United States Patent Application Publication US 2026/0022371 A1 - sequence listing, part 5

SEQ ID NO: 81045 - DNA, 120 bp, synthetic construct; identical to SEQ ID NO: 14240
  source 1..120: mol_type = other DNA

SEQ ID NO: 81046 - DNA, 120 bp, synthetic construct; identical to SEQ ID NO: 51092
  source 1..120: mol_type = other DNA

SEQ ID NO: 81047 - DNA, 120 bp, synthetic construct; identical to SEQ ID NO: 51093
  source 1..120: mol_type = other DNA

SEQ ID NO: 81048 - DNA, 120 bp, synthetic construct; identical to SEQ ID NO: 14241
  source 1..120: mol_type = other DNA

SEQ ID NO: 81049 - DNA, 120 bp, synthetic construct; identical to SEQ ID NO: 51095
  source 1..120: mol_type = other DNA

SEQ ID NO: 81050 - DNA, 120 bp, synthetic construct; identical to SEQ ID NO: 51096
  source 1..120: mol_type = other DNA

SEQ ID NO: 81051 - DNA, 120 bp, synthetic construct; identical to SEQ ID NO: 51097
  source 1..120: mol_type = other DNA

SEQ ID NO: 81052 - DNA, 120 bp, synthetic construct; identical to SEQ ID NO: 14242
  source 1..120: mol_type = other DNA

SEQ ID NO: 81053 - DNA, 120 bp, synthetic construct; identical to SEQ ID NO: 51099
  source 1..120: mol_type = other DNA

SEQ ID NO: 81054 - DNA, 120 bp, synthetic construct; identical to SEQ ID NO: 51100
  source 1..120: mol_type = other DNA

SEQ ID NO: 81055 - DNA, 120 bp, synthetic construct; identical to SEQ ID NO: 51101
  source 1..120: mol_type = other DNA

SEQ ID NO: 81056 - DNA, 120 bp, synthetic construct; identical to SEQ ID NO: 51102
  source 1..120: mol_type = other DNA

SEQ ID NO: 81057 - DNA, 120 bp, synthetic construct; identical to SEQ ID NO: 14243
  source 1..120: mol_type = other DNA

SEQ ID NO: 81058 - DNA, 120 bp, synthetic construct; identical to SEQ ID NO: 51104
  source 1..120: mol_type = other DNA

SEQ ID NO: 81059 - DNA, 120 bp, synthetic construct; identical to SEQ ID NO: 51105
  source 1..120: mol_type = other DNA

SEQ ID NO: 81060 - DNA, 120 bp, synthetic construct; identical to SEQ ID NO: 51106
  source 1..120: mol_type = other DNA

SEQ ID NO: 81061 - DNA, 120 bp, synthetic construct; identical to SEQ ID NO: 14244
  source 1..120: mol_type = other DNA

SEQ ID NO: 81062 - DNA, 120 bp, synthetic construct; identical to SEQ ID NO: 51108
  source 1..120: mol_type = other DNA

SEQ ID NO: 81063 - DNA, 120 bp, synthetic construct; identical to SEQ ID NO: 51109
  source 1..120: mol_type = other DNA

SEQ ID NO: 81064 - DNA, 120 bp, synthetic construct; identical to SEQ ID NO: 51110
  source 1..120: mol_type = other DNA

SEQ ID NO: 81065 - DNA, 120 bp, synthetic construct; identical to SEQ ID NO: 14245
  source 1..120: mol_type = other DNA

SEQ ID NO: 81066 - DNA, 120 bp, synthetic construct; identical to SEQ ID NO: 51112
  source 1..120: mol_type = other DNA

SEQ ID NO: 81067 - DNA, 120 bp, synthetic construct; identical to SEQ ID NO: 51113
  source 1..120: mol_type = other DNA

SEQ ID NO: 81068 - DNA, 120 bp, synthetic construct; identical to SEQ ID NO: 51114
  source 1..120: mol_type = other DNA

SEQ ID NO: 81069 - DNA, 120 bp, synthetic construct; identical to SEQ ID NO: 51115
  source 1..120: mol_type = other DNA

SEQ ID NO: 81070 - DNA, 120 bp, synthetic construct; identical to SEQ ID NO: 14246
  source 1..120: mol_type = other DNA

SEQ ID NO: 81071 - DNA, 120 bp, synthetic construct; identical to SEQ ID NO: 51117
  source 1..120: mol_type = other DNA

SEQ ID NO: 81072 - DNA, 120 bp, synthetic construct; identical to SEQ ID NO: 51118
  source 1..120: mol_type = other DNA

SEQ ID NO: 81073 - DNA, 120 bp, synthetic construct; identical to SEQ ID NO: 14247
  source 1..120: mol_type = other DNA

SEQ ID NO: 81074 - DNA, 120 bp, synthetic construct; identical to SEQ ID NO: 51120
  source 1..120: mol_type = other DNA

SEQ ID NO: 81075 - DNA, 120 bp, synthetic construct; identical to SEQ ID NO: 51121
  source 1..120: mol_type = other DNA

SEQ ID NO: 81076 - DNA, 120 bp, synthetic construct; identical to SEQ ID NO: 51122
  source 1..120: mol_type = other DNA

SEQ ID NO: 81077 - DNA, 120 bp, synthetic construct; identical to SEQ ID NO: 14248
  source 1..120: mol_type = other DNA

SEQ ID NO: 81078 - DNA, 120 bp, synthetic construct; identical to SEQ ID NO: 51124
  source 1..120: mol_type = other DNA

SEQ ID NO: 81079 - DNA, 120 bp, synthetic construct; identical to SEQ ID NO: 51125
  source 1..120: mol_type = other DNA

SEQ ID NO: 81080 - DNA, 120 bp, synthetic construct; identical to SEQ ID NO: 51126
  source 1..120: mol_type = other DNA

SEQ ID NO: 81081 - DNA, 120 bp, synthetic construct; identical to SEQ ID NO: 14249
  source 1..120: mol_type = other DNA

SEQ ID NO: 81082 - DNA, 120 bp, synthetic construct; identical to SEQ ID NO: 51128
  source 1..120: mol_type = other DNA

SEQ ID NO: 81083 - DNA, 120 bp, synthetic construct; identical to SEQ ID NO: 51129
  source 1..120: mol_type = other DNA

SEQ ID NO: 81084 - DNA, 120 bp, synthetic construct; identical to SEQ ID NO: 51130
  source 1..120: mol_type = other DNA

SEQ ID NO: 81085 - DNA, 120 bp, synthetic construct; identical to SEQ ID NO: 14250
  source 1..120: mol_type = other DNA

SEQ ID NO: 81086 - DNA, 120 bp, synthetic construct; identical to SEQ ID NO: 51132
  source 1..120: mol_type = other DNA

SEQ ID NO: 81087 - DNA, 120 bp, synthetic construct; identical to SEQ ID NO: 51133
  source 1..120: mol_type = other DNA

SEQ ID NO: 81088 - DNA, 120 bp, synthetic construct; identical to SEQ ID NO: 51134
  source 1..120: mol_type = other DNA

SEQ ID NO: 81089 - DNA, 120 bp, synthetic construct; identical to SEQ ID NO: 51135
  source 1..120: mol_type = other DNA

SEQ ID NO: 81090 - DNA, 120 bp, synthetic construct; identical to SEQ ID NO: 14251
  source 1..120: mol_type = other DNA

SEQ ID NO: 81091 - DNA, 120 bp, synthetic construct; identical to SEQ ID NO: 51137
  source 1..120: mol_type = other DNA

SEQ ID NO: 81092 - DNA, 120 bp, synthetic construct; identical to SEQ ID NO: 51138
  source 1..120: mol_type = other DNA

SEQ ID NO: 81093 - DNA, 120 bp, synthetic construct; identical to SEQ ID NO: 14252
  source 1..120: mol_type = other DNA

SEQ ID NO: 81094 - DNA, 120 bp, synthetic construct; identical to SEQ ID NO: 51140
  source 1..120: mol_type = other DNA

SEQ ID NO: 81095 - DNA, 120 bp, synthetic construct; identical to SEQ ID NO: 51141
  source 1..120: mol_type = other DNA

SEQ ID NO: 81096 - DNA, 120 bp, synthetic construct; identical to SEQ ID NO: 51142
  source 1..120: mol_type = other DNA

SEQ ID NO: 81097 - DNA, 120 bp, synthetic construct; identical to SEQ ID NO: 51143
  source 1..120: mol_type = other DNA

SEQ ID NO: 81098 - DNA, 120 bp, synthetic construct; identical to SEQ ID NO: 14253
  source 1..120: mol_type = other DNA

SEQ ID NO: 81099 - DNA, 120 bp, synthetic construct; identical to SEQ ID NO: 51145
  source 1..120: mol_type = other DNA

SEQ ID NO: 81100 - DNA, 120 bp, synthetic construct; identical to SEQ ID NO: 51146
  source 1..120: mol_type = other DNA

SEQ ID NO: 81101 - DNA, 120 bp, synthetic construct; identical to SEQ ID NO: 51147
  source 1..120: mol_type = other DNA

SEQ ID NO: 81102 - DNA, 120 bp, synthetic construct; identical to SEQ ID NO: 14254
  source 1..120: mol_type = other DNA

SEQ ID NO: 81103 - DNA, 120 bp, synthetic construct; identical to SEQ ID NO: 51149
  source 1..120: mol_type = other DNA

SEQ ID NO: 81104 - DNA, 120 bp, synthetic construct; identical to SEQ ID NO: 51150
  source 1..120: mol_type = other DNA

SEQ ID NO: 81105 - DNA, 120 bp, synthetic construct; identical to SEQ ID NO: 14255
  source 1..120: mol_type = other DNA

SEQ ID NO: 81106 - DNA, 120 bp, synthetic construct; identical to SEQ ID NO: 51152
  source 1..120: mol_type = other DNA

SEQ ID NO: 81107 - DNA, 120 bp, synthetic construct; identical to SEQ ID NO: 51153
  source 1..120: mol_type = other DNA

SEQ ID NO: 81108 - DNA, 120 bp, synthetic construct; identical to SEQ ID NO: 51154
  source 1..120: mol_type = other DNA

SEQ ID NO: 81109 - DNA, 120 bp, synthetic construct; identical to SEQ ID NO: 51155
  source 1..120: mol_type = other DNA

SEQ ID NO: 81110 - DNA, 120 bp, synthetic construct; identical to SEQ ID NO: 14256
  source 1..120: mol_type = other DNA

SEQ ID NO: 81111 - DNA, 120 bp, synthetic construct; identical to SEQ ID NO: 51157
  source 1..120: mol_type = other DNA

SEQ ID NO: 81112 - DNA, 120 bp, synthetic construct; identical to SEQ ID NO: 51158
  source 1..120: mol_type = other DNA

SEQ ID NO: 81113 - DNA, 120 bp, synthetic construct; identical to SEQ ID NO: 14257
  source 1..120: mol_type = other DNA

SEQ ID NO: 81114 - DNA, 120 bp, synthetic construct; identical to SEQ ID NO: 51160
  source 1..120: mol_type = other DNA

SEQ ID NO: 81115 - DNA, 120 bp, synthetic construct; identical to SEQ ID NO: 51161
  source 1..120: mol_type = other DNA

SEQ ID NO: 81116 - DNA, 120 bp, synthetic construct; identical to SEQ ID NO: 51162
  source 1..120: mol_type = other DNA

SEQ ID NO: 81117 - DNA, 120 bp, synthetic construct; identical to SEQ ID NO: 51163
  source 1..120: mol_type = other DNA

SEQ ID NO: 81118 - DNA, 120 bp, synthetic construct; identical to SEQ ID NO: 14258
  source 1..120: mol_type = other DNA

SEQ ID NO: 81119 - DNA, 120 bp, synthetic construct; identical to SEQ ID NO: 51165
  source 1..120: mol_type = other DNA

SEQ ID NO: 81120 - DNA, 120 bp, synthetic construct; identical to SEQ ID NO: 51166
  source 1..120: mol_type = other DNA

SEQ ID NO: 81121 - DNA, 120 bp, synthetic construct; identical to SEQ ID NO: 51167
  source 1..120: mol_type = other DNA

SEQ ID NO: 81122 - DNA, 120 bp, synthetic construct; identical to SEQ ID NO: 14259
  source 1..120: mol_type = other DNA

SEQ ID NO: 81123 - DNA, 120 bp, synthetic construct; identical to SEQ ID NO: 51169
  source 1..120: mol_type = other DNA

SEQ ID NO: 81124 - DNA, 120 bp, synthetic construct; identical to SEQ ID NO: 51170
  source 1..120: mol_type = other DNA

SEQ ID NO: 81125 - DNA, 120 bp, synthetic construct; identical to SEQ ID NO: 51171
  source 1..120: mol_type = other DNA

SEQ ID NO: 81126 - DNA, 120 bp, synthetic construct; identical to SEQ ID NO: 14260
  source 1..120: mol_type = other DNA

SEQ ID NO: 81127 - DNA, 120 bp, synthetic construct; identical to SEQ ID NO: 51173
  source 1..120: mol_type = other DNA

SEQ ID NO: 81128 - DNA, 120 bp, synthetic construct; identical to SEQ ID NO: 51174
  source 1..120: mol_type = other DNA

SEQ ID NO: 81129 - DNA, 120 bp, synthetic construct; identical to SEQ ID NO: 51175
  source 1..120: mol_type = other DNA

SEQ ID NO: 81130 - DNA, 120 bp, synthetic construct; identical to SEQ ID NO: 14261
  source 1..120: mol_type = other DNA

SEQ ID NO: 81131 - DNA, 120 bp, synthetic construct; identical to SEQ ID NO: 51177
  source 1..120: mol_type = other DNA

SEQ ID NO: 81132 - DNA, 120 bp, synthetic construct; identical to SEQ ID NO: 51178
  source 1..120: mol_type = other DNA

SEQ ID NO: 81133 - DNA, 120 bp, synthetic construct; identical to SEQ ID NO: 14262
  source 1..120: mol_type = other DNA

SEQ ID NO: 81134 - DNA, 120 bp, synthetic construct; identical to SEQ ID NO: 51180
  source 1..120: mol_type = other DNA

SEQ ID NO: 81135 - DNA, 120 bp, synthetic construct; identical to SEQ ID NO: 51181
  source 1..120: mol_type = other DNA

SEQ ID NO: 81136 - DNA, 120 bp, synthetic construct; identical to SEQ ID NO: 51182
  source 1..120: mol_type = other DNA

SEQ ID NO: 81137 - DNA, 120 bp, synthetic construct; identical to SEQ ID NO: 14263
  source 1..120: mol_type = other DNA

SEQ ID NO: 81138 - DNA, 120 bp, synthetic construct; identical to SEQ ID NO: 51184
  source 1..120: mol_type = other DNA

SEQ ID NO: 81139 - DNA, 120 bp, synthetic construct; identical to SEQ ID NO: 51185
  source 1..120: mol_type = other DNA

SEQ ID NO: 81140 - DNA, 120 bp, synthetic construct; identical to SEQ ID NO: 51186
  source 1..120: mol_type = other DNA

SEQ ID NO: 81141 - DNA, 120 bp, synthetic construct; identical to SEQ ID NO: 51187
  source 1..120: mol_type = other DNA

SEQ ID NO: 81142 - DNA, 120 bp, synthetic construct; identical to SEQ ID NO: 14264
  source 1..120: mol_type = other DNA

SEQ ID NO: 81143 - DNA, 120 bp, synthetic construct; identical to SEQ ID NO: 51189
  source 1..120: mol_type = other DNA

SEQ ID NO: 81144 - DNA, 120 bp, synthetic construct; identical to SEQ ID NO: 51190
  source 1..120: mol_type = other DNA

SEQ ID NO: 81145 - DNA, 120 bp, synthetic construct; identical to SEQ ID NO: 51191
  source 1..120: mol_type = other DNA

SEQ ID NO: 81146 - DNA, 120 bp, synthetic construct; identical to SEQ ID NO: 14265
  source 1..120: mol_type = other DNA

SEQ ID NO: 81147 - DNA, 120 bp, synthetic construct; identical to SEQ ID NO: 51193
  source 1..120: mol_type = other DNA

SEQ ID NO: 81148 - DNA, 120 bp, synthetic construct; identical to SEQ ID NO: 51194
  source 1..120: mol_type = other DNA

SEQ ID NO: 81149 - DNA, 120 bp, synthetic construct; identical to SEQ ID NO: 51195
  source 1..120: mol_type = other DNA

SEQ ID NO: 81150 - DNA, 120 bp, synthetic construct; identical to SEQ ID NO: 14266
  source 1..120: mol_type = other DNA

SEQ ID NO: 81151 - DNA, 120 bp, synthetic construct; identical to SEQ ID NO: 51197
  source 1..120: mol_type = other DNA

SEQ ID NO: 81152 - DNA, 120 bp, synthetic construct; identical to SEQ ID NO: 51198
  source 1..120: mol_type = other DNA

SEQ ID NO: 81153 - DNA, 120 bp, synthetic construct; identical to SEQ ID NO: 14267
  source 1..120: mol_type = other DNA

SEQ ID NO: 81154 - DNA, 120 bp, synthetic construct; identical to SEQ ID NO: 51200
  source 1..120: mol_type = other DNA

SEQ ID NO: 81155 - DNA, 120 bp, synthetic construct; identical to SEQ ID NO: 51201
  source 1..120: mol_type = other DNA

SEQ ID NO: 81156 - DNA, 120 bp, synthetic construct; identical to SEQ ID NO: 51202
  source 1..120: mol_type = other DNA

SEQ ID NO: 81157 - DNA, 120 bp, synthetic construct; identical to SEQ ID NO: 51203
  source 1..120: mol_type = other DNA

SEQ ID NO: 81158 - DNA, 120 bp, synthetic construct; identical to SEQ ID NO: 14268
  source 1..120: mol_type = other DNA

SEQ ID NO: 81159 - DNA, 120 bp, synthetic construct; identical to SEQ ID NO: 51205
  source 1..120: mol_type = other DNA

SEQ ID NO: 81160 - DNA, 120 bp, synthetic construct; identical to SEQ ID NO: 51206
  source 1..120: mol_type = other DNA

SEQ ID NO: 81161 - DNA, 120 bp, synthetic construct; identical to SEQ ID NO: 51207
  source 1..120: mol_type = other DNA

SEQ ID NO: 81162 - DNA, 120 bp, synthetic construct; identical to SEQ ID NO: 14269
  source 1..120: mol_type = other DNA

SEQ ID NO: 81163 - DNA, 120 bp, synthetic construct; identical to SEQ ID NO: 51209
  source 1..120: mol_type = other DNA

SEQ ID NO: 81164 - DNA, 120 bp, synthetic construct; identical to SEQ ID NO: 51210
  source 1..120: mol_type = other DNA

SEQ ID NO: 81165 - DNA, 120 bp, synthetic construct; identical to SEQ ID NO: 51211
  source 1..120: mol_type = other DNA

SEQ ID NO: 81166 - DNA, 120 bp, synthetic construct; identical to SEQ ID NO: 51212
  source 1..120: mol_type = other DNA

SEQ ID NO: 81167 - DNA, 120 bp, synthetic construct; identical to SEQ ID NO: 14270
  source 1..120: mol_type = other DNA

SEQ ID NO: 81168 - DNA, 120 bp, synthetic construct; identical to SEQ ID NO: 51214
  source 1..120: mol_type = other DNA

SEQ ID NO: 81169 - DNA, 120 bp, synthetic construct; identical to SEQ ID NO: 51215
  source 1..120: mol_type = other DNA

SEQ ID NO: 81170 - DNA, 120 bp, synthetic construct; identical to SEQ ID NO: 51216
  source 1..120: mol_type = other DNA

SEQ ID NO: 81171 - DNA, 120 bp, synthetic construct; identical to SEQ ID NO: 14271
  source 1..120: mol_type = other DNA

SEQ ID NO: 81172 - DNA, 120 bp, synthetic construct; identical to SEQ ID NO: 51218
  source 1..120: mol_type = other DNA

SEQ ID NO: 81173 - DNA, 120 bp, synthetic construct; identical to SEQ ID NO: 51219
  source 1..120: mol_type = other DNA

SEQ ID NO: 81174 - DNA, 120 bp, synthetic construct; identical to SEQ ID NO: 14272
  source 1..120: mol_type = other DNA

SEQ ID NO: 81175 - DNA, 120 bp, synthetic construct; identical to SEQ ID NO: 51221
  source 1..120: mol_type = other DNA

SEQ ID NO: 81176 - DNA, 120 bp, synthetic construct; identical to SEQ ID NO: 51222
  source 1..120: mol_type = other DNA

SEQ ID NO: 81177 - DNA, 120 bp, synthetic construct; identical to SEQ ID NO: 51223
  source 1..120: mol_type = other DNA

SEQ ID NO: 81178 - DNA, 120 bp, synthetic construct; identical to SEQ ID NO: 51224
  source 1..120: mol_type = other DNA

SEQ ID NO: 81179 - DNA, 120 bp, synthetic construct; identical to SEQ ID NO: 14273
  source 1..120: mol_type = other DNA

SEQ ID NO: 81180 - DNA, 120 bp, synthetic construct; identical to SEQ ID NO: 51226
  source 1..120: mol_type = other DNA

SEQ ID NO: 81181 - DNA, 120 bp, synthetic construct; identical to SEQ ID NO: 51227
  source 1..120: mol_type = other DNA

SEQ ID NO: 81182 - DNA, 120 bp, synthetic construct; identical to SEQ ID NO: 51228
  source 1..120: mol_type = other DNA

SEQ ID NO: 81183 - DNA, 120 bp, synthetic construct; identical to SEQ ID NO: 14274
  source 1..120: mol_type = other DNA

SEQ ID NO: 81184 - DNA, 120 bp, synthetic construct; identical to SEQ ID NO: 51230
  source 1..120: mol_type = other DNA

SEQ ID NO: 81185 - DNA, 120 bp, synthetic construct; identical to SEQ ID NO: 51231
  source 1..120: mol_type = other DNA

SEQ ID NO: 81186 - DNA, 120 bp, synthetic construct; identical to SEQ ID NO: 51232
  source 1..120: mol_type = other DNA

SEQ ID NO: 81187 - DNA, 120 bp, synthetic construct; identical to SEQ ID NO: 14275
  source 1..120: mol_type = other DNA

SEQ ID NO: 81188 - DNA, 120 bp, synthetic construct; identical to SEQ ID NO: 51234
  source 1..120: mol_type = other DNA

SEQ ID NO: 81189 - DNA, 120 bp, synthetic construct; identical to SEQ ID NO: 51235
  source 1..120: mol_type = other DNA

SEQ ID NO: 81190 - DNA, 120 bp, synthetic construct; identical to SEQ ID NO: 14276
  source 1..120: mol_type = other DNA

SEQ ID NO: 81191 - DNA, 120 bp, synthetic construct; identical to SEQ ID NO: 51237
  source 1..120: mol_type = other DNA

SEQ ID NO: 81192 - DNA, 120 bp, synthetic construct; identical to SEQ ID NO: 51238
  source 1..120: mol_type = other DNA

SEQ ID NO: 81193 - DNA, 120 bp, synthetic construct; identical to SEQ ID NO: 51239
  source 1..120: mol_type = other DNA

SEQ ID NO: 81194 - DNA, 120 bp, synthetic construct; identical to SEQ ID NO: 51240
  source 1..120: mol_type = other DNA

SEQ ID NO: 81195 - DNA, 120 bp, synthetic construct; identical to SEQ ID NO: 14277
  source 1..120: mol_type = other DNA

SEQ ID NO: 81196 - DNA, 120 bp, synthetic construct; identical to SEQ ID NO: 51242
  source 1..120: mol_type = other DNA

SEQ ID NO: 81197 - DNA, 120 bp, synthetic construct; identical to SEQ ID NO: 51243
  source 1..120: mol_type = other DNA

SEQ ID NO: 81198 - DNA, 120 bp, synthetic construct; identical to SEQ ID NO: 51244
  source 1..120: mol_type = other DNA

SEQ ID NO: 81199 - DNA, 120 bp, synthetic construct; identical to SEQ ID NO: 6780
  source 1..120: mol_type = other DNA

SEQ ID NO: 81200 - DNA, 120 bp, synthetic construct; identical to SEQ ID NO: 51246
  source 1..120: mol_type = other DNA

SEQ ID NO: 81201 - DNA, 120 bp, synthetic construct; identical to SEQ ID NO: 51247
  source 1..120: mol_type = other DNA

SEQ ID NO: 81202 - DNA, 120 bp, synthetic construct; identical to SEQ ID NO: 14279
  source 1..120: mol_type = other DNA

SEQ ID NO: 81203 - DNA, 120 bp, synthetic construct; identical to SEQ ID NO: 51249
  source 1..120: mol_type = other DNA

SEQ ID NO: 81204 - DNA, 120 bp, synthetic construct; identical to SEQ ID NO: 51250
  source 1..120: mol_type = other DNA

SEQ ID NO: 81205 - DNA, 120 bp, synthetic construct; identical to SEQ ID NO: 51251
  source 1..120: mol_type = other DNA

SEQ ID NO: 81206 - DNA, 120 bp, synthetic construct; identical to SEQ ID NO: 51252
  source 1..120: mol_type = other DNA

SEQ ID NO: 81207 - DNA, 120 bp, synthetic construct; identical to SEQ ID NO: 14280
  source 1..120: mol_type = other DNA

SEQ ID NO: 81208 - DNA, 120 bp, synthetic construct; identical to SEQ ID NO: 51254
  source 1..120: mol_type = other DNA

SEQ ID NO: 81209 - DNA, 120 bp, synthetic construct; identical to SEQ ID NO: 51255
  source 1..120: mol_type = other DNA

SEQ ID NO: 81210 - DNA, 120 bp, synthetic construct; identical to SEQ ID NO: 14281
  source 1..120: mol_type = other DNA

SEQ ID NO: 81211 - DNA, 120 bp, synthetic construct; identical to SEQ ID NO: 51257
  source 1..120: mol_type = other DNA

SEQ ID NO: 81212 - DNA, 120 bp, synthetic construct; identical to SEQ ID NO: 51258
  source 1..120: mol_type = other DNA

SEQ ID NO: 81213 - DNA, 120 bp, synthetic construct; identical to SEQ ID NO: 51259
  source 1..120: mol_type = other DNA

SEQ ID NO: 81214 - DNA, 120 bp, synthetic construct; identical to SEQ ID NO: 14282
  source 1..120: mol_type = other DNA

SEQ ID NO: 81215 - DNA, 120 bp, synthetic construct; identical to SEQ ID NO: 51261
  source 1..120: mol_type = other DNA

SEQ ID NO: 81216 - DNA, 120 bp, synthetic construct; identical to SEQ ID NO: 51262
  source 1..120: mol_type = other DNA

SEQ ID NO: 81217 - DNA, 120 bp, synthetic construct; identical to SEQ ID NO: 51263
  source 1..120: mol_type = other DNA

SEQ ID NO: 81218 - DNA, 120 bp, synthetic construct; identical to SEQ ID NO: 51264
  source 1..120: mol_type = other DNA

SEQ ID NO: 81219 - DNA, 120 bp, synthetic construct; identical to SEQ ID NO: 14283
  source 1..120: mol_type = other DNA

SEQ ID NO: 81220 - DNA, 120 bp, synthetic construct; identical to SEQ ID NO: 51266
  source 1..120: mol_type = other DNA

SEQ ID NO: 81221 - DNA, 120 bp, synthetic construct; identical to SEQ ID NO: 51267
  source 1..120: mol_type = other DNA

SEQ ID NO: 81222 - DNA, 120 bp, synthetic construct; identical to SEQ ID NO: 51268
  source 1..120: mol_type = other DNA

SEQ ID NO: 81223 - DNA, 120 bp, synthetic construct; identical to SEQ ID NO: 14284
  source 1..120: mol_type = other DNA

SEQ ID NO: 81224 - DNA, 120 bp, synthetic construct; identical to SEQ ID NO: 51270
  source 1..120: mol_type = other DNA

SEQ ID NO: 81225 - DNA, 120 bp, synthetic construct; identical to SEQ ID NO: 51271
  source 1..120: mol_type = other DNA

SEQ ID NO: 81226 - DNA, 120 bp, synthetic construct; identical to SEQ ID NO: 51272
  source 1..120: mol_type = other DNA

SEQ ID NO: 81227 - DNA, 120 bp, synthetic construct; identical to SEQ ID NO: 14285
  source 1..120: mol_type = other DNA

SEQ ID NO: 81228 - DNA, 120 bp, synthetic construct; identical to SEQ ID NO: 51274
  source 1..120: mol_type = other DNA

SEQ ID NO: 81229 - DNA, 120 bp, synthetic construct; identical to SEQ ID NO: 51275
  source 1..120: mol_type = other DNA

SEQ ID NO: 81230 - DNA, 120 bp, synthetic construct; identical to SEQ ID NO: 51276
  source 1..120: mol_type = other DNA

SEQ ID NO: 81231 - DNA, 120 bp, synthetic construct; identical to SEQ ID NO: 14286
  source 1..120: mol_type = other DNA

SEQ ID NO: 81232 - DNA, 120 bp, synthetic construct; identical to SEQ ID NO: 51278
  source 1..120: mol_type = other DNA

SEQ ID NO: 81233 - DNA, 120 bp, synthetic construct; identical to SEQ ID NO: 51279
  source 1..120: mol_type = other DNA

SEQ ID NO: 81234 - DNA, 120 bp, synthetic construct; identical to SEQ ID NO: 51280
  source 1..120: mol_type = other DNA

SEQ ID NO: 81235 - DNA, 120 bp, synthetic construct; identical to SEQ ID NO: 14287
  source 1..120: mol_type = other DNA

SEQ ID NO: 81236 - DNA, 120 bp, synthetic construct; identical to SEQ ID NO: 51282
  source 1..120: mol_type = other DNA

SEQ ID NO: 81237 - DNA, 120 bp, synthetic construct; identical to SEQ ID NO: 51283
  source 1..120: mol_type = other DNA

SEQ ID NO: 81238 - DNA, 120 bp, synthetic construct; identical to SEQ ID NO: 14288
  source 1..120: mol_type = other DNA

SEQ ID NO: 81239 - DNA, 120 bp, synthetic construct; identical to SEQ ID NO: 51285
  source 1..120: mol_type = other DNA

SEQ ID NO: 81240 - DNA, 120 bp, synthetic construct; identical to SEQ ID NO: 51286
  source 1..120: mol_type = other DNA

SEQ ID NO: 81241 - DNA, 120 bp, synthetic construct; identical to SEQ ID NO: 51287
  source 1..120: mol_type = other DNA

SEQ ID NO: 81242 - DNA, 120 bp, synthetic construct; identical to SEQ ID NO: 51288
  source 1..120: mol_type = other DNA

SEQ ID NO: 81243 - DNA, 120 bp, synthetic construct; identical to SEQ ID NO: 6790
  source 1..120: mol_type = other DNA

SEQ ID NO: 81244 - DNA, 120 bp, synthetic construct; identical to SEQ ID NO: 51290
  source 1..120: mol_type = other DNA

SEQ ID NO: 81245 - DNA, 120 bp, synthetic construct; identical to SEQ ID NO: 51291
  source 1..120: mol_type = other DNA

SEQ ID NO: 81246 - DNA, 120 bp, synthetic construct; identical to SEQ ID NO: 14290
  source 1..120: mol_type = other DNA

SEQ ID NO: 81247 - DNA, 120 bp, synthetic construct; identical to SEQ ID NO: 51293
  source 1..120: mol_type = other DNA

SEQ ID NO: 81248 - DNA, 120 bp, synthetic construct; identical to SEQ ID NO: 51294
  source 1..120: mol_type = other DNA

SEQ ID NO: 81249 - DNA, 120 bp, synthetic construct; identical to SEQ ID NO: 51295
  source 1..120: mol_type = other DNA

SEQ ID NO: 81250 - DNA, 120 bp, synthetic construct; identical to SEQ ID NO: 14291
  source 1..120: mol_type = other DNA

SEQ ID NO: 81251 - DNA, 120 bp, synthetic construct; identical to SEQ ID NO: 51297
  source 1..120: mol_type = other DNA

SEQ ID NO: 81252 - DNA, 120 bp, synthetic construct; identical to SEQ ID NO: 51298
  source 1..120: mol_type = other DNA

SEQ ID NO: 81253 - DNA, 120 bp, synthetic construct; identical to SEQ ID NO: 51299
  source 1..120: mol_type = other DNA

SEQ ID NO: 81254 - DNA, 120 bp, synthetic construct; identical to SEQ ID NO: 14292
  source 1..120: mol_type = other DNA

SEQ ID NO: 81255 - DNA, 120 bp, synthetic construct; identical to SEQ ID NO: 51301
  source 1..120: mol_type = other DNA

SEQ ID NO: 81256 - DNA, 120 bp, synthetic construct; identical to SEQ ID NO: 51302
  source 1..120: mol_type = other DNA

SEQ ID NO: 81257 - DNA, 120 bp, synthetic construct; identical to SEQ ID NO: 51303
  source 1..120: mol_type = other DNA

SEQ ID NO: 81258 - DNA, 120 bp, synthetic construct; identical to SEQ ID NO: 14293
  source 1..120: mol_type = other DNA

SEQ ID NO: 81259 - DNA, 120 bp, synthetic construct; identical to SEQ ID NO: 51305
  source 1..120: mol_type = other DNA

SEQ ID NO: 81260 - DNA, 120 bp, synthetic construct; identical to SEQ ID NO: 51306
  source 1..120: mol_type = other DNA

SEQ ID NO: 81261 - DNA, 120 bp, synthetic construct; identical to SEQ ID NO: 51307
  source 1..120: mol_type = other DNA

SEQ ID NO: 81262 - DNA, 120 bp, synthetic construct; identical to SEQ ID NO: 51308
  source 1..120: mol_type = other DNA

SEQ ID NO: 81263 - DNA, 120 bp, synthetic construct; identical to SEQ ID NO: 14294
  source 1..120: mol_type = other DNA

SEQ ID NO: 81264 - DNA, 120 bp, synthetic construct; identical to SEQ ID NO: 51310
  source 1..120: mol_type = other DNA

SEQ ID NO: 81265 - DNA, 120 bp, synthetic construct; identical to SEQ ID NO: 51311
  source 1..120: mol_type = other DNA

SEQ ID NO: 81266 - DNA, 120 bp, synthetic construct; identical to SEQ ID NO: 51312
  source 1..120: mol_type = other DNA

SEQ ID NO: 81267 - DNA, 120 bp, synthetic construct; identical to SEQ ID NO: 14295
  source 1..120: mol_type = other DNA

SEQ ID NO: 81268 - DNA, 120 bp, synthetic construct; identical to SEQ ID NO: 51314
  source 1..120: mol_type = other DNA

SEQ ID NO: 81269 - DNA, 120 bp, synthetic construct; identical to SEQ ID NO: 51315
  source 1..120: mol_type = other DNA

SEQ ID NO: 81270 - DNA, 120 bp, synthetic construct; identical to SEQ ID NO: 51316
  source 1..120: mol_type = other DNA

SEQ ID NO: 81271 - DNA, 120 bp, synthetic construct; identical to SEQ ID NO: 14296
  source 1..120: mol_type = other DNA

SEQ ID NO: 81272 - DNA, 120 bp, synthetic construct; identical to SEQ ID NO: 51318
  source 1..120: mol_type = other DNA

SEQ ID NO: 81273 - DNA, 120 bp, synthetic construct; identical to SEQ ID NO: 51319
  source 1..120: mol_type = other DNA

SEQ ID NO: 81274 - DNA, 120 bp, synthetic construct; identical to SEQ ID NO: 14297
  source 1..120: mol_type = other DNA

SEQ ID NO: 81275 - DNA, 120 bp, synthetic construct; identical to SEQ ID NO: 51321
  source 1..120: mol_type = other DNA

SEQ ID NO: 81276 - DNA, 120 bp, synthetic construct; identical to SEQ ID NO: 51322
  source 1..120: mol_type = other DNA

SEQ ID NO: 81277 - DNA, 120 bp, synthetic construct; identical to SEQ ID NO: 51323
  source 1..120: mol_type = other DNA

SEQ ID NO: 81278 - DNA, 120 bp, synthetic construct; identical to SEQ ID NO: 51324
  source 1..120: mol_type = other DNA

SEQ ID NO: 81279 - DNA, 120 bp, synthetic construct; identical to SEQ ID NO: 14298
  source 1..120: mol_type = other DNA

SEQ ID NO: 81280 - DNA, 120 bp, synthetic construct; identical to SEQ ID NO: 51326
  source 1..120: mol_type = other DNA

SEQ ID NO: 81281 - DNA, 120 bp, synthetic construct; identical to SEQ ID NO: 51327
  source 1..120: mol_type = other DNA

SEQ ID NO: 81282 - DNA, 120 bp, synthetic construct; identical to SEQ ID NO: 14299
  source 1..120: mol_type = other DNA

SEQ ID NO: 81283 - DNA, 120 bp, synthetic construct; identical to SEQ ID NO: 51329
  source 1..120: mol_type = other DNA

SEQ ID NO: 81284 - DNA, 120 bp, synthetic construct; identical to SEQ ID NO: 51330
  source 1..120: mol_type = other DNA

SEQ ID NO: 81285 - DNA, 120 bp, synthetic construct; identical to SEQ ID NO: 51331
  source 1..120: mol_type = other DNA

SEQ ID NO: 81286 - DNA, 120 bp, synthetic construct; identical to SEQ ID NO: 14300
  source 1..120: mol_type = other DNA

SEQ ID NO: 81287 - DNA, 120 bp, synthetic construct; identical to SEQ ID NO: 51333
  source 1..120: mol_type = other DNA

SEQ ID NO: 81288 - DNA, 120 bp, synthetic construct; identical to SEQ ID NO: 51334
  source 1..120: mol_type = other DNA

SEQ ID NO: 81289 - DNA, 120 bp, synthetic construct; identical to SEQ ID NO: 51335
  source 1..120: mol_type = other DNA

SEQ ID NO: 81290 - DNA, 120 bp, synthetic construct; identical to SEQ ID NO: 14301
  source 1..120: mol_type = other DNA

SEQ ID NO: 81291 - DNA, 120 bp, synthetic construct; identical to SEQ ID NO: 51337
  source 1..120: mol_type = other DNA

SEQ ID NO: 81292 - DNA, 120 bp, synthetic construct; identical to SEQ ID NO: 51338
  source 1..120: mol_type = other DNA

SEQ ID NO: 81293 - DNA, 120 bp, synthetic construct; identical to SEQ ID NO: 51339
  source 1..120: mol_type = other DNA

SEQ ID NO: 81294 - DNA, 120 bp, synthetic construct; identical to SEQ ID NO: 14302
  source 1..120: mol_type = other DNA

SEQ ID NO: 81295 - DNA, 120 bp, synthetic construct; identical to SEQ ID NO: 51341
  source 1..120: mol_type = other DNA

SEQ ID NO: 81296 - DNA, 120 bp, synthetic construct; identical to SEQ ID NO: 51342
  source 1..120: mol_type = other DNA

SEQ ID NO: 81297 - DNA, 120 bp, synthetic construct; identical to SEQ ID NO: 51343
  source 1..120: mol_type = other DNA

SEQ ID NO: 81298 - DNA, 120 bp, synthetic construct; identical to SEQ ID NO: 51344
  source 1..120: mol_type = other DNA

SEQ ID NO: 81299 - DNA, 120 bp, synthetic construct; identical to SEQ ID NO: 14303
  source 1..120: mol_type = other DNA

SEQ ID NO: 81300 - DNA, 120 bp, synthetic construct; identical to SEQ ID NO: 51346
  source 1..120: mol_type = other DNA

SEQ ID NO: 81301 - DNA, 120 bp, synthetic construct; identical to SEQ ID NO: 51347
  source 1..120: mol_type = other DNA

SEQ ID NO: 81302 - DNA, 120 bp, synthetic construct; identical to SEQ ID NO: 14304
  source 1..120: mol_type = other DNA

SEQ ID NO: 81303 - DNA, 120 bp, synthetic construct; identical to SEQ ID NO: 51349
  source 1..120: mol_type = other DNA

SEQ ID NO: 81304 - DNA, 120 bp, synthetic construct; identical to SEQ ID NO: 51350
  source 1..120: mol_type = other DNA

SEQ ID NO: 81305 - DNA, 120 bp, synthetic construct; identical to SEQ ID NO: 51351
  source 1..120: mol_type = other DNA

SEQ ID NO: 81306 - DNA, 120 bp, synthetic construct; identical to SEQ ID NO: 51352
  source 1..120: mol_type = other DNA

SEQ ID NO: 81307 - DNA, 120 bp, synthetic construct; identical to SEQ ID NO: 14305
  source 1..120: mol_type = other DNA

SEQ ID NO: 81308 - DNA, 120 bp, synthetic construct; identical to SEQ ID NO: 51354
  source 1..120: mol_type = other DNA

SEQ ID NO: 81309 - DNA, 120 bp, synthetic construct; identical to SEQ ID NO: 51355
  source 1..120: mol_type = other DNA

SEQ ID NO: 81310 - DNA, 120 bp, synthetic construct; identical to SEQ ID NO: 14306
  source 1..120: mol_type = other DNA

SEQ ID NO: 81311 - DNA, 120 bp, synthetic construct; identical to SEQ ID NO: 51357
  source 1..120: mol_type = other DNA

SEQ ID NO: 81312 - DNA, 120 bp, synthetic construct; identical to SEQ ID NO: 51358
  source 1..120: mol_type = other DNA

SEQ ID NO: 81313 - DNA, 120 bp, synthetic construct; identical to SEQ ID NO: 51359
  source 1..120: mol_type = other DNA

SEQ ID NO: 81314 - DNA, 120 bp, synthetic construct; identical to SEQ ID NO: 51360
  source 1..120: mol_type = other DNA

SEQ ID NO: 81315 - DNA, 120 bp, synthetic construct; identical to SEQ ID NO: 14307
  source 1..120: mol_type = other DNA

SEQ ID NO: 81316 - DNA, 120 bp, synthetic construct; identical to SEQ ID NO: 51362
  source 1..120: mol_type = other DNA

SEQ ID NO: 81317 - DNA, 120 bp, synthetic construct; identical to SEQ ID NO: 51363
  source 1..120: mol_type = other DNA

SEQ ID NO: 81318 - DNA, 120 bp, synthetic construct; identical to SEQ ID NO: 14308
  source 1..120: mol_type = other DNA

SEQ ID NO: 81319 - DNA, 120 bp, synthetic construct; identical to SEQ ID NO: 51365
  source 1..120: mol_type = other DNA

SEQ ID NO: 81320 - DNA, 120 bp, synthetic construct; identical to SEQ ID NO: 51366
  source 1..120: mol_type = other DNA

SEQ ID NO: 81321 - DNA, 120 bp, synthetic construct; identical to SEQ ID NO: 51367
  source 1..120: mol_type = other DNA

SEQ ID NO: 81322 - DNA, 120 bp, synthetic construct; identical to SEQ ID NO: 51368
  source 1..120: mol_type = other DNA

SEQ ID NO: 81323 - DNA, 120 bp, synthetic construct; identical to SEQ ID NO: 14309
  source 1..120: mol_type = other DNA

SEQ ID NO: 81324 - DNA, 120 bp, synthetic construct; identical to SEQ ID NO: 51370
  source 1..120: mol_type = other DNA

SEQ ID NO: 81325 - DNA, 120 bp, synthetic construct; identical to SEQ ID NO: 51371
  source 1..120: mol_type = other DNA

SEQ ID NO: 81326 - DNA, 120 bp, synthetic construct; identical to SEQ ID NO: 51372
  source 1..120: mol_type = other DNA

SEQ ID NO: 81327 - DNA, 120 bp, synthetic construct; identical to SEQ ID NO: 14310
  source 1..120: mol_type = other DNA

SEQ ID NO: 81328 - DNA, 120 bp, synthetic construct; identical to SEQ ID NO: 51374
  source 1..120: mol_type = other DNA

SEQ ID NO: 81329 - DNA, 120 bp, synthetic construct; identical to SEQ ID NO: 6810
  source 1..120: mol_type = other DNA

SEQ ID NO: 81330 - DNA, 120 bp, synthetic construct; identical to SEQ ID NO: 51376
  source 1..120: mol_type = other DNA

SEQ ID NO: 81331 - DNA, 120 bp, synthetic construct; identical to SEQ ID NO: 14311
  source 1..120: mol_type = other DNA

SEQ ID NO: 81332 - DNA, 120 bp, synthetic construct; identical to SEQ ID NO: 51378
  source 1..120: mol_type = other DNA

SEQ ID NO: 81333 - DNA, 120 bp, synthetic construct; identical to SEQ ID NO: 51379
  source 1..120: mol_type = other DNA

SEQ ID NO: 81334 - DNA, 120 bp, synthetic construct; identical to SEQ ID NO: 51380
  source 1..120: mol_type = other DNA

SEQ ID NO: 81335 - DNA, 120 bp, synthetic construct; identical to SEQ ID NO: 14312
  source 1..120: mol_type = other DNA

SEQ ID NO: 81336 - DNA, 120 bp, synthetic construct; identical to SEQ ID NO: 51382
  source 1..120: mol_type = other DNA

SEQ ID NO: 81337 - DNA, 120 bp, synthetic construct; identical to SEQ ID NO: 51383
  source 1..120: mol_type = other DNA

SEQ ID NO: 81338 - DNA, 120 bp, synthetic construct; identical to SEQ ID NO: 51384
  source 1..120: mol_type = other DNA

SEQ ID NO: 81339 - DNA, 120 bp, synthetic construct; identical to SEQ ID NO: 14313
  source 1..120: mol_type = other DNA

SEQ ID NO: 81340 - DNA, 120 bp, synthetic construct; identical to SEQ ID NO: 51386
  source 1..120: mol_type = other DNA

SEQ ID NO: 81341 - DNA, 120 bp, synthetic construct; identical to SEQ ID NO: 51387
  source 1..120: mol_type = other DNA

SEQ ID NO: 81342 - DNA, 120 bp, synthetic construct; identical to SEQ ID NO: 51388
  source 1..120: mol_type = other DNA

SEQ ID NO: 81343 - DNA, 120 bp, synthetic construct; identical to SEQ ID NO: 14314
  source 1..120: mol_type = other DNA

SEQ ID NO: 81344 - DNA, 120 bp, synthetic construct; identical to SEQ ID NO: 51390
  source 1..120: mol_type = other DNA

SEQ ID NO: 81345 - DNA, 120 bp, synthetic construct; identical to SEQ ID NO: 51391
  source 1..120: mol_type = other DNA

SEQ ID NO: 81346 - DNA, 120 bp, synthetic construct; identical to SEQ ID NO: 51392
  source 1..120: mol_type = other DNA

SEQ ID NO: 81347 - DNA, 120 bp, synthetic construct; identical to SEQ ID NO: 14315
  source 1..120: mol_type = other DNA

SEQ ID NO: 81348 - DNA, 120 bp, synthetic construct; identical to SEQ ID NO: 51394
  source 1..120: mol_type = other DNA

SEQ ID NO: 81349 - DNA, 120 bp, synthetic construct; identical to SEQ ID NO: 51395
  source 1..120: mol_type = other DNA

SEQ ID NO: 81350 - DNA, 120 bp, synthetic construct; identical to SEQ ID NO: 51396
  source 1..120: mol_type = other DNA

SEQ ID NO: 81351 - DNA, 120 bp, synthetic construct; identical to SEQ ID NO: 14316
  source 1..120: mol_type = other DNA

SEQ ID NO: 81352 - DNA, 120 bp, synthetic construct; identical to SEQ ID NO: 51398
  source 1..120: mol_type = other DNA

SEQ ID NO: 81353 - DNA, 120 bp, synthetic construct; identical to SEQ ID NO: 51399
  source 1..120: mol_type = other DNA

SEQ ID NO: 81354 - DNA, 120 bp, synthetic construct; identical to SEQ ID NO: 14317
  source 1..120: mol_type = other DNA

SEQ ID NO: 81355 - DNA, 120 bp, synthetic construct; identical to SEQ ID NO: 51401
  source 1..120: mol_type = other DNA

SEQ ID NO: 81356 - DNA, 120 bp, synthetic construct; identical to SEQ ID NO: 51402
  source 1..120: mol_type = other DNA

SEQ ID NO: 81357 - DNA, 120 bp, synthetic construct; identical to SEQ ID NO: 51403
  source 1..120: mol_type = other DNA

SEQ ID NO: 81358 - DNA, 120 bp, synthetic construct; identical to SEQ ID NO: 14318
  source 1..120: mol_type = other DNA

SEQ ID NO: 81359 - DNA, 120 bp, synthetic construct; identical to SEQ ID NO: 51405
  source 1..120: mol_type = other DNA

SEQ ID NO: 81360 - DNA, 120 bp, synthetic construct; identical to SEQ ID NO: 51406
  source 1..120: mol_type = other DNA

SEQ ID NO: 81361 - DNA, 120 bp, synthetic construct; identical to SEQ ID NO: 51407
  source 1..120: mol_type = other DNA

SEQ ID NO: 81362 - DNA, 120 bp, synthetic construct; identical to SEQ ID NO: 14319
  source 1..120: mol_type = other DNA

SEQ ID NO: 81363 - DNA, 120 bp, synthetic construct; identical to SEQ ID NO: 51409
  source 1..120: mol_type = other DNA

SEQ ID NO: 81364 - DNA, 120 bp, synthetic construct; identical to SEQ ID NO: 51410
  source 1..120: mol_type = other DNA

SEQ ID NO: 81365 - DNA, 120 bp, synthetic construct; identical to SEQ ID NO: 51411
  source 1..120: mol_type = other DNA

SEQ ID NO: 81366 - DNA, 120 bp, synthetic construct; identical to SEQ ID NO: 51412
  source 1..120: mol_type = other DNA

SEQ ID NO: 81367 - DNA, 120 bp, synthetic construct; identical to SEQ ID NO: 14320
  source 1..120: mol_type = other DNA

SEQ ID NO: 81368 - DNA, 120 bp, synthetic construct; identical to SEQ ID NO: 51414
  source 1..120: mol_type = other DNA

SEQ ID NO: 81369 - DNA, 120 bp, synthetic construct; identical to SEQ ID NO: 51415
  source 1..120: mol_type = other DNA

SEQ ID NO: 81370 - DNA, 120 bp, synthetic construct; identical to SEQ ID NO: 51416
  source 1..120: mol_type = other DNA

SEQ ID NO: 81371 - DNA, 120 bp, synthetic construct; identical to SEQ ID NO: 14321
  source 1..120: mol_type = other DNA

SEQ ID NO: 81372 - DNA, 120 bp, synthetic construct; identical to SEQ ID NO: 51418
  source 1..120: mol_type = other DNA

SEQ ID NO: 81373 - DNA, 120 bp, synthetic construct; identical to SEQ ID NO: 51419
  source 1..120: mol_type = other DNA

SEQ ID NO: 81374 - DNA, 120 bp, synthetic construct; identical to SEQ ID NO: 14322
  source 1..120: mol_type = other DNA

SEQ ID NO: 81375 - DNA, 120 bp, synthetic construct; identical to SEQ ID NO: 51421
  source 1..120: mol_type = other DNA

SEQ ID NO: 81376 - DNA, 120 bp, synthetic construct; identical to SEQ ID NO: 51422
  source 1..120: mol_type = other DNA

SEQ ID NO: 81377 - DNA, 120 bp, synthetic construct; identical to SEQ ID NO: 51423
  source 1..120: mol_type = other DNA

SEQ ID NO: 81378 - DNA, 120 bp, synthetic construct; identical to SEQ ID NO: 51424
  source 1..120: mol_type = other DNA

SEQ ID NO: 81379 - DNA, 120 bp, synthetic construct; identical to SEQ ID NO: 14323
  source 1..120: mol_type = other DNA

SEQ ID NO: 81380 - DNA, 120 bp, synthetic construct; identical to SEQ ID NO: 51426
  source 1..120: mol_type = other DNA

SEQ ID NO: 81381 - DNA, 120 bp, synthetic construct; identical to SEQ ID NO: 51427
  source 1..120: mol_type = other DNA

SEQ ID NO: 81382 - DNA, 120 bp, synthetic construct; identical to SEQ ID NO: 51428
  source 1..120: mol_type = other DNA

SEQ ID NO: 81383 - DNA, 120 bp, synthetic construct; identical to SEQ ID NO: 14324
  source 1..120: mol_type = other DNA

SEQ ID NO: 81384 - DNA, 120 bp, synthetic construct; identical to SEQ ID NO: 51430
  source 1..120: mol_type = other DNA

SEQ ID NO: 81385 - DNA, 120 bp, synthetic construct; identical to SEQ ID NO: 51431
  source 1..120: mol_type = other DNA

SEQ ID NO: 81386 - DNA, 120 bp, synthetic construct; identical to SEQ ID NO: 51432
  source 1..120: mol_type = other DNA

SEQ ID NO: 81387 - DNA, 120 bp, synthetic construct; identical to SEQ ID NO: 14325
  source 1..120: mol_type = other DNA

SEQ ID NO: 81388 - DNA, 120 bp, synthetic construct; identical to SEQ ID NO: 51434
  source 1..120: mol_type = other DNA

SEQ ID NO: 81389 - DNA, 120 bp, synthetic construct; identical to SEQ ID NO: 51435
  source 1..120: mol_type = other DNA

SEQ ID NO: 81390 - DNA, 120 bp, synthetic construct; identical to SEQ ID NO: 14326
  source 1..120: mol_type = other DNA

SEQ ID NO: 81391 - DNA, 120 bp, synthetic construct; identical to SEQ ID NO: 51437
  source 1..120: mol_type = other DNA

SEQ ID NO: 81392 - DNA, 120 bp, synthetic construct; identical to SEQ ID NO: 51438
  source 1..120: mol_type = other DNA

SEQ ID NO: 81393 - DNA, 120 bp, synthetic construct; identical to SEQ ID NO: 51439
  source 1..120: mol_type = other DNA

SEQ ID NO: 81394 - DNA, 120 bp, synthetic construct; identical to SEQ ID NO: 51440
  source 1..120: mol_type = other DNA

SEQ ID NO: 81395 - DNA, 120 bp, synthetic construct; identical to SEQ ID NO: 14327
  source 1..120: mol_type = other DNA

SEQ ID NO: 81396 - DNA, 120 bp, synthetic construct; identical to SEQ ID NO: 51442
  source 1..120: mol_type = other DNA

SEQ ID NO: 81397 - DNA, 120 bp, synthetic construct; identical to SEQ ID NO: 51443
  source 1..120: mol_type = other DNA

SEQ ID NO: 81398 - DNA, 120 bp, synthetic construct; identical to SEQ ID NO: 14328
  source 1..120: mol_type = other DNA

SEQ ID NO: 81399 - DNA, 120 bp, synthetic construct; identical to SEQ ID NO: 51445
  source 1..120: mol_type = other DNA

SEQ ID NO: 81400 - DNA, 120 bp, synthetic construct; identical to SEQ ID NO: 51446
  source 1..120: mol_type = other DNA

SEQ ID NO: 81401 - DNA, 120 bp, synthetic construct; identical to SEQ ID NO: 51447
  source 1..120: mol_type = other DNA

SEQ ID NO: 81402 - DNA, 120 bp, synthetic construct; identical to SEQ ID NO: 51448
  source 1..120: mol_type = other DNA

SEQ ID NO: 81403 - DNA, 120 bp, synthetic construct; identical to SEQ ID NO: 14329
  source 1..120: mol_type = other DNA

SEQ ID NO: 81404 - DNA, 120 bp, synthetic construct; identical to SEQ ID NO: 51450
  source 1..120: mol_type = other DNA

SEQ ID NO: 81405 - DNA, 120 bp, synthetic construct; identical to SEQ ID NO: 51451
  source 1..120: mol_type = other DNA

SEQ ID NO: 81406 - DNA, 120 bp, synthetic construct; identical to SEQ ID NO: 51452
  source 1..120: mol_type = other DNA

SEQ ID NO: 81407 - DNA, 120 bp, synthetic construct; identical to SEQ ID NO: 51453
  source 1..120: mol_type = other DNA

SEQ ID NO: 81408 - DNA, 120 bp, synthetic construct; identical to SEQ ID NO: 14330
  source 1..120: mol_type = other DNA

SEQ ID NO: 81409 - DNA, 120 bp, synthetic construct; identical to SEQ ID NO: 51455
  source 1..120: mol_type = other DNA

SEQ ID NO: 81410 - DNA, 120 bp, synthetic construct; identical to SEQ ID NO: 51456
  source 1..120: mol_type = other DNA

SEQ ID NO: 81411 - DNA, 120 bp, synthetic construct; identical to SEQ ID NO: 51457
  source 1..120: mol_type = other DNA

SEQ ID NO: 81412 - DNA, 120 bp, synthetic construct; identical to SEQ ID NO: 14331
  source 1..120: mol_type = other DNA

SEQ ID NO: 81413 - DNA, 120 bp, synthetic construct; identical to SEQ ID NO: 51459
  source 1..120: mol_type = other DNA

SEQ ID NO: 81414 - DNA, 120 bp, synthetic construct; identical to SEQ ID NO: 51460
  source 1..120: mol_type = other DNA

SEQ ID NO: 81415 - DNA, 120 bp, synthetic construct; identical to SEQ ID NO: 51461
  source 1..120: mol_type = other DNA

SEQ ID NO: 81416 - DNA, 120 bp, synthetic construct; identical to SEQ ID NO: 14332
  source 1..120: mol_type = other DNA

SEQ ID NO: 81417 - DNA, 120 bp, synthetic construct; identical to SEQ ID NO: 51463
  source 1..120: mol_type = other DNA

SEQ ID NO: 81418 - DNA, 120 bp, synthetic construct; identical to SEQ ID NO: 51464
  source 1..120: mol_type = other DNA

SEQ ID NO: 81419 - DNA, 120 bp, synthetic construct; identical to SEQ ID NO: 14333
  source 1..120: mol_type = other DNA

SEQ ID NO: 81420 - DNA, 120 bp, synthetic construct; identical to SEQ ID NO: 51466
  source 1..120: mol_type = other DNA

SEQ ID NO: 81421 - DNA, 120 bp, synthetic construct; identical to SEQ ID NO: 51467
  source 1..120: mol_type = other DNA

SEQ ID NO: 81422 - DNA, 120 bp, synthetic construct; identical to SEQ ID NO: 51468
  source 1..120: mol_type = other DNA

SEQ ID NO: 81423 - DNA, 120 bp, synthetic construct; identical to SEQ ID NO: 51469
  source 1..120: mol_type = other DNA

SEQ ID NO: 81424 - DNA, 120 bp, synthetic construct; identical to SEQ ID NO: 14334
  source 1..120: mol_type = other DNA

SEQ ID NO: 81425 - DNA, 120 bp, synthetic construct; identical to SEQ ID NO: 51471
  source 1..120: mol_type = other DNA

SEQ ID NO: 81426 - DNA, 120 bp, synthetic construct; identical to SEQ ID NO: 51472
  source 1..120: mol_type = other DNA

SEQ ID NO: 81427 - DNA, 120 bp, synthetic construct; identical to SEQ ID NO: 14335
  source 1..120: mol_type = other DNA

SEQ ID NO: 81428 - DNA, 120 bp, synthetic construct; identical to SEQ ID NO: 51474
  source 1..120: mol_type = other DNA

SEQ ID NO: 81429 - DNA, 120 bp, synthetic construct; identical to SEQ ID NO: 51475
  source 1..120: mol_type = other DNA

SEQ ID NO: 81430 - DNA, 120 bp, synthetic construct; identical to SEQ ID NO: 51476
  source 1..120: mol_type = other DNA

SEQ ID NO: 81431 - DNA, 120 bp, synthetic construct; identical to SEQ ID NO: 51477
  source 1..120: mol_type = other DNA

SEQ ID NO: 81432 - DNA, 120 bp, synthetic construct; identical to SEQ ID NO: 14336
  source 1..120: mol_type = other DNA

SEQ ID NO: 81433 - DNA, 120 bp, synthetic construct; identical to SEQ ID NO: 51479
  source 1..120: mol_type = other DNA

SEQ ID NO: 81434 - DNA, 120 bp, synthetic construct; identical to SEQ ID NO: 51480
  source 1..120: mol_type = other DNA

SEQ ID NO: 81435 - DNA, 120 bp, synthetic construct; identical to SEQ ID NO: 14337
  source 1..120: mol_type = other DNA

SEQ ID NO: 81436 - DNA, 120 bp, synthetic construct; identical to SEQ ID NO: 51482
  source 1..120: mol_type = other DNA

SEQ ID NO: 81437 - DNA, 120 bp, synthetic construct; identical to SEQ ID NO: 51483
  source 1..120: mol_type = other DNA

SEQ ID NO: 81438 - DNA, 120 bp, synthetic construct; identical to SEQ ID NO: 51484
  source 1..120: mol_type = other DNA

SEQ ID NO: 81439 - DNA, 120 bp, synthetic construct; identical to SEQ ID NO: 14338
  source 1..120: mol_type = other DNA

SEQ ID NO: 81440 - DNA, 120 bp, synthetic construct; identical to SEQ ID NO: 51486
  source 1..120: mol_type = other DNA

SEQ ID NO: 81441 - DNA, 120 bp, synthetic construct; identical to SEQ ID NO: 51487
  source 1..120: mol_type = other DNA

SEQ ID NO: 81442 - DNA, 120 bp, synthetic construct; identical to SEQ ID NO: 14339
  source 1..120: mol_type = other DNA

SEQ ID NO: 81443 - DNA, 120 bp, synthetic construct; identical to SEQ ID NO: 51489
  source 1..120: mol_type = other DNA

SEQ ID NO: 81444 - DNA, 120 bp, synthetic construct; identical to SEQ ID NO: 14340
  source 1..120: mol_type = other DNA

SEQ ID NO: 81445 - DNA, 120 bp, synthetic construct; identical to SEQ ID NO: 51491
  source 1..120: mol_type = other DNA

SEQ ID NO: 81446 - DNA, 120 bp, synthetic construct; identical to SEQ ID NO: 51492
  source 1..120: mol_type = other DNA

SEQ ID NO: 81447 - DNA, 120 bp, synthetic construct; identical to SEQ ID NO: 14341
  source 1..120: mol_type = other DNA

SEQ ID NO: 81448 - DNA, 120 bp, synthetic construct; identical to SEQ ID NO: 51494
  source 1..120: mol_type = other DNA

SEQ ID NO: 81449 - DNA, 120 bp, synthetic construct; identical to SEQ ID NO: 51495
  source 1..120: mol_type = other DNA

SEQ ID NO: 81450 - DNA, 120 bp, synthetic construct; identical to SEQ ID NO: 51496
  source 1..120: mol_type = other DNA

SEQ ID NO: 81451 - DNA, 120 bp, synthetic construct; identical to SEQ ID NO: 51497
  source 1..120: mol_type = other DNA

SEQ ID NO: 81452 - DNA, 120 bp, synthetic construct; identical to SEQ ID NO: 14342
  source 1..120: mol_type = other DNA

SEQ ID NO: 81453 - DNA, 120 bp, synthetic construct; identical to SEQ ID NO: 51499
  source 1..120: mol_type = other DNA

SEQ ID NO: 81454 - DNA, 120 bp, synthetic construct; identical to SEQ ID NO: 51500
  source 1..120: mol_type = other DNA

SEQ ID NO: 81455 - DNA, 120 bp, synthetic construct; identical to SEQ ID NO: 14343
  source 1..120: mol_type = other DNA

SEQ ID NO: 81456 - DNA, 120 bp, synthetic construct; identical to SEQ ID NO: 51502
  source 1..120: mol_type = other DNA

SEQ ID NO: 81457 - DNA, 120 bp, synthetic construct; identical to SEQ ID NO: 51503
  source 1..120: mol_type = other DNA

SEQ ID NO: 81458 - DNA, 120 bp, synthetic construct; identical to SEQ ID NO: 51504
  source 1..120: mol_type = other DNA

SEQ ID NO: 81459 - DNA, 120 bp, synthetic construct; identical to SEQ ID NO: 51505
  source 1..120: mol_type = other DNA

SEQ ID NO: 81460 - DNA, 120 bp, synthetic construct; identical to SEQ ID NO: 14344
  source 1..120: mol_type = other DNA

SEQ ID NO: 81461 - DNA, 120 bp, synthetic construct; identical to SEQ ID NO: 51507
  source 1..120: mol_type = other DNA

SEQ ID NO: 81462 - DNA, 120 bp, synthetic construct; identical to SEQ ID NO: 51508
  source 1..120: mol_type = other DNA

SEQ ID NO: 81463 - DNA, 120 bp, synthetic construct; identical to SEQ ID NO: 14345
  source 1..120: mol_type = other DNA

SEQ ID NO: 81464 - DNA, 120 bp, synthetic construct; identical to SEQ ID NO: 51510
  source 1..120: mol_type = other DNA

SEQ ID NO: 81465 - DNA, 120 bp, synthetic construct; identical to SEQ ID NO: 51511
  source 1..120: mol_type = other DNA

SEQ ID NO: 81466 - DNA, 120 bp, synthetic construct; identical to SEQ ID NO: 51512
  source 1..120: mol_type = other DNA

SEQ ID NO: 81467 - DNA, 120 bp, synthetic construct; identical to SEQ ID NO: 14346
  source 1..120: mol_type = other DNA

SEQ ID NO: 81468 - DNA, 120 bp, synthetic construct; identical to SEQ ID NO: 51514
  source 1..120: mol_type = other DNA

SEQ ID NO: 81469 - DNA, 120 bp, synthetic construct; identical to SEQ ID NO: 51515
  source 1..120: mol_type = other DNA

SEQ ID NO: 81470 - DNA, 120 bp, synthetic construct; identical to SEQ ID NO: 51516
  source 1..120: mol_type = other DNA

SEQ ID NO: 81471 - DNA, 120 bp, synthetic construct; identical to SEQ ID NO: 14347
  source 1..120: mol_type = other DNA

SEQ ID NO: 81472 - DNA, 120 bp, synthetic construct; identical to SEQ ID NO: 51518
  source 1..120: mol_type = other DNA

SEQ ID NO: 81473 - DNA, 120 bp, synthetic construct; identical to SEQ ID NO: 51519
  source 1..120: mol_type = other DNA

SEQ ID NO: 81474 - DNA, 120 bp, synthetic construct; identical to SEQ ID NO: 51520
  source 1..120: mol_type = other DNA

SEQ ID NO: 81475 - DNA, 120 bp, synthetic construct; identical to SEQ ID NO: 14348
  source 1..120: mol_type = other DNA

SEQ ID NO: 81476 - DNA, 120 bp, synthetic construct; identical to SEQ ID NO: 51522
  source 1..120: mol_type = other DNA

SEQ ID NO: 81477 - DNA, 120 bp, synthetic construct; identical to SEQ ID NO: 51523
  source 1..120: mol_type = other DNA

SEQ ID NO: 81478 - DNA, 120 bp, synthetic construct; identical to SEQ ID NO: 51524
  source 1..120: mol_type = other DNA

SEQ ID NO: 81479 - DNA, 120 bp, synthetic construct; identical to SEQ ID NO: 14349
  source 1..120: mol_type = other DNA

SEQ ID NO: 81480 - DNA, 120 bp, synthetic construct; identical to SEQ ID NO: 51526
  source 1..120: mol_type = other DNA

SEQ ID NO: 81481 - DNA, 120 bp, synthetic construct; identical to SEQ ID NO: 51527
  source 1..120: mol_type = other DNA

SEQ ID NO: 81482 - DNA, 120 bp, synthetic construct; identical to SEQ ID NO: 51528
  source 1..120: mol_type = other DNA

SEQ ID NO: 81483 - DNA, 120 bp, synthetic construct; identical to SEQ ID NO: 14350
  source 1..120: mol_type = other DNA

SEQ ID NO: 81484 - DNA, 120 bp, synthetic construct; identical to SEQ ID NO: 51530
  source 1..120: mol_type = other DNA

SEQ ID NO: 81485 - DNA, 120 bp, synthetic construct; identical to SEQ ID NO: 51531
  source 1..120: mol_type = other DNA

SEQ ID NO: 81486 - DNA, 120 bp, synthetic construct; identical to SEQ ID NO: 51532
  source 1..120: mol_type = other DNA

SEQ ID NO: 81487 - DNA, 120 bp, synthetic construct; identical to SEQ ID NO: 14351
  source 1..120: mol_type = other DNA

SEQ ID NO: 81488 - DNA, 120 bp, synthetic construct; identical to SEQ ID NO: 51534
  source 1..120: mol_type = other DNA

SEQ ID NO: 81489 - DNA, 120 bp, synthetic construct; identical to SEQ ID NO: 51535
  source 1..120: mol_type = other DNA

SEQ ID NO: 81490 - DNA, 120 bp, synthetic construct; identical to SEQ ID NO: 51536
  source 1..120: mol_type = other DNA

SEQ ID NO: 81491 - DNA, 120 bp, synthetic construct; identical to SEQ ID NO: 51537
  source 1..120: mol_type = other DNA

SEQ ID NO: 81492 - DNA, 120 bp, synthetic construct; identical to SEQ ID NO: 14352
  source 1..120: mol_type = other DNA

SEQ ID NO: 81493 - DNA, 120 bp, synthetic construct; identical to SEQ ID NO: 51539
  source 1..120: mol_type = other DNA

SEQ ID NO: 81494 - DNA, 120 bp, synthetic construct; identical to SEQ ID NO: 51540
  source 1..120: mol_type = other DNA

SEQ ID NO: 81495 - DNA, 120 bp, synthetic construct; identical to SEQ ID NO: 14353
  source 1..120: mol_type = other DNA

SEQ ID NO: 81496 - DNA, 120 bp, synthetic construct; identical to SEQ ID NO: 51542
  source 1..120: mol_type = other DNA

SEQ ID NO: 81497 - DNA, 120 bp, synthetic construct; identical to SEQ ID NO: 51543
  source 1..120: mol_type = other DNA

SEQ ID NO: 81498 - DNA, 120 bp, synthetic construct; identical to SEQ ID NO: 51544
  source 1..120: mol_type = other DNA

SEQ ID NO: 81499 - DNA, 120 bp, synthetic construct; identical to SEQ ID NO: 51545
  source 1..120: mol_type = other DNA

SEQ ID NO: 81500 - DNA, 120 bp, synthetic construct; identical to SEQ ID NO: 14354
  source 1..120: mol_type = other DNA

SEQ ID NO: 81501 - DNA, 120 bp, synthetic construct; identical to SEQ ID NO: 51547
  source 1..120: mol_type = other DNA

SEQ ID NO: 81502 - DNA, 120 bp, synthetic construct; identical to SEQ ID NO: 51548
  source 1..120: mol_type = other DNA

SEQ ID NO: 81503 - DNA, 120 bp, synthetic construct; identical to SEQ ID NO: 14355
  source 1..120: mol_type = other DNA

SEQ ID NO: 81504 - DNA, 120 bp, synthetic construct; identical to SEQ ID NO: 51550
  source 1..120: mol_type = other DNA

SEQ ID NO: 81505 - DNA, 120 bp, synthetic construct; identical to SEQ ID NO: 51551
  source 1..120: mol_type = other DNA

SEQ ID NO: 81506 - DNA, 120 bp, synthetic construct; identical to SEQ ID NO: 51552
  source 1..120: mol_type = other DNA

SEQ ID NO: 81507 - DNA, 120 bp, synthetic construct; identical to SEQ ID NO: 14356
  source 1..120: mol_type = other DNA

SEQ ID NO: 81508 - DNA, 120 bp, synthetic construct; identical to SEQ ID NO: 51554
  source 1..120: mol_type = other DNA

SEQ ID NO: 81509 - DNA, 120 bp, synthetic construct; identical to SEQ ID NO: 51555
  source 1..120: mol_type = other DNA

SEQ ID NO: 81510 - DNA, 120 bp, synthetic construct; identical to SEQ ID NO: 51556
  source 1..120: mol_type = other DNA

SEQ ID NO: 81511 - DNA, 120 bp, synthetic construct; identical to SEQ ID NO: 51557
  source 1..120: mol_type = other DNA

SEQ ID NO: 81512 - DNA, 120 bp, synthetic construct; identical to SEQ ID NO: 14357
  source 1..120: mol_type = other DNA

SEQ ID NO: 81513 - DNA, 120 bp, synthetic construct; identical to SEQ ID NO: 51559
  source 1..120: mol_type = other DNA

SEQ ID NO: 81514 - DNA, 120 bp, synthetic construct; identical to SEQ ID NO: 51560
  source 1..120: mol_type = other DNA

SEQ ID NO: 81515 - DNA, 120 bp, synthetic construct; identical to SEQ ID NO: 51561
  source 1..120: mol_type = other DNA

SEQ ID NO: 81516 - DNA, 120 bp, synthetic construct; identical to SEQ ID NO: 14358
  source 1..120: mol_type = other DNA

SEQ ID NO: 81517 - DNA, 120 bp, synthetic construct; identical to SEQ ID NO: 51563
  source 1..120: mol_type = other DNA

SEQ ID NO: 81518 - DNA, 120 bp, synthetic construct; identical to SEQ ID NO: 51564
  source 1..120: mol_type = other DNA

SEQ ID NO: 81519 - DNA, 120 bp, synthetic construct; identical to SEQ ID NO: 14359
  source 1..120: mol_type = other DNA

SEQ ID NO: 81520 - DNA, 120 bp, synthetic construct; identical to SEQ ID NO: 51566
  source 1..120: mol_type = other DNA

SEQ ID NO: 81521 - DNA, 120 bp, synthetic construct; identical to SEQ ID NO: 51567
  source 1..120: mol_type = other DNA

SEQ ID NO: 81522 - DNA, 120 bp, synthetic construct; identical to SEQ ID NO: 51568
  source 1..120: mol_type = other DNA

SEQ ID NO: 81523 - DNA, 120 bp, synthetic construct; identical to SEQ ID NO: 51569
  source 1..120: mol_type = other DNA

SEQ ID NO: 81524 - DNA, 120 bp, synthetic construct; identical to SEQ ID NO: 14360
  source 1..120: mol_type = other DNA

SEQ ID NO: 81525 - DNA, 120 bp, synthetic construct; identical to SEQ ID NO: 51571
  source 1..120: mol_type = other DNA

SEQ ID NO: 81526 - DNA, 120 bp, synthetic construct; identical to SEQ ID NO: 51572
  source 1..120: mol_type = other DNA

SEQ ID NO: 81527 - DNA, 120 bp, synthetic construct; identical to SEQ ID NO: 14361
  source 1..120: mol_type = other DNA

SEQ ID NO: 81528 - DNA, 120 bp, synthetic construct; identical to SEQ ID NO: 51574
  source 1..120: mol_type = other DNA

SEQ ID NO: 81529 - DNA, 120 bp, synthetic construct; identical to SEQ ID NO: 51575
  source 1..120: mol_type = other DNA

SEQ ID NO: 81530 - DNA, 120 bp, synthetic construct; identical to SEQ ID NO: 14362
  source 1..120: mol_type = other DNA

SEQ ID NO: 81531 - DNA, 120 bp, synthetic construct; identical to SEQ ID NO: 51577
  source 1..120: mol_type = other DNA

SEQ ID NO: 81532 - DNA, 120 bp, synthetic construct; identical to SEQ ID NO: 51578
  source 1..120: mol_type = other DNA

SEQ ID NO: 81533 - DNA, 120 bp, synthetic construct; identical to SEQ ID NO: 51579
  source 1..120: mol_type = other DNA

SEQ ID NO: 81534 - DNA, 120 bp, synthetic construct; identical to SEQ ID NO: 14363
  source 1..120: mol_type = other DNA

SEQ ID NO: 81535 - DNA, 120 bp, synthetic construct; identical to SEQ ID NO: 51581
  source 1..120: mol_type = other DNA

SEQ ID NO: 81536 - DNA, 120 bp, synthetic construct; identical to SEQ ID NO: 51582
  source 1..120: mol_type = other DNA

SEQ ID NO: 81537 - DNA, 120 bp, synthetic construct; identical to SEQ ID NO: 51583
  source 1..120: mol_type = other DNA

SEQ ID NO: 81538 - DNA, 120 bp, synthetic construct; identical to SEQ ID NO: 51584
  source 1..120: mol_type = other DNA

SEQ ID NO: 81539 - DNA, 120 bp, synthetic construct; identical to SEQ ID NO: 14364
  source 1..120: mol_type = other DNA

SEQ ID NO: 81540 - DNA, 120 bp, synthetic construct; identical to SEQ ID NO: 51586
  source 1..120: mol_type = other DNA

SEQ ID NO: 81541 - DNA, 120 bp, synthetic construct; identical to SEQ ID NO: 51587
  source 1..120: mol_type = other DNA

SEQ ID NO: 81542 - DNA, 120 bp, synthetic construct; identical to SEQ ID NO: 6859
  source 1..120: mol_type = other DNA

SEQ ID NO: 81543 - DNA, 120 bp, synthetic construct; identical to SEQ ID NO: 51589
  source 1..120: mol_type = other DNA

SEQ ID NO: 81544 - DNA, 120 bp, synthetic construct; identical to SEQ ID NO: 51590
  source 1..120: mol_type = other DNA

SEQ ID NO: 81545 - DNA, 120 bp, synthetic construct; identical to SEQ ID NO: 51591
  source 1..120: mol_type = other DNA

SEQ ID NO: 81546 - DNA, 120 bp, synthetic construct; identical to SEQ ID NO: 51592
  source 1..120: mol_type = other DNA

SEQ ID NO: 81547 - DNA, 120 bp, synthetic construct; identical to SEQ ID NO: 14366
  source 1..120: mol_type = other DNA

SEQ ID NO: 81548 - DNA, 120 bp, synthetic construct; identical to SEQ ID NO: 51594
  source 1..120: mol_type = other DNA

SEQ ID NO: 81549 - DNA, 120 bp, synthetic construct; identical to SEQ ID NO: 51595
  source 1..120: mol_type = other DNA

SEQ ID NO: 81550 - DNA, 120 bp, synthetic construct; identical to SEQ ID NO: 51596
  source 1..120: mol_type = other DNA

SEQ ID NO: 81551 - DNA, 120 bp, synthetic construct; identical to SEQ ID NO: 14367
  source 1..120: mol_type = other DNA

SEQ ID NO: 81552 - DNA, 120 bp, synthetic construct; identical to SEQ ID NO: 51598
  source 1..120: mol_type = other DNA

SEQ ID NO: 81553 - DNA, 120 bp, synthetic construct; identical to SEQ ID NO: 51599
  source 1..120: mol_type = other DNA

SEQ ID NO: 81554 - DNA, 120 bp, synthetic construct; identical to SEQ ID NO: 51600
  source 1..120: mol_type = other DNA

SEQ ID NO: 81555 - DNA, 120 bp, synthetic construct; identical to SEQ ID NO: 51601
  source 1..120: mol_type = other DNA

SEQ ID NO: 81556 - DNA, 120 bp, synthetic construct; identical to SEQ ID NO: 14368
  source 1..120: mol_type = other DNA

SEQ ID NO: 81557 - DNA, 120 bp, synthetic construct; identical to SEQ ID NO: 51603
  source 1..120: mol_type = other DNA

SEQ ID NO: 81558 - DNA, 120 bp, synthetic construct; identical to SEQ ID NO: 51604
  source 1..120: mol_type = other DNA

SEQ ID NO: 81559 - DNA, 120 bp, synthetic construct; identical to SEQ ID NO: 14369
  source 1..120: mol_type = other DNA

SEQ ID NO: 81560 - DNA, 120 bp, synthetic construct; identical to SEQ ID NO: 51606
  source 1..120: mol_type = other DNA

SEQ ID NO: 81561 - DNA, 120 bp, synthetic construct; identical to SEQ ID NO: 51607
  source 1..120: mol_type = other DNA

SEQ ID NO: 81562 - DNA, 120 bp, synthetic construct; identical to SEQ ID NO: 51608
  source 1..120: mol_type = other DNA

SEQ ID NO: 81563 - DNA, 120 bp, synthetic construct; identical to SEQ ID NO: 51609
  source 1..120: mol_type = other DNA

SEQ ID NO: 81564 - DNA, 120 bp, synthetic construct; identical to SEQ ID NO: 14370
  source 1..120: mol_type = other DNA

SEQ ID NO: 81565 - DNA, 120 bp, synthetic construct; identical to SEQ ID NO: 51611
  source 1..120: mol_type = other DNA

SEQ ID NO: 81566 - DNA, 120 bp, synthetic construct; identical to SEQ ID NO: 51612
  source 1..120: mol_type = other DNA

SEQ ID NO: 81567 - DNA, 120 bp, synthetic construct; identical to SEQ ID NO: 14371
  source 1..120: mol_type = other DNA

SEQ ID NO: 81568 - DNA, 120 bp, synthetic construct; identical to SEQ ID NO: 51614
  source 1..120: mol_type = other DNA

SEQ ID NO: 81569 - DNA, 120 bp, synthetic construct; identical to SEQ ID NO: 51615
  source 1..120: mol_type = other DNA

SEQ ID NO: 81570 - DNA, 120 bp, synthetic construct; identical to SEQ ID NO: 51616
  source 1..120: mol_type = other DNA

SEQ ID NO: 81571 - DNA, 120 bp, synthetic construct; identical to SEQ ID NO: 14372
  source 1..120: mol_type = other DNA

SEQ ID NO: 81572 - DNA, 120 bp, synthetic construct; identical to SEQ ID NO: 51618
  source 1..120: mol_type = other DNA

SEQ ID NO: 81573 - DNA, 120 bp, synthetic construct; identical to SEQ ID NO: 51619
  source 1..120: mol_type = other DNA

SEQ ID NO: 81574 - DNA, 120 bp, synthetic construct; identical to SEQ ID NO: 51620
  source 1..120: mol_type = other DNA

SEQ ID NO: 81575 - DNA, 120 bp, synthetic construct; identical to SEQ ID NO: 51621
  source 1..120: mol_type = other DNA

SEQ ID NO: 81576 - DNA, 120 bp, synthetic construct; identical to SEQ ID NO: 14373
  source 1..120: mol_type = other DNA

SEQ ID NO: 81577 - DNA, 120 bp, synthetic construct; identical to SEQ ID NO: 51623
  source 1..120: mol_type = other DNA

SEQ ID NO: 81578 - DNA, 120 bp, synthetic construct; identical to SEQ ID NO: 51624
  source 1..120: mol_type = other DNA

SEQ ID NO: 81579 - DNA, 120 bp, synthetic construct; identical to SEQ ID NO: 14374
  source 1..120: mol_type = other DNA

SEQ ID NO: 81580 - DNA, 120 bp, synthetic construct; identical to SEQ ID NO: 51626
  source 1..120: mol_type = other DNA

SEQ ID NO: 81581 - DNA, 120 bp, synthetic construct; identical to SEQ ID NO: 51627
  source 1..120: mol_type = other DNA

SEQ ID NO: 81582 - DNA, 120 bp, synthetic construct; identical to SEQ ID NO: 51628
  source 1..120: mol_type = other DNA

SEQ ID NO: 81583 - DNA, 120 bp, synthetic construct; identical to SEQ ID NO: 51629
  source 1..120: mol_type = other DNA

SEQ ID NO: 81584 - DNA, 120 bp, synthetic construct; identical to SEQ ID NO: 14375
  source 1..120: mol_type = other DNA

SEQ ID NO: 81585 - DNA, 120 bp, synthetic construct; identical to SEQ ID NO: 51631
  source 1..120: mol_type = other DNA

SEQ ID NO: 81586 - DNA, 120 bp, synthetic construct; identical to SEQ ID NO: 51632
  source 1..120: mol_type = other DNA

SEQ ID NO: 81587 - DNA, 120 bp, synthetic construct; identical to SEQ ID NO: 51633
  source 1..120: mol_type = other DNA

SEQ ID NO: 81588 - DNA, 120 bp, synthetic construct; identical to SEQ ID NO: 14376
  source 1..120: mol_type = other DNA

SEQ ID NO: 81589 - DNA, 120 bp, synthetic construct; identical to SEQ ID NO: 51635
  source 1..120: mol_type = other DNA

SEQ ID NO: 81590 - DNA, 120 bp, synthetic construct; identical to SEQ ID NO: 51636
  source 1..120: mol_type = other DNA

SEQ ID NO: 81591 - DNA, 120 bp, synthetic construct; identical to SEQ ID NO: 51637
  source 1..120: mol_type = other DNA

SEQ ID NO: 81592 - DNA, 120 bp, synthetic construct; identical to SEQ ID NO: 51638
  source 1..120: mol_type = other DNA

SEQ ID NO: 81593 - DNA, 120 bp, synthetic construct; identical to SEQ ID NO: 14377
  source 1..120: mol_type = other DNA

SEQ ID NO: 81594 - DNA, 120 bp, synthetic construct; identical to SEQ ID NO: 51640
  source 1..120: mol_type = other DNA

SEQ ID NO: 81595 - DNA, 120 bp, synthetic construct; identical to SEQ ID NO: 51641
  source 1..120: mol_type = other DNA

SEQ ID NO: 81596 - DNA, 120 bp, synthetic construct; identical to SEQ ID NO: 51642
  source 1..120: mol_type = other DNA

SEQ ID NO: 81597 - DNA, 120 bp, synthetic construct; identical to SEQ ID NO: 14378
  source 1..120: mol_type = other DNA

SEQ ID NO: 81598 - DNA, 120 bp, synthetic construct; identical to SEQ ID NO: 51644
  source 1..120: mol_type = other DNA

SEQ ID NO: 81599 - DNA, 120 bp, synthetic construct; identical to SEQ ID NO: 51645
  source 1..120: mol_type = other DNA

SEQ ID NO: 81600 - DNA, 120 bp, synthetic construct; identical to SEQ ID NO: 14379
  source 1..120: mol_type = other DNA

SEQ ID NO: 81601 - DNA, 120 bp, synthetic construct; identical to SEQ ID NO: 51647
  source 1..120: mol_type = other DNA

SEQ ID NO: 81602 - DNA, 120 bp, synthetic construct; identical to SEQ ID NO: 51648
  source 1..120: mol_type = other DNA

SEQ ID NO: 81603 - DNA, 120 bp, synthetic construct; identical to SEQ ID NO: 51649
  source 1..120: mol_type = other DNA

SEQ ID NO: 81604 - DNA, 120 bp, synthetic construct; identical to SEQ ID NO: 51650
  source 1..120: mol_type = other DNA

SEQ ID NO: 81605 - DNA, 120 bp, synthetic construct; identical to SEQ ID NO: 14380
  source 1..120: mol_type = other DNA

SEQ ID NO: 81606 - DNA, 120 bp, synthetic construct; identical to SEQ ID NO: 51652
  source 1..120: mol_type = other DNA

SEQ ID NO: 81607 - DNA, 120 bp, synthetic construct; identical to SEQ ID NO: 51653
  source 1..120: mol_type = other DNA

SEQ ID NO: 81608 - DNA, 120 bp, synthetic construct; identical to SEQ ID NO: 14381
  source 1..120: mol_type = other DNA

SEQ ID NO: 81609 - DNA, 120 bp, synthetic construct; identical to SEQ ID NO: 51655
  source 1..120: mol_type = other DNA

SEQ ID NO: 81610 - DNA, 120 bp, synthetic construct; identical to SEQ ID NO: 51656
  source 1..120: mol_type = other DNA

SEQ ID NO: 81611 - DNA, 120 bp, synthetic construct; identical to SEQ ID NO: 51657
  source 1..120: mol_type = other DNA

SEQ ID NO: 81612 - DNA, 120 bp, synthetic construct; identical to SEQ ID NO: 51658
  source 1..120: mol_type = other DNA

SEQ ID NO: 81613 - DNA, 120 bp, synthetic construct; identical to SEQ ID NO: 14382
  source 1..120: mol_type = other DNA

SEQ ID NO: 81614 - DNA, 120 bp, synthetic construct; identical to SEQ ID NO: 51660
  source 1..120: mol_type = other DNA

SEQ ID NO: 81615 - DNA, 120 bp, synthetic construct; identical to SEQ ID NO: 51661
  source 1..120: mol_type = other DNA

SEQ ID NO: 81616 - DNA, 120 bp, synthetic construct; identical to SEQ ID NO: 14383
  source 1..120: mol_type = other DNA

SEQ ID NO: 81617 - DNA, 120 bp, synthetic construct; identical to SEQ ID NO: 51663
  source 1..120: mol_type = other DNA

SEQ ID NO: 81618 - DNA, 120 bp, synthetic construct; identical to SEQ ID NO: 51664
  source 1..120: mol_type = other DNA

SEQ ID NO: 81619 - DNA, 120 bp, synthetic construct; identical to SEQ ID NO: 51665
  source 1..120: mol_type = other DNA

SEQ ID NO: 81620 - DNA, 120 bp, synthetic construct; identical to SEQ ID NO: 14384
  source 1..120: mol_type = other DNA

SEQ ID NO: 81621 - DNA, 120 bp, synthetic construct; identical to SEQ ID NO: 51667
  source 1..120: mol_type = other DNA

SEQ ID NO: 81622 - DNA, 120 bp, synthetic construct; identical to SEQ ID NO: 51668
  source 1..120: mol_type = other DNA

SEQ ID NO: 81623 - DNA, 120 bp, synthetic construct; identical to SEQ ID NO: 51669
  source 1..120: mol_type = other DNA

SEQ ID NO: 81624 - DNA, 120 bp, synthetic construct; identical to SEQ ID NO: 14385
  source 1..120: mol_type = other DNA

SEQ ID NO: 81625 - DNA, 120 bp, synthetic construct; identical to SEQ ID NO: 6878
  source 1..120: mol_type = other DNA

SEQ ID NO: 81626 - DNA, 120 bp, synthetic construct; identical to SEQ ID NO: 51672
  source 1..120: mol_type = other DNA

SEQ ID NO: 81627 - DNA, 120 bp, synthetic construct; identical to SEQ ID NO: 51673
  source 1..120: mol_type = other DNA

SEQ ID NO: 81628 - DNA, 120 bp, synthetic construct; identical to SEQ ID NO: 51674
  source 1..120: mol_type = other DNA

SEQ ID NO: 81629 - DNA, 120 bp, synthetic construct; identical to SEQ ID NO: 14387
  source 1..120: mol_type = other DNA

SEQ ID NO: 81630 - DNA, 120 bp, synthetic construct; identical to SEQ ID NO: 51676
  source 1..120: mol_type = other DNA

SEQ ID NO: 81631 - DNA, 120 bp, synthetic construct; identical to SEQ ID NO: 51677
  source 1..120: mol_type = other DNA

SEQ ID NO: 81632 - DNA, 120 bp, synthetic construct; identical to SEQ ID NO: 51678
  source 1..120: mol_type = other DNA

SEQ ID NO: 81633 - DNA, 120 bp, synthetic construct; identical to SEQ ID NO: 14388
  source 1..120: mol_type = other DNA

SEQ ID NO: 81634 - DNA, 120 bp, synthetic construct; identical to SEQ ID NO: 51680
  source 1..120: mol_type = other DNA

SEQ ID NO: 81635 - DNA, 120 bp, synthetic construct; identical to SEQ ID NO: 6880
  source 1..120: mol_type = other DNA

SEQ ID NO: 81636 - DNA, 120 bp, synthetic construct; identical to SEQ ID NO: 51682
  source 1..120: mol_type = other DNA

SEQ ID NO: 81637 - DNA, 120 bp, synthetic construct; identical to SEQ ID NO: 14389
  source 1..120: mol_type = other DNA

SEQ ID NO: 81638 - DNA, 120 bp, synthetic construct; identical to SEQ ID NO: 51684
  source 1..120: mol_type = other DNA

SEQ ID NO: 81639 - DNA, 120 bp, synthetic construct; identical to SEQ ID NO: 51685
  source 1..120: mol_type = other DNA

SEQ ID NO: 81640 - DNA, 120 bp, synthetic construct; identical to SEQ ID NO: 51686
  source 1..120: mol_type = other DNA

SEQ ID NO: 81641 - DNA, 120 bp, synthetic construct; identical to SEQ ID NO: 51687
  source 1..120: mol_type = other DNA

SEQ ID NO: 81642 - DNA, 120 bp, synthetic construct; identical to SEQ ID NO: 14390
  source 1..120: mol_type = other DNA

SEQ ID NO: 81643 - DNA, 120 bp, synthetic construct; identical to SEQ ID NO: 51689
  source 1..120: mol_type = other DNA

SEQ ID NO: 81644 - DNA, 120 bp, synthetic construct; identical to SEQ ID NO: 51690
  source 1..120: mol_type = other DNA

SEQ ID NO: 81645 - DNA, 120 bp, synthetic construct; identical to SEQ ID NO: 14391
  source 1..120: mol_type = other DNA

SEQ ID NO: 81646 - DNA, 120 bp, synthetic construct; identical to SEQ ID NO: 51692
  source 1..120: mol_type = other DNA

SEQ ID NO: 81647 - DNA, 120 bp, synthetic construct; identical to SEQ ID NO: 6883
  source 1..120: mol_type = other DNA

SEQ ID NO: 81648 - DNA, 120 bp, synthetic construct; identical to SEQ ID NO: 51694
  source 1..120: mol_type = other DNA

SEQ ID NO: 81649 - DNA, 120 bp, synthetic construct; identical to SEQ ID NO: 14392
  source 1..120: mol_type = other DNA

SEQ ID NO: 81650 - DNA, 120 bp, synthetic construct; identical to SEQ ID NO: 51696
  source 1..120: mol_type = other DNA

SEQ ID NO: 81651 - DNA, 120 bp, synthetic construct; identical to SEQ ID NO: 51697
  source 1..120: mol_type = other DNA

SEQ ID NO: 81652 - DNA, 120 bp, synthetic construct; identical to SEQ ID NO: 51698
  source 1..120: mol_type = other DNA

SEQ ID NO: 81653 - DNA, 120 bp, synthetic construct; identical to SEQ ID NO: 14393
  source 1..120: mol_type = other DNA

SEQ ID NO: 81654 - DNA, 120 bp, synthetic construct; identical to SEQ ID NO: 51700
  source 1..120: mol_type = other DNA

SEQ ID NO: 81655 - DNA, 120 bp, synthetic construct; identical to SEQ ID NO: 6885
  source 1..120: mol_type = other DNA

SEQ ID NO: 81656 - DNA, 120 bp, synthetic construct; identical to SEQ ID NO: 51702
  source 1..120: mol_type = other DNA

SEQ ID NO: 81657 - DNA, 120 bp, synthetic construct; identical to SEQ ID NO: 14394
  source 1..120: mol_type = other DNA

SEQ ID NO: 81658 - DNA, 120 bp, synthetic construct; identical to SEQ ID NO: 51704
  source 1..120: mol_type = other DNA

SEQ ID NO: 81659 - DNA, 120 bp, synthetic construct; identical to SEQ ID NO: 51705
  source 1..120: mol_type = other DNA

SEQ ID NO: 81660 - DNA, 120 bp, synthetic construct; identical to SEQ ID NO: 6886
  source 1..120: mol_type = other DNA

SEQ ID NO: 81661 - DNA, 120 bp, synthetic construct; identical to SEQ ID NO: 51707
  source 1..120: mol_type = other DNA

SEQ ID NO: 81662 - DNA, 120 bp, synthetic construct; identical to SEQ ID NO: 14395
  source 1..120: mol_type = other DNA

SEQ ID NO: 81663 - DNA, 120 bp, synthetic construct; identical to SEQ ID NO: 51709
  source 1..120: mol_type = other DNA

SEQ ID NO: 81664 - DNA, 120 bp, synthetic construct; identical to SEQ ID NO: 51710
  source 1..120: mol_type = other DNA

SEQ ID NO: 81665 - DNA, 120 bp, synthetic construct; identical to SEQ ID NO: 6887
  source 1..120: mol_type = other DNA

SEQ ID NO: 81666 - DNA, 120 bp, synthetic construct; identical to SEQ ID NO: 51712
  source 1..120: mol_type = other DNA

SEQ ID NO: 81667 - DNA, 120 bp, synthetic construct; identical to SEQ ID NO: 51713
  source 1..120: mol_type = other DNA

SEQ ID NO: 81668 - DNA, 120 bp, synthetic construct; identical to SEQ ID NO: 51714
  source 1..120: mol_type = other DNA

SEQ ID NO: 81669 - DNA, 120 bp, synthetic construct; identical to SEQ ID NO: 51715
  source 1..120: mol_type = other DNA

SEQ ID NO: 81670 - DNA, 120 bp, synthetic construct; identical to SEQ ID NO: 14397
  source 1..120: mol_type = other DNA

SEQ ID NO: 81671 - DNA, 120 bp, synthetic construct; identical to SEQ ID NO: 14398
  source 1..120: mol_type = other DNA

SEQ ID NO: 81672 - DNA, 120 bp, synthetic construct; identical to SEQ ID NO: 51718
  source 1..120: mol_type = other DNA

SEQ ID NO: 81673 - DNA, 120 bp, synthetic construct; identical to SEQ ID NO: 51719
  source 1..120: mol_type = other DNA

SEQ ID NO: 81674 - DNA, 120 bp, synthetic construct; identical to SEQ ID NO: 51720
  source 1..120: mol_type = other DNA

SEQ ID NO: 81675 - DNA, 120 bp, synthetic construct; identical to SEQ ID NO: 14399
  source 1..120: mol_type = other DNA

SEQ ID NO: 81676 - DNA, 120 bp, synthetic construct; identical to SEQ ID NO: 51722
  source 1..120: mol_type = other DNA

SEQ ID NO: 81677 - DNA, 120 bp, synthetic construct; identical to SEQ ID NO: 51723
  source 1..120: mol_type = other DNA

SEQ ID NO: 81678 - DNA, 120 bp, synthetic construct; identical to SEQ ID NO: 51724
  source 1..120: mol_type = other DNA

SEQ ID NO: 81679 - DNA, 120 bp, synthetic construct; identical to SEQ ID NO: 14400
  source 1..120: mol_type = other DNA

SEQ ID NO: 81680 - DNA, 120 bp, synthetic construct; identical to SEQ ID NO: 51726
  source 1..120: mol_type = other DNA

SEQ ID NO: 81681 - DNA, 120 bp, synthetic construct; identical to SEQ ID NO: 51727
  source 1..120: mol_type = other DNA

SEQ ID NO: 81682 - DNA, 120 bp, synthetic construct; identical to SEQ ID NO: 14401
  source 1..120: mol_type = other DNA

SEQ ID NO: 81683 - DNA, 120 bp, synthetic construct; identical to SEQ ID NO: 51729
  source 1..120: mol_type = other DNA

SEQ ID NO: 81684 - DNA, 120 bp, synthetic construct; identical to SEQ ID NO: 51730
  source 1..120: mol_type = other DNA

SEQ ID NO: 81685 - DNA, 120 bp, synthetic construct; identical to SEQ ID NO: 51731
  source 1..120: mol_type = other DNA

SEQ ID NO: 81686 - DNA, 120 bp, synthetic construct; identical to SEQ ID NO: 51732
  source 1..120: mol_type = other DNA

SEQ ID NO: 81687 - DNA, 120 bp, synthetic construct; identical to SEQ ID NO: 14402
  source 1..120: mol_type = other DNA

SEQ ID NO: 81688 - DNA, 120 bp, synthetic construct; identical to SEQ ID NO: 51734
  source 1..120: mol_type = other DNA

SEQ ID NO: 81689 - DNA, 120 bp, synthetic construct; identical to SEQ ID NO: 6893
  source 1..120: mol_type = other DNA

SEQ ID NO: 81690 - DNA, 120 bp, synthetic construct; identical to SEQ ID NO: 51736
  source 1..120: mol_type = other DNA

SEQ ID NO: 81691 - DNA, 120 bp, synthetic construct; identical to SEQ ID NO: 14403
  source 1..120: mol_type = other DNA

SEQ ID NO: 81692 - DNA, 120 bp, synthetic construct; identical to SEQ ID NO: 51738
  source 1..120: mol_type = other DNA

SEQ ID NO: 81693 - DNA, 120 bp, synthetic construct; identical to SEQ ID NO: 51739
  source 1..120: mol_type = other DNA

SEQ ID NO: 81694 - DNA, 120 bp, synthetic construct; identical to SEQ ID NO: 51740
  source 1..120: mol_type = other DNA

SEQ ID NO: 81695 - DNA, 120 bp, synthetic construct; identical to SEQ ID NO: 14404
  source 1..120: mol_type = other DNA

SEQ ID NO: 81696 - DNA, 120 bp, synthetic construct; identical to SEQ ID NO: 51742
  source 1..120: mol_type = other DNA

SEQ ID NO: 81697 - DNA, 120 bp, synthetic construct; identical to SEQ ID NO: 51743
  source 1..120: mol_type = other DNA

SEQ ID NO: 81698 - DNA, 120 bp, synthetic construct; identical to SEQ ID NO: 14405
  source 1..120: mol_type = other DNA

SEQ ID NO: 81699 - DNA, 120 bp, synthetic construct; identical to SEQ ID NO: 51745
  source 1..120: mol_type = other DNA

SEQ ID NO: 81700 - DNA, 120 bp, synthetic construct; identical to SEQ ID NO: 51746
  source 1..120: mol_type = other DNA

SEQ ID NO: 81701 - DNA, 120 bp, synthetic construct; identical to SEQ ID NO: 51747
  source 1..120: mol_type = other DNA

SEQ ID NO: 81702 - DNA, 120 bp, synthetic construct; identical to SEQ ID NO: 14406
  source 1..120: mol_type = other DNA

SEQ ID NO: 81703 - DNA, 120 bp, synthetic construct; identical to SEQ ID NO: 51749
  source 1..120: mol_type = other DNA

SEQ ID NO: 81704 - DNA, 120 bp, synthetic construct; identical to SEQ ID NO: 51750
  source 1..120: mol_type = other DNA

SEQ ID NO: 81705 - DNA, 120 bp, synthetic construct; identical to SEQ ID NO: 51751
  source 1..120: mol_type = other DNA

SEQ ID NO: 81706 - DNA, 120 bp, synthetic construct; identical to SEQ ID NO: 51752
  source 1..120: mol_type = other DNA

SEQ ID NO: 81707 - DNA, 120 bp, synthetic construct; identical to SEQ ID NO: 6897
  source 1..120: mol_type = other DNA

SEQ ID NO: 81708 - DNA, 120 bp, synthetic construct; identical to SEQ ID NO: 51754
  source 1..120: mol_type = other DNA

SEQ ID NO: 81709 - DNA, 120 bp, synthetic construct; identical to SEQ ID NO: 51755
  source 1..120: mol_type = other DNA

SEQ ID NO: 81710 - DNA, 120 bp, synthetic construct; identical to SEQ ID NO: 14408
  source 1..120: mol_type = other DNA

SEQ ID NO: 81711 - DNA, 120 bp, synthetic construct; identical to SEQ ID NO: 51757
  source 1..120: mol_type = other DNA

SEQ ID NO: 81712 - DNA, 120 bp, synthetic construct; identical to SEQ ID NO: 51758
  source 1..120: mol_type = other DNA

SEQ ID NO: 81713 - DNA, 120 bp, synthetic construct; identical to SEQ ID NO: 51759
  source 1..120: mol_type = other DNA

SEQ ID NO: 81714 - DNA, 120 bp, synthetic construct; identical to SEQ ID NO: 51760
  source 1..120: mol_type = other DNA

SEQ ID NO: 81715 - DNA, 120 bp, synthetic construct; identical to SEQ ID NO: 14409
  source 1..120: mol_type = other DNA

SEQ ID NO: 81716 - DNA, 120 bp, synthetic construct; identical to SEQ ID NO: 51762
  source 1..120: mol_type = other DNA

SEQ ID NO: 81717 - DNA, 120 bp, synthetic construct; identical to SEQ ID NO: 51763
  source 1..120: mol_type = other DNA

SEQ ID NO: 81718 - DNA, 120 bp, synthetic construct; identical to SEQ ID NO: 51764
  source 1..120: mol_type = other DNA

SEQ ID NO: 81719 - DNA, 120 bp, synthetic construct; identical to SEQ ID NO: 14410
  source 1..120: mol_type = other DNA

SEQ ID NO: 81720 - DNA, 120 bp, synthetic construct; identical to SEQ ID NO: 51766
  source 1..120: mol_type = other DNA

SEQ ID NO: 81721 - DNA, 120 bp, synthetic construct; identical to SEQ ID NO: 51767
  source 1..120: mol_type = other DNA

SEQ ID NO: 81722 - DNA, 120 bp, synthetic construct; identical to SEQ ID NO: 51768
  source 1..120: mol_type = other DNA

SEQ ID NO: 81723 - DNA, 120 bp, synthetic construct; identical to SEQ ID NO: 51769
  source 1..120: mol_type = other DNA

SEQ ID NO: 81724 - DNA, 120 bp, synthetic construct; identical to SEQ ID NO: 14411
  source 1..120: mol_type = other DNA

SEQ ID NO: 81725 - DNA, 120 bp, synthetic construct; identical to SEQ ID NO: 51771
  source 1..120: mol_type = other DNA

SEQ ID NO: 81726 - DNA, 120 bp, synthetic construct; identical to SEQ ID NO: 51772
  source 1..120: mol_type = other DNA

SEQ ID NO: 81727 - DNA, 120 bp, synthetic construct; identical to SEQ ID NO: 51773
  source 1..120: mol_type = other DNA

SEQ ID NO: 81728 - DNA, 120 bp, synthetic construct; identical to SEQ ID NO: 14412
  source 1..120: mol_type = other DNA

SEQ ID NO: 81729 - DNA, 120 bp, synthetic construct; identical to SEQ ID NO: 51775
  source 1..120: mol_type = other DNA

SEQ ID NO: 81730 - DNA, 120 bp, synthetic construct; identical to SEQ ID NO: 51776
  source 1..120: mol_type = other DNA

SEQ ID NO: 81731 - DNA, 120 bp, synthetic construct; identical to SEQ ID NO: 14413
  source 1..120: mol_type = other DNA

SEQ ID NO: 81732 - DNA, 120 bp, synthetic construct; identical to SEQ ID NO: 51778
  source 1..120: mol_type = other DNA

SEQ ID NO: 81733 - DNA, 120 bp, synthetic construct; identical to SEQ ID NO: 51779
  source 1..120: mol_type = other DNA

SEQ ID NO: 81734 - DNA, 120 bp, synthetic construct; identical to SEQ ID NO: 51780
  source 1..120: mol_type = other DNA

SEQ ID NO: 81735 - DNA, 120 bp, synthetic construct; identical to SEQ ID NO: 51781
  source 1..120: mol_type = other DNA

SEQ ID NO: 81736 - DNA, 120 bp, synthetic construct; identical to SEQ ID NO: 14414
  source 1..120: mol_type = other DNA

SEQ ID NO: 81737 - DNA, 120 bp, synthetic construct; identical to SEQ ID NO: 51783
  source 1..120: mol_type = other DNA

SEQ ID NO: 81738 - DNA, 120 bp, synthetic construct; identical to SEQ ID NO: 51784
  source 1..120: mol_type = other DNA

SEQ ID NO: 81739 - DNA, 120 bp, synthetic construct; identical to SEQ ID NO: 14415
  source 1..120: mol_type = other DNA

SEQ ID NO: 81740 - DNA, 120 bp, synthetic construct; identical to SEQ ID NO: 51786
  source 1..120: mol_type = other DNA

SEQ ID NO: 81741 - DNA, 120 bp, synthetic construct; identical to SEQ ID NO: 51787
  source 1..120: mol_type = other DNA

SEQ ID NO: 81742 - DNA, 120 bp, synthetic construct; identical to SEQ ID NO: 51788
  source 1..120: mol_type = other DNA

SEQ ID NO: 81743 - DNA, 120 bp, synthetic construct; identical to SEQ ID NO: 51789
  source 1..120: mol_type = other DNA

SEQ ID NO: 81744 - DNA, 120 bp, synthetic construct; identical to SEQ ID NO: 14416
  source 1..120: mol_type = other DNA

SEQ ID NO: 81745 - DNA, 120 bp, synthetic construct; identical to SEQ ID NO: 51791
  source 1..120: mol_type = other DNA

SEQ ID NO: 81746 - DNA, 120 bp, synthetic construct; identical to SEQ ID NO: 51792
  source 1..120: mol_type = other DNA

SEQ ID NO: 81747 - DNA, 120 bp, synthetic construct; identical to SEQ ID NO: 14417
  source 1..120: mol_type = other DNA

SEQ ID NO: 81748 - DNA, 120 bp, synthetic construct; identical to SEQ ID NO: 51794
  source 1..120: mol_type = other DNA

SEQ ID NO: 81749 - DNA, 120 bp, synthetic construct; identical to SEQ ID NO: 51795
  source 1..120: mol_type = other DNA

SEQ ID NO: 81750 - DNA, 120 bp, synthetic construct; identical to SEQ ID NO: 51796
  source 1..120: mol_type = other DNA

SEQ ID NO: 81751 - DNA, 120 bp, synthetic construct; identical to SEQ ID NO: 14418
  source 1..120: mol_type = other DNA

SEQ ID NO: 81752 - DNA, 120 bp, synthetic construct; identical to SEQ ID NO: 51798
  source 1..120: mol_type = other DNA

SEQ ID NO: 81753 - DNA, 120 bp, synthetic construct; identical to SEQ ID NO: 51799
  source 1..120: mol_type = other DNA

SEQ ID NO: 81754 - DNA, 120 bp, synthetic construct; identical to SEQ ID NO: 51800
  source 1..120: mol_type = other DNA

SEQ ID NO: 81755 - DNA, 120 bp, synthetic construct; identical to SEQ ID NO: 51801
  source 1..120: mol_type = other DNA

SEQ ID NO: 81756 - DNA, 120 bp, synthetic construct; identical to SEQ ID NO: 14419
  source 1..120: mol_type = other DNA

SEQ ID NO: 81757 - DNA, 120 bp, synthetic construct; identical to SEQ ID NO: 51803
  source 1..120: mol_type = other DNA

SEQ ID NO: 81758 - DNA, 120 bp, synthetic construct; identical to SEQ ID NO: 51804
  source 1..120: mol_type = other DNA

SEQ ID NO: 81759 - DNA, 120 bp, synthetic construct; identical to SEQ ID NO: 14420
  source 1..120: mol_type = other DNA

SEQ ID NO: 81760 - DNA, 120 bp, synthetic construct; identical to SEQ ID NO: 51806
  source 1..120: mol_type = other DNA

SEQ ID NO: 81761 - DNA, 120 bp, synthetic construct; identical to SEQ ID NO: 51807
  source 1..120: mol_type = other DNA

SEQ ID NO: 81762 - DNA, 120 bp, synthetic construct; identical to SEQ ID NO: 51808
  source 1..120: mol_type = other DNA

SEQ ID NO: 81763 - DNA, 120 bp, synthetic construct; identical to SEQ ID NO: 14421
  source 1..120: mol_type = other DNA

SEQ ID NO: 81764 - DNA, 120 bp, synthetic construct; identical to SEQ ID NO: 51810
  source 1..120: mol_type = other DNA

SEQ ID NO: 81765 - DNA, 120 bp, synthetic construct; identical to SEQ ID NO: 51811
  source 1..120: mol_type = other DNA

SEQ ID NO: 81766 - DNA, 120 bp, synthetic construct; identical to SEQ ID NO: 51812
  source 1..120: mol_type = other DNA

SEQ ID NO: 81767 - DNA, 120 bp, synthetic construct; identical to SEQ ID NO: 51813
  source 1..120: mol_type = other DNA

SEQ ID NO: 81768 - DNA, 120 bp, synthetic construct; identical to SEQ ID NO: 14422
  source 1..120: mol_type = other DNA

SEQ ID NO: 81769 - DNA, 120 bp, synthetic construct; identical to SEQ ID NO: 51815
  source 1..120: mol_type = other DNA

SEQ ID NO: 81770 - DNA, 120 bp, synthetic construct; identical to SEQ ID NO: 51816
  source 1..120: mol_type = other DNA

SEQ ID NO: 81771 - DNA, 120 bp, synthetic construct; identical to SEQ ID NO: 51817
  source 1..120: mol_type = other DNA

SEQ ID NO: 81772 - DNA, 120 bp, synthetic construct; identical to SEQ ID NO: 14423
  source 1..120: mol_type = other DNA

SEQ ID NO: 81773 - DNA, 120 bp, synthetic construct; identical to SEQ ID NO: 51819
  source 1..120: mol_type = other DNA

SEQ ID NO: 81774 - DNA, 120 bp, synthetic construct; identical to SEQ ID NO: 51820
  source 1..120: mol_type = other DNA

SEQ ID NO: 81775 - DNA, 120 bp, synthetic construct; identical to SEQ ID NO: 51821
  source 1..120: mol_type = other DNA

SEQ ID NO: 81776 - DNA, 120 bp, synthetic construct; identical to SEQ ID NO: 14424
  source 1..120: mol_type = other DNA

SEQ ID NO: 81777 - DNA, 120 bp, synthetic construct; identical to SEQ ID NO: 51823
  source 1..120: mol_type = other DNA

SEQ ID NO: 81778 - DNA, 120 bp, synthetic construct; identical to SEQ ID NO: 51824
  source 1..120: mol_type = other DNA

SEQ ID NO: 81779 - DNA, 120 bp, synthetic construct; identical to SEQ ID NO: 51825
  source 1..120: mol_type = other DNA

SEQ ID NO: 81780 - DNA, 120 bp, synthetic construct; identical to SEQ ID NO: 14425
  source 1..120: mol_type = other DNA

SEQ ID NO: 81781 - DNA, 120 bp, synthetic construct; identical to SEQ ID NO: 51827
  source 1..120: mol_type = other DNA

SEQ ID NO: 81782 - DNA, 120 bp, synthetic construct; identical to SEQ ID NO: 51828
  source 1..120: mol_type = other DNA

SEQ ID NO: 81783 - DNA, 120 bp, synthetic construct; identical to SEQ ID NO: 14426
  source 1..120: mol_type = other DNA

SEQ ID NO: 81784 - DNA, 120 bp, synthetic construct; identical to SEQ ID NO: 51830
  source 1..120: mol_type = other DNA

SEQ ID NO: 81785 - DNA, 120 bp, synthetic construct; identical to SEQ ID NO: 51831
  source 1..120: mol_type = other DNA

SEQ ID NO: 81786 - DNA, 120 bp, synthetic construct; identical to SEQ ID NO: 51832
  source 1..120: mol_type = other DNA

SEQ ID NO: 81787 - DNA, 120 bp, synthetic construct; identical to SEQ ID NO: 14427
  source 1..120: mol_type = other DNA

SEQ ID NO: 81788 - DNA, 120 bp, synthetic construct; identical to SEQ ID NO: 51834
  source 1..120: mol_type = other DNA

SEQ ID NO: 81789 - DNA, 120 bp, synthetic construct; identical to SEQ ID NO: 51835
  source 1..120: mol_type = other DNA

SEQ ID NO: 81790 - DNA, 120 bp, synthetic construct; identical to SEQ ID NO: 51836
  source 1..120: mol_type = other DNA

SEQ ID NO: 81791 - DNA, 120 bp, synthetic construct; identical to SEQ ID NO: 51837
  source 1..120: mol_type = other DNA

SEQ ID NO: 81792 - DNA, 120 bp, synthetic construct; identical to SEQ ID NO: 14428
  source 1..120: mol_type = other DNA

SEQ ID NO: 81793 - DNA, 120 bp, synthetic construct; identical to SEQ ID NO: 51839
  source 1..120: mol_type = other DNA

SEQ ID NO: 81794 - DNA, 120 bp, synthetic construct; identical to SEQ ID NO: 51840
  source 1..120: mol_type = other DNA

SEQ ID NO: 81795 - DNA, 120 bp, synthetic construct; identical to SEQ ID NO: 14429
  source 1..120: mol_type = other DNA

SEQ ID NO: 81796 - DNA, 120 bp, synthetic construct; identical to SEQ ID NO: 51842
  source 1..120: mol_type = other DNA

SEQ ID NO: 81797 - DNA, 120 bp, synthetic construct; identical to SEQ ID NO: 51843
  source 1..120: mol_type = other DNA

SEQ ID NO: 81798 - DNA, 120 bp, synthetic construct; identical to SEQ ID NO: 51844
  source 1..120: mol_type = other DNA

SEQ ID NO: 81799 - DNA, 120 bp, synthetic construct; identical to SEQ ID NO: 14430
  source 1..120: mol_type = other DNA

SEQ ID NO: 81800 - DNA, 120 bp, synthetic construct; identical to SEQ ID NO: 51846
  source 1..120: mol_type = other DNA

SEQ ID NO: 81801 - DNA, 120 bp, synthetic construct; identical to SEQ ID NO: 51847
  source 1..120: mol_type = other DNA

SEQ ID NO: 81802 - DNA, 120 bp, synthetic construct; identical to SEQ ID NO: 51848
  source 1..120: mol_type = other DNA

SEQ ID NO: 81803 - DNA, 120 bp, synthetic construct; identical to SEQ ID NO: 14431
  source 1..120: mol_type = other DNA

SEQ ID NO: 81804 - DNA, 120 bp, synthetic construct; identical to SEQ ID NO: 51850
  source 1..120: mol_type = other DNA

SEQ ID NO: 81805 - DNA, 120 bp, synthetic construct; identical to SEQ ID NO: 51851
  source 1..120: mol_type = other DNA

SEQ ID NO: 81806 - DNA, 120 bp, synthetic construct; identical to SEQ ID NO: 51852
  source 1..120: mol_type = other DNA

SEQ ID NO: 81807 - DNA, 120 bp, synthetic construct; identical to SEQ ID NO: 14432
  source 1..120: mol_type = other DNA

SEQ ID NO: 81808 - DNA, 120 bp, synthetic construct; identical to SEQ ID NO: 51854
  source 1..120: mol_type = other DNA

SEQ ID NO: 81809 - DNA, 120 bp, synthetic construct; identical to SEQ ID NO: 51855
  source 1..120: mol_type = other DNA

SEQ ID NO: 81810 - DNA, 120 bp, synthetic construct; identical to SEQ ID NO: 51856
  source 1..120: mol_type = other DNA

SEQ ID NO: 81811 - DNA, 120 bp, synthetic construct; identical to SEQ ID NO: 14433
  source 1..120: mol_type = other DNA

SEQ ID NO: 81812 - DNA, 120 bp, synthetic construct; identical to SEQ ID NO: 51858
  source 1..120: mol_type = other DNA

SEQ ID NO: 81813 - DNA, 120 bp, synthetic construct; identical to SEQ ID NO: 51859
  source 1..120: mol_type = other DNA

SEQ ID NO: 81814 - DNA, 120 bp, synthetic construct; identical to SEQ ID NO: 51860
  source 1..120: mol_type = other DNA

SEQ ID NO: 81815 - DNA, 120 bp, synthetic construct; identical to SEQ ID NO: 51861
  source 1..120: mol_type = other DNA

SEQ ID NO: 81816 - DNA, 120 bp, synthetic construct; identical to SEQ ID NO: 14434
  source 1..120: mol_type = other DNA

SEQ ID NO: 81817 - DNA, 120 bp, synthetic construct; identical to SEQ ID NO: 51863
  source 1..120: mol_type = other DNA

SEQ ID NO: 81818 - DNA, 120 bp, synthetic construct; identical to SEQ ID NO: 51864
  source 1..120: mol_type = other DNA

SEQ ID NO: 81819 - DNA, 120 bp, synthetic construct; identical to SEQ ID NO: 14435
  source 1..120: mol_type = other DNA

SEQ ID NO: 81820 - DNA, 120 bp, synthetic construct; identical to SEQ ID NO: 51866
  source 1..120: mol_type = other DNA

SEQ ID NO: 81821 - DNA, 120 bp, synthetic construct; identical to SEQ ID NO: 51867
  source 1..120: mol_type = other DNA

SEQ ID NO: 81822 - DNA, 120 bp, synthetic construct; identical to SEQ ID NO: 51868
  source 1..120: mol_type = other DNA

SEQ ID NO: 81823 - DNA, 120 bp, synthetic construct; identical to SEQ ID NO: 14436
  source 1..120: mol_type = other DNA

SEQ ID NO: 81824 - DNA, 120 bp, synthetic construct; identical to SEQ ID NO: 51870
  source 1..120: mol_type = other DNA

SEQ ID NO: 81825 - DNA, 120 bp, synthetic construct; identical to SEQ ID NO: 51871
  source 1..120: mol_type = other DNA

SEQ ID NO: 81826 - DNA, 120 bp, synthetic construct; identical to SEQ ID NO: 51872
  source 1..120: mol_type = other DNA

SEQ ID NO: 81827 - DNA, 120 bp, synthetic construct; identical to SEQ ID NO: 14437
  source 1..120: mol_type = other DNA

SEQ ID NO: 81828 - DNA, 120 bp, synthetic construct; identical to SEQ ID NO: 51874
  source 1..120: mol_type = other DNA

SEQ ID NO: 81829 - DNA, 120 bp, synthetic construct; identical to SEQ ID NO: 51875
  source 1..120: mol_type = other DNA

SEQ ID NO: 81830 - DNA, 120 bp, synthetic construct; identical to SEQ ID NO: 51876
  source 1..120: mol_type = other DNA

SEQ ID NO: 81831 - DNA, 120 bp, synthetic construct; identical to SEQ ID NO: 14438
  source 1..120: mol_type = other DNA

SEQ ID NO: 81832 - DNA, 120 bp, synthetic construct; identical to SEQ ID NO: 51878
  source 1..120: mol_type = other DNA

SEQ ID NO: 81833 - DNA, 120 bp, synthetic construct; identical to SEQ ID NO: 51879
  source 1..120: mol_type = other DNA

SEQ ID NO: 81834 - DNA, 120 bp, synthetic construct; identical to SEQ ID NO: 51880
  source 1..120: mol_type = other DNA

SEQ ID NO: 81835 - DNA, 120 bp, synthetic construct; identical to SEQ ID NO: 14439
  source 1..120: mol_type = other DNA

SEQ ID NO: 81836 - DNA, 120 bp, synthetic construct; identical to SEQ ID NO: 51882
  source 1..120: mol_type = other DNA

SEQ ID NO: 81837 - DNA, 120 bp, synthetic construct; identical to SEQ ID NO: 51883
  source 1..120: mol_type = other DNA

SEQ ID NO: 81838 - DNA, 120 bp, synthetic construct; identical to SEQ ID NO: 51884
  source 1..120: mol_type = other DNA

SEQ ID NO: 81839 - DNA, 120 bp, synthetic construct; identical to SEQ ID NO: 51885
  source 1..120: mol_type = other DNA

SEQ ID NO: 81840 - DNA, 120 bp, synthetic construct; identical to SEQ ID NO: 14440
  source 1..120: mol_type = other DNA

SEQ ID NO: 81841 - DNA, 120 bp, synthetic construct; identical to SEQ ID NO: 51887
  source 1..120: mol_type = other DNA

SEQ ID NO: 81842 - DNA, 120 bp, synthetic construct; identical to SEQ ID NO: 51888
  source 1..120: mol_type = other DNA

SEQ ID NO: 81843 - DNA, 120 bp, synthetic construct; identical to SEQ ID NO: 14441
  source 1..120: mol_type = other DNA

SEQ ID NO: 81844 - DNA, 120 bp, synthetic construct; identical to SEQ ID NO: 51890
  source 1..120: mol_type = other DNA

SEQ ID NO: 81845 - DNA, 120 bp, synthetic construct; identical to SEQ ID NO: 51891
  source 1..120: mol_type = other DNA

SEQ ID NO: 81846 - DNA, 120 bp, synthetic construct; identical to SEQ ID NO: 51892
  source 1..120: mol_type = other DNA

SEQ ID NO: 81847 - DNA, 120 bp, synthetic construct; identical to SEQ ID NO: 14442
  source 1..120: mol_type = other DNA

SEQ ID NO: 81848 - DNA, 120 bp, synthetic construct; identical to SEQ ID NO: 51894
  source 1..120: mol_type = other DNA

SEQ ID NO: 81849 - DNA, 120 bp, synthetic construct; identical to SEQ ID NO: 51895
  source 1..120: mol_type = other DNA

SEQ ID NO: 81850 - DNA, 120 bp, synthetic construct; identical to SEQ ID NO: 51896
  source 1..120: mol_type = other DNA

SEQ ID NO: 81851 - DNA, 120 bp, synthetic construct; identical to SEQ ID NO: 51897
  source 1..120: mol_type = other DNA

SEQ ID NO: 81852 - DNA, 120 bp, synthetic construct; identical to SEQ ID NO: 14443
  source 1..120: mol_type = other DNA

SEQ ID NO: 81853 - DNA, 120 bp, synthetic construct; identical to SEQ ID NO: 51899
  source 1..120: mol_type = other DNA

SEQ ID NO: 81854 - DNA, 120 bp, synthetic construct; identical to SEQ ID NO: 51900
  source 1..120: mol_type = other DNA

SEQ ID NO: 81855 - DNA, 120 bp, synthetic construct; identical to SEQ ID NO: 14444
  source 1..120: mol_type = other DNA

SEQ ID NO: 81856 - DNA, 120 bp, synthetic construct; identical to SEQ ID NO: 51902
  source 1..120: mol_type = other DNA

SEQ ID NO: 81857 - DNA, 120 bp, synthetic construct; identical to SEQ ID NO: 51903
  source 1..120: mol_type = other DNA

SEQ ID NO: 81858 - DNA, 120 bp, synthetic construct; identical to SEQ ID NO: 51904
  source 1..120: mol_type = other DNA

SEQ ID NO: 81859 - DNA, 120 bp, synthetic construct; identical to SEQ ID NO: 14445
  source 1..120: mol_type = other DNA

SEQ ID NO: 81860 - DNA, 120 bp, synthetic construct; identical to SEQ ID NO: 51906
  source 1..120: mol_type = other DNA

SEQ ID NO: 81861 - DNA, 120 bp, synthetic construct; identical to SEQ ID NO: 51907
  source 1..120: mol_type = other DNA

SEQ ID NO: 81862 - DNA, 120 bp, synthetic construct; identical to SEQ ID NO: 51908
  source 1..120: mol_type = other DNA

SEQ ID NO: 81863 - DNA, 120 bp, synthetic construct; identical to SEQ ID NO: 14446
  source 1..120: mol_type = other DNA

SEQ ID NO: 81864 - DNA, 120 bp, synthetic construct; identical to SEQ ID NO: 51910
  source 1..120: mol_type = other DNA

SEQ ID NO: 81865 - DNA, 120 bp, synthetic construct; identical to SEQ ID NO: 51911
  source 1..120: mol_type = other DNA

SEQ ID NO: 81866 - DNA, 120 bp, synthetic construct; identical to SEQ ID NO: 51912
  source 1..120: mol_type = other DNA

SEQ ID NO: 81867 - DNA, 120 bp, synthetic construct; identical to SEQ ID NO: 14447
  source 1..120: mol_type = other DNA

SEQ ID NO: 81868 - DNA, 120 bp, synthetic construct; identical to SEQ ID NO: 51914
  source 1..120: mol_type = other DNA

SEQ ID NO: 81869 - DNA, 120 bp, synthetic construct; identical to SEQ ID NO: 51915
  source 1..120: mol_type = other DNA

SEQ ID NO: 81870 - DNA, 120 bp, synthetic construct; identical to SEQ ID NO: 51916
  source 1..120: mol_type = other DNA

SEQ ID NO: 81871 - DNA, 120 bp, synthetic construct; identical to SEQ ID NO: 14448
  source 1..120: mol_type = other DNA

SEQ ID NO: 81872 - DNA, 120 bp, synthetic construct; identical to SEQ ID NO: 51918
  source 1..120: mol_type = other DNA

SEQ ID NO: 81873 - DNA, 120 bp, synthetic construct; identical to SEQ ID NO: 51919
  source 1..120: mol_type = other DNA

SEQ ID NO: 81874 - DNA, 120 bp, synthetic construct; identical to SEQ ID NO: 51920
  source 1..120: mol_type = other DNA

SEQ ID NO: 81875 - DNA, 120 bp, synthetic construct; identical to SEQ ID NO: 51921
  source 1..120: mol_type = other DNA

SEQ ID NO: 81876 - DNA, 120 bp, synthetic construct; identical to SEQ ID NO: 14449
  source 1..120: mol_type = other DNA

SEQ ID NO: 81877 - DNA, 120 bp, synthetic construct; identical to SEQ ID NO: 51923
  source 1..120: mol_type = other DNA

SEQ ID NO: 81878 - DNA, 80 bp, synthetic construct; identical to SEQ ID NO: 14450
  source 1..80: mol_type = other DNA

SEQ ID NO: 81879 - DNA, 80 bp, synthetic construct
  source 1..80: mol_type = other DNA
gaggggcaatgatctgtcagtcaagatgaaaaagaatggtcattaatgtcatcattagtgcagtcgttagtgcggtagga

SEQ ID NO: 81880 - DNA, 80 bp, synthetic construct
  source 1..80: mol_type = other DNA
taattgtgtcatgttcttggcaggaccgccagagggagccatggatttagaaattcttcagtaagcacattcgtttttct

SEQ ID NO: 81881 - DNA, 80 bp, synthetic construct
  source 1..80: mol_type = other DNA
tcaaaggagaagttttaattgtgctaggacttagtatacaaatgtgtttccacgtggtgaagtgaactaccacttttcac

SEQ ID NO: 81882 - DNA, 80 bp, synthetic construct
  source 1..80: mol_type = other DNA
gcatgctcatgtttcttaaataaatgaatggtttaggcacagagaacagtgaaaactggctaaccagtttaatctttatc

SEQ ID NO: 81883 - DNA, 80 bp, synthetic construct; identical to SEQ ID NO: 14451
  source 1..80: mol_type = other DNA

SEQ ID NO: 81884 - DNA, 80 bp, synthetic construct
  source 1..80: mol_type = other DNA
tggtaggaggtgtttggatcacgtgggtggatctctcatgaatggcttaggacatctccttggtgataagtgagctcttc

SEQ ID NO: 81885 - DNA, 80 bp, synthetic construct
  source 1..80: mol_type = other DNA
atgattcgaagctttctgagactgaggcctccccagaagctgatgctagagctatgcttcctgtacagcctgctgaactg

SEQ ID NO: 81886 - DNA, 80 bp, synthetic construct
  source 1..80: mol_type = other DNA
catttttgccaaatgttatcatcttattgtcctaggtttttcttggttctctatactatctcattacatcggggcccaga

SEQ ID NO: 81887 - DNA, 80 bp, synthetic construct; identical to SEQ ID NO: 14452
  source 1..80: mol_type = other DNA

SEQ ID NO: 81888 - DNA, 80 bp, synthetic construct
  source 1..80: mol_type = other DNA
taatttgtttaaatacccacgtgtgtgaactgcactagaattgcccctctacttcctgtgacatgggtcagagggtccca

SEQ ID NO: 81889 - DNA, 80 bp, synthetic construct
  source 1..80: mol_type = other DNA
actgagcttggtcatcctagagtcattctgtgcttttgagcacctgtaccaaaagatgtgctagacagaggaatgaggat

SEQ ID NO: 81890 - DNA, 80 bp, synthetic construct
  source 1..80: mol_type = other DNA
aaaacaacaaaatgcatattttaaagagagatgagcatgtggggagctctgttgactttgactgcagctactgaaagtag

SEQ ID NO: 81891 - DNA, 80 bp, synthetic construct; identical to SEQ ID NO: 14453
  source 1..80: mol_type = other DNA

SEQ ID NO: 81892 - DNA, 80 bp, synthetic construct
  source 1..80: mol_type = other DNA
attgttagcatagaggtccttcctgatgtcaatatcacacttcatgatgctgttgtaggtggtttcatggatgccagcag

SEQ ID NO: 81893 - DNA, 80 bp, synthetic construct
  source 1..80: mol_type = other DNA
gacataataatctaggaaccacctgtctgagagacaaaagggtcttgttatgctctatgtcttcctgcctgccttctaat

SEQ ID NO: 81894 - DNA, 80 bp, synthetic construct
  source 1..80: mol_type = other DNA
caggtatcactgattttttaatagactcactactcactccatgtggtttaaataagggatgaagccttccaattccctgc

SEQ ID NO: 81895 - DNA, 80 bp, synthetic construct
  source 1..80: mol_type = other DNA
tccaatcttgctaacattttttttgggtgggggtgggggtctggacttttgttaatttctgacgcaggtgttttcaaaaa

SEQ ID NO: 81896 - DNA, 80 bp, synthetic construct; identical to SEQ ID NO: 14454
  source 1..80: mol_type = other DNA

SEQ ID NO: 81897 - DNA, 80 bp, synthetic construct
  source 1..80: mol_type = other DNA
ttctcagccttcagcacacccttgctaccctttccgctgtctccaaagcacaggcattatttaattctttcatcatacac

SEQ ID NO: 81898 - DNA, 80 bp, synthetic construct
  source 1..80: mol_type = other DNA
gaaatgcttttggtcttggggcaaccgtcacttgtctccatgttctggaggctggcttgatatggaagaagacaatgact

SEQ ID NO: 81899 - DNA, 80 bp, synthetic construct; identical to SEQ ID NO: 14455
  source 1..80: mol_type = other DNA

SEQ ID NO: 81900 - DNA, 80 bp, synthetic construct
  source 1..80: mol_type = other DNA
cacctctgttcctaggacagtgtctcatgcatagtaggccctcagcatgcattgtctgggaaatgcataacaagaataaa

SEQ ID NO: 81901 - DNA, 80 bp, synthetic construct
  source 1..80: mol_type = other DNA
attgtattttcagttaaccaggatatcttatgctgaatcagctcctcaggggcctcacaattttcaaaaagtctgagatc

SEQ ID NO: 81902 - DNA, 80 bp, synthetic construct
  source 1..80: mol_type = other DNA
cttctgctctctgaagttctaggctattaattatatctgaggctctaggaaccttttagaggcatcttgggattctttgt

SEQ ID NO: 81903 - DNA, 80 bp, synthetic construct; identical to SEQ ID NO: 14456
  source 1..80: mol_type = other DNA

SEQ ID NO: 81904 - DNA, 80 bp, synthetic construct
  source 1..80: mol_type = other DNA
aattattgaatgcttactctatgtcaagtattccacatgcgttcttccatttaatactgataacaatcatgtgatatagg

SEQ ID NO: 81905 - DNA, 80 bp, synthetic construct
  source 1..80: mol_type = other DNA
caccacaccatgccatcttcagtctctgcacaatcttcttctatttgctaatggaggggattaaaaaaagatcaattata

SEQ ID NO: 81906 - DNA, 80 bp, synthetic construct
  source 1..80: mol_type = other DNA
ggccttgccatttgcaaaacttcatcccatcatctccttggatagtgaggatggtcctggaagttactgagcaacacact

SEQ ID NO: 81907 - DNA, 80 bp, synthetic construct
  source 1..80: mol_type = other DNA
ttgtgggtgacaccatctccagagtccagcacgatgcctgggagacaattgggcgtgataagtcaccatggcagctggca

SEQ ID NO: 81908 - DNA, 80 bp, synthetic construct; identical to SEQ ID NO: 14457
  source 1..80: mol_type = other DNA

SEQ ID NO: 81909 - DNA, 80 bp, synthetic construct
  source 1..80: mol_type = other DNA
atacatggctgggacattgaaagtctcaaacataatctgcaaagcaatccaaagagctgagttagtgaaggtgcccatct

SEQ ID NO: 81910 - DNA, 80 bp, synthetic construct; identical to SEQ ID NO: 14458
  source 1..80: mol_type = other DNA

SEQ ID NO: 81911 - DNA, 80 bp, synthetic construct
  source 1..80: mol_type = other DNA
ccatttctgtgatttgtctgaggttctatttaatctattccacttttttatgtagttactgggtcaatgctaaccctaga

SEQ ID NO: 81912 - DNA, 80 bp, synthetic construct
  source 1..80: mol_type = other DNA
gtgcatcaggagatgtccgtgggtcttcatttctccatctgtaagacccttcctactctattaaccagaatgtctgacat

SEQ ID NO: 81913 - DNA, 80 bp, synthetic construct
  source 1..80: mol_type = other DNA
caagcaccaggagctcttctgaggaaaaggccttgcagttatttacatttatgattcttcaatgctggaagatcgtggat

SEQ ID NO: 81914 - DNA, 80 bp, synthetic construct; identical to SEQ ID NO: 14459
  source 1..80: mol_type = other DNA

SEQ ID NO: 81915 - DNA, 80 bp, synthetic construct
  source 1..80: mol_type = other DNA
ttggatgtttattaggaaccatgatacacatctgtcatttcacctcattaatgttcacatcaatccttggaaaaatgata

SEQ ID NO: 81916 - DNA, 80 bp, synthetic construct
  source 1..80: mol_type = other DNA
ttgaagtgacttctccttagacattataacttaaacgtggccccttctcagtgaaatcttttaaatttcctattgctttt

SEQ ID NO: 81917 - DNA, 80 bp, synthetic construct
  source 1..80: mol_type = other DNA
tccccagaccccacagtgttgtgtgctggggtagcatacttacttgagtcattttctcccggttggccttggggttcagg

SEQ ID NO: 81918 - DNA, 80 bp, synthetic construct
  source 1..80: mol_type = other DNA
aaaccaagaccaaaggaaatgctacaagtactcatgcatgtgtccatggttttatagatgcagagactgaagctcaaagt

SEQ ID NO: 81919 - DNA, 80 bp, synthetic construct; identical to SEQ ID NO: 14460
  source 1..80: mol_type = other DNA

SEQ ID NO: 81920 - DNA, 80 bp, synthetic construct
  source 1..80: mol_type = other DNA
gaatgtatatatgaataaatgacgcttacttgaaaacctaattgacacttttaatgcttctagagaagttgccctttgca

SEQ ID NO: 81921 - DNA, 80 bp, synthetic construct
  source 1..80: mol_type = other DNA
atttggccttcaggtgtttccaaaaggcccacgcctgtgtatagtgtgtctatgtgaaggtactttggacataactacat

SEQ ID NO: 81922 - DNA, 80 bp, synthetic construct
  source 1..80: mol_type = other DNA
ctggtgaaagcttacaaattagcaaaaccaagattagctttaaagactatcttattccactttcttttgttttggatttg

SEQ ID NO: 81923 - DNA, 80 bp, synthetic construct; identical to SEQ ID NO: 14461
  source 1..80: mol_type = other DNA

SEQ ID NO: 81924 - DNA, 80 bp, synthetic construct
  source 1..80: mol_type = other DNA
tcttttaagtgataaattgtgtgcgtagtagtagtagtgagccgatagataaataaaaggccagatatcgtgattctgat

SEQ ID NO: 81925 - DNA, 80 bp, synthetic construct
  source 1..80: mol_type = other DNA
atttatcatatagcttttttcagtggctcttgtgcttcagtgtgtggagaggcattcagaaatgtaccaaacctgcaatg

SEQ ID NO: 81926 - DNA, 80 bp, synthetic construct
  source 1..80: mol_type = other DNA
gatgaaaatgaaaggagggttttcattctctgagctgctgctcatgcactgcttgtcctaggagggcaacagagttgacg

SEQ ID NO: 81927 - DNA, 80 bp, synthetic construct; identical to SEQ ID NO: 14462
  source 1..80: mol_type = other DNA

SEQ ID NO: 81928 - DNA, 80 bp, synthetic construct
  source 1..80: mol_type = other DNA
gcaggatttttttcttcttttttttgagataggatctcactctgtcacctaggctggagtaggatcttggcccactgcag

SEQ ID NO: 81929 - DNA, 80 bp, synthetic construct
  source 1..80: mol_type = other DNA
ctcccaccttggcctcccaaagtgttgggattacacgtgtgagcaaccatgcctggcaagggatttttttttaaagaaac

SEQ ID NO: 81930 - DNA, 80 bp, synthetic construct
  source 1..80: mol_type = other DNA
taatgctattcctccccctccccccaccccacaacagtccccggtgtgtgatgttccccttcctgtgtccatgtgttctc

SEQ ID NO: 81931 - DNA, 80 bp, synthetic construct; identical to SEQ ID NO: 14463
  source 1..80: mol_type = other DNA

SEQ ID NO: 81932 - DNA, 80 bp, synthetic construct
  source 1..80: mol_type = other DNA
ggttcaacacattatgagtcagcatctcccaaaacttgtgaatcaattacagccaagccacaaaaggttaagtcattgag

SEQ ID NO: 81933 - DNA, 80 bp, synthetic construct
  source 1..80: mol_type = other DNA
tctcctatgttccttgatgagcttttttagggcagagatcatgtctgtcttgtccatcactatagcaaattgcatggcac

SEQ ID NO: 81934 - DNA, 80 bp, synthetic construct
  source 1..80: mol_type = other DNA
cattgcatctacaaataaccacttgaggcttgatttctaatggataagttcataccaatcaactgttaagacatttgcct

SEQ ID NO: 81935 - DNA, 80 bp, synthetic construct; identical to SEQ ID NO: 14464
  source 1..80: mol_type = other DNA

SEQ ID NO: 81936 - DNA, 80 bp, synthetic construct
  source 1..80: mol_type = other DNA
gtatcgatgcttgctttcatctaacatcagccctgtatggttaagtgacctggacttttattttagtttctttccaaaca

SEQ ID NO: 81937 - DNA, 80 bp, synthetic construct
  source 1..80: mol_type = other DNA
cattatatgtgaaattggcatttactcctggaccttaatcattagaggtctatttgtaacaaggttacataacttctggg

SEQ ID NO: 81938 - DNA, 80 bp, synthetic construct
  source 1..80: mol_type = other DNA
acagagcccagagccattgtcacacaccaaggcagtgctgtcctcttcttcacacatagctggagctgcttcacaggatt

SEQ ID NO: 81939 - DNA, 80 bp, synthetic construct; identical to SEQ ID NO: 14465
  source 1..80: mol_type = other DNA

SEQ ID NO: 81940 - DNA, 80 bp, synthetic construct
  source 1..80: mol_type = other DNA
aagttgcctaccttatgttaaagaagcatctagattttcctgtctgtatcaacccaaatgcacatttttctagatatgct

SEQ ID NO: 81941 - DNA, 80 bp, synthetic construct
  source 1..80: mol_type = other DNA
gagaaggtgctttaaattttaggggctgcaattatccaccgttaataaaagtcactgttaagctaacagtccaacaagtg

SEQ ID NO: 81942 - DNA, 80 bp, synthetic construct
  source 1..80: mol_type = other DNA
aaaaagattaatcatatttaccaagatgttgactgaggttattatgaagtggtgggttttataggtgtttttaattattt

SEQ ID NO: 81943 - DNA, 80 bp, synthetic construct
  source 1..80: mol_type = other DNA
aattagaaaggctggagcagcctatcaacttacaaatttgagaaattgaaggcatattagaggacattttcatccaatgc

SEQ ID NO: 81944 - DNA, 80 bp, synthetic construct; identical to SEQ ID NO: 14466
  source 1..80: mol_type = other DNA

SEQ ID NO: 81945 - DNA, 80 bp, synthetic construct
  source 1..80: mol_type = other DNA
acttccttagcagtgcttcatgtaaaataactctttgcaaagaacataaaactgcaattgagatgacatattttaaagtc

SEQ ID NO: 81946 - DNA, 80 bp, synthetic construct
  source 1..80: mol_type = other DNA
ccaggctccaacagttaaaagctgtgtgatttcagttatttaacatctctaaaccacaatttccttactataaaacagta

SEQ ID NO: 81947 - DNA, 80 bp, synthetic construct
  source 1..80: mol_type = other DNA
ctctttgtttctaacctttgctttctttccacactgctccaggcttagaataaaaataatcaacgtgtggattccacttg

SEQ ID NO: 81948 - DNA, 80 bp, synthetic construct; identical to SEQ ID NO: 14467
  source 1..80: mol_type = other DNA

SEQ ID NO: 81949 - DNA, 80 bp, synthetic construct
  source 1..80: mol_type = other DNA
ggtatggttaccatgaatgctgggatatttttaataactgttttgttgggcagtgatggcttgggaggaggggttgacta

SEQ ID NO: 81950 - DNA, 80 bp, synthetic construct
  source 1..80: mol_type = other DNA
gagtcagctcagtggtttacagctcctctctaacctgaatgagcagttcggtttggagcaaagcatttcctaattaggta

SEQ ID NO: 81951 - DNA, 80 bp, synthetic construct; identical to SEQ ID NO: 14468
  source 1..80: mol_type = other DNA

SEQ ID NO: 81952 - DNA, 80 bp, synthetic construct
  source 1..80: mol_type = other DNA
ttcagcaggtcacctgctgcgctctgctgcaaatgaccaatgatgtagatccaaacttgtaaggtcacacatacacattt

SEQ ID NO: 81953 - DNA, 80 bp, synthetic construct
  source 1..80: mol_type = other DNA
atacagcccagtgaaagaaaacccctacaacaaatcagaaccagaaagaaatctgagtttccagtgcctaaatacaaata

SEQ ID NO: 81954 - DNA, 80 bp, synthetic construct
  source 1..80: mol_type = other DNA
tttagtagtacaatcttcattcagaaatatcagtgcatgaacccagccaaatccctgcagatgatgtcttattataccgg

SEQ ID NO: 81955 - DNA, 80 bp, synthetic construct; identical to SEQ ID NO: 14469
  source 1..80: mol_type = other DNA

SEQ ID NO: 81956 - DNA, 80 bp, synthetic construct
  source 1..80: mol_type = other DNA
caggcatggtttgcacattccacagaggatgccagcttgctatcatgctggaatttcaggccatttcctaataaactgag

SEQ ID NO: 81957 - DNA, 80 bp, synthetic construct
  source 1..80: mol_type = other DNA
gatgattttatggtaggcacactgtttataaatcaagttcttgagggaggtgagtggaaataggaattgaagtatggaga

SEQ ID NO: 81958 - DNA, 80 bp, synthetic construct
  source 1..80: mol_type = other DNA
agcctgtcaaagaagtagtttggaaaagaaaggagattgttcaaaggaagcctctgtagccctcctctctgcccactaac

SEQ ID NO: 81959 - DNA, 80 bp, synthetic construct
  source 1..80: mol_type = other DNA
aaagtgagtgagttctcacgatatctgatggttttataaggcagttttccctgctcttgcttgctctctctcgcctgctg

SEQ ID NO: 81960 - DNA, 80 bp, synthetic construct; identical to SEQ ID NO: 14470
  source 1..80: mol_type = other DNA

SEQ ID NO: 81961 - DNA, 80 bp, synthetic construct
  source 1..80: mol_type = other DNA
caaaatgagtggctttattttacagccatgaccagctgttcactcatgttactatgtcagatctgtttgattaatggtgc

SEQ ID NO: 81962 - DNA, 80 bp, synthetic construct
  source 1..80: mol_type = other DNA
taccaaccagaaaacacggccattagaatgttaaaatataaaatctacacagtacaacataaagttgggcatttggggtt

SEQ ID NO: 81963 - DNA, 80 bp, synthetic construct
  source 1..80: mol_type = other DNA
taaacaccaaagagaagagtttttgcattcacttttatgattcttacatcatttctaccattagtgtacatccaaagctc

SEQ ID NO: 81964 - DNA, 80 bp, synthetic construct; identical to SEQ ID NO: 14471
  source 1..80: mol_type = other DNA

SEQ ID NO: 81965 - DNA, 80 bp, synthetic construct
  source 1..80: mol_type = other DNA
cttggttgcagttcagggacactataaaataaattccaagctaaagaacatatccaacaatcatttccagacacgttgtt

SEQ ID NO: 81966 - DNA, 80 bp, synthetic construct
  source 1..80: mol_type = other DNA
tggtgccgaaaaattgggctgtagaaattgtttttttctagactgatcatatgcattggctattttgttcagttcataaa

SEQ ID NO: 81967 - DNA, 80 bp, synthetic construct
  source 1..80: mol_type = other DNA
ggatttgccaggctctgctctgttcctcatttgagcataattaatattctttatgggaaatttgactggacactttctat

SEQ ID NO: 81968 - DNA, 80 bp, synthetic construct; identical to SEQ ID NO: 14472
  source 1..80: mol_type = other DNA

SEQ ID NO: 81969 - DNA, 80 bp, synthetic construct
  source 1..80: mol_type = other DNA
agctattattattgtcggatgctccataatgaggaagttagttctagaggtgagacagacactttttcagacaaaagtgc

SEQ ID NO: 81970 - DNA, 80 bp, synthetic construct
  source 1..80: mol_type = other DNA
caaggcattccttctggaagctcttgtgggggtctatgtctttgtattttctagtctctagagtccacttgactcatggc

SEQ ID NO: 81971 - DNA, 80 bp, synthetic construct
  source 1..80: mol_type = other DNA
tttaatcatatctgcaaagtcaccattttgtgtgtaaggtaacatatccacaggtttaggggattagtaggtgaacatct

SEQ ID NO: 81972 - DNA, 80 bp, synthetic construct; identical to SEQ ID NO: 14473
  source 1..80: mol_type = other DNA

SEQ ID NO: 81973 - DNA, 80 bp, synthetic construct
  source 1..80: mol_type = other DNA
cattaatccattcatggaggtggagcccttatcaattaaacacctcccattaggcctcatctctcaacactgttgcccta

SEQ ID NO: 81974 - DNA, 80 bp, synthetic construct
  source 1..80: mol_type = other DNA
tgtatcactcctttatgcttttcagaatgtctagataatgtaatgtatttataagattcacgaggcaccttcaagaactt

SEQ ID NO: 81975 - DNA, 80 bp, synthetic construct
  source 1..80: mol_type = other DNA
gatgttttaaattcctggaaaagaaggaaaatacctattactcctttgtcaattgcacttacattttttcctgcctctcc

SEQ ID NO: 81976 - DNA, 80 bp, synthetic construct; identical to SEQ ID NO: 14474
  source 1..80: mol_type = other DNA

SEQ ID NO: 81977 - DNA, 80 bp, synthetic construct
  source 1..80: mol_type = other DNA
tctcctgcctcagcctcccaagtagctggaattacaggcacctgccactgtgcctggctaatttttgtatttttagtaga

SEQ ID NO: 81978 - DNA, 80 bp, synthetic construct
  source 1..80: mol_type = other DNA
aattttggttaagggtgcctcctctgtttatccatactactttgtgtttgcctctctcgtagcactcactatattgttct

SEQ ID NO: 81979 - DNA, 80 bp, synthetic construct; identical to SEQ ID NO: 14475
  source 1..80: mol_type = other DNA

SEQ ID NO: 81980 - DNA, 80 bp, synthetic construct
  source 1..80: mol_type = other DNA
gacccatctgacaccagaaattgagttcaagcacatgcacagaggtgtgggtagtggcctgtatgtcaggctccacccag

SEQ ID NO: 81981 - DNA, 80 bp, synthetic construct
  source 1..80: mol_type = other DNA
ctgccccagcttcctagtgattgaagctctccttcacaaaagactttggatctacaggatgaccaaggttcctggtgtac

SEQ ID NO: 81982 - DNA, 80 bp, synthetic construct
  source 1..80: mol_type = other DNA
cctttggagaagaccacaaacaagccatttataccaatggtattgaccagcgttgtccaacagaacttattgcaatgacg

SEQ ID NO: 81983 - DNA, 80 bp, synthetic construct; identical to SEQ ID NO: 14476
  source 1..80: mol_type = other DNA

SEQ ID NO: 81984 - DNA, 80 bp, synthetic construct
  source 1..80: mol_type = other DNA
ctttccccttaaaaacacctcctaaattacaatccctggagaagaccttagagtcaattttccaaaataaacttttcata

SEQ ID NO: 81985 - DNA, 80 bp, synthetic construct
  source 1..80: mol_type = other DNA
cctcagcttttacttaatgttccttttttgttcaaggataccatgctgcatttaagtcaagtctctttagccatgtcctc

SEQ ID NO: 81986 - DNA, 80 bp, synthetic construct
  source 1..80: mol_type = other DNA
gattagactgaaatcacatgtttttgagaaaaagaccctagaggtaagttgctattctcatcccttgatatcaagacaag

SEQ ID NO: 81987 - DNA, 80 bp, synthetic construct
  source 1..80: mol_type = other DNA
tagtagttactaagtacagcacacacttaaagaatggggagttacacttcacccccttgaggacagagtatttatataaa

SEQ ID NO: 81988 - DNA, 80 bp, synthetic construct; identical to SEQ ID NO: 14477
  source 1..80: mol_type = other DNA

SEQ ID NO: 81989 - DNA, 80 bp, synthetic construct
  source 1..80: mol_type = other DNA
atagcgaccaagaggcattccctaaagaagacaaaatatcagtggtatcaggtagagaaatagggaactggtggcccgaa

SEQ ID NO: 81990 - DNA, 80 bp, synthetic construct
  source 1..80: mol_type = other DNA
ttgtcactagtggattccttgaactagtaacaaagctatcttaccaaggggaaattgttttactattgctgcttataagc

SEQ ID NO: 81991 - DNA, 80 bp, synthetic construct
  source 1..80: mol_type = other DNA
cacacccaggagcagctctgagtaactgagaatgcttagtcagaagtgaggactatggggagacacttaatgcactgaag

SEQ ID NO: 81992 - DNA, 80 bp, synthetic construct; identical to SEQ ID NO: 14478
  source 1..80: mol_type = other DNA

SEQ ID NO: 81993 - DNA, 80 bp, synthetic construct
  source 1..80: mol_type = other DNA
cttagaagagtgtgatgcttttcttaaactggctgatttatacacatcagaggaagacataacttaggcaagaatagcca

SEQ ID NO: 81994 - DNA, 80 bp, synthetic construct
  source 1..80: mol_type = other DNA
ctgacattctatgcagtcttccctttgtccttattctctgatggtgtttgctaggtttcaatgaaaaggtactaggcttt

SEQ ID NO: 81995 - DNA, 80 bp, synthetic construct; identical to SEQ ID NO: 14479
  source 1..80: mol_type = other DNA

SEQ ID NO: 81996 - DNA, 80 bp, synthetic construct
  source 1..80: mol_type = other DNA
aaatcaatgtttgctgtgggtcttcagtttgtaaattctgatctacaaacaataaccaatccaatcacagctccagtgct

SEQ ID NO: 81997 - DNA, 80 bp, synthetic construct
  source 1..80: mol_type = other DNA
ttagatgtggttctgtaagttttgcttaggaaggaagtagtaacaaaagctcttggctaattgtctttggtgacaaatac

SEQ ID NO: 81998 - DNA, 80 bp, synthetic construct
  source 1..80: mol_type = other DNA
cataacctgagactgggtaacttataaaggaaagaggtttaatggactcacagttccacatggctgaggaggcctcacaa

SEQ ID NO: 81999 - DNA, 80 bp, synthetic construct; identical to SEQ ID NO: 14480
  source 1..80: mol_type = other DNA

SEQ ID NO: 82000 - DNA, 80 bp, synthetic construct
  source 1..80: mol_type = other DNA
tgggaagcttttgagcagcataggtttggagcaaatgcctactaatgtcttagtgtaaatttatttccagagattctcag

SEQ ID NO: 82001 - DNA, 80 bp, synthetic construct
  source 1..80: mol_type = other DNA
ttttttacactcaccttattttatttagtcaagacattttttgtccctctcctagaggtcactctgggaagttcagcagt

SEQ ID NO: 82002 - DNA, 80 bp, synthetic construct
  source 1..80: mol_type = other DNA
gagttgacaagcttgggcattaccattttgggtcaaaaaagaagtaggttctggagtaatcaaactaatatccgtgtttg

SEQ ID NO: 82003 - DNA, 80 bp, synthetic construct; identical to SEQ ID NO: 14481
  source 1..80: mol_type = other DNA

SEQ ID NO: 82004 - DNA, 80 bp, synthetic construct
  source 1..80: mol_type = other DNA
atattttgcattgtatgggaggaaaaaagaattctctctctattcttccgaattcttatctggaacccctgcaaaaaaag

SEQ ID NO: 82005 - DNA, 80 bp, synthetic construct
  source 1..80: mol_type = other DNA
aagacaaggggaaaggatcttgagtttctaggggtggcaaattgtgggaaaacaaatacatgggaaactaatgatagaca

SEQ ID NO: 82006 - DNA, 80 bp, synthetic construct
  source 1..80: mol_type = other DNA
cacctttataagtgtatgtcctgcttttaagcaaataggggtagggcagagagattttttgtatctacttctcgattgct

SEQ ID NO: 82007 - DNA, 80 bp, synthetic construct; identical to SEQ ID NO: 14482
  source 1..80: mol_type = other DNA

SEQ ID NO: 82008 - DNA, 80 bp, synthetic construct
  source 1..80: mol_type = other DNA
ccttttcttcttctgccaaatcatgtttctgccttattttaaaagtctactcaaaattcatctacagcaaaccttcttag

SEQ ID NO: 82009 - DNA, 80 bp, synthetic construct
  source 1..80: mol_type = other DNA
ccctgcccttctacatatagtagaaactcaggaatttggttaagcaactttctattttccccaaaccttaaaagagctgt

SEQ ID NO: 82010 - DNA, 80 bp, synthetic construct
  source 1..80: mol_type = other DNA
atttcaggattattataacataaaagccttgccctattttccttaagcagcacgcggctgcctagtgtacttgccttagg

SEQ ID NO: 82011 - DNA, 80 bp, synthetic construct; identical to SEQ ID NO: 14483
  source 1..80: mol_type = other DNA

SEQ ID NO: 82012 - DNA, 80 bp, synthetic construct
  source 1..80: mol_type = other DNA
agtttcctaaagcatggcctgaatttacggaaccatggtcaacagaatcacttgggcaatttgttaaaatgtattaggtt

SEQ ID NO: 82013 - DNA, 80 bp, synthetic construct
  source 1..80: mol_type = other DNA
acagaagcacttggacagagggtaagaagggaatgtgatactgaagtctcaaaaatacagaagaatagtaaggaatgatc

SEQ ID NO: 82014 - DNA, 80 bp, synthetic construct
  source 1..80: mol_type = other DNA
gctttgaagagttcactaagccctttggccctcattttgtaatctataagtgtgtgggcctattattttaatatcctgtc

SEQ ID NO: 82015 - DNA, 80 bp, synthetic construct
  source 1..80: mol_type = other DNA
aaggaaagcatgacttagacagagtgcctaaaattctgtcccgggaaccatgatctcctcatctactggctgtctgtgtt

SEQ ID NO: 82016 - DNA, 80 bp, synthetic construct; identical to SEQ ID NO: 14484
  source 1..80: mol_type = other DNA

SEQ ID NO: 82017 - DNA, 80 bp, synthetic construct
  source 1..80: mol_type = other DNA
aaagtgaacaggaagagaccctcgagatatctttggatgcatcaagaattttaaaagctgcaacttggaattcaaagcat

SEQ ID NO: 82018 - DNA, 80 bp, synthetic construct
  source 1..80: mol_type = other DNA
tctggaggtaggttggattcatatcccagttttcaacaatttattttgagtcccttggcaaatcatctagcatctcacct

SEQ ID NO: 82019 - DNA, 80 bp, synthetic construct; identical to SEQ ID NO: 14485
  source 1..80: mol_type = other DNA

SEQ ID NO: 82020 - DNA, 80 bp, synthetic construct
  source 1..80: mol_type = other DNA
ccagaactcatttcaatcatccctaaatttaaaacaggaaaatggttggcaaagttgttccctttcttcctctggagaaa

SEQ ID NO: 82021 - DNA, 80 bp, synthetic construct
  source 1..80: mol_type = other DNA
agagttttctacttgtgaccttaaggtgtgttgtcatggtcttgacatttctgcagaagtaaactattcaattcagtagt

SEQ ID NO: 82022 - DNA, 80 bp, synthetic construct
  source 1..80: mol_type = other DNA
tctatgcatttaatgaatgttcttattttgtagccagcatatgtaatacaggtgattcctttcagcgatgggagctggac

SEQ ID NO: 82023 - DNA, 80 bp, synthetic construct
  source 1..80: mol_type = other DNA
ggcacagtgcattttgcacacatgtttgtcggtagagtacttttttggtagagaggaagagaaaattctggcttctttag

SEQ ID NO: 82024 - DNA, 80 bp, synthetic construct; identical to SEQ ID NO: 14486
  source 1..80: mol_type = other DNA

SEQ ID NO: 82025 - DNA, 80 bp, synthetic construct
  source 1..80: mol_type = other DNA
acagagatgaaaaatgtgtttaggtagaagatcctcctaaataagaaggaagggtctggaaagctgttatctgggttgta

SEQ ID NO: 82026 - DNA, 80 bp, synthetic construct
  source 1..80: mol_type = other DNA
ggaacacattgttattcccataggatcagcatagatttccgtaatgtccaaattaccttgccatttctttcatttcccaa

SEQ ID NO: 82027 - DNA, 80 bp, synthetic construct; identical to SEQ ID NO: 14487
  source 1..80: mol_type = other DNA

SEQ ID NO: 82028 - DNA, 80 bp, synthetic construct
  source 1..80: mol_type = other DNA
tatgtttgcagcatcaagatcacttttttttttggctggtttactcctactcaaattgtttctggctctctgggatgacc

SEQ ID NO: 82029 - DNA, 80 bp, synthetic construct
  source 1..80: mol_type = other DNA
catttgatacaattatttcattcgtatacatcttcctcaccagcctagggaagggacactgattgttcaccatcatatcc

SEQ ID NO: 82030 - DNA, 80 bp, synthetic construct
  source 1..80: mol_type = other DNA
aaaaattgctcatggcagacgtcagatgtaaccacactgataactggaaagaaaaatgaatttagatgggttttagagat

SEQ ID NO: 82031 - DNA, 80 bp, synthetic construct
  source 1..80: mol_type = other DNA
tctttggacgtttccatctcaagaaacagctcttcaatctctcccttgtattccaccttccagaaccacccagaaattcc

SEQ ID NO: 82032 - DNA, 80 bp, synthetic construct; identical to SEQ ID NO: 14488
  source 1..80: mol_type = other DNA

SEQ ID NO: 82033 - DNA, 80 bp, synthetic construct
  source 1..80: mol_type = other DNA
tgttgtggggtggggagagcggggagggatagcattaggagatatacctaatgtaaatgacaagttaatgggtacagcac

SEQ ID NO: 82034 - DNA, 80 bp, synthetic construct
  source 1..80: mol_type = other DNA
tccccacttaatatttatacatccaaaaactgacaaaaataatgtctgaactcatgtctgacattcagattcctccgccc

SEQ ID NO: 82035 - DNA, 80 bp, synthetic construct
  source 1..80: mol_type = other DNA
agcatttgagctggaaaaggcagatatttttcttgacctcacttttcctaaagttcacaacttctgctacttaaatgagt

SEQ ID NO: 82036 - DNA, 80 bp, synthetic construct; identical to SEQ ID NO: 14489
  source 1..80: mol_type = other DNA

SEQ ID NO: 82037 - DNA, 80 bp, synthetic construct
  source 1..80: mol_type = other DNA
tcttttgctgctcttttttgttgctatctttttgtaactaataggacacgtgtaagactataatacaaacaggagtccta

SEQ ID NO: 82038 - DNA, 80 bp, synthetic construct
  source 1..80: mol_type = other DNA
ctacagtttgcctaacagtttatttaagccaaatttatagtttctgaagcgctagaaggctgctgtccaaggggactact

SEQ ID NO: 82039 - DNA, 80 bp, synthetic construct
  source 1..80: mol_type = other DNA
aatttttgtatttttagtagagacagggtttcaccatgttggccaggatggtctcaatctcttgaccttgtgatccaccc

SEQ ID NO: 82040 - DNA, 80 bp, synthetic construct; identical to SEQ ID NO: 14490
  source 1..80: mol_type = other DNA

SEQ ID NO: 82041 - DNA, 80 bp, synthetic construct
  source 1..80: mol_type = other DNA
tgttctttgatctatttttattttttgccttttttgttgttctctttcttctctcctgccttcttttatattgtttaatt

SEQ ID NO: 82042 - DNA, 80 bp, synthetic construct
  source 1..80: mol_type = other DNA
tacccttgttcatcccattataatgtatattataagcctcatacaatggtatgatttttactttttctctgcgttgtttc

SEQ ID NO: 82043 - DNA, 80 bp, synthetic construct
  source 1..80: mol_type = other DNA
tgtgtttatatgtgagggccaatctattgaaaagaaacactgcagaatactaaagcaaaattgaaaccatttagagtttg

SEQ ID NO: 82044 - DNA, 80 bp, synthetic construct; identical to SEQ ID NO: 14491
  source 1..80: mol_type = other DNA

SEQ ID NO: 82045 - DNA, 80 bp, synthetic construct
  source 1..80: mol_type = other DNA
tctgcctttcctttctaaagaaaaacacgtcatttcatcttgattatcagtttctcaagtactcatggatgtgaggccag

SEQ ID NO: 82046 - DNA, 80 bp, synthetic construct
  source 1..80: mol_type = other DNA
taacacccatattcatttctgctactgaaccaaagccttttccaaaaaaatcatctagcaaactgtttttgccaggccaa

SEQ ID NO: 82047 - DNA, 80 bp, synthetic construct
  source 1..80: mol_type = other DNA
gcctcagcctcccgagtagcgaggactacaggcgtgcaccaccacgcccagctaatttttgtatttttagtagagatggg

SEQ ID NO: 82048 - DNA, 80 bp, synthetic construct; identical to SEQ ID NO: 14492
  source 1..80: mol_type = other DNA

SEQ ID NO: 82049 - DNA, 80 bp, synthetic construct
  source 1..80: mol_type = other DNA
aactaaattcctacccaattagttgaaaaatatgaaaaaagcaattgctagagaatgcaatttattaaatgttggtggtc

SEQ ID NO: 82050 - DNA, 80 bp, synthetic construct
  source 1..80: mol_type = other DNA
gagccaccatgcctggctagttaatggttattaagtaatacaaacatttctgtgaattccaccagatcattgactttggc

SEQ ID NO: 82051 - DNA, 80 bp, synthetic construct; identical to SEQ ID NO: 14493
  source 1..80: mol_type = other DNA

SEQ ID NO: 82052 - DNA, 80 bp, synthetic construct
  source 1..80: mol_type = other DNA
aactgttattacaggttgtattagtatcacattaaattacccactgaagtgaaagtgaaaccagaatgctgtcaacgatt

SEQ ID NO: 82053 - DNA, 80 bp, synthetic construct
  source 1..80: mol_type = other DNA
gcagcgtgtgcatttgaatgaggtattagctccatgcagaaaaattagttgagaaggacaatagtactgtcatacttttt

SEQ ID NO: 82054 - DNA, 80 bp, synthetic construct
  source 1..80: mol_type = other DNA
tatcagcaaataaatgtgtgggctctgggcttaggaaaatggggccctgactacttttccactggatcgtaagttccatg

SEQ ID NO: 82055 - DNA, 80 bp, synthetic construct; identical to SEQ ID NO: 14494
  source 1..80: mol_type = other DNA

SEQ ID NO: 82056 - DNA, 80 bp, synthetic construct
  source 1..80: mol_type = other DNA
atcccgattaggacccaaccatacattactattatcaattagttatagtgataatataatgtgtaatacaggggtgtcca

SEQ ID NO: 82057 - DNA, 80 bp, synthetic construct
  source 1..80: mol_type = other DNA
ggacaaggttggtataatagataacatataattaatatattgatattatcacaaatgccagagtaaacaaggggaaacta

SEQ ID NO: 82058 - DNA, 80 bp, synthetic construct
  source 1..80: mol_type = other DNA
atagcaaaaacccacttcctttccactaaattgaaaatgactaacatatctctaatgtaccctgaacataatcagcagca

SEQ ID NO: 82059 - DNA, 80 bp, synthetic construct
  source 1..80: mol_type = other DNA
agaatttcttgaaagtatttttactaaataaaaccaaatgtaaaggtccaggtgctgggtagagttgaagtttgaaaatt

SEQ ID NO: 82060 - DNA, 80 bp, synthetic construct; identical to SEQ ID NO: 14495
  source 1..80: mol_type = other DNA

SEQ ID NO: 82061 - DNA, 80 bp, synthetic construct
  source 1..80: mol_type = other DNA
tgcccatgcctatgtcctgaatggtaatgcctaggttttcttctagggtttttatggttttaggtctaacatttaagtct

SEQ ID NO: 82062 - DNA, 80 bp, synthetic construct; identical to SEQ ID NO: 14496
  source 1..80: mol_type = other DNA

SEQ ID NO: 82063 - DNA, 80 bp, synthetic construct
  source 1..80: mol_type = other DNA
agttagaatggcaatcattaaaaagtcaggaaacaacaggtgctggagaggatgtggagaaataggaacacttttacact

SEQ ID NO: 82064 - DNA, 80 bp, synthetic construct
  source 1..80: mol_type = other DNA
gtttattgcagcattattcacaatagcaaagacttggaaccaacccaaatgtccaacaatgatagactggattaagaaaa

SEQ ID NO: 82065 - DNA, 80 bp, synthetic construct
  source 1..80: mol_type = other DNA
aacaatgagatcacatggacactggaaggggaatatcacactctggggactgttgtggggtggggggaggggggagggat

SEQ ID NO: 82066 - DNA, 80 bp, synthetic construct; identical to SEQ ID NO: 14497
  source 1..80: mol_type = other DNA

SEQ ID NO: 82067 - DNA, 80 bp, synthetic construct
  source 1..80: mol_type = other DNA
aagagagagaaaagattctgttctattgaaagccaatctcaatggaaagaagtgacaaccagtcaggctcatgctgagag

SEQ ID NO: 82068 - DNA, 80 bp, synthetic construct
  source 1..80: mol_type = other DNA
tctaatggtaatttctccaaaaagccttctatgacacctgaagctattagaagcaaccttccttattctttctgtccttg

SEQ ID NO: 82069 - DNA, 80 bp, synthetic construct
  source 1..80: mol_type = other DNA
gttttataaatcagaaaactgaaagctcagaaaacctttttatgtttaaaaacactgtccactgcctgaaacactgaaaa

SEQ ID NO: 82070 - DNA, 80 bp, synthetic construct
  source 1..80: mol_type = other DNA
gggaagaaagtgagtactgagacaaaaaagcagaaaaaaaaaaatgaggtcagcgagtttcccggctctgccgcagggtg

SEQ ID NO: 82071 - DNA, 80 bp, synthetic construct; identical to SEQ ID NO: 14498
  source 1..80: mol_type = other DNA

SEQ ID NO: 82072 - DNA, 80 bp, synthetic construct
  source 1..80: mol_type = other DNA
ctcaattcgatcagaaaaggttacatgtgcttgactgtataatttgctagccatttgtttagtcctgactctctaatcaa

SEQ ID NO: 82073 - DNA, 80 bp, synthetic construct
  source 1..80: mol_type = other DNA
ccaagctatttatggagcttgacagatgcagaaaaaggcaacgctaatttgcaaagtctgtagtttcagaagatggccag

SEQ ID NO: 82074 - DNA, 80 bp, synthetic construct
  source 1..80: mol_type = other DNA
gaacatgagcaggaattaaacataatgcactttaaatgtacaactaagaagtcagggcatgaggtatagatttgaagagc

SEQ ID NO: 82075 - DNA, 80 bp, synthetic construct
  source 1..80: mol_type = other DNA
tgtctggtgagccaaaagagagacgcatttcacaggcaaagagaggccaggcctgatgcttataattactctaatttgtc

SEQ ID NO: 82076 - DNA, 80 bp, synthetic construct; identical to SEQ ID NO: 14499
  source 1..80: mol_type = other DNA

SEQ ID NO: 82077 - DNA, 80 bp, synthetic construct
  source 1..80: mol_type = other DNA
agttctaaatttggaaaggtcacaaagggataaagtgagtcagaggaggctttggtttgccttatatgaaaagtgggatt

SEQ ID NO: 82078 - DNA, 80 bp, synthetic construct
  source 1..80: mol_type = other DNA
agcctccagacctgtgtcctaactcgagctctgccacatactcgctgtgtgcaaattagttaaactcacctaacctatgt

SEQ ID NO: 82079 - DNA, 80 bp, synthetic construct
  source 1..80: mol_type = other DNA
tattaaccatcgggttaagagagaaatgactttttttttttaaagaactggccattgctttatcttccatcgtcgtgatt

SEQ ID NO: 82080 - DNA, 80 bp, synthetic construct; identical to SEQ ID NO: 14500
  source 1..80: mol_type = other DNA

SEQ ID NO: 82081 - DNA, 80 bp, synthetic construct
  source 1..80: mol_type = other DNA
ttcagatgggctttccatgaaaaacagcaatgaggcaaaccgtcccattcactaaaaagacaggcattatcatgatactg

SEQ ID NO: 82082 - DNA, 80 bp, synthetic construct
  source 1..80: mol_type = other DNA
atagtgagtgcttgattaactggtatgtgttagttcaagaaggcagtatgttgttatatgcgagaagcaattgctttggt

SEQ ID NO: 82083 - DNA, 80 bp, synthetic construct
  source 1..80: mol_type = other DNA
ttatgagcattgaatgaaatcatatttataaaacccactaaatggtacctggctcatactaagtgatctaaatgaagagg

SEQ ID NO: 82084 - DNA, 80 bp, synthetic construct; identical to SEQ ID NO: 14501
  source 1..80: mol_type = other DNA

SEQ ID NO: 82085 - DNA, 80 bp, synthetic construct
  source 1..80: mol_type = other DNA
tgtttctgctaagtaaaaattcagcctaagcagtgtaatatgaagctaaatggagactggatacaaatatgtttataatg

SEQ ID NO: 82086 - DNA, 80 bp, synthetic construct
  source 1..80: mol_type = other DNA
gactcttgctacttcatgtgtcctttccagaacgtggcatcaacatcacatgggagctggtgagaaattcataacctcat

SEQ ID NO: 82087 - DNA, 80 bp, synthetic construct
  source 1..80: mol_type = other DNA
ctatgattcttagaggagtgaacataaacagcaaaaattcttacttagcagacttacccagtgcaagaaagagttccctt

SEQ ID NO: 82088 - DNA, 80 bp, synthetic construct; identical to SEQ ID NO: 14502
  source 1..80: mol_type = other DNA

SEQ ID NO: 82089 - DNA, 80 bp, synthetic construct
  source 1..80: mol_type = other DNA
attatataagcattagatattactgatatcttatttttgtttatttttaaatgtctgtccctttaaaccattcctttcaa

SEQ ID NO: 82090 - DNA, 80 bp, synthetic construct
  source 1..80: mol_type = other DNA
atttctccctcagtttactgtgatcagagacttaggctgcctagttatccttgttgcctggacaaaaaactctttagatg

SEQ ID NO: 82091 - DNA, 80 bp, synthetic construct; identical to SEQ ID NO: 14503
  source 1..80: mol_type = other DNA

SEQ ID NO: 82092 - DNA, 80 bp, synthetic construct
  source 1..80: mol_type = other DNA
taaatgatagtagcacactagtgtcatatgtcaagtggcaaatgacactagcaccaaatgtgattctgcatttaagttct

SEQ ID NO: 82093 - DNA, 80 bp, synthetic construct
  source 1..80: mol_type = other DNA
cttatgtttagttattcatgaaaccactgggcctgtctaaatggccaagtcatataggaagagacagagtgaaagggaga

SEQ ID NO: 82094 - DNA, 80 bp, synthetic construct
  source 1..80: mol_type = other DNA
gccaagatgttaggctgcaggcagtgcttatgctctctagcctagtgaggaggaaagcagtataggtaaataaaatgaca

SEQ ID NO: 82095 - DNA, 80 bp, synthetic construct; identical to SEQ ID NO: 14504
  source 1..80: mol_type = other DNA

SEQ ID NO: 82096 - DNA, 80 bp, synthetic construct
  source 1..80: mol_type = other DNA
ttgaactagatgttaataccactattgtattagtcgactaacattgccttctgcagaaaaccacctatgtctcctttcta

SEQ ID NO: 82097 - DNA, 80 bp, synthetic construct
  source 1..80: mol_type = other DNA
tggtaaagagtcccccacccccatcccactccctggcactagatgggcttgggagacaatgactgcccctccctcatgct

SEQ ID NO: 82098 - DNA, 80 bp, synthetic construct
  source 1..80: mol_type = other DNA
gaagtataatgcccttgccactagtagtttgggaaacaatttttattggcatgcaggcaaatattttgtttcaatagtgg

SEQ ID NO: 82099 - DNA, 80 bp, synthetic construct
  source 1..80: mol_type = other DNA
aagtagactacagaaatggcaaaatagattgaagttgaagaaacattgccttaagctaagcccactcaggatgaaatttt

SEQ ID NO: 82100 - DNA, 80 bp, synthetic construct; identical to SEQ ID NO: 14505
  source 1..80: mol_type = other DNA

SEQ ID NO: 82101 - DNA, 80 bp, synthetic construct
  source 1..80: mol_type = other DNA
ttttcttaggcttcaggaatgtgagcatggaagtagtacagaaaggaagtagtacagaaaggaagtaatacaggaaggaa

SEQ ID NO: 82102 - DNA, 80 bp, synthetic construct
  source 1..80: mol_type = other DNA
ctgaactgtgacccccaaattatcaatttgtcttgtgaagtcacttcatttaggaaaagcaatgtaaaagtaaaaattag

SEQ ID NO: 82103 - DNA, 80 bp, synthetic construct; identical to SEQ ID NO: 14506
  source 1..80: mol_type = other DNA

SEQ ID NO: 82104 - DNA, 80 bp, synthetic construct
  source 1..80: mol_type = other DNA
tttatcagttaagattttttcagttgtaagaatctagcttaagcagaaactaagaatttgtagagttgggtaactttggg

SEQ ID NO: 82105 - DNA, 80 bp, synthetic construct
  source 1..80: mol_type = other DNA
catcagtttcacatctcacatatttctacttcaaatccaatgaaaaagaaagggtttgtgtcccagtgtttccagtaaag

SEQ ID NO: 82106 - DNA, 80 bp, synthetic construct
  source 1..80: mol_type = other DNA
cactgtgatggttaattttatgtatcaaattagctaggccatggcacttggctatttagtcaaacactatcttagatgtt

SEQ ID NO: 82107 - DNA, 80 bp, synthetic construct; identical to SEQ ID NO: 14507
  source 1..80: mol_type = other DNA

SEQ ID NO: 82108 - DNA, 80 bp, synthetic construct
  source 1..80: mol_type = other DNA
tattaccagaaggaagaagaaggagaaaggcaggataaacagtcatggatatacactatagctgggagttattaaaatca

SEQ ID NO: 82109 - DNA, 80 bp, synthetic construct
  source 1..80: mol_type = other DNA
caagattcttgtttaagtgttattcagaatgttcagaaaccaggatatcttttgagtagaagctttaacttatatggtat

SEQ ID NO: 82110 - DNA, 80 bp, synthetic construct
  source 1..80: mol_type = other DNA
cccagaacaccagcattcattaggtgttcattcaatagattcttcaaaggattccaaaggcaaagaagtttggggaacag

SEQ ID NO: 82111 - DNA, 80 bp, synthetic construct; identical to SEQ ID NO: 14508
  source 1..80: mol_type = other DNA

SEQ ID NO: 82112 - DNA, 80 bp, synthetic construct
  source 1..80: mol_type = other DNA
ctgggctataatgataagtattaagtaaggaagatccacatatgtgagttgctggcttataattcacactcaagagatac

SEQ ID NO: 82113 - DNA, 80 bp, synthetic construct
  source 1..80: mol_type = other DNA
aaaaaatttgcagagataatacagagaatgcccatataccatcctccttatcccacttctttttgtgtctattagatgct

SEQ ID NO: 82114 - DNA, 80 bp, synthetic construct
  source 1..80: mol_type = other DNA
aacctaacctagatttgagggcccaaacaggctccagaagaaaatgtcaactgagaggaagcctgaaggatgaacagtgg

SEQ ID NO: 82115 - DNA, 80 bp, synthetic construct; identical to SEQ ID NO: 14509
  source 1..80: mol_type = other DNA

SEQ ID NO: 82116 - DNA, 80 bp, synthetic construct
  source 1..80: mol_type = other DNA
aacgaaggacaggaagtaattgtgaatgtttaatatagctggggctatgcgatttggcttaagttgttagctttgttttc

SEQ ID NO: 82117 - DNA, 80 bp, synthetic construct
  source 1..80: mol_type = other DNA
tctctgagtgactccagcaattagccaaggctcctgtacccaggcaggacctctgcgctctgagctccattctccttcaa

SEQ ID NO: 82118 - DNA, 80 bp, synthetic construct
  source 1..80: mol_type = other DNA
cctgacttctccccctccctacccgcgcgcaggccaagttgctgaatcaatggagccctccccaacccgggcgttcccca

SEQ ID NO: 82119 - DNA, 80 bp, synthetic construct; identical to SEQ ID NO: 14510
  source 1..80: mol_type = other DNA

SEQ ID NO: 82120 - DNA, 80 bp, synthetic construct
  source 1..80: mol_type = other DNA
ttgcggcggcagcggcgcacgcgggcacctgggagcggcgggctgctgcgggaggcgttggagactggctcccgggggct

SEQ ID NO: 82121 - DNA, 80 bp, synthetic construct
  source 1..80: mol_type = other DNA
gaattgaagcggaagtctgggaagctttagggtcgctggagggggaccccggttggagagaggagcggaactcctggaca

SEQ ID NO: 82122 - DNA, 80 bp, synthetic construct; identical to SEQ ID NO: 14511
  source 1..80: mol_type = other DNA

SEQ ID NO: 82123 - DNA, 80 bp, synthetic construct
  source 1..80: mol_type = other DNA
ccagacagagtatttacgctcagggggagcaataatctgcagaaagaaaacaaaaacttccagtgaactctgaagttcca

SEQ ID NO: 82124 - DNA, 80 bp, synthetic construct
  source 1..80: mol_type = other DNA
attattaaaatggaatttctccacttacctagagtgtaatttggcaacaagctaaatgtgtagtggagcctagcccaaaa

SEQ ID NO: 82125 - DNA, 80 bp, synthetic construct
  source 1..80: mol_type = other DNA
ggtaaagtttgtaggagacaagaaactgagtatgagggaaaaggaatttggaacgtagttctgcttagaataccaagact

SEQ ID NO: 82126 - DNA, 80 bp, synthetic construct
  source 1..80: mol_type = other DNA
gtcacacttcatgatgctattgtaagttgtttcatggatgccagcagattccatacctgggaacgagtcacacacacaca

SEQ ID NO: 82127 - DNA, 80 bp, synthetic construct; identical to SEQ ID NO: 14512
  source 1..80: mol_type = other DNA

SEQ ID NO: 82128 - DNA, 80 bp, synthetic construct
  source 1..80: mol_type = other DNA
catttaatgatgaggaacttggaaagtccagctacttggtagtgaaacttacgggaataagtcagctcttgtgaactagc

SEQ ID NO: 82129 - DNA, 80 bp, synthetic construct
  source 1..80: mol_type = other DNA
actatgacttcttttaactcaagggcttcttgagccttctagattttactctgggagaccctaagatttccagggaaaat

SEQ ID NO: 82130 - DNA, 80 bp, synthetic construct
  source 1..80: mol_type = other DNA
ctcaaaatccagggcgacatagcacagcttctctttaatgtcacggacaatttcacgttcagctacagaaataaagagta

SEQ ID NO: 82131 - DNA, 80 bp, synthetic construct
  source 1..80: mol_type = other DNA
acactcaccagtggtgacaaaggagtagccacgctcagtgaggatcttcatgaggtagtcagtgaggtcccgaccagcca

SEQ ID NO: 82132 - DNA, 80 bp, synthetic construct; identical to SEQ ID NO: 14513
  source 1..80: mol_type = other DNA

SEQ ID NO: 82133 - DNA, 80 bp, synthetic construct
  source 1..80: mol_type = other DNA
gtgtttttctttgctcctattgaacttacacgtttctctctcttttgactcagaccctgtatggaatgtattctccttgg

SEQ ID NO: 82134 - DNA, 80 bp, synthetic construct
  source 1..80: mol_type = other DNA
tgttaactctttctcttagcacagaccttgctagggaatgggaggaaagggattatccctttttcaactgggggatctga

SEQ ID NO: 82135 - DNA, 80 bp, synthetic construct
  source 1..80: mol_type = other DNA
ttctcccggttggccttggggttcagcggggcctctgtgagcagggtggggtgctcctcgggagccacacggagctcatt

SEQ ID NO: 82136 - DNA, 80 bp, synthetic construct; identical to SEQ ID NO: 14514
  source 1..80: mol_type = other DNA

SEQ ID NO: 82137 - DNA, 80 bp, synthetic construct
  source 1..80: mol_type = other DNA
aagaagcagagcctcacctcaccttaaaaatatcatatgccttcattaagttattaagctcatcacccatgtcaactgga

SEQ ID NO: 82138 - DNA, 80 bp, synthetic construct
  source 1..80: mol_type = other DNA
gaggactaagctctcctgcttggcagcctgtctggccaggcatgtgacaaacccagagagcatggcatgtcttttaacaa

SEQ ID NO: 82139 - DNA, 80 bp, synthetic construct; identical to SEQ ID NO: 14515
  source 1..80: mol_type = other DNA

SEQ ID NO: 82140 - DNA, 80 bp, synthetic construct
  source 1..80: mol_type = other DNA
gaagtcaatcagccttctcttaatttggcctaaagagttcatcgaacaagagggtcaggtgagagccatttcctagatcg

SEQ ID NO: 82141 - DNA, 80 bp, synthetic construct
  source 1..80: mol_type = other DNA
tctcctcgtcgtcacacatcttggcacagcttcagggggttctgcaggttgaggaggggagggcggaccacgcttagctg

SEQ ID NO: 82142 - DNA, 80 bp, synthetic construct
  source 1..80: mol_type = other DNA
aatccacccaggctccctggccaggagttccagctagggtgccaggtgcaaggagggacccaagaaacccagccccttag

SEQ ID NO: 82143 - DNA, 80 bp, synthetic construct; identical to SEQ ID NO: 14516
  source 1..80: mol_type = other DNA

SEQ ID NO: 82144 - DNA, 80 bp, synthetic construct
  source 1..80: mol_type = other DNA
gcggaccaggcgaggagtgaacgcggagggccgggcgctgactcaccgtcggcggggcgggtcggctcggctccggcggc

SEQ ID NO: 82145 - DNA, 80 bp, synthetic construct; identical to SEQ ID NO: 14517
  source 1..80: mol_type = other DNA

SEQ ID NO: 82146 - DNA, 80 bp, synthetic construct
  source 1..80: mol_type = other DNA
cggctgtgggtccggaccccacgggacccctatgggacccccacaggacccccacggcctgagtccaaggcccgccccct

SEQ ID NO: 82147 - DNA, 80 bp, synthetic construct
  source 1..80: mol_type = other DNA
ctgggcaataaggaaacggtttattaggagggagtggtggagctgggccaggcaggaagacgctggaataagaaacattt

SEQ ID NO: 82148 - DNA, 80 bp, synthetic construct
  source 1..80: mol_type = other DNA
cggtccgccgaaggctagcgccccgccacccgcagagcgggcccagaggtgagtcgaggtccgcggacgggaccgggtgg

SEQ ID NO: 82149 - DNA, 80 bp, synthetic construct
  source 1..80: mol_type = other DNA
aatggacgagactggactggaaatcagaaacttggttctagtcgggtgacctggggtcagtgacttcacttctctgttct

SEQ ID NO: 82150 - DNA, 80 bp, synthetic construct
  source 1..80: mol_type = other DNA
atcagtccttccagctgttgcttgaggaatctgacactatcactccaacctaggagtctcaccctaggcgcgcatggtca

SEQ ID NO: 82151 - DNA, 80 bp, synthetic construct
  source 1..80: mol_type = other DNA
ataatggacagttgctctcactctctctatgtatggccagcttctggctgagtcagggtctgtcctaatacctgtcctct

SEQ ID NO: 82152 - DNA, 80 bp, synthetic construct; identical to SEQ ID NO: 14518
  source 1..80: mol_type = other DNA

SEQ ID NO: 82153 - DNA, 80 bp, synthetic construct
  source 1..80: mol_type = other DNA
cccactttacatatgatgggaagcctaagcctcagaaagtttaagtaacgtctcaaatttcatacctctaagtggcaaag

SEQ ID NO: 82154 - DNA, 80 bp, synthetic construct
  source 1..80: mol_type = other DNA
gaaaatccaggcatcacctggatgttccactgcatcaccccgctgtgaagggctaataaatcacatggatgaatcgtaag

SEQ ID NO: 82155 - DNA, 80 bp, synthetic construct
  source 1..80: mol_type = other DNA
agtaggttttatcaatccttcaggtgtgctagggagaaaaacattgataagcacctttcgggcataccactactctggct

SEQ ID NO: 82156 - DNA, 80 bp, synthetic construct; identical to SEQ ID NO: 14519
  source 1..80: mol_type = other DNA

SEQ ID NO: 82157 - DNA, 80 bp, synthetic construct
  source 1..80: mol_type = other DNA
tttttcttcctttgagggactcatctaaccccaaacaactggaggaataacaatgaccaaggaatgatttattatcagca

SEQ ID NO: 82158 - DNA, 80 bp, synthetic construct
  source 1..80: mol_type = other DNA
ttcatagtgtttagctaacgtttgaaattagtttaacgtctgtaatttctggccaacaatagtgatgcttctgtcagcag

SEQ ID NO: 82159 - DNA, 80 bp, synthetic construct
  source 1..80: mol_type = other DNA
tccagttaaaaattggacagtcccaattttactccatcacattcccaggattagaccatagatgggttctgcagatgcag

SEQ ID NO: 82160 - DNA, 80 bp, synthetic construct; identical to SEQ ID NO: 14520
  source 1..80: mol_type = other DNA

SEQ ID NO: 82161 - DNA, 80 bp, synthetic construct
  source 1..80: mol_type = other DNA
gatcctagaggaatgccggattttagccttattgttagccactttttcctttccacctcaaaccctctcctttgcagctt

SEQ ID NO: 82162 - DNA, 80 bp, synthetic construct
  source 1..80: mol_type = other DNA
gtcaggcagaggctggggacacagctgcagcagcccagggctctgtttcctcccccagcctgggcctctggggcagagga

SEQ ID NO: 82163 - DNA, 80 bp, synthetic construct
  source 1..80: mol_type = other DNA
ccagccctgtcaggctcaccatgtcatgccaaaggacagtctccctgccttgtgccctgcctgaggatccagtccccaga

SEQ ID NO: 82164 - DNA, 80 bp, synthetic construct; identical to SEQ ID NO: 14521
  source 1..80: mol_type = other DNA

SEQ ID NO: 82165 - DNA, 80 bp, synthetic construct
  source 1..80: mol_type = other DNA
cttatactctggtgagcttgcagagaggtttctctacacctggcatgaccctgccccgtccgagctttgcatggttgtta

SEQ ID NO: 82166 - DNA, 80 bp, synthetic construct
  source 1..80: mol_type = other DNA
ccttactcctctcttctgtaaaacaaggagctggattttgtgattcacaggatgtccacctagaattctgtcatgtgggt

SEQ ID NO: 82167 - DNA, 80 bp, synthetic construct
  source 1..80: mol_type = other DNA
ctaaacaatcttgattcctgttcctggcttggcaggaccctgaatggcaggaagcgaagacaggagcctgtttatgtttg

SEQ ID NO: 82168 - DNA, 80 bp, synthetic construct; identical to SEQ ID NO: 14522
  source 1..80: mol_type = other DNA

SEQ ID NO: 82169 - DNA, 80 bp, synthetic construct
  source 1..80: mol_type = other DNA
acttcatggctcttactccacctctcttgctcctctctgcagggaccatgaccttgggctcccccaggaaaggccttctg

SEQ ID NO: 82170 - DNA, 80 bp, synthetic construct
  source 1..80: mol_type = other DNA
agagtggaggacagtgaggctccattagactcagtccccagctaccccagccctcctttgctctcctcttgatccagacc

SEQ ID NO: 82171 - DNA, 80 bp, synthetic construct
  source 1..80: mol_type = other DNA
aaaagcctgcttttcagagtgtcagctgctctgaggggagggttctgagggaaggatgactgaggatgaaagtaagagac

SEQ ID NO: 82172 - DNA, 80 bp, synthetic construct
  source 1..80: mol_type = other DNA
ctggtgacctgcacgtgtgagagcccacattgcaaggggcctacctgccggggggcctggtgcacagtagtgctggtgcg

SEQ ID NO: 82173 - DNA, 80 bp, synthetic construct; identical to SEQ ID NO: 14523
  source 1..80: mol_type = other DNA

SEQ ID NO: 82174 - DNA, 80 bp, synthetic construct
  source 1..80: mol_type = other DNA
acagatggccagctggccctgatcctgggccccgtgctggccttgctggccctggtggccctgggtgtcctgggcctgtg

SEQ ID NO: 82175 - DNA, 80 bp, synthetic construct
  source 1..80: mol_type = other DNA
gggcagataggaactgcagaatcagaggggtcacccagagattagagccggtggggagctgggcgagtgaggagcttgca

SEQ ID NO: 82176 - DNA, 80 bp, synthetic construct
  source 1..80: mol_type = other DNA
cagtggcacggcaggttgccttggtggagtgtgtgggtgagcagtgggtgagcccggtggatgaggaccaagggctctca

SEQ ID NO: 82177 - DNA, 80 bp, synthetic construct; identical to SEQ ID NO: 14524
  source 1..80: mol_type = other DNA

SEQ ID NO: 82178 - DNA, 80 bp, synthetic construct
  source 1..80: mol_type = other DNA
aagatcttctcctcgagggatgaacagtcctggttccgggagactgagatctataacacagtgttgctcagacacgacaa

SEQ ID NO: 82179 - DNA, 80 bp, synthetic construct
  source 1..80: mol_type = other DNA
tttgcagacctccagacattaacagaaccctgaaggactctcagcccacctgcagcatcaacctctttttttaatttaat

SEQ ID NO: 82180 - DNA, 80 bp, synthetic construct
  source 1..80: mol_type = other DNA
ggaccacaggcatgtgccaccatgcccagctaacttttttattttttgtagagacgaggtctccctatgtttcccagact

SEQ ID NO: 82181 - DNA, 80 bp, synthetic construct; identical to SEQ ID NO: 14525
  source 1..80: mol_type = other DNA

SEQ ID NO: 82182 - DNA, 80 bp, synthetic construct
  source 1..80: mol_type = other DNA
ctctgaggctagctgtgtccgcggcatgcggcctggcgcacctgcacgtggagatcttcggtacacagggcaaaccagcc

SEQ ID NO: 82183 - DNA, 80 bp, synthetic construct
  source 1..80: mol_type = other DNA
attagcacttgaaaatttagaggtgcatgttgtttcagttctcctccgcaagaccccacgagttgtctgaacaccctttt

SEQ ID NO: 82184 - DNA, 80 bp, synthetic construct; identical to SEQ ID NO: 14526
  source 1..80: mol_type = other DNA

SEQ ID NO: 82185 - DNA, 80 bp, synthetic construct
  source 1..80: mol_type = other DNA
ctggacgagcagatccgcacggactgctttgagtcctacaagtggactgacatctgggcctttggcctggtgctgtggga

SEQ ID NO: 82186 - DNA, 80 bp, synthetic construct
  source 1..80: mol_type = other DNA
agctggttcagctgagtgaccttttaaggtataaaccttaaaaacagataacagggtctgtgagtctggctgtgaaatct

SEQ ID NO: 82187 - DNA, 80 bp, synthetic construct; identical to SEQ ID NO: 14527
  source 1..80: mol_type = other DNA

SEQ ID NO: 82188 - DNA, 80 bp, synthetic construct
  source 1..80: mol_type = other DNA
acaaaaattagctggctgtggtggcacacacctgtaatcccagctactcgggaggctgaggcaggagaatcacttgaatc

SEQ ID NO: 82189 - DNA, 80 bp, synthetic construct
  source 1..80: mol_type = other DNA
cagtatctagagctaaatattagtggctgttattgttgtagatagaatgagtgcctgacatcatattgtccccattttac

SEQ ID NO: 82190 - DNA, 80 bp, synthetic construct
  source 1..80: mol_type = other DNA
actgcctgcttattgctgcctggttgttactgtgggttgccacaggggactctgatttagagggactgcgacaggtagag

SEQ ID NO: 82191 - DNA, 80 bp, synthetic construct; identical to SEQ ID NO: 14528
  source 1..80: mol_type = other DNA

SEQ ID NO: 82192 - DNA, 80 bp, synthetic construct
  source 1..80: mol_type = other DNA
ggatcgggggaaagaggaacctggaagaagccaaggctccttggaccaggctgcagggcagaaaggaaaggctgggagga

SEQ ID NO: 82193 - DNA, 80 bp, synthetic construct
  source 1..80: mol_type = other DNA
gcacaggggccggcctggaagctggccatggggagaacagctggcgaaggctctatcgaggttgcggcctgtgtggccat

SEQ ID NO: 82194 - DNA, 80 bp, synthetic construct
  source 1..80: mol_type = other DNA
ctgacactgggtgatgttatgtggacctgggtaaaaagataagtgcagctcagaggtcaagagcacatgctttggtgtta

SEQ ID NO: 82195 - DNA, 80 bp, synthetic construct
  source 1..80: mol_type = other DNA
ctcttaggacagcacctggcatacagtgctcagtaaacatttggtgttattattatcaggcatgtgtgatagttggggcc

SEQ ID NO: 82196 - DNA, 80 bp, synthetic construct; identical to SEQ ID NO: 14529
  source 1..80: mol_type = other DNA

SEQ ID NO: 82197 - DNA, 80 bp, synthetic construct
  source 1..80: mol_type = other DNA
cctccttagagtcccaagtgattgtcctgtccattctccatttccaggcatcgtggaggactatagaccacccttctatg

SEQ ID NO: 82198 - DNA, 80 bp, synthetic construct
  source 1..80: mol_type = other DNA
gtgtctgaggcctctgcttcatctcatagatactgagtgtcctggttagggcacctctctaggtactccctctttcaacc

SEQ ID NO: 82199 - DNA, 80 bp, synthetic construct
  source 1..80: mol_type = other DNA
tcttgtcacccaggctggggtgcagtggcacagtcatagctcactgtaacctcaaactcctcggctcaactgatcctact

SEQ ID NO: 82200 - DNA, 80 bp, synthetic construct; identical to SEQ ID NO: 14530
  source 1..80: mol_type = other DNA

SEQ ID NO: 82201 - DNA, 80 bp, synthetic construct
  source 1..80: mol_type = other DNA
acgtgtcttttgctcacccttatgtccctattacctatcatagtatctggctcacaataggtgctaataaatatttactg

SEQ ID NO: 82202 - DNA, 80 bp, synthetic construct
  source 1..80: mol_type = other DNA
ggatgggttgatgagcttcctgggatgggttgatgagctttttgggatgggttgctccctggacacttgcatttttaggg

SEQ ID NO: 82203 - DNA, 80 bp, synthetic construct
  source 1..80: mol_type = other DNA
gggggtaaggtgtttcacagacactgcttgcccaagggggcttgagtgctcctgaagatctgagttctctctttctgtcc

SEQ ID NO: 82204 - DNA, 80 bp, synthetic construct
  source 1..80: mol_type = other DNA
ctgcttatgtctccccattaccggccatcctcctcatcttcttcccatcttctctgacccacctccctctgcatctctct

SEQ ID NO: 82205 - DNA, 80 bp, synthetic construct; identical to SEQ ID NO: 14531
  source 1..80: mol_type = other DNA

SEQ ID NO: 82206 - DNA, 80 bp, synthetic construct
  source 1..80: mol_type = other DNA
ctgacgcctggctctctccccacccctatggccagcatggtgcaccccctaccactcccgggacaggatgcaaaagaggc

SEQ ID NO: 82207 - DNA, 80 bp, synthetic construct
  source 1..80: mol_type = other DNA
cagcctctagcataagctccagagagccagggcccatcagtttctctctgtggatttgtatctcagctccatgatgcctt

SEQ ID NO: 82208 - DNA, 80 bp, synthetic construct; identical to SEQ ID NO: 14532
  source 1..80: mol_type = other DNA

SEQ ID NO: 82209 - DNA, 80 bp, synthetic construct
  source 1..80: mol_type = other DNA
tacctcccaggttcaaatcattctcttgcctcagactcccgagtagctgggattacaggcacatgccaccatgcctggct

SEQ ID NO: 82210 - DNA, 80 bp, synthetic construct
  source 1..80: mol_type = other DNA
atctacatattggaagatttggtcctgatgtcctttgaggcttctttagctctagttctctgacacttcagcctatatca

SEQ ID NO: 82211 - DNA, 80 bp, synthetic construct
  source 1..80: mol_type = other DNA
ggccacccttgggctcagacagctctgggccttttgaccacaagccagcccctcgccctctctgtggcatagtcttctct

SEQ ID NO: 82212 - DNA, 80 bp, synthetic construct; identical to SEQ ID NO: 14533
  source 1..80: mol_type = other DNA

SEQ ID NO: 82213 - DNA, 80 bp, synthetic construct
  source 1..80: mol_type = other DNA
gaagaaagctctccccgctcctgctgtaatgacccagagtagcctccccaggccggcatcttatgtgtgtcttccaccat

SEQ ID NO: 82214 - DNA, 80 bp, synthetic construct
  source 1..80: mol_type = other DNA
aatcatctccctcttgaaggattttatttctactgggttttggaacaaactcctgctgagaccccacagccagaaactga

SEQ ID NO: 82215 - DNA, 80 bp, synthetic construct
  source 1..80: mol_type = other DNA
ttacacttctcgtacctggagacgctgtttgtgggagcactgggctcatgcctggcacacaataggtctgcaataaacca

SEQ ID NO: 82216 - DNA, 80 bp, synthetic construct; identical to SEQ ID NO: 14534
  source 1..80: mol_type = other DNA

SEQ ID NO: 82217 - DNA, 80 bp, synthetic construct
  source 1..80: mol_type = other DNA
gggtccggtcgcccctttgcccgcttctgtaccaccctcagttctcgggtcctggagcaccggcggcagcaggagctgcg

SEQ ID NO: 82218 - DNA, 80 bp, synthetic construct
  source 1..80: mol_type = other DNA
ctgtggctctcttctctccatgtctcaccctctcccctccccgcactccccattcaggcctccagttggcccctggcttt

SEQ ID NO: 82219 - DNA, 80 bp, synthetic construct
  source 1..80: mol_type = other DNA
tcgtttggaccctcttgcttcctctaaaagttttaaactctctgcctgggaaaatacctgatagcccggcatgtggagtt

SEQ ID NO: 82220 - DNA, 80 bp, synthetic construct; identical to SEQ ID NO: 14535
  source 1..80: mol_type = other DNA

SEQ ID NO: 82221 - DNA, 80 bp, synthetic construct
  source 1..80: mol_type = other DNA
tgcctactgacgtcttagaattccatgttgtacaagccctttgtttctatttagaaaggactaaaatggagaaaagcttt

SEQ ID NO: 82222 - DNA, 80 bp, synthetic construct
  source 1..80: mol_type = other DNA
aaaactgtcctaaataacgtagtaccttgccagagtctaagtgcaaaatgtgggatcaaagcggtagtggaggaagttgc

SEQ ID NO: 82223 - DNA, 80 bp, synthetic construct
  source 1..80: mol_type = other DNA
tttcttgaagttatgctagatgttctccaaagttgttaagcacaaactatgcctgctgtattagaattgtatgttaaaaa

SEQ ID NO: 82224 - DNA, 80 bp, synthetic construct; identical to SEQ ID NO: 14536
  source 1..80: mol_type = other DNA

SEQ ID NO: 82225 - DNA, 80 bp, synthetic construct
  source 1..80: mol_type = other DNA
gctcactgcttctggcaaaatgatttgtagctctgtatcaaaaaacatctgaccacaaactctttaaaacctctcacttt

SEQ ID NO: 82226 - DNA, 80 bp, synthetic construct
  source 1..80: mol_type = other DNA
gcctgtgattccagctacttgggaggctgaggcaggaggattgttggagcccgggatgtggaggttgcagtgagccaaga

SEQ ID NO: 82227 - DNA, 80 bp, synthetic construct
  source 1..80: mol_type = other DNA
taccctaatgctgatttcatttgcctccctgtgtaaccaggatcccatgatcatcagcttttactaagctcctattgatg

SEQ ID NO: 82228 - DNA, 80 bp, synthetic construct; identical to SEQ ID NO: 14537
  source 1..80: mol_type = other DNA

SEQ ID NO: 82229 - DNA, 80 bp, synthetic construct
  source 1..80: mol_type = other DNA
tctagaaactgtccattttcacttcctgtccaccttcttcagcctctccctctctagcctacatagatgcttgtatcttc

SEQ ID NO: 82230 - DNA, 80 bp, synthetic construct
  source 1..80: mol_type = other DNA
ttgatctgggtttttgaagtcttttaaaaccactttagtagctgtgtaactgtgggtatgttactattcagatttcattc

SEQ ID NO: 82231 - DNA, 80 bp, synthetic construct
  source 1..80: mol_type = other DNA
ctgttttaaaagttatctgtgacctccgaatcaccaaatccaatgacgtttcctctgtcatccttggtttccttagaccc

SEQ ID NO: 82232 - DNA, 80 bp, synthetic construct; identical to SEQ ID NO: 14538
  source 1..80: mol_type = other DNA

SEQ ID NO: 82233 - DNA, 80 bp, synthetic construct
  source 1..80: mol_type = other DNA
ctagatttcttggcttttctgcattatacttcctgattctgtatttctcaggaagtttcttcacattttccttttatcag

SEQ ID NO: 82234 - DNA, 80 bp, synthetic construct
  source 1..80: mol_type = other DNA
caaagagatgttttggctcttgcaattggcaagtacatagatagaagtggcttgaagagtgctttgtcatgtcatcaggg

SEQ ID NO: 82235 - DNA, 80 bp, synthetic construct; identical to SEQ ID NO: 14539
  source 1..80: mol_type = other DNA

SEQ ID NO: 82236 - DNA, 80 bp, synthetic construct
  source 1..80: mol_type = other DNA
tgcttttcactgtgttctcttggtgatcatatcctttatgatataaaccatcatttctgtggggctgtttcttggttctg

SEQ ID NO: 82237 - DNA, 80 bp, synthetic construct
  source 1..80: mol_type = other DNA
atatatactaccctaagtttaactcatactaaactgagtcagtttgatctcttcaccaaccctcacctagtgtgtgtgtg

SEQ ID NO: 82238 - DNA, 80 bp, synthetic construct
  source 1..80: mol_type = other DNA
tgtgcatcaccacacccagcccttttttttttttttttaagcgaccggggcttgctgtattccccaggctggtgtcaaac

SEQ ID NO: 82239 - DNA, 80 bp, synthetic construct; identical to SEQ ID NO: 14540
  source 1..80: mol_type = other DNA

SEQ ID NO: 82240 - DNA, 80 bp, synthetic construct
  source 1..80: mol_type = other DNA
aaaattagccgggtatggtggcaggcgcctgtaatccccactactcaggaggctgaggcaggagaatcacttgaacccag

SEQ ID NO: 82241 - DNA, 80 bp, synthetic construct
  source 1..80: mol_type = other DNA
aggattcaggtgctttccatctttatgcttggctatccttagcatgcttaactttgggctcagactttgccatcatggtt

SEQ ID NO: 82242 - DNA, 80 bp, synthetic construct
  source 1..80: mol_type = other DNA
tgtggcatttcagtctaggaagagggtaagcaaatggctgattagaagaaaacagatggtgtcaatgacagtattgtatg

SEQ ID NO: 82243 - DNA, 80 bp, synthetic construct
  source 1..80: mol_type = other DNA
cgttcagtcactcaggctggagtgcagtggcttgatctcagctcagtgcaacctctacctcttgggttcagcgattctcc

SEQ ID NO: 82244 - DNA, 80 bp, synthetic construct; identical to SEQ ID NO: 14541
  source 1..80: mol_type = other DNA

SEQ ID NO: 82245 - DNA, 80 bp, synthetic construct
  source 1..80: mol_type = other DNA
gagctactgcaagaaacaggtatgttatatgtaacaactattgaaatagagttgtggttccccttggggatgggagatgt

SEQ ID NO: 82246 - DNA, 80 bp, synthetic construct
  source 1..80: mol_type = other DNA
cagaattgtcctttcaaaaataccagtagtgcccctgcacatgtatacactgaagttagcaaatgctttgccttttgaaa

SEQ ID NO: 82247 - DNA, 80 bp, synthetic construct; identical to SEQ ID NO: 14542
  source 1..80: mol_type = other DNA

SEQ ID NO: 82248 - DNA, 80 bp, synthetic construct
  source 1..80: mol_type = other DNA
tttattatctcttctatcatgcttcagctttacaatctatatatcacactctatgggtattatttttctgtcccatgcat

SEQ ID NO: 82249 - DNA, 80 bp, synthetic construct
  source 1..80: mol_type = other DNA
tgaggtaccccttggggatgggagatgtttagaaatttaagaacgcctcattccttcatcagttatttttgaatcctgaa

SEQ ID NO: 82250 - DNA, 80 bp, synthetic construct
  source 1..80: mol_type = other DNA
gaagcctgctgtaggcagatagtgtggcaacattgagtgggaacaaaacagagcctgtgttgtctgagcttaaattttag

SEQ ID NO: 82251 - DNA, 80 bp, synthetic construct; identical to SEQ ID NO: 14543
  source 1..80: mol_type = other DNA

SEQ ID NO: 82252 - DNA, 80 bp, synthetic construct
  source 1..80: mol_type = other DNA
attttgatacgtgtataaaatgtgtaatgatcaagtcggggtatttagagtacctgtcatcttgagcgtttatcatttct

SEQ ID NO: 82253 - DNA, 80 bp, synthetic construct
  source 1..80: mol_type = other DNA
ctgtggtccttttaatggctgcaggaaaagattcccttttcatatctgacgtaggttatttgtaccttttccttttcctt

SEQ ID NO: 82254 - DNA, 80 bp, synthetic construct
  source 1..80: mol_type = other DNA
cttgtttttaaatatgttcataaagttaaacattcccctctaagcgccattttagctagttctattactagttttgatac

SEQ ID NO: 82255 - DNA, 80 bp, synthetic construct; identical to SEQ ID NO: 14544
  source 1..80: mol_type = other DNA

SEQ ID NO: 82256 - DNA, 80 bp, synthetic construct
  source 1..80: mol_type = other DNA
gattgtggatttgagtatttcccttgtagttctctaatcttttataaatttgaggctatgctattagatgcatagaaatg

SEQ ID NO: 82257 - DNA, 80 bp, synthetic construct
  source 1..80: mol_type = other DNA
atctatcttataaaatctaatgttaatcaatacctttatcctattctcagatgatgcactttaattctacttacttgcag

SEQ ID NO: 82258 - DNA, 80 bp, synthetic construct
  source 1..80: mol_type = other DNA
gtagctgggattacaggcatgtgccactacgcctgcctaatttttttgtactttgagtagatacggggtttcaccatgtt

SEQ ID NO: 82259 - DNA, 80 bp, synthetic construct; identical to SEQ ID NO: 14545
  source 1..80: mol_type = other DNA

SEQ ID NO: 82260 - DNA, 80 bp, synthetic construct
  source 1..80: mol_type = other DNA
ctgttttactaagctgtgattaggcatcggattctttgggctgtgtgaatatatggattggtgtcttatcagtcctggaa

SEQ ID NO: 82261 - DNA, 80 bp, synthetic construct
  source 1..80: mol_type = other DNA
gcttctttttgacctcaaggcattgttctggatattgcttcagacttatcttcaaagttcacattttttttttcacctat

SEQ ID NO: 82262 - DNA, 80 bp, synthetic construct
  source 1..80: mol_type = other DNA
catagttatttttcagtttgtgtctgataattccaatgttgggaagtctctaggaagctgattcagttgtgttgtagaaa

SEQ ID NO: 82263 - DNA, 80 bp, synthetic construct; identical to SEQ ID NO: 14546
  source 1..80: mol_type = other DNA

SEQ ID NO: 82264 - DNA, 80 bp, synthetic construct
  source 1..80: mol_type = other DNA
aaagctggggtcacctttctgggttcctgacttctagtggatttgagcttcttattcattcctcgttattttgctggtta

SEQ ID NO: 82265 - DNA, 80 bp, synthetic construct
  source 1..80: mol_type = other DNA
cattcctttgtgttagggctcctttgatggtgcaaattagatacctggaaaaggtagactttaagctatggttgcctttt

SEQ ID NO: 82266 - DNA, 80 bp, synthetic construct; identical to SEQ ID NO: 14547
  source 1..80: mol_type = other DNA

SEQ ID NO: 82267 - DNA, 80 bp, synthetic construct
  source 1..80: mol_type = other DNA
cctccgagtagctgggattacaggtgtgcaccaccacgcccggctaatttttttttttaatttttagtagaggtggggtt

SEQ ID NO: 82268 - DNA, 80 bp, synthetic construct; identical to SEQ ID NO: 14548
  source 1..80: mol_type = other DNA

SEQ ID NO: 82269 - DNA, 80 bp, synthetic construct
  source 1..80: mol_type = other DNA
cagttgtgcgccactgcgcccagccaattttcaataaaaattctggcaaatctctctatgccatgtaggtgtcatgattt

SEQ ID NO: 82270 - DNA, 80 bp, synthetic construct
  source 1..80: mol_type = other DNA
ctaggcaaactaagctatggtagtctacataaattggtgttcttctgtgatggaggagtgttaaaaatttagtataacat

SEQ ID NO: 82271 - DNA, 80 bp, synthetic construct
  source 1..80: mol_type = other DNA
ttatttttttctctttgctagaagaaaatactaagtcaaagattcctattatagttccttctctttcctgctatgttaga

SEQ ID NO: 82272 - DNA, 80 bp, synthetic construct; identical to SEQ ID NO: 14549
  source 1..80: mol_type = other DNA

SEQ ID NO: 82273 - DNA, 80 bp, synthetic construct
  source 1..80: mol_type = other DNA
cctgctaggcagtattggatatcctttgatgtttatagttgtgaatttaaagtgaaaccagctagctttgttagctggtt

SEQ ID NO: 82274 - DNA, 80 bp, synthetic construct
  source 1..80: mol_type = other DNA
agtgtaaagatgaaagtaacggatggtgaaaaatgatgagagcatttttgattggattggagaacacagtaagtaaggtg

SEQ ID NO: 82275 - DNA, 80 bp, synthetic construct
  source 1..80: mol_type = other DNA
agcctggccaacatagtgaaactccatctctagtaaaaatacaaaaattagccaggcatggtggcgtgtgcctgtaatcc

SEQ ID NO: 82276 - DNA, 80 bp, synthetic construct; identical to SEQ ID NO: 14550
  source 1..80: mol_type = other DNA

SEQ ID NO: 82277 - DNA, 80 bp, synthetic construct
  source 1..80: mol_type = other DNA
gtgtttaagaaaggaggagaaatggtttggaagtgataattggatgcaaggagcatatcttttgcctccctctacaccag

SEQ ID NO: 82278 - DNA, 80 bp, synthetic construct
  source 1..80: mol_type = other DNA
gacaaatttgctctagacccttcagtatcctattcctatctcctggcctaaagtacataggatgtgagaggaaaaaaaga

SEQ ID NO: 82279 - DNA, 80 bp, synthetic construct
  source 1..80: mol_type = other DNA
tgtacattcatctattgtattttagtacagtagtactaaagtaatacactgttcggttttgtgagttacataaatttcca

SEQ ID NO: 82280 - DNA, 80 bp, synthetic construct; identical to SEQ ID NO: 14551
  source 1..80: mol_type = other DNA

SEQ ID NO: 82281 - DNA, 80 bp, synthetic construct
  source 1..80: mol_type = other DNA
ttcccactaccccctctttggagtcgattaatttgctggagcacctcacagaactcagggaaacacttgcttatatttac

SEQ ID NO: 82282 - DNA, 80 bp, synthetic construct
  source 1..80: mol_type = other DNA
ttggctttttatggaggcctcattgcataggtatgattgacaaccatgtagaaatgtgtttggacaaaaagtgcgtgatc

SEQ ID NO: 82283 - DNA, 80 bp, synthetic construct; identical to SEQ ID NO: 14552
  source 1..80: mol_type = other DNA

SEQ ID NO: 82284 - DNA, 80 bp, synthetic construct
  source 1..80: mol_type = other DNA
tgtggtgccagctactcagaaagctgagatgggagaattgcttgagcctgtgaggcggaggttgcagtgagccaagatta

SEQ ID NO: 82285 - DNA, 80 bp, synthetic construct
  source 1..80: mol_type = other DNA
aagagaatagtagttcaaaaatttaaacatctgtcatggtcccataggaataatgtgttgaccggaatgatgatgtccca

SEQ ID NO: 82286 - DNA, 80 bp, synthetic construct
  source 1..80: mol_type = other DNA
caggaacatttcatctccttttattgctctagtataagagttttcttccttaccttaccattactgcccccactgctact

SEQ ID NO: 82287 - DNA, 80 bp, synthetic construct
  source 1..80: mol_type = other DNA
aatagtctgatcttttaacggctccctttccctaatcctaaagcaagcacaaaatatttttagagctttatgatctctta

SEQ ID NO: 82288 - DNA, 80 bp, synthetic construct; identical to SEQ ID NO: 14553
  source 1..80: mol_type = other DNA

SEQ ID NO: 82289 - DNA, 80 bp, synthetic construct
  source 1..80: mol_type = other DNA
agagtcttgtcctcaaacagcttttagtgagaaagagcaatatatacgtaatcccaagtgtgtggtaaatgagatagttg

SEQ ID NO: 82290 - DNA, 80 bp, synthetic construct
  source 1..80: mol_type = other DNA
cacattatctaggtgaaaaagcagatgtaagaaccttccagtaaatgaaatggtatagtgatttggtggtgagtgcacag

SEQ ID NO: 82291 - DNA, 80 bp, synthetic construct; identical to SEQ ID NO: 14554
  source 1..80: mol_type = other DNA

SEQ ID NO: 82292 - DNA, 80 bp, synthetic construct
  source 1..80: mol_type = other DNA
ctaatttgtatttttagtagagacagagtttcactatgttggccaggctgttctcaaactactgacctcaggtggtccac

SEQ ID NO: 82293 - DNA, 80 bp, synthetic construct
  source 1..80: mol_type = other DNA
gaggaagtcactgttgtttcttgagtgttcaagcagcatattcttaatatcagaatagtgttagaaacaaaacagtttca

SEQ ID NO: 82294 - DNA, 80 bp, synthetic construct
  source 1..80: mol_type = other DNA
gggctcagtagtgcaggcctgtagtcccaggtacttgggaggctgagttgggaggatcacctgagcccaggaggttgagt

SEQ ID NO: 82295 - DNA, 80 bp, synthetic construct; identical to SEQ ID NO: 14555
  source 1..80: mol_type = other DNA

SEQ ID NO: 82296 - DNA, 80 bp, synthetic construct
  source 1..80: mol_type = other DNA
gtaccctcctggtacccaggtccttgtctggcatccaggaagattcaggttgtacacggacttgaaggatgaatgcatgg

SEQ ID NO: 82297 - DNA, 80 bp, synthetic construct
  source 1..80: mol_type = other DNA
ttcttttctctgctgtgctgttttgctgttcttctgcttctccatttgtctccttgtggagcagggggtttggggttttt

SEQ ID NO: 82298 - DNA, 80 bp, synthetic construct; identical to SEQ ID NO: 14556
  source 1..80: mol_type = other DNA

SEQ ID NO: 82299 - DNA, 80 bp, synthetic construct
  source 1..80: mol_type = other DNA
ctctgagaacataatattaaataggcattatgaacgcctatattaggtgactcattctcctaatgcttaaaatgagtcta

SEQ ID NO: 82300 - DNA, 80 bp, synthetic construct
  source 1..80: mol_type = other DNA
gatagattttttttttttcattttacttaatagtaagttgggacccttgcaaacacttatcttcggacattcagagtgaa

SEQ ID NO: 82301 - DNA, 80 bp, synthetic construct
  source 1..80: mol_type = other DNA
ggtaatattggtataagaacaaaagtcttttgacccaaggctttggtttcaagttctaaatgccattactatgccctata

SEQ ID NO: 82302 - DNA, 80 bp, synthetic construct; identical to SEQ ID NO: 14557
  source 1..80: mol_type = other DNA

SEQ ID NO: 82303 - DNA, 80 bp, synthetic construct
  source 1..80: mol_type = other DNA
aacatttaacttaaaaaaaaaaatcagaattttatccctccataggaaaggatagtttaaaatgagcatgtccaacccac

SEQ ID NO: 82304 - DNA, 80 bp, synthetic construct
  source 1..80: mol_type = other DNA
agtgcagtgttgtgatctcagctcactgcagcctccacctcctgggttcaagcgattcccctgcctcaacctcctgagta

SEQ ID NO: 82305 - DNA, 80 bp, synthetic construct
  source 1..80: mol_type = other DNA
caccgtgcccgaccagtgtattttatatgtggctcaagacaattcttccagtgttgctcagggaagccaaaatattggac

SEQ ID NO: 82306 - DNA, 80 bp, synthetic construct
  source 1..80: mol_type = other DNA
caacatcatagaatttataaacttttttataaagagtatgacttagttttttttttcctgcaatcatattttccagttga

SEQ ID NO: 82307 - DNA, 80 bp, synthetic construct; identical to SEQ ID NO: 14558
  source 1..80: mol_type = other DNA

SEQ ID NO: 82308 - DNA, 80 bp, synthetic construct
  source 1..80: mol_type = other DNA
attattgtatcatctacattcatacattgaacaaaaagcaccaagcactgttatagatgcgagggaaagagcagtgcagg

SEQ ID NO: 82309 - DNA, 80 bp, synthetic construct
  source 1..80: mol_type = other DNA
gtgcgttgataaggtgatcatggaaggtgtgatctttgaaaatttgacatttttgccaaaacctgaatgacatgaaggac

SEQ ID NO: 82310 - DNA, 80 bp, synthetic construct
  source 1..80: mol_type = other DNA
gattacactgggaagccaatgaacagtttgaagtttttaagggctcatgtcattacattgggtctacccaggataatctc

SEQ ID NO: 82311 - DNA, 80 bp, synthetic construct; identical to SEQ ID NO: 14559
  source 1..80: mol_type = other DNA

SEQ ID NO: 82312 - DNA, 80 bp, synthetic construct
  source 1..80: mol_type = other DNA
gatctgtattttctcatggataaaaatttatgggtggattcattgtagattctaaaaggacattttcaaatctgtttgag

SEQ ID NO: 82313 - DNA, 80 bp, synthetic construct
  source 1..80: mol_type = other DNA
agctgctctgaaaggtaccttagtgaaggaaattgctgctgagacatggaggatgaggcaatatagtcagcattggcttt

SEQ ID NO: 82314 - DNA, 80 bp, synthetic construct
  source 1..80: mol_type = other DNA
ttagaagcatatttatcatgaaactgatgaagtttagtgaacctaattgcatggccctttctaaggcccttgcaggagca

SEQ ID NO: 82315 - DNA, 80 bp, synthetic construct; identical to SEQ ID NO: 14560
  source 1..80: mol_type = other DNA

SEQ ID NO: 82316 - DNA, 80 bp, synthetic construct
  source 1..80: mol_type = other DNA
acatgatgttttatctctctctgcttttctctgtgtacatacgcaatttattttttaaaagctagtttatatcatattaa

SEQ ID NO: 82317 - DNA, 80 bp, synthetic construct
  source 1..80: mol_type = other DNA
tagtacaagtaatgccaaattacaaatctttgtaggggtatctgtacataggataatttcttttaattgggcttgcttga

SEQ ID NO: 82318 - DNA, 80 bp, synthetic construct
  source 1..80: mol_type = other DNA
caaggtggaaggaggaaggacaggagacggccagagcaagcaagggatcaaatttgtagcctcaggctttttaataaaac

SEQ ID NO: 82319 - DNA, 80 bp, synthetic construct; identical to SEQ ID NO: 14561
  source 1..80: mol_type = other DNA

SEQ ID NO: 82320 - DNA, 80 bp, synthetic construct
  source 1..80: mol_type = other DNA
actacaggcatgtgccacctcgcctggctaagttttgtatttttagtagagacagggtttcgccatgttggccaggctgg

SEQ ID NO: 82321 - DNA, 80 bp, synthetic construct
  source 1..80: mol_type = other DNA
ggaaagctttttgacaggaagaagtaagtttctttctcctgtaagcaagtcctgaggctgtataacactccaaattaaaa

SEQ ID NO: 82322 - DNA, 80 bp, synthetic construct
  source 1..80: mol_type = other DNA
agggattctgcagtgtaacaactaagctcagaaacttagtcccgtggctgcatcacaacatttgtttttccatatacagg

SEQ ID NO: 82323 - DNA, 80 bp, synthetic construct; identical to SEQ ID NO: 14562
  source 1..80: mol_type = other DNA

SEQ ID NO: 82324 - DNA, 80 bp, synthetic construct
  source 1..80: mol_type = other DNA
gggaaaaggagatgaattgattctaggtgggttgctggattacttcatgggaatttatgtttaagccaaaccatgatttg

SEQ ID NO: 82325 - DNA, 80 bp, synthetic construct
  source 1..80: mol_type = other DNA
cttttccagcgttatcaagctacaaagtgaaagattcagaacttgaacctaagtcttcaatctccatatgctggagcctt

SEQ ID NO: 82326 - DNA, 80 bp, synthetic construct; identical to SEQ ID NO: 14563
  source 1..80: mol_type = other DNA

SEQ ID NO: 82327 - DNA, 80 bp, synthetic construct
  source 1..80: mol_type = other DNA
attgcttgctctgaagatggaagtgaagtgctatgaaccataaaatacagtggatctgtagaagccagaaaggataagga

SEQ ID NO: 82328 - DNA, 80 bp, synthetic construct
  source 1..80: mol_type = other DNA
taggacatttaatacgcctaggaactattttattgtaggaagactaattaacatgacctcagggcactccatgactaaac

SEQ ID NO: 82329 - DNA, 80 bp, synthetic construct; identical to SEQ ID NO: 14564
  source 1..80: mol_type = other DNA

SEQ ID NO: 82330 - DNA, 80 bp, synthetic construct
  source 1..80: mol_type = other DNA
tgggtcaagatctcccacttagtttatacatcactgaaaatctcattgccattgtaacatttcacctcgttctcgtatcc

SEQ ID NO: 82331 - DNA, 80 bp, synthetic construct
  source 1..80: mol_type = other DNA
catgaaaaatacagaaccagttaggcacacatctaacttatctcttcttaggcttttccatcgtaccataactaactata

SEQ ID NO: 82332 - DNA, 80 bp, synthetic construct; identical to SEQ ID NO: 14565
  source 1..80: mol_type = other DNA

SEQ ID NO: 82333 - DNA, 80 bp, synthetic construct
  source 1..80: mol_type = other DNA
tcttgctttgtcactgaggctggagtacagtggtgtgatctcggctcactgcagcccccacctcccaggtccaagagatt

SEQ ID NO: 82334 - DNA, 80 bp, synthetic construct
  source 1..80: mol_type = other DNA
catttactaaaagcaatgaagctggttataacaaacactgatactgaaaataagagatatgtttgtcagtgcggtcttta

SEQ ID NO: 82335 - DNA, 80 bp, synthetic construct
  source 1..80: mol_type = other DNA
ctagagtagctaggaccacaggcgcgtgtcaccacagctggctaatttttttgtattcttggtagaaatgaggtttcgcc

SEQ ID NO: 82336 - DNA, 80 bp, synthetic construct; identical to SEQ ID NO: 14566
  source 1..80: mol_type = other DNA

SEQ ID NO: 82337 - DNA, 80 bp, synthetic construct
  source 1..80: mol_type = other DNA
aaatgtttaacttggctttcttttagatttgaagcatagtgactaatgaacatataatggtcgtagctttctttacaact

SEQ ID NO: 82338 - DNA, 80 bp, synthetic construct
  source 1..80: mol_type = other DNA
gaggaccttttaaaaggtattctttgttttgaaagactgttttccttctggaagttctaggccttatgagaaattaccta

SEQ ID NO: 82339 - DNA, 80 bp, synthetic construct
  source 1..80: mol_type = other DNA
ttaatagaacagtagtatgccatcagtgtggaaataactcacttgttaaataaatatttggggtgtatttgctgtatatc

SEQ ID NO: 82340 - DNA, 80 bp, synthetic construct; identical to SEQ ID NO: 14567
  source 1..80: mol_type = other DNA

SEQ ID NO: 82341 - DNA, 80 bp, synthetic construct
  source 1..80: mol_type = other DNA
atggcacgtgcctgtagtcccagctacttgggaggctgaggcaggagaatcgcttgaacccgggaggtggaggttgcagt

SEQ ID NO: 82342 - DNA, 80 bp, synthetic construct
  source 1..80: mol_type = other DNA
tattcttgacagtttggattttgtccttcaacctcataaaattgggaatttaagcatcacctggttcgatttaaatgcaa

SEQ ID NO: 82343 - DNA, 80 bp, synthetic construct
  source 1..80: mol_type = other DNA
gagaggttaagtaactaaagttacagagctagagtgacaggagtaaagcttcaactcaggcaacccagacttccagagtt

SEQ ID NO: 82344 - DNA, 80 bp, synthetic construct; identical to SEQ ID NO: 14568
  source 1..80: mol_type = other DNA

SEQ ID NO: 82345 - DNA, 80 bp, synthetic construct
  source 1..80: mol_type = other DNA
ggtcgggaagcggagagagaagcagctgtgtaatccgctggatgcggaccagggcgctccccattcccgtcgggagcccg

SEQ ID NO: 82346 - DNA, 80 bp, synthetic construct
  source 1..80: mol_type = other DNA
tggttttccctcgcactgtcttaaaccgatggcctttccttggcacagggtccactgcagcatgccaaacgaggaggcag

SEQ ID NO: 82347 - DNA, 80 bp, synthetic construct
  source 1..80: mol_type = other DNA
tataatgccatttgacagagtggaataacagtatctaaggaaacgggtagaggacaacaaagaatggagcatattcatgg

SEQ ID NO: 82348 - DNA, 80 bp, synthetic construct
  source 1..80: mol_type = other DNA
caggtactgcagagcgtgagtggtggtgttggttggtgaaatactggtcaccagtagtgtgcctgcttttgtaaaacatc

SEQ ID NO: 82349 - DNA, 80 bp, synthetic construct; identical to SEQ ID NO: 14569
  source 1..80: mol_type = other DNA

SEQ ID NO: 82350 - DNA, 80 bp, synthetic construct
  source 1..80: mol_type = other DNA
gttagtgaagcttttatgccattaattaggtcattcaagagcaaaccactttacaacgtaaattactttgtcaaaaatta

SEQ ID NO: 82351 - DNA, 80 bp, synthetic construct
  source 1..80: mol_type = other DNA
atttctgtttagtgagtactcatgagatatactcttgatataaagtgtttttcattgagcttttttttcctttacctaaa

SEQ ID NO: 82352 - DNA, 80 bp, synthetic construct
  source 1..80: mol_type = other DNA
attgtttcagtaatattttcaagataatgcggaattgggctggcttagataaataagactacataagtttttcactgata

SEQ ID NO: 82353 - DNA, 80 bp, synthetic construct; identical to SEQ ID NO: 14570
  source 1..80: mol_type = other DNA

SEQ ID NO: 82354 - DNA, 80 bp, synthetic construct
  source 1..80: mol_type = other DNA
ttgtagcattatttttattttaaatgttagagactcctattcaagtatgttgtgactttatccaaggtcaaatattgtat

SEQ ID NO: 82355 - DNA, 80 bp, synthetic construct
  source 1..80: mol_type = other DNA
ttgtggatttttatctacaatataagaatgctttaaaaaatacctggtgactaagcaaatggagaagcagcagttttcat

SEQ ID NO: 82356 - DNA, 80 bp, synthetic construct; identical to SEQ ID NO: 14571
  source 1..80: mol_type = other DNA

SEQ ID NO: 82357 - DNA, 80 bp, synthetic construct
  source 1..80: mol_type = other DNA
gtgcagtagcaaacatggctcacttgcagcttcaacctcgcaggctcaagtgatgctcccacttcagccctccaggtagc

SEQ ID NO: 82358 - DNA, 80 bp, synthetic construct
  source 1..80: mol_type = other DNA
tgaagtttttccatttgcattaattgctctgtagattttaccatttttgtctgttttataaactgttactcattttatga

SEQ ID NO: 82359 - DNA, 80 bp, synthetic construct
  source 1..80: mol_type = other DNA
cctacctatgcagcacataaaatgggatagagtattatggttcagaaaagatgggtaatagtttaggaaatatattcact

SEQ ID NO: 82360 - DNA, 80 bp, synthetic construct
  source 1..80: mol_type = other DNA
tataatctaagatatcctctaatttagaagaatatggtggattgctgtttgaaacactgctttttcataaaatctgctta

SEQ ID NO: 82361 - DNA, 80 bp, synthetic construct; identical to SEQ ID NO: 14572
  source 1..80: mol_type = other DNA

SEQ ID NO: 82362 - DNA, 80 bp, synthetic construct
  source 1..80: mol_type = other DNA
ttttcccctccccccaacccttggcaaccaccactccactttttgtctcaaagaatttgactattctgggaacctctaat

SEQ ID NO: 82363 - DNA, 80 bp, synthetic construct
  source 1..80: mol_type = other DNA
tctgtcagtggacacttcaggttgtttccaccttttgtctatcatgaataatgctactatgaacgtgggtgtgcaagtgt

SEQ ID NO: 82364 - DNA, 80 bp, synthetic construct; identical to SEQ ID NO: 14573
  source 1..80: mol_type = other DNA

SEQ ID NO: 82365 - DNA, 80 bp, synthetic construct
  source 1..80: mol_type = other DNA
tcagtcacagatacagtcatctgaagggcttgactagactgacggatcttcttccaagatggctaactcacatagtctca

SEQ ID NO: 82366 - DNA, 80 bp, synthetic construct
  source 1..80: mol_type = other DNA
ctgctgtattctctttattagatatgagtcactaagtccagcccaccaaagagaggaattaggatccacctcttaaagga

SEQ ID NO: 82367 - DNA, 80 bp, synthetic construct
  source 1..80: mol_type = other DNA
acaaatgtattatcttgcagtcctggagatcagacacggttttcactggaccaaaatcaagatatcagtggctctgcgtc

SEQ ID NO: 82368 - DNA, 80 bp, synthetic construct; identical to SEQ ID NO: 14574
  source 1..80: mol_type = other DNA

SEQ ID NO: 82369 - DNA, 80 bp, synthetic construct
  source 1..80: mol_type = other DNA
ccattttttttaagctgaaggatttttttagttatttttacttttgcgaatgtgtgttactttcttttggtaatttcaga

SEQ ID NO: 82370 - DNA, 80 bp, synthetic construct
  source 1..80: mol_type = other DNA
aacgttaaagcaacacagccttattaaatttctctttgtatcttttagactcgttataacaccagttctgtgggcgcttt

SEQ ID NO: 82371 - DNA, 80 bp, synthetic construct
  source 1..80: mol_type = other DNA
ttttccctctgttgcgcaggctagagtagcttctgggctcaagcagtcctcccaactgagcctcccaagtagctaggatt

SEQ ID NO: 82372 - DNA, 80 bp, synthetic construct
  source 1..80: mol_type = other DNA
acacctgtaacatatctttttatgaaacacagttcaacccataacactcccttaatacttggtaccttgtgaataataag

SEQ ID NO: 82373 - DNA, 80 bp, synthetic construct; identical to SEQ ID NO: 14575
  source 1..80: mol_type = other DNA

SEQ ID NO: 82374 - DNA, 80 bp, synthetic construct
  source 1..80: mol_type = other DNA
agacatcaggaaggttttgtgtaagaaactgagctgggccttaaaggatgaggatatattataacagcagaggaaaaaag

SEQ ID NO: 82375 - DNA, 80 bp, synthetic construct
  source 1..80: mol_type = other DNA
gaacaccagacagaagttatacagtctttgagagcatgagcattaaaaacaagtacagatttgaattctggcataggctc

SEQ ID NO: 82376 - DNA, 80 bp, synthetic construct
  source 1..80: mol_type = other DNA
atcaggctttctgaatttcacatatcaaatacataaaaaataagggcatatataggatttaaataatatgctggtcagtt

SEQ ID NO: 82377 - DNA, 80 bp, synthetic construct; identical to SEQ ID NO: 14576
  source 1..80: mol_type = other DNA

SEQ ID NO: 82378 - DNA, 80 bp, synthetic construct
  source 1..80: mol_type = other DNA
taatattcactttattattattattattattattattattttttgagacggagtctcactctgtcgccgaggctggagtg

SEQ ID NO: 82379 - DNA, 80 bp, synthetic construct
  source 1..80: mol_type = other DNA
ggctggtctcaaactcctgaccttgacctgcctcgcaaagtatggggattacacgcgtgagccaccacgccagcctttca

SEQ ID NO: 82380 - DNA, 80 bp, synthetic construct
  source 1..80: mol_type = other DNA
taaaaagtttaaaggaataaaaggcaaacagaacatcagtgagaaaagataccttcagataaagaatttttaaatgacag

SEQ ID NO: 82381 - DNA, 80 bp, synthetic construct; identical to SEQ ID NO: 14577
  source 1..80: mol_type = other DNA

SEQ ID NO: 82382 - DNA, 80 bp, synthetic construct
  source 1..80: mol_type = other DNA
aaagcataaaacatgaacaactggggtttatttcaggaatggaggataggtcaacattcaaaaatcttataactgactgc

SEQ ID NO: 82383 - DNA, 80 bp, synthetic construct
  source 1..80: mol_type = other DNA
actgaaatctgagtaagaatattaaatagtgaaataatatgccattcttattaaaatcgagaataagatagtttattcga

SEQ ID NO: 82384 - DNA, 80 bp, synthetic construct
  source 1..80: mol_type = other DNA
tggaaaccctattggaattcatagaatcatttgataaggtggccacacaagggttatgagttaaatagaattagtagctt

SEQ ID NO: 82385 - DNA, 80 bp, synthetic construct; identical to SEQ ID NO: 14578
  source 1..80: mol_type = other DNA

SEQ ID NO: 82386 - DNA, 80 bp, synthetic construct
  source 1..80: mol_type = other DNA
aagaaatacgtttccattcagtggaaaagaaatggtttgtttaatagtgctgatgtaattgcactgtttattactacttt

SEQ ID NO: 82387 - DNA, 80 bp, synthetic construct
  source 1..80: mol_type = other DNA
ccattaaagtgatagtaaaaacaaaataaagatgggagcttacaatgccataaagagtaagagacattcaaattgacatt

SEQ ID NO: 82388 - DNA, 80 bp, synthetic construct; identical to SEQ ID NO: 14579
  source 1..80: mol_type = other DNA

SEQ ID NO: 82389 - DNA, 80 bp, synthetic construct
  source 1..80: mol_type = other DNA
aaagtcaagtagttgcaacagaaatcatacgacccacaaagccttataatatttattatctggcccttacagaaaatgct

SEQ ID NO: 82390 - DNA, 80 bp, synthetic construct
  source 1..80: mol_type = other DNA
cacctaatggggccttagtagggaagagaaagagaaatagaaaagggttgttaaagagaaaattaaaatggatgaggtga

SEQ ID NO: 82391 - DNA, 80 bp, synthetic construct
  source 1..80: mol_type = other DNA
gttgactggaagtgtggatagtagacatcttattcctgattttaaagagaatgtctgtaacatttcactatgaagaatga

SEQ ID NO: 82392 - DNA, 80 bp, synthetic construct
  source 1..80: mol_type = other DNA
gaacctgggaggttacagtgagcccagatcatgccactgcactccagcctgggcaacagagcaagactccatctatttaa

SEQ ID NO: 82393 - DNA, 80 bp, synthetic construct; identical to SEQ ID NO: 14580
  source 1..80: mol_type = other DNA

SEQ ID NO: 82394 - DNA, 80 bp, synthetic construct
  source 1..80: mol_type = other DNA
ctggaataaactcagctttgttctgctgtagtttctttactgtatgttattgtattctgcttcctgataatctcgtttag

SEQ ID NO: 82395 - DNA, 80 bp, synthetic construct
  source 1..80: mol_type = other DNA
ttccttaaaagtttggtagaaggtgtttgtaaaaccattcagatacggtattttgaaggatttggaggaggaggggaaag

SEQ ID NO: 82396 - DNA, 80 bp, synthetic construct
  source 1..80: mol_type = other DNA
gctgggactacaggcacatgccaccatgcccggctaatttttgtatttttagtagaggcggggtttcaccatgttggcca

SEQ ID NO: 82397 - DNA, 80 bp, synthetic construct; identical to SEQ ID NO: 14581
  source 1..80: mol_type = other DNA

SEQ ID NO: 82398 - DNA, 80 bp, synthetic construct
  source 1..80: mol_type = other DNA
gttcaagctagtctctcacctcagcctcccaagtagctgagattacaggcatatgccaccacgcctggctaatttttgta

SEQ ID NO: 82399 - DNA, 80 bp, synthetic construct
  source 1..80: mol_type = other DNA
ctggccaatgctttgcttttcaaactcttcaaagggtatgtaataaaaaggaaggcttaccaccagacaccataccttga

SEQ ID NO: 82400 - DNA, 80 bp, synthetic construct
  source 1..80: mol_type = other DNA
agaggagggaccacatgaggcattagtgatgagcattctttttttttttcttggcttttgcctgttttttatgtttgttt

SEQ ID NO: 82401 - DNA, 80 bp, synthetic construct; identical to SEQ ID NO: 14582
  source 1..80: mol_type = other DNA

SEQ ID NO: 82402 - DNA, 80 bp, synthetic construct
  source 1..80: mol_type = other DNA
tgaggaatagatgcagttttttctttttcctcatggctgtcctatttcccagcaccactttaaattccatctttttacaa

SEQ ID NO: 82403 - DNA, 80 bp, synthetic construct
  source 1..80: mol_type = other DNA
aatagtacagagagtttctatataccttttacagattccccagatgattaacatcttatatatctgtactacaattatca

SEQ ID NO: 82404 - DNA, 80 bp, synthetic construct
  source 1..80: mol_type = other DNA
agctttatatagtatttttactgggactgtaaaatttataagttagcttagggagaaatggcatttttatgttgctgaat

SEQ ID NO: 82405 - DNA, 80 bp, synthetic construct; identical to SEQ ID NO: 14583
  source 1..80: mol_type = other DNA

SEQ ID NO: 82406 - DNA, 80 bp, synthetic construct
  source 1..80: mol_type = other DNA
accctgactgtaggactatatccagtgtttccacattaagtatgctgttggccttggggttgatagatcatgttaaagaa

SEQ ID NO: 82407 - DNA, 80 bp, synthetic construct
  source 1..80: mol_type = other DNA
tttcatctcttttgggatcagttctgatagattatatcttctagtaaattattttgggttttcaaatttgtttgcataga

SEQ ID NO: 82408 - DNA, 80 bp, synthetic construct
  source 1..80: mol_type = other DNA
aaagcagctccattaatgtaaaaaagaagtgatctcaaacttctgaaaataataatcctccacatttaattctgattatc

SEQ ID NO: 82409 - DNA, 80 bp, synthetic construct; identical to SEQ ID NO: 14584
  source 1..80: mol_type = other DNA

SEQ ID NO: 82410 - DNA, 80 bp, synthetic construct
  source 1..80: mol_type = other DNA
cacaaattttgtatgacttcacaagttttggattagggaggtatggctgcagcatcctaaaacaatataaggttgggtat

SEQ ID NO: 82411 - DNA, 80 bp, synthetic construct
  source 1..80: mol_type = other DNA
tctgaagagttgatttttttattcctgtaataaagggtacttttagcagtctctgctcatcttgcccatccggctctttt

SEQ ID NO: 82412 - DNA, 80 bp, synthetic construct
  source 1..80: mol_type = other DNA
aattctgtcagatccctacctctgtcatatggtttataatgtgctgggtattttcagacctgcttattaaaaagatgtaa

SEQ ID NO: 82413 - DNA, 80 bp, synthetic construct; identical to SEQ ID NO: 14585
  source 1..80: mol_type = other DNA

SEQ ID NO: 82414 - DNA, 80 bp, synthetic construct
  source 1..80: mol_type = other DNA
ggcctgaaattaacacacaagactcaatttttttcaaccaaagacttttgtaggtgatccctgcctgcaggactcccctt

SEQ ID NO: 82415 - DNA, 80 bp, synthetic construct
  source 1..80: mol_type = other DNA
caatattgtcgtgactagccagtgttacaacctgtctgccttattttgtgtaatggatttcatattacagaggcattttt

SEQ ID NO: 82416 - DNA, 80 bp, synthetic construct
  source 1..80: mol_type = other DNA
ataactcctagcattctataattcttcctaaagtcctcttacctggctatcttttgtatcttctttgtctctcctcttct

SEQ ID NO: 82417 - DNA, 80 bp, synthetic construct; identical to SEQ ID NO: 14586
  source 1..80: mol_type = other DNA

SEQ ID NO: 82418 - DNA, 80 bp, synthetic construct
  source 1..80: mol_type = other DNA
atgacatcttagaacttcagaactatttcaccatggaggatgtgtaagattagccttttatcaaataaaaagtgtgaaat

SEQ ID NO: 82419 - DNA, 80 bp, synthetic construct
  source 1..80: mol_type = other DNA
aagaaattattacttgatagaaagtttaatccatctgtgagaaggcaaatgtattcagacacaactaaagttctctcttc

SEQ ID NO: 82420 - DNA, 80 bp, synthetic construct; identical to SEQ ID NO: 14587
  source 1..80: mol_type = other DNA

SEQ ID NO: 82421 - DNA, 80 bp, synthetic construct
  source 1..80: mol_type = other DNA
atatgaaggtatcaagactgtgacttttaattgtagtttatccatttttattcagtattccctcttgtaaacttgaggta

SEQ ID NO: 82422 - DNA, 80 bp, synthetic construct
  source 1..80: mol_type = other DNA
ttctttttaagattaaagagaagagaccaaatatagcatcactgtactgaggcaaggttttctgtgtagttcatagaaac

SEQ ID NO: 82423 - DNA, 80 bp, synthetic construct
  source 1..80: mol_type = other DNA
tatccctggctttcccacaaactgagctatatgacctctgtatattcttcagaacttaagttgtcttatttggcaagtac

SEQ ID NO: 82424 - DNA, 80 bp, synthetic construct
  source 1..80: mol_type = other DNA
agccattttaattcccacttaggcagattctcttctgactgaatttaataacttcatagaattggacattatcaacaaaa

SEQ ID NO: 82425 - DNA, 80 bp, synthetic construct; identical to SEQ ID NO: 14588
  source 1..80: mol_type = other DNA

SEQ ID NO: 82426 - DNA, 80 bp, synthetic construct
  source 1..80: mol_type = other DNA
ttttaccctttatattcagtatcatcacagctcaacctttgctcatgtgtcctattctctttttccatccctctatcaat

SEQ ID NO: 82427 - DNA, 80 bp, synthetic construct
  source 1..80: mol_type = other DNA
ttccacaaactatgggtgacctaaaaagacttgcattagttgcctaacaggttaaaaaagagtagtttggtattttaaca

SEQ ID NO: 82428 - DNA, 80 bp, synthetic construct; identical to SEQ ID NO: 14589
  source 1..80: mol_type = other DNA

SEQ ID NO: 82429 - DNA, 80 bp, synthetic construct
  source 1..80: mol_type = other DNA
caagttgagtatcccttacccaaaattgcttcaggccagaagtgttttggattttatattttttcagatttttaaatact

SEQ ID NO: 82430 - DNA, 80 bp, synthetic construct
  source 1..80: mol_type = other DNA
caggaatagtggcacttcagatatacctgaaaccaaccataaattttattttactcagcatgtgcttcaacagacatctt

SEQ ID NO: 82431 - DNA, 80 bp, synthetic construct
  source 1..80: mol_type = other DNA
ttgaaaccattggcacttcctactgtggattaaaattaatccacacaatggttatttctcccaaaatcacttgctagact

SEQ ID NO: 82432 - DNA, 80 bp, synthetic construct
  source 1..80: mol_type = other DNA
gcctgggcaacatggcaagactctgtttctgcaaaaaaatacaaaaattagccaggtgtggcgtatatctgtggtcccag

SEQ ID NO: 82433 - DNA, 80 bp, synthetic construct; identical to SEQ ID NO: 14590
  source 1..80: mol_type = other DNA

SEQ ID NO: 82434 - DNA, 80 bp, synthetic construct
  source 1..80: mol_type = other DNA
aagttgtatgatgcctgagctttattttaaaaataagtctgaggcagaggggtggaaatagaggaagtggatatgggtgt

SEQ ID NO: 82435 - DNA, 80 bp, synthetic construct
  source 1..80: mol_type = other DNA
ataaatgcagaattatagctaatcttaaaaaaagttgtgtagtgtattttttactccatggctagagccctccccccaac

SEQ ID NO: 82436 - DNA, 80 bp, synthetic construct
  source 1..80: mol_type = other DNA
ctgggactacgggtgtgcaccaccacgcccggctaatttttatatttttagtacagacggggtttcactatgttggctag

SEQ ID NO: 82437 - DNA, 80 bp, synthetic construct; identical to SEQ ID NO: 14591
  source 1..80: mol_type = other DNA

SEQ ID NO: 82438 - DNA, 80 bp, synthetic construct
  source 1..80: mol_type = other DNA
gtatagcaacaaggtaaatatggcattttagagataaaaagctgaaagatggcatggtgtaggaagaattatctataggc

SEQ ID NO: 82439 - DNA, 80 bp, synthetic construct
  source 1..80: mol_type = other DNA
ccgagatcaacatttcagaatgtattttgaagatgtaattatcaagtgtacttatatctggtaatgaaaagcatctttaa

SEQ ID NO: 82440 - DNA, 80 bp, synthetic construct
  source 1..80: mol_type = other DNA
agaccgagtcttgctctgtcaccaggctggagtgcagtgacatgatcttggctgtctgcaacctccgcctcccgggttca

SEQ ID NO: 82441 - DNA, 80 bp, synthetic construct; identical to SEQ ID NO: 14592
  source 1..80: mol_type = other DNA

SEQ ID NO: 82442 - DNA, 80 bp, synthetic construct
  source 1..80: mol_type = other DNA
gcaattgtattccattttcttttaaaaactcttcaaaatcaagggcctcttctaggttgtatgcagtatgcagcccccaa

SEQ ID NO: 82443 - DNA, 80 bp, synthetic construct
  source 1..80: mol_type = other DNA
agaaccctttctagataagctgagattactggtaattttcttcctggggtatattgattctgggtacagattgagattca

SEQ ID NO: 82444 - DNA, 80 bp, synthetic construct
  source 1..80: mol_type = other DNA
gagatactagcatttagaggagctctaaatgcatggctcatttttaccatgagatattggccgagtcttgtagtgcagga

SEQ ID NO: 82445 - DNA, 80 bp, synthetic construct; identical to SEQ ID NO: 14593
  source 1..80: mol_type = other DNA

SEQ ID NO: 82446 - DNA, 80 bp, synthetic construct
  source 1..80: mol_type = other DNA
agagacacactcaaggaactgggaaaaccaaaccagttagttgtgaacttaaaattgcaactaggtctcaatccattttt

SEQ ID NO: 82447 - DNA, 80 bp, synthetic construct
  source 1..80: mol_type = other DNA
tttttgtatttttagtagagacggggtttcactgtgttagccaggatggtcttgatctcctgacctcgtgatccacctga

SEQ ID NO: 82448 - DNA, 80 bp, synthetic construct; identical to SEQ ID NO: 14594
  source 1..80: mol_type = other DNA

SEQ ID NO: 82449 - DNA, 80 bp, synthetic construct
  source 1..80: mol_type = other DNA
tattctagaactgaaaaatatatttgaaattaacattggatgggcttaacagcaggctgaacactgaattagtgaactag

SEQ ID NO: 82450 - DNA, 80 bp, synthetic construct
  source 1..80: mol_type = other DNA
gtaatagcttcttgtcctgggagtaggcaaagatgtcttaaacagaatgccaaagcaccatatatagaaagaaatttgat

SEQ ID NO: 82451 - DNA, 80 bp, synthetic construct
  source 1..80: mol_type = other DNA
tcgagtgtgcttctagaagaaaacataggataatcttatctatgtggccttgggtgggcaaaatttcttaggacacacaa

SEQ ID NO: 82452 - DNA, 80 bp, synthetic construct
  source 1..80: mol_type = other DNA
ttccttcagaatatataaatcccacaaaccagtaacaaaaagacaatccagtttttaaaatgtgacccagggacttgaaa

SEQ ID NO: 82453 - DNA, 80 bp, synthetic construct; identical to SEQ ID NO: 14595
  source 1..80: mol_type = other DNA

SEQ ID NO: 82454 - DNA, 80 bp, synthetic construct
  source 1..80: mol_type = other DNA
ggatagataaattgggctgtatttatacagtggactgctacatactatacaacatttaaaaacaatgaactgataaggca

SEQ ID NO: 82455 - DNA, 80 bp, synthetic construct
  source 1..80: mol_type = other DNA
taaaaggagcttgagggaaccctctggggtgctagaaatgtattttcacctagatagtgattacatgggtgtgaaaattc

SEQ ID NO: 82456 - DNA, 80 bp, synthetic construct; identical to SEQ ID NO: 14596
  source 1..80: mol_type = other DNA

SEQ ID NO: 82457 - DNA, 80 bp, synthetic construct
  source 1..80: mol_type = other DNA
aagttgagtatattcactattttattaaattaggaagtgtggacaaaaaaaatcaaaatcaactatttttttttaaattt

SEQ ID NO: 82458 - DNA, 80 bp, synthetic construct
  source 1..80: mol_type = other DNA
ttgcatagtattccattgtaggtacagctaaaaaatgctatggtttatttaatacttattgttggacatctgaatttata

SEQ ID NO: 82459 - DNA, 80 bp, synthetic construct
  source 1..80: mol_type = other DNA
acaagtaggattttttctaatacatattgtttaaaaagtatgacacaacaagtaaaaaagaaattgcttgtaatttcagt

SEQ ID NO: 82460 - DNA, 80 bp, synthetic construct; identical to SEQ ID NO: 14597
  source 1..80: mol_type = other DNA

SEQ ID NO: 82461 - DNA, 80 bp, synthetic construct
  source 1..80: mol_type = other DNA
ggggaggctgaggcaggagaatggcgtgaacttgggaggcggagctttcagtgagccgagattgcgccactgctctccag

SEQ ID NO: 82462 - DNA, 80 bp, synthetic construct
  source 1..80: mol_type = other DNA
agtaagaatatgaaagagatagctgtaagagagctaatagaggtagaatcaccagaaatccataactgggaatgtgaagg

SEQ ID NO: 82463 - DNA, 80 bp, synthetic construct
  source 1..80: mol_type = other DNA
agatgtatggtacctgtcatacagatgtaaagcatccatcagttggttggaaaagtgagtctgaagtttgcaagtgaagt

SEQ ID NO: 82464 - DNA, 80 bp, synthetic construct; identical to SEQ ID NO: 14598
  source 1..80: mol_type = other DNA

SEQ ID NO: 82465 - DNA, 80 bp, synthetic construct
  source 1..80: mol_type = other DNA
atactaaggctatttattaaaaggaattctggggtttgggggcgatttctttgtttctgtttttttagctgaggtctcac

SEQ ID NO: 82466 - DNA, 80 bp, synthetic construct
  source 1..80: mol_type = other DNA
gggacagagtctcgctatgttgttcaggctggtctcaaactcctggactcaagtgaccttcctgccttagcctcccaaag

SEQ ID NO: 82467 - DNA, 80 bp, synthetic construct
  source 1..80: mol_type = other DNA
caaagttgcaaatgttcaaatattttgtcttgcattcaggaaacctgattggccaaagaactatgctaggagctagaatg

SEQ ID NO: 82468 - DNA, 80 bp, synthetic construct
  source 1..80: mol_type = other DNA
gagaaaaaatgatcaagaaagggattacatgggaaagaagaaaagcatcaaaagtcaagaagtagtgaacatacagtcat

SEQ ID NO: 82469 - DNA, 80 bp, synthetic construct; identical to SEQ ID NO: 14599
  source 1..80: mol_type = other DNA

SEQ ID NO: 82470 - DNA, 80 bp, synthetic construct
  source 1..80: mol_type = other DNA
agagtgatctgaatttttttctcagcatacttaaatgtcaagaaatacagaatcatgtcttgaagttatttagaatttca

SEQ ID NO: 82471 - DNA, 80 bp, synthetic construct
  source 1..80: mol_type = other DNA
tcatctttaggtgtgtagatccaagtacagcttctctcgatttgggtgttggtatcagttttcttggtatgttagcctta

SEQ ID NO: 82472 - DNA, 80 bp, synthetic construct; identical to SEQ ID NO: 14600
  source 1..80: mol_type = other DNA

SEQ ID NO: 82473 - DNA, 80 bp, synthetic construct
  source 1..80: mol_type = other DNA
tctgttgcttgaaaattccagtgtcagaacagagaaagtgcttgataataattgaagccagacagagaaattacttttgg

SEQ ID NO: 82474 - DNA, 80 bp, synthetic construct
  source 1..80: mol_type = other DNA
ttgttttcagtcatgtatatttgtggttaaaatgtaaacctaatatttcactttaaaataatataacattaagaatattt

SEQ ID NO: 82475 - DNA, 80 bp, synthetic construct
  source 1..80: mol_type = other DNA
cagtcctgttcctatgggttcatttccaagaagagggtttgtaaatggaagcagagaaagtactggatatttagaagaac

SEQ ID NO: 82476 - DNA, 80 bp, synthetic construct; identical to SEQ ID NO: 14601
  source 1..80: mol_type = other DNA

SEQ ID NO: 82477 - DNA, 80 bp, synthetic construct
  source 1..80: mol_type = other DNA
ctaccaccacgcctggctaatttttgtatttttggtagagacggggtttcttcatgttggccaagctggttatcacttaa

SEQ ID NO: 82478 - DNA, 80 bp, synthetic construct
  source 1..80: mol_type = other DNA
gaggcggtaggattgcttgaggccaggagttcaggactagcctgggtgacatagtaagactctttctttttttttttttt

SEQ ID NO: 82479 - DNA, 80 bp, synthetic construct
  source 1..80: mol_type = other DNA
ggattacaggcatgtgccaccacgcctggctaattttatattttgagtagagacagtgtttcaccatgttggtcaggcta

SEQ ID NO: 82480 - DNA, 80 bp, synthetic construct; identical to SEQ ID NO: 14602
  source 1..80: mol_type = other DNA

SEQ ID NO: 82481 - DNA, 80 bp, synthetic construct
  source 1..80: mol_type = other DNA
ttaactgtgctcatcctatggtagcgtagaacacagccctgtacagtagcgtagaacacagtcctgtacagtagcgtaga

SEQ ID NO: 82482 - DNA, 80 bp, synthetic construct
  source 1..80: mol_type = other DNA
ttatattctttaacaaatctctctttatctcttctttccctctgtgtttcctagcctctagtatttactttttacttctg

SEQ ID NO: 82483 - DNA, 80 bp, synthetic construct
  source 1..80: mol_type = other DNA
tttttgtatttttagtagagatgggatttcaccatgttggccaggctggtctcgatctcctgacctcaggtgatctgcct

SEQ ID NO: 82484 - DNA, 80 bp, synthetic construct; identical to SEQ ID NO: 14603
  source 1..80: mol_type = other DNA

SEQ ID NO: 82485 - DNA, 80 bp, synthetic construct
  source 1..80: mol_type = other DNA
aaagatatggttctactttgtggcattgttgtgaaaattgaatattagtatataggaaatgcccagcatatctccctgag

SEQ ID NO: 82486 - DNA, 80 bp, synthetic construct
  source 1..80: mol_type = other DNA
atcttgaaaaataaggagtgaacttgggtccataatcttccatctctttttcccctttgagctctattaagaggcagagg

SEQ ID NO: 82487 - DNA, 80 bp, synthetic construct
  source 1..80: mol_type = other DNA
gtaagtggtaaggaatacttgtaataaaaatgttcttagtttctgtcttgacattatttcttgctagtcttccagagttc

SEQ ID NO: 82488 - DNA, 80 bp, synthetic construct; identical to SEQ ID NO: 14604
  source 1..80: mol_type = other DNA

SEQ ID NO: 82489 - DNA, 80 bp, synthetic construct
  source 1..80: mol_type = other DNA
cctttgctatgttcagtctcatttcccatgagatagttacttctataactctaaataatatgtttatattgctagtattg

SEQ ID NO: 82490 - DNA, 80 bp, synthetic construct
  source 1..80: mol_type = other DNA
tttcctgtgagtgactgtgtctactgaagccccgctgtataagatttggcaactgtgtgtttacctttattttgttaaga

SEQ ID NO: 82491 - DNA, 80 bp, synthetic construct
  source 1..80: mol_type = other DNA
attgatagaatatcatactctttgtgctgtttaaaggaagatgatgctatttggactgtgtctttcttatatagctcttt

SEQ ID NO: 82492 - DNA, 80 bp, synthetic construct; identical to SEQ ID NO: 14605
  source 1..80: mol_type = other DNA

SEQ ID NO: 82493 - DNA, 80 bp, synthetic construct
  source 1..80: mol_type = other DNA
cctttgtagatggccatttttcctctttggaagcttttgaatgttttggtatgcatattttcctcattcatcatgctgaa

SEQ ID NO: 82494 - DNA, 80 bp, synthetic construct
  source 1..80: mol_type = other DNA
taaatgctagaagttggttaagccaggacttaaacccagcttgtagctttataagctgggttttgaacctcagttttcta

SEQ ID NO: 82495 - DNA, 80 bp, synthetic construct; identical to SEQ ID NO: 14606
  source 1..80: mol_type = other DNA

SEQ ID NO: 82496 - DNA, 80 bp, synthetic construct
  source 1..80: mol_type = other DNA
gcttccccagagtattttactacaggttaatcttaaacttgatagtagcaaattgtccctagtgtccctaacctccccct

SEQ ID NO: 82497 - DNA, 80 bp, synthetic construct
  source 1..80: mol_type = other DNA
gagattctcatgcctcagcctcccaagcagctaggactatgagtatctgccacagcgcccagctaatttctgtattttta

SEQ ID NO: 82498 - DNA, 80 bp, synthetic construct
  source 1..80: mol_type = other DNA
aggaaatagtagcatcaccatctattttattctttttcccaccttggacctggtaggtcctgcaggtcctcactagggaa

SEQ ID NO: 82499 - DNA, 80 bp, synthetic construct; identical to SEQ ID NO: 14607
  source 1..80: mol_type = other DNA

SEQ ID NO: 82500 - DNA, 80 bp, synthetic construct
  source 1..80: mol_type = other DNA
aagtaatagtatcagagtggggaacgtctctctgtatgaccaaactccagaatctgtaatagaaaatatctacaaatcgg

SEQ ID NO: 82501 - DNA, 80 bp, synthetic construct
  source 1..80: mol_type = other DNA
cccgaaaactttactgattgcctgtctattgacctgaagccttactgataacataaacagtcaagtaacaaatattttgt

SEQ ID NO: 82502 - DNA, 80 bp, synthetic construct
  source 1..80: mol_type = other DNA
gtcaactgagtaaaaaatgttaaaaagacaagtgtcaagttcagaaaattatatgcagcccaacaactgacaaagcacta

SEQ ID NO: 82503 - DNA, 80 bp, synthetic construct; identical to SEQ ID NO: 14608
  source 1..80: mol_type = other DNA

SEQ ID NO: 82504 - DNA, 80 bp, synthetic construct
  source 1..80: mol_type = other DNA
catagatttatgaatactagggaattcttggaatattatgtagctaacaaaaaaaatacctagtatagattgagcatccc

SEQ ID NO: 82505 - DNA, 80 bp, synthetic construct
  source 1..80: mol_type = other DNA
agatcgattttttttttttttttttttggaaaggagtccattgcccaggctggaatgcagtggtatgatctcagctcact

SEQ ID NO: 82506 - DNA, 80 bp, synthetic construct
  source 1..80: mol_type = other DNA
aactcctgagctcaagtgatccacctgcctcggcttccctaagtattggcattacaggcatgtgccaccacacctggccc

SEQ ID NO: 82507 - DNA, 80 bp, synthetic construct; identical to SEQ ID NO: 14609
  source 1..80: mol_type = other DNA

SEQ ID NO: 82508 - DNA, 80 bp, synthetic construct
  source 1..80: mol_type = other DNA
gctgtgaagctgaaagccacatcagtgtccaaagtaatagcttcttatattctgggtttgttttctgggcatcattgctg

SEQ ID NO: 82509 - DNA, 80 bp, synthetic construct
  source 1..80: mol_type = other DNA
gaaaaaaagttctttttaatactctaattttaatgactgtaatattctaagtcctacctttaaaaattgaaatcaatgta

SEQ ID NO: 82510 - DNA, 80 bp, synthetic construct
  source 1..80: mol_type = other DNA
aagaaaaggaaaaagactggtattacgctcaacttcagaatctcactaaaagaatagatagtcttcctttaactgaaaat

SEQ ID NO: 82511 - DNA, 80 bp, synthetic construct; identical to SEQ ID NO: 14610
  source 1..80: mol_type = other DNA

SEQ ID NO: 82512 - DNA, 80 bp, synthetic construct
  source 1..80: mol_type = other DNA
cggatattagcatttttgcaagcactaaagctggtttgttttgtccaccagtattcacaataaattaacagtatgcagtt

SEQ ID NO: 82513 - DNA, 80 bp, synthetic construct
  source 1..80: mol_type = other DNA
ttatgacagcaggtcctaaactgccaacatctctaaccatctgattaggtttccatgagccaagtcttagatattccatg

SEQ ID NO: 82514 - DNA, 80 bp, synthetic construct
  source 1..80: mol_type = other DNA
tgaaactctgtctctactaaagtaaatacaaaaattagccagacatggtggtgcatgcctgtaatctcagctacttggga

SEQ ID NO: 82515 - DNA, 80 bp, synthetic construct; identical to SEQ ID NO: 14611
  source 1..80: mol_type = other DNA

SEQ ID NO: 82516 - DNA, 80 bp, synthetic construct
  source 1..80: mol_type = other DNA
gaagtgatttatttttcttagattgttcagaatgatggcatttcagaaacattggattacctgtgatttttgttttggta

SEQ ID NO: 82517 - DNA, 80 bp, synthetic construct
  source 1..80: mol_type = other DNA
atttagaaaagctgttctctcatgcagtggatataatataccatggtatctaatttttctttctgatgaaggaagcaact

SEQ ID NO: 82518 - DNA, 80 bp, synthetic construct
  source 1..80: mol_type = other DNA
ccatataaaacagggcgaacaattactgtgcttcatcttctggacaagaatgccaagttagtttctcttttataagcaat

SEQ ID NO: 82519 - DNA, 80 bp, synthetic construct
  source 1..80: mol_type = other DNA
ttcaggatcaagacatctggcaaagccttttagtttgtcagcagcatcccttctcttctttgatttactgtcatcagatt

SEQ ID NO: 82520 - DNA, 80 bp, synthetic construct; identical to SEQ ID NO: 14612
  source 1..80: mol_type = other DNA

SEQ ID NO: 82521 - DNA, 80 bp, synthetic construct
  source 1..80: mol_type = other DNA
gttctgtaaaaaaaaaattctaatcctgtcagcctctccctctccatgtcaatgattttattcatgggatggcacatata

SEQ ID NO: 82522 - DNA, 80 bp, synthetic construct
  source 1..80: mol_type = other DNA
tcaaacaagactacatattttagctattatccataaatatttcacgtaacttattttttttttttttgagatggagtctc

SEQ ID NO: 82523 - DNA, 80 bp, synthetic construct; identical to SEQ ID NO: 14613
  source 1..80: mol_type = other DNA

SEQ ID NO: 82524 - DNA, 80 bp, synthetic construct
  source 1..80: mol_type = other DNA
aatagacaaaaaggtaaaaactgaaagagagaaaaccgttttgaaaacatgtagctagccaggtttcctgagtggacgtt

SEQ ID NO: 82525 - DNA, 80 bp, synthetic construct
  source 1..80: mol_type = other DNA
gttattgttagcctgtgaggattaggaattttgggggatttgttgggactataacttatgaagaaaaataccaaagtgta

SEQ ID NO: 82526 - DNA, 80 bp, synthetic construct
  source 1..80: mol_type = other DNA
ctctactaatttattaagtagatcacatttatttaatatgatatataagacattatcaggcaccattggcaacatcagca

SEQ ID NO: 82527 - DNA, 80 bp, synthetic construct; identical to SEQ ID NO: 14614
  source 1..80: mol_type = other DNA

SEQ ID NO: 82528 - DNA, 80 bp, synthetic construct
  source 1..80: mol_type = other DNA
gaccagaatgccattctgagtcagatatatgtcatatacagttttctaagggcacacagaaaatctataacattgcctga

SEQ ID NO: 82529 - DNA, 80 bp, synthetic construct
  source 1..80: mol_type = other DNA
ttggcagttatcacagtccttggaattttaattaaagggttaataaatttttgaatgagttattacccattctgaagaag

SEQ ID NO: 82530 - DNA, 80 bp, synthetic construct
  source 1..80: mol_type = other DNA
tgtatatggtaatccttaccttaagttgaagtatgagcttaagaatgatggacttgtttcttgatatttctatgttgtcc

SEQ ID NO: 82531 - DNA, 80 bp, synthetic construct
  source 1..80: mol_type = other DNA
gtttgaattccacgtcacatcagggatccagattgagtctgacacctataatcaaatttaaacactccttggagtaaaaa

SEQ ID NO: 82532 - DNA, 80 bp, synthetic construct; identical to SEQ ID NO: 14615
  source 1..80: mol_type = other DNA

SEQ ID NO: 82533 - DNA, 80 bp, synthetic construct
  source 1..80: mol_type = other DNA
aacataatcaatattcacatagttgtgtctttaccatattcatttcccctggtactgttctgttctgccttggaattata

SEQ ID NO: 82534 - DNA, 80 bp, synthetic construct
  source 1..80: mol_type = other DNA
ataggaaggaaacaaagagaattttaggagagatgaagtaagttgtatggagaacattcccatatttctaccctcaatgt

SEQ ID NO: 82535 - DNA, 80 bp, synthetic construct
  source 1..80: mol_type = other DNA
caattgccttatctgtttcaaaactagcgtgggttgttgttttcttttttaacttttgggacaaattgggaggaaaacat

SEQ ID NO: 82536 - DNA, 80 bp, synthetic construct; identical to SEQ ID NO: 14616
  source 1..80: mol_type = other DNA

SEQ ID NO: 82537 - DNA, 80 bp, synthetic construct
  source 1..80: mol_type = other DNA
ccggcctcagcctcccaaagtgctaggatttagagtcatcatgcccagtgtattagtttgttttcaggcttctgataaat

SEQ ID NO: 82538 - DNA, 80 bp, synthetic construct
  source 1..80: mol_type = other DNA
ctcccatttttaaaaccatcagatctcgtgagaattatttactatcacaagaacagcacaggagagacccacccccataa

SEQ ID NO: 82539 - DNA, 80 bp, synthetic construct; identical to SEQ ID NO: 14617
  source 1..80: mol_type = other DNA

SEQ ID NO: 82540 - DNA, 80 bp, synthetic construct
  source 1..80: mol_type = other DNA
atgtttctgatattagagtaggaaagtatttcttaagaaagacttaaaacgctaatgataaaagaccaataagtttactg

SEQ ID NO: 82541 - DNA, 80 bp, synthetic construct
  source 1..80: mol_type = other DNA
taaattttagattttcatggaattattttaaaatgttaggtttatttgtttcaaaaaaacaagtattactttggtttata

SEQ ID NO: 82542 - DNA, 80 bp, synthetic construct
  source 1..80: mol_type = other DNA
tgtattccagacattttatatccctgaggagaggttaacttgagttctttcttggccattttgttcacataagcgctgat

SEQ ID NO: 82543 - DNA, 80 bp, synthetic construct; identical to SEQ ID NO: 14618
  source 1..80: mol_type = other DNA

SEQ ID NO: 82544 - DNA, 80 bp, synthetic construct
  source 1..80: mol_type = other DNA
agtgagctacaatctcaccactgcactcaaaaaaaaaaaaaaaaaaagagaaagaaaggaaagaaaagaaaagaaagaaa

SEQ ID NO: 82545 - DNA, 80 bp, synthetic construct
  source 1..80: mol_type = other DNA
ctgcccgaaactttataatttttgatgacatgcagtattagcaagggtgtgaaagtaaaaacatcatctacctttaaatc

SEQ ID NO: 82546 - DNA, 80 bp, synthetic construct
  source 1..80: mol_type = other DNA
ccaccacgcccagctaatttttgtatttttagtagaaacagggtttcaccatattggtcaggctggtcttgaactcttgg

SEQ ID NO: 82547 - DNA, 80 bp, synthetic construct; identical to SEQ ID NO: 14619
  source 1..80: mol_type = other DNA

SEQ ID NO: 82548 - DNA, 80 bp, synthetic construct
  source 1..80: mol_type = other DNA
gggtctgaggctatgagaaaaaatatgggatctcatttgcaaggggaaggagtaaataagaattccaaataaaataagaa

SEQ ID NO: 82549 - DNA, 80 bp, synthetic construct
  source 1..80: mol_type = other DNA
gtaatcccagctgccttaaggaatgctgaggtggtaggattgcttgagcttaggaattagaggttgcagtgagctatgat

SEQ ID NO: 82550 - DNA, 80 bp, synthetic construct
  source 1..80: mol_type = other DNA
tattatttaactttgtttgacaggcttgactaatgcaagtagaaaaaacaaaataagtgttatgaatcctacactatttt

SEQ ID NO: 82551 - DNA, 80 bp, synthetic construct; identical to SEQ ID NO: 14620
  source 1..80: mol_type = other DNA

SEQ ID NO: 82552 - DNA, 80 bp, synthetic construct
  source 1..80: mol_type = other DNA
cacagtatgataatagcacaggaataaatttaggcaaatgatagagactagaaagaggtacaggaatatttacaaccttt

SEQ ID NO: 82553 - DNA, 80 bp, synthetic construct
  source 1..80: mol_type = other DNA
aaatctaaaattaatagaataaaatacaggcaagagatcttcttaaatatgaatggaaactcaaaagcaataaagaggaa

SEQ ID NO: 82554 - DNA, 80 bp, synthetic construct
  source 1..80: mol_type = other DNA
gttcagagagggggttttgctggttgcccaggctgtagtgcagtggccattcacaggagcaatcataatacactacagcc

SEQ ID NO: 82555 - DNA, 80 bp, synthetic construct; identical to SEQ ID NO: 14621
  source 1..80: mol_type = other DNA

SEQ ID NO: 82556 - DNA, 80 bp, synthetic construct
  source 1..80: mol_type = other DNA
cttactactgggatgtgggaattggtggggtgaaggtgtaagtacacctctatattgccataattgatgatactgtttaa

SEQ ID NO: 82557 - DNA, 80 bp, synthetic construct
  source 1..80: mol_type = other DNA
cttattcatgtcttgtaaacaaacatgcaagagtttctctaggtgaggagtcagcaatctttttcttagaaggccacata

SEQ ID NO: 82558 - DNA, 80 bp, synthetic construct
  source 1..80: mol_type = other DNA
agtacagtcatgcaattttgtctcactgcaacctccgcctctaaggttcaaacgattcttgtgcctcaggctcccaagta

SEQ ID NO: 82559 - DNA, 80 bp, synthetic construct; identical to SEQ ID NO: 14622
  source 1..80: mol_type = other DNA

SEQ ID NO: 82560 - DNA, 80 bp, synthetic construct
  source 1..80: mol_type = other DNA
ttcctaatagtagtatgtgacaattcttgtttctgtatgtcttctccatcacttgtgagtcagaatttatcattaacaat

SEQ ID NO: 82561 - DNA, 80 bp, synthetic construct
  source 1..80: mol_type = other DNA
tttgagagatgttttaatatcctcttgataccaatcctttgtagataatatacatctcaattcctccccaccaaatctgt

SEQ ID NO: 82562 - DNA, 80 bp, synthetic construct
  source 1..80: mol_type = other DNA
taattcatcttgagtttgctattatgtatgttgtggaggcaggaatctaacttatatgtatattacttatatatgtgtgt

SEQ ID NO: 82563 - DNA, 80 bp, synthetic construct; identical to SEQ ID NO: 14623
  source 1..80: mol_type = other DNA

SEQ ID NO: 82564 - DNA, 80 bp, synthetic construct
  source 1..80: mol_type = other DNA
attaaatttatagattaaggagaagtcagaccttcataatatttagtcttggttgaaaggatggactctggaaccagacc

SEQ ID NO: 82565 - DNA, 80 bp, synthetic construct
  source 1..80: mol_type = other DNA
agtaagcaaattattaggtattcttactaattttatatctctctattcatttaggctttattttatatccttcaataagg

SEQ ID NO: 82566 - DNA, 80 bp, synthetic construct; identical to SEQ ID NO: 14624
  source 1..80: mol_type = other DNA

SEQ ID NO: 82567 - DNA, 80 bp, synthetic construct
  source 1..80: mol_type = other DNA
agttaagtgtgttgtttacacagttaagtgtaccctttatcaagttaagggatttaccttctattctaatttgtggagag

SEQ ID NO: 82568 - DNA, 80 bp, synthetic construct
  source 1..80: mol_type = other DNA
tagaaaaaggaaagaaatacttagtggttaagcatcctaatccaaaaatccaaattgtgaagtgctgcagtgagcatttc

SEQ ID NO: 82569 - DNA, 80 bp, synthetic construct
  source 1..80: mol_type = other DNA
atccacctcactggacatcaagacatagacatgacctcagtatttagtgagatactggcaatatggaaatgtagtgtaaa

SEQ ID NO: 82570 - DNA, 80 bp, synthetic construct; identical to SEQ ID NO: 14625
  source 1..80: mol_type = other DNA

SEQ ID NO: 82571 - DNA, 80 bp, synthetic construct
  source 1..80: mol_type = other DNA
caacctccgcctcccaggctcaagccatcctccctcctcagcttcccaagtcactgggactacaggcgtatgccctcatg

SEQ ID NO: 82572 - DNA, 80 bp, synthetic construct
  source 1..80: mol_type = other DNA
ttaagtttactactttcagaatcatgatagagactcagcttagttatattgttaaaaagaaagaaaagagggagaaaatt

SEQ ID NO: 82573 - DNA, 80 bp, synthetic construct
  source 1..80: mol_type = other DNA
tgctgtagcatgatctcagctcactgcaacctctgcctcctgggttcgagcgattctcctgccttagcctcccgagtagc

SEQ ID NO: 82574 - DNA, 80 bp, synthetic construct; identical to SEQ ID NO: 14626
  source 1..80: mol_type = other DNA

SEQ ID NO: 82575 - DNA, 80 bp, synthetic construct
  source 1..80: mol_type = other DNA
gaacataactgaaaaatgtttggaaatactccatctagcttctaacacacacacaccccttattgaaacagtttactttt

SEQ ID NO: 82576 - DNA, 80 bp, synthetic construct
  source 1..80: mol_type = other DNA
atattccccacattgtttccattccatgtggttcaatctgtagttactgctttgtgaccagttgatggtctccatatagt

SEQ ID NO: 82577 - DNA, 80 bp, synthetic construct
  source 1..80: mol_type = other DNA
gcccccaggccacgagcaagcattaccacctgagccctgcctcctgccaccatcagtggctgcattaggagcatgaaccc

SEQ ID NO: 82578 - DNA, 80 bp, synthetic construct; identical to SEQ ID NO: 14627
  source 1..80: mol_type = other DNA

SEQ ID NO: 82579 - DNA, 80 bp, synthetic construct
  source 1..80: mol_type = other DNA
tactaagcagatctagacatctgttgaataaagtccagtgtattacaaaaaattgaactgacccagggccgggcacagtg

SEQ ID NO: 82580 - DNA, 80 bp, synthetic construct
  source 1..80: mol_type = other DNA
ggaggttgcggtgagctgagattatgccactgcactccagccagggcaacagagcgagactctgtctcgaaaaaaaaaga

SEQ ID NO: 82581 - DNA, 80 bp, synthetic construct; identical to SEQ ID NO: 14628
  source 1..80: mol_type = other DNA

SEQ ID NO: 82582 - DNA, 80 bp, synthetic construct
  source 1..80: mol_type = other DNA
tgaaatatagatgttctttcagagaatttaaataccgtaatttttttcgtgaaattaaattatcaaagatttggactatt

SEQ ID NO: 82583 - DNA, 80 bp, synthetic construct
  source 1..80: mol_type = other DNA
tacacatttacctgtgtttactccagaaaccccattaaagtgatagtaaaaggatacaatgaaagaggcattaagaccag

SEQ ID NO: 82584 - DNA, 80 bp, synthetic construct
  source 1..80: mol_type = other DNA
caggaagatatttgaaaatctgttaagaagcagatggactttccagaacctccctacaaccctgtacagctaggtgactg

SEQ ID NO: 82585 - DNA, 80 bp, synthetic construct; identical to SEQ ID NO: 14629
  source 1..80: mol_type = other DNA

SEQ ID NO: 82586 - DNA, 80 bp, synthetic construct
  source 1..80: mol_type = other DNA
catagagcttcatttaactttttcatagatagcccgctcttaaatatgagtggacactaactaccagacagtatagatca

SEQ ID NO: 82587 - DNA, 80 bp, synthetic construct
  source 1..80: mol_type = other DNA
agaataatcctacactaagacacatcatgaggaaatttcaaatcactggggataaaaagaatattctaacaaccttctgg

SEQ ID NO: 82588 - DNA, 80 bp, synthetic construct
  source 1..80: mol_type = other DNA
gtaggatgatctagctgggttgttttgttggtgaatcctgccatgtaagtaagtctctttaaaaagtttctgtcacccag

SEQ ID NO: 82589 - DNA, 80 bp, synthetic construct; identical to SEQ ID NO: 14630
  source 1..80: mol_type = other DNA

SEQ ID NO: 82590 - DNA, 80 bp, synthetic construct
  source 1..80: mol_type = other DNA
tgtgcgtgtgctgtggtaccattccattctcacactaactacccagagttagcacagccccaacaggttaagagccgact

SEQ ID NO: 82591 - DNA, 80 bp, synthetic construct
  source 1..80: mol_type = other DNA
cttaggattaacagttttattataaggatacagatcaagaatggccaaatgaagagacatatggggcaaggcctaaggaa

SEQ ID NO: 82592 - DNA, 80 bp, synthetic construct
  source 1..80: mol_type = other DNA
cacactgcaacctccgcctcctgggttcaagcgattctcctgcctcagcctccctagtagctgggattgtaggtgtctgc

SEQ ID NO: 82593 - DNA, 80 bp, synthetic construct
  source 1..80: mol_type = other DNA
tcagtgtattcaccaatcagaaagctgcactgagttttggtatccataatttttattgaaattttattctgtaggcatga

SEQ ID NO: 82594 - DNA, 80 bp, synthetic construct; identical to SEQ ID NO: 14631
  source 1..80: mol_type = other DNA

SEQ ID NO: 82595 - DNA, 80 bp, synthetic construct
  source 1..80: mol_type = other DNA
aaaatgaattttttcaactcaagacccaggggatataatacaagagaaagagatgagtgaaactacagagtaaagatgaa

SEQ ID NO: 82596 - DNA, 80 bp, synthetic construct
  source 1..80: mol_type = other DNA
tgagcatcagtcatatgtacccagaaacccaaatgaacaaaaaataaagataacctttaactccatggacaacaggaagt

SEQ ID NO: 82597 - DNA, 80 bp, synthetic construct; identical to SEQ ID NO: 14632
  source 1..80: mol_type = other DNA

SEQ ID NO: 82598 - DNA, 80 bp, synthetic construct
  source 1..80: mol_type = other DNA
ataagtcaaatatttgcaatttaaagaatgtgttcatttttgcaatggactctttttttacctggcccttggaaagggcc

SEQ ID NO: 82599 - DNA, 80 bp, synthetic construct
  source 1..80: mol_type = other DNA
ataggcagtgttttgtttttaattgaatagctttagttacagttagttctttcccccccatctttcttgtattctgatta

SEQ ID NO: 82600 - DNA, 80 bp, synthetic construct
  source 1..80: mol_type = other DNA
gttcaccttcaatttcattgtagtaccatttattaatagtaatcctcattttccagtactgttacaagtttcaggttgga

SEQ ID NO: 82601 - DNA, 80 bp, synthetic construct
  source 1..80: mol_type = other DNA
aaggaaggtgccatttcacatttaagaaagaacaaaaccactttttacaattttgccgtttgtggtttgtttattgcatt

SEQ ID NO: 82602 - DNA, 80 bp, synthetic construct; identical to SEQ ID NO: 14633
  source 1..80: mol_type = other DNA

SEQ ID NO: 82603 - DNA, 80 bp, synthetic construct
  source 1..80: mol_type = other DNA
gaggacaatgcagtgtgtcttaaaagataatagcaaatgaagaatacttactaaagtcacagtattcttgcaactcatta

SEQ ID NO: 82604 - DNA, 80 bp, synthetic construct
  source 1..80: mol_type = other DNA
ttatgatggctttaatcataaaggcaataataagcattgacgaagatgtggagaagcaggatccctcattgctggtggga

SEQ ID NO: 82605 - DNA, 80 bp, synthetic construct; identical to SEQ ID NO: 14634
  source 1..80: mol_type = other DNA

SEQ ID NO: 82606 - DNA, 80 bp, synthetic construct
  source 1..80: mol_type = other DNA
atcaaatgtccagaaaaggcaaaatttctaaagacaaaaagtacattagtggttgtctgactgtaagtggaaatgaggat

SEQ ID NO: 82607 - DNA, 80 bp, synthetic construct
  source 1..80: mol_type = other DNA
tatcacctagagtagaaaaccttggagaagttgtaaagcaactatggaaatgaggaaactagttagaattaatctttcat

SEQ ID NO: 82608 - DNA, 80 bp, synthetic construct
  source 1..80: mol_type = other DNA
gaagatagtaaatgttaaatggtagtttgggttggaattgcctgggttggaattccagctctgactctgccatttactag

SEQ ID NO: 82609 - DNA, 80 bp, synthetic construct
  source 1..80: mol_type = other DNA
taaccaacatggtgaaaccctgtctctactaaaaatacaaaacataaccagcatggtggtgggcgcctgtaatcccagct

SEQ ID NO: 82610 - DNA, 80 bp, synthetic construct; identical to SEQ ID NO: 14635
  source 1..80: mol_type = other DNA

SEQ ID NO: 82611 - DNA, 80 bp, synthetic construct
  source 1..80: mol_type = other DNA
ttcttttatctctgtcactgcttccctagtgcatagtgccactgtctcacacttatattaatacattagcctcctaactg

SEQ ID NO: 82612 - DNA, 80 bp, synthetic construct
  source 1..80: mol_type = other DNA
aatatattagtattaattatgtgggggcaatcatgcagtggcctcactgtaacttgcaagtagaaaaggcaagaatgcca

SEQ ID NO: 82613 - DNA, 80 bp, synthetic construct; identical to SEQ ID NO: 14636
  source 1..80: mol_type = other DNA

SEQ ID NO: 82614 - DNA, 80 bp, synthetic construct
  source 1..80: mol_type = other DNA
ccaagagagcatagaacaatgtctagttttgctagcactgtattccccagcatctattgcaagtaactaacatagtagat

SEQ ID NO: 82615 - DNA, 80 bp, synthetic construct
  source 1..80: mol_type = other DNA
tattcttatatttctggattactgagtgctacctcacttttgccagcatataactgatactagtttattgatggaaatgt

SEQ ID NO: 82616 - DNA, 80 bp, synthetic construct
  source 1..80: mol_type = other DNA
agcatataggtgtttctataaatgaccgtgagaaattcttttatttctttaattttgtggtggtatttttataaagtgac

SEQ ID NO: 82617 - DNA, 80 bp, synthetic construct
  source 1..80: mol_type = other DNA
atggtggttgcattagaaaaggctttgggttttattcatatcagaagctaagagcctatcattttatttcacctaacttt

SEQ ID NO: 82618 - DNA, 80 bp, synthetic construct; identical to SEQ ID NO: 14637
  source 1..80: mol_type = other DNA

SEQ ID NO: 82619 - DNA, 80 bp, synthetic construct
  source 1..80: mol_type = other DNA
ccttgggctaagaaagcctacaccatttttgcatgtactgatgttaactccatcttaacagaggtcatctcagaacaagc

SEQ ID NO: 82620 - DNA, 80 bp, synthetic construct
  source 1..80: mol_type = other DNA
aatgatctataaatcttacctattttcttagtcctgaatgcatatttccagaagcattcagtaccaatgtgctgtcattt

SEQ ID NO: 82621 - DNA, 80 bp, synthetic construct; identical to SEQ ID NO: 14638
  source 1..80: mol_type = other DNA

SEQ ID NO: 82622 - DNA, 80 bp, synthetic construct
  source 1..80: mol_type = other DNA
acaaaaaagtaaggcaacatggcctaattatgcttaatattaccacatcattttcagcaaaattatgaaagtaaactttt

SEQ ID NO: 82623 - DNA, 80 bp, synthetic construct
  source 1..80: mol_type = other DNA
ttaaaaacagaatttcactaaattgttcttaaaggtaatttttctactgttgatacagaaaattttcttagtctctctag

SEQ ID NO: 82624 - DNA, 80 bp, synthetic construct
  source 1..80: mol_type = other DNA
ttcagtattactagttagcattatattggaaaacaagtggtaaattaggacaaaggcaatcatgtttaaacagcacattt

SEQ ID NO: 82625 - DNA, 80 bp, synthetic construct; identical to SEQ ID NO: 14639
  source 1..80: mol_type = other DNA

SEQ ID NO: 82626 - DNA, 80 bp, synthetic construct
  source 1..80: mol_type = other DNA
tgatagatttcacgttacagcatgagacttcagtatgccaggaaatcatagcgagattccaaaacaaacaaccaagatca

SEQ ID NO: 82627 - DNA, 80 bp, synthetic construct
  source 1..80: mol_type = other DNA
aaggatatgaacaggaaataaaagaagaaattaaaatgacttgtaaacatggaaagatggtcaactttactaatcatgat

SEQ ID NO: 82628 - DNA, 80 bp, synthetic construct
  source 1..80: mol_type = other DNA
tgacatgaaacaggctttctggagagcaattttgtcaaatgcatctagcattatttataatgtgcctgttgtgaagctca

SEQ ID NO: 82629 - DNA, 80 bp, synthetic construct; identical to SEQ ID NO: 14640
  source 1..80: mol_type = other DNA

SEQ ID NO: 82630 - DNA, 80 bp, synthetic construct
  source 1..80: mol_type = other DNA
tatctttaaattaacaaatatgccagatactgtgttggactctagaattgataattgaaaaggacagacagtccttggcc

SEQ ID NO: 82631 - DNA, 80 bp, synthetic construct
  source 1..80: mol_type = other DNA
acttatttgtttaaacctttcagtggctactcacctcccatatattagaatccagattcttcatgttgcttactcttcca

SEQ ID NO: 82632 - DNA, 80 bp, synthetic construct
  source 1..80: mol_type = other DNA
ttcagttcatattatatgttttactcatccttccccaccgtttaaatgtcacttcttcctggacattttccttgtctcca

SEQ ID NO: 82633 - DNA, 80 bp, synthetic construct
  source 1..80: mol_type = other DNA
tgctcctcactgtatgccagccaactaatatgtacctggcagagagcatttatgttgaatattaataaatattattgact

SEQ ID NO: 82634 - DNA, 80 bp, synthetic construct; identical to SEQ ID NO: 14641
  source 1..80: mol_type = other DNA

SEQ ID NO: 82635 - DNA, 80 bp, synthetic construct
  source 1..80: mol_type = other DNA
cagggtagaagttcgagttcaacctgggcaacatagggagactttgcctctgcaaaaaaaaataaaaattagccgtgtgt

SEQ ID NO: 82636 - DNA, 80 bp, synthetic construct
  source 1..80: mol_type = other DNA
aacttaaaagcaagtaagtatgatctcattatacatatgtataatgtgtgtatatgcatagagaaatgtgtgggagaatg

SEQ ID NO: 82637 - DNA, 80 bp, synthetic construct; identical to SEQ ID NO: 14642
  source 1..80: mol_type = other DNA

SEQ ID NO: 82638 - DNA, 80 bp, synthetic construct
  source 1..80: mol_type = other DNA
ttgtttagcagtagcaatcatagacttgcccaccatattggtgtttgtatgacactaatgctgctaatactatctggtta

SEQ ID NO: 82639 - DNA, 80 bp, synthetic construct
  source 1..80: mol_type = other DNA
gttttattatttgctcaaaagacaaaagccaccaacactagttgaaaatgaaaatcagtctctgactttctcaggatcac

SEQ ID NO: 82640 - DNA, 80 bp, synthetic construct
  source 1..80: mol_type = other DNA
tcattggcttcccttgattcttagaaaaatgataaccatttattgtgacccaggtaacctggcccctacctatcttgtca

SEQ ID NO: 82641 - DNA, 80 bp, synthetic construct; identical to SEQ ID NO: 14643
  source 1..80: mol_type = other DNA

SEQ ID NO: 82642 - DNA, 80 bp, synthetic construct
  source 1..80: mol_type = other DNA
tgtaagctccagaaaggcagggattctatctagttttgttattttcatacccacacagtccctgataaatagtagataac

SEQ ID NO: 82643 - DNA, 80 bp, synthetic construct
  source 1..80: mol_type = other DNA
tagttggttctcaactttatttatttatttatttatttatttatttatttatttattgagatagggtctcactctgtcac

SEQ ID NO: 82644 - DNA, 80 bp, synthetic construct
  source 1..80: mol_type = other DNA
atattgtccaggctggttttgaattcccaagctcaagcaatcctccagcattggcctcccaaagtgctacgattggctgg

SEQ ID NO: 82645 - DNA, 80 bp, synthetic construct
  source 1..80: mol_type = other DNA
agctacttgggaggctgaggcaggaaaatctcttgaacctaggaggctgaggttgcagtgagttgagattgtaccactgc

SEQ ID NO: 82646 - DNA, 80 bp, synthetic construct; identical to SEQ ID NO: 14644
  source 1..80: mol_type = other DNA

SEQ ID NO: 82647 - DNA, 80 bp, synthetic construct
  source 1..80: mol_type = other DNA
agatatggaagtttttaatccatttttctttcactattttttctttttttcaagcaacctaagcttttctatttgaaatt

SEQ ID NO: 82648 - DNA, 80 bp, synthetic construct
  source 1..80: mol_type = other DNA
tcatatcgacatgtaacctattcaccttaacctcccattttattttttaagaagattccaggcatcatcatcacttcttc

SEQ ID NO: 82649 - DNA, 80 bp, synthetic construct
  source 1..80: mol_type = other DNA
aaccctgtctctactgaaaatacaaaaattagccagatgtggtggcgcacacgtgtagtcccagctactcgggaagctga

SEQ ID NO: 82650 - DNA, 80 bp, synthetic construct; identical to SEQ ID NO: 14645
  source 1..80: mol_type = other DNA

SEQ ID NO: 82651 - DNA, 80 bp, synthetic construct
  source 1..80: mol_type = other DNA
tttgtttttgtttttttagtcaggatctcactctcgcctggactagagtgcagtggcaaagctcactgcagccttgaact

SEQ ID NO: 82652 - DNA, 80 bp, synthetic construct
  source 1..80: mol_type = other DNA
tcatgcctggcttccaaatgttttttttatagagtgtcccatactctagattttgctgatgactccccatgatatacttc

SEQ ID NO: 82653 - DNA, 80 bp, synthetic construct; identical to SEQ ID NO: 14646
  source 1..80: mol_type = other DNA

SEQ ID NO: 82654 - DNA, 80 bp, synthetic construct
  source 1..80: mol_type = other DNA
cctgtctctacaaaaaatacaaaaaaaaaaaaaaattaggcgtggtggcatgtgcctgaggtcccagctacttgggaggt

SEQ ID NO: 82655 - DNA, 80 bp, synthetic construct
  source 1..80: mol_type = other DNA
gtaaagaattggtaattaaaggtattaaagatttttacatccccaatgagtatacagtgagaagatgaatacctagccta

SEQ ID NO: 82656 - DNA, 80 bp, synthetic construct
  source 1..80: mol_type = other DNA
ttcctactatattatattggagtgagttgaagttaaatggaaggttaaaaagtagaagagagcagtcaggcgtgatggct

SEQ ID NO: 82657 - DNA, 80 bp, synthetic construct; identical to SEQ ID NO: 14647
  source 1..80: mol_type = other DNA

SEQ ID NO: 82658 - DNA, 80 bp, synthetic construct
  source 1..80: mol_type = other DNA
agagttgaagatccctaagatcaaagagaaatggagagagaaaggatccagagcacatctaaagggatggaccttagata

SEQ ID NO: 82659 - DNA, 80 bp, synthetic construct
  source 1..80: mol_type = other DNA
acagttttatatgatacaaaatgaggcatatcaaaaatagccaaagaaaggagagctgacaagggaaacaaaaagatggc

SEQ ID NO: 82660 - DNA, 80 bp, synthetic construct
  source 1..80: mol_type = other DNA
ttgcaatgtttccagacaaatggggtggaataagtgcagggcaaagctgttaaaagctagcaagagaattatgaaagtga

SEQ ID NO: 82661 - DNA, 80 bp, synthetic construct
  source 1..80: mol_type = other DNA
gcctgtaatcccagctactctggaggctgaagcaggagaatcacttgaacctgggagccagagttggtagtgagctgaga

SEQ ID NO: 82662 - DNA, 80 bp, synthetic construct; identical to SEQ ID NO: 14648
  source 1..80: mol_type = other DNA

SEQ ID NO: 82663 - DNA, 80 bp, synthetic construct
  source 1..80: mol_type = other DNA
gaagttattaatcatttcttgtggatagggagactctagtccctccgaaagaagttggctcaggtctagccttaataaaa

SEQ ID NO: 82664 - DNA, 80 bp, synthetic construct
  source 1..80: mol_type = other DNA
gaagagtgtctcaaaatccaggagctatataggaagataactaagactgaagcttagaaaagatttgttgtctacactga

SEQ ID NO: 82665 - DNA, 80 bp, synthetic construct; identical to SEQ ID NO: 14649
  source 1..80: mol_type = other DNA

SEQ ID NO: 82666 - DNA, 80 bp, synthetic construct
  source 1..80: mol_type = other DNA
tgcttctaagttcacttacggctattgaaggcctcagatcctcattggatgtcagccagagagacatcagttccttgtta

SEQ ID NO: 82667 - DNA, 80 bp, synthetic construct
  source 1..80: mol_type = other DNA
agccaagactaaaggggaagggattacaaaaacgcgtgaataccaggaggcaaagatctatcttagaggctacctacaaa

SEQ ID NO: 82668 - DNA, 80 bp, synthetic construct
  source 1..80: mol_type = other DNA
tattagttagaaccagagtaagctccttatgttcagatttatttgtagttctgcctccccttcctctccacacacacaca

SEQ ID NO: 82669 - DNA, 80 bp, synthetic construct; identical to SEQ ID NO: 14650
  source 1..80: mol_type = other DNA

SEQ ID NO: 82670 - DNA, 80 bp, synthetic construct
  source 1..80: mol_type = other DNA
agatgtaagatgagtctttccttgatgcctcttttcccttccctaaggaggattactaattagttttgtcctagaagtgt

SEQ ID NO: 82671 - DNA, 80 bp, synthetic construct
  source 1..80: mol_type = other DNA
ttctcagtccaaccccagacttccctatgcgagtatgaataagtggattatcttgcctttatatggggacacatttttta

SEQ ID NO: 82672 - DNA, 80 bp, synthetic construct
  source 1..80: mol_type = other DNA
atctaaaatagttttgtgcactagtcaggaaaacctcaccttggcttataacatgacttatacagaagttctaagcagcc

SEQ ID NO: 82673 - DNA, 80 bp, synthetic construct; identical to SEQ ID NO: 14651
  source 1..80: mol_type = other DNA

SEQ ID NO: 82674 - DNA, 80 bp, synthetic construct
  source 1..80: mol_type = other DNA
aaaaatcaccaaaagtgaaatttatgcacaaaaggaagttataaggtgtgttggttccagaattctccccttgtaccctc

SEQ ID NO: 82675 - DNA, 80 bp, synthetic construct
  source 1..80: mol_type = other DNA
ttatttataattcaacaaatattctgtggatacctactaagcttaagaccacccttggtactaagaatgcagcagcgaac

SEQ ID NO: 82676 - DNA, 80 bp, synthetic construct
  source 1..80: mol_type = other DNA
attaatgaatggatttagctgtggcctatattttgataggtcccagttatttatctgcaaccccacctcctgtccagagt

SEQ ID NO: 82677 - DNA, 80 bp, synthetic construct
  source 1..80: mol_type = other DNA
gccatcatttatttctgggtttccgatatccattacgagcatcattacttacccatttatccaagcttgacacctccaag

SEQ ID NO: 82678 - DNA, 80 bp, synthetic construct; identical to SEQ ID NO: 14652
  source 1..80: mol_type = other DNA

SEQ ID NO: 82679 - DNA, 80 bp, synthetic construct
  source 1..80: mol_type = other DNA
cacagtctcctccgtcagtctcctgtcacaaaatgcctaccttaaatgttactgattttatacagcctctaatagtccct

SEQ ID NO: 82680 - DNA, 80 bp, synthetic construct
  source 1..80: mol_type = other DNA
gactgtagcaaattcatacttagttttctggcaatttggagcatttcagaatttgaacattccttcaatgcttttcatca

SEQ ID NO: 82681 - DNA, 80 bp, synthetic construct
  source 1..80: mol_type = other DNA
taggtaaaaaatattttgaacagttataatggtcatacttttatgatgtatttaattgtttatcatacagacacttcatt

SEQ ID NO: 82682 - DNA, 80 bp, synthetic construct; identical to SEQ ID NO: 14653
  source 1..80: mol_type = other DNA

SEQ ID NO: 82683 - DNA, 80 bp, synthetic construct
  source 1..80: mol_type = other DNA
atacaaaaatttagccagtgtggtggcacacacctgtggtcccagctactcaggaggctgaggcatgagaatagttggaa

SEQ ID NO: 82684 - DNA, 80 bp, synthetic construct
  source 1..80: mol_type = other DNA
ctttttcagtctttacatccacttttctgcaagaatactgagttccagccaaactggctcacttcctgcttcctgaacat

SEQ ID NO: 82685 - DNA, 80 bp, synthetic construct
  source 1..80: mol_type = other DNA
tcaaaactcttcttgggctttgctttttcacaaaacattttctgattcccaaggtcctcttacctccccatgtgatccat

SEQ ID NO: 82686 - DNA, 80 bp, synthetic construct; identical to SEQ ID NO: 14654
  source 1..80: mol_type = other DNA

SEQ ID NO: 82687 - DNA, 80 bp, synthetic construct
  source 1..80: mol_type = other DNA
tggcacatggctgtaatcccagctactcgggaggctgaggcaggagaattgtttgaacctgggaggcggaggttgcagtg

SEQ ID NO: 82688 - DNA, 80 bp, synthetic construct
  source 1..80: mol_type = other DNA
ttgctctgttgcccaggctgtagtgcagtggcacgatcttggctcactgcaacccccacctccagggtttaagtgattct

SEQ ID NO: 82689 - DNA, 80 bp, synthetic construct
  source 1..80: mol_type = other DNA
gggattagaggcatgagtgaccacacccggcccatcagagattttaatattcactaagatgaaatgaaattctaatatta

SEQ ID NO: 82690 - DNA, 80 bp, synthetic construct; identical to SEQ ID NO: 14655
  source 1..80: mol_type = other DNA

SEQ ID NO: 82691 - DNA, 80 bp, synthetic construct
  source 1..80: mol_type = other DNA
tattgtgtgaaaactggcaattagaatactgtttctttttgaagtaatttatgcatgataatattaagaccctagtatgt

SEQ ID NO: 82692 - DNA, 80 bp, synthetic construct
  source 1..80: mol_type = other DNA
tcaaatagcttaactataatagtatcacagcttgctcctaagaggtggagccaaaatttgaacctagctccgatgaaaac

SEQ ID NO: 82693 - DNA, 80 bp, synthetic construct
  source 1..80: mol_type = other DNA
tgcattctagaatgtatagtaacgtccctggtctctccccactagattcccctaaaatacccatcctacaattgtgacaa

SEQ ID NO: 82694 - DNA, 80 bp, synthetic construct; identical to SEQ ID NO: 14656
  source 1..80: mol_type = other DNA

SEQ ID NO: 82695 - DNA, 80 bp, synthetic construct
  source 1..80: mol_type = other DNA
tatcatctgacgagaattaatgattgctgagaattagtacttaaaattgttgcagaaatgttttctgtttattgcttata

SEQ ID NO: 82696 - DNA, 80 bp, synthetic construct
  source 1..80: mol_type = other DNA
acttatctaggcaaacagcactaacagtttgttagtgagtatgcaaaaacctacttttgcttttaatactgtatattacc

SEQ ID NO: 82697 - DNA, 80 bp, synthetic construct
  source 1..80: mol_type = other DNA
acttaattggtttttggcttttggatattaaagtcgtaattttgtttctaaactcatttggcccacaggtggaaatggtg

SEQ ID NO: 82698 - DNA, 80 bp, synthetic construct; identical to SEQ ID NO: 14657
  source 1..80: mol_type = other DNA

SEQ ID NO: 82699 - DNA, 80 bp, synthetic construct
  source 1..80: mol_type = other DNA
gtggcaggaagctcatgaaccaggcatggaccaggacaaaaatccaagtatgttctctatagtgtacatcgtagtgcatg

SEQ ID NO: 82700 - DNA, 80 bp, synthetic construct
  source 1..80: mol_type = other DNA
gtgcactactataagaacagtaagtcaagagaaatttatacaatcatagcatagtagggccttagtagagctagaaagaa

SEQ ID NO: 82701 - DNA, 80 bp, synthetic construct
  source 1..80: mol_type = other DNA
tatcattatattcaggggatacagagcagcgttacatctgttatgttatttgctcctcacatcaacctactgaagtagga

SEQ ID NO: 82702 - DNA, 80 bp, synthetic construct
  source 1..80: mol_type = other DNA
ctgtagacagtgggcctcagttgctgggagtgataatccacccagctcttcactcaggaagggacccttagacctcagcc

SEQ ID NO: 82703 - DNA, 80 bp, synthetic construct; identical to SEQ ID NO: 14658
  source 1..80: mol_type = other DNA

SEQ ID NO: 82704 - DNA, 80 bp, synthetic construct
  source 1..80: mol_type = other DNA
gggcagcacagtgagacactatctcatttttaaaaaatttaaaaagcataagaaaaaagggattgcctttcatatctatt

SEQ ID NO: 82705 - DNA, 80 bp, synthetic construct
  source 1..80: mol_type = other DNA
gttttttaaaaacttacgtcaaatgagttttgaaacctcgtgcatagtattgaatgtggaggtacattttcttagtcacc

SEQ ID NO: 82706 - DNA, 80 bp, synthetic construct
  source 1..80: mol_type = other DNA
agcgcccagactgtaatgcagtggtgcgatcacagttcactgcagcctcaacctcccaggctcaagcactcctcctacct

SEQ ID NO: 82707 - DNA, 80 bp, synthetic construct; identical to SEQ ID NO: 14659
  source 1..80: mol_type = other DNA

SEQ ID NO: 82708 - DNA, 80 bp, synthetic construct
  source 1..80: mol_type = other DNA
atgcctgtagtcctagctgctccggaagctgaggcaggaaggtcaattgagcccaggaatacaaggctgcggtgaaagct

SEQ ID NO: 82709 - DNA, 80 bp, synthetic construct
  source 1..80: mol_type = other DNA
ctatatgagtaatagcataaacctcctagacttattctaagagacttagtcaagggcagatgagtggtaaacatttttat

SEQ ID NO: 82710 - DNA, 80 bp, synthetic construct
  source 1..80: mol_type = other DNA
aacaaagcattatggtttatgttgattttatttttcagtgccagctcctgttgaacatcagatctgtcctgctgtgtgtg

SEQ ID NO: 82711 - DNA, 80 bp, synthetic construct; identical to SEQ ID NO: 14660
  source 1..80: mol_type = other DNA

SEQ ID NO: 82712 - DNA, 80 bp, synthetic construct
  source 1..80: mol_type = other DNA
tgaaatgtggagctgctgtattgtgattgaactcagtcacttttgatgagcatcagagggaattattattaagattgtca

SEQ ID NO: 82713 - DNA, 80 bp, synthetic construct
  source 1..80: mol_type = other DNA
gccttatataaccagcagtgcactccattttttatgtaatggtttttctttgatttctaggttcattttgtacatgtggt

SEQ ID NO: 82714 - DNA, 80 bp, synthetic construct
  source 1..80: mol_type = other DNA
ctatcccctcatcgtttcattcgtcatttatcttaaaagtgatgaagtcatgagactcttacacagagaacctgaacagc

SEQ ID NO: 82715 - DNA, 80 bp, synthetic construct; identical to SEQ ID NO: 14661
  source 1..80: mol_type = other DNA

SEQ ID NO: 82716 - DNA, 80 bp, synthetic construct
  source 1..80: mol_type = other DNA
atttcaaaataaaacctagactcagtatttgttcctcttccttcttcaggtaggaaggctacccggggcatttcatcaca

SEQ ID NO: 82717 - DNA, 80 bp, synthetic construct
  source 1..80: mol_type = other DNA
atagtacaagacagcacaaggttttggcagtaagggataaggagaaaagaaatcccaaataggtaaaggggaattcctta

SEQ ID NO: 82718 - DNA, 80 bp, synthetic construct; identical to SEQ ID NO: 14662
  source 1..80: mol_type = other DNA

SEQ ID NO: 82719 - DNA, 80 bp, synthetic construct
  source 1..80: mol_type = other DNA
taggaatcaatgtgataagtggcctggctgattcttatgttcgggaaattttgtgaaacaccagtagaatattcttgttg

SEQ ID NO: 82720 - DNA, 80 bp, synthetic construct
  source 1..80: mol_type = other DNA
aaattaaggattctgttgaatgtcacctgagtctgttggtgctctactatcggtagttttaccctattgggcaatagtcc

SEQ ID NO: 82721 - DNA, 80 bp, synthetic construct
  source 1..80: mol_type = other DNA
ttataggtttaacctatgaattctattctgtgcctcaaaattctctgaaatcttttcatttgcctgaaatcaaaaagcac

SEQ ID NO: 82722 - DNA, 80 bp, synthetic construct
  source 1..80: mol_type = other DNA
ctaagatttttagtttttccatacaagagtactcaactctttgatcatgtagtgccttcttggcatcttctttaggtgca

SEQ ID NO: 82723 - DNA, 80 bp, synthetic construct; identical to SEQ ID NO: 14663
  source 1..80: mol_type = other DNA

SEQ ID NO: 82724 - DNA, 80 bp, synthetic construct
  source 1..80: mol_type = other DNA
gacacttctaactcaactgtcacaaactgaattcgtaatctttcccatccctgaatctcttatcttttcccagtttcctt

SEQ ID NO: 82725 - DNA, 80 bp, synthetic construct
  source 1..80: mol_type = other DNA
tcgtctctcctgttctacaatactttgtcttacttctcttcccatttccactcatagtcgattttgttcactgaaaccat

SEQ ID NO: 82726 - DNA, 80 bp, synthetic construct; identical to SEQ ID NO: 14664
  source 1..80: mol_type = other DNA

SEQ ID NO: 82727 - DNA, 80 bp, synthetic construct
  source 1..80: mol_type = other DNA
gagcctaatcccaggtctaagttaagtccacctattatatcaccctgtggttctacatagttcatctatctttgctccaa

SEQ ID NO: 82728 - DNA, 80 bp, synthetic construct
  source 1..80: mol_type = other DNA
ctgctagtaataaagttttgcataaatcttcctacatttaaatcccttggcttggaattcttgacccacgacagaacttt

SEQ ID NO: 82729 - DNA, 80 bp, synthetic construct
  source 1..80: mol_type = other DNA
cagatgaatgacctaattagacttgtagtatccaagaattgcctgtttatattcatctttttctttctgagtcccgtgat

SEQ ID NO: 82730 - DNA, 80 bp, synthetic construct; identical to SEQ ID NO: 14665
  source 1..80: mol_type = other DNA

SEQ ID NO: 82731 - DNA, 80 bp, synthetic construct
  source 1..80: mol_type = other DNA
ttcttcatgcacagtttcatttaaaggcatccgtattcctaagggtaattatttgccaaaaaaaaaaaattaaagtagtt

SEQ ID NO: 82732 - DNA, 80 bp, synthetic construct
  source 1..80: mol_type = other DNA
cgctcagcaagataaggggctgggggtggagaaactggcataaaatggaataattgtcagttgtactttataaatatatt

SEQ ID NO: 82733 - DNA, 80 bp, synthetic construct
  source 1..80: mol_type = other DNA
tttaaattagggggactacaggccattgcagaattattgcaagtggactgtgaaatgtatgggcttactaatgaccacta

SEQ ID NO: 82734 - DNA, 80 bp, synthetic construct; identical to SEQ ID NO: 14666
  source 1..80: mol_type = other DNA

SEQ ID NO: 82735 - DNA, 80 bp, synthetic construct
  source 1..80: mol_type = other DNA
accaaggcaagtgttacacacacattgattccatccaaataagaggctttactctaaaacctgttgcttatcatttctca

SEQ ID NO: 82736 - DNA, 80 bp, synthetic construct
  source 1..80: mol_type = other DNA
aatgatcctctattctgtatttaatttacaggctacgctatgctctatgaaaggctgcatgagagcacttgtggcccaac

SEQ ID NO: 82737 - DNA, 80 bp, synthetic construct
  source 1..80: mol_type = other DNA
caatcctcccacttcagcctctcgaggctgggcctacaggtgcacaccaccatgccaaacgaatttttgtattttttata

SEQ ID NO: 82738 - DNA, 80 bp, synthetic construct; identical to SEQ ID NO: 14667
  source 1..80: mol_type = other DNA

SEQ ID NO: 82739 - DNA, 80 bp, synthetic construct
  source 1..80: mol_type = other DNA
ttaaaaagttttcatagagacagggtctcactgtgttacccagaaggtcttgaactcctggtctcaggagatcctcctgc

SEQ ID NO: 82740 - DNA, 80 bp, synthetic construct
  source 1..80: mol_type = other DNA
tattgcgagtgttttgaggaatttgtcttggcgagcagatgtaaatagtaaaaagacgttgcgagaagttggaagtgtga

SEQ ID NO: 82741 - DNA, 80 bp, synthetic construct
  source 1..80: mol_type = other DNA
atttcttacctgtgtattattcagtactataatatgaatttcatgtttagctttttttgctgccttcttttagccatgag

SEQ ID NO: 82742 - DNA, 80 bp, synthetic construct
  source 1..80: mol_type = other DNA
cggctatttgtatttttagtagagatggggtttcaccatgttggtaaggctggtctcgaactactcctgactttgtgatc

SEQ ID NO: 82743 - DNA, 80 bp, synthetic construct; identical to SEQ ID NO: 14668
  source 1..80: mol_type = other DNA

SEQ ID NO: 82744 - DNA, 80 bp, synthetic construct
  source 1..80: mol_type = other DNA
gaaggacaacgtcaccaccaattaagaatcactggtataagtgtacctttgtgctctccaaacctcaatcccctcaaatt

SEQ ID NO: 82745 - DNA, 80 bp, synthetic construct
  source 1..80: mol_type = other DNA
ccaagcaagttgtcttagctagtctaggtttcctttcacccagctagtcctcctatacccacagcctacatgttcttctt

SEQ ID NO: 82746 - DNA, 80 bp, synthetic construct
  source 1..80: mol_type = other DNA
atacttagcatctgcataaaaatacctgtatcactgttgaatggagagaagacatttaagaaaagaacatggccgataag

SEQ ID NO: 82747 - DNA, 80 bp, synthetic construct; identical to SEQ ID NO: 14669
  source 1..80: mol_type = other DNA

SEQ ID NO: 82748 - DNA, 80 bp, synthetic construct
  source 1..80: mol_type = other DNA
tccacttctaagtatttacccaagaggagcaaaagtgctgacacgaagacttacacacaaacatccacaataatttatga

SEQ ID NO: 82749 - DNA, 80 bp, synthetic construct
  source 1..80: mol_type = other DNA
tgggagtagaagagaaggggaggattatgagagggtaggaaacttttggggatgatataaatgtttgttatcttgattgg

SEQ ID NO: 82750 - DNA, 80 bp, synthetic construct; identical to SEQ ID NO: 14670
  source 1..80: mol_type = other DNA

SEQ ID NO: 82751 - DNA, 80 bp, synthetic construct
  source 1..80: mol_type = other DNA
gccaccatgcccagctagtttttgtatttttagtagagacggggtttcaccatgttggccaggatggtcttcatctcctg

SEQ ID NO: 82752 - DNA, 80 bp, synthetic construct
  source 1..80: mol_type = other DNA
ccctctttttctacatttagtgcagcagtcatgaacattcttcttctctttttcattcaatatcaattccctctcaactt

SEQ ID NO: 82753 - DNA, 80 bp, synthetic construct
  source 1..80: mol_type = other DNA
ttcacttaaagctgttggtcccttactcttgtcttctacatattctctactggatccttcttttttatgtttcagttctc

SEQ ID NO: 82754 - DNA, 80 bp, synthetic construct; identical to SEQ ID NO: 14671
  source 1..80: mol_type = other DNA

SEQ ID NO: 82755 - DNA, 80 bp, synthetic construct
  source 1..80: mol_type = other DNA
tttgtgtcttctaatttgaactataaaaacatttttgaaacaaaacctctggcccttgacatgtagccccacagagagga

SEQ ID NO: 82756 - DNA, 80 bp, synthetic construct
  source 1..80: mol_type = other DNA
tgttctcaggatacttggagtgccccacctttatctcagtcacaatgtaattaaaattgggctcatcttgattgatgtga

SEQ ID NO: 82757 - DNA, 80 bp, synthetic construct
  source 1..80: mol_type = other DNA
taaagtagctatttattgggttagacccaaaatgtttgctgtgacattcaaggcctggcttttgtctctctggacttatt

SEQ ID NO: 82758 - DNA, 80 bp, synthetic construct; identical to SEQ ID NO: 14672
  source 1..80: mol_type = other DNA

SEQ ID NO: 82759 - DNA, 80 bp, synthetic construct
  source 1..80: mol_type = other DNA
atgtttgcatcctctagagtgcctctcattgcaataggcacagagttgatttctaattaatgtttgtttcctgatggata

SEQ ID NO: 82760 - DNA, 80 bp, synthetic construct
  source 1..80: mol_type = other DNA
caagtagctggacctataggtgtgcaccaccatgcctggctaattttttttttttttttttttgagaccgagtctcgctc

SEQ ID NO: 82761 - DNA, 80 bp, synthetic construct
  source 1..80: mol_type = other DNA
tcaccatgttgatcaggatggtctcgatctcctgacctcgtgatccgtgcaccttggcccctcaaagtgctgggattaca

SEQ ID NO: 82762 - DNA, 80 bp, synthetic construct; identical to SEQ ID NO: 14673
  source 1..80: mol_type = other DNA

SEQ ID NO: 82763 - DNA, 80 bp, synthetic construct
  source 1..80: mol_type = other DNA
tattgtatatactacactgcaacttgctcttgtcatttaataatacttccaagatatctttccatatctatgtatggttt

SEQ ID NO: 82764 - DNA, 80 bp, synthetic construct
  source 1..80: mol_type = other DNA
ccagctcattttttttttattttttgtacagacgggatttcaccatgttgtccaggctggtctcaaattcctaaactccc

SEQ ID NO: 82765 - DNA, 80 bp, synthetic construct
  source 1..80: mol_type = other DNA
ttcaagcgattctcccacctcagcctcccaagtagctgggattacaggcacctgccatgaagcccggctaattttttttt

SEQ ID NO: 82766 - DNA, 80 bp, synthetic construct; identical to SEQ ID NO: 14674
  source 1..80: mol_type = other DNA

SEQ ID NO: 82767 - DNA, 80 bp, synthetic construct
  source 1..80: mol_type = other DNA
actatttggtattttatgaacatttttctaaatggaaagttcttaatttaccagtgagggacgggcaataggatagatta

SEQ ID NO: 82768 - DNA, 80 bp, synthetic construct
  source 1..80: mol_type = other DNA
gccttatggaatttgtcagcacattgcactgagaataaagctgatatatgtgctgtagatggtgcacttgcatttttggt

SEQ ID NO: 82769 - DNA, 80 bp, synthetic construct
  source 1..80: mol_type = other DNA
attattgaaagtggaggtgggatattacggaatgtgtccagcttgatagctacaaatgaggaccacaggtatatatagag

SEQ ID NO: 82770 - DNA, 80 bp, synthetic construct; identical to SEQ ID NO: 14675
  source 1..80: mol_type = other DNA

SEQ ID NO: 82771 - DNA, 80 bp, synthetic construct
  source 1..80: mol_type = other DNA
tttttttttttttgagacagggtctcactctgtctcccagactggagggcagtgttgtgatcttggctcactgcaacctc

SEQ ID NO: 82772 - DNA, 80 bp, synthetic construct
  source 1..80: mol_type = other DNA
ccaccgcgcccggccaataatcataatattatttagctaacagccattcatccaatctgctagagttgtaaaacccaaga

SEQ ID NO: 82773 - DNA, 80 bp, synthetic construct
  source 1..80: mol_type = other DNA
gcaacctctgcctttggggttcaagcgattctcctgcctcagcctcccgagtagctgggattacaggtcccccccccccc

SEQ ID NO: 82774 - DNA, 80 bp, synthetic construct
  source 1..80: mol_type = other DNA
tggttgttttttatagcttattcattttttaagtctgtgatgcagaaactacaagcctagtctccctttctgctatacag

SEQ ID NO: 82775 - DNA, 80 bp, synthetic construct; identical to SEQ ID NO: 14676
  source 1..80: mol_type = other DNA

SEQ ID NO: 82776 - DNA, 80 bp, synthetic construct
  source 1..80: mol_type = other DNA
ctcactgcaacctctgcctcccaagtgattctcctggctcagcctcctgagtagctgggactacaggcatgcactaccat

SEQ ID NO: 82777 - DNA, 80 bp, synthetic construct
  source 1..80: mol_type = other DNA
ggatggcagtatcacaaaatcaagccagagatacagagattactctaaaaagtaagtgttctaatctaagagcttataat

SEQ ID NO: 82778 - DNA, 80 bp, synthetic construct; identical to SEQ ID NO: 14677
  source 1..80: mol_type = other DNA

SEQ ID NO: 82779 - DNA, 80 bp, synthetic construct
  source 1..80: mol_type = other DNA
tgttactgcatacacattgtgaccttaattttgtgatctcttgattttatttcaggcaaatcctaagagagaacaactgt

SEQ ID NO: 82780 - DNA, 80 bp, synthetic construct
  source 1..80: mol_type = other DNA
ggggcagttagcatgctcaagaacctcattcattcaaagcacaaaatgattgctatgggaagtgctgcagctttaaggaa

SEQ ID NO: 82781 - DNA, 80 bp, synthetic construct
  source 1..80: mol_type = other DNA
cttatcagaaacttttgacaatatagacaatttaagtcccaaggcatctcatcgtagtaagcagagacacaagcaaagtc

SEQ ID NO: 82782 - DNA, 80 bp, synthetic construct; identical to SEQ ID NO: 14678
  source 1..80: mol_type = other DNA

SEQ ID NO: 82783 - DNA, 80 bp, synthetic construct
  source 1..80: mol_type = other DNA
tgacagatgagagaaatgcacttagaagaagctctgctgcccatacacattcaaacacttacaatttcactaagtcggaa

SEQ ID NO: 82784 - DNA, 80 bp, synthetic construct
  source 1..80: mol_type = other DNA
gcagttatggtcaatacccagccgacctagcccataaaatacatagtgcaaatcatatggatgataatgatggagaacta

SEQ ID NO: 82785 - DNA, 80 bp, synthetic construct
  source 1..80: mol_type = other DNA
caaagtgagcaaagacaatcaaggaatcaaagtacaacttatcctgtttatactgagagcactgatgataaacacctcaa

SEQ ID NO: 82786 - DNA, 80 bp, synthetic construct
  source 1..80: mol_type = other DNA
tttgtgtcaagaagatgactatgaagatgataagcctaccaattatagtgaacgttactctgaagaagaacagcatgaag

SEQ ID NO: 82787 - DNA, 80 bp, synthetic construct; identical to SEQ ID NO: 14679
  source 1..80: mol_type = other DNA

SEQ ID NO: 82788 - DNA, 80 bp, synthetic construct
  source 1..80: mol_type = other DNA
atgtaatcagacgacacaggaagcagattctgctaataccctgcaaatagcagaaataaaagaaaagattggaactaggt

SEQ ID NO: 82789 - DNA, 80 bp, synthetic construct
  source 1..80: mol_type = other DNA
acccaaaagtccacctgaacactatgttcaggagaccccactcatgtttagcagatgtacttctgtcagttcacttgata

SEQ ID NO: 82790 - DNA, 80 bp, synthetic construct; identical to SEQ ID NO: 14680
  source 1..80: mol_type = other DNA

SEQ ID NO: 82791 - DNA, 80 bp, synthetic construct
  source 1..80: mol_type = other DNA
tcaggaaaatgacaatgggaatgaaacagaatcagagcagcctaaagaatcaaatgaaaaccaagagaaagaggcagaaa

SEQ ID NO: 82792 - DNA, 80 bp, synthetic construct
  source 1..80: mol_type = other DNA
accaagtcagctgcctgtgtacaaacttctaccatcacaaaacaggttgcaaccccaaaagcatgttagttttacaccgg

SEQ ID NO: 82793 - DNA, 80 bp, synthetic construct
  source 1..80: mol_type = other DNA
taccattcctacagaaggcagaagtacagatgaggctcaaggaggaaaaacctcatctgtaaccatacctgaattggatg

SEQ ID NO: 82794 - DNA, 80 bp, synthetic construct
  source 1..80: mol_type = other DNA
cgtcttcttctgcacccaacaaaaatcagttagatggtaagaaaaagaaaccaacttcaccagtaaaacctataccacaa

SEQ ID NO: 82795 - DNA, 80 bp, synthetic construct; identical to SEQ ID NO: 14681
  source 1..80: mol_type = other DNA

SEQ ID NO: 82796 - DNA, 80 bp, synthetic construct
  source 1..80: mol_type = other DNA
tccaaccaacaatcagctaataagacacaagctattgcaaagcagccaataaatcgaggtcagcctaaacccatacttca

SEQ ID NO: 82797 - DNA, 80 bp, synthetic construct
  source 1..80: mol_type = other DNA
tctgagttctctcagtgacattgaccaagaaaacaacaataaagaaaatgaacctatcaaagagactgagccccctgact

SEQ ID NO: 82798 - DNA, 80 bp, synthetic construct
  source 1..80: mol_type = other DNA
aaaaaagaaaaagccttcaagactcaagggtgataatgaaaaacatagtcccagaaatatgggtggcatattaggtgaag

SEQ ID NO: 82799 - DNA, 80 bp, synthetic construct; identical to SEQ ID NO: 14682
  source 1..80: mol_type = other DNA

SEQ ID NO: 82800 - DNA, 80 bp, synthetic construct
  source 1..80: mol_type = other DNA
aatttcaggccaaatgaaacagccccttcaagcaaacatgccttcaatctctcgaggcaggacaatgattcatattccag

SEQ ID NO: 82801 - DNA, 80 bp, synthetic construct
  source 1..80: mol_type = other DNA
agccatctgtgaaatcagaattaagccctgttgccaggcagacatcccaaataggtgggtcaagtaaagcaccttctaga

SEQ ID NO: 82802 - DNA, 80 bp, synthetic construct; identical to SEQ ID NO: 14683
  source 1..80: mol_type = other DNA

SEQ ID NO: 82803 - DNA, 80 bp, synthetic construct
  source 1..80: mol_type = other DNA
ctgtattagtacgccagtcaactttcatcaaagaagctccaagcccaaccttaagaagaaaattggaggaatctgcttca

SEQ ID NO: 82804 - DNA, 80 bp, synthetic construct
  source 1..80: mol_type = other DNA
tagagtataatgatggaagaccagcaaagcgccatgatattgcacggtctcattctgaaagtccttctagacttccaatc

SEQ ID NO: 82805 - DNA, 80 bp, synthetic construct
  source 1..80: mol_type = other DNA
gaaaaagcaaaaagtgaggatgaaaaacatgtgaactctatttcaggaaccaaacaaagtaaagaaaaccaagtatccgc

SEQ ID NO: 82806 - DNA, 80 bp, synthetic construct; identical to SEQ ID NO: 14684
  source 1..80: mol_type = other DNA

SEQ ID NO: 82807 - DNA, 80 bp, synthetic construct
  source 1..80: mol_type = other DNA
ggatgcccctgaccaaaaaggaactgagataaaaccaggacaaaataatcctgtccctgtatcagagactaatgaaagtt

SEQ ID NO: 82808 - DNA, 80 bp, synthetic construct
  source 1..80: mol_type = other DNA
agtgaataacaacacaaagaagcgagattccaaaactgacagcacagaatccagtggaacccaaagtcctaagcgccatt

SEQ ID NO: 82809 - DNA, 80 bp, synthetic construct
  source 1..80: mol_type = other DNA
ttctggaagccatatttgatagtatactttgtcttcactggtcttattttgggaggcactcttgatggttaggaaaaaaa

SEQ ID NO: 82810 - DNA, 80 bp, synthetic construct
  source 1..80: mol_type = other DNA
atttaaagtagcatcccatcccaacttcctttaattattgcttgtcttaaaataatgaacactacagatagaaaatatga

SEQ ID NO: 82811 - DNA, 80 bp, synthetic construct; identical to SEQ ID NO: 14685
  source 1..80: mol_type = other DNA

SEQ ID NO: 82812 - DNA, 80 bp, synthetic construct
  source 1..80: mol_type = other DNA
tgtaatttgttgtatattctggtatttgaggtgagatggctgctcttttattaatgagacatgaattgtgtctcaacaga

SEQ ID NO: 82813 - DNA, 80 bp, synthetic construct
  source 1..80: mol_type = other DNA
gagtaaaattcctcttactgtaataaaaacaattgaagaagactgttgccacttaaccattccatgcgttggcacttatc

SEQ ID NO: 82814 - DNA, 80 bp, synthetic construct
  source 1..80: mol_type = other DNA
agcagcctagcacagactaagcattgagcataataggcccacataatttcctctttcttaatattatagaattctgtact

SEQ ID NO: 82815 - DNA, 80 bp, synthetic construct; identical to SEQ ID NO: 14686
  source 1..80: mol_type = other DNA

SEQ ID NO: 82816 - DNA, 80 bp, synthetic construct
  source 1..80: mol_type = other DNA
tctggggtacatgttaagtgtccccttatacagtggagggaagtcttccttcctgaaggaaaataaactgacacttatta

SEQ ID NO: 82817 - DNA, 80 bp, synthetic construct
  source 1..80: mol_type = other DNA
ggtggggcactcagataggagtgaatacacctacctggtgccttgaaaatcacatcaagtagttaattatctacccctta

SEQ ID NO: 82818 - DNA, 80 bp, synthetic construct; identical to SEQ ID NO: 14687
  source 1..80: mol_type = other DNA

SEQ ID NO: 82819 - DNA, 80 bp, synthetic construct; identical to SEQ ID NO: 14688
  source 1..80: mol_type = other DNA

SEQ ID NO: 82820 - DNA, 80 bp, synthetic construct
  source 1..80: mol_type = other DNA
tgtgcttctgcttatagtctactgcctactgcaaggctggctcactgtatggttttatcaatataggcagtttgaatttt

SEQ ID NO: 82821 - DNA, 80 bp, synthetic construct
  source 1..80: mol_type = other DNA
ttgattgcagctttttcagtaactccgtgatgtatatcagaaatgtgtggtagttttgaatggacaggtcaatcaatctt

SEQ ID NO: 82822 - DNA, 80 bp, synthetic construct
  source 1..80: mol_type = other DNA
tctctttcccttttccatctggatcggtaaggatgctaagatattcctgaatatttctgtgcagaaattgctcaacttga

SEQ ID NO: 82823 - DNA, 80 bp, synthetic construct
  source 1..80: mol_type = other DNA
gaagggccataatgtattgatggatctgctgtaactcttgagaagcttcctgaagctcgttttgaataaattcattgaac

SEQ ID NO: 82824 - DNA, 80 bp, synthetic construct; identical to SEQ ID NO: 14689
  source 1..80: mol_type = other DNA

SEQ ID NO: 82825 - DNA, 80 bp, synthetic construct
  source 1..80: mol_type = other DNA
gtatatcccaggtttccccggaaactggaatctggggaagttcagaaaatcaatgagtgagtcaatcagatgcttgactt

SEQ ID NO: 82826 - DNA, 80 bp, synthetic construct
  source 1..80: mol_type = other DNA
ctggaacctcacgtcgatatcatcaatttgcctaatggccccttgataaacccactcagcattgttctgcagatttcttc

SEQ ID NO: 82827 - DNA, 80 bp, synthetic construct
  source 1..80: mol_type = other DNA
ttcctcatcagattcccggaccctcaactcagttttgaatatggtgagttttttatctggagaggactaaacagagagaa

SEQ ID NO: 82828 - DNA, 80 bp, synthetic construct; identical to SEQ ID NO: 14690
  source 1..80: mol_type = other DNA

SEQ ID NO: 82829 - DNA, 80 bp, synthetic construct
  source 1..80: mol_type = other DNA
catcagtacgcattctccaagcccatgacaaacttttagtaacagtcatagaaccatgtttggtcttctcctctggtaat

SEQ ID NO: 82830 - DNA, 80 bp, synthetic construct
  source 1..80: mol_type = other DNA
cctctctgaaaaatataccctgcctatggctgagcttgcctatgatttagatgatgaggtataaccctcatcttcctgga

SEQ ID NO: 82831 - DNA, 80 bp, synthetic construct
  source 1..80: mol_type = other DNA
tatttggtcctgaattaaatgtatctgccccaattctccactcgctcttgggggcgtgtcactcattaggtggtatttac

SEQ ID NO: 82832 - DNA, 80 bp, synthetic construct; identical to SEQ ID NO: 14691
  source 1..80: mol_type = other DNA

SEQ ID NO: 82833 - DNA, 80 bp, synthetic construct
  source 1..80: mol_type = other DNA
agtcttagaggctaacgtaccatcttcgattttgtgtgttcccaaaactgtataggagagattttgtattttattagatt

SEQ ID NO: 82834 - DNA, 80 bp, synthetic construct
  source 1..80: mol_type = other DNA
ccattttctttaaagctgtttgtcttgaatgacactagattttctacagtttggtttttacgtgtagggtatacatgtat

SEQ ID NO: 82835 - DNA, 80 bp, synthetic construct
  source 1..80: mol_type = other DNA
gttgagctgcatgtggaatccaggactgtttcaacataatctgctttgtttttcaaactggcactccaagtggcattata

SEQ ID NO: 82836 - DNA, 80 bp, synthetic construct
  source 1..80: mol_type = other DNA
agatccaaagcagcaatgccatctgaaacactttttggaagcgtgaactgggacacagttaactgagattcaggcacggt

SEQ ID NO: 82837 - DNA, 80 bp, synthetic construct; identical to SEQ ID NO: 14692
  source 1..80: mol_type = other DNA

SEQ ID NO: 82838 - DNA, 80 bp, synthetic construct
  source 1..80: mol_type = other DNA
tagactggtaggatgatatttttgaggaaccttaggtgtccttctaaggatcctgcaatgtcaaggtgtgccttttcttg

SEQ ID NO: 82839 - DNA, 80 bp, synthetic construct
  source 1..80: mol_type = other DNA
acaagagctgacatttgccatggagagagttccagggtggctttgcttgtatgttctccgttggtgaaaaagaggccctc

SEQ ID NO: 82840 - DNA, 80 bp, synthetic construct; identical to SEQ ID NO: 14693
  source 1..80: mol_type = other DNA

SEQ ID NO: 82841 - DNA, 80 bp, synthetic construct
  source 1..80: mol_type = other DNA
aaattcattctcaaaattggaatttgggcttttgtggttgttgccactgacacttccatatttttcgtggttaagctcac

SEQ ID NO: 82842 - DNA, 80 bp, synthetic construct
  source 1..80: mol_type = other DNA
gactggttaaaaagttcagcattggtattcagtgtgatgacacttgatttaaaggagaaatcataggtaatattgcccat

SEQ ID NO: 82843 - DNA, 80 bp, synthetic construct
  source 1..80: mol_type = other DNA
atgctgactgcttttgggaacacatagccgaatgccgacatctctatggtgaatggagacacttcaacattgacaactgg

SEQ ID NO: 82844 - DNA, 80 bp, synthetic construct; identical to SEQ ID NO: 14694
  source 1..80: mol_type = other DNA

SEQ ID NO: 82845 - DNA, 80 bp, synthetic construct
  source 1..80: mol_type = other DNA
tctccatttattcctacatgggcctccataatgttctcgttgtttccagcagagaaattttggttgtacttatactgatt

SEQ ID NO: 82846 - DNA, 80 bp, synthetic construct
  source 1..80: mol_type = other DNA
ttcattgtttgtggatgccgtgatctcaaatggctgggctgaaaagaaaagagaatttttcaaagttccaataacctttc

SEQ ID NO: 82847 - DNA, 80 bp, synthetic construct
  source 1..80: mol_type = other DNA
gttttggtttactcttaggtgtttgctattgatcttattggacagtccaaaggaagtgaggggtccttctatggtgaaac

SEQ ID NO: 82848 - DNA, 80 bp, synthetic construct
  source 1..80: mol_type = other DNA
caatttgtggaagtatttagtgttgctatccagggtaagctgattgtttatcttgacaatcactccattactaagctcca

SEQ ID NO: 82849 - DNA, 80 bp, synthetic construct; identical to SEQ ID NO: 14695
  source 1..80: mol_type = other DNA

SEQ ID NO: 82850 - DNA, 80 bp, synthetic construct
  source 1..80: mol_type = other DNA
aacttgaaaatcattaaggttgagagttgggattatgaattctggaattgcgatttctggtaaacggaagtctggcaggg

SEQ ID NO: 82851 - DNA, 80 bp, synthetic construct
  source 1..80: mol_type = other DNA
ctacaaagtcaattgtaaaggaaggaatgtggaaggtgttaaggatggtaaattctggtgtggaaaacctggatgggatt

SEQ ID NO: 82852 - DNA, 80 bp, synthetic construct; identical to SEQ ID NO: 14696
  source 1..80: mol_type = other DNA

SEQ ID NO: 82853 - DNA, 80 bp, synthetic construct
  source 1..80: mol_type = other DNA
gagccaaagatgctgaacttaaagcctcctgtaaccaattgatgattaaggttattttggtgtcctgtaggctttccaga

SEQ ID NO: 82854 - DNA, 80 bp, synthetic construct
  source 1..80: mol_type = other DNA
ttcaccattgagtctctgagtcacctcacggattttgtcattggtttcatctacaaactggtggtaatcaaatgacttta

SEQ ID NO: 82855 - DNA, 80 bp, synthetic construct
  source 1..80: mol_type = other DNA
agtctccttcaacttgtattggtgggccaactctactaatttatccattaaaacctggatttgttggtctacttcatacc

SEQ ID NO: 82856 - DNA, 80 bp, synthetic construct; identical to SEQ ID NO: 14697
  source 1..80: mol_type = other DNA

SEQ ID NO: 82857 - DNA, 80 bp, synthetic construct
  source 1..80: mol_type = other DNA
atcaagactttttaatttttcaatgatttcatcaataatattagcaatagctattttcaaatcatgtaaatcataactat

SEQ ID NO: 82858 - DNA, 80 bp, synthetic construct
  source 1..80: mol_type = other DNA
tctctcccaattgaatgaattcagataatcattagcttgctgtgggagttttcccagggctgctctgtattttcttacaa

SEQ ID NO: 82859 - DNA, 80 bp, synthetic construct
  source 1..80: mol_type = other DNA
tgtaaattcttggggcttctcaacggcatctctcatctctaaagcatcaatgatattgatgggctcactgagtaaaagtg

SEQ ID NO: 82860 - DNA, 80 bp, synthetic construct; identical to SEQ ID NO: 14698
  source 1..80: mol_type = other DNA

SEQ ID NO: 82861 - DNA, 80 bp, synthetic construct
  source 1..80: mol_type = other DNA
gctgaaatgcagtgagtctgaattatagtttgtgctcatgtcaatggctgaagccagcccagcgatgtctgtgttgagcc

SEQ ID NO: 82862 - DNA, 80 bp, synthetic construct
  source 1..80: mol_type = other DNA
tttcccattgttggtgagatccagagcattgtatttcaggtcactgtttaaagtagttaccagagaatagggctgtagct

SEQ ID NO: 82863 - DNA, 80 bp, synthetic construct
  source 1..80: mol_type = other DNA
ttgactgaccttgaagttgaaaatgtttttgctgtcgacacccagaatcatggcctgataagcacttcccagtgatagct

SEQ ID NO: 82864 - DNA, 80 bp, synthetic construct; identical to SEQ ID NO: 14699
  source 1..80: mol_type = other DNA

SEQ ID NO: 82865 - DNA, 80 bp, synthetic construct
  source 1..80: mol_type = other DNA
gtcagattttaaagtcagctcgtagttctcatactttagggaagcagtatttttaatgatgccactttgcagatcagagg

SEQ ID NO: 82866 - DNA, 80 bp, synthetic construct
  source 1..80: mol_type = other DNA
agagactctgaactgcccatcaatcttgacttctttgacaaacaaatgctgtttctttttggagtccaaatgaactgaag

SEQ ID NO: 82867 - DNA, 80 bp, synthetic construct
  source 1..80: mol_type = other DNA
gtagagacccatcacatgatagtgtgaacgtattcttgtggtcatatgttgtttctccagatcctaacataaaaatgaaa

SEQ ID NO: 82868 - DNA, 80 bp, synthetic construct; identical to SEQ ID NO: 14700
  source 1..80: mol_type = other DNA

SEQ ID NO: 82869 - DNA, 80 bp, synthetic construct
  source 1..80: mol_type = other DNA
ataaaagacttccaagtagcaaggaagattatctgctagaaagccaaagtcctttcctccctggaggaggctctcctctt

SEQ ID NO: 82870 - DNA, 80 bp, synthetic construct
  source 1..80: mol_type = other DNA
ccagttgtacaagttgctgtagacattcgtggagaggtctagaacacccaggagaggcacttgcagttgatacaacttgg

SEQ ID NO: 82871 - DNA, 80 bp, synthetic construct
  source 1..80: mol_type = other DNA
caaggtatatttgacccggccatcgctgaaatgaacaacaaagataacatccccacagtcagacatcagtcattcaaagt

SEQ ID NO: 82872 - DNA, 80 bp, synthetic construct; identical to SEQ ID NO: 14701
  source 1..80: mol_type = other DNA

SEQ ID NO: 82873 - DNA, 80 bp, synthetic construct
  source 1..80: mol_type = other DNA
tgaattgagacaacttgatttgtggaaagaacataggtatggaagtcagtaagcctgggttaaagtattttctcagaatg

SEQ ID NO: 82874 - DNA, 80 bp, synthetic construct
  source 1..80: mol_type = other DNA
agaatcctctaatgactttcttagattcttcctgacagggttggtgttctcatgtttactaatgcaaagatgccacagtg

SEQ ID NO: 82875 - DNA, 80 bp, synthetic construct
  source 1..80: mol_type = other DNA
tgctgctttcttcttttacctttttaagaagaggttttctgggatgtggaagtctggcaatcccatgttctggaggttga

SEQ ID NO: 82876 - DNA, 80 bp, synthetic construct; identical to SEQ ID NO: 14702
  source 1..80: mol_type = other DNA

SEQ ID NO: 82877 - DNA, 80 bp, synthetic construct
  source 1..80: mol_type = other DNA
atctctttgatatgtatcacattcagctttgtgtaactgggtaactacacacttgtgaaagtttttttttctccccaaga

SEQ ID NO: 82878 - DNA, 80 bp, synthetic construct
  source 1..80: mol_type = other DNA
gtctgtttgagggactctgtgatccaggagtctattagcatacatatgcaagctcttaggataatcggagagatccacag

SEQ ID NO: 82879 - DNA, 80 bp, synthetic construct
  source 1..80: mol_type = other DNA
cacaggggaagagacacataccataatgccatgccaccctcttggaaactgtggagccataagctgtagcagatgagtcc

SEQ ID NO: 82880 - DNA, 80 bp, synthetic construct; identical to SEQ ID NO: 14703
  source 1..80: mol_type = other DNA

SEQ ID NO: 82881 - DNA, 80 bp, synthetic construct
  source 1..80: mol_type = other DNA
ctaccatttccttatccatgaaacaggaaaactcacagtgacctcgcagtttattgtgaggaccgagataatttctttaa

SEQ ID NO: 82882 - DNA, 80 bp, synthetic construct
  source 1..80: mol_type = other DNA
cacgaggtcaggagatcgagaccatcctggtcaatatggtgaaaccctgtctctactaaaaatataaaaattagctgggt

SEQ ID NO: 82883 - DNA, 80 bp, synthetic construct
  source 1..80: mol_type = other DNA
ggctctctctgccactctgattgtagactaggggagaacatggcttggtcaggtatgaagtggaagaggaataatgaaaa

SEQ ID NO: 82884 - DNA, 80 bp, synthetic construct; identical to SEQ ID NO: 14704
  source 1..80: mol_type = other DNA

SEQ ID NO: 82885 - DNA, 80 bp, synthetic construct
  source 1..80: mol_type = other DNA
tctggctaacatggtgaaaccccgtctctactaaaaatacaaaaaattagccgggcgcgttggtgggtgcctgtagtccc

SEQ ID NO: 82886 - DNA, 80 bp, synthetic construct
  source 1..80: mol_type = other DNA
ataaataaataaataaagaagctatgttttggaaggaaagagaggaaaaggtagagaaactccaaggaatcaatgtgctt

SEQ ID NO: 82887 - DNA, 80 bp, synthetic construct
  source 1..80: mol_type = other DNA
tttaaactcagttgtgttcatgtatgcaagtctttatggattgcctgttatgagcctattgtgtgctgggcactgctctt

SEQ ID NO: 82888 - DNA, 80 bp, synthetic construct; identical to SEQ ID NO: 14705
  source 1..80: mol_type = other DNA

SEQ ID NO: 82889 - DNA, 80 bp, synthetic construct
  source 1..80: mol_type = other DNA
cacgacatctctatattactttctacccaagatgcctgtcctggttccttgctgcccttgccctgggctccatctcccca

SEQ ID NO: 82890 - DNA, 80 bp, synthetic construct
  source 1..80: mol_type = other DNA
tgtgatatgctatccctatataaaaatttttccaaagtgaacacctaaatgtgccccattccctaaaacctgctcctcgc

SEQ ID NO: 82891 - DNA, 80 bp, synthetic construct
  source 1..80: mol_type = other DNA
tacactcaacatccactgtatcagcaaatcttgtcagcctaatcttcaaaatatggccagaatccatccccttctcatat

SEQ ID NO: 82892 - DNA, 80 bp, synthetic construct; identical to SEQ ID NO: 14706
  source 1..80: mol_type = other DNA

SEQ ID NO: 82893 - DNA, 80 bp, synthetic construct
  source 1..80: mol_type = other DNA
tccttatgctcactttaccagggagactttcccttattattccaaatgcactgctttccctgcccttcttcctccctcct

SEQ ID NO: 82894 - DNA, 80 bp, synthetic construct
  source 1..80: mol_type = other DNA
cttattgggtactcagttaacccaggtcttagaataggcctgccgcttagtgggtactcagttaacctatttgttaaata

SEQ ID NO: 82895 - DNA, 80 bp, synthetic construct
  source 1..80: mol_type = other DNA
gaatactgctcaatctctcctgtaggcctcagttccagctctaatctaaagacattacaatgaagacagtgcataatgtt

SEQ ID NO: 82896 - DNA, 80 bp, synthetic construct
  source 1..80: mol_type = other DNA
tgtctcttgcccttaactaagatgatctttttgatccctcagtcctacaagaacccaaggcaagggcagacaccaggatt

SEQ ID NO: 82897 - DNA, 80 bp, synthetic construct; identical to SEQ ID NO: 14707
  source 1..80: mol_type = other DNA

SEQ ID NO: 82898 - DNA, 80 bp, synthetic construct
  source 1..80: mol_type = other DNA
tcttacaacacagagtattttttcctgtgccatgctaggtggccatgatgtggaaggtgagaaaatgctgggtcaggcac

SEQ ID NO: 82899 - DNA, 80 bp, synthetic construct
  source 1..80: mol_type = other DNA
ctccgttttggtggtagagaccaaatgtaatgtgttgctggtgaagaacaaaaatacctgagttattgccaagtcatgaa

SEQ ID NO: 82900 - DNA, 80 bp, synthetic construct; identical to SEQ ID NO: 14708
  source 1..80: mol_type = other DNA

SEQ ID NO: 82901 - DNA, 80 bp, synthetic construct
  source 1..80: mol_type = other DNA
gccccttccttcctacaatgcagggcaagagaaactgtctctttcatatgaaatctcctactctctacctgcttccttcc

SEQ ID NO: 82902 - DNA, 80 bp, synthetic construct
  source 1..80: mol_type = other DNA
aatgctttcatcaatgtctctaatgccctccttgctcctacatccaatgggcatatttaggtttcatcttccttgacctc

SEQ ID NO: 82903 - DNA, 80 bp, synthetic construct
  source 1..80: mol_type = other DNA
ctttgaaatagcacattttcctccaagtattgtttctccaagttgggggtgccacaagaccaagctttgctgatgtgctg

SEQ ID NO: 82904 - DNA, 80 bp, synthetic construct
  source 1..80: mol_type = other DNA
tctccatatttctgtcctcatctctcatgtctcactctataccagttgctgtttaaccacaacaacctctgtatactaat

SEQ ID NO: 82905 - DNA, 80 bp, synthetic construct; identical to SEQ ID NO: 14709
  source 1..80: mol_type = other DNA

SEQ ID NO: 82906 - DNA, 80 bp, synthetic construct
  source 1..80: mol_type = other DNA
cacccatcttccacactagagtcagagtatttcttctaaaacatcacccctatcttatttctgctccccttttcaactcc

SEQ ID NO: 82907 - DNA, 80 bp, synthetic construct
  source 1..80: mol_type = other DNA
cttgaaccatattcctttaccttcaggccattacatgcttttccttttgcctggaacactcactcctttctcctttgcct

SEQ ID NO: 82908 - DNA, 80 bp, synthetic construct; identical to SEQ ID NO: 14710
  source 1..80: mol_type = other DNA

SEQ ID NO: 82909 - DNA, 80 bp, synthetic construct
  source 1..80: mol_type = other DNA
ccacgactggctaattttgttatttatttaattttttttgtagagatggggttttgccatgttgcccaggctggtatcca

SEQ ID NO: 82910 - DNA, 80 bp, synthetic construct
  source 1..80: mol_type = other DNA
ttaaaatggaactctccaaaagaggctgtattccattatcacgaggttaggagtttcatgctttacctacctagctacct

SEQ ID NO: 82911 - DNA, 80 bp, synthetic construct
  source 1..80: mol_type = other DNA
agcagaaagataaaggacagtttagtaaaatgtgaaaagtagaagaaaggtaattatgtagttatgtagtaagtctaggc

SEQ ID NO: 82912 - DNA, 80 bp, synthetic construct; identical to SEQ ID NO: 14711
  source 1..80: mol_type = other DNA

SEQ ID NO: 82913 - DNA, 80 bp, synthetic construct
  source 1..80: mol_type = other DNA
atttgtcacaaactccacagacacggagggttttgccaccagttcagcctgcatctataagtcagaaaacaacctattca

SEQ ID NO: 82914 - DNA, 80 bp, synthetic construct
  source 1..80: mol_type = other DNA
ccagaactagaaagcacctgagttaacgtgaggcaaaaccagattaaaaagatgataggaatactcatttgttgagagaa

SEQ ID NO: 82915 - DNA, 80 bp, synthetic construct
  source 1..80: mol_type = other DNA
atgcaccctggaagaaagtaataacctaagaaatcaaaaggcaaacagaatcttacgttggctacttccagttttactcc

SEQ ID NO: 82916 - DNA, 80 bp, synthetic construct; identical to SEQ ID NO: 14712
  source 1..80: mol_type = other DNA

SEQ ID NO: 82917 - DNA, 80 bp, synthetic construct
  source 1..80: mol_type = other DNA
tcatgtcattttcaagtggactcagaaggctcttaagaatattgctgggcctcagagctttatggactttaagtatcata

SEQ ID NO: 82918 - DNA, 80 bp, synthetic construct
  source 1..80: mol_type = other DNA
aataaaatagcttgagacctgttttcttaaagtcaacatttttttaatcaagccataggagtacatttatatatttcctt

SEQ ID NO: 82919 - DNA, 80 bp, synthetic construct
  source 1..80: mol_type = other DNA
tggaggatcacttgaggtcaggagttcgaaaccagcctgacatggttgtcaacaggcttgtctctactaaagatacacaa

SEQ ID NO: 82920 - DNA, 80 bp, synthetic construct; identical to SEQ ID NO: 14713
  source 1..80: mol_type = other DNA

SEQ ID NO: 82921 - DNA, 80 bp, synthetic construct
  source 1..80: mol_type = other DNA
tgggcgatctaaaaaaaaaccaacgtctggtctcatgggcccccagtggggcctgctgacttaccatctgggggatcccc

SEQ ID NO: 82922 - DNA, 80 bp, synthetic construct
  source 1..80: mol_type = other DNA
ttccatttaccatatcctgagagtttagtaataaaatggccagtgagatgtcagcaatgtcaaacacctttcagttccca

SEQ ID NO: 82923 - DNA, 80 bp, synthetic construct
  source 1..80: mol_type = other DNA
tctgtagacatagtaagatgtggtgggatgagaggaggggtccctattctccagtatgccaggatcctcaagattagaag

SEQ ID NO: 82924 - DNA, 80 bp, synthetic construct; identical to SEQ ID NO: 14714
  source 1..80: mol_type = other DNA

SEQ ID NO: 82925 - DNA, 80 bp, synthetic construct
  source 1..80: mol_type = other DNA
ctgtatttctgaccagaccacactttgggtagcaaaaaattcaagaataagctccagatcatacaacctatttccctcct

SEQ ID NO: 82926 - DNA, 80 bp, synthetic construct
  source 1..80: mol_type = other DNA
cactgtgcttggcattttagatgccttatttcattgtctttaaataaccttgtgaggtttggactgttattagtagtctg

SEQ ID NO: 82927 - DNA, 80 bp, synthetic construct
  source 1..80: mol_type = other DNA
gtgatctcggctcactgcaacctccacctcccgggttcaagcaattctcctgtctcagcctcccgagtagctaggattac

SEQ ID NO: 82928 - DNA, 80 bp, synthetic construct
  source 1..80: mol_type = other DNA
agagttcatactcttgttatcctagagtacttattgtgagtctggtttctgggcacactgaattcaggagatctttaact

SEQ ID NO: 82929 - DNA, 80 bp, synthetic construct; identical to SEQ ID NO: 14715
  source 1..80: mol_type = other DNA

SEQ ID NO: 82930 - DNA, 80 bp, synthetic construct
  source 1..80: mol_type = other DNA
aatggcatcaggtttctttgttgtatgccagcctagtagtccccactcttgatgtccatttatctaaacaagtatttgaa

SEQ ID NO: 82931 - DNA, 80 bp, synthetic construct
  source 1..80: mol_type = other DNA
gatttgaagcagatctgactaggcagcacatatgcttccttggctttgggacttaaagacgagacatttgcatttcaatt

SEQ ID NO: 82932 - DNA, 80 bp, synthetic construct
  source 1..80: mol_type = other DNA
acgcccggctaattttttgtatttttagtagagatgggctttcaccgtgttagccaggatggtgtcgatatcctgacctc

SEQ ID NO: 82933 - DNA, 80 bp, synthetic construct; identical to SEQ ID NO: 14716
  source 1..80: mol_type = other DNA

SEQ ID NO: 82934 - DNA, 80 bp, synthetic construct
  source 1..80: mol_type = other DNA
tcaagtgatggaagagaaacagatttgtagagttgatagttccgagagaattttctgaagtccatgacagttggaagttg

SEQ ID NO: 82935 - DNA, 80 bp, synthetic construct
  source 1..80: mol_type = other DNA
aatcactaccaaaatgtcttgatttcattgaccctaagtctttgggtctagatctgctacacatttgcacaagtgtttgt

SEQ ID NO: 82936 - DNA, 80 bp, synthetic construct
  source 1..80: mol_type = other DNA
cacttgctcattctgttcccatggtagaatttggacaattttgttaatatctgcctgtgaaggactcctcatcaacataa

SEQ ID NO: 82937 - DNA, 80 bp, synthetic construct; identical to SEQ ID NO: 14717
  source 1..80: mol_type = other DNA

SEQ ID NO: 82938 - DNA, 80 bp, synthetic construct
  source 1..80: mol_type = other DNA
agttgttttaacgtaagttattttaatgtgaggataaagatgagaaggggtagtaagagtttggggctaataaatagggt

SEQ ID NO: 82939 - DNA, 80 bp, synthetic construct
  source 1..80: mol_type = other DNA
gttgacatagcagcaaagtcaagtatttctctcacgtcacatactgctaggcagtcaagtcaataggcttgttgaaattt

SEQ ID NO: 82940 - DNA, 80 bp, synthetic construct
  source 1..80: mol_type = other DNA
ggtgtaatggcacatgcctgtaatcccagttactcaggaggctgaggcagagagaattgcttgaacccaggaggcagaag

SEQ ID NO: 82941 - DNA, 80 bp, synthetic construct; identical to SEQ ID NO: 14718
  source 1..80: mol_type = other DNA

SEQ ID NO: 82942 - DNA, 80 bp, synthetic construct
  source 1..80: mol_type = other DNA
cattgaagaaaagaaacaagaacccatcagggtgcaggagagggaagtaaaaggtgtccaggaaaagtgcttctgaaatg

SEQ ID NO: 82943 - DNA, 80 bp, synthetic construct
  source 1..80: mol_type = other DNA
gtccctgtagggtttgtcttatgatagctacagaataagagaagagagtcaggacttggtaaccccagttaggtttgtct

SEQ ID NO: 82944 - DNA, 80 bp, synthetic construct
  source 1..80: mol_type = other DNA
gcatggtactggcataaaaatagacacatagatcaatggaacagaatactgaacccagaaataaagtcacatacttacag

SEQ ID NO: 82945 - DNA, 80 bp, synthetic construct; identical to SEQ ID NO: 14719
  source 1..80: mol_type = other DNA

SEQ ID NO: 82946 - DNA, 80 bp, synthetic construct
  source 1..80: mol_type = other DNA
tactaatatccggaatgtacaagcaattcaaacaactcaacaaaaaaatcccccaaataatcccattaaaaagtaggcaa

SEQ ID NO: 82947 - DNA, 80 bp, synthetic construct
  source 1..80: mol_type = other DNA
ataacagttgttggtgaggatacagagaaaaggaaacagttaatcactgttgatgggattgtaaataagtacaaccacta

SEQ ID NO: 82948 - DNA, 80 bp, synthetic construct
  source 1..80: mol_type = other DNA
catggaatcaacctaagtgtctatcaatggacgattggattaaaaatgtgaaatgtataggcaataaaatactattcggc

SEQ ID NO: 82949 - DNA, 80 bp, synthetic construct; identical to SEQ ID NO: 14720
  source 1..80: mol_type = other DNA

SEQ ID NO: 82950 - DNA, 80 bp, synthetic construct
  source 1..80: mol_type = other DNA
tgaaaccctgtatctaccaagaatacaaaaattagccagggcatggtagcatgcacctgtggtcccagctactcaggagg

SEQ ID NO: 82951 - DNA, 80 bp, synthetic construct
  source 1..80: mol_type = other DNA
ctgctaactaatattgaactgaagttaataatatgcaagctgtaatacttaggggaaagtgtgttgatgtttgcaattta

SEQ ID NO: 82952 - DNA, 80 bp, synthetic construct
  source 1..80: mol_type = other DNA
taggagatagctggttttctaggggttttccctgtgaaattctgtcaactttgctatgttcaaaaacttttataatataa

SEQ ID NO: 82953 - DNA, 80 bp, synthetic construct; identical to SEQ ID NO: 14721
  source 1..80: mol_type = other DNA

SEQ ID NO: 82954 - DNA, 80 bp, synthetic construct
  source 1..80: mol_type = other DNA
tttcagccactggaggatgtgagtggagcactgaggctgtccacactgaaccaaggcttgtaaagtgatggggctgagaa

SEQ ID NO: 82955 - DNA, 80 bp, synthetic construct
  source 1..80: mol_type = other DNA
tattacccacagaagaagcccaatcgagaaaagttccaagaggggactgtggatctgtagcaacaagaagactgttatca

SEQ ID NO: 82956 - DNA, 80 bp, synthetic construct; identical to SEQ ID NO: 14722
  source 1..80: mol_type = other DNA

SEQ ID NO: 82957 - DNA, 80 bp, synthetic construct
  source 1..80: mol_type = other DNA
tggccaaggtttgaaagttcagtcagttaccatcagttttataaaaagttgagctgtaaccattagatacctggacacct

SEQ ID NO: 82958 - DNA, 80 bp, synthetic construct
  source 1..80: mol_type = other DNA
aggtgatgtggatttggtgctctcaaatgcgaggcccatcttcttagtacctggaagatggaaagtgtcaaaggaactct

SEQ ID NO: 82959 - DNA, 80 bp, synthetic construct
  source 1..80: mol_type = other DNA
ataggtgattgacttgttttcactgactcatcatcctatccctgtggggtggcattattgttcaatttaatgataaattc

SEQ ID NO: 82960 - DNA, 80 bp, synthetic construct; identical to SEQ ID NO: 14723
  source 1..80: mol_type = other DNA

SEQ ID NO: 82961 - DNA, 80 bp, synthetic construct
  source 1..80: mol_type = other DNA
atcatggaaatgtggtgtaatgagaatagtcctggcttagattacaacctggcacttattttcccccctctaatattctg

SEQ ID NO: 82962 - DNA, 80 bp, synthetic construct
  source 1..80: mol_type = other DNA
tacaatactgggtaagggttggacttgagattgttagagttccttctacctctaaagactgactcctgaggttactatct

SEQ ID NO: 82963 - DNA, 80 bp, synthetic construct
  source 1..80: mol_type = other DNA
tttcctttatgccattgcaacttgacatcatgaaatgagtttgctttctcactagaggtagccagaacaccagtgtctgt

SEQ ID NO: 82964 - DNA, 80 bp, synthetic construct
  source 1..80: mol_type = other DNA
tgtgtcacttgtgctaccatcccatacttattcctggtaaccaaggaagcacaccatgtcacggatggccagaacatact

SEQ ID NO: 82965 - DNA, 80 bp, synthetic construct; identical to SEQ ID NO: 14724
  source 1..80: mol_type = other DNA

SEQ ID NO: 82966 - DNA, 80 bp, synthetic construct
  source 1..80: mol_type = other DNA
gcccttaaagaatgggtcttagatatcttttgttggtcttggattgttttgcatgcctaggacttttctgccaaatggcc

SEQ ID NO: 82967 - DNA, 80 bp, synthetic construct
  source 1..80: mol_type = other DNA
taaatgacaaatcaggggtgcatcacatgacctacttgtaggagaaaggcaggaagaggtgttgctccttgcagatggct

SEQ ID NO: 82968 - DNA, 80 bp, synthetic construct
  source 1..80: mol_type = other DNA
agcaggagtcctgtaccactagataaactcagagaaagaagataactgggtacttgacatttagaccagggggtgcaaca

SEQ ID NO: 82969 - DNA, 80 bp, synthetic construct; identical to SEQ ID NO: 14725
  source 1..80: mol_type = other DNA

SEQ ID NO: 82970 - DNA, 80 bp, synthetic construct
  source 1..80: mol_type = other DNA
gatgctcagaaaagacccctaagccagtgcattatcctcttctgactgtggcactcatggtcatcagactccctgttttc

SEQ ID NO: 82971 - DNA, 80 bp, synthetic construct
  source 1..80: mol_type = other DNA
gagagggtgctccaggccggtggcagtggggccatgtttggtcagggtggtactgggggtggaaggacaagaagctggag

SEQ ID NO: 82972 - DNA, 80 bp, synthetic construct; identical to SEQ ID NO: 14726
  source 1..80: mol_type = other DNA

SEQ ID NO: 82973 - DNA, 80 bp, synthetic construct
  source 1..80: mol_type = other DNA
caaaagttctggaattgtattaataagaggatgctccttgctgtgcacgacagtgctgacatgggacttaccatgccttt

SEQ ID NO: 82974 - DNA, 80 bp, synthetic construct
  source 1..80: mol_type = other DNA
agatgcaaccacatgtattcaacacgggcaacatccttgggtacttgggagggatggggtggggatcgtgaaagaaaaag

SEQ ID NO: 82975 - DNA, 80 bp, synthetic construct
  source 1..80: mol_type = other DNA
tgtcgtagagaaattagaacacacaaaagtgctcatgggactgaggtgaaatgaattctgtctcacagtgaaacctgaaa

SEQ ID NO: 82976 - DNA, 80 bp, synthetic construct
  source 1..80: mol_type = other DNA
cagcaaacacaggtgaagcatcaaacaaaagcaggggtggggtggccaggactcctcaatgactgttttaaaattagacc

SEQ ID NO: 82977 - DNA, 80 bp, synthetic construct; identical to SEQ ID NO: 14727
  source 1..80: mol_type = other DNA

SEQ ID NO: 82978 - DNA, 80 bp, synthetic construct
  source 1..80: mol_type = other DNA
tccattacaacttgctggaagtaagctgggtggcactgaagtttcttttctcatatttttttaaccaattgttcttctga

SEQ ID NO: 82979 - DNA, 80 bp, synthetic construct
  source 1..80: mol_type = other DNA
tgcaatggcgcaacctcagctcactgcaacctccacctcctgggatcaagtgattctcctgcctcagcctccggagtagc

SEQ ID NO: 82980 - DNA, 80 bp, synthetic construct; identical to SEQ ID NO: 14728
  source 1..80: mol_type = other DNA

SEQ ID NO: 82981 - DNA, 80 bp, synthetic construct
  source 1..80: mol_type = other DNA
tgcacactcatacaatcctctgtaaacatgggtgagtgcaaacagagtcatacaaagattttgccattgtttgttttata

SEQ ID NO: 82982 - DNA, 80 bp, synthetic construct
  source 1..80: mol_type = other DNA
gccccatttgatggcatttgccctctctctttctggattttttttaaaccacacaaacaataccaaaacaaacatcctta

SEQ ID NO: 82983 - DNA, 80 bp, synthetic construct
  source 1..80: mol_type = other DNA
tggcctgccagcaacaggtgctatcactgttttccagttttgcagtatgatgggtaaaagcagataaatatcttgttgtt

SEQ ID NO: 82984 - DNA, 80 bp, synthetic construct
  source 1..80: mol_type = other DNA
ggctgcagccactctggttacatcaggaggaaaaggtgacggacttatctcccacagcctacactctctcagaaagttcc

SEQ ID NO: 82985 - DNA, 80 bp, synthetic construct; identical to SEQ ID NO: 14729
  source 1..80: mol_type = other DNA

SEQ ID NO: 82986 - DNA, 80 bp, synthetic construct
  source 1..80: mol_type = other DNA
ctcacagcctattttggcaagaaaggactggcatctgaatctaatgtttagcaaaactgaaaaatgggcaaggatggtga

SEQ ID NO: 82987 - DNA, 80 bp, synthetic construct
  source 1..80: mol_type = other DNA
ctaaaaacaggagtttctctgcacaagctctctttgccagccaccatctacataagatgtgacttgctgtccctcacctt

SEQ ID NO: 82988 - DNA, 80 bp, synthetic construct; identical to SEQ ID NO: 14730
  source 1..80: mol_type = other DNA

SEQ ID NO: 82989 - DNA, 80 bp, synthetic construct
  source 1..80: mol_type = other DNA
gccagtgcctctgggaccccacaccaaagaccaccaagcactagtcttgactagttctttaaataagaattcacttgttt

SEQ ID NO: 82990 - DNA, 80 bp, synthetic construct
  source 1..80: mol_type = other DNA
gatacggaatacaaatacttacagtcacatccgtgcctggtgcaaacacacaagttcatacctcagcggacacacacaca

SEQ ID NO: 82991 - DNA, 80 bp, synthetic construct
  source 1..80: mol_type = other DNA
aacctccagctcaacctgagaattcagggtagcagagcattgaggttgtctatcaagaatgagaggtggcccctgaagcc

SEQ ID NO: 82992 - DNA, 80 bp, synthetic construct
  source 1..80: mol_type = other DNA
atttcttaagtttgcccctaggcatgggaaggaggatgtccttttattggttctaaagttactcactttaattataaaga

SEQ ID NO: 82993 - DNA, 80 bp, synthetic construct; identical to SEQ ID NO: 14731
  source 1..80: mol_type = other DNA

SEQ ID NO: 82994 - DNA, 80 bp, synthetic construct
  source 1..80: mol_type = other DNA
tcattccatttaaatagcccaatgtggctcatgtctaccatattggacagcacatacaagagctacggtactctctaaaa

SEQ ID NO: 82995 - DNA, 80 bp, synthetic construct
  source 1..80: mol_type = other DNA
ttcatttttcagcaacagattctgtttgacttaaattataaaaactgcatttcacagtgcgattccgagttgcctgcctc

SEQ ID NO: 82996 - DNA, 80 bp, synthetic construct; identical to SEQ ID NO: 14732
  source 1..80: mol_type = other DNA

SEQ ID NO: 82997 - DNA, 80 bp, synthetic construct
  source 1..80: mol_type = other DNA
catagttgtatgtgtacttccggaggtgcttgaatcgggtcgcatcttctaacgtggggagaaatacgtcagccacatag

SEQ ID NO: 82998 - DNA, 80 bp, synthetic construct
  source 1..80: mol_type = other DNA
gtttaaattggctggcatgtcttgaatatctcatctgaggcacagggaagggagtgacaagtgtcaagtaatggggctca

SEQ ID NO: 82999 - DNA, 80 bp, synthetic construct
  source 1..80: mol_type = other DNA
cttaacaaactcctagaaaagaatttctggaggtttccactgtagttgagaggaattttctgaacaattgaagaaaaaga

SEQ ID NO: 83000 - DNA, 80 bp, synthetic construct; identical to SEQ ID NO: 14733
  source 1..80: mol_type = other DNA

SEQ ID NO: 83001 - DNA, 80 bp, synthetic construct
  source 1..80: mol_type = other DNA
ttacttggacagaccaggctgacattttccagcatttcctcttctgtaagacaggagaaagaaatctgtgagcttcccac

SEQ ID NO: 83002 - DNA, 80 bp, synthetic construct
  source 1..80: mol_type = other DNA
gccctggaccctgtggctgccctccctctggcctaggcccaggctgccccggccaacctcgtgccgccggctccctcccg

SEQ ID NO: 83003 - DNA, 80 bp, synthetic construct
  source 1..80: mol_type = other DNA
ggcctcgcggccctggctggctgggcgggctcctcagcggcagcaaccgagaagggcactcagccccgcaggtcccggtg

SEQ ID NO: 83004 - DNA, 80 bp, synthetic construct; identical to SEQ ID NO: 14734
  source 1..80: mol_type = other DNA

SEQ ID NO: 83005 - DNA, 80 bp, synthetic construct
  source 1..80: mol_type = other DNA
aataaaaattgtctaactcaattgtatacacattaggaaatttacctactaaaacactgtcataattttttagagcaaaa

SEQ ID NO: 83006 - DNA, 80 bp, synthetic construct
  source 1..80: mol_type = other DNA
aatttgagaatctattttctaacatgtcaatttccagatgtcatttttgaaaaaaaatgagaattactgcatttgtttat

SEQ ID NO: 83007 - DNA, 80 bp, synthetic construct
  source 1..80: mol_type = other DNA
tggacactatgtttattgcagcactgttcacaatagtaaaggcttggaaccaacgcaaatgcccatcaatgatagactga

SEQ ID NO: 83008 - DNA, 80 bp, synthetic construct
  source 1..80: mol_type = other DNA
accaaacaccacatattctcactcgtaagtgggagatgaacaatgagaacacatggacgcagggaggggaacatcacaca

SEQ ID NO: 83009 - DNA, 80 bp, synthetic construct; identical to SEQ ID NO: 14735
  source 1..80: mol_type = other DNA

SEQ ID NO: 83010 - DNA, 80 bp, synthetic construct
  source 1..80: mol_type = other DNA
agtcacaatgagccatgagataatcacctcaatgattctacagagatgtgtaggtaccaagacgtggatatgggggagaa

SEQ ID NO: 83011 - DNA, 80 bp, synthetic construct
  source 1..80: mol_type = other DNA
tttaggccagttgtcctggcataactattcatagtgcctccttccactctttgaagtgtcctggtgtgggtgaagattac

SEQ ID NO: 83012 - DNA, 80 bp, synthetic construct
  source 1..80: mol_type = other DNA
agatgtgtttgagaacagccttttgcagacactcaccctagaacagaggggtgcaaacgatgcggtaatttaagcctgtg

SEQ ID NO: 83013 - DNA, 80 bp, synthetic construct; identical to SEQ ID NO: 14736
  source 1..80: mol_type = other DNA

SEQ ID NO: 83014 - DNA, 80 bp, synthetic construct
  source 1..80: mol_type = other DNA
ataatgatcagcctagtcagaaaacaacattccccaagcaagcataaagagaggacacaattactgacggacagcggaaa

SEQ ID NO: 83015 - DNA, 80 bp, synthetic construct
  source 1..80: mol_type = other DNA
gttgaaacaatgaatagatcacctggtagatttgttcttccaggaggcaaggaccttttcctcgtttattcttatcagga

SEQ ID NO: 83016 - DNA, 80 bp, synthetic construct
  source 1..80: mol_type = other DNA
gttgggaggattagacgtaatctatcaaaagtgctgctaaaactgcccctggcaagtaatggacaatgaaaaaaatcact

SEQ ID NO: 83017 - DNA, 80 bp, synthetic construct; identical to SEQ ID NO: 14737
  source 1..80: mol_type = other DNA

SEQ ID NO: 83018 - DNA, 80 bp, synthetic construct
  source 1..80: mol_type = other DNA
aggcgctagtcacatgaattctctactgaaccccacgaggtgacagtcagaagactgaaaacgaagccccttgggccgtg

SEQ ID NO: 83019 - DNA, 80 bp, synthetic construct
  source 1..80: mol_type = other DNA
tggtcagcaacaacactctattgagaagccaacactccatggagaagggggctttaagcaaaaaagaactctcctcaact

SEQ ID NO: 83020 - DNA, 80 bp, synthetic construct
  source 1..80: mol_type = other DNA
aggggtccccactgacaagcacacaggagagaaaaggaacagactatgtacgaagaaaggaacagactatgcaggaagaa

SEQ ID NO: 83021 - DNA, 80 bp, synthetic construct; identical to SEQ ID NO: 14738
  source 1..80: mol_type = other DNA

SEQ ID NO: 83022 - DNA, 80 bp, synthetic construct
  source 1..80: mol_type = other DNA
cccatcctgctgctggctgtcctgctcagcttgtggtgagtggaggcaagtccctgccccggcccgcctgcctgaagtca

SEQ ID NO: 83023 - DNA, 80 bp, synthetic construct
  source 1..80: mol_type = other DNA
gagtcccgccacctgtcatccatgcctatgtgcacactgacctgggatgccgtcaggggcttcatgtggccatgcgcctg

SEQ ID NO: 83024 - DNA, 80 bp, synthetic construct
  source 1..80: mol_type = other DNA
aaggaaaaggacattaaactccctatggttccaggaaagctcacctgatttagaaacttcctaagcaaatgccttgcaca

SEQ ID NO: 83025 - DNA, 80 bp, synthetic construct; identical to SEQ ID NO: 14739
  source 1..80: mol_type = other DNA

SEQ ID NO: 83026 - DNA, 80 bp, synthetic construct
  source 1..80: mol_type = other DNA
ctgccatggccgctgagcccatccagggctgcagcacaatgccgatgggcatgaagacacctggggaagaaagaactcgc

SEQ ID NO: 83027 - DNA, 80 bp, synthetic construct
  source 1..80: mol_type = other DNA
gctgggtgtgggatgctgttgagtgggcctggctctcttccactcgccctgatgttcccagaaccacccacaggtggcat

SEQ ID NO: 83028 - DNA, 80 bp, synthetic construct
  source 1..80: mol_type = other DNA
gatctcgcctccagggcttcatgacatctttagaagaggaatgagagccaggtcccaggacagggtcaggagacaggtat

SEQ ID NO: 83029 - DNA, 80 bp, synthetic construct; identical to SEQ ID NO: 14740
  source 1..80: mol_type = other DNA

SEQ ID NO: 83030 - DNA, 80 bp, synthetic construct
  source 1..80: mol_type = other DNA
gtcactgccacctccaactcctgggctcaataaatccttctgccccagcctctgtactcccagatgggactaaggtgtac

SEQ ID NO: 83031 - DNA, 80 bp, synthetic construct
  source 1..80: mol_type = other DNA
tttctttccatgatcatttgtgtaactcagagtgaaacttgggcaggattaatgttcaggataaggttctgaaacaccaa

SEQ ID NO: 83032 - DNA, 80 bp, synthetic construct
  source 1..80: mol_type = other DNA
tgaatgaaggtttcaggtcctctccacagtttctcatttaaagacatataaagcaggggacatgaaaaaaaaaaaaaaac

SEQ ID NO: 83033 - DNA, 80 bp, synthetic construct; identical to SEQ ID NO: 14741
  source 1..80: mol_type = other DNA

SEQ ID NO: 83034 - DNA, 80 bp, synthetic construct
  source 1..80: mol_type = other DNA
aggccggggagtcattgaccccatcccccaccatggcgactttcttccctttattctggagctcctggaccttggccacc

SEQ ID NO: 83035 - DNA, 80 bp, synthetic construct
  source 1..80: mol_type = other DNA
gtcaaccacaccctgcaggtttgctgtcacagggccagtttatccctggctcctgccccaacaccctgcactggtttagg

SEQ ID NO: 83036 - DNA, 80 bp, synthetic construct
  source 1..80: mol_type = other DNA
catgcatctcccagaggagggcagctcaactcttgggtctgcttccgagggtcccagagtcccagggtcccagggtctgg

SEQ ID NO: 83037 - DNA, 80 bp, synthetic construct
  source 1..80: mol_type = other DNA
tcactggtccaccttcctgcaagaccatgagcccgtcaagggcagaccccccttcactcctcacagagcctggccccaca

SEQ ID NO: 83038 - DNA, 80 bp, synthetic construct; identical to SEQ ID NO: 14742
  source 1..80: mol_type = other DNA

SEQ ID NO: 83039 - DNA, 80 bp, synthetic construct
  source 1..80: mol_type = other DNA
ccttaggtcacatacttttttttccattgcaaagactgggaaacggttagagaaccctggaactcctttttttccaggat

SEQ ID NO: 83040 - DNA, 80 bp, synthetic construct
  source 1..80: mol_type = other DNA
tgtctctaactgcttttatgagctttacacagtttgcaacattaaagggctgtacctgggtggcaatagctctggctgtc

SEQ ID NO: 83041 - DNA, 80 bp, synthetic construct
  source 1..80: mol_type = other DNA
caccccgcaccaagataccacacttgcaatgttctcatcatataatattatgtgcaaaaaacaaaacatcaaattatata

SEQ ID NO: 83042 - DNA, 80 bp, synthetic construct; identical to SEQ ID NO: 14743
  source 1..80: mol_type = other DNA

SEQ ID NO: 83043 - DNA, 80 bp, synthetic construct; identical to SEQ ID NO: 14744
  source 1..80: mol_type = other DNA

SEQ ID NO: 83044 - DNA, 80 bp, synthetic construct
  source 1..80: mol_type = other DNA
cagtctttttttttttttttttttttttttttttgagacagagttacgctcttgttgcccaggctggagggcagtggtgt

SEQ ID NO: 83045 - DNA, 80 bp, synthetic construct
  source 1..80: mol_type = other DNA
ctcccgacctcaggtgatccacccacctcagcctcccaaagtgctgggattacaggcgtgagccaccgcacctggccaac

SEQ ID NO: 83046 - DNA, 80 bp, synthetic construct
  source 1..80: mol_type = other DNA
ctctactaaaaatacaaaatgtagctgggcgtggtggcgggggcctgtaatcccagctactcaggagtctgaggcaggag

SEQ ID NO: 83047 - DNA, 80 bp, synthetic construct; identical to SEQ ID NO: 14745
  source 1..80: mol_type = other DNA

SEQ ID NO: 83048 - DNA, 80 bp, synthetic construct
  source 1..80: mol_type = other DNA
ctgaaattaagagaggaaggcttttgtttgtcttcttttcttttataaaggaggactcttttgcctgatatctgcagaaa

SEQ ID NO: 83049 - DNA, 80 bp, synthetic construct
  source 1..80: mol_type = other DNA
cagcacagagaaggtctgggggactgcatctattcaaaagaggctgtggttatttctaaatggtccaatttcactgtgaa

SEQ ID NO: 83050 - DNA, 80 bp, synthetic construct; identical to SEQ ID NO: 14746
  source 1..80: mol_type = other DNA

SEQ ID NO: 83051 - DNA, 80 bp, synthetic construct
  source 1..80: mol_type = other DNA
tgcttggtatcaacaaccccaggtgaatcaacaaataatcagacacgtctacatgaaatgtttaaaactgtaactcccga

SEQ ID NO: 83052 - DNA, 80 bp, synthetic construct
  source 1..80: mol_type = other DNA
tttcactaccaacacttaggaaaaacactagtcacagattttgagtgttttccaccctttattctggtggctggcaagct

SEQ ID NO: 83053 - DNA, 80 bp, synthetic construct; identical to SEQ ID NO: 14747
  source 1..80: mol_type = other DNA

SEQ ID NO: 83054 - DNA, 80 bp, synthetic construct
  source 1..80: mol_type = other DNA
ggcgtggtgctctctgtggtttgacccacctctacttttaaccagctgcagagacaaaagccagcaatacctttttctgc

SEQ ID NO: 83055 - DNA, 80 bp, synthetic construct
  source 1..80: mol_type = other DNA
gaagtccgtgcagtatcccaaggtctctgttccaagttcctgggaaggtggaaagagaggaagaggaaactgtaagccaa

SEQ ID NO: 83056 - DNA, 80 bp, synthetic construct
  source 1..80: mol_type = other DNA
ctttggtaaagatattatagctgtaagttgaatgagactattttaaacagcctaaaatccttccctgggtgggtgcctca

SEQ ID NO: 83057 - DNA, 80 bp, synthetic construct; identical to SEQ ID NO: 14748
  source 1..80: mol_type = other DNA

SEQ ID NO: 83058 - DNA, 80 bp, synthetic construct
  source 1..80: mol_type = other DNA
gagcctgacgcctggtgatgttcagcaaatggctgtgacaccgacctcactttatgacaacctagaactgtggcaagggc

SEQ ID NO: 83059 - DNA, 80 bp, synthetic construct
  source 1..80: mol_type = other DNA
acaaaactagaaatgaggtttctggaagagcccctgatcaggaagagttgtcaattgtttttcaaggcaatgatgtcacc

SEQ ID NO: 83060 - DNA, 80 bp, synthetic construct
  source 1..80: mol_type = other DNA
cccctatattcagactgaaattaagagaaaacaaaatagaacctttcctgtggagagaccaaaagaaggcaatgcttctc

SEQ ID NO: 83061 - DNA, 80 bp, synthetic construct
  source 1..80: mol_type = other DNA
agactgcccgtactccccaagaccgtgagctcccaaagggtagagttcatatcccactcctgttgttctcctgagcctgg

SEQ ID NO: 83062 - DNA, 80 bp, synthetic construct; identical to SEQ ID NO: 14749
  source 1..80: mol_type = other DNA

SEQ ID NO: 83063 - DNA, 80 bp, synthetic construct
  source 1..80: mol_type = other DNA
acatcacagtctttatctgccaaaaacaaccacaactcactgaccacaatacagatggaggggcttccatagtcacactc

SEQ ID NO: 83064 - DNA, 80 bp, synthetic construct
  source 1..80: mol_type = other DNA
accttgaccaggcaaagccagaaaccctcagtcggctgtacaggagatggcacagcactgtcccccagacagtgacacca

SEQ ID NO: 83065 - DNA, 80 bp, synthetic construct; identical to SEQ ID NO: 14750
  source 1..80: mol_type = other DNA

SEQ ID NO: 83066 - DNA, 80 bp, synthetic construct
  source 1..80: mol_type = other DNA
caaacaataattcagctttttgtttctgatgctgagcggtggccttccttccttcaacacacttaactcatcttcctcca

SEQ ID NO: 83067 - DNA, 80 bp, synthetic construct
  source 1..80: mol_type = other DNA
ctccctcaacggcctcatctctggttcctctctctcaatgattttcttccagttcctcatttgctcattcaacagataac

SEQ ID NO: 83068 - DNA, 80 bp, synthetic construct
  source 1..80: mol_type = other DNA
ttcgtattcgcttccctgaccacctgcagcacccttgtccctgagtcgagcaccccaagtctaggattggcccctgttca

SEQ ID NO: 83069 - DNA, 80 bp, synthetic construct; identical to SEQ ID NO: 14751
  source 1..80: mol_type = other DNA

SEQ ID NO: 83070 - DNA, 80 bp, synthetic construct
  source 1..80: mol_type = other DNA
ctaatctcctcctgctgcagtttcctcatctgtaaaatgggaatgataagcacctaccacacagagttgttaatgcaatt

SEQ ID NO: 83071 - DNA, 80 bp, synthetic construct
  source 1..80: mol_type = other DNA
tggctctcaggcttttctctcaatgtgaaatagtaaacagatactactttcatctctcaggatggggaaagccgtgctac

SEQ ID NO: 83072 - DNA, 80 bp, synthetic construct
  source 1..80: mol_type = other DNA
accggatgatcacctctgtctgggagatgtgcttgttggggttctgaaaacaggacagagtcagaggcaggttgagagtt

SEQ ID NO: 83073 - DNA, 80 bp, synthetic construct; identical to SEQ ID NO: 14752
  source 1..80: mol_type = other DNA

SEQ ID NO: 83074 - DNA, 80 bp, synthetic construct
  source 1..80: mol_type = other DNA
cacagtacataacacctggcataggagcggcatttaagaaacagtaactattatcgttatttttctcatcattaggaaag

SEQ ID NO: 83075 - DNA, 80 bp, synthetic construct
  source 1..80: mol_type = other DNA
aggcaactattggaatgatgatggaacatactgatatggaaaggtaccagcagcactgcaaaattaaaaagcaagtacaa

SEQ ID NO: 83076 - DNA, 80 bp, synthetic construct
  source 1..80: mol_type = other DNA
ttttctttgtacccaaaacaaacaaaatatgacctactttccagacacttggtattatttgcattctgagagcttgaatt

SEQ ID NO: 83077 - DNA, 80 bp, synthetic construct; identical to SEQ ID NO: 14753
  source 1..80: mol_type = other DNA

SEQ ID NO: 83078 - DNA, 80 bp, synthetic construct
  source 1..80: mol_type = other DNA
gactgggtggacttctggaagttaccatgagcccttctctacaatgacttttgtacagcagagagatgacagtatcttaa

SEQ ID NO: 83079 - DNA, 80 bp, synthetic construct
  source 1..80: mol_type = other DNA
tcccgaaaaagccgaaattataggcagtcaggtgccatggatagccacaggcacattctaccaatatatctgtaagttac

SEQ ID NO: 83080 - DNA, 80 bp, synthetic construct
  source 1..80: mol_type = other DNA
agaaaaaaattatccattctgtatttgtactttttgctacgttgcccaggttggagtgcagtggctattcacaggcacga

SEQ ID NO: 83081 - DNA, 80 bp, synthetic construct
  source 1..80: mol_type = other DNA
gtaaaaacattgttccgctcattgtgccattaccaaatactgttctaagtgtgccattagctttttaagtacattatcaa

SEQ ID NO: 83082 - DNA, 80 bp, synthetic construct; identical to SEQ ID NO: 14754
  source 1..80: mol_type = other DNA

SEQ ID NO: 83083 - DNA, 80 bp, synthetic construct
  source 1..80: mol_type = other DNA
gatcacctgaggtcaggagttcgaagccagcctgactaatacggtgaaaccccatctctgctaaaaatacaaaaattagc

SEQ ID NO: 83084 - DNA, 80 bp, synthetic construct
  source 1..80: mol_type = other DNA
aaacaaacaaacataaaaagctatttacattacttgggaagctgggaggtcaaagatggtactggtaaatatatacatca

SEQ ID NO: 83085 - DNA, 80 bp, synthetic construct
  source 1..80: mol_type = other DNA
aaaattatctaagtagaatgtaaaggagatctttaatagaaacctgcagaaggagagtgactgtttatcctactctggct

SEQ ID NO: 83086 - DNA, 80 bp, synthetic construct; identical to SEQ ID NO: 14755
  source 1..80: mol_type = other DNA

SEQ ID NO: 83087 - DNA, 80 bp, synthetic construct
  source 1..80: mol_type = other DNA
ggataatctccttcatttaaccacatttactaatcaatctctactcaataaaactgtctgatttcccagaactcttcaca

SEQ ID NO: 83088 - DNA, 80 bp, synthetic construct
  source 1..80: mol_type = other DNA
gcaattacagtgcttccgggtttcttagtgactggcatggcttctcctagacgtaggaaagagacaactgtcacttgctc

SEQ ID NO: 83089 - DNA, 80 bp, synthetic construct
  source 1..80: mol_type = other DNA
cgatatcgccccgctgcaccagctccatggggacttgctcctccctgcaacaaacgccacttatcactcacatggccact

SEQ ID NO: 83090 - DNA, 80 bp, synthetic construct; identical to SEQ ID NO: 14756
  source 1..80: mol_type = other DNA

SEQ ID NO: 83091 - DNA, 80 bp, synthetic construct
  source 1..80: mol_type = other DNA
ctgagacctgcatgccaagaaggtccaacacacacggaaaggaagttcacggagagaaaacaactgacacaaaggtttaa

SEQ ID NO: 83092 - DNA, 80 bp, synthetic construct
  source 1..80: mol_type = other DNA
aaagtgacacaatctgattcacatttaagtgatctctttggctgctgcatgagaatgggctgtagggatgatcacaggag

SEQ ID NO: 83093 - DNA, 80 bp, synthetic construct
  source 1..80: mol_type = other DNA
agctccaaattttcattttgagcaactgggtggatagagaaaccatttaatgagatggagatgattatggagaagcagct

SEQ ID NO: 83094 - DNA, 80 bp, synthetic construct; identical to SEQ ID NO: 14757
  source 1..80: mol_type = other DNA

SEQ ID NO: 83095 - DNA, 80 bp, synthetic construct
  source 1..80: mol_type = other DNA
acaggggcaaatatacgtaaaattcatcacactctacacgtagggtttgtgtgttgcagtgactgtgagttacacattga

SEQ ID NO: 83096 - DNA, 80 bp, synthetic construct
  source 1..80: mol_type = other DNA
agcgaaagtcacgtttttaaagaaggcttttgtgaaggaacagaaaaacagagcagtagaagggagggtggattaaagtg

SEQ ID NO: 83097 - DNA, 80 bp, synthetic construct; identical to SEQ ID NO: 14758
  source 1..80: mol_type = other DNA

SEQ ID NO: 83098 - DNA, 80 bp, synthetic construct
  source 1..80: mol_type = other DNA
ttttacctcactgaatcttcccagacacatacaaggtgagtcttattacccccatttcagcaaaacctgaagatgtctta

SEQ ID NO: 83099 - DNA, 80 bp, synthetic construct
  source 1..80: mol_type = other DNA
tttgtaaaaattgttcaggaacagtctctgtgctacgaggattcaaggcttgtgtggctacttcctgtgattacgtgaga

SEQ ID NO: 83100 - DNA, 80 bp, synthetic construct
  source 1..80: mol_type = other DNA
tttatagcctcataactaaaagcagacacacagatggacagttaagacacacacagaaagttcaatcatggcaaccaaaa

SEQ ID NO: 83101 - DNA, 80 bp, synthetic construct; identical to SEQ ID NO: 14759
  source 1..80: mol_type = other DNA

SEQ ID NO: 83102 - DNA, 80 bp, synthetic construct
  source 1..80: mol_type = other DNA
ccacttctgtaaggagacttaaaattggcacgaatgtacagttgggtgtctttctaagaaatctttagtaatgctaatct

SEQ ID NO: 83103 - DNA, 80 bp, synthetic construct
  source 1..80: mol_type = other DNA
tgctgagcgataggaaccctcttaattaaaagacagtggtttgtttcatagcacttcatctttaagagtttctgccagga

SEQ ID NO: 83104 - DNA, 80 bp, synthetic construct
  source 1..80: mol_type = other DNA
atttcaacatgggagactggggatggggctgtgcaagccttttaatatcaagcacacacatgcatgtgtgcagtatgttt

SEQ ID NO: 83105 - DNA, 80 bp, synthetic construct
  source 1..80: mol_type = other DNA
tccatgctgagccctgaaggcaaggagccaggcaaaggttaaggaagaagggagttcagagggaaggaaggatgtgtgca

SEQ ID NO: 83106 - DNA, 80 bp, synthetic construct; identical to SEQ ID NO: 14760
  source 1..80: mol_type = other DNA

SEQ ID NO: 83107 - DNA, 80 bp, synthetic construct
  source 1..80: mol_type = other DNA
catgaggatggactgcagatgtgtgaatgagggcagacaggcattgtagaggacacactgggagctggcatgagggtacc

SEQ ID NO: 83108 - DNA, 80 bp, synthetic construct
  source 1..80: mol_type = other DNA
tccaaccagcaggtagtctctgggatctagacgtaggtttgagaatgagcttctcacggctgttaaccaaagacgtggga

SEQ ID NO: 83109 - DNA, 80 bp, synthetic construct; identical to SEQ ID NO: 14761
  source 1..80: mol_type = other DNA

SEQ ID NO: 83110 - DNA, 80 bp, synthetic construct
  source 1..80: mol_type = other DNA
actgggaaaccagtgtccagtgcacctcaaagcacagaatggttgagctcaggggaggcctagactgcggcaatccaggc

SEQ ID NO: 83111 - DNA, 80 bp, synthetic construct
  source 1..80: mol_type = other DNA
tagtcaggccgtgcgtccccagccaaaaaatgaatcggcattcttggaaaagaactgagttatgacaggtgctgcacgca

SEQ ID NO: 83112 - DNA, 80 bp, synthetic construct
  source 1..80: mol_type = other DNA
ccagcggcttggctccctgtctgaacgttttcacttctcagaaactttcatgcaattaatttataagagaagaaaaaaaa

SEQ ID NO: 83113 - DNA, 80 bp, synthetic construct; identical to SEQ ID NO: 14762
  source 1..80: mol_type = other DNA

SEQ ID NO: 83114 - DNA, 80 bp, synthetic construct
  source 1..80: mol_type = other DNA
gcctgcacctcatgaacactcatgcatctgtgtggccccggtcagttcctctactcacctggggcgtgcccagggccagc

SEQ ID NO: 83115 - DNA, 80 bp, synthetic construct
  source 1..80: mol_type = other DNA
gagtggttagagtctgcatgacatcggaggataagaatcagagacaccaaaaaccactgagaaaaccaacagagaaaggt

SEQ ID NO: 83116 - DNA, 80 bp, synthetic construct
  source 1..80: mol_type = other DNA
atagaaaatgtggtgggaccagggagagattttaggaatatgaaggagggctgaaataaccattgcctagaatataaaaa

SEQ ID NO: 83117 - DNA, 80 bp, synthetic construct
  source 1..80: mol_type = other DNA
tgggccagttgcttagcctctctgaacctcagcttcctcatctgtaaattaagagtaataatagtccctgcctcagaaag

SEQ ID NO: 83118 - DNA, 80 bp, synthetic construct; identical to SEQ ID NO: 14763
  source 1..80: mol_type = other DNA

SEQ ID NO: 83119 - DNA, 80 bp, synthetic construct
  source 1..80: mol_type = other DNA
actgtgtctctgcccacactcacaaggtctattgcaatgtcaatacaacatgggcatctgatgcagctcacacagattga

SEQ ID NO: 83120 - DNA, 80 bp, synthetic construct
  source 1..80: mol_type = other DNA
tgaggttttgctctaggaaataaccagaatgtgaaatgagagctatcgaaagcagacctgtccaaacccagcctgagagt

SEQ ID NO: 83121 - DNA, 80 bp, synthetic construct
  source 1..80: mol_type = other DNA
ttcagactggaaacaaacatcagtcttcccactgaccattttcttttaggttcaatctaatttcttttagggcctgagtt

SEQ ID NO: 83122 - DNA, 80 bp, synthetic construct; identical to SEQ ID NO: 14764
  source 1..80: mol_type = other DNA

SEQ ID NO: 83123 - DNA, 80 bp, synthetic construct
  source 1..80: mol_type = other DNA
aaacatggtgttcagaggaagtgagatttgtttactgaaggagcagctcttttctgaacctgaagctgctgttacctttg

SEQ ID NO: 83124 - DNA, 80 bp, synthetic construct
  source 1..80: mol_type = other DNA
aataaacataagcaatgcttgtggccaggacgatgagcacgtccatgttggctgacctgtgtctcagagatttgtaggcc

SEQ ID NO: 83125 - DNA, 80 bp, synthetic construct; identical to SEQ ID NO: 14765
  source 1..80: mol_type = other DNA

SEQ ID NO: 83126 - DNA, 80 bp, synthetic construct
  source 1..80: mol_type = other DNA
aatgggctctatctataacccactggcataaaagatgtctaatacatagttaagtgaaaaagccagctgcacatcagtct

SEQ ID NO: 83127 - DNA, 80 bp, synthetic construct
  source 1..80: mol_type = other DNA
gcgggaggcagaatgtgatcagtgaaagggcatcttcctcttttcttcttatacttcagtacggtttgaattgttaataa

SEQ ID NO: 83128 - DNA, 80 bp, synthetic construct
  source 1..80: mol_type = other DNA
ggccaggagtttgagaccaacctgggcacatagcaagaccctatctagccaggcatggtggcaggcgcttgtggtcctag

SEQ ID NO: 83129 - DNA, 80 bp, synthetic construct
  source 1..80: mol_type = other DNA
aaaaaaaaaaaaaatccagcctaccaatgcttgcccccaaatagcccctaaacattccaatattaggacagggatttagt

SEQ ID NO: 83130 - DNA, 80 bp, synthetic construct; identical to SEQ ID NO: 14766
  source 1..80: mol_type = other DNA

SEQ ID NO: 83131 - DNA, 80 bp, synthetic construct
  source 1..80: mol_type = other DNA
aaaaagcagcaactgcctgggtggggcaggaaagctgcaataaagtgccatttaaaccaagctaaagcactatgtttgcg

SEQ ID NO: 83132 - DNA, 80 bp, synthetic construct
  source 1..80: mol_type = other DNA
aggtacacaagataaagaagatgagatttagaatggacagtcctggaatgatgttgtggtccaggaccatggactggtgg

SEQ ID NO: 83133 - DNA, 80 bp, synthetic construct
  source 1..80: mol_type = other DNA
gaggacacagtttaagacctgcctttgtcacatgtctgggacagaccaccaggggttaaaatgaaagtaagaactctctc

SEQ ID NO: 83134 - DNA, 80 bp, synthetic construct; identical to SEQ ID NO: 14767
  source 1..80: mol_type = other DNA

SEQ ID NO: 83135 - DNA, 80 bp, synthetic construct
  source 1..80: mol_type = other DNA
tgcagcatccatgaaattccaaccgagtggttgtggaacctcaaatgcacctaaaacatgacatgaaaaccactggcctt

SEQ ID NO: 83136 - DNA, 80 bp, synthetic construct
  source 1..80: mol_type = other DNA
agcaaacttccactcattctttgaggctcagatcttatgtcccctgcttggagttttcctagaccttccagaatctgcca

SEQ ID NO: 83137 - DNA, 80 bp, synthetic construct; identical to SEQ ID NO: 14768
  source 1..80: mol_type = other DNA

SEQ ID NO: 83138 - DNA, 80 bp, synthetic construct
  source 1..80: mol_type = other DNA
ttttggacagcactgtttcagagggttcacattacaagggtaaaggcagctaatccaggaggaaggcaccatgggaagac

SEQ ID NO: 83139 - DNA, 80 bp, synthetic construct
  source 1..80: mol_type = other DNA
tgtcattaaaaagagaggggtggggaaaaaggaggaaggtacttggttaaaatatgcattggcagaaagcacttttcagc

SEQ ID NO: 83140 - DNA, 80 bp, synthetic construct
  source 1..80: mol_type = other DNA
aatttaaactcagcatttttgagtgaaggaatcccagatacctaatggtcagaaatcttcattccatgtatgaggaaaca

SEQ ID NO: 83141 - DNA, 80 bp, synthetic construct; identical to SEQ ID NO: 14769
  source 1..80: mol_type = other DNA

SEQ ID NO: 83142 - DNA, 80 bp, synthetic construct
  source 1..80: mol_type = other DNA
tccttttacaagtaataccagcctaattatattagcaaaaaatggcccagagatgcaagaatggaggacagacattagca

SEQ ID NO: 83143 - DNA, 80 bp, synthetic construct
  source 1..80: mol_type = other DNA
gaggtcaggagttcgagaccagcctgacaaacatggcgaaaccccatctctactaaaaatacaaaaattagccaggcgtg

SEQ ID NO: 83144 - DNA, 80 bp, synthetic construct
  source 1..80: mol_type = other DNA
tcagaaatggtgactaagttgtgttcaaaagcaccacatgggactctccttgctgttgactgcatcagtctgatgtctga

SEQ ID NO: 83145 - DNA, 80 bp, synthetic construct; identical to SEQ ID NO: 14770
  source 1..80: mol_type = other DNA

SEQ ID NO: 83146 - DNA, 80 bp, synthetic construct
  source 1..80: mol_type = other DNA
catggtggcaggtgcctgtaatcccaactactcggggaaccgaggcaggagaatcgcttgatcccaggaggcggaggttg

SEQ ID NO: 83147 - DNA, 80 bp, synthetic construct
  source 1..80: mol_type = other DNA
ggtgtcaggagtttgagaccggcctggccaacatggcgaaacaccatctcaagtaaaaatacaaaaattagccaggcatg

SEQ ID NO: 83148 - DNA, 80 bp, synthetic construct
  source 1..80: mol_type = other DNA
ccaggccacataacagacagcatctctctttaaacacacacacacacacacacacacacacacaatgaagaggaaattca

SEQ ID NO: 83149 - DNA, 80 bp, synthetic construct; identical to SEQ ID NO: 14771
  source 1..80: mol_type = other DNA

SEQ ID NO: 83150 - DNA, 80 bp, synthetic construct
  source 1..80: mol_type = other DNA
tacaattaggcactttaaccctatgtacagggtatcttgacaatattgatgtttcttagggaatatctaaaattaaaaca

SEQ ID NO: 83151 - DNA, 80 bp, synthetic construct
  source 1..80: mol_type = other DNA
ttttctcatttttcttcactgattatatattactgtttttaaaaaggtgactacaattttttaatgaattacttacctca

SEQ ID NO: 83152 - DNA, 80 bp, synthetic construct
  source 1..80: mol_type = other DNA
gcaacacaggatggcaagaatcccacagacccaggatcaaggaaagcctgtgaaagccagtccagggagtctaggtaaca

SEQ ID NO: 83153 - DNA, 80 bp, synthetic construct
  source 1..80: mol_type = other DNA
atggcaacagaccaaggcttgacttccggctctgatacagatgggcttttataagcccctctccactgtctgttacctca

SEQ ID NO: 83154 - DNA, 80 bp, synthetic construct; identical to SEQ ID NO: 14772
  source 1..80: mol_type = other DNA

SEQ ID NO: 83155 - DNA, 80 bp, synthetic construct
  source 1..80: mol_type = other DNA
gtccacagcctgaaggctctcaagcagccagctaaagtgttgctaagctagcacctgatgcgaagtcactgaggggtaat

SEQ ID NO: 83156 - DNA, 80 bp, synthetic construct
  source 1..80: mol_type = other DNA
aaaaaatgggactgcaaggaccaccaggaaaacttaggagcttatctgttggcaggtgactgccaacagaattttaaaaa

SEQ ID NO: 83157 - DNA, 80 bp, synthetic construct; identical to SEQ ID NO: 14773
  source 1..80: mol_type = other DNA

SEQ ID NO: 83158 - DNA, 80 bp, synthetic construct
  source 1..80: mol_type = other DNA
accgcttgtgccgtaccatgttgtgtatcctgacatgggaaagggaagtcttaagtgtgacgtgctattcctgggatatg

SEQ ID NO: 83159 - DNA, 80 bp, synthetic construct
  source 1..80: mol_type = other DNA
aactattgatacagcatggtttttttaaaaaaagaacactacagacacagcatgctgccatgccgacgtagaccctgctc

SEQ ID NO: 83160 - DNA, 80 bp, synthetic construct
  source 1..80: mol_type = other DNA
actttgaaaacaacacagttttcttgtaccctgggagatgagtttgaagaaaccacagctgatggcagaaaaacacagac

SEQ ID NO: 83161 - DNA, 80 bp, synthetic construct
  source 1..80: mol_type = other DNA
catcatcactttggacaggagttaactaagagaatgaccaagctcagttcaatgagcaaatctccatactgtttctttct

SEQ ID NO: 83162 - DNA, 80 bp, synthetic construct; identical to SEQ ID NO: 14774
  source 1..80: mol_type = other DNA

SEQ ID NO: 83163 - DNA, 80 bp, synthetic construct
  source 1..80: mol_type = other DNA
ggcctctgtgtcctcagtgctttcccctcaaacatccagttaccactaatggcactgacaaaacacacaaaggaagtaga

SEQ ID NO: 83164 - DNA, 80 bp, synthetic construct
  source 1..80: mol_type = other DNA
tctaggcatcagacacatccattgttttcaataatgtgttggcacgtagacagatgggaaataatacctccccacccaaa

SEQ ID NO: 83165 - DNA, 80 bp, synthetic construct
  source 1..80: mol_type = other DNA
ccacatggacttccctcttctgccttgagatagttgcaggcatgctagcttctttttaggcttgaaggactgtgttcatg

SEQ ID NO: 83166 - DNA, 80 bp, synthetic construct; identical to SEQ ID NO: 14775
  source 1..80: mol_type = other DNA

SEQ ID NO: 83167 - DNA, 80 bp, synthetic construct
  source 1..80: mol_type = other DNA
gtacttactgtcagctcaatgttgccatcggagcctgcgtagtcctccatgactgctgcctcaaaacccaggtcctggat

SEQ ID NO: 83168 - DNA, 80 bp, synthetic construct
  source 1..80: mol_type = other DNA
aaccgaacaaagaaacacatcttcccagaatcctctagaacagcagttttcaaacactgtttgaaaatgaggctgcacat

SEQ ID NO: 83169 - DNA, 80 bp, synthetic construct
  source 1..80: mol_type = other DNA
agtagcatgatctcggctcactgcaacctctgcctccagggttcaagtgattctcctgcctcagcctcctgagtagctgg

SEQ ID NO: 83170 - DNA, 80 bp, synthetic construct; identical to SEQ ID NO: 14776
  source 1..80: mol_type = other DNA

SEQ ID NO: 83171 - DNA, 80 bp, synthetic construct
  source 1..80: mol_type = other DNA
tcactcaggctttagaagacaccaatgaaataaggaatgtggtctgcagttattgactgctgttaccggaaggatatcct

SEQ ID NO: 83172 - DNA, 80 bp, synthetic construct
  source 1..80: mol_type = other DNA
ccacaatcttgctaacactattgtgttagttttacatgggaaaaaaagcctcgttcaaataaatgaaaggaaggaagtgc

SEQ ID NO: 83173 - DNA, 80 bp, synthetic construct; identical to SEQ ID NO: 14777
  source 1..80: mol_type = other DNA

SEQ ID NO: 83174 - DNA, 80 bp, synthetic construct
  source 1..80: mol_type = other DNA
aggtttaaaagtattggaaatgcattctggaggacaaaactttgacatttccacatatttctgtcctgttgttcctacaa

SEQ ID NO: 83175 - DNA, 80 bp, synthetic construct
  source 1..80: mol_type = other DNA
tggaataatactagtacaacctaactgagaagtctatccacaaaaggtactatgacctttaaactggattttcaatggct

SEQ ID NO: 83176 - DNA, 80 bp, synthetic construct
  source 1..80: mol_type = other DNA
gaatacgaggtctatacgcagcattcctaagttcaacatgggcgttcatctcttaccagcttctttctgcagattccttt

SEQ ID NO: 83177 - DNA, 80 bp, synthetic construct
  source 1..80: mol_type = other DNA
aggtgtaccatctgtagtttgcaccatggaattcccagcactgtggtttccaagagggttagtagaacagctttctagga

SEQ ID NO: 83178 - DNA, 80 bp, synthetic construct; identical to SEQ ID NO: 14778
  source 1..80: mol_type = other DNA

SEQ ID NO: 83179 - DNA, 80 bp, synthetic construct
  source 1..80: mol_type = other DNA
agaagggctcttcaaatacaaactggcacactaatggtttattccaaattaaagttgccaggtaaaatacaggacatcca

SEQ ID NO: 83180 - DNA, 80 bp, synthetic construct
  source 1..80: mol_type = other DNA
aatacctcttcggctaaataaaattctcataatcctgcccaattaaaaaaatcactattcttttctttctaggtttattt

SEQ ID NO: 83181 - DNA, 80 bp, synthetic construct; identical to SEQ ID NO: 14779
  source 1..80: mol_type = other DNA

SEQ ID NO: 83182 - DNA, 80 bp, synthetic construct
  source 1..80: mol_type = other DNA
ccatccctgagcactgagctgccagtgggcttgcccacgccactgaaagcagctcttcttagtgttgggcccgctgctcc

SEQ ID NO: 83183 - DNA, 80 bp, synthetic construct
  source 1..80: mol_type = other DNA
cttcagcatttctctcaaccatctccactcacctatcatcctctttatccctaatctaagctactagtggtctccaccct

SEQ ID NO: 83184 - DNA, 80 bp, synthetic construct
  source 1..80: mol_type = other DNA
ctaattctttcccatctcacaatcactctttctaggtctctgtcatcttcccacactctgcatttccggccccacactct

SEQ ID NO: 83185 - DNA, 80 bp, synthetic construct; identical to SEQ ID NO: 14780
  source 1..80: mol_type = other DNA

SEQ ID NO: 83186 - DNA, 80 bp, synthetic construct
  source 1..80: mol_type = other DNA
cacacctgtagtcccagctactcaggaggctgaggtgcgaggatcacctgagcccaaaggttcaaggatgcagtgaccta

SEQ ID NO: 83187 - DNA, 80 bp, synthetic construct
  source 1..80: mol_type = other DNA
tcctttccttaactctcatttttaccagcatggtctctaggtgatgagactaaggttctgttgtttagcagtaaaatctt

SEQ ID NO: 83188 - DNA, 80 bp, synthetic construct
  source 1..80: mol_type = other DNA
gaattctctccagaaaagaagcccaaatccaaggaggttcgcattcaagtcagccatggtttgactgtgtcccccaaatt

SEQ ID NO: 83189 - DNA, 80 bp, synthetic construct
  source 1..80: mol_type = other DNA
ccacctaagcaaccacgtgagcatgctcagcacccctgccatgtgatgccctgtggcaccggagtccccactggcagaag

SEQ ID NO: 83190 - DNA, 80 bp, synthetic construct; identical to SEQ ID NO: 14781
  source 1..80: mol_type = other DNA

SEQ ID NO: 83191 - DNA, 80 bp, synthetic construct
  source 1..80: mol_type = other DNA
atcccatgtcttctatagcagctctgagttcttctgggctaattacagagggattataaagaactgttgcagtcccttcg

SEQ ID NO: 83192 - DNA, 80 bp, synthetic construct
  source 1..80: mol_type = other DNA
tggaagacctgtgatctgtcccactcccttcggctccatcaggaagagaaactttaaaattcccaggtggaagtgcctcg

SEQ ID NO: 83193 - DNA, 80 bp, synthetic construct; identical to SEQ ID NO: 14782
  source 1..80: mol_type = other DNA

SEQ ID NO: 83194 - DNA, 80 bp, synthetic construct
  source 1..80: mol_type = other DNA
cttggttgctgagtgagactttgactctcactactccttgcagtttccggaccttgccttcaatggagctgacacaggac

SEQ ID NO: 83195 - DNA, 80 bp, synthetic construct
  source 1..80: mol_type = other DNA
atttcacagtggcactgccttgttccagggaaaccttcatgctgatgatgcctttcaaattggaaatcctgtcctcaatg

SEQ ID NO: 83196 - DNA, 80 bp, synthetic construct
  source 1..80: mol_type = other DNA
aaccttgaaaccaaatattttctacaacatcccagcttctctggcactgagaaaatggaaaacaatgccactggtgtcaa

SEQ ID NO: 83197 - DNA, 80 bp, synthetic construct; identical to SEQ ID NO: 14783
  source 1..80: mol_type = other DNA

SEQ ID NO: 83198 - DNA, 80 bp, synthetic construct
  source 1..80: mol_type = other DNA
tagtcaacaccttacttctatatctctttctaggggtgtctgtctgattatcttagcagaggttaaatgtgcttaacacc

SEQ ID NO: 83199 - DNA, 80 bp, synthetic construct
  source 1..80: mol_type = other DNA
aacagaaagttgagtttcacaaggaatttcatagttctgcctgtgactcagtgtcaccgccctcctgggtgttcaggaga

SEQ ID NO: 83200 - DNA, 80 bp, synthetic construct
  source 1..80: mol_type = other DNA
tctattaacaagcaaaatcttcctttcacaggctcccagcctacagctgtcttaactagatatactttttacaccagaac

SEQ ID NO: 83201 - DNA, 80 bp, synthetic construct; identical to SEQ ID NO: 14784
  source 1..80: mol_type = other DNA

SEQ ID NO: 83202 - DNA, 80 bp, synthetic construct
  source 1..80: mol_type = other DNA
aattaagtaatttgggggacagcagttcaaaagatattgctgaatccagtaaatacatgaatgtttaatgatgttaagga

SEQ ID NO: 83203 - DNA, 80 bp, synthetic construct
  source 1..80: mol_type = other DNA
gtactgaatactgtaggcaattgtaacacaatggtaagtacttgtgtatctaaacatatctgaacatagaaaaggtacag

SEQ ID NO: 83204 - DNA, 80 bp, synthetic construct
  source 1..80: mol_type = other DNA
ctgtaaacttaggctacactaaatttataaaaaatagttttatttcttcaacaataaatcaacatagccagacagtggct

SEQ ID NO: 83205 - DNA, 80 bp, synthetic construct
  source 1..80: mol_type = other DNA
agcttgctgtaacttttttacttcataaacgtttaattttttttttttttactttcgactcttttgtaataacacttagc

SEQ ID NO: 83206 - DNA, 80 bp, synthetic construct; identical to SEQ ID NO: 14785
  source 1..80: mol_type = other DNA

SEQ ID NO: 83207 - DNA, 80 bp, synthetic construct
  source 1..80: mol_type = other DNA
tattatgtactgtacagaattgtatgtgctctatttttatatgactggcagtacagtaagttggtttacaccagctcacc

SEQ ID NO: 83208 - DNA, 80 bp, synthetic construct
  source 1..80: mol_type = other DNA
ataacaatattaacagacaaatgactagccacctcggacacctacctggaaacgtctacgtcaaaagacatttcaggcag

SEQ ID NO: 83209 - DNA, 80 bp, synthetic construct
  source 1..80: mol_type = other DNA
cacaataaggacaaaaaattattcaaatgaagtcaaaagataaaaaactgggggaaaaaagatttgcttcacatagcata

SEQ ID NO: 83210 - DNA, 80 bp, synthetic construct; identical to SEQ ID NO: 14786
  source 1..80: mol_type = other DNA

SEQ ID NO: 83211 - DNA, 80 bp, synthetic construct
  source 1..80: mol_type = other DNA
catggagatattaaatgctgagaaagattagaaacatcaatgtccatcaataagaggctagttaattactgtacagccat

SEQ ID NO: 83212 - DNA, 80 bp, synthetic construct
  source 1..80: mol_type = other DNA
agtacattactagcaacagctcacaatttttcaattcggacagggcttggcagggaaagcttgtctcttctccacatagc

SEQ ID NO: 83213 - DNA, 80 bp, synthetic construct
  source 1..80: mol_type = other DNA
ggagtgtcacaatagcaagcactcctctagaacacatttcaaagtgcaagctcttatcaaacctctgcttgcatcacact

SEQ ID NO: 83214 - DNA, 80 bp, synthetic construct; identical to SEQ ID NO: 14787
  source 1..80: mol_type = other DNA

SEQ ID NO: 83215 - DNA, 80 bp, synthetic construct
  source 1..80: mol_type = other DNA
aaggggaccaggtggctgggatacagagaattactttcactatataatttaactgtacaatacacacattaccaaaatct

SEQ ID NO: 83216 - DNA, 80 bp, synthetic construct
  source 1..80: mol_type = other DNA
cttattaggcaaaaacctcttcctcataataagaaagacataaccctcaaccatctagtttgttggaaaaacaaatccct

SEQ ID NO: 83217 - DNA, 80 bp, synthetic construct
  source 1..80: mol_type = other DNA
gcagtagtactgaaagcaatttcttattatcaaacactactcagaggcccccctttctagacaggcaggtttttaaggcc

SEQ ID NO: 83218 - DNA, 80 bp, synthetic construct; identical to SEQ ID NO: 14788
  source 1..80: mol_type = other DNA

SEQ ID NO: 83219 - DNA, 80 bp, synthetic construct
  source 1..80: mol_type = other DNA
tctagcttttgaatttttgataaatgatggtagacgtcaggatgagaaaggactggaagcagaggaggccacagaaggga

SEQ ID NO: 83220 - DNA, 80 bp, synthetic construct
  source 1..80: mol_type = other DNA
caagatgaagccagaaaggaaaacaaaatctctggataagccattctgatatgaagaaatcagaaactgggtggcatgtt

SEQ ID NO: 83221 - DNA, 80 bp, synthetic construct
  source 1..80: mol_type = other DNA
aaccttaaataggataccagtcagtcccctgctgcctatcctcaagaattctttcactttgaaggatgtataacacccat

SEQ ID NO: 83222 - DNA, 80 bp, synthetic construct
  source 1..80: mol_type = other DNA
tgattctgagtgttattttatgaggatggcattttatatccctcatgcttagggcaattctagaaggagatattatcacc

SEQ ID NO: 83223 - DNA, 80 bp, synthetic construct; identical to SEQ ID NO: 14789
  source 1..80: mol_type = other DNA

SEQ ID NO: 83224 - DNA, 80 bp, synthetic construct
  source 1..80: mol_type = other DNA
ccactttcctcaatatccctaatcaaggcaaccacacttacaggagaaggcacacaagacacaagtcagagaagacaaca

SEQ ID NO: 83225 - DNA, 80 bp, synthetic construct
  source 1..80: mol_type = other DNA
gccagtgggggttggtctctaaaacccccactgaggaagaatcaatgtcccatattaacctctatgaacattaagtatac

SEQ ID NO: 83226 - DNA, 80 bp, synthetic construct; identical to SEQ ID NO: 14790
  source 1..80: mol_type = other DNA

SEQ ID NO: 83227 - DNA, 80 bp, synthetic construct
  source 1..80: mol_type = other DNA
acacccctgctctaaggcaaggaagaaaatgttttgttaaaccattctaatttgggcaacaatattattgactgtgataa

SEQ ID NO: 83228 - DNA, 80 bp, synthetic construct
  source 1..80: mol_type = other DNA
aatccaggcctcagtttcctttaggtataaaggtttgtgttttggatagttttaagtgtagacacagggcacatgtatgc

SEQ ID NO: 83229 - DNA, 80 bp, synthetic construct
  source 1..80: mol_type = other DNA
aataatggccatcttacagttgtacaggaaggcttgagagctaatgggccctaaaagactaacatcagcttgtggcaaga

SEQ ID NO: 83230 - DNA, 80 bp, synthetic construct; identical to SEQ ID NO: 14791
  source 1..80: mol_type = other DNA

SEQ ID NO: 83231 - DNA, 80 bp, synthetic construct
  source 1..80: mol_type = other DNA
agtggtgcctggaatgccagcaagacagaaccgttcactcgcctggaaaggtggctgaagccagggagccaagtggtcta

SEQ ID NO: 83232 - DNA, 80 bp, synthetic construct
  source 1..80: mol_type = other DNA
catagtgtaaacaaagccacagggaaatggcaactggctggagccctccgcagctcagcaaagctactgtagctagactg

SEQ ID NO: 83233 - DNA, 80 bp, synthetic construct
  source 1..80: mol_type = other DNA
gctctgaagagagcagtggatctcctagcacagtgctcgagctctgctaagggtcagactgcctcctcaagtgggtccgt

SEQ ID NO: 83234 - DNA, 80 bp, synthetic construct; identical to SEQ ID NO: 14792
  source 1..80: mol_type = other DNA

SEQ ID NO: 83235 - DNA, 80 bp, synthetic construct
  source 1..80: mol_type = other DNA
gcctcttctccttcaaaggatcacaactccctcgccagcaagggaacaaaactggatggagaatgcgtttaacaaattga

SEQ ID NO: 83236 - DNA, 80 bp, synthetic construct
  source 1..80: mol_type = other DNA
tgaaaaacacagcacaagaacttcgtgaagcatacacaagtatcaatagccaaatcgatcaagcagaagaaagaatatca

SEQ ID NO: 83237 - DNA, 80 bp, synthetic construct
  source 1..80: mol_type = other DNA
gttggaaaacactcttcaggatattatccaggagaacttccccaacctagcaagacaggccaacattcaaattcaggaaa

SEQ ID NO: 83238 - DNA, 80 bp, synthetic construct; identical to SEQ ID NO: 14793
  source 1..80: mol_type = other DNA

SEQ ID NO: 83239 - DNA, 80 bp, synthetic construct
  source 1..80: mol_type = other DNA
caaaaacataccaaattgtaaagaccatagacactatgaagaaactgcatcaactaatagccaaaataaccagctagcat

SEQ ID NO: 83240 - DNA, 80 bp, synthetic construct
  source 1..80: mol_type = other DNA
aggctcgaaatacagggatggaggaagatttaccaagcaaatggaaagcaaaaaaaagtcggggttggaatcctagtctc

SEQ ID NO: 83241 - DNA, 80 bp, synthetic construct
  source 1..80: mol_type = other DNA
aaaaagacttagacttccacacagtaatagtgggagactttaacaccccactgtcaatattagacagatcaatgaggcag

SEQ ID NO: 83242 - DNA, 80 bp, synthetic construct
  source 1..80: mol_type = other DNA
tcctcagcaaatgcaaaagaacagaaataataacaaacagtctctcagatcacagtgcaatcaaattagaactcaggatt

SEQ ID NO: 83243 - DNA, 80 bp, synthetic construct; identical to SEQ ID NO: 14794
  source 1..80: mol_type = other DNA

SEQ ID NO: 83244 - DNA, 80 bp, synthetic construct
  source 1..80: mol_type = other DNA
atagaccgctagccagactaataaagaagaaaagagagaggaatcaaatcgatgcaataaaaaatgataaaggagatatc

SEQ ID NO: 83245 - DNA, 80 bp, synthetic construct; identical to SEQ ID NO: 14795
  source 1..80: mol_type = other DNA

SEQ ID NO: 83246 - DNA, 80 bp, synthetic construct
  source 1..80: mol_type = other DNA
ccctgatgaacatcgatgcaaaaattctcaataaaatactggcaaaccgaatccagcagcacatcaaaaagcttatccac

SEQ ID NO: 83247 - DNA, 80 bp, synthetic construct
  source 1..80: mol_type = other DNA
tgctaaaaactctcaataaactaggtactgatgggatgtatctcaaaataataacagctatttatgacaaacccagagcc

SEQ ID NO: 83248 - DNA, 80 bp, synthetic construct
  source 1..80: mol_type = other DNA
aggaagtcaaattgtctctgtttgcagatgacatgattgtatatttagaaaaccccatcatctcagcccaaaatctcctt

SEQ ID NO: 83249 - DNA, 80 bp, synthetic construct
  source 1..80: mol_type = other DNA
ggatgtgaaggacctcttcaaggagaactacaaaccactgctcaaggaaataagagaggacacaaacaaatggaaaaaca

SEQ ID NO: 83250 - DNA, 80 bp, synthetic construct; identical to SEQ ID NO: 14796
  source 1..80: mol_type = other DNA

SEQ ID NO: 83251 - DNA, 80 bp, synthetic construct
  source 1..80: mol_type = other DNA
tgggaaaactggctagccatatgcagaaaactgaaactggaccccttccttacaccttacacaaaaattaactcaagatg

SEQ ID NO: 83252 - DNA, 80 bp, synthetic construct
  source 1..80: mol_type = other DNA
agagcttctgcacagcaaaagaaactatcatcagagtgaacaggcaacctacagaatgggagaaaatttttgcaatctat

SEQ ID NO: 83253 - DNA, 80 bp, synthetic construct
  source 1..80: mol_type = other DNA
cactggttattacagacatgcaaatcaaaaccacaatgagataccatctcatgccagttaggatggcaatcattaaaaag

SEQ ID NO: 83254 - DNA, 80 bp, synthetic construct; identical to SEQ ID NO: 14797
  source 1..80: mol_type = other DNA

SEQ ID NO: 83255 - DNA, 80 bp, synthetic construct
  source 1..80: mol_type = other DNA
taacacaagaacagaaaaccaaacagtgcatgttctcactcataagtgggagctaaacaatgagaacacatggacacagg

SEQ ID NO: 83256 - DNA, 80 bp, synthetic construct; identical to SEQ ID NO: 14798
  source 1..80: mol_type = other DNA

SEQ ID NO: 83257 - DNA, 80 bp, synthetic construct
  source 1..80: mol_type = other DNA
ctaattattaaaagtagtgtacatattcccccaagcccttcactctggccttgaatcctgtttcacaatggtccaaaaag

SEQ ID NO: 83258 - DNA, 80 bp, synthetic construct
  source 1..80: mol_type = other DNA
atgactattcattgcctatttgcttctctcaaccacagcaagggaaaatattaacccttactgagaaacaaaatgtagca

SEQ ID NO: 83259 - DNA, 80 bp, synthetic construct; identical to SEQ ID NO: 14799
  source 1..80: mol_type = other DNA

SEQ ID NO: 83260 - DNA, 80 bp, synthetic construct
  source 1..80: mol_type = other DNA
gtattggtttctgcctagaattataggtatgacacataaaacaaatgtattcctttaagacatgtacaaacctaatgttt

SEQ ID NO: 83261 - DNA, 80 bp, synthetic construct
  source 1..80: mol_type = other DNA
gatgatacagtaaacaagagtataaggaaaaacagttcttaaccactgtttgtagaaagctaaattttgcctaattgctc

SEQ ID NO: 83262 - DNA, 80 bp, synthetic construct; identical to SEQ ID NO: 14800
  source 1..80: mol_type = other DNA

SEQ ID NO: 83263 - DNA, 80 bp, synthetic construct
  source 1..80: mol_type = other DNA
acaaaagcaaataaaataatagcgaatgctgatgattccataatgacagataacttctttaaatgactagatcacaccac

SEQ ID NO: 83264 - DNA, 80 bp, synthetic construct
  source 1..80: mol_type = other DNA
tcaagagattgagacgatcctggacaacacggtgaaacctcatctctactaaaaatacaaatattagttgggcgtggtgg

SEQ ID NO: 83265 - DNA, 80 bp, synthetic construct
  source 1..80: mol_type = other DNA
accaccacttacctaagaacaaaattccatattctggtctctaaaaatgctaagtccaccacgtaacaaccttatagtca

SEQ ID NO: 83266 - DNA, 80 bp, synthetic construct; identical to SEQ ID NO: 14801
  source 1..80: mol_type = other DNA

SEQ ID NO: 83267 - DNA, 80 bp, synthetic construct
  source 1..80: mol_type = other DNA
aacagcagccaagcttggccaaagaagtcaacagagtcatgagtaaggaggcttaagcagttgtttctggaaacaaaggg

SEQ ID NO: 83268 - DNA, 80 bp, synthetic construct
  source 1..80: mol_type = other DNA
tctgtggaacctttgataggaacacctgggccaaagcacggagcccctgacttctactctggttagcgtgctcttatgga

SEQ ID NO: 83269 - DNA, 80 bp, synthetic construct
  source 1..80: mol_type = other DNA
agttatgccttttaaaacagatctttttcccctctctgcctgtctgaaacatagaagaatcaaagaaacaggttttccaa

SEQ ID NO: 83270 - DNA, 80 bp, synthetic construct; identical to SEQ ID NO: 14802
  source 1..80: mol_type = other DNA

SEQ ID NO: 83271 - DNA, 80 bp, synthetic construct
  source 1..80: mol_type = other DNA
taagctctcactcagctttctcgtctgttaaaggtggactgatgatacctactaaagttgttaaaatgattaagtgacaa

SEQ ID NO: 83272 - DNA, 80 bp, synthetic construct
  source 1..80: mol_type = other DNA
ttctttctaaaaattaatcctaaatttaaaagtggaactgcaataaaaaatgattatataggccaggcagggtggttcac

SEQ ID NO: 83273 - DNA, 80 bp, synthetic construct
  source 1..80: mol_type = other DNA
gctgaggcaggagaatcacttgaacccaggagatggaggttgcagtgagccaagattacgccactgcactctatagcctg

SEQ ID NO: 83274 - DNA, 80 bp, synthetic construct; identical to SEQ ID NO: 14803
  source 1..80: mol_type = other DNA

SEQ ID NO: 83275 - DNA, 80 bp, synthetic construct
  source 1..80: mol_type = other DNA
ccaggagtttgagaccagcctgggcaacatagggagaccacatctctacaaataaagagaaactggaaatggtggcatgc

SEQ ID NO: 83276 - DNA, 80 bp, synthetic construct
  source 1..80: mol_type = other DNA
aaaaatagagttgcaactgtgctcagatagattactgggttatcacagtcctgtccagaccttcagacaacacatcaaac

SEQ ID NO: 83277 - DNA, 80 bp, synthetic construct
  source 1..80: mol_type = other DNA
caaagtgctttcacaatcatatgaggcaggatttatcatccactttgcaatgaagaatctaaaggagagtgtccaagact

SEQ ID NO: 83278 - DNA, 80 bp, synthetic construct; identical to SEQ ID NO: 14804
  source 1..80: mol_type = other DNA

SEQ ID NO: 83279 - DNA, 80 bp, synthetic construct
  source 1..80: mol_type = other DNA
gctaaaagtataaatgttcaccgtatattgtataaaccggcaacatatgaaaaggctgattaaaagattaaacgctctgt

SEQ ID NO: 83280 - DNA, 80 bp, synthetic construct
  source 1..80: mol_type = other DNA
ctgtgtagaagctacccaaacgggcagccactgaataattctacatttcatatttttaaatttgcctaggaaaaaacttt

SEQ ID NO: 83281 - DNA, 80 bp, synthetic construct
  source 1..80: mol_type = other DNA
caagtaccctgtgatttcaacgtatgtaaatctcttgcatagcacatttgaaagttcttttcacaaaatttcctttagtc

SEQ ID NO: 83282 - DNA, 80 bp, synthetic construct; identical to SEQ ID NO: 14805
  source 1..80: mol_type = other DNA

SEQ ID NO: 83283 - DNA, 80 bp, synthetic construct
  source 1..80: mol_type = other DNA
acttttgcttcatagagtcttacaaaatattctgaaaataaaaagcaacaaaacccaaacttccaagccatggtgtaatt

SEQ ID NO: 83284 - DNA, 80 bp, synthetic construct
  source 1..80: mol_type = other DNA
gactggaactcatttcccaggttccattcaaaactctctgtggaaattctccttcctctgacggtggagtgccttcctcc

SEQ ID NO: 83285 - DNA, 80 bp, synthetic construct
  source 1..80: mol_type = other DNA
agttcacggccacggcttccctcctcactaaagcagttcaccttcagcagactatttggttgtgttagagagaaatgctt

SEQ ID NO: 83286 - DNA, 80 bp, synthetic construct
  source 1..80: mol_type = other DNA
gtactgcacctatttgcttttgtttatctacaaccgtcccagcacttggcaccctctcactcaacacactgtgtgcagca

SEQ ID NO: 83287 - DNA, 80 bp, synthetic construct; identical to SEQ ID NO: 14806
  source 1..80: mol_type = other DNA

SEQ ID NO: 83288 - DNA, 80 bp, synthetic construct
  source 1..80: mol_type = other DNA
ctcatctgtttaagcagcaccacggccaggaactaaggcacaattcaggcttctcaggctacctgctgttccacatgggg

SEQ ID NO: 83289 - DNA, 80 bp, synthetic construct
  source 1..80: mol_type = other DNA
acctcctgctgcaagtgagtgtggaattgaattcagggtaaaatgatcactctgtctctccgtgttattcttcacagcag

SEQ ID NO: 83290 - DNA, 80 bp, synthetic construct
  source 1..80: mol_type = other DNA
acactgtcatccctgccccaagaactcctgactgagagatctgttctctttgaggaaaggcaacaccaaggctggtccat

SEQ ID NO: 83291 - DNA, 80 bp, synthetic construct; identical to SEQ ID NO: 14807
  source 1..80: mol_type = other DNA

SEQ ID NO: 83292 - DNA, 80 bp, synthetic construct
  source 1..80: mol_type = other DNA
ctcacatgccctgctgaccacctgacatttcatttatggggcatcagaagtagattttccaggtaactgaagctcatcgc

SEQ ID NO: 83293 - DNA, 80 bp, synthetic construct
  source 1..80: mol_type = other DNA
ctgtgcctatgaatagctaataaggaaaatatgttgggatcatatgtcccacatgcttttaaataatctattctgttagc

SEQ ID NO: 83294 - DNA, 80 bp, synthetic construct; identical to SEQ ID NO: 14808
  source 1..80: mol_type = other DNA

SEQ ID NO: 83295 - DNA, 80 bp, synthetic construct
  source 1..80: mol_type = other DNA
tttcgcagattgagcacatggtgatgagtacaccaagatgagcggggagggtgggaagaaggcaagtctggggtaaacac

SEQ ID NO: 83296 - DNA, 80 bp, synthetic construct
  source 1..80: mol_type = other DNA
caccatctaatccttcttatcctttaagtcctgcctctctgtggaatcctgctagcagctctctcccttatctgaattcc

SEQ ID NO: 83297 - DNA, 80 bp, synthetic construct
  source 1..80: mol_type = other DNA
tggaacacaaggatctcatatcttagctgcccacagacctaacatggtgatgaacaatatcagacattaaataagtatat

SEQ ID NO: 83298 - DNA, 80 bp, synthetic construct
  source 1..80: mol_type = other DNA
tccctcacatatttcttctaggtcttcaaggatttccttgcactagattattctgtcttccatatgtacaaatttcacga

SEQ ID NO: 83299 - DNA, 80 bp, synthetic construct; identical to SEQ ID NO: 14809
  source 1..80: mol_type = other DNA

SEQ ID NO: 83300 - DNA, 80 bp, synthetic construct
  source 1..80: mol_type = other DNA
taaagctgcatatgttgggttcccaagaagagaacatgagcactgcaaacagcacagccaccaacagtcagggctctagc

SEQ ID NO: 83301 - DNA, 80 bp, synthetic construct
  source 1..80: mol_type = other DNA
ttggaagtttactggcaagttaggagagaagaacagtagcaaagagcagtattcaaagtctgaattcctcaaacactagg

SEQ ID NO: 83302 - DNA, 80 bp, synthetic construct; identical to SEQ ID NO: 14810
  source 1..80: mol_type = other DNA

SEQ ID NO: 83303 - DNA, 80 bp, synthetic construct
  source 1..80: mol_type = other DNA
ctggcaccttcctgcaaaactccaacacggctttactctcagttccacttggcttcacgcctgtcctctagcagctcaac

SEQ ID NO: 83304 - DNA, 80 bp, synthetic construct
  source 1..80: mol_type = other DNA
caggtccccagtgcccacccccatacttactctcagccagtgacacactgcccaaggtgaccagtccttgtctccaagct

SEQ ID NO: 83305 - DNA, 80 bp, synthetic construct
  source 1..80: mol_type = other DNA
gtacactcatccaggccaggagaagtatacctttcttagctcactcaggctgctatcacaaaataccttagactgggtaa

SEQ ID NO: 83306 - DNA, 80 bp, synthetic construct
  source 1..80: mol_type = other DNA
aagcctcttttataagggcactaatcccattcgagaaggcagagccctcatggccaaatcacctcctaaagtcctcacct

SEQ ID NO: 83307 - DNA, 80 bp, synthetic construct; identical to SEQ ID NO: 14811
  source 1..80: mol_type = other DNA

SEQ ID NO: 83308 - DNA, 80 bp, synthetic construct
  source 1..80: mol_type = other DNA
catagtgagacaccatctcttcaaaaaataaaaaattagctgggcatggtggtgcacacttgtagtcccagctactcaga

SEQ ID NO: 83309 - DNA, 80 bp, synthetic construct
  source 1..80: mol_type = other DNA
tcaaacccacatgtaaatgtttagcaaatcctgttagttccaccaacaaaatgcatccagcatctaatgacttcaacaca

SEQ ID NO: 83310 - DNA, 80 bp, synthetic construct; identical to SEQ ID NO: 14812
  source 1..80: mol_type = other DNA

SEQ ID NO: 83311 - DNA, 80 bp, synthetic construct
  source 1..80: mol_type = other DNA
ctactagcttagaaatacctccctccaacatcccatatccaaagggctcacttcctcacctccatgaaatctttgctcaa

SEQ ID NO: 83312 - DNA, 80 bp, synthetic construct
  source 1..80: mol_type = other DNA
taatacatcttttacttactctttttaacaactatctccccagttaggatataagtttcacaagtgcaggaatccttcac

SEQ ID NO: 83313 - DNA, 80 bp, synthetic construct
  source 1..80: mol_type = other DNA
tgcttatttatttatttatttagtagagacaggggtttcactatgttatccaggctggcctcgaactcctgagctcaagc

SEQ ID NO: 83314 - DNA, 80 bp, synthetic construct
  source 1..80: mol_type = other DNA
acaaagaatgccaagcaaaaacaacttacaaatgtgcttgctgtaaaaggactgctaaactttccgacaatactcaacat

SEQ ID NO: 83315 - DNA, 80 bp, synthetic construct; identical to SEQ ID NO: 14813
  source 1..80: mol_type = other DNA

SEQ ID NO: 83316 - DNA, 80 bp, synthetic construct
  source 1..80: mol_type = other DNA
tcctccctcacttactcattcatttatcccttcaagccagggatctaagctcaaatacaggcatctctcagagatatcca

SEQ ID NO: 83317 - DNA, 80 bp, synthetic construct
  source 1..80: mol_type = other DNA
aaatatgttatggcaaaaaaatgctaacaatcatctgagctgtcagtaagtcatggtctttctgctagtggaaggccttg

SEQ ID NO: 83318 - DNA, 80 bp, synthetic construct; identical to SEQ ID NO: 14814
  source 1..80: mol_type = other DNA

SEQ ID NO: 83319 - DNA, 80 bp, synthetic construct
  source 1..80: mol_type = other DNA
gaatgtacacatttatagattaactttgccatcttacacgggccccaagatgattataacagtagcatcaaagagcactg

SEQ ID NO: 83320 - DNA, 80 bp, synthetic construct
  source 1..80: mol_type = other DNA
aaatacagcatctgcaaaagggcaataaagcaaaggtttgcctgtactgtcacaagtaggcagtgacttaaatgagcaga

SEQ ID NO: 83321 - DNA, 80 bp, synthetic construct
  source 1..80: mol_type = other DNA
ttttaagatgttgaaaactggccaaagttctagccaatggaatataaggcaaagttgtttgtcagggctcctaagcaggc

SEQ ID NO: 83322 - DNA, 80 bp, synthetic construct; identical to SEQ ID NO: 14815
  source 1..80: mol_type = other DNA

SEQ ID NO: 83323 - DNA, 80 bp, synthetic construct
  source 1..80: mol_type = other DNA
ggccatgaggtatcaggaagatggagttgcatcctaacttgtgttaacaaatcattaatcaggaagcaattaggctgaga

SEQ ID NO: 83324 - DNA, 80 bp, synthetic construct
  source 1..80: mol_type = other DNA
tgactccaacatttcaggttcctatgtaagcaaaccaaacccaactcaatataaacagtaaaacaaagcttagcttaacc

SEQ ID NO: 83325 - DNA, 80 bp, synthetic construct
  source 1..80: mol_type = other DNA
ctttgttttgcttccctgaacacttacaaagtctttccctcattccccctagatggagccctgaactatgtagtctggca

SEQ ID NO: 83326 - DNA, 80 bp, synthetic construct
  source 1..80: mol_type = other DNA
agttagcaccacatggacaccaaggtttatagcctgcaccttccagagcagcagcccaagccacacctgagccgcacctg

SEQ ID NO: 83327 - DNA, 80 bp, synthetic construct; identical to SEQ ID NO: 14816
  source 1..80: mol_type = other DNA

SEQ ID NO: 83328 - DNA, 80 bp, synthetic construct
  source 1..80: mol_type = other DNA
atcatctatcctccacaaagcattagggcacagacacaactgacccacgttctctgccattttataaataaaaacagaat

SEQ ID NO: 83329 - DNA, 80 bp, synthetic construct
  source 1..80: mol_type = other DNA
ctcaccaaaataatccttaatgcttagtttatcactatctaggctttttccagcatgtacctccaaactcttccagcctc

SEQ ID NO: 83330 - DNA, 80 bp, synthetic construct; identical to SEQ ID NO: 14817
  source 1..80: mol_type = other DNA

SEQ ID NO: 83331 - DNA, 80 bp, synthetic construct
  source 1..80: mol_type = other DNA
ggcaaggaacacctggcccgcccagggcagaaaactgcttaaaggtgtccttaaaccacaaacagcatgagcgatctgtg

SEQ ID NO: 83332 - DNA, 80 bp, synthetic construct
  source 1..80: mol_type = other DNA
ttcggggctctcagcactgaacacggatacttcctcgatatctatgctatggcatcagtgagcagtgttcatgttactgg

SEQ ID NO: 83333 - DNA, 80 bp, synthetic construct
  source 1..80: mol_type = other DNA
gagtttggatagcctagtttctctactgagaagacaattccataaagaataagggtagaagacccaacttacagttcttt

SEQ ID NO: 83334 - DNA, 80 bp, synthetic construct; identical to SEQ ID NO: 14818
  source 1..80: mol_type = other DNA

SEQ ID NO: 83335 - DNA, 80 bp, synthetic construct
  source 1..80: mol_type = other DNA
cactgaaggaatttttctgccccttctgtgggtgctgtaccatgtagacagctctgtcccagcatgcatccagcacaggg

SEQ ID NO: 83336 - DNA, 80 bp, synthetic construct
  source 1..80: mol_type = other DNA
atccattcattcaagaacaactgtggtgcacctacatgtgggaaatagttttttaaacggtaaaaacccggttcccattt

SEQ ID NO: 83337 - DNA, 80 bp, synthetic construct
  source 1..80: mol_type = other DNA
ctaggactcaatcctagatctgcctcttataagcaaggtacatcgggcaagttacttaacttgtgtctggctcagtttcc

SEQ ID NO: 83338 - DNA, 80 bp, synthetic construct; identical to SEQ ID NO: 14819
  source 1..80: mol_type = other DNA

SEQ ID NO: 83339 - DNA, 80 bp, synthetic construct
  source 1..80: mol_type = other DNA
tgctagaacagctcgcagaacttaggaaagcactttatttaatatcaccagtttattatacaaaatacagctaagaaacc

SEQ ID NO: 83340 - DNA, 80 bp, synthetic construct
  source 1..80: mol_type = other DNA
agcaccttgatgtgttcactaacaggaagctctccaaaacccatcatttagggtttttaagaaagctctatttgtgatcc

SEQ ID NO: 83341 - DNA, 80 bp, synthetic construct
  source 1..80: mol_type = other DNA
atggtgaaaccccgtctccactaaaaatacaaaaattagctgggtgtggtggcgtgcgcctgtaatcccagctactcagg

SEQ ID NO: 83342 - DNA, 80 bp, synthetic construct; identical to SEQ ID NO: 14820
  source 1..80: mol_type = other DNA

SEQ ID NO: 83343 - DNA, 80 bp, synthetic construct
  source 1..80: mol_type = other DNA
tcttatcaccatctctcaggaaattacaacggtttaagaagctctatgtcaggaacttgggacaagaccaagtatatatt

SEQ ID NO: 83344 - DNA, 80 bp, synthetic construct
  source 1..80: mol_type = other DNA
ttccctgaccacctacttaaaacagcatcttcctctccacccatgtcaatccctatcttattcccttattctgctttctt

SEQ ID NO: 83345 - DNA, 80 bp, synthetic construct
  source 1..80: mol_type = other DNA
agctaatttttcttttttttttgtataaacgatgtcttgatatgctgccaggctggtcttgaactcctggacccaaactg

SEQ ID NO: 83346 - DNA, 80 bp, synthetic construct
  source 1..80: mol_type = other DNA
tgagaacctccattgacgcagccagtttttctcagagggcccttccttgtctggatctgggtgagattagctgaatttgg

SEQ ID NO: 83347 - DNA, 80 bp, synthetic construct; identical to SEQ ID NO: 14821
  source 1..80: mol_type = other DNA

SEQ ID NO: 83348 - DNA, 80 bp, synthetic construct
  source 1..80: mol_type = other DNA
ccctttttttttcctatctccaactaggatgtaaattcatgagggcaaggtctcggtcctacctaaatccccagtgtcta

SEQ ID NO: 83349 - DNA, 80 bp, synthetic construct
  source 1..80: mol_type = other DNA
gcacatagagggatatgagtgcctaacacaatgcccagcacacagtaagctcaataacgctggtcaacgctattatcaga

SEQ ID NO: 83350 - DNA, 80 bp, synthetic construct; identical to SEQ ID NO: 14822
  source 1..80: mol_type = other DNA

SEQ ID NO: 83351 - DNA, 80 bp, synthetic construct
  source 1..80: mol_type = other DNA
gtgtcagcattaaaaatcatgtacaaagatgttcacttgcaagagagagagaaaaaaagtagcaaacagaacgtccacca

SEQ ID NO: 83352 - DNA, 80 bp, synthetic construct
  source 1..80: mol_type = other DNA
tacaaatgaaacctaaagatttctctgaatgtgtgcatattacatatagatacatgtcttgttaaccactgtatcaactc

SEQ ID NO: 83353 - DNA, 80 bp, synthetic construct
  source 1..80: mol_type = other DNA
acaattaaaatgaatttaaaacagttataaaagttccaggacctcgatataccatatctggtccaagcaccaggctctga

SEQ ID NO: 83354 - DNA, 80 bp, synthetic construct; identical to SEQ ID NO: 14823
  source 1..80: mol_type = other DNA

SEQ ID NO: 83355 - DNA, 80 bp, synthetic construct
  source 1..80: mol_type = other DNA
tctgtctctcctgctcaggcatcgtcccgcacggacaccgaattcttctctgatctggctcagagcaaaaggtcacctgg

SEQ ID NO: 83356 - DNA, 80 bp, synthetic construct
  source 1..80: mol_type = other DNA
cgcgccgccgtcctcccgacctgggggcacggggatgagagcgtgaggggagagtgggcctcggaccctcgcccactccc

SEQ ID NO: 83357 - DNA, 80 bp, synthetic construct
  source 1..80: mol_type = other DNA
actgtactgggatctcacgcgtgtgcgggagcgggagggcaggtgagctgcgcagagccgggccgcagactcagctccca

SEQ ID NO: 83358 - DNA, 80 bp, synthetic construct
  source 1..80: mol_type = other DNA
ctgtgcgcaaaggccagccaatggcctccaacgggcggcgggctttgggccgggaacgggggcgcaggcgcccaggcggg

SEQ ID NO: 83359 - DNA, 80 bp, synthetic construct; identical to SEQ ID NO: 14824
  source 1..80: mol_type = other DNA

SEQ ID NO: 83360 - DNA, 80 bp, synthetic construct
  source 1..80: mol_type = other DNA
ggcgcccggagccagcgccccgcacccgcgccccagcgggcagaccccaacccagcatgagcgccgccacccactcgccc

SEQ ID NO: 83361 - DNA, 80 bp, synthetic construct
  source 1..80: mol_type = other DNA
gccgggcccgcggcccgccctggtcggtggcgccacctcgacggcaggcggcggggagtgggctgggccggggggacgcg

SEQ ID NO: 83362 - DNA, 80 bp, synthetic construct
  source 1..80: mol_type = other DNA
gcgaccccgcagtggctccggtgccgtccacggctcgactccagggcggaaggccgggtgtccagcgctggcctcgcgct

SEQ ID NO: 83363 - DNA, 80 bp, synthetic construct
  source 1..80: mol_type = other DNA
ggaattttaccgctcaagttctccaacttggttgaggggtatcttggctactgtcccatgttaggcacccaatgactctg

SEQ ID NO: 83364 - DNA, 80 bp, synthetic construct; identical to SEQ ID NO: 14825
  source 1..80: mol_type = other DNA

SEQ ID NO: 83365 - DNA, 80 bp, synthetic construct
  source 1..80: mol_type = other DNA
gactaatgatactcttgtgaatacagcagaagtatgtctcatttacatacatgcaaggatatatacttcttaatccccaa

SEQ ID NO: 83366 - DNA, 80 bp, synthetic construct
  source 1..80: mol_type = other DNA
ctgggcaagataaaagcagcaaagagctggtaaattattttgaagatttaaaaactcaccaaattaaaactgctgtgtaa

SEQ ID NO: 83367 - DNA, 80 bp, synthetic construct
  source 1..80: mol_type = other DNA
gtacaagaggctgtaattagctgggatgggcacagttacatatacctttttgtgtgtctgttccacccatttttgggtga

SEQ ID NO: 83368 - DNA, 80 bp, synthetic construct
  source 1..80: mol_type = other DNA
ataaacattcccagcactttgttctcagcatgaaacttacccagcaagttgagatcttcctgtacccacctggtgcatgg

SEQ ID NO: 83369 - DNA, 80 bp, synthetic construct; identical to SEQ ID NO: 14826
  source 1..80: mol_type = other DNA

SEQ ID NO: 83370 - DNA, 80 bp, synthetic construct
  source 1..80: mol_type = other DNA
tctgtgctgaggttgcttggattttgatgatgggactgatgaactcaagaaaagagttccctttaccaagtgaatgactt

SEQ ID NO: 83371 - DNA, 80 bp, synthetic construct
  source 1..80: mol_type = other DNA
ccttgaatatcattttgtatttgaaattggcttctcaatgcataatgagaaaaaggcccttgcagaaaacaaagggcgat

SEQ ID NO: 83372 - DNA, 80 bp, synthetic construct; identical to SEQ ID NO: 14827
  source 1..80: mol_type = other DNA

SEQ ID NO: 83373 - DNA, 80 bp, synthetic construct
  source 1..80: mol_type = other DNA
gattttgattttctgcacacttgggcttcccactaatttggcaagttcataccagtccaggccctttcctggcagaggat

SEQ ID NO: 83374 - DNA, 80 bp, synthetic construct
  source 1..80: mol_type = other DNA
atggagcagggccgctctagctccatggatcttgggggttaccagtctggcactctccagggagtcctgttaagaacaca

SEQ ID NO: 83375 - DNA, 80 bp, synthetic construct
  source 1..80: mol_type = other DNA
ttggggaggaggagctgcggcttagtgcctcctgaacatctatcctgcagagcattttcccaagcctccattttccttct

SEQ ID NO: 83376 - DNA, 80 bp, synthetic construct; identical to SEQ ID NO: 14828
  source 1..80: mol_type = other DNA

SEQ ID NO: 83377 - DNA, 80 bp, synthetic construct
  source 1..80: mol_type = other DNA
agatcgttttgctctttccagatctattgcaagctgttatgcctcttagcagaggcggagcacaatcaggaaatgagtgg

SEQ ID NO: 83378 - DNA, 80 bp, synthetic construct
  source 1..80: mol_type = other DNA
ctgtgttgttcacatgagaaccgactgcacctccgagaacatcatttgtcccgttttgtagggtagatttgccctttatg

SEQ ID NO: 83379 - DNA, 80 bp, synthetic construct
  source 1..80: mol_type = other DNA
ggcttgcttagtgctgtcctcgtttctggaatgacacacagtcaccttatataaaccactctacatgtttattactttct

SEQ ID NO: 83380 - DNA, 80 bp, synthetic construct; identical to SEQ ID NO: 14829
  source 1..80: mol_type = other DNA

SEQ ID NO: 83381 - DNA, 80 bp, synthetic construct
  source 1..80: mol_type = other DNA
tttttttttttttttttttgagacggagtcgcactttgtctcccaggctggggtgccgtagtgcgatcttggctcactgc

SEQ ID NO: 83382 - DNA, 80 bp, synthetic construct
  source 1..80: mol_type = other DNA
catgtgataccatgtgaggtatctggtgttactaagtcgtcacgtatttcgatgaaggtatctttgggaccttggcagcc

SEQ ID NO: 83383 - DNA, 80 bp, synthetic construct
  source 1..80: mol_type = other DNA
ctttgaactagaaactatgaagtgtcttacacatgggacagcagatttggagaggcagtgtgcctggcctgtgataaaca

SEQ ID NO: 83384 - DNA, 80 bp, synthetic construct
  source 1..80: mol_type = other DNA
agttaatcagaaatgttggcctgtttcttgaacctgggtctggatttaggagatgggcccgactctttactcactccttt

SEQ ID NO: 83385 - DNA, 80 bp, synthetic construct; identical to SEQ ID NO: 14830
  source 1..80: mol_type = other DNA

SEQ ID NO: 83386 - DNA, 80 bp, synthetic construct
  source 1..80: mol_type = other DNA
gaagccttccattggttcctaagaactgcagagttgtcctgggctcctaaaggtccccagaggcctgctcctttttgtca

SEQ ID NO: 83387 - DNA, 80 bp, synthetic construct
  source 1..80: mol_type = other DNA
tagctgtgcagagagcagcccctggcactgtgaaaagagtctcttaaaaattttttttcgtgtggctggcagcaagatca

SEQ ID NO: 83388 - DNA, 80 bp, synthetic construct; identical to SEQ ID NO: 14831
  source 1..80: mol_type = other DNA

SEQ ID NO: 83389 - DNA, 80 bp, synthetic construct
  source 1..80: mol_type = other DNA
aatgaatgaataaatgaatggatggtttaaaaattcatacagtgggaggatgggaaggccccttcatgtgcagaagaaaa

SEQ ID NO: 83390 - DNA, 80 bp, synthetic construct
  source 1..80: mol_type = other DNA
aagctgagtgctctcactctcgtgtaccctgcctggctggcctgatgactcagcatggagcgctggctccctgacccaga

SEQ ID NO: 83391 - DNA, 80 bp, synthetic construct
  source 1..80: mol_type = other DNA
gtgacaggagtagcagaaaggttagcatctacctggccttaccatcagacaaacctgggttctagagatcttaggcaaag

SEQ ID NO: 83392 - DNA, 80 bp, synthetic construct; identical to SEQ ID NO: 14832
  source 1..80: mol_type = other DNA

SEQ ID NO: 83393 - DNA, 80 bp, synthetic construct
  source 1..80: mol_type = other DNA
gaacagtaacagatgaagctgcggggccttcgggagccttgacccagctgccagaccctgcgccatgcgtccatagatgc

SEQ ID NO: 83394 - DNA, 80 bp, synthetic construct
  source 1..80: mol_type = other DNA
gtgaggggggacatcagcccaccttactgaggggccgattacctgcacagctcttctggacccagctctcaggggtgtaa

SEQ ID NO: 83395 - DNA, 80 bp, synthetic construct
  source 1..80: mol_type = other DNA
tgcctgcatggcagctgatgaactgaggatgtttttcttttggaaattgtattttgtacagaatacacgtccgctgatgt

SEQ ID NO: 83396 - DNA, 80 bp, synthetic construct; identical to SEQ ID NO: 14833
  source 1..80: mol_type = other DNA

SEQ ID NO: 83397 - DNA, 80 bp, synthetic construct
  source 1..80: mol_type = other DNA
gtgtgccctggtgaggggccatcgaggatgttgaggagacgccagcagatgttctgctcccaggcggacccttctgtgcc

SEQ ID NO: 83398 - DNA, 80 bp, synthetic construct
  source 1..80: mol_type = other DNA
tcaggtccctagagttgtctttggctctttgcttccaggctgtgaaactttagataaagtcttaagcagagaaagtgaca

SEQ ID NO: 83399 - DNA, 80 bp, synthetic construct
  source 1..80: mol_type = other DNA
gcttctaattctaactgtcttactaccaacttggtgagacagactaaagaattaggctttgttgaacagggcgcggtggc

SEQ ID NO: 83400 - DNA, 80 bp, synthetic construct; identical to SEQ ID NO: 14834
  source 1..80: mol_type = other DNA

SEQ ID NO: 83401 - DNA, 80 bp, synthetic construct
  source 1..80: mol_type = other DNA
tccagtctgggcaataagagtgaatcttcgtctcaaaaacaaaaacaaaaattagctgggcgtggtggcaggtgcctgta

SEQ ID NO: 83402 - DNA, 80 bp, synthetic construct
  source 1..80: mol_type = other DNA
ttagggcacagagcagctcagagtttacaaagacttgtaccttatttcgtaccttatttcacttaactcttgcaaaaacc

SEQ ID NO: 83403 - DNA, 80 bp, synthetic construct
  source 1..80: mol_type = other DNA
ggctcatgctggttcattcctgtttatttggacacagctgcaaagagaagcaatgttggtttcatcttctaaaaaaattt

SEQ ID NO: 83404 - DNA, 80 bp, synthetic construct; identical to SEQ ID NO: 14835
  source 1..80: mol_type = other DNA

SEQ ID NO: 83405 - DNA, 80 bp, synthetic construct
  source 1..80: mol_type = other DNA
accccatcatagcaagcagagagcttcggtagggtgctgaagctcgactccagttgcactttgttttttgttttggttgt

SEQ ID NO: 83406 - DNA, 80 bp, synthetic construct
  source 1..80: mol_type = other DNA
ttttttgttttttttttttttgtatttttagtagagacagggtttcaccatgttggccaagctggtcttgaactcctgac

SEQ ID NO: 83407 - DNA, 80 bp, synthetic construct; identical to SEQ ID NO: 14836
  source 1..80: mol_type = other DNA

SEQ ID NO: 83408 - DNA, 80 bp, synthetic construct
  source 1..80: mol_type = other DNA
cgagatgggcagatcacgaggtcaggagatcgagaccatcctggccaatatagtgaaaccccgtctctactaaaaacaca

SEQ ID NO: 83409 - DNA, 80 bp, synthetic construct
  source 1..80: mol_type = other DNA
taaaaataaaataaagagcactgtaccatggagccaagattggggctcacagaaggtgcccattttcgggtttcagtgac

SEQ ID NO: 83410 - DNA, 80 bp, synthetic construct
  source 1..80: mol_type = other DNA
ttgtggttcccaccctgcttttagggcacagggttgggggttagaggcttccttctcttcatttgtttttggttttgttt

SEQ ID NO: 83411 - DNA, 80 bp, synthetic construct; identical to SEQ ID NO: 14837
  source 1..80: mol_type = other DNA

SEQ ID NO: 83412 - DNA, 80 bp, synthetic construct
  source 1..80: mol_type = other DNA
tttttagatttctgtgacattaacttttccttgtttgggggcttgtatagctgttgagagcttgaagggactttggaaat

SEQ ID NO: 83413 - DNA, 80 bp, synthetic construct
  source 1..80: mol_type = other DNA
gctggagaaccactgctttctagaacatttttgggcctccccttcattttgcagctgagaaaacgaaagttcacagaggg

SEQ ID NO: 83414 - DNA, 80 bp, synthetic construct
  source 1..80: mol_type = other DNA
gctcaccaaagctcagaacctgacctcaggctttctctaatcataatatcttgtacataatagggcaaattttgactcat

SEQ ID NO: 83415 - DNA, 80 bp, synthetic construct
  source 1..80: mol_type = other DNA
gagagtcaggactgagcccctgggctcttctttcctaattggattttgtataatatgtgttcctgatgtctttagccgag

SEQ ID NO: 83416 - DNA, 80 bp, synthetic construct; identical to SEQ ID NO: 14838
  source 1..80: mol_type = other DNA

SEQ ID NO: 83417 - DNA, 80 bp, synthetic construct
  source 1..80: mol_type = other DNA
tgaaaacaccatagaagagagaaagggcaatttaactcttccaggtggtgttttttgtgtgtgtgtgagagtttttttgg

SEQ ID NO: 83418 - DNA, 80 bp, synthetic construct
  source 1..80: mol_type = other DNA
gtgtgtgtgtgtgtgtgtgtgtgtgtgtatatatatatatatatatttttttttttagttggagtcttgctctgtcgccc

SEQ ID NO: 83419 - DNA, 80 bp, synthetic construct
  source 1..80: mol_type = other DNA
ccgtgttagccaggatggtctccatctcctgacctcgtgatccacccacctcagcctgccaaagtgctgggattacaggc

SEQ ID NO: 83420 - DNA, 80 bp, synthetic construct
  source 1..80: mol_type = other DNA
aggtggtgttttttacttagtaaaagcggaagcatttgctgttgtgaccctaatgatagtggatgggaacattagaatgt

SEQ ID NO: 83421 - DNA, 80 bp, synthetic construct; identical to SEQ ID NO: 14839
  source 1..80: mol_type = other DNA

SEQ ID NO: 83422 - DNA, 80 bp, synthetic construct
  source 1..80: mol_type = other DNA
cttctcctttccagtccctctgtcttgctgaggcatctcctgtgatggttggaacactcagaagggtggacctcagcccc

SEQ ID NO: 83423 - DNA, 80 bp, synthetic construct; identical to SEQ ID NO: 14840
  source 1..80: mol_type = other DNA

SEQ ID NO: 83424 - DNA, 80 bp, synthetic construct
  source 1..80: mol_type = other DNA
cccaggaggagctgcatctcctcaaggcctgtctgaggactccaagccctggaagggtctggctataaggggttgggatc

SEQ ID NO: 83425 - DNA, 80 bp, synthetic construct
  source 1..80: mol_type = other DNA
agccactaccatctcctccagaagtgaccaccattctggtttctagcaccatcgattcactttgtacttcactttttctt

SEQ ID NO: 83426 - DNA, 80 bp, synthetic construct
  source 1..80: mol_type = other DNA
ctaatctttgtatttttagtagagatggggtttcaccatgttggttaggctggtcttgaactcctgacctcaggtgatct

SEQ ID NO: 83427 - DNA, 80 bp, synthetic construct; identical to SEQ ID NO: 14841
  source 1..80: mol_type = other DNA

SEQ ID NO: 83428 - DNA, 80 bp, synthetic construct
  source 1..80: mol_type = other DNA
tcttgtttgtttcctgcccccttagcccatcttctaagcccctgttggcagggagtgccccttgctggtttggtaacccc

SEQ ID NO: 83429 - DNA, 80 bp, synthetic construct
  source 1..80: mol_type = other DNA
aggactaatgcaggctccgatttcggctggaaggaggaggacctcagtgagtggacagaatgcccacaggcacgttatga

SEQ ID NO: 83430 - DNA, 80 bp, synthetic construct
  source 1..80: mol_type = other DNA
gcacgtggctgttctaatctgagaatgcctgtctgcccatgtccccaaggacacagtgacacccatgcctttcctgtgtg

SEQ ID NO: 83431 - DNA, 80 bp, synthetic construct; identical to SEQ ID NO: 14842
  source 1..80: mol_type = other DNA

SEQ ID NO: 83432 - DNA, 80 bp, synthetic construct
  source 1..80: mol_type = other DNA
cttgttgtctgaaataagatctttcctgtggtacatctggaacttggccttctcaagggtcccaaaatagccaggccact

SEQ ID NO: 83433 - DNA, 80 bp, synthetic construct
  source 1..80: mol_type = other DNA
agtggggtcgtgcagtcatgggtagagactgggcacaacttcaaatacaacacgggcgattgggaatttatagtcaagga

SEQ ID NO: 83434 - DNA, 80 bp, synthetic construct
  source 1..80: mol_type = other DNA
ggctaaactgacttagcagtgtcttttgctaaaacttgactttacaaggaagtgcacagatgggcctaggagatgcttcg

SEQ ID NO: 83435 - DNA, 80 bp, synthetic construct; identical to SEQ ID NO: 14843
  source 1..80: mol_type = other DNA

SEQ ID NO: 83436 - DNA, 80 bp, synthetic construct
  source 1..80: mol_type = other DNA
tgtcttaccagtttggagaattgggacctttcctttgcttaacagatacttttggctttctcctgatgcccctaattcct

SEQ ID NO: 83437 - DNA, 80 bp, synthetic construct
  source 1..80: mol_type = other DNA
ccagcctgtgtttctccactttttatttcaggagactccatcctctgccaatggcccttcccgggagggctctaggctgc

SEQ ID NO: 83438 - DNA, 80 bp, synthetic construct
  source 1..80: mol_type = other DNA
tcctcagaggtcccagtcacctctgcggggcatgccagaaaccactcagccagataaacagtgtggacaggtggcagcgg

SEQ ID NO: 83439 - DNA, 80 bp, synthetic construct
  source 1..80: mol_type = other DNA
ctagcctgcagcatcagaggtcacccagcaaagacagggtgatggccccacatcatcccccagcatctcatagggctgtt

SEQ ID NO: 83440 - DNA, 80 bp, synthetic construct; identical to SEQ ID NO: 14844
  source 1..80: mol_type = other DNA

SEQ ID NO: 83441 - DNA, 80 bp, synthetic construct
  source 1..80: mol_type = other DNA
ttaatcctgaagccaaacatctcagggatatgtcaatggattctgtgcattaatagctaaaaaatagttcttaatctggt

SEQ ID NO: 83442 - DNA, 80 bp, synthetic construct
  source 1..80: mol_type = other DNA
tctgaatctgttcagcttcacacctgcttgagagtgaaagttacagttaatgtgggataccttttttcttttcttagaga

SEQ ID NO: 83443 - DNA, 80 bp, synthetic construct
  source 1..80: mol_type = other DNA
ttcctgtaatcccagctactcaggaggctgaggcaggagaattgcttaaacccaggaggcagaggttgcagtgagccgag

SEQ ID NO: 83444 - DNA, 80 bp, synthetic construct; identical to SEQ ID NO: 14845
  source 1..80: mol_type = other DNA

SEQ ID NO: 83445 - DNA, 80 bp, synthetic construct
  source 1..80: mol_type = other DNA
cccaggtgactgacctcatcttcagagcagcccagtgagggaggggcactcttcctatatttcaaatgaagcttagaaaa

SEQ ID NO: 83446 - DNA, 80 bp, synthetic construct
  source 1..80: mol_type = other DNA
atcactgcaacctctgcctcctaggttcaagcaattcccctgcctcagcctcctgagtagctggcactacaggcatgcgc

SEQ ID NO: 83447 - DNA, 80 bp, synthetic construct; identical to SEQ ID NO: 14846
  source 1..80: mol_type = other DNA

SEQ ID NO: 83448 - DNA, 80 bp, synthetic construct
  source 1..80: mol_type = other DNA
gtcaccagctcccgcgggggtacatctccattccggtgatacacgagcagaacgttacccggccagcagcccagccctcc

SEQ ID NO: 83449 - DNA, 80 bp, synthetic construct
  source 1..80: mol_type = other DNA
ccgttcaggtcatctgtccagggtgcatcgagccgggagggctcaccagccaggagcagcacgccactccactccccctc

SEQ ID NO: 83450 - DNA, 80 bp, synthetic construct
  source 1..80: mol_type = other DNA
ccttcatccctgcctatttaacatgcgtgtacctacaggcaagtgagattcgagaaattgctaggtattaacagaaatgc

SEQ ID NO: 83451 - DNA, 80 bp, synthetic construct
  source 1..80: mol_type = other DNA
acacccccatccacaccgcagccacagcctcaccttgggtgtaggcagtgtgtcaccttccactcagttacccactccac

SEQ ID NO: 83452 - DNA, 80 bp, synthetic construct; identical to SEQ ID NO: 14847
  source 1..80: mol_type = other DNA

SEQ ID NO: 83453 - DNA, 80 bp, synthetic construct
  source 1..80: mol_type = other DNA
gttatcttccagtggagacacaaggtgcaggttcctggaagaggatgtcatttagtttaagcagctcacagcttagcagc

SEQ ID NO: 83454 - DNA, 80 bp, synthetic construct
  source 1..80: mol_type = other DNA
cactggccagggccctggaatagagcaccctcatcttaaaatgttgttttatttggaaataatttcaatctcatagaaga

SEQ ID NO: 83455 - DNA, 80 bp, synthetic construct
  source 1..80: mol_type = other DNA
aaatattttcctaagaggaagacattctcgttcataaccatggtagacttaccagattcaggaaatttcacattcttaca

SEQ ID NO: 83456 - DNA, 80 bp, synthetic construct; identical to SEQ ID NO: 14848
  source 1..80: mol_type = other DNA

SEQ ID NO: 83457 - DNA, 80 bp, synthetic construct
  source 1..80: mol_type = other DNA
aagttgcgaatgtctgcattggcgaaagagatttgatggaaaaggaggttgctggagtgtagacagctacatcgatccat

SEQ ID NO: 83458 - DNA, 80 bp, synthetic construct
  source 1..80: mol_type = other DNA
ttcccttttgggaggctttccaggatttcaccaaactgaacgttatagtggaattgagtgttttaagctgggaatagttt

SEQ ID NO: 83459 - DNA, 80 bp, synthetic construct
  source 1..80: mol_type = other DNA
gggggtatcacttaaggtcaggagttcaagactagcctggccaacatggtgaaaccccatctctactaaaaatacaaaaa

SEQ ID NO: 83460 - DNA, 80 bp, synthetic construct; identical to SEQ ID NO: 14849
  source 1..80: mol_type = other DNA

SEQ ID NO: 83461 - DNA, 80 bp, synthetic construct
  source 1..80: mol_type = other DNA
ctaatcatgaagctaaggtgagaggatcacttgaggccagaaggttgaggctgcattgagctgtgatagccccgctgcac

SEQ ID NO: 83462 - DNA, 80 bp, synthetic construct
  source 1..80: mol_type = other DNA
aaattgttctggagttaaccatttagagcatcttggctaatcctaaaaaaatacattggtctgggcagaaactactaggc

SEQ ID NO: 83463 - DNA, 80 bp, synthetic construct; identical to SEQ ID NO: 14850
  source 1..80: mol_type = other DNA

SEQ ID NO: 83464 - DNA, 80 bp, synthetic construct
  source 1..80: mol_type = other DNA
ctttgagacaggatctcgctctgtcactcaggctggagtgcaatgacataatcgtggctcactacagccttgaattcctg

SEQ ID NO: 83465 - DNA, 80 bp, synthetic construct
  source 1..80: mol_type = other DNA
tcattgccattaagaataccatctacagagaaattcagtgagaggtaatagacaaatagcctggggtgatcaatggaagc

SEQ ID NO: 83466 - DNA, 80 bp, synthetic construct
  source 1..80: mol_type = other DNA
tttcagtcagttattaaaaatatatttttgtgtccttttttcagcagcccatgacccatcgagaaactgcacctgtttcc

SEQ ID NO: 83467 - DNA, 80 bp, synthetic construct
  source 1..80: mol_type = other DNA
ccacctccctctgagaaggtagaggtgaaagttccccctgctccagttccttgtcctcctcccagccctggcccttctgc

SEQ ID NO: 83468 - DNA, 80 bp, synthetic construct; identical to SEQ ID NO: 14851
  source 1..80: mol_type = other DNA

SEQ ID NO: 83469 - DNA, 80 bp, synthetic construct
  source 1..80: mol_type = other DNA
gaagcagatcagccactgcaggcaatcatggagatgggtgccgtggcagcagacaagggcaagaaaaatgctggaaatgc

SEQ ID NO: 83470 - DNA, 80 bp, synthetic construct
  source 1..80: mol_type = other DNA
tgcatgcatttcagagactttaagtcagttggtttttattagctgcttggtatgcagtaacttgggtggaggcaaaacac

SEQ ID NO: 83471 - DNA, 80 bp, synthetic construct; identical to SEQ ID NO: 14852
  source 1..80: mol_type = other DNA

SEQ ID NO: 83472 - DNA, 80 bp, synthetic construct
  source 1..80: mol_type = other DNA
ttaaaatacctgactttagagagagtaaaatgtgccaggagccataggaatatctgtatgttggatgactttaatgctac

SEQ ID NO: 83473 - DNA, 80 bp, synthetic construct; identical to SEQ ID NO: 14853
  source 1..80: mol_type = other DNA

SEQ ID NO: 83474 - DNA, 80 bp, synthetic construct
  source 1..80: mol_type = other DNA
gggtcggggccgctgcacgccaagggcgaaggccgattcgggccccacttcgccccggcggctcgccgcgcccacccgct

SEQ ID NO: 83475 - DNA, 80 bp, synthetic construct
  source 1..80: mol_type = other DNA
cggccccggcagctccgcaggcctcggcgcgcgctgggccgggaccgcccagccagagacccacggcaccccgcgccgcg

SEQ ID NO: 83476 - DNA, 80 bp, synthetic construct
  source 1..80: mol_type = other DNA
cctccccgccccggagcggcgaggctgatatttgtgatttggctccggacgctgtggggaggaacaggggagaacaaaat

SEQ ID NO: 83477 - DNA, 80 bp, synthetic construct; identical to SEQ ID NO: 14854
  source 1..80: mol_type = other DNA

SEQ ID NO: 83478 - DNA, 80 bp, synthetic construct
  source 1..80: mol_type = other DNA
tgtgttacgtcatttaatccttacaacgattctggtttattgtattcctcattgttttaggggaagaaaccgagtcgcaa

SEQ ID NO: 83479 - DNA, 80 bp, synthetic construct
  source 1..80: mol_type = other DNA
tgctggagttgaaaacaactactttattgtatttacttgtgagaggagttaaactttgaattagagtgtaacttaatgcg

SEQ ID NO: 83480 - DNA, 80 bp, synthetic construct
  source 1..80: mol_type = other DNA
gattgaaatgtagaatgcgtttttagtagaaccagactcagttcttgtttaatttttcctccattttccgtggagcccac

SEQ ID NO: 83481 - DNA, 80 bp, synthetic construct; identical to SEQ ID NO: 14855
  source 1..80: mol_type = other DNA

SEQ ID NO: 83482 - DNA, 80 bp, synthetic construct
  source 1..80: mol_type = other DNA
gcgaactagcgcaacattgaaattaaaatttagtcattcacaatccatctctagagattgccaagtgtagtctgcttttc

SEQ ID NO: 83483 - DNA, 80 bp, synthetic construct
  source 1..80: mol_type = other DNA
cttgagttttctgtaagatttaacatcgacttcacattttcagatgcctctccttgggtttcattcatctatactcgctg

SEQ ID NO: 83484 - DNA, 80 bp, synthetic construct; identical to SEQ ID NO: 14856
  source 1..80: mol_type = other DNA

SEQ ID NO: 83485 - DNA, 80 bp, synthetic construct
  source 1..80: mol_type = other DNA
ttctccaagtttcacttttcagatcacttttctctatgtctctagtcccttagaatgattgttcagacctttctgttgga

SEQ ID NO: 83486 - DNA, 80 bp, synthetic construct
  source 1..80: mol_type = other DNA
gttgatgtcataccaaacccaaaccttttcccatttcatcatatcttgtctgtagccaacatctgttgattctgctttat

SEQ ID NO: 83487 - DNA, 80 bp, synthetic construct
  source 1..80: mol_type = other DNA
aagtttggaagacctcccctatgtgaccatttaggcctagatcttttttctggagaggactttgagtaacacttcaattt

SEQ ID NO: 83488 - DNA, 80 bp, synthetic construct; identical to SEQ ID NO: 14857
  source 1..80: mol_type = other DNA

SEQ ID NO: 83489 - DNA, 80 bp, synthetic construct
  source 1..80: mol_type = other DNA
tctcgcactgtcgcctgggctggagtgcaatggcgtgagctcagctcattgcaacctctgcctcctgggttcaagggatt

SEQ ID NO: 83490 - DNA, 80 bp, synthetic construct
  source 1..80: mol_type = other DNA
gcactgtggctggcctttatagcagtttttatacaaatattagtttcactactagtttgcagggtgggtctgtaacggac

SEQ ID NO: 83491 - DNA, 80 bp, synthetic construct
  source 1..80: mol_type = other DNA
ctattggatcttaggagcagcgaaccatggagagaaaggaaaatgggtttcctatcacactaaattttgaagtaggaacc

SEQ ID NO: 83492 - DNA, 80 bp, synthetic construct; identical to SEQ ID NO: 14858
  source 1..80: mol_type = other DNA

SEQ ID NO: 83493 - DNA, 80 bp, synthetic construct
  source 1..80: mol_type = other DNA
ggcccctgtggtccctaagccagttcgtatgggcagtttaatatataactaatgagtagacattgaatagatgagtaaat

SEQ ID NO: 83494 - DNA, 80 bp, synthetic construct
  source 1..80: mol_type = other DNA
gctgttgacttatgaaggaggacaggagtatgctagagatagggataaaatattataatcacatttgcagttagggagat

SEQ ID NO: 83495 - DNA, 80 bp, synthetic construct
  source 1..80: mol_type = other DNA
tagttacatgttggaaaatcattttgaagaaaggaagactgaagatgttcaaacttgtaggaaggtctttctggcctagc

SEQ ID NO: 83496 - DNA, 80 bp, synthetic construct
  source 1..80: mol_type = other DNA
agaaggaatgggattggcaagaacaactcctggatttctagcttggaaagcagggtagatgtgggtgacagatatgaaaa

SEQ ID NO: 83497 - DNA, 80 bp, synthetic construct; identical to SEQ ID NO: 14859
  source 1..80: mol_type = other DNA

SEQ ID NO: 83498 - DNA, 80 bp, synthetic construct
  source 1..80: mol_type = other DNA
tatatctggcagaggaagacataggttataggttatagaattacaggttataggttatagacctcgtatcgagaactcct

SEQ ID NO: 83499 - DNA, 80 bp, synthetic construct
  source 1..80: mol_type = other DNA
cccgagtagctgggtttaacaggcgcccgccaatacgcctggctcctttttgtatttttagtagagacagggttttgcct

SEQ ID NO: 83500 - DNA, 80 bp, synthetic construct; identical to SEQ ID NO: 14860
  source 1..80: mol_type = other DNA

SEQ ID NO: 83501 - DNA, 80 bp, synthetic construct
  source 1..80: mol_type = other DNA
ttctcatgcctcagcctcccaagtagttggggtcacaagcgtgagccaccacgcctggctaatttttgtatttttagtag

SEQ ID NO: 83502 - DNA, 80 bp, synthetic construct
  source 1..80: mol_type = other DNA
taaaggcaatacatctattgtgggtaatttgggaagtataaaaagccataaagaagcagcggaatgattaagtttcagct

SEQ ID NO: 83503 - DNA, 80 bp, synthetic construct
  source 1..80: mol_type = other DNA
aagaaagaaaatatcttgacttgcagcacagttagctgccgaaattgaaggtcatataatgcttttggtcctaatgacat

SEQ ID NO: 83504 - DNA, 80 bp, synthetic construct; identical to SEQ ID NO: 14861
  source 1..80: mol_type = other DNA

SEQ ID NO: 83505 - DNA, 80 bp, synthetic construct
  source 1..80: mol_type = other DNA
tttctattttttagtagagacagggtttcaccgtgttagccaggatggtctcaatctcctgacctcgtgatcctcccgcc

SEQ ID NO: 83506 - DNA, 80 bp, synthetic construct
  source 1..80: mol_type = other DNA
atgctttgtaatgtatttcaagagtatagggtcttgagtgttttaaatttgtatataagaatgttttagattcctggcta

SEQ ID NO: 83507 - DNA, 80 bp, synthetic construct
  source 1..80: mol_type = other DNA
atataatcgctgggtgacagattattcttccttcattttataatcttttatttaataaaaatgtgggggaaaaattgcat

SEQ ID NO: 83508 - DNA, 80 bp, synthetic construct; identical to SEQ ID NO: 14862
  source 1..80: mol_type = other DNA

SEQ ID NO: 83509 - DNA, 80 bp, synthetic construct
  source 1..80: mol_type = other DNA
tatagtgagatgatactgttagggatacattggattaaagaaatatattaaaactgattttggccgggcatggtggctca

SEQ ID NO: 83510 - DNA, 80 bp, synthetic construct; identical to SEQ ID NO: 14863
  source 1..80: mol_type = other DNA

SEQ ID NO: 83511 - DNA, 80 bp, synthetic construct
  source 1..80: mol_type = other DNA
actaaaaatacaaaaattagccgggtgtggtggcacgcctgtaatcccaggtactcaggaggctaagacaggagaatcac

SEQ ID NO: 83512 - DNA, 80 bp, synthetic construct; identical to SEQ ID NO: 14864
  source 1..80: mol_type = other DNA

SEQ ID NO: 83513 - DNA, 80 bp, synthetic construct
  source 1..80: mol_type = other DNA
gaaatgaagtaatgaaagtcttctgtaatcatgcttcacctgtgccccaagattgccactgttgaaagtatagagctaga

SEQ ID NO: 83514 - DNA, 80 bp, synthetic construct
  source 1..80: mol_type = other DNA
tttgagggaaggtcttgttctgttgcccaggctgcagtggtgctgtggtgcaaacagctcactgcagcatccaactcctg

SEQ ID NO: 83515 - DNA, 80 bp, synthetic construct
  source 1..80: mol_type = other DNA
tgtgcgcagccttaatcatctcattctttatagtagttaagcagttattccattttctgattataccttaattttactta

SEQ ID NO: 83516 - DNA, 80 bp, synthetic construct; identical to SEQ ID NO: 14865
  source 1..80: mol_type = other DNA

SEQ ID NO: 83517 - DNA, 80 bp, synthetic construct
  source 1..80: mol_type = other DNA
acacctggctaatttttttttgtatttttagtggagacggggtttcaccgtgttagccaggatggttttttttttttttt

SEQ ID NO: 83518 - DNA, 80 bp, synthetic construct
  source 1..80: mol_type = other DNA
tttagtagagacagggtttcaccatgttggtcaggatggtcttgatctcgtgacctcgtgatccgcccgccttggcctcc

SEQ ID NO: 83519 - DNA, 80 bp, synthetic construct
  source 1..80: mol_type = other DNA
actctcaacttgttatacgctcctttgatttttgtgctaaaatatttcgtattgctaacagtacacatgcatgctttgta

SEQ ID NO: 83520 - DNA, 80 bp, synthetic construct
  source 1..80: mol_type = other DNA
ccagcctgggcaatatgttgagactctgtctctacaaaaatttaaaaatcaatgagatgtggtggtatgcacttgtagtc

SEQ ID NO: 83521 - DNA, 80 bp, synthetic construct; identical to SEQ ID NO: 14866
  source 1..80: mol_type = other DNA

SEQ ID NO: 83522 - DNA, 80 bp, synthetic construct
  source 1..80: mol_type = other DNA
tcctaagggtccatttgtctttcctacatgttacttgttttcctgcaacagcccattgttcttttctagttccagttccc

SEQ ID NO: 83523 - DNA, 80 bp, synthetic construct
  source 1..80: mol_type = other DNA
gtaggaagtttttcttctctgacaatggccaaattgatatttttctggctgtaagggcaagggataataataaagtaacg

SEQ ID NO: 83524 - DNA, 80 bp, synthetic construct; identical to SEQ ID NO: 14867
  source 1..80: mol_type = other DNA

SEQ ID NO: 83525 - DNA, 80 bp, synthetic construct
  source 1..80: mol_type = other DNA
gagaaaatgatttgtaacaggtttctctggtcacatcactgaggagagtcaacaaaagaagtcattcaattgaggttaaa

SEQ ID NO: 83526 - DNA, 80 bp, synthetic construct
  source 1..80: mol_type = other DNA
tttctaggtttagttatgcatcggtgtgtttattgctttctgtgccttattacactctgcttactaggtttgtgaccttg

SEQ ID NO: 83527 - DNA, 80 bp, synthetic construct
  source 1..80: mol_type = other DNA
aacactgtgcttgccactgtagtagcttaatgaatgttagtgaagatgagtatttctgagagaaataagcaggacagttc

SEQ ID NO: 83528 - DNA, 80 bp, synthetic construct
  source 1..80: mol_type = other DNA
ttgcaaaatgcttctgtgtatcatcagtactggcaaattgatataggaaattttgttgcttttcctgctttgtacatcaa

SEQ ID NO: 83529 - DNA, 80 bp, synthetic construct; identical to SEQ ID NO: 14868
  source 1..80: mol_type = other DNA

SEQ ID NO: 83530 - DNA, 80 bp, synthetic construct
  source 1..80: mol_type = other DNA
tcctttccagggcttattaagatgtggcagaattaggtcacaagttggggggagaaggaattgtgccagaattgtcattg

SEQ ID NO: 83531 - DNA, 80 bp, synthetic construct
  source 1..80: mol_type = other DNA
aggcagtattaattacgcagcaggctggtttatctgtacctatttgagcaaaggataaggaaaattagaaatcccagtgt

SEQ ID NO: 83532 - DNA, 80 bp, synthetic construct
  source 1..80: mol_type = other DNA
cagtactttgggaggccgaggtgggaggatcattgagctcaggagttcgagatcagcctgggcaacatggcgaaaccccg

SEQ ID NO: 83533 - DNA, 80 bp, synthetic construct
  source 1..80: mol_type = other DNA
cctgtgtcatattcccagcttcttgggcaactgaggcaggaggactgcctgagcccagaaggttgaggctgcagtgagct

SEQ ID NO: 83534 - DNA, 80 bp, synthetic construct; identical to SEQ ID NO: 14869
  source 1..80: mol_type = other DNA

SEQ ID NO: 83535 - DNA, 80 bp, synthetic construct
  source 1..80: mol_type = other DNA
ggaacttttcaagatctccataagaagtggaaaagggagatttgaccaaccacaattagggatagggatagagaaacaat

SEQ ID NO: 83536 - DNA, 80 bp, synthetic construct
  source 1..80: mol_type = other DNA
ttggacaccaaatcccattctctttttctccgtatgaggctgtcacagtactatagatgaccatttgatcttctcagtgg

SEQ ID NO: 83537 - DNA, 80 bp, synthetic construct
  source 1..80: mol_type = other DNA
tcaaaccttggaaacgttaaataacataaaaagcactcaaaaagaaacactaattcaatattttatttttacttagtgtt

SEQ ID NO: 83538 - DNA, 80 bp, synthetic construct; identical to SEQ ID NO: 14870
  source 1..80: mol_type = other DNA

SEQ ID NO: 83539 - DNA, 80 bp, synthetic construct
  source 1..80: mol_type = other DNA
attcaaacccaggcagtctggattttagagtccatgctcttaaccacataattatattgtcaaatggaggaggagaattt

SEQ ID NO: 83540 - DNA, 80 bp, synthetic construct
  source 1..80: mol_type = other DNA
ccccaggcaggagtgcagtggtgtgaacatggctcactgtagcctcggctgcctgggctcaagcttagatcctcccgcct

SEQ ID NO: 83541 - DNA, 80 bp, synthetic construct
  source 1..80: mol_type = other DNA
ccacataccttctttaaaaattagtgcttttttttttctcatctctgagatgtatacatgtttaattggcgatggtcaga

SEQ ID NO: 83542 - DNA, 80 bp, synthetic construct
  source 1..80: mol_type = other DNA
ccaccatgcccggctaatgttttgtatttttagtagagacggggtttcaccgtgttagccaggatggtctcgatctcctg

SEQ ID NO: 83543 - DNA, 80 bp, synthetic construct; identical to SEQ ID NO: 14871
  source 1..80: mol_type = other DNA

SEQ ID NO: 83544 - DNA, 80 bp, synthetic construct
  source 1..80: mol_type = other DNA
caagtcttttttccctcctgattgcaaaaataatgcttacagaacaaattgaaacacatagaaaagccctgagaagaaag

SEQ ID NO: 83545 - DNA, 80 bp, synthetic construct
  source 1..80: mol_type = other DNA
gttgagtaaagctaagttcatcctgagcgtctgaacctggaatataaggaacttgaaatttgtaggggtgggggtatctg

SEQ ID NO: 83546 - DNA, 80 bp, synthetic construct; identical to SEQ ID NO: 14872
  source 1..80: mol_type = other DNA

SEQ ID NO: 83547 - DNA, 80 bp, synthetic construct
  source 1..80: mol_type = other DNA
aaattagctgggcatggtggcgggcacctgtaatcccagctacttgggaagctgaggcaagagaatcacttgaacccggg

SEQ ID NO: 83548 - DNA, 80 bp, synthetic construct
  source 1..80: mol_type = other DNA
aatctaaaacctctagcagaatgaagctagaaagaatggaatctaaacactgaaattatacatctgctaggcagctgtgc

SEQ ID NO: 83549 - DNA, 80 bp, synthetic construct
  source 1..80: mol_type = other DNA
ttactctgtcgccaggctggagtgaagtggtgcgatctcggctcactgcaacctgtgcctcctgggttcaagcgattctc

SEQ ID NO: 83550 - DNA, 80 bp, synthetic construct
  source 1..80: mol_type = other DNA
attacaagcgtgagccaccgcgcccagcctttaattcatctttaaatgaattgtccccattttctaggagttattatctt

SEQ ID NO: 83551 - DNA, 80 bp, synthetic construct; identical to SEQ ID NO: 14873
  source 1..80: mol_type = other DNA

SEQ ID NO: 83552 - DNA, 80 bp, synthetic construct
  source 1..80: mol_type = other DNA
accctgctgcaagcaaaatcagacaaggatggaccagaaaaagagaacaatttctattctcacttatcgtgtatttgtaa

SEQ ID NO: 83553 - DNA, 80 bp, synthetic construct
  source 1..80: mol_type = other DNA
gatagactagttttaagaaaagaaagaaccttcctcaacctgataaagggtaattttctacctggggcgtgtagcaaacc

SEQ ID NO: 83554 - DNA, 80 bp, synthetic construct
  source 1..80: mol_type = other DNA
tatttgaagggaaggtcagaatgtgtactgtttgtttatgctctttgctaagcatgtaatctacctagaaaagccaagaa

SEQ ID NO: 83555 - DNA, 80 bp, synthetic construct; identical to SEQ ID NO: 14874
  source 1..80: mol_type = other DNA

SEQ ID NO: 83556 - DNA, 80 bp, synthetic construct
  source 1..80: mol_type = other DNA
aaagtttcattttttggacagcatttcctgagagaatgtatcactgagttttctggagacctgaggtctaatccttagta

SEQ ID NO: 83557 - DNA, 80 bp, synthetic construct
  source 1..80: mol_type = other DNA
tccttttccttggtaaccagtgttgttactgtatgtatcttcctaagattttctttccatttacaaaaatgcatatccat

SEQ ID NO: 83558 - DNA, 80 bp, synthetic construct
  source 1..80: mol_type = other DNA
aactcctgacaccttccattgtctctctttttctatttgccttcttgttcttaaggattcttaaatgttttaagcagcct

SEQ ID NO: 83559 - DNA, 80 bp, synthetic construct; identical to SEQ ID NO: 14875
  source 1..80: mol_type = other DNA

SEQ ID NO: 83560 - DNA, 80 bp, synthetic construct
  source 1..80: mol_type = other DNA
tctgaataagaacttctgcagttgaaacttggttcacactggaggacactgattgttttttgtagtccactcaagcagtg

SEQ ID NO: 83561 - DNA, 80 bp, synthetic construct
  source 1..80: mol_type = other DNA
ggctcattttctctagtacttctttattctagttcttgatctcaacatccaggtgggagactcttccactaccttcctgg

SEQ ID NO: 83562 - DNA, 80 bp, synthetic construct; identical to SEQ ID NO: 14876
  source 1..80: mol_type = other DNA

SEQ ID NO: 83563 - DNA, 80 bp, synthetic construct
  source 1..80: mol_type = other DNA
cccagtttctctattaagaaccgcagttggttaaatccaactgtgcctactctacacttgtactttttaaaaatgtggtt

SEQ ID NO: 83564 - DNA, 80 bp, synthetic construct
  source 1..80: mol_type = other DNA
catggtggcatatgcccgtagttccagctacttgggaggctaaagtgggaggatcacttgagcctgatgaggtttaggtt

SEQ ID NO: 83565 - DNA, 80 bp, synthetic construct
  source 1..80: mol_type = other DNA
aactttttttttgttctctgcagttacaagcttttaaaaattttatttttaggccaggcgcagtggctcatgcctgtaat

SEQ ID NO: 83566 - DNA, 80 bp, synthetic construct
  source 1..80: mol_type = other DNA
gagaattgcttgaacccaggaggcagaggttgcagtgagtcaagatggtgccattgcactccagcctgggtaacaagagc

SEQ ID NO: 83567 - DNA, 80 bp, synthetic construct; identical to SEQ ID NO: 14877
  source 1..80: mol_type = other DNA

SEQ ID NO: 83568 - DNA, 80 bp, synthetic construct
  source 1..80: mol_type = other DNA
cccaaagtgctggattacagatgtgagccaccgtgcctgccctgccgctagtgtattttatgtgtggtccaagacaattt

SEQ ID NO: 83569 - DNA, 80 bp, synthetic construct
  source 1..80: mol_type = other DNA
tattgttcactatagccttcctaccgtaggataaaggataaagtactagaatttattcctcctgtcttgctgtaattttg

SEQ ID NO: 83570 - DNA, 80 bp, synthetic construct
  source 1..80: mol_type = other DNA
ttccatccatattgctgtgaatgagtggattttatttatgtattttctttttttttttttttttttaagtagagatgggg

SEQ ID NO: 83571 - DNA, 80 bp, synthetic construct; identical to SEQ ID NO: 14878
  source 1..80: mol_type = other DNA

SEQ ID NO: 83572 - DNA, 80 bp, synthetic construct
  source 1..80: mol_type = other DNA
gtaagtgttcccttttctcctgtccttgtcagcacttgttactttttaaattgaattgtttatctttttccccgtttgcc

SEQ ID NO: 83573 - DNA, 80 bp, synthetic construct
  source 1..80: mol_type = other DNA
agctttatttatttatttagacagaatcttgctctgttgcccaggctggaatgctgtggcctgatcactgtccactctaa

SEQ ID NO: 83574 - DNA, 80 bp, synthetic construct
  source 1..80: mol_type = other DNA
atctttcagcatcagcctcccaaagtgctgggactacaggtgtgagccaccatgctctgcccttctttgtttttgttttg

SEQ ID NO: 83575 - DNA, 80 bp, synthetic construct; identical to SEQ ID NO: 14879
  source 1..80: mol_type = other DNA

SEQ ID NO: 83576 - DNA, 80 bp, synthetic construct
  source 1..80: mol_type = other DNA
ttttgctgtgcagtagctttttagtttaatataatcccatttgtttatttttgcttttgatgcctgtgtttttgaggttt

SEQ ID NO: 83577 - DNA, 80 bp, synthetic construct
  source 1..80: mol_type = other DNA
gcctcccaggttcaagcaattctcctgcctcagcctcccgagtagctgggattacaggcgtgcaccaccacgcccggcta

SEQ ID NO: 83578 - DNA, 80 bp, synthetic construct
  source 1..80: mol_type = other DNA
gcattctgatgggcaaagaaccagggaaaggaaagtcaaaggcagtactgtccaatatgacatgtaattttaaactttct

SEQ ID NO: 83579 - DNA, 80 bp, synthetic construct; identical to SEQ ID NO: 14880
  source 1..80: mol_type = other DNA

SEQ ID NO: 83580 - DNA, 80 bp, synthetic construct
  source 1..80: mol_type = other DNA
ttttgtatagggtgagtgttgggcgtctgcttttattcttctgcatatggatatccatttttcccagcaccatttattga

SEQ ID NO: 83581 - DNA, 80 bp, synthetic construct
  source 1..80: mol_type = other DNA
taatgctgcaccatgctgttttggttactacagccttgtagtatattttcaggtgttgtattgtgatacctccaactttt

SEQ ID NO: 83582 - DNA, 80 bp, synthetic construct
  source 1..80: mol_type = other DNA
ctttgtgtagtatttctggcactttctcatcttgcctgactgaaactctgtactttagagcaactccctatttccctctc

SEQ ID NO: 83583 - DNA, 80 bp, synthetic construct; identical to SEQ ID NO: 14881
  source 1..80: mol_type = other DNA

SEQ ID NO: 83584 - DNA, 80 bp, synthetic construct
  source 1..80: mol_type = other DNA
ttgaactcctgacctcaggtgatcctcccgcctcggcctcccaaagtgctgggattacaggtgtgagccatcatgccagg

SEQ ID NO: 83585 - DNA, 80 bp, synthetic construct
  source 1..80: mol_type = other DNA
tgttttcaatttttttagatatatactgagaagtgggatttctggatcatctggtattccattttaaattttttgaggaa

SEQ ID NO: 83586 - DNA, 80 bp, synthetic construct
  source 1..80: mol_type = other DNA
ctcagtgtgatttgatgtgagttttgccgatgattagtgatgttgagtagcttttcatattttttttggccatttatgta

SEQ ID NO: 83587 - DNA, 80 bp, synthetic construct; identical to SEQ ID NO: 14882
  source 1..80: mol_type = other DNA

SEQ ID NO: 83588 - DNA, 80 bp, synthetic construct
  source 1..80: mol_type = other DNA
agattattctttccccattgcgtagtcttggctcatcatttgaccacatacacaggggtttatatctgggctgtctgttc

SEQ ID NO: 83589 - DNA, 80 bp, synthetic construct
  source 1..80: mol_type = other DNA
ctatttggggtcctttgagattacttactgatttcaggatggctttttctcattttgcaaaaaatgacactgaaatttga

SEQ ID NO: 83590 - DNA, 80 bp, synthetic construct
  source 1..80: mol_type = other DNA
acgtttatttttaagtattttattttagttttactttatttttttagaaacgggatctcgttctgtcacccaggttggag

SEQ ID NO: 83591 - DNA, 80 bp, synthetic construct; identical to SEQ ID NO: 14883
  source 1..80: mol_type = other DNA

SEQ ID NO: 83592 - DNA, 80 bp, synthetic construct
  source 1..80: mol_type = other DNA
gactttgtatcctcctgctttgcttagtttattataatagttctaacagtttttttgtgaaacccttagggtttttcatg

SEQ ID NO: 83593 - DNA, 80 bp, synthetic construct
  source 1..80: mol_type = other DNA
agtttttcaccattgtaatgtttgctgtggactttttatgtatggtctttattatgttcaggtaatttccttctattcct

SEQ ID NO: 83594 - DNA, 80 bp, synthetic construct
  source 1..80: mol_type = other DNA
gaataaggctccctcagtcatcgtgtatgattttaatatgcctttgaatttggtttggtaacattttttgagaatatgtg

SEQ ID NO: 83595 - DNA, 80 bp, synthetic construct; identical to SEQ ID NO: 14884
  source 1..80: mol_type = other DNA

SEQ ID NO: 83596 - DNA, 80 bp, synthetic construct
  source 1..80: mol_type = other DNA
caattttattgatcttatttaagatctttttaaatgtaggcatttactgctataaacttccctcttagcacggcttttct

SEQ ID NO: 83597 - DNA, 80 bp, synthetic construct
  source 1..80: mol_type = other DNA
ggtcagaaaagatacttgctatgatttcagtcttcttaaatttgctaagacttgttctgtggcctaacatgtgatctgtc

SEQ ID NO: 83598 - DNA, 80 bp, synthetic construct
  source 1..80: mol_type = other DNA
gttcaagtgattctcctgcctcaccttcccgagtagctgggattataggcatgtgccaccacatctagctaattttgtat

SEQ ID NO: 83599 - DNA, 80 bp, synthetic construct; identical to SEQ ID NO: 14885
  source 1..80: mol_type = other DNA

SEQ ID NO: 83600 - DNA, 80 bp, synthetic construct
  source 1..80: mol_type = other DNA
aattaacttggctgattggccttaccactaattaccactaagttcaggagagtccttaaaactgcacagcagtagttcct

SEQ ID NO: 83601 - DNA, 80 bp, synthetic construct
  source 1..80: mol_type = other DNA
agataccacaagaaaaatatctgcaaagctcctgccactactgcctgtgtctgtgcttcatgtattctcacatccctcaa

SEQ ID NO: 83602 - DNA, 80 bp, synthetic construct; identical to SEQ ID NO: 14886
  source 1..80: mol_type = other DNA

SEQ ID NO: 83603 - DNA, 80 bp, synthetic construct
  source 1..80: mol_type = other DNA
ttgacactggtgattacttatttcctgctcgttgaaacactttgttcacttggcttccaggatagcatacaaagaaattc

SEQ ID NO: 83604 - DNA, 80 bp, synthetic construct
  source 1..80: mol_type = other DNA
agccgcttctttgaaatgcagacttatgttccacctggatgtctaataggcaaatgaaatgcagctttctctaaagggaa

SEQ ID NO: 83605 - DNA, 80 bp, synthetic construct
  source 1..80: mol_type = other DNA
atcaggcggctagctagtttcttaacagtattgaataatatatttttaattgtttgaattgtcatctttattgttctgag

SEQ ID NO: 83606 - DNA, 80 bp, synthetic construct
  source 1..80: mol_type = other DNA
agagcacagaaacaaactttaaatttagcatttaatagaccaggaacaacacaccagtaaagaaaggggtcactaattac

SEQ ID NO: 83607 - DNA, 80 bp, synthetic construct; identical to SEQ ID NO: 14887
  source 1..80: mol_type = other DNA

SEQ ID NO: 83608 - DNA, 80 bp, synthetic construct
  source 1..80: mol_type = other DNA
aggggaagaggaagcaggcctatcttcacatgacagcaggagagacagcaaagaggggaatgccacatgcttccagatct

SEQ ID NO: 83609 - DNA, 80 bp, synthetic construct; identical to SEQ ID NO: 14888
  source 1..80: mol_type = other DNA

SEQ ID NO: 83610 - DNA, 80 bp, synthetic construct
  source 1..80: mol_type = other DNA
cattgaatcaaatgtttcatgtaaaacaggatggaaatgaacttttctatttggctaagtggtgtaggcagaaaaaccta

SEQ ID NO: 83611 - DNA, 80 bp, synthetic construct
  source 1..80: mol_type = other DNA
tggaaacagactcctagaggtgcacaagcacatggataattttacctgaatcaatttccaaatcctaaactttaaatgtc

SEQ ID NO: 83612 - DNA, 80 bp, synthetic construct
  source 1..80: mol_type = other DNA
cttcagcctcctgagtagctgggattacaggtgcctgcaccatgcccggcttatttttgtatttttagtagagatagggt

SEQ ID NO: 83613 - DNA, 80 bp, synthetic construct; identical to SEQ ID NO: 14889
  source 1..80: mol_type = other DNA

SEQ ID NO: 83614 - DNA, 80 bp, synthetic construct
  source 1..80: mol_type = other DNA
ctaaatgtaagagctaaaaccataaaaatcttagaagaaaacataggtataaatcttggtgaccttggattaggcagtga

SEQ ID NO: 83615 - DNA, 80 bp, synthetic construct
  source 1..80: mol_type = other DNA
atgggagaaaatactgtaaaatatatttgataagcagcttgtgtctagaatacataaagaacacataactggctgggcgc

SEQ ID NO: 83616 - DNA, 80 bp, synthetic construct
  source 1..80: mol_type = other DNA
tgcttgggaggctgaggtaggagaattgcttgaacctggaaggcagaggttgcagtgagccaaaatcatgccactgcact

SEQ ID NO: 83617 - DNA, 80 bp, synthetic construct; identical to SEQ ID NO: 14890
  source 1..80: mol_type = other DNA

SEQ ID NO: 83618 - DNA, 80 bp, synthetic construct
  source 1..80: mol_type = other DNA
aggaggcagagcttgcagtgagccgagatcttgccactgccactgcactccagcctggacgacagagcgagactctgtct

SEQ ID NO: 83619 - DNA, 80 bp, synthetic construct
  source 1..80: mol_type = other DNA
tggagaaatgggaacctccagacactatttgtgggaatataaaatcgtgcagctggtctggaaacagattagcagttcct

SEQ ID NO: 83620 - DNA, 80 bp, synthetic construct
  source 1..80: mol_type = other DNA
tcataataggaggaaacaacccaaatgtccaaccgataaatagataaacaaaatgtggtctgtctaggcaatggaatatt

SEQ ID NO: 83621 - DNA, 80 bp, synthetic construct
  source 1..80: mol_type = other DNA
tttatgaaaggtccggaaaaggtaagtccacagagaaagtagattagtgataaaaatgtactggaattagtgttgatggt

SEQ ID NO: 83622 - DNA, 80 bp, synthetic construct; identical to SEQ ID NO: 14891
  source 1..80: mol_type = other DNA

SEQ ID NO: 83623 - DNA, 80 bp, synthetic construct
  source 1..80: mol_type = other DNA
actcagaagaaattttaaaagtcatgtgacccaactgacagaattccttttatttccatcacctgtttatatgagcaagc

SEQ ID NO: 83624 - DNA, 80 bp, synthetic construct
  source 1..80: mol_type = other DNA
tgccaccatgcctggctaattttttgtatttttagtagagacggggtttcaccatgttggccaggctggtctcaatctcc

SEQ ID NO: 83625 - DNA, 80 bp, synthetic construct; identical to SEQ ID NO: 14892
  source 1..80: mol_type = other DNA

SEQ ID NO: 83626 - DNA, 80 bp, synthetic construct
  source 1..80: mol_type = other DNA
cttcccgagtagctgggactacagatgtgtgccaccatgcctggcttttttttttttgctagagatgggggtttcaccac

SEQ ID NO: 83627 - DNA, 80 bp, synthetic construct
  source 1..80: mol_type = other DNA
tttttttagatggactcttactctgttgctaggctggagtgctgtggcatgatctctgctcactgcaacctccaactccc

SEQ ID NO: 83628 - DNA, 80 bp, synthetic construct
  source 1..80: mol_type = other DNA
ggcctactgtcagatctttaatgtttgccatttaaatgaattgcatactgctaaaaattataatggtaattgaattcaaa

SEQ ID NO: 83629 - DNA, 80 bp, synthetic construct; identical to SEQ ID NO: 14893
  source 1..80: mol_type = other DNA

SEQ ID NO: 83630 - DNA, 80 bp, synthetic construct
  source 1..80: mol_type = other DNA
gctctgtttccctatatataaatgggataataatagcacctatatcaaggagtaatttattattatgtctagtgcagctt

SEQ ID NO: 83631 - DNA, 80 bp, synthetic construct
  source 1..80: mol_type = other DNA
acacacatggtggtgtggacaaggcaaaaaagaaagttagctggatttatgtttcggaatttcagggctttgtatttaca

SEQ ID NO: 83632 - DNA, 80 bp, synthetic construct
  source 1..80: mol_type = other DNA
tgagttgtatagggaagggtacctgtatttttatttcatctgtactggagacaggatttctgatgacacgcttgctcact

SEQ ID NO: 83633 - DNA, 80 bp, synthetic construct
  source 1..80: mol_type = other DNA
gcctagctaatttttgtatttttagtagagacagggtttcatcatattgatcaggctggtctcaggtgatctgcctgcct

SEQ ID NO: 83634 - DNA, 80 bp, synthetic construct; identical to SEQ ID NO: 14894
  source 1..80: mol_type = other DNA

SEQ ID NO: 83635 - DNA, 80 bp, synthetic construct
  source 1..80: mol_type = other DNA
gggagaagttctctgcttttaaggaccatgtgagtagattggtcccaacaagctcatccaggataatcgccccatctcag

SEQ ID NO: 83636 - DNA, 80 bp, synthetic construct
  source 1..80: mol_type = other DNA
ctattttttttttatgacagttgtggttagaggtgaggcttggattggtcctggcctgaatcttgttctgctgtgtagca

SEQ ID NO: 83637 - DNA, 80 bp, synthetic construct; identical to SEQ ID NO: 14895
  source 1..80: mol_type = other DNA

SEQ ID NO: 83638 - DNA, 80 bp, synthetic construct
  source 1..80: mol_type = other DNA
taaattatggtaaatgaaaagataatatgagaattaaaagtaatgacttctgtgattcgtatagtcactaggatttaaaa

SEQ ID NO: 83639 - DNA, 80 bp, synthetic construct
  source 1..80: mol_type = other DNA
cctgcctcagcctcccgagtagctgggattacaggcatgcaccaccacaactagctaattttgtatttttagtagagatg

SEQ ID NO: 83640 - DNA, 80 bp, synthetic construct
  source 1..80: mol_type = other DNA
gagctatactatatgtgttgtagaagcaaaataaatactaagtctaccttgcattagtaagactgatttttcttaaatcc

SEQ ID NO: 83641 - DNA, 80 bp, synthetic construct
  source 1..80: mol_type = other DNA
acagtgaatagatctttttcccctaagcagcacaaagatgccattttgggaggttaaattactttctaaaagttgctgtg

SEQ ID NO: 83642 - DNA, 80 bp, synthetic construct; identical to SEQ ID NO: 14896
  source 1..80: mol_type = other DNA

SEQ ID NO: 83643 - DNA, 80 bp, synthetic construct
  source 1..80: mol_type = other DNA
cttaaaggttatagtttaataatgcagttaaacatcaatttatctcaaattgatattgagttaaatttaaagagtatttt

SEQ ID NO: 83644 - DNA, 80 bp, synthetic construct
  source 1..80: mol_type = other DNA
tctgtttccttgctactcttagataaatgaagagtttgaaaagaattttcacataaaaacgtcataaaatcccagtgcca

SEQ ID NO: 83645 - DNA, 80 bp, synthetic construct; identical to SEQ ID NO: 14897
  source 1..80: mol_type = other DNA

SEQ ID NO: 83646 - DNA, 80 bp, synthetic construct
  source 1..80: mol_type = other DNA
ttatttatttttagtattttgagagtaggtgctgtattttcttttctttccttgtttcttcttttttgttttttgagaca

SEQ ID NO: 83647 - DNA, 80 bp, synthetic construct
  source 1..80: mol_type = other DNA
cagggttttgccatgtcaccgagactgagttactgtattttcttagcagaatattgtcccagtgagctttttccaaaaga

SEQ ID NO: 83648 - DNA, 80 bp, synthetic construct
  source 1..80: mol_type = other DNA
cagatttttgcccagtaacttgattttatacttggctttctatattgtggctccaatttttcttcccagtttatactctt

SEQ ID NO: 83649 - DNA, 80 bp, synthetic construct
  source 1..80: mol_type = other DNA
attacaggcgcctgccaccaagcccggctaatttttttttttttttttgagacggagtcttgctctgttgtctgggctgg

SEQ ID NO: 83650 - DNA, 80 bp, synthetic construct; identical to SEQ ID NO: 14898
  source 1..80: mol_type = other DNA

SEQ ID NO: 83651 - DNA, 80 bp, synthetic construct
  source 1..80: mol_type = other DNA
aattcttcaaattgtatagcattttcaggtaccatcgagggcttttcttctgtacttctgtgtgttcaaatatggacctt

SEQ ID NO: 83652 - DNA, 80 bp, synthetic construct
  source 1..80: mol_type = other DNA
tttaaaaattagatgtaggtaagcctcagaaatgggaaaatggagataaatcttaggagagatttttgaatcttttactt

SEQ ID NO: 83653 - DNA, 80 bp, synthetic construct; identical to SEQ ID NO: 14899
  source 1..80: mol_type = other DNA

SEQ ID NO: 83654 - DNA, 80 bp, synthetic construct
  source 1..80: mol_type = other DNA
ttataaatatataatttgctttaattacttaaatgttccttgagccttagaacttaaatcctgatgagggttttactttt

SEQ ID NO: 83655 - DNA, 80 bp, synthetic construct
  source 1..80: mol_type = other DNA
tatcttaaaggaaccacttcactgtaagggagcagtttgtctttctacctttccaattgtattgagattttgcccagtat

SEQ ID NO: 83656 - DNA, 80 bp, synthetic construct
  source 1..80: mol_type = other DNA
gctgagcactgtgccttgtgtcagtagtcagtggtgttcctttagtccttgttatgttaataaaaaagctttggtttttg

SEQ ID NO: 83657 - DNA, 80 bp, synthetic construct
  source 1..80: mol_type = other DNA
tcaaaggatattgtccttcaaaatctttaccttgcatttttgttactgtgatttaagatggttgtaattatcattgattg

SEQ ID NO: 83658 - DNA, 80 bp, synthetic construct; identical to SEQ ID NO: 14900
  source 1..80: mol_type = other DNA

SEQ ID NO: 83659 - DNA, 80 bp, synthetic construct
  source 1..80: mol_type = other DNA
gagtgaagtggtgtgatcttggatcactgcaacctctgcctcttgggctcaagtgatcctccctccttatcctcctgagt

SEQ ID NO: 83660 - DNA, 80 bp, synthetic construct
  source 1..80: mol_type = other DNA
ttctttcccatcccaaaccagtatcaaaatgcaaatatagtaaattactttttaaaagagagatgtttaatggcagttgt

SEQ ID NO: 83661 - DNA, 80 bp, synthetic construct
  source 1..80: mol_type = other DNA
gtaggcatgtttttggcttataatgtaattttttaaaaattagtggccaacaattaaaaattgggagagttttcaaaaga

SEQ ID NO: 83662 - DNA, 80 bp, synthetic construct; identical to SEQ ID NO: 14901
  source 1..80: mol_type = other DNA

SEQ ID NO: 83663 - DNA, 80 bp, synthetic construct
  source 1..80: mol_type = other DNA
tttgtattttttagtagagacgggatttcaccatgttggccaggttggtcttgaactcctgagctcaagtgatccacccg

SEQ ID NO: 83664 - DNA, 80 bp, synthetic construct
  source 1..80: mol_type = other DNA
taattcatagcaattaatatatgtggagaagatacgtaatgaaaaactaactagaagaggaattcagacattgaaaggga

SEQ ID NO: 83665 - DNA, 80 bp, synthetic construct
  source 1..80: mol_type = other DNA
gtttgcatagatgttaaaaatatgggcaggacaatgtgtactaaaatgctgaattctagtgaggctgacataagcttatt

SEQ ID NO: 83666 - DNA, 80 bp, synthetic construct; identical to SEQ ID NO: 14902
  source 1..80: mol_type = other DNA

SEQ ID NO: 83667 - DNA, 80 bp, synthetic construct
  source 1..80: mol_type = other DNA
ctctcttctttagtcattacccctgtttttggttcattcctatcagtaaacaatctctggtagagacttggtaagaaaac

SEQ ID NO: 83668 - DNA, 80 bp, synthetic construct
  source 1..80: mol_type = other DNA
tggagtgcagtggcgcatgttggctcactgcaagctctgcctcccgggttcacgccattctcctgcctcagactcccgag

SEQ ID NO: 83669 - DNA, 80 bp, synthetic construct
  source 1..80: mol_type = other DNA
accgccccccacccttgcctgattcttattctcttgtccaccacagtttgcattcctcaggccatttttgtctgcgtcgt

SEQ ID NO: 83670 - DNA, 80 bp, synthetic construct; identical to SEQ ID NO: 14903
  source 1..80: mol_type = other DNA

SEQ ID NO: 83671 - DNA, 80 bp, synthetic construct
  source 1..80: mol_type = other DNA
aggaaagggagaagaaactaaaaatttgacgtgggatgtcacattcaaataagcagttttttcccctttagaacatttgc

SEQ ID NO: 83672 - DNA, 80 bp, synthetic construct
  source 1..80: mol_type = other DNA
taactcaacaccaacttgtcagaagttagctgaattttagataatttctttcattccagccaaaaataataatcacagac

SEQ ID NO: 83673 - DNA, 80 bp, synthetic construct
  source 1..80: mol_type = other DNA
gggatctgcactctagcctgggcgacagagcaagacccggtctcaaaaaaaaaaaaaaaaaaaagaccctaagccttttt

SEQ ID NO: 83674 - DNA, 80 bp, synthetic construct; identical to SEQ ID NO: 14904
  source 1..80: mol_type = other DNA

SEQ ID NO: 83675 - DNA, 80 bp, synthetic construct
  source 1..80: mol_type = other DNA
agccacatttttctttatggtttttacttttgatgtcaaacttagacatttttttccccattacagtagtgttttccagt

SEQ ID NO: 83676 - DNA, 80 bp, synthetic construct
  source 1..80: mol_type = other DNA
atatttggatctacttttggtcttttgtgacctatctcttgacagtggaatcacactgtttatatcagtatagctttggg

SEQ ID NO: 83677 - DNA, 80 bp, synthetic construct; identical to SEQ ID NO: 14905
  source 1..80: mol_type = other DNA

SEQ ID NO: 83678 - DNA, 80 bp, synthetic construct
  source 1..80: mol_type = other DNA
ataactttgctaaatcagttttaatatattcacaattgggacttagtaatatatgggtttggttagtagttttgtatcac

SEQ ID NO: 83679 - DNA, 80 bp, synthetic construct
  source 1..80: mol_type = other DNA
ggctaatttttatatttttagcagagatggggtttcgccatctcctgatctcaaactcatgatctcaagtgatccaccca

SEQ ID NO: 83680 - DNA, 80 bp, synthetic construct
  source 1..80: mol_type = other DNA
caaggttggtgtttgatgatttcctcagtctttattttgtgaccaccagtgaataacccaagtatttgtgtttttaaaca

SEQ ID NO: 83681 - DNA, 80 bp, synthetic construct
  source 1..80: mol_type = other DNA
tagaggctgtacttccaaaatcaagggatccaaaataggagtgtccgcagagccatgctccctttaaaggtaccagggaa

SEQ ID NO: 83682 - DNA, 80 bp, synthetic construct; identical to SEQ ID NO: 14906
  source 1..80: mol_type = other DNA

SEQ ID NO: 83683 - DNA, 80 bp, synthetic construct
  source 1..80: mol_type = other DNA
gaatgcccataatcttcatacccacattcaccagtttttaacattttcccatatttgcattataattctctgtttctgtc

SEQ ID NO: 83684 - DNA, 80 bp, synthetic construct
  source 1..80: mol_type = other DNA
gcaggatcttggctcactgcaacctccacctccccagttcaagcaattctcctgcctcagcctcccgagtagctaggact

SEQ ID NO: 83685 - DNA, 80 bp, synthetic construct
  source 1..80: mol_type = other DNA
ttcagctttcattttctaaggacatggatattctgtgtaatcattcttcagttatcaaattcagggagtttaacattgag

SEQ ID NO: 83686 - DNA, 80 bp, synthetic construct; identical to SEQ ID NO: 14907
  source 1..80: mol_type = other DNA

SEQ ID NO: 83687 - DNA, 80 bp, synthetic construct
  source 1..80: mol_type = other DNA
gtgttttccagtttctcttctctataattactgttttccctcttgtaactagtaagcagtctgtggggagaaacttcaag

SEQ ID NO: 83688 - DNA, 80 bp, synthetic construct
  source 1..80: mol_type = other DNA
atgtatttgatttatctatttagttgtcatcactatggagtgatagactccatttcgttcaatgagttatagtccttatg

SEQ ID NO: 83689 - DNA, 80 bp, synthetic construct; identical to SEQ ID NO: 14908
  source 1..80: mol_type = other DNA

SEQ ID NO: 83690 - DNA, 80 bp, synthetic construct
  source 1..80: mol_type = other DNA
aaaaaaaataaagagcacttctttatgccatagtgatgttccaggcttctataggaccttctttgccccatccccagaat

SEQ ID NO: 83691 - DNA, 80 bp, synthetic construct
  source 1..80: mol_type = other DNA
atctttaaaatcatttttagtttatactaatacttctaattctaaaccaacccctcaggatttttttggcctttccccag

SEQ ID NO: 83692 - DNA, 80 bp, synthetic construct
  source 1..80: mol_type = other DNA
catgatcatagctcattgtagccttgaacttctaggctcaagcggtcctcctgcctcagcctcctgagtagctggggtta

SEQ ID NO: 83693 - DNA, 80 bp, synthetic construct; identical to SEQ ID NO: 14909
  source 1..80: mol_type = other DNA

SEQ ID NO: 83694 - DNA, 80 bp, synthetic construct
  source 1..80: mol_type = other DNA
catgcccggctaatttttgtatttttagtagagacggggtttcaccatgttggtcaggctggtcttgaattcttgacctc

SEQ ID NO: 83695 - DNA, 80 bp, synthetic construct
  source 1..80: mol_type = other DNA
cttgtgtgagttttggcatattgtgtcttttaaggaattgatccatgtcatctaaattatcaaatttttaatcatgtttg

SEQ ID NO: 83696 - DNA, 80 bp, synthetic construct
  source 1..80: mol_type = other DNA
agtttttcttactgatttcctattttcagtatcattgatactattatatttttatttcttttattccacttactttggat

SEQ ID NO: 83697 - DNA, 80 bp, synthetic construct; identical to SEQ ID NO: 14910
  source 1..80: mol_type = other DNA

SEQ ID NO: 83698 - DNA, 80 bp, synthetic construct
  source 1..80: mol_type = other DNA
tttgtctggttttcagtttccagaatttccatctctcacctgctacccaaatcaggatggctaccaaacctgcccatctt

SEQ ID NO: 83699 - DNA, 80 bp, synthetic construct
  source 1..80: mol_type = other DNA
cttcttttattatgagtcgttcattcattgtgaaaaatctcatttcagtgatagggaaggcaaaaaaaatcagtctcctg

SEQ ID NO: 83700 - DNA, 80 bp, synthetic construct
  source 1..80: mol_type = other DNA
aaacaggcccccctcccttttttttttgagacagggtctcactctgtcacccaggctggagtgcagtggcacaatcatag

SEQ ID NO: 83701 - DNA, 80 bp, synthetic construct
  source 1..80: mol_type = other DNA
tgggctcaagtgatcctcctgcctcagtcttccaaagtccggggattacaggagtaaggcaccacacccgacctcttttt

SEQ ID NO: 83702 - DNA, 80 bp, synthetic construct; identical to SEQ ID NO: 14911
  source 1..80: mol_type = other DNA

SEQ ID NO: 83703 - DNA, 80 bp, synthetic construct
  source 1..80: mol_type = other DNA
cactctgtctcttaggctagagtgcagtagcatgatctcggctcactgcaacctccgcctcccgggttcaagcgattctt

SEQ ID NO: 83704 - DNA, 80 bp, synthetic construct
  source 1..80: mol_type = other DNA
aaagtgctgggattacaggcgtgagccaacacgcctggctgctgaatattattttattgtgtagagtaatgtattcattc

SEQ ID NO: 83705 - DNA, 80 bp, synthetic construct; identical to SEQ ID NO: 14912
  source 1..80: mol_type = other DNA

SEQ ID NO: 83706 - DNA, 80 bp, synthetic construct
  source 1..80: mol_type = other DNA
tgcttattgctcatatgcatatgttctttggagaactgtctgagattctttgctcatttttaactgggttatttctcttt

SEQ ID NO: 83707 - DNA, 80 bp, synthetic construct
  source 1..80: mol_type = other DNA
atttttagtagagatggggttttgccatgttggtcgggcgggtcttaaactcctgatctcaggtgatccacccaccttgc

SEQ ID NO: 83708 - DNA, 80 bp, synthetic construct
  source 1..80: mol_type = other DNA
cccgagtagctgggattacaggtacacaccaccacaccctgctaatttttatatttttggtagagacagagttttgccat

SEQ ID NO: 83709 - DNA, 80 bp, synthetic construct
  source 1..80: mol_type = other DNA
tatttttgtgtgtcttaatatgtcttctaagtctgttttaatggatggattctccccttcctgcctctcatttatctgtt

SEQ ID NO: 83710 - DNA, 80 bp, synthetic construct; identical to SEQ ID NO: 14913
  source 1..80: mol_type = other DNA

SEQ ID NO: 83711 - DNA, 80 bp, synthetic construct
  source 1..80: mol_type = other DNA
accaccctggtcaacatagtgagacatcatttgtacaaaaaattagaaaaattagccaggcgtggtggtgtcaacctgta

SEQ ID NO: 83712 - DNA, 80 bp, synthetic construct
  source 1..80: mol_type = other DNA
cacatctatagatataacaaactacaagtcattatacagagcagttcagtcaccggaaaacctcctgctatccctttgca

SEQ ID NO: 83713 - DNA, 80 bp, synthetic construct; identical to SEQ ID NO: 14914
  source 1..80: mol_type = other DNA

SEQ ID NO: 83714 - DNA, 80 bp, synthetic construct
  source 1..80: mol_type = other DNA
aagatacatgcttgttctctccttttactggcagtttttaaaaacagactgtttcttagagcattttcaggttcacagca

SEQ ID NO: 83715 - DNA, 80 bp, synthetic construct
  source 1..80: mol_type = other DNA
cactcttggtgttgtacattatatgggttatattatatattaaatgcagagtgatgtctattcaccattatggtatcata

SEQ ID NO: 83716 - DNA, 80 bp, synthetic construct
  source 1..80: mol_type = other DNA
tggttccctatcttctctgaaggtgattttctttcctttttgttttttgaattgttatgaactcatttgttggggttcag

SEQ ID NO: 83717 - DNA, 80 bp, synthetic construct; identical to SEQ ID NO: 14915
  source 1..80: mol_type = other DNA

SEQ ID NO: 83718 - DNA, 80 bp, synthetic construct
  source 1..80: mol_type = other DNA
tgtctctgacagttacaaaacaacaatactaatatatccaccatgggttgaaaccagttaaaaccattctttgcatgcgc

SEQ ID NO: 83719 - DNA, 80 bp, synthetic construct
  source 1..80: mol_type = other DNA
gtatccctctatctacatgggttctctcaaactcattttctagtagatatctctagaagggcttatgggaacaatattcc

SEQ ID NO: 83720 - DNA, 80 bp, synthetic construct
  source 1..80: mol_type = other DNA
aattacttgatgtttttgcctagatgctcaagtttattttttccttaaaaatcctgcaattttactatatcttggtattg

SEQ ID NO: 83721 - DNA, 80 bp, synthetic construct; identical to SEQ ID NO: 14916
  source 1..80: mol_type = other DNA

SEQ ID NO: 83722 - DNA, 80 bp, synthetic construct
  source 1..80: mol_type = other DNA
ttttggtttttagaattatcttccttcttactttcaatttctcgaaggcattatctgtaatattcattcttgtgttcctt

SEQ ID NO: 83723 - DNA, 80 bp, synthetic construct
  source 1..80: mol_type = other DNA
ctaattttaatctcctttgtgtttctggccttctagcatgatgtatttgtctgtaaggaggatgttgttttgttgttttg

SEQ ID NO: 83724 - DNA, 80 bp, synthetic construct
  source 1..80: mol_type = other DNA
gactataggtgcgcgccaccatgctcggctaatttttgtatttttagtagagacagggtttcaccatattggccaggctt

SEQ ID NO: 83725 - DNA, 80 bp, synthetic construct; identical to SEQ ID NO: 14917
  source 1..80: mol_type = other DNA

SEQ ID NO: 83726 - DNA, 80 bp, synthetic construct
  source 1..80: mol_type = other DNA
gagaaccttttcctgttcaattctgttttaattttcagcagttttttttctgtgtgagtgaggctgtttcctagcaggga

SEQ ID NO: 83727 - DNA, 80 bp, synthetic construct
  source 1..80: mol_type = other DNA
gaagacttgtttgttatttggcttgtagagggacatggaagaagcaaatcagtctttacctctctcaaggctggagattt

SEQ ID NO: 83728 - DNA, 80 bp, synthetic construct
  source 1..80: mol_type = other DNA
agtgctcgtccacatctaggtcttctttagtcccaggctgatgggaacatttaattcctttgctccttgatgttagatgg

SEQ ID NO: 83729 - DNA, 80 bp, synthetic construct; identical to SEQ ID NO: 14918
  source 1..80: mol_type = other DNA

SEQ ID NO: 83730 - DNA, 80 bp, synthetic construct
  source 1..80: mol_type = other DNA
gtgtaaaatatcttaataatttttatattacatattaacatcttgtattcattgggttaaataagatgtattgaaattat

SEQ ID NO: 83731 - DNA, 80 bp, synthetic construct
  source 1..80: mol_type = other DNA
aactgaatcagtgaaactccagatttgaagagagtacagaagaggagtacactacagatggggattaagcgaaagtcgac

SEQ ID NO: 83732 - DNA, 80 bp, synthetic construct
  source 1..80: mol_type = other DNA
gcccgatatttaaggctctccgtatctgcacaagcaggagttaccctgcagtaaagcctgctagttcacaagcctcacct

SEQ ID NO: 83733 - DNA, 80 bp, synthetic construct
  source 1..80: mol_type = other DNA
catattaaataattcagataatgaaagtacaagtgaaaaaatgagtctttgcgataaagctcttctccagccatccccat

SEQ ID NO: 83734 - DNA, 80 bp, synthetic construct; identical to SEQ ID NO: 14919
  source 1..80: mol_type = other DNA

SEQ ID NO: 83735 - DNA, 80 bp, synthetic construct
  source 1..80: mol_type = other DNA
gttgtggcatgtctcagaatttccctcctccttaaggctgaacaatactccattgtatgcatataccacattttgcttat

SEQ ID NO: 83736 - DNA, 80 bp, synthetic construct
  source 1..80: mol_type = other DNA
tactaagactaaataatgaagaaacagaatatcagaatagacctgtaactagtgaggagattgaatgagtaatcaaaaat

SEQ ID NO: 83737 - DNA, 80 bp, synthetic construct; identical to SEQ ID NO: 14920
  source 1..80: mol_type = other DNA

SEQ ID NO: 83738 - DNA, 80 bp, synthetic construct
  source 1..80: mol_type = other DNA
cgattctcctgcctcagcctcctaagtagctaggattacaggcacctgccaccatgcctggctaatttttgtacttttag

SEQ ID NO: 83739 - DNA, 80 bp, synthetic construct
  source 1..80: mol_type = other DNA
aataattttagggagcagatgaagaggtcttcagactgcttttagctcaggtttttttgttttaaaatttattaagtgga

SEQ ID NO: 83740 - DNA, 80 bp, synthetic construct
  source 1..80: mol_type = other DNA
tagtgctagtttttcttgacaggtcatttcctatagggagggcagtagtataagcaaaacaacaaaatattcaaaattct

SEQ ID NO: 83741 - DNA, 80 bp, synthetic construct
  source 1..80: mol_type = other DNA
cactttatttgactccatagagaaattactcaagccccttaagacagacactgaaataggatacagtttccaagaaggca

SEQ ID NO: 83742 - DNA, 80 bp, synthetic construct; identical to SEQ ID NO: 14921
  source 1..80: mol_type = other DNA

SEQ ID NO: 83743 - DNA, 80 bp, synthetic construct
  source 1..80: mol_type = other DNA
cacttacatctctggagatctctgtatgtgtgttaaaaataccatgttttgtaacaattggcttgtcttagaaaactttt

SEQ ID NO: 83744 - DNA, 80 bp, synthetic construct
  source 1..80: mol_type = other DNA
caggcacgcgccaccatgcccaactaatttttgtatttttagtagagatggggtttcatcattttggccaggatggtctc

SEQ ID NO: 83745 - DNA, 80 bp, synthetic construct; identical to SEQ ID NO: 14922
  source 1..80: mol_type = other DNA

SEQ ID NO: 83746 - DNA, 80 bp, synthetic construct
  source 1..80: mol_type = other DNA
gatgattaggctgatggtttctgctagctctggcaaaaggtgaatccagttgctttctagcacttttcctactaaccctg

SEQ ID NO: 83747 - DNA, 80 bp, synthetic construct
  source 1..80: mol_type = other DNA
gcctcctgaatagctgggactacaggattatgcccccatgcctggctgtttaaaaatttttgggtagagatggggttttg

SEQ ID NO: 83748 - DNA, 80 bp, synthetic construct
  source 1..80: mol_type = other DNA
gagggtaccaaattaaagtctgtcagttttttctgtctccacctcaaagatcactgtatgacttcttttcttccttctcg

SEQ ID NO: 83749 - DNA, 80 bp, synthetic construct
  source 1..80: mol_type = other DNA
atccttgactgtttctagttcgattgtaacactgatcaaatctccttcaagttcaaaacaaaccagcaaaaccttccctt

SEQ ID NO: 83750 - DNA, 80 bp, synthetic construct; identical to SEQ ID NO: 14923
  source 1..80: mol_type = other DNA

SEQ ID NO: 83751 - DNA, 80 bp, synthetic construct
  source 1..80: mol_type = other DNA
agacaattatcaactgtaataccagcagtacctattgttaagctctagggcatgtcatttccatcgctctctttttaaat

SEQ ID NO: 83752 - DNA, 80 bp, synthetic construct
  source 1..80: mol_type = other DNA
agttactgctgcagtgtgacctgaaggaagttactcctctgggttttagtttcctcatcttgaaaatagttataacattc

SEQ ID NO: 83753 - DNA, 80 bp, synthetic construct
  source 1..80: mol_type = other DNA
atttttgtttttgcttgttctgccgtcattaagcgtgttgtaagaccatacgtgtcactaaatctgggtgcacaacatga

SEQ ID NO: 83754 - DNA, 80 bp, synthetic construct; identical to SEQ ID NO: 14924
  source 1..80: mol_type = other DNA

SEQ ID NO: 83755 - DNA, 80 bp, synthetic construct
  source 1..80: mol_type = other DNA
gcagtctggacctcccaggctcaagtggtcctctcacttcagcctcctgagtagctgggacagcaggcacgcaccaccac

SEQ ID NO: 83756 - DNA, 80 bp, synthetic construct
  source 1..80: mol_type = other DNA
cctggcctcacagatatttcttgatctacattttattcattatttaggtccaactttagcatgtgtcatgtatttatata

SEQ ID NO: 83757 - DNA, 80 bp, synthetic construct; identical to SEQ ID NO: 14925
  source 1..80: mol_type = other DNA

SEQ ID NO: 83758 - DNA, 80 bp, synthetic construct
  source 1..80: mol_type = other DNA
agaaaacgtatggcattaggattaaaagtacaatgtttagagtctggctgatctgggtttaaatcccaaatctaccatgt

SEQ ID NO: 83759 - DNA, 80 bp, synthetic construct
  source 1..80: mol_type = other DNA
ctgcctcctgggttcaagtgattctttgcctcagcctcccaagtagctgggattacaggccaccatgcttggctaatttt

SEQ ID NO: 83760 - DNA, 80 bp, synthetic construct
  source 1..80: mol_type = other DNA
ttactagtggtatctggctcataggcttattttaaggattaagcaagataataaatgtatagaatttagcacagtaaccg

SEQ ID NO: 83761 - DNA, 80 bp, synthetic construct
  source 1..80: mol_type = other DNA
gtttctaccagtgattcacagtgttttctgtatccagcaagcttttaatacagctgcttgtattattctcccgtataaac

SEQ ID NO: 83762 - DNA, 80 bp, synthetic construct; identical to SEQ ID NO: 14926
  source 1..80: mol_type = other DNA

SEQ ID NO: 83763 - DNA, 80 bp, synthetic construct
  source 1..80: mol_type = other DNA
gtgctgtgggcatgggccttagggcagctgtatatttgtcatctggatcagaccatacattggtgatcctgcttcacaac

SEQ ID NO: 83764 - DNA, 80 bp, synthetic construct
  source 1..80: mol_type = other DNA
agcagtaaacgttagtgctcttcggttaatcatcatgtgtggtggtatgacatttgcagtatcatctgttaccattattt

SEQ ID NO: 83765 - DNA, 80 bp, synthetic construct; identical to SEQ ID NO: 14927
  source 1..80: mol_type = other DNA

SEQ ID NO: 83766 - DNA, 80 bp, synthetic construct
  source 1..80: mol_type = other DNA
ctgcatccaggcccctcccttaggcatgtgactcacggatttaaaagacagtgctgtacggtaattaactacctgcctct

SEQ ID NO: 83767 - DNA, 80 bp, synthetic construct
  source 1..80: mol_type = other DNA
ttgctagacttatttctcctgtttgaaatcactagttggcatattcgtgtacaagggatggattttacatgggtgctctt

SEQ ID NO: 83768 - DNA, 80 bp, synthetic construct
  source 1..80: mol_type = other DNA
ttaagtcaagtattacatgacagtttaattggactaaattctgacataacctatacatccttaaggtgaccggtggttat

SEQ ID NO: 83769 - DNA, 80 bp, synthetic construct
  source 1..80: mol_type = other DNA
acgtacactattaataggacatttagaaatgtaattttctaaatatattagaaataataggacatttagaaatgacattc

SEQ ID NO: 83770 - DNA, 80 bp, synthetic construct; identical to SEQ ID NO: 14928
  source 1..80: mol_type = other DNA

SEQ ID NO: 83771 - DNA, 80 bp, synthetic construct
  source 1..80: mol_type = other DNA
gtgtgtgtgtgtgtgtgacagggtcttgccctgttgcccaggctagagtatagtgatgcaatgatggtttactgcagcct

SEQ ID NO: 83772 - DNA, 80 bp, synthetic construct
  source 1..80: mol_type = other DNA
gccatcgtgcctggcctttcattcaacttgtaattcacaatttccagaaaaaaagttttaaaattactgatggaggaaag

SEQ ID NO: 83773 - DNA, 80 bp, synthetic construct
  source 1..80: mol_type = other DNA
ttgaatgaatagtgaacacccttgtgtctttcactaactcagtggctcacttgctaacgtttgcctcatttgctttctct

SEQ ID NO: 83774 - DNA, 80 bp, synthetic construct; identical to SEQ ID NO: 14929
  source 1..80: mol_type = other DNA

SEQ ID NO: 83775 - DNA, 80 bp, synthetic construct
  source 1..80: mol_type = other DNA
taggataagccactaccccacctccatctaccacccggcagtggtcttttatgaaatctcatcatatttttccttttctt

SEQ ID NO: 83776 - DNA, 80 bp, synthetic construct
  source 1..80: mol_type = other DNA
cttaattttcttagtatgttgtattccaaaattatagaaagtgctataatagacatttatgtacattacataaagtaata

SEQ ID NO: 83777 - DNA, 80 bp, synthetic construct; identical to SEQ ID NO: 14930
  source 1..80: mol_type = other DNA

SEQ ID NO: 83778 - DNA, 80 bp, synthetic construct
  source 1..80: mol_type = other DNA
attcttcttgggcttgatttttttatttatattacaattttgagatgtcatttatgttgacattgttagccgaagttcat

SEQ ID NO: 83779 - DNA, 80 bp, synthetic construct
  source 1..80: mol_type = other DNA
agctaagtacaaaaggttctctaggttatatgcatagacctggattgttgagtcttgggtgtatacaccatcagctttac

SEQ ID NO: 83780 - DNA, 80 bp, synthetic construct
  source 1..80: mol_type = other DNA
gatgtgtttacttttttagctccacccatctttgttttttcctaggttgactcattcaggtatgtcatctctcccttctc

SEQ ID NO: 83781 - DNA, 80 bp, synthetic construct
  source 1..80: mol_type = other DNA
aattagccgagcgtggtgacacgtgcctgtaatcccagccacttgggaggctgaggcaggagaatcactggacctaggga

SEQ ID NO: 83782 - DNA, 80 bp, synthetic construct; identical to SEQ ID NO: 14931
  source 1..80: mol_type = other DNA

SEQ ID NO: 83783 - DNA, 80 bp, synthetic construct
  source 1..80: mol_type = other DNA
tctgaaacaaatagcagcatgtattaatagtccctgatgatttcactgtattgtagcataactctggtattcataatgtc

SEQ ID NO: 83784 - DNA, 80 bp, synthetic construct
  source 1..80: mol_type = other DNA
ctgttttatgtggtgaaattattctaggaagcttgttccatgggacatttacctattagctaataaaacaaatggtctat

SEQ ID NO: 83785 - DNA, 80 bp, synthetic construct; identical to SEQ ID NO: 14932
  source 1..80: mol_type = other DNA

SEQ ID NO: 83786 - DNA, 80 bp, synthetic construct
  source 1..80: mol_type = other DNA
tgggactgctgttttgtttctaggaaactagaaaccttggcagaattgaaatttcgtagtgattttttcttctttgctct

SEQ ID NO: 83787 - DNA, 80 bp, synthetic construct
  source 1..80: mol_type = other DNA
ttacaggaaattgcaaaaaatagtaaggagaggtcccttgtgcctttcacctttcccttaatggtaacttcttactaccc

SEQ ID NO: 83788 - DNA, 80 bp, synthetic construct
  source 1..80: mol_type = other DNA
ggcagccagtaatctgcttttcatctctatgatgttgacatttcgaggatattaataaatggaatcacatagtatgtgac

SEQ ID NO: 83789 - DNA, 80 bp, synthetic construct; identical to SEQ ID NO: 14933
  source 1..80: mol_type = other DNA

SEQ ID NO: 83790 - DNA, 80 bp, synthetic construct
  source 1..80: mol_type = other DNA
cgtggcctcagtgctggatgtagcatggggaagtgggaatttgtagccaaggagctggttgagggccagtggatggaaaa

SEQ ID NO: 83791 - DNA, 80 bp, synthetic construct
  source 1..80: mol_type = other DNA
gcttagcagggttctttgctaaaacaggaatttacaaggaagtacacagataggcctgggagaaaagttcaggagcctgg

SEQ ID NO: 83792 - DNA, 80 bp, synthetic construct
  source 1..80: mol_type = other DNA
ttttagctgtgccagtaggtgtgcagcatagtttggtttgcgtttccctgatgtctagtaatgttgaccatatcttttca

SEQ ID NO: 83793 - DNA, 80 bp, synthetic construct
  source 1..80: mol_type = other DNA
agcctgtacctcatttttttgccttcttaaacaggtcttttgtagagcaaacatttttaattttgttgaagttcagttta

SEQ ID NO: 83794 - DNA, 80 bp, synthetic construct; identical to SEQ ID NO: 14934
  source 1..80: mol_type = other DNA

SEQ ID NO: 83795 - DNA, 80 bp, synthetic construct
  source 1..80: mol_type = other DNA
cctgcaccttccttatacacgatgcacagatgtacgcatgcgagtacttgtgtgtacggttttgttttcttttttaaata

SEQ ID NO: 83796 - DNA, 80 bp, synthetic construct
  source 1..80: mol_type = other DNA
aattgatcctattctaataaacatttagatgacattgggtaacttcttgtttttcttttttatataacagtggcaccagg

SEQ ID NO: 83797 - DNA, 80 bp, synthetic construct
  source 1..80: mol_type = other DNA
gtagtcccagctactttggaggctgaggtgggaggatcacttgagcccagtaggtggaggctacagggaattaggattac

SEQ ID NO: 83798 - DNA, 80 bp, synthetic construct; identical to SEQ ID NO: 14935
  source 1..80: mol_type = other DNA

SEQ ID NO: 83799 - DNA, 80 bp, synthetic construct
  source 1..80: mol_type = other DNA
gtctgtgaatgcccttctaatgaatttggacttcattttgtacataattagaaatcattgaaaaaggccgggcgcggtgg

SEQ ID NO: 83800 - DNA, 80 bp, synthetic construct
  source 1..80: mol_type = other DNA
ctgagtgtgatggcacatgcctgtagtcccagctacttgggaggctgaggcaggagaattgcttgaacccgggaggcaga

SEQ ID NO: 83801 - DNA, 80 bp, synthetic construct; identical to SEQ ID NO: 14936
  source 1..80: mol_type = other DNA

SEQ ID NO: 83802 - DNA, 80 bp, synthetic construct
  source 1..80: mol_type = other DNA
tttttacattggcttctttcatctagcgtgtctttgaggctcatgtatgctgtaatgtgtatcagtattttgtgcctttt

SEQ ID NO: 83803 - DNA, 80 bp, synthetic construct
  source 1..80: mol_type = other DNA
aaattttggatcctgtgataagtttatatataactttaagaaattagggcatggtggctcacgcttataatcccagtgac

SEQ ID NO: 83804 - DNA, 80 bp, synthetic construct
  source 1..80: mol_type = other DNA
cattttacagtcctgtcagcaatgtatgcgggttccagcttctccagatgctcgacacttggtattgtcttttgattatg

SEQ ID NO: 83805 - DNA, 80 bp, synthetic construct; identical to SEQ ID NO: 14937
  source 1..80: mol_type = other DNA

SEQ ID NO: 83806 - DNA, 80 bp, synthetic construct
  source 1..80: mol_type = other DNA
cggtacataaacagattttgtgctggtggttgatggcttttatattgatcttattctcttgatgtgccactggaataaac

SEQ ID NO: 83807 - DNA, 80 bp, synthetic construct
  source 1..80: mol_type = other DNA
tgtgtagggaacaactaaattcatggaagtaaatgatgtatctgttcctaagtcaccctatctgctgagttacttgtgac

SEQ ID NO: 83808 - DNA, 80 bp, synthetic construct
  source 1..80: mol_type = other DNA
agttcttgtttacacattcaaacccagaattgcatgcaaaaaggctgggagcatgtgtttttacctgggtcttttttcat

SEQ ID NO: 83809 - DNA, 80 bp, synthetic construct; identical to SEQ ID NO: 14938
  source 1..80: mol_type = other DNA

SEQ ID NO: 83810 - DNA, 80 bp, synthetic construct
  source 1..80: mol_type = other DNA
gtagtttgacatagatacaagcttaaacagaagagtgctatgatagatttgtacactaaagttcttttggactatggatt

SEQ ID NO: 83811 - DNA, 80 bp, synthetic construct
  source 1..80: mol_type = other DNA
ggggtgcatggtatactatcctaaagtaactgttcatttgagttatttacagctaaaaccacattatgtttttctggagc

SEQ ID NO: 83812 - DNA, 80 bp, synthetic construct
  source 1..80: mol_type = other DNA
gaaatgatagggaagaggggatttggagtagccgaaggaaaaaatgtgcaatcagtgttgttgattccaccgaattctaa

SEQ ID NO: 83813 - DNA, 80 bp, synthetic construct; identical to SEQ ID NO: 14939
  source 1..80: mol_type = other DNA

SEQ ID NO: 83814 - DNA, 80 bp, synthetic construct
  source 1..80: mol_type = other DNA
ctggggaggctgaggcaggagaatggcttgaacccaggaggcagaggttgcagtgagctgagatcgtgccactgtactcc

SEQ ID NO: 83815 - DNA, 80 bp, synthetic construct
  source 1..80: mol_type = other DNA
ctgaaaccttatagataactgttatgatatccataatcagtgcttgtccttggattctgcatgggtagtgagctttaaag

SEQ ID NO: 83816 - DNA, 80 bp, synthetic construct
  source 1..80: mol_type = other DNA
gatgttagctctgagttatgaatgttagaatatatttagaaatgtttgattttcatttttccatgtcattaagaagcttg

SEQ ID NO: 83817 - DNA, 80 bp, synthetic construct; identical to SEQ ID NO: 14940
  source 1..80: mol_type = other DNA

SEQ ID NO: 83818 - DNA, 80 bp, synthetic construct
  source 1..80: mol_type = other DNA
gagcatatcctttcctgtgtcttttgtttacctctgagtaatgaagtcaaatcttacttgattttccttggctggtctat

SEQ ID NO: 83819 - DNA, 80 bp, synthetic construct
  source 1..80: mol_type = other DNA
ccaggaattcgagaccagcctgggcaacacggcaaaaccccatgtctacaaaaaatataaaaattagctgggcatggttg

SEQ ID NO: 83820 - DNA, 80 bp, synthetic construct; identical to SEQ ID NO: 14941
  source 1..80: mol_type = other DNA

SEQ ID NO: 83821 - DNA, 80 bp, synthetic construct
  source 1..80: mol_type = other DNA
agttggtaagtagtttacatgttaattttataatgatacattggaaatatctggcagaattagaatcaggctgtgtgtgt

SEQ ID NO: 83822 - DNA, 80 bp, synthetic construct
  source 1..80: mol_type = other DNA
tggactgtttttacttttatggggataaattcatttgaactttgtttaatacagtgattgcctgctctctctcccacacc

SEQ ID NO: 83823 - DNA, 80 bp, synthetic construct
  source 1..80: mol_type = other DNA
ttgccttccctcatttctctgagcgacagcctgagagttttatagtcatatgaggactctgaaaaatgttagagacctgg

SEQ ID NO: 83824 - DNA, 80 bp, synthetic construct; identical to SEQ ID NO: 14942
  source 1..80: mol_type = other DNA

SEQ ID NO: 83825 - DNA, 80 bp, synthetic construct
  source 1..80: mol_type = other DNA
agattgaatgatttttaagatcgcaaagtaaacagcagacatacctttagaaatttttttatgacttgaacccaggaggc

SEQ ID NO: 83826 - DNA, 80 bp, synthetic construct
  source 1..80: mol_type = other DNA
atgaatgcttgccccttaaagggtaaggtgttaatagcagtactaatatacggtagtttagacctattccacaggcatag

SEQ ID NO: 83827 - DNA, 80 bp, synthetic construct
  source 1..80: mol_type = other DNA
ctaggtggtccaatatatttttgtctaagtaggaatctgaatattgtagaattgtacatttcggtgctgcttctagctat

SEQ ID NO: 83828 - DNA, 80 bp, synthetic construct
  source 1..80: mol_type = other DNA
tggaagtactgttcccacagaactaactttacaaatgtaaagcttgggcagaggttgaggaaaatggtaaagtgatagat

SEQ ID NO: 83829 - DNA, 80 bp, synthetic construct
  source 1..80: mol_type = other DNA
atcagtttaatactgtcttggaattcatgagatggaagcataggtcaaagctgtttggagaaaatcagaagtacagtttt

SEQ ID NO: 83830 - DNA, 80 bp, synthetic construct; identical to SEQ ID NO: 14943
  source 1..80: mol_type = other DNA

SEQ ID NO: 83831 - DNA, 80 bp, synthetic construct
  source 1..80: mol_type = other DNA
ttagaagataagcattaaatggtttatatgtttatttcttccccctaagtttgcaaagcagagttcagcatgcaagatta

SEQ ID NO: 83832 - DNA, 80 bp, synthetic construct
  source 1..80: mol_type = other DNA
cacctgggaggctgaggcatgagaattgcttgaacccagaatgcagaggttgtagtgagctgagatcatgccgctgtact

SEQ ID NO: 83833 - DNA, 80 bp, synthetic construct
  source 1..80: mol_type = other DNA
ggactgcagtgagcatagtttcaactccctgggctcaagcgatccttctgcctcagtctcccacatagctgggactacag

SEQ ID NO: 83834 - DNA, 80 bp, synthetic construct; identical to SEQ ID NO: 14944
  source 1..80: mol_type = other DNA

SEQ ID NO: 83835 - DNA, 80 bp, synthetic construct
  source 1..80: mol_type = other DNA
cattttaagaaatagatagaatgtatggttttatgaagtggtctacgcttacacttctggaagtggcaggctttgcttgc

SEQ ID NO: 83836 - DNA, 80 bp, synthetic construct
  source 1..80: mol_type = other DNA
tttggtttctatgattgtgtgctcttctgattctacttatttaattactccttgaccttttttccttcccctcctactct

SEQ ID NO: 83837 - DNA, 80 bp, synthetic construct
  source 1..80: mol_type = other DNA
ctcagttgtggcattttctctaagcttcaggcccatattttcatctgtttacagatggctcagcttagtgcctcagactt

SEQ ID NO: 83838 - DNA, 80 bp, synthetic construct; identical to SEQ ID NO: 14945
  source 1..80: mol_type = other DNA

SEQ ID NO: 83839 - DNA, 80 bp, synthetic construct
  source 1..80: mol_type = other DNA
taaattatcttaagagataattttgcttgtattgtcggtgacactttgcctgtctgccagagtaaggacagattcctcta

SEQ ID NO: 83840 - DNA, 80 bp, synthetic construct
  source 1..80: mol_type = other DNA
aacaggttcctagctatactcaaaaaatagtctttctagggttggatgagcatgaaaacaattattgaagtgcaatctga

SEQ ID NO: 83841 - DNA, 80 bp, synthetic construct
  source 1..80: mol_type = other DNA
tgaaaatacaggtgaccatgtcagaaaacaaaggtgtattggcatcacctggaaagactacaccaatgttatgagaggag

SEQ ID NO: 83842 - DNA, 80 bp, synthetic construct
  source 1..80: mol_type = other DNA
attggaaagtgtaatactgtaaaatacatatgtgtttttgatgccatttcctggcattcaactcttaaaatccttgaaac

SEQ ID NO: 83843 - DNA, 80 bp, synthetic construct; identical to SEQ ID NO: 14946
  source 1..80: mol_type = other DNA

SEQ ID NO: 83844 - DNA, 80 bp, synthetic construct
  source 1..80: mol_type = other DNA
tttccttgaattctgtcagccgctctaagcaaactaatagaacctgaaaaaggggttgtgggtacctggatttatggctg

SEQ ID NO: 83845 - DNA, 80 bp, synthetic construct; identical to SEQ ID NO: 14947
  source 1..80: mol_type = other DNA

SEQ ID NO: 83846 - DNA, 80 bp, synthetic construct
  source 1..80: mol_type = other DNA
agagtttgagggacaaggctggaaaggaccttatgaagaattttgaatgccatggcaaggagtctagactttattttgtg

SEQ ID NO: 83847 - DNA, 80 bp, synthetic construct
  source 1..80: mol_type = other DNA
gaaggtgaaaggcacatcttaggtggcagcaggcagagagaatgagagccaagtgaaaggggaaacctcttacaaaatca

SEQ ID NO: 83848 - DNA, 80 bp, synthetic construct
  source 1..80: mol_type = other DNA
ttggtgatatgaatggtagtttggaaaaaggaaaaactaaaactagagagacaagttaggctattcttaactgtttcaag

SEQ ID NO: 83849 - DNA, 80 bp, synthetic construct; identical to SEQ ID NO: 14948
  source 1..80: mol_type = other DNA

SEQ ID NO: 83850 - DNA, 80 bp, synthetic construct
  source 1..80: mol_type = other DNA
ccacccttggtgtgtagtccagttagcaaggtatgtatataagtaatataagtaatgataaccaacattgccatgcaaaa

SEQ ID NO: 83851 - DNA, 80 bp, synthetic construct
  source 1..80: mol_type = other DNA
gtaaaggatatttctggaaaagtgcatggatagaaaatgaatgtttttgtaggaatgtggtgaaggtcttagaaagggca

SEQ ID NO: 83852 - DNA, 80 bp, synthetic construct
  source 1..80: mol_type = other DNA
ttgtggaaatagaaaagaaagactcaatgataaaggtattgcggcagaagaagggacaccgatgtgtgactagatgttgg

SEQ ID NO: 83853 - DNA, 80 bp, synthetic construct
  source 1..80: mol_type = other DNA
agtttttttggcattatttttccagccttaacatattcaaagggagattttatgaaaaaagcaaagtatgacctctttta

SEQ ID NO: 83854 - DNA, 80 bp, synthetic construct; identical to SEQ ID NO: 14949
  source 1..80: mol_type = other DNA

SEQ ID NO: 83855 - DNA, 80 bp, synthetic construct
  source 1..80: mol_type = other DNA
catgtgtaaaactggaagacattacattattgaggaaggaaggcatttgtgttttgtttgttttttaagtcaggctttgt

SEQ ID NO: 83856 - DNA, 80 bp, synthetic construct
  source 1..80: mol_type = other DNA
cacccgccaccacgctcagctaattttgtatttttagtagagatgaggtttcgccatgttggccaggctggtcttgaaca

SEQ ID NO: 83857 - DNA, 80 bp, synthetic construct; identical to SEQ ID NO: 14950
  source 1..80: mol_type = other DNA

SEQ ID NO: 83858 - DNA, 80 bp, synthetic construct
  source 1..80: mol_type = other DNA
gttgctccgtgagctttaactccggcaggtctgtgcttgtgcctccatgctgttgagcagtctcccttaggtttgcaaag

SEQ ID NO: 83859 - DNA, 80 bp, synthetic construct
  source 1..80: mol_type = other DNA
ctcatgccccattagatctactctgtcactgaccctgcagattggtggctgattatgatcactaaaagaaatatctaaca

SEQ ID NO: 83860 - DNA, 80 bp, synthetic construct
  source 1..80: mol_type = other DNA
caaaaaattagccgggtgtgatggcgggcgcctgtagtcccagctactcgggaggctgaggcaggagaatggcgtggact

SEQ ID NO: 83861 - DNA, 80 bp, synthetic construct; identical to SEQ ID NO: 14951
  source 1..80: mol_type = other DNA

SEQ ID NO: 83862 - DNA, 80 bp, synthetic construct
  source 1..80: mol_type = other DNA
taggtcacccttcataagaaggagcccatgctgttgggcctatgtagagccttcctctctgtcactccacaggctccatt

SEQ ID NO: 83863 - DNA, 80 bp, synthetic construct
  source 1..80: mol_type = other DNA
gggccgtcagcgtgcctcttctccaggcttctggtctcttatttcctttttggacccttttaatacaaaaattagccggg

SEQ ID NO: 83864 - DNA, 80 bp, synthetic construct
  source 1..80: mol_type = other DNA
aaaaaaattaaccacacacccacttgcttctgtagagaaacctagaactcctggtctcagaaatgtcatccaggtctcgc

SEQ ID NO: 83865 - DNA, 80 bp, synthetic construct
  source 1..80: mol_type = other DNA
ggtgctttaattttatttatttatttatttagaggtggagtctcgctctgctctctgctaatttttgtatttttagtaga

SEQ ID NO: 83866 - DNA, 80 bp, synthetic construct; identical to SEQ ID NO: 14952
  source 1..80: mol_type = other DNA

SEQ ID NO: 83867 - DNA, 80 bp, synthetic construct
  source 1..80: mol_type = other DNA
gattatatcttatgtattctttcttccttccttttgtttctcccttccctgctctgtcttttatagggcaggggttaggg

SEQ ID NO: 83868 - DNA, 80 bp, synthetic construct
  source 1..80: mol_type = other DNA
ggagttcgagaccccatctctatttaaaaatacacacacacgtgtgtatgtgtgtgtataaagattatgtaagcagccta

SEQ ID NO: 83869 - DNA, 80 bp, synthetic construct; identical to SEQ ID NO: 14953
  source 1..80: mol_type = other DNA

SEQ ID NO: 83870 - DNA, 80 bp, synthetic construct
  source 1..80: mol_type = other DNA
gccaccacacctggctaaagttttgtagttttagtagagatggggcttcatcatgttggtcaggctggtcttgaactccc

SEQ ID NO: 83871 - DNA, 80 bp, synthetic construct
  source 1..80: mol_type = other DNA
tgagaatatccctctcataaagttagtgtgaagattaaggaatttaacatatgaagtatgtagaacagtgcctggcctat

SEQ ID NO: 83872 - DNA, 80 bp, synthetic construct
  source 1..80: mol_type = other DNA
ctagggatattgaactttctagataatttcatgggtcttttcaaagagccagcattttggttttataaattaactccact

SEQ ID NO: 83873 - DNA, 80 bp, synthetic construct
  source 1..80: mol_type = other DNA
attctcccagccttagttagagctgcttgtatattttcaaaagcttcttgcacctctgtctcctgatggtctgtaatttt

SEQ ID NO: 83874 - DNA, 80 bp, synthetic construct; identical to SEQ ID NO: 14954
  source 1..80: mol_type = other DNA

SEQ ID NO: 83875 - DNA, 80 bp, synthetic construct
  source 1..80: mol_type = other DNA
tagtaatgctgtttttcagtcttactgatctcactctattccttatctttaccatgcttttctgactttgtgcttttgcc

SEQ ID NO: 83876 - DNA, 80 bp, synthetic construct
  source 1..80: mol_type = other DNA
agcttctgtgctctgttactagtcattccattttcgatagtctaccagtaacttctgtgccttagatccacatttacact

SEQ ID NO: 83877 - DNA, 80 bp, synthetic construct; identical to SEQ ID NO: 14955
  source 1..80: mol_type = other DNA

SEQ ID NO: 83878 - DNA, 80 bp, synthetic construct
  source 1..80: mol_type = other DNA
gaacaataaatatattttgggtgagtaagtaaatactacgaagcatccagaaagcatcttgctctcttttggggtgggga

SEQ ID NO: 83879 - DNA, 80 bp, synthetic construct
  source 1..80: mol_type = other DNA
aaatacaaaaattagccaggcatggtggtgcatgccagtaattccagctccttgggaggctgaggcaggagaatggcttg

SEQ ID NO: 83880 - DNA, 80 bp, synthetic construct
  source 1..80: mol_type = other DNA
ataaaggtggtcttatctactgcttttcaaatttagtgtacgcgcatgtcacctgggggtcttgttagaagattctaatt

SEQ ID NO: 83881 - DNA, 80 bp, synthetic construct
  source 1..80: mol_type = other DNA
tgttgttttgagacagggtcttgctctgttgcccaggctggagtgcagtggcatgatcatgactcaccacagccttgaac

SEQ ID NO: 83882 - DNA, 80 bp, synthetic construct; identical to SEQ ID NO: 14956
  source 1..80: mol_type = other DNA

SEQ ID NO: 83883 - DNA, 80 bp, synthetic construct
  source 1..80: mol_type = other DNA
tctagaaatcacaaaaggatggtgattttgggaacgaagttcttgagctagcactgtcagtagtaactggccgttactgt

SEQ ID NO: 83884 - DNA, 80 bp, synthetic construct
  source 1..80: mol_type = other DNA
gcaagataagtaaaaaaatcagctgactaagctttataagaggaggaatcatgtctcttttatttaccgttggatagtca

SEQ ID NO: 83885 - DNA, 80 bp, synthetic construct; identical to SEQ ID NO: 14957
  source 1..80: mol_type = other DNA

SEQ ID NO: 83886 - DNA, 80 bp, synthetic construct
  source 1..80: mol_type = other DNA
gaggatattttttaggtttttaagcagagagaatggcaaggtcatttggttttagaagttagtccgagctaggcatggtg

SEQ ID NO: 83887 - DNA, 80 bp, synthetic construct
  source 1..80: mol_type = other DNA
aaaaaaaaaaaaaagttctttcaagcacacgtggagtgttttatgaaagtgaccatttactaggctatacagcaagttct

SEQ ID NO: 83888 - DNA, 80 bp, synthetic construct
  source 1..80: mol_type = other DNA
gagaaaataacagcctgagcaaaatagtgagaccctgcgtctacaaaaaaaaataaaaattagcccggcacagtggtgtc

SEQ ID NO: 83889 - DNA, 80 bp, synthetic construct
  source 1..80: mol_type = other DNA
gtgtgaaaccctgaagccttaaatattcatatttgaaaagaagattttaatactaataagctaatctaagttagggaaag

SEQ ID NO: 83890 - DNA, 80 bp, synthetic construct; identical to SEQ ID NO: 14958
  source 1..80: mol_type = other DNA

SEQ ID NO: 83891 - DNA, 80 bp, synthetic construct
  source 1..80: mol_type = other DNA
aactatttgaaagattgatcaagaaaaaatataaagtacaaataatactgaggatataaaaggaagatacagaagaaagt

SEQ ID NO: 83892 - DNA, 80 bp, synthetic construct
  source 1..80: mol_type = other DNA
cacccactttcatatattcagagataagcctttggcccagatgatctttttttctaagaaaaaaaaaaacaggcctcttc

SEQ ID NO: 83893 - DNA, 80 bp, synthetic construct; identical to SEQ ID NO: 14959
  source 1..80: mol_type = other DNA

SEQ ID NO: 83894 - DNA, 80 bp, synthetic construct
  source 1..80: mol_type = other DNA
atgtcggtagattccgtgatgccccacaagccgtgaaaccagcaattttttattagtgattttcaaaaggggagggagtg

SEQ ID NO: 83895 - DNA, 80 bp, synthetic construct
  source 1..80: mol_type = other DNA
gagacagggtttgagagcaaccagtctgaccaaaatttattaggcgggaatttccttgtcctaataagcctgggagcgct

SEQ ID NO: 83896 - DNA, 80 bp, synthetic construct
  source 1..80: mol_type = other DNA
ttgaaagaagagcaatatggctctgttccgcccggctcaccggcggtcagagtttaaggttctctctcttattccctgaa

SEQ ID NO: 83897 - DNA, 80 bp, synthetic construct
  source 1..80: mol_type = other DNA
ataggaaatcacaagggtattgattgaggaagtgataagtgtccatgaaatcttcacaatttgtgtttagagactgcagt

SEQ ID NO: 83898 - DNA, 80 bp, synthetic construct; identical to SEQ ID NO: 14960
  source 1..80: mol_type = other DNA

SEQ ID NO: 83899 - DNA, 80 bp, synthetic construct
  source 1..80: mol_type = other DNA
aagactcttccaagctgttgagactccctccaggcaggggaatgactatctgggtctgagattatgtcattaagttcttt

SEQ ID NO: 83900 - DNA, 80 bp, synthetic construct
  source 1..80: mol_type = other DNA
tgcctccacgcccagctaattattgtatttttagtagagacagggtttcacatcaggtctcgaactcctgacatcaggtg

SEQ ID NO: 83901 - DNA, 80 bp, synthetic construct
  source 1..80: mol_type = other DNA
tttaagtaagtttctatttgccacttcaggacacacctgcactgaactagacactgacttagaaacttggtttgatttgg

SEQ ID NO: 83902 - DNA, 80 bp, synthetic construct; identical to SEQ ID NO: 14961
  source 1..80: mol_type = other DNA

SEQ ID NO: 83903 - DNA, 80 bp, synthetic construct
  source 1..80: mol_type = other DNA
ttcctggtagaatggaggaaacaaagtcttgctcattatcactgctgctgtcattatgagtgctggaagaacaattgcta

SEQ ID NO: 83904 - DNA, 80 bp, synthetic construct
  source 1..80: mol_type = other DNA
atctggatgcctctcaccgtactggagttttgggaatttgtgcttcaaaaaactcagatgcttcataacaaaaattgctg

SEQ ID NO: 83905 - DNA, 80 bp, synthetic construct
  source 1..80: mol_type = other DNA
ctacatcgttgtagtgagcaggtgtaatgaacttccccttttagaagcatcttcttgtttcaaagtacttgtctgtttag

SEQ ID NO: 83906 - DNA, 80 bp, synthetic construct; identical to SEQ ID NO: 14962
  source 1..80: mol_type = other DNA

SEQ ID NO: 83907 - DNA, 80 bp, synthetic construct
  source 1..80: mol_type = other DNA
tgactgtaatacagttctgacagagttagcatgaaactccacaggtttaagggtgcagttcccaacgagactgcccttgc

SEQ ID NO: 83908 - DNA, 80 bp, synthetic construct
  source 1..80: mol_type = other DNA
gaacttgggaaagtggtatacttaagttacactttaattatgaagaatacagatcaggaccagccaaatgagatacaggg

SEQ ID NO: 83909 - DNA, 80 bp, synthetic construct
  source 1..80: mol_type = other DNA
atgctcaccaatgaggaagcctacctgagctatggtgtgtgtagattttatatgtaggtgtaatggaataattggccatg

SEQ ID NO: 83910 - DNA, 80 bp, synthetic construct; identical to SEQ ID NO: 14963
  source 1..80: mol_type = other DNA

SEQ ID NO: 83911 - DNA, 80 bp, synthetic construct
  source 1..80: mol_type = other DNA
aggagtagcctagctggatgtggttctaatctttatgtttcacaaggttgcagtcaggaagtcagcaggggctacagtca

SEQ ID NO: 83912 - DNA, 80 bp, synthetic construct
  source 1..80: mol_type = other DNA
aaaaaaacaaggagaaagctgcagtgccttttaagacctagtcattactttattcgtttctttttttttttaaattaaat

SEQ ID NO: 83913 - DNA, 80 bp, synthetic construct; identical to SEQ ID NO: 14964
  source 1..80: mol_type = other DNA

SEQ ID NO: 83914 - DNA, 80 bp, synthetic construct
  source 1..80: mol_type = other DNA
ccttaatgtgataaagactttcattaaatttataattaatttaggaacagttgacataccttatattgaagctttctgta

SEQ ID NO: 83915 - DNA, 80 bp, synthetic construct
  source 1..80: mol_type = other DNA
agggcatctaaattggaaaggaggaagtcgaattgccacgatcatatatatatgtggaaaaccctaaaaacttcaccata

SEQ ID NO: 83916 - DNA, 80 bp, synthetic construct
  source 1..80: mol_type = other DNA
gaggtgaaagatctctacaaggaaaactataaaacactgatgaaggaaattgaagcgggcacaaaatatggaaagacatc

SEQ ID NO: 83917 - DNA, 80 bp, synthetic construct; identical to SEQ ID NO: 14965
  source 1..80: mol_type = other DNA

SEQ ID NO: 83918 - DNA, 80 bp, synthetic construct
  source 1..80: mol_type = other DNA
gatatacatatgcagagtgaaactgtacccctgtctttcaccatatacaaaaataaactcaaaatggattaaagacttaa

SEQ ID NO: 83919 - DNA, 80 bp, synthetic construct
  source 1..80: mol_type = other DNA
ttataggtgtgagccattagcgcccagctaaatactgtattttcagcccatgtttgcctgcaatatgaagagattgctat

SEQ ID NO: 83920 - DNA, 80 bp, synthetic construct
  source 1..80: mol_type = other DNA
gcgcctgtagtcccagctactcgggaggctgaggcaggagaatctcttgaacctgggaggcggaggttgcagtgagccaa

SEQ ID NO: 83921 - DNA, 80 bp, synthetic construct; identical to SEQ ID NO: 14966
  source 1..80: mol_type = other DNA

SEQ ID NO: 83922 - DNA, 80 bp, synthetic construct
  source 1..80: mol_type = other DNA
atgttcatcaacgagaatgagcaaatatgaccataagatatttataggataaaacactagataacaatgaaaatgaatta

SEQ ID NO: 83923 - DNA, 80 bp, synthetic construct
  source 1..80: mol_type = other DNA
ataaaaggcaagttgatgtgtgtttaaactagaaatcccaggaaaaaatcagaaaggtacctgggcttaaagaaaaatgc

SEQ ID NO: 83924 - DNA, 80 bp, synthetic construct
  source 1..80: mol_type = other DNA
ctctactaaaaatacaaaaattggccaagtgtggtggcatgtgcctgtagtcccagctactcgggaggctgaggcaggag

SEQ ID NO: 83925 - DNA, 80 bp, synthetic construct; identical to SEQ ID NO: 14967
  source 1..80: mol_type = other DNA

SEQ ID NO: 83926 - DNA, 80 bp, synthetic construct
  source 1..80: mol_type = other DNA
ccatgttagccaggatggtctcaatctcctgaccttgtgatccgccatccttggcctcccaaagtgctgggattacaggc

SEQ ID NO: 83927 - DNA, 80 bp, synthetic construct
  source 1..80: mol_type = other DNA
gcatacagcaggaatctgtcatcttgagggagttctttcttaaacctatgggtttgtaagattttagttttctatgctgt

SEQ ID NO: 83928 - DNA, 80 bp, synthetic construct
  source 1..80: mol_type = other DNA
gtgtgttgtttatgtactgaaagattgcagttgaatttagatcatgctttgaagttccctttgtcagaccacattgtttg

SEQ ID NO: 83929 - DNA, 80 bp, synthetic construct
  source 1..80: mol_type = other DNA
aagcctttcttaagcccttttaatttatatctcaaacttgaggatatccatgaaaacagcggaaactttttcctcaccgg

SEQ ID NO: 83930 - DNA, 80 bp, synthetic construct; identical to SEQ ID NO: 14968
  source 1..80: mol_type = other DNA

SEQ ID NO: 83931 - DNA, 80 bp, synthetic construct
  source 1..80: mol_type = other DNA
gtgctaggcatggggatgggattacagttttaaatagggtgggcaggaagcctgtaaataagaaagggattttgagtaag

SEQ ID NO: 83932 - DNA, 80 bp, synthetic construct
  source 1..80: mol_type = other DNA
gtctgagtgagttggagcaccgttggagggatctgaatggggtgtgatgtggtttaacatgctttctcttaggatcactc

SEQ ID NO: 83933 - DNA, 80 bp, synthetic construct; identical to SEQ ID NO: 14969
  source 1..80: mol_type = other DNA

SEQ ID NO: 83934 - DNA, 80 bp, synthetic construct
  source 1..80: mol_type = other DNA
agattttagacctgggacttttaagattttacaccaagtaaagaggctgtcaacggaggtgggaaagacttaggatctag

SEQ ID NO: 83935 - DNA, 80 bp, synthetic construct
  source 1..80: mol_type = other DNA
acagtctcagctcactgcaacctctacctcccaggttcaagcagttctcctacctcggcctcaagtagctgggattacag

SEQ ID NO: 83936 - DNA, 80 bp, synthetic construct
  source 1..80: mol_type = other DNA
ctgtcttaaaaatagcacttatagcagcctgtgttttcttttcagatgttatcaagtatcttttctggtaagacatttat

SEQ ID NO: 83937 - DNA, 80 bp, synthetic construct
  source 1..80: mol_type = other DNA
ttaagagttccaaagtaattgaggcttcagacaaggttgcttgagtggctcatcgatgtctcccgggatctggcttcttt

SEQ ID NO: 83938 - DNA, 80 bp, synthetic construct; identical to SEQ ID NO: 14970
  source 1..80: mol_type = other DNA

SEQ ID NO: 83939 - DNA, 80 bp, synthetic construct
  source 1..80: mol_type = other DNA
agataatttttcttcttagagatttaatagtgttgccacttgaccagctggaactacaaaggaaccattagatagtaatg

SEQ ID NO: 83940 - DNA, 80 bp, synthetic construct
  source 1..80: mol_type = other DNA
ttcagtttgcaaatgggaccgaagagctccctgttcccctcatgacaccgacacgacaaaaaaaagttattccactaatt

SEQ ID NO: 83941 - DNA, 80 bp, synthetic construct
  source 1..80: mol_type = other DNA
ttgactcttcagctgcagttgtcctccaaggacaactccgaggccttgacttactcactgctgaaaaaggaggactctgt

SEQ ID NO: 83942 - DNA, 80 bp, synthetic construct; identical to SEQ ID NO: 14971
  source 1..80: mol_type = other DNA

SEQ ID NO: 83943 - DNA, 80 bp, synthetic construct
  source 1..80: mol_type = other DNA
ctctccataccaccccccaaaaattttcgccgccccaacacttcaacactattttgttttatttttcctattaatataag

SEQ ID NO: 83944 - DNA, 80 bp, synthetic construct
  source 1..80: mol_type = other DNA
aatggccggtccatgccttaactgatgacattccaccacaaaagaagtgaaaatggccagtccttgccttaactgatgat

SEQ ID NO: 83945 - DNA, 80 bp, synthetic construct
  source 1..80: mol_type = other DNA
cccccactctgcccgccagagaacaactcctctttgactgtaattttcctttatctacccaaatcctataaaacggcccc

SEQ ID NO: 83946 - DNA, 80 bp, synthetic construct; identical to SEQ ID NO: 14972
  source 1..80: mol_type = other DNA

SEQ ID NO: 83947 - DNA, 80 bp, synthetic construct
  source 1..80: mol_type = other DNA
agacattattccaaccaaaaagtcacctacatatttttagatcctcttaggagggggtggtaacccagccactgctgatg

SEQ ID NO: 83948 - DNA, 80 bp, synthetic construct
  source 1..80: mol_type = other DNA
aggcaactgacaggaacagcgaaccaaattgggaaaaagaaagtcccttctcccctcttccagctttctctagttcccca

SEQ ID NO: 83949 - DNA, 80 bp, synthetic construct; identical to SEQ ID NO: 14973
  source 1..80: mol_type = other DNA

SEQ ID NO: 83950 - DNA, 80 bp, synthetic construct
  source 1..80: mol_type = other DNA
gcctcagcctcctgagtagctgggtttgcaggtgcctgccaccacgcctggctaattttttgtatttttagtagagacag

SEQ ID NO: 83951 - DNA, 80 bp, synthetic construct
  source 1..80: mol_type = other DNA
ttcctgtttaacatatgtgctcatggtatacccgacaaaacactgcactttggattagaaaacctgggtgttagtttgtc

SEQ ID NO: 83952 - DNA, 80 bp, synthetic construct
  source 1..80: mol_type = other DNA
gctaagcaggtaccattaaataccaccacatatctgagtttctctgatttaatctgcacaaaatacctagatcatctgtt

SEQ ID NO: 83953 - DNA, 80 bp, synthetic construct
  source 1..80: mol_type = other DNA
cattaggtgttttggatttgagttgctgaaccagtaagtatagatagtgcaaatattacaaatttaaaaatccaaaatcc

SEQ ID NO: 83954 - DNA, 80 bp, synthetic construct; identical to SEQ ID NO: 14974
  source 1..80: mol_type = other DNA

SEQ ID NO: 83955 - DNA, 80 bp, synthetic construct
  source 1..80: mol_type = other DNA
cctggaagcatttcttctgcatctaatgttgaggtcctggtgaagggtataaaacacacagcatcaactatatataatgc

SEQ ID NO: 83956 - DNA, 80 bp, synthetic construct
  source 1..80: mol_type = other DNA
attgagcatgggggaaaggtagagttggaaagtaatttcaggggtggcgatgaaattggtaacttcaaagtggtggagac

SEQ ID NO: 83957 - DNA, 80 bp, synthetic construct; identical to SEQ ID NO: 14975
  source 1..80: mol_type = other DNA

SEQ ID NO: 83958 - DNA, 80 bp, synthetic construct
  source 1..80: mol_type = other DNA
gggaaaagatgatattcttatgctaatccaggccctggataaggagcagagcagccatgcgaacaatggccttggagcca

SEQ ID NO: 83959 - DNA, 80 bp, synthetic construct
  source 1..80: mol_type = other DNA
agaaagtgaaaatcaacggtggggggcttaacaggaagaggaaggaatgactttactctgtagtctgttttttcaactga

SEQ ID NO: 83960 - DNA, 80 bp, synthetic construct
  source 1..80: mol_type = other DNA
ccagtctgtgtatatagcaaggggaagtaaatttatttagatgcccatttcgtctaactattcaatagcttttaaatggc

SEQ ID NO: 83961 - DNA, 80 bp, synthetic construct
  source 1..80: mol_type = other DNA
ttaagaatgattgtggccaggcacggtggctcacacctgtaatcccagcactttgagaggccgaggtggacagatcgcct

SEQ ID NO: 83962 - DNA, 80 bp, synthetic construct; identical to SEQ ID NO: 14976
  source 1..80: mol_type = other DNA

SEQ ID NO: 83963 - DNA, 80 bp, synthetic construct
  source 1..80: mol_type = other DNA
cagctactcgggatgctgaggcgggagaatcgcttgaaccctggaggcagaggttgcggtgagctgagatggcgccattg

SEQ ID NO: 83964 - DNA, 80 bp, synthetic construct
  source 1..80: mol_type = other DNA
tttactgagatgtaatattactaactcttttgagttagtaatatccccattttgtggtgaaggaaaccgagacctggata

SEQ ID NO: 83965 - DNA, 80 bp, synthetic construct; identical to SEQ ID NO: 14977
  source 1..80: mol_type = other DNA

SEQ ID NO: 83966 - DNA, 80 bp, synthetic construct
  source 1..80: mol_type = other DNA
attcccatttcaataactgttcatgccacagatgtgggaatcttctttgacgcctcactttcccttaccctacatttaat

SEQ ID NO: 83967 - DNA, 80 bp, synthetic construct
  source 1..80: mol_type = other DNA
tacaggtatgcaccaccatgcccagctaatttttttaagttttttgtacagatgaggtcttgcagtgtttcccaggctgg

SEQ ID NO: 83968 - DNA, 80 bp, synthetic construct
  source 1..80: mol_type = other DNA
atctgcacacggattctgccctaatcttaaccaccattgtcattctcctaaatttccacaatattctgcttactcatctg

SEQ ID NO: 83969 - DNA, 80 bp, synthetic construct; identical to SEQ ID NO: 14978
  source 1..80: mol_type = other DNA

SEQ ID NO: 83970 - DNA, 80 bp, synthetic construct
  source 1..80: mol_type = other DNA
cctggcacttttcttcctttgcacttatcatgagttatgattgtgtatcatttgtgttttcttgtttggtgtcttgagta

SEQ ID NO: 83971 - DNA, 80 bp, synthetic construct
  source 1..80: mol_type = other DNA
tagggaataaattaataattcaacggcaagaacactgtttccataggactccagcattggaagggataacgtagattatt

SEQ ID NO: 83972 - DNA, 80 bp, synthetic construct
  source 1..80: mol_type = other DNA
gtgcttgtggtcccagctactcaggaggctgaggtgggaggattgcctggagcccaggaggcagtgagctgaggttgtac

SEQ ID NO: 83973 - DNA, 80 bp, synthetic construct; identical to SEQ ID NO: 14979
  source 1..80: mol_type = other DNA

SEQ ID NO: 83974 - DNA, 80 bp, synthetic construct
  source 1..80: mol_type = other DNA
gctttttttgtctataaaaatttcttgcagattgaattgttatggatagcacctgttagtgacttcctttgccaggttgg

SEQ ID NO: 83975 - DNA, 80 bp, synthetic construct
  source 1..80: mol_type = other DNA
tcagacctccttgattttaattatgactctgccacttaacctgttgtgtgatctttgataagttccttaaagtctacttg

SEQ ID NO: 83976 - DNA, 80 bp, synthetic construct
  source 1..80: mol_type = other DNA
aatatgtgtttgctgttatctcatttggttctcaaaataactgtcagttaataaatatcattccagatttgtttgtttgt

SEQ ID NO: 83977 - DNA, 80 bp, synthetic construct; identical to SEQ ID NO: 14980
  source 1..80: mol_type = other DNA

SEQ ID NO: 83978 - DNA, 80 bp, synthetic construct
  source 1..80: mol_type = other DNA
tctcctgcccaagactgtgagttccttgcagcaggaacaaccatactcatatttgtatttctggtacctaacactgggtc

SEQ ID NO: 83979 - DNA, 80 bp, synthetic construct
  source 1..80: mol_type = other DNA
aaaaaaaaaaaaagatgttgttggtgaataagtgagtaaattaataagtgaaaatttggggaggggtggagacctagcaa

SEQ ID NO: 83980 - DNA, 80 bp, synthetic construct
  source 1..80: mol_type = other DNA
ggattggaaatacactggaaacttctcttgaattggaaacctggaacatatatccttagaatgacagttgaattatttca

SEQ ID NO: 83981 - DNA, 80 bp, synthetic construct; identical to SEQ ID NO: 14981
  source 1..80: mol_type = other DNA

SEQ ID NO: 83982 - DNA, 80 bp, synthetic construct
  source 1..80: mol_type = other DNA
aaagtagaatgatatatatcttgatactaattagccttttcccccgttatttatttaacaattttactttgaggcattta

SEQ ID NO: 83983 - DNA, 80 bp, synthetic construct; identical to SEQ ID NO: 14982
  source 1..80: mol_type = other DNA

SEQ ID NO: 83984 - DNA, 80 bp, synthetic construct
  source 1..80: mol_type = other DNA
tcatgatctgcccacctcagcctctcaaagtgctgggattacaggcgtgagtcactgcacccgaccttcttttttttttt

SEQ ID NO: 83985 - DNA, 80 bp, synthetic construct
  source 1..80: mol_type = other DNA
tgcctggctaatttttgtatttttagtagagatggggtttcaccatgctggccaggctggtcttgaactcctgacttcac

SEQ ID NO: 83986 - DNA, 80 bp, synthetic construct
  source 1..80: mol_type = other DNA
ctagcactttgggaggctgaggctggcggatcacctgaggtcaggagtttgagactagcccggccaagatggtgaaaccc

SEQ ID NO: 83987 - DNA, 80 bp, synthetic construct; identical to SEQ ID NO: 14983
  source 1..80: mol_type = other DNA

SEQ ID NO: 83988 - DNA, 80 bp, synthetic construct
  source 1..80: mol_type = other DNA
agaaaggactattgagattgtttaatatacttcccttgttgtacatatggctaatctgaggtcaggagaggttgcagcct

SEQ ID NO: 83989 - DNA, 80 bp, synthetic construct
  source 1..80: mol_type = other DNA
accttttaaatatttttgtctttcaggagtcgtaagaaagcagtgggagttgaagtcattgtcaagtgcttgcgatcttt

SEQ ID NO: 83990 - DNA, 80 bp, synthetic construct; identical to SEQ ID NO: 14984
  source 1..80: mol_type = other DNA

SEQ ID NO: 83991 - DNA, 80 bp, synthetic construct
  source 1..80: mol_type = other DNA
tgaaatctcagtctgagtctgtcttctccttcacaacataggcgtaatgatacacagcattaggtcttgtgaggattaaa

SEQ ID NO: 83992 - DNA, 80 bp, synthetic construct
  source 1..80: mol_type = other DNA
cacctgtaatcccagcgctttgggaggccgaggtgggcggatcatgaggtcaggagttcaagaccagcctgggcaacatg

SEQ ID NO: 83993 - DNA, 80 bp, synthetic construct
  source 1..80: mol_type = other DNA
gactcttgtccctgccccaaccaaaaaatttcattttattgttgttaaaagactttagaaagataactgacacttgtctg

SEQ ID NO: 83994 - DNA, 80 bp, synthetic construct; identical to SEQ ID NO: 14985
  source 1..80: mol_type = other DNA

SEQ ID NO: 83995 - DNA, 80 bp, synthetic construct
  source 1..80: mol_type = other DNA
tcctaatgttttgatcacagtgatctggattaatatctgctgttaagaagaaacatgattaacaccataaagcttttgat

SEQ ID NO: 83996 - DNA, 80 bp, synthetic construct
  source 1..80: mol_type = other DNA
tcacgcccagctaattttttgtatttttagtagagacggggtttcaccgtgttagccaggatggtctcgatctcctgacc

SEQ ID NO: 83997 - DNA, 80 bp, synthetic construct
  source 1..80: mol_type = other DNA
atatccttagtattaccatgctaagaatacagagccttcagcaaaagccacttttacttgtgaaacaccaaattatttag

SEQ ID NO: 83998 - DNA, 80 bp, synthetic construct; identical to SEQ ID NO: 14986
  source 1..80: mol_type = other DNA

SEQ ID NO: 83999 - DNA, 80 bp, synthetic construct
  source 1..80: mol_type = other DNA
atgtagaaaagttatttctgagagatcattaggaaggattgtagaatggtattaatggaaataacttctgactttagctc

SEQ ID NO: 84000 - DNA, 80 bp, synthetic construct
  source 1..80: mol_type = other DNA
taaagttacttaggtttgaacagaaaaatgagtcatctgatattaacagctgatagatacttagttcttattttttaaga

SEQ ID NO: 84001 - DNA, 80 bp, synthetic construct
  source 1..80: mol_type = other DNA
tacattcagttattgagtagtgtcaaggctgacatgtctgtaattttcttgacatttcccttgtggttcccaagtggtta

SEQ ID NO: 84002 - DNA, 80 bp, synthetic construct; identical to SEQ ID NO: 14987
  source 1..80: mol_type = other DNA

SEQ ID NO: 84003 - DNA, 80 bp, synthetic construct
  source 1..80: mol_type = other DNA
gtttgaacaataaagagcatgtagtaacacacaggaagtctgtatataaggggactgtagttggttatgtggctcatcaa

SEQ ID NO: 84004 - DNA, 80 bp, synthetic construct
  source 1..80: mol_type = other DNA
tttaattgataaatctttccccattcactcacttcctctccccaacagacttccttctaatcttagtggccaaaattcat

SEQ ID NO: 84005 - DNA, 80 bp, synthetic construct; identical to SEQ ID NO: 14988
  source 1..80: mol_type = other DNA

SEQ ID NO: 84006 - DNA, 80 bp, synthetic construct
  source 1..80: mol_type = other DNA
ggctaaaagcaattatcagtgcacagtatatccagtatccagtgataaagatgaagtgggataagtactatataaaactt

SEQ ID NO: 84007 - DNA, 80 bp, synthetic construct
  source 1..80: mol_type = other DNA
acatctgagctggaattagtggaggatgatctttgtggagactgaacagctttagcggcctgctttctgttagtatggag

SEQ ID NO: 84008 - DNA, 80 bp, synthetic construct
  source 1..80: mol_type = other DNA
gatctctttggtttcactccattaaacacagttaaatatcttgtcttgatgtgtgttctgagaatttctgacctagccac

SEQ ID NO: 84009 - DNA, 80 bp, synthetic construct
  source 1..80: mol_type = other DNA
atctttattgtctttctccgtcgaagactgtaagctttaatagatatgggactgtgttttgtttactcttctagtcaccc

SEQ ID NO: 84010 - DNA, 80 bp, synthetic construct; identical to SEQ ID NO: 14989
  source 1..80: mol_type = other DNA

SEQ ID NO: 84011 - DNA, 80 bp, synthetic construct
  source 1..80: mol_type = other DNA
acgtgtttgtaataacacttaagaaaaaaactagttagggctgagggctgtgacttacacctgtacatgccaacacttgg

SEQ ID NO: 84012 - DNA, 80 bp, synthetic construct
  source 1..80: mol_type = other DNA
tgcctgtattcctggctgaggtgggcgggagaatcacttgagcccgggagcttgaggctgcagtgaaccaatgatgacgc

SEQ ID NO: 84013 - DNA, 80 bp, synthetic construct
  source 1..80: mol_type = other DNA
gtgccacctgtatccaattagtaggtgagggaaagcatctcatagatgtattccaagtcataaaaaagagaaatgatagg

SEQ ID NO: 84014 - DNA, 80 bp, synthetic construct; identical to SEQ ID NO: 14990
  source 1..80: mol_type = other DNA

SEQ ID NO: 84015 - DNA, 80 bp, synthetic construct
  source 1..80: mol_type = other DNA
gagacaaccagcttatttggatcctgattcaaggaaactactaaagtaatttgtaatatttatgatacaattggaaatta

SEQ ID NO: 84016 - DNA, 80 bp, synthetic construct
  source 1..80: mol_type = other DNA
gataaatggacatatctggtattagcttcataattatatgaaagggggagggagtgaaacaagaagggccatgaattcat

SEQ ID NO: 84017 - DNA, 80 bp, synthetic construct
  source 1..80: mol_type = other DNA
ggtgaaaccctgtctctactaaaaatacgaaaattagccgggcatggtggcatgtgcctgtagtcacagctactcgggag

SEQ ID NO: 84018 - DNA, 80 bp, synthetic construct; identical to SEQ ID NO: 14991
  source 1..80: mol_type = other DNA

SEQ ID NO: 84019 - DNA, 80 bp, synthetic construct
  source 1..80: mol_type = other DNA
tattttaaaaactacttttaggaaaaaaaaaaaaaaagacccaacacggtggctcatgtcatgtctataatcccagcaca

SEQ ID NO: 84020 - DNA, 80 bp, synthetic construct
  source 1..80: mol_type = other DNA
gcttgaacctgggaggcggaggttgccgtgagctgtcatgccactgtactccagcctgggcaacaggagcgaaaacgcca

SEQ ID NO: 84021 - DNA, 80 bp, synthetic construct; identical to SEQ ID NO: 14992
  source 1..80: mol_type = other DNA

SEQ ID NO: 84022 - DNA, 80 bp, synthetic construct
  source 1..80: mol_type = other DNA
tgggcggatcatgaggtcaggagatagagaccatcctggctaacacggtgaaaccccgtctctactacaaatacaaaaaa

SEQ ID NO: 84023 - DNA, 80 bp, synthetic construct
  source 1..80: mol_type = other DNA
aaaaaaaaaagaccagcctggccaacatggtgaaacaccgtctctactaaaaatacaaaaattagccgggcgtggtggca

SEQ ID NO: 84024 - DNA, 80 bp, synthetic construct; identical to SEQ ID NO: 14993
  source 1..80: mol_type = other DNA

SEQ ID NO: 84025 - DNA, 80 bp, synthetic construct
  source 1..80: mol_type = other DNA
atttttgtatttttagtagggtttcgccatgttggccaggctggtttgaactcctgagctcaggtgatccacccacctcg

SEQ ID NO: 84026 - DNA, 80 bp, synthetic construct
  source 1..80: mol_type = other DNA
tcagcatgtttcccaggctggtcttgaactcctgagctcaagcatcctaccttcctggacctccgtaagtgctaggatta

SEQ ID NO: 84027 - DNA, 80 bp, synthetic construct
  source 1..80: mol_type = other DNA
cctttgtctcagcctcctgagtagctggattacaggctcacagcaccatgcccagctaatttgttgtatttttagtagag

SEQ ID NO: 84028 - DNA, 80 bp, synthetic construct; identical to SEQ ID NO: 14994
  source 1..80: mol_type = other DNA

SEQ ID NO: 84029 - DNA, 80 bp, synthetic construct
  source 1..80: mol_type = other DNA
gtgtcataaaataagcctaatcattcacatatcctatcagatgtgaaaagcccatttctatgctttctggccctgccgca

SEQ ID NO: 84030 - DNA, 80 bp, synthetic construct
  source 1..80: mol_type = other DNA
tccagcgcattgctgcattttgtgctgctcatgagtgaagaatggtgtttttgcatttttaagtgattgaagaaaaatca

SEQ ID NO: 84031 - DNA, 80 bp, synthetic construct; identical to SEQ ID NO: 14995
  source 1..80: mol_type = other DNA

SEQ ID NO: 84032 - DNA, 80 bp, synthetic construct
  source 1..80: mol_type = other DNA
ttctgctgatgtcttcctggtttctatttaattaatgatgcagactgttgttgcagaattcattaggctaccattgctga

SEQ ID NO: 84033 - DNA, 80 bp, synthetic construct
  source 1..80: mol_type = other DNA
ttagccaggaataaaaatctagtaaaatcattgatgccaaaaattgctgttgatgacaaggacctgtaaatgtgcctgtg

SEQ ID NO: 84034 - DNA, 80 bp, synthetic construct; identical to SEQ ID NO: 14996
  source 1..80: mol_type = other DNA

SEQ ID NO: 84035 - DNA, 80 bp, synthetic construct
  source 1..80: mol_type = other DNA
tgcattgtggagccattgattggttttatataggagtgacagatttgtgtttataaaatgtctctggctgctctgtggaa

SEQ ID NO: 84036 - DNA, 80 bp, synthetic construct
  source 1..80: mol_type = other DNA
ttgacatacattttggaggttgagccaaaagactttggtaagaccaggtttgaggcaaatcaagagttcatttaagacaa

SEQ ID NO: 84037 - DNA, 80 bp, synthetic construct; identical to SEQ ID NO: 14997
  source 1..80: mol_type = other DNA

SEQ ID NO: 84038 - DNA, 80 bp, synthetic construct
  source 1..80: mol_type = other DNA
ctgggattacaggcgccttgccaccacgcccagctaattttttaatatttttagtagagacggggtttcaccatgttgac

SEQ ID NO: 84039 - DNA, 80 bp, synthetic construct
  source 1..80: mol_type = other DNA
aagtttctcaaggccacatatgtggttttgatgccacatctttgcgtttctagcatttaataccttgcctgcacataata

SEQ ID NO: 84040 - DNA, 80 bp, synthetic construct
  source 1..80: mol_type = other DNA
gacccctactaagtattctgttgaatatttggcaataacataagctccagatacaactactgtaattgagttttttgtct

SEQ ID NO: 84041 - DNA, 80 bp, synthetic construct
  source 1..80: mol_type = other DNA
tataacctcttgatttgaattaggcaggaattattatccccattttctatagatagctgaggttcagagagtaacttatc

SEQ ID NO: 84042 - DNA, 80 bp, synthetic construct; identical to SEQ ID NO: 14998
  source 1..80: mol_type = other DNA

SEQ ID NO: 84043 - DNA, 80 bp, synthetic construct
  source 1..80: mol_type = other DNA
tgtttctaacataaaggaggtctttccgctttgtagcaatcagatccaacggaagccttgacattatattacggaattta

SEQ ID NO: 84044 - DNA, 80 bp, synthetic construct
  source 1..80: mol_type = other DNA
atcacttgaggtcaggagtttgagaccagcctggccaacatggtgaaaccctgtctctaccaacaaaatacaaaaaaatt

SEQ ID NO: 84045 - DNA, 80 bp, synthetic construct; identical to SEQ ID NO: 14999
  source 1..80: mol_type = other DNA

SEQ ID NO: 84046 - DNA, 80 bp, synthetic construct
  source 1..80: mol_type = other DNA
agaggctgaggtgggaggatcacttgagcctgggaggttgaggctgcagtgagctctgatcacatcactgtactccagcc

SEQ ID NO: 84047 - DNA, 80 bp, synthetic construct
  source 1..80: mol_type = other DNA
tcagtatggtaaatgtaaaatcaagtctgtgttgtgtcttgaaccacttatttaacattcataatgaaatacatatacac

SEQ ID NO: 84048 - DNA, 80 bp, synthetic construct
  source 1..80: mol_type = other DNA
aggctgctagactctagtgtaagaacatagttctatttctgtgagctaactgctgcccttctataaccttcagtttctgc

SEQ ID NO: 84049 - DNA, 80 bp, synthetic construct
  source 1..80: mol_type = other DNA
ggtcacaagttttgaaccaaagagttaaaagaagaatcataacttgtctctatttaatgattggaaactctcacagactt

SEQ ID NO: 84050 - DNA, 80 bp, synthetic construct; identical to SEQ ID NO: 15000
  source 1..80: mol_type = other DNA

SEQ ID NO: 84051 - DNA, 80 bp, synthetic construct
  source 1..80: mol_type = other DNA
atatagctgtcttcatgtaccccgcaatacctggtgcagtaattctgtgcataataatgtatgtctgtttgttgtatgaa

SEQ ID NO: 84052 - DNA, 80 bp, synthetic construct
  source 1..80: mol_type = other DNA
aaattccatatttgaatgcaggacagaatctggatagtatgcttcatggcactgggatgaaatcagactccgaccagaaa

SEQ ID NO: 84053 - DNA, 80 bp, synthetic construct; identical to SEQ ID NO: 15001
  source 1..80: mol_type = other DNA

SEQ ID NO: 84054 - DNA, 80 bp, synthetic construct
  source 1..80: mol_type = other DNA
gtttttaatgatcttttaatcttaaatttattgatgctcattttagaaaacttagaggttaccaaaaaagaaatcagaaa

SEQ ID NO: 84055 - DNA, 80 bp, synthetic construct
  source 1..80: mol_type = other DNA
gccacacctggcctcctacttcttaattagttgaaatattttgcagatatatataaatcatattgtgttaattaatttta

SEQ ID NO: 84056 - DNA, 80 bp, synthetic construct
  source 1..80: mol_type = other DNA
ccaaaaaaaattgcctgaacaactcaacctcatcagtcaattaattgtctccttgttatagaggcaataatgaatgtcat

SEQ ID NO: 84057 - DNA, 80 bp, synthetic construct; identical to SEQ ID NO: 15002
  source 1..80: mol_type = other DNA

SEQ ID NO: 84058 - DNA, 80 bp, synthetic construct
  source 1..80: mol_type = other DNA
aacagaattctgccccacacttaacattttctcctaacagaaaaccaagaattctgcaaaattcttctaagtagaagcag

SEQ ID NO: 84059 - DNA, 80 bp, synthetic construct
  source 1..80: mol_type = other DNA
ttattcaaaagtcctctccctgttttcccatcatattcagtaaaaggtgccttttagtccccttttttttggtcattaag

SEQ ID NO: 84060 - DNA, 80 bp, synthetic construct
  source 1..80: mol_type = other DNA
attagcaaagagaagtcacataactcctatgtggaggacttgtttaattgaaatccttttcttcttgacaaagggttgtc

SEQ ID NO: 84061 - DNA, 80 bp, synthetic construct
  source 1..80: mol_type = other DNA
actggccttttagatcttggctcagacataactttcatttgtcttaaaacctctggcgttgccaataaatcacgtgtgaa

SEQ ID NO: 84062 - DNA, 80 bp, synthetic construct
  source 1..80: mol_type = other DNA
gatgaccagggagaaaccacattagcttcagggtgtatgaaatatgaaggatctgattttcagtgcaaagtaagatataa

SEQ ID NO: 84063 - DNA, 80 bp, synthetic construct; identical to SEQ ID NO: 15003
  source 1..80: mol_type = other DNA

SEQ ID NO: 84064 - DNA, 80 bp, synthetic construct
  source 1..80: mol_type = other DNA
ctggtctcaaactcctgggctcaagcagtctgcccgcatcggcccgcaaagtgctgggattacaggtgtgagccactgtg

SEQ ID NO: 84065 - DNA, 80 bp, synthetic construct
  source 1..80: mol_type = other DNA
attcttttttctttttttaaattttaaccgtctttggctactgattacaattttcaatgagaaaaagtttctaaactttc

SEQ ID NO: 84066 - DNA, 80 bp, synthetic construct
  source 1..80: mol_type = other DNA
gtagattataaaatttactgagaagacttttaagatagtggcagtaacctttgtatcactctgagacaacttagaaatgt

SEQ ID NO: 84067 - DNA, 80 bp, synthetic construct; identical to SEQ ID NO: 15004
  source 1..80: mol_type = other DNA

SEQ ID NO: 84068 - DNA, 80 bp, synthetic construct
  source 1..80: mol_type = other DNA
acatggtgaaactccgtctctactaaaaatacaaaaaattagctggacgtggtggcgggtgcctgtcgtcccagctactc

SEQ ID NO: 84069 - DNA, 80 bp, synthetic construct
  source 1..80: mol_type = other DNA
gtttcaacctctcagctaatgtttggaatcacccttgttgcaaatgactgcaaatctatcttcctttctgactctttgga

SEQ ID NO: 84070 - DNA, 80 bp, synthetic construct; identical to SEQ ID NO: 15005
  source 1..80: mol_type = other DNA

SEQ ID NO: 84071 - DNA, 80 bp, synthetic construct
  source 1..80: mol_type = other DNA
tcattggtgctgttggtttcttcacacaaataagtagatgggaatggaatgaggttttcctatacagttgttacatactt

SEQ ID NO: 84072 - DNA, 80 bp, synthetic construct
  source 1..80: mol_type = other DNA
acaggcccctagtgtaggcctgtcctaagctgaattcaccattataagttagttgttaaacttgacaagctgttcaaatc

SEQ ID NO: 84073 - DNA, 80 bp, synthetic construct
  source 1..80: mol_type = other DNA
gtaagggcttaatagatgttagctttgaccatattgattctttaatagagcagtcttcatgctgttacccatatccctgg

SEQ ID NO: 84074 - DNA, 80 bp, synthetic construct; identical to SEQ ID NO: 15006
  source 1..80: mol_type = other DNA

SEQ ID NO: 84075 - DNA, 80 bp, synthetic construct
  source 1..80: mol_type = other DNA
ttatggcacttttagcatatgctttggaaggactttaaacaattatgggctgatcgtggtggcacggtggccccagcctg

SEQ ID NO: 84076 - DNA, 80 bp, synthetic construct
  source 1..80: mol_type = other DNA
gacaggagaattgcttgaacacaggaggtggaggttgcagtgagccaaaatcatgccattgcactccagcctaggcagca

SEQ ID NO: 84077 - DNA, 80 bp, synthetic construct
  source 1..80: mol_type = other DNA
ttttattcatgaattcgtgaactgatttgtttcaaaagtcccatccatatcattaagaaatgcctggccaggtgcagtgg

SEQ ID NO: 84078 - DNA, 80 bp, synthetic construct
  source 1..80: mol_type = other DNA
aggcaggtggatcacctgaggtcaggagtttcagactagcctggccaacatggtgaaaccccgtctctactagaaataca

SEQ ID NO: 84079 - DNA, 80 bp, synthetic construct; identical to SEQ ID NO: 15007
  source 1..80: mol_type = other DNA

SEQ ID NO: 84080 - DNA, 80 bp, synthetic construct
  source 1..80: mol_type = other DNA
gataaactagaataattttctaagacttaaagacatacagttataggaaataaaagaatttttatgtacttatctttgat

SEQ ID NO: 84081 - DNA, 80 bp, synthetic construct
  source 1..80: mol_type = other DNA
gcaatgctatttagattctactgaatgcattaaaaaatgatgtaacacttctatttcaaaatgaggtaacaattctatgt

SEQ ID NO: 84082 - DNA, 80 bp, synthetic construct; identical to SEQ ID NO: 15008
  source 1..80: mol_type = other DNA

SEQ ID NO: 84083 - DNA, 80 bp, synthetic construct
  source 1..80: mol_type = other DNA
cctataggacaaattatttttcagaaacctcactgccattccttgtaacttggcgtcagttccttcctcatatactgtct

SEQ ID NO: 84084 - DNA, 80 bp, synthetic construct
  source 1..80: mol_type = other DNA
aaggctgtgtcacccaaattcataatctcgacaaacccaatttttgcctacccagatacatagttaacctgagtaagaca

SEQ ID NO: 84085 - DNA, 80 bp, synthetic construct
  source 1..80: mol_type = other DNA
tcctggggattcagtatattctaccttgtttccccccaactactctatagagcagatttttttaaagacagggtattgct

SEQ ID NO: 84086 - DNA, 80 bp, synthetic construct; identical to SEQ ID NO: 15009
  source 1..80: mol_type = other DNA

SEQ ID NO: 84087 - DNA, 80 bp, synthetic construct
  source 1..80: mol_type = other DNA
caaactgtttgattccaaaacccttgtattttctgtaatactatgctccttaatctgttggcagagtctatttttggctt

SEQ ID NO: 84088 - DNA, 80 bp, synthetic construct
  source 1..80: mol_type = other DNA
attatctattgtagtttccaacactccatctttctaaagtctttaaattacacctgtctttcagccatctctcttacaag

SEQ ID NO: 84089 - DNA, 80 bp, synthetic construct; identical to SEQ ID NO: 15010
  source 1..80: mol_type = other DNA

SEQ ID NO: 84090 - DNA, 80 bp, synthetic construct
  source 1..80: mol_type = other DNA
catgtgttttctctgaatctgggattatttcagactctccagtttaaccctaacttttttctctctctccttatgatcat

SEQ ID NO: 84091 - DNA, 80 bp, synthetic construct
  source 1..80: mol_type = other DNA
ttttccttaatttccgcttacattcttgttacttgtgtagtgacaaacagttctttgctattcacatgttggtcagaatg

SEQ ID NO: 84092 - DNA, 80 bp, synthetic construct
  source 1..80: mol_type = other DNA
taatcagctctcaagaatgctttctgtagtttgtccttccctcaccatggatgctcaacttgcctctgcatcaggctcat

SEQ ID NO: 84093 - DNA, 80 bp, synthetic construct; identical to SEQ ID NO: 15011
  source 1..80: mol_type = other DNA

SEQ ID NO: 84094 - DNA, 80 bp, synthetic construct
  source 1..80: mol_type = other DNA
ccatttctaattttatcattactcttcttttaggattctccaaaagcccagctacgccggacaatagaatgttgtcggac

SEQ ID NO: 84095 - DNA, 80 bp, synthetic construct
  source 1..80: mol_type = other DNA
tttacattgtttacttttattgtcaggtccgttttttgatggcagcattcgatggctggttttgctcatttctatggctg

SEQ ID NO: 84096 - DNA, 80 bp, synthetic construct
  source 1..80: mol_type = other DNA
tttatgtaactagactatagttctcttaagggaaaaggaccttactaccaattaattaattgggcacaatttcatacttc

SEQ ID NO: 84097 - DNA, 80 bp, synthetic construct
  source 1..80: mol_type = other DNA
gcatgtagccatgatttcagaagacagttgccaaaaaagaagagtaataagagacagtccctaatggatataaactttaa

SEQ ID NO: 84098 - DNA, 80 bp, synthetic construct; identical to SEQ ID NO: 15012
  source 1..80: mol_type = other DNA

SEQ ID NO: 84099 - DNA, 80 bp, synthetic construct
  source 1..80: mol_type = other DNA
gggctgatctgtgtgacaaataggatatggcaaaagtgacttccaagtctacgttataaacagctttgcagctttcacca

SEQ ID NO: 84100 - DNA, 80 bp, synthetic construct
  source 1..80: mol_type = other DNA
atctgaccctgagctacccaatcaagtcactcctgaatgcatgatccacagaaacagtgagataacaattgctgttttaa

SEQ ID NO: 84101 - DNA, 80 bp, synthetic construct; identical to SEQ ID NO: 15013
  source 1..80: mol_type = other DNA

SEQ ID NO: 84102 - DNA, 80 bp, synthetic construct
  source 1..80: mol_type = other DNA
gcaagcaagtatgctcaatcggttattttaagctcaaagtccctttgtcaaataactgaatctttgccagtaagacaggt

SEQ ID NO: 84103 - DNA, 80 bp, synthetic construct
  source 1..80: mol_type = other DNA
tgatctcggctcactgcaatctctgcctcccaggttcaagcgatactcatgcctcagccttgcaagtaactgggattaca

SEQ ID NO: 84104 - DNA, 80 bp, synthetic construct
  source 1..80: mol_type = other DNA
ctaatgtgtatagtaaaatattgttgagtatgcttttatttttcttttaagaaaagaaccatctatatttttatttaaat

SEQ ID NO: 84105 - DNA, 80 bp, synthetic construct
  source 1..80: mol_type = other DNA
tttctttttttgtttttttttcatgctgcgttacctcagagctacctacacttttcactgtggtgtgtcttgagactgcc

SEQ ID NO: 84106 - DNA, 80 bp, synthetic construct; identical to SEQ ID NO: 15014
  source 1..80: mol_type = other DNA

SEQ ID NO: 84107 - DNA, 80 bp, synthetic construct
  source 1..80: mol_type = other DNA
agttcgaagagttgtgaggaagctaccaagcctagggaaagagcacctgaaatgattgagaaaacagtgtttggtgctca

SEQ ID NO: 84108 - DNA, 80 bp, synthetic construct
  source 1..80: mol_type = other DNA
tagactaaacatggctctggtctcaccctaaaagcaagccccaaacagatcacaccatttctaagtcactgtatcctaga

SEQ ID NO: 84109 - DNA, 80 bp, synthetic construct
  source 1..80: mol_type = other DNA
tccataatgagggaagaaatgaagcaatcaaaaccactgacccagaactgatatagaccttagaattagcaattacatta

SEQ ID NO: 84110 - DNA, 80 bp, synthetic construct; identical to SEQ ID NO: 15015
  source 1..80: mol_type = other DNA

SEQ ID NO: 84111 - DNA, 80 bp, synthetic construct
  source 1..80: mol_type = other DNA
cttgcttcagccttccgagtagctgggactacaggcacctgccaccatgcctaagtttttgtatttttagtagagacggg

SEQ ID NO: 84112 - DNA, 80 bp, synthetic construct
  source 1..80: mol_type = other DNA
tggtgcaatctcagctctctgcatactccacctgctgggttcaagcgattctcgtgcttcagcttcccaagtagctggga

SEQ ID NO: 84113 - DNA, 80 bp, synthetic construct
  source 1..80: mol_type = other DNA
gctttttcaaatttaatgaaaaccatgaatccagatatctgaaagctcagcaaaccctgagtataagaaacatgaagaaa

SEQ ID NO: 84114 - DNA, 80 bp, synthetic construct; identical to SEQ ID NO: 15016
  source 1..80: mol_type = other DNA

SEQ ID NO: 84115 - DNA, 80 bp, synthetic construct
  source 1..80: mol_type = other DNA
gaagttcttcgggtggaaagacaggccaggtgaagataagaatccacataaaagaatgaagatccggaaatggggatcta

SEQ ID NO: 84116 - DNA, 80 bp, synthetic construct
  source 1..80: mol_type = other DNA
caagtgagtgacctataacacttcacagaacatacaatcagacatcaggaactggtcatgtaggcttttttatagttcta

SEQ ID NO: 84117 - DNA, 80 bp, synthetic construct
  source 1..80: mol_type = other DNA
gttctccatagcaaaccgtaaaagaataaaattaaagttaaagagaggtctgtccgtcagcatattaaggtttgtctgtt

SEQ ID NO: 84118 - DNA, 80 bp, synthetic construct; identical to SEQ ID NO: 15017
  source 1..80: mol_type = other DNA

SEQ ID NO: 84119 - DNA, 80 bp, synthetic construct
  source 1..80: mol_type = other DNA
gcaagtattcgtttacttactcatgcatatttgccaaaagtctgcatttccattcaacaggaatctcattggtaacagag

SEQ ID NO: 84120 - DNA, 80 bp, synthetic construct
  source 1..80: mol_type = other DNA
gcccagaatttctgcttgggaaatagtatcacggatgcatttgtcagatgaaaagcctgcttctggctttataatggacc

SEQ ID NO: 84121 - DNA, 80 bp, synthetic construct
  source 1..80: mol_type = other DNA
gaagctgccaatcagcttttaaagtgattaaaaataagaaaaaatgccctatatgtacacatatttttatcactttcagc

SEQ ID NO: 84122 - DNA, 80 bp, synthetic construct; identical to SEQ ID NO: 15018
  source 1..80: mol_type = other DNA

SEQ ID NO: 84123 - DNA, 80 bp, synthetic construct
  source 1..80: mol_type = other DNA
taaacagctacaatacatttagaagcgtgtgtgtgtgtttcttttttggtatttactctgctttgggtttcactgagctt

SEQ ID NO: 84124 - DNA, 80 bp, synthetic construct
  source 1..80: mol_type = other DNA
catactggctaacatggtgaaactccgtctctaccaaaaatacaaaaaaagaaattagccaggcgtggtggcgggcgcct

SEQ ID NO: 84125 - DNA, 80 bp, synthetic construct
  source 1..80: mol_type = other DNA
aacactttgtccttttatctgtctcttctgtttttgagactccaattatacatattttagattatttggtgttgtgccac

SEQ ID NO: 84126 - DNA, 80 bp, synthetic construct; identical to SEQ ID NO: 15019
  source 1..80: mol_type = other DNA

SEQ ID NO: 84127 - DNA, 80 bp, synthetic construct
  source 1..80: mol_type = other DNA
ggatgttgtacatcatgttaagaatagcagagattgtcacaatgagatatcaacctcaccccaattaaaatggccattat

SEQ ID NO: 84128 - DNA, 80 bp, synthetic construct
  source 1..80: mol_type = other DNA
gtatatatccaaaaggaaatcagtatattgaaggcctgttcattcccctgtgtttaagcactattcataatggccaagat

SEQ ID NO: 84129 - DNA, 80 bp, synthetic construct
  source 1..80: mol_type = other DNA
ggttgatttcatagaggtggtaagtagaataacataccagaggttagaaaggagggagggaggttggatgaagatggatg

SEQ ID NO: 84130 - DNA, 80 bp, synthetic construct; identical to SEQ ID NO: 15020
  source 1..80: mol_type = other DNA

SEQ ID NO: 84131 - DNA, 80 bp, synthetic construct
  source 1..80: mol_type = other DNA
tgaggtgatggctatcccagttactctgatttgttcattttacatcgtatacatgcataagatatcacatgtacccccca

SEQ ID NO: 84132 - DNA, 80 bp, synthetic construct
  source 1..80: mol_type = other DNA
tagtacgagtcgatttgggttagggttttgttcagtgtttgggcctgtgccttcaatgcctcacaagtttcaaattcctt

SEQ ID NO: 84133 - DNA, 80 bp, synthetic construct
  source 1..80: mol_type = other DNA
atctgctgttgcgtgttattcacattagaggacagttggaaagtgaggggggcgtgcctgttgtccttaggtaggttctg

SEQ ID NO: 84134 - DNA, 80 bp, synthetic construct
  source 1..80: mol_type = other DNA
gtcagagcacagggagcatttcctctacatccccaagaggcagagggactttgctgcttctcctccctccaaagtaatgg

SEQ ID NO: 84135 - DNA, 80 bp, synthetic construct; identical to SEQ ID NO: 15021
  source 1..80: mol_type = other DNA

SEQ ID NO: 84136 - DNA, 80 bp, synthetic construct
  source 1..80: mol_type = other DNA
tggccaactagcggaaccttaactctactaaaaatacaaaaattagcctggtatggtggtgtgtgcctgcagtcccagct

SEQ ID NO: 84137 - DNA, 80 bp, synthetic construct
  source 1..80: mol_type = other DNA
caaaaagtcacaattctttattctaagaagtggaaactggataggaggaggagaggagacaaagtatggctttttcatta

SEQ ID NO: 84138 - DNA, 80 bp, synthetic construct; identical to SEQ ID NO: 15022
  source 1..80: mol_type = other DNA

SEQ ID NO: 84139 - DNA, 80 bp, synthetic construct
  source 1..80: mol_type = other DNA
ttaggagttcaagaccagcctggccaacatggtgaaaccccatctctactaaaaaaaaatacaaaaattagccaggtgtg

SEQ ID NO: 84140 - DNA, 80 bp, synthetic construct
  source 1..80: mol_type = other DNA
ataaagattaccaataggtgaatggttagcagctatacagtggaatactatctagccattaaagaaaaaggtgacacttt

SEQ ID NO: 84141 - DNA, 80 bp, synthetic construct
  source 1..80: mol_type = other DNA
ctcttctaaggaagtgaacttgatagcttagggatagagctgggaggaggatttttttttgccatatacccttttgtgtc

SEQ ID NO: 84142 - DNA, 80 bp, synthetic construct; identical to SEQ ID NO: 15023
  source 1..80: mol_type = other DNA

SEQ ID NO: 84143 - DNA, 80 bp, synthetic construct
  source 1..80: mol_type = other DNA
cctaggcaacatggtgaaacctcatctctatgaaaaatacaaaaattagccaggcgtagtggaacataccagtagtccca

SEQ ID NO: 84144 - DNA, 80 bp, synthetic construct
  source 1..80: mol_type = other DNA
gacattaggattggaaggttgtcttaagagacaaaagcatgtcaaaaagagtaaagatgaagtaatttgtctacactaaa

SEQ ID NO: 84145 - DNA, 80 bp, synthetic construct
  source 1..80: mol_type = other DNA
tcaatgaggagaagagttcagggaacacttcaattgaataatgtgcaataaacacaaatagattgatcaggcatagtgtc

SEQ ID NO: 84146 - DNA, 80 bp, synthetic construct
  source 1..80: mol_type = other DNA
tcaggaggctgaggtgggaggatcgcttgagcctgggtggcagaggttgcagtgaactgagatcgtaccactgcattcca

SEQ ID NO: 84147 - DNA, 80 bp, synthetic construct; identical to SEQ ID NO: 15024
  source 1..80: mol_type = other DNA

SEQ ID NO: 84148 - DNA, 80 bp, synthetic construct
  source 1..80: mol_type = other DNA
actaatttggataggattctttctgagggaaggataatggtatagagaacctcaaggtttttcttagggttttatagttt

SEQ ID NO: 84149 - DNA, 80 bp, synthetic construct
  source 1..80: mol_type = other DNA
agtgggtctggactacctttattggtaagttaaacgttcctatagacatgaatggtgtgttgatttagaatgtgtcctca

SEQ ID NO: 84150 - DNA, 80 bp, synthetic construct; identical to SEQ ID NO: 15025
  source 1..80: mol_type = other DNA

SEQ ID NO: 84151 - DNA, 80 bp, synthetic construct
  source 1..80: mol_type = other DNA
tgaaataaaaaagaagtttcaacagatattcttagagaggatgcttctctcaatatactactaccaaaacacatagttca

SEQ ID NO: 84152 - DNA, 80 bp, synthetic construct
  source 1..80: mol_type = other DNA
acactagatatccagataggtttaagtttttaattgtattagttgaaagaaactgatctcttcttattttattttatttt

SEQ ID NO: 84153 - DNA, 80 bp, synthetic construct
  source 1..80: mol_type = other DNA
ccaggctaatttttttttttttttttttttgagggatgaggtttctccatgttggccaggctggtctcaaactcctggcc

SEQ ID NO: 84154 - DNA, 80 bp, synthetic construct; identical to SEQ ID NO: 15026
  source 1..80: mol_type = other DNA

SEQ ID NO: 84155 - DNA, 80 bp, synthetic construct
  source 1..80: mol_type = other DNA
aagaaattaataaagccctaaataagtggagatgtttataaatctgaggactcagtattaagatttcagttttcctcaaa

SEQ ID NO: 84156 - DNA, 80 bp, synthetic construct
  source 1..80: mol_type = other DNA
gtagaagaacaaagaggaatcactacctgatttctggacttaccgtaaaactcaataatgatctcaatttggtactggca

SEQ ID NO: 84157 - DNA, 80 bp, synthetic construct
  source 1..80: mol_type = other DNA
aatccatttaccaagaagttaatctcagtccttacctcctcactctataccaaattaacttgaaatgtagcatagaccta

SEQ ID NO: 84158 - DNA, 80 bp, synthetic construct; identical to SEQ ID NO: 15027
  source 1..80: mol_type = other DNA

SEQ ID NO: 84159 - DNA, 80 bp, synthetic construct
  source 1..80: mol_type = other DNA
gatatacaaattaaacacagtaagatactactgcacatccactagtatagctaagactgataatattaagtggtgccaaa

SEQ ID NO: 84160 - DNA, 80 bp, synthetic construct
  source 1..80: mol_type = other DNA
ttgtccacaccagaggcctgaatgtgaatgtttatagcagttttatttataatagacataaactggaaacaaccccaaag

SEQ ID NO: 84161 - DNA, 80 bp, synthetic construct
  source 1..80: mol_type = other DNA
cacaaaagtgattctcctgcctcagcctcccaagtagctgggattaaggcatgcaccaccatgcccagctaatttttgta

SEQ ID NO: 84162 - DNA, 80 bp, synthetic construct; identical to SEQ ID NO: 15028
  source 1..80: mol_type = other DNA

SEQ ID NO: 84163 - DNA, 80 bp, synthetic construct
  source 1..80: mol_type = other DNA
tgcctgtaatcccagctgctcgggaggctgaggcaggaaattgttttaactggggaggcagaagttgcagtgagctgaga

SEQ ID NO: 84164 - DNA, 80 bp, synthetic construct
  source 1..80: mol_type = other DNA
gttctttttaatttagaatgatcactaatgcttctgaaaatgaaagataacaatccatgtacatcttttatttaacaaat

SEQ ID NO: 84165 - DNA, 80 bp, synthetic construct
  source 1..80: mol_type = other DNA
tagcactctaagtaaagggaactggatattcaaaaaaacccagcgacaggaataagcttgagtgaattctaaaagttgag

SEQ ID NO: 84166 - DNA, 80 bp, synthetic construct; identical to SEQ ID NO: 15029
  source 1..80: mol_type = other DNA

SEQ ID NO: 84167 - DNA, 80 bp, synthetic construct
  source 1..80: mol_type = other DNA
tgagtctgtggaccaagactacccacgactgtgtgcactgggagggtaattattatgaccatttttgcaaacagccagcc

SEQ ID NO: 84168 - DNA, 80 bp, synthetic construct
  source 1..80: mol_type = other DNA
gtcaacgtggctaaaccccatctctactaaaaatacaaaaaaattagctgggcatggtggcgggtgtctgtaatcccagc

SEQ ID NO: 84169 - DNA, 80 bp, synthetic construct
  source 1..80: mol_type = other DNA
caccatgctttttgatgagatggactacccctttgccagtcttaatgggtttctttcatcaagagctcaaaccttttact

SEQ ID NO: 84170 - DNA, 80 bp, synthetic construct
  source 1..80: mol_type = other DNA
acagaaatctaccaaactgtgctaatgcgccatgaaaacatacttggtgggtacacactgattcagtcaatttcattttt

SEQ ID NO: 84171 - DNA, 80 bp, synthetic construct; identical to SEQ ID NO: 15030
  source 1..80: mol_type = other DNA

SEQ ID NO: 84172 - DNA, 80 bp, synthetic construct
  source 1..80: mol_type = other DNA
atagataacttaagcagtgatttagggtaacattaacatatgtgccttttccctttcataagctcaacagcccaacatgc

SEQ ID NO: 84173 - DNA, 80 bp, synthetic construct
  source 1..80: mol_type = other DNA
agttttcttttcccttcacctcttgttttcctccctttaatttggagagcccatagcatgttgccaagcaggcaattgta

SEQ ID NO: 84174 - DNA, 80 bp, synthetic construct
  source 1..80: mol_type = other DNA
tggctactggttggtggccaggaatttttggtgttccttggcttagtatagacaacactctagtctccatttctgtcatc

SEQ ID NO: 84175 - DNA, 80 bp, synthetic construct; identical to SEQ ID NO: 15031
  source 1..80: mol_type = other DNA

SEQ ID NO: 84176 - DNA, 80 bp, synthetic construct
  source 1..80: mol_type = other DNA
gatgggcaaatgggagttggcttaattaggagctaactcttagttgaacattcttaattttataaaagtgtccacttttt

SEQ ID NO: 84177 - DNA, 80 bp, synthetic construct
  source 1..80: mol_type = other DNA
tggcgccatcttggctcactgcaacctctgccgccaggttcaagtgattctcttgcctcagcctccagagtagccgggac

SEQ ID NO: 84178 - DNA, 80 bp, synthetic construct
  source 1..80: mol_type = other DNA
tgatctttttcttaatcctattcactttcatgattattaagattattataaatttattgtagaagtacagatatatgtgt

SEQ ID NO: 84179 - DNA, 80 bp, synthetic construct; identical to SEQ ID NO: 15032
  source 1..80: mol_type = other DNA

SEQ ID NO: 84180 - DNA, 80 bp, synthetic construct
  source 1..80: mol_type = other DNA
aaggaaagcccgcaattgctcatcgagacctaaagagcaaaaacatcctcatcaagaaaaatgggagttgctgcattgct

SEQ ID NO: 84181 - DNA, 80 bp, synthetic construct
  source 1..80: mol_type = other DNA
tgtgcatatgcttgtttttagttacataaatgtatagttgggggggattttgttctttttacaaaaattgtgtcctactt

SEQ ID NO: 84182 - DNA, 80 bp, synthetic construct
  source 1..80: mol_type = other DNA
gggctcaagcaatcctcccacctcagcctcctgagtagctgggactacaggcatgcactgccacacctagctaatgtttt

SEQ ID NO: 84183 - DNA, 80 bp, synthetic construct
  source 1..80: mol_type = other DNA
agatgcagagttttccatatgtggaggtactgtagtttattcttaagacccaactgatgaacattaaaggtgtcttcagt

SEQ ID NO: 84184 - DNA, 80 bp, synthetic construct; identical to SEQ ID NO: 15033
  source 1..80: mol_type = other DNA

SEQ ID NO: 84185 - DNA, 80 bp, synthetic construct
  source 1..80: mol_type = other DNA
actgtaagagacatttaaatctgttacagtgttctgagtcagtgtagtatttgttggctcagatatttatcagatgctat

SEQ ID NO: 84186 - DNA, 80 bp, synthetic construct
  source 1..80: mol_type = other DNA
gtggtaaaagcaagcgattcctcttgtattttcatattcaccacttctcagacataattatctactactttatctttttt

SEQ ID NO: 84187 - DNA, 80 bp, synthetic construct; identical to SEQ ID NO: 15034
  source 1..80: mol_type = other DNA

SEQ ID NO: 84188 - DNA, 80 bp, synthetic construct
  source 1..80: mol_type = other DNA
tgtattgcccttatccagttgaggaggactatcggacttagtgttttgctgtagacacagtactgagtactgagttggat

SEQ ID NO: 84189 - DNA, 80 bp, synthetic construct
  source 1..80: mol_type = other DNA
ttggccctcaacttggaccttggctttcttttgtttcagtgacacaaatgaagttgatgtgcccttgaataccagggtgg

SEQ ID NO: 84190 - DNA, 80 bp, synthetic construct
  source 1..80: mol_type = other DNA
gttgtatcacaggaggtgggagtttgagtagtttctgattatgttgatttactcatcattttaaaaataacagctccagt

SEQ ID NO: 84191 - DNA, 80 bp, synthetic construct; identical to SEQ ID NO: 15035
  source 1..80: mol_type = other DNA

SEQ ID NO: 84192 - DNA, 80 bp, synthetic construct
  source 1..80: mol_type = other DNA
ttttctggctgaatgatactccattgtgtgtaggtgccacattttcttgatgtgttcatctgttgatggtcacttaggtt

SEQ ID NO: 84193 - DNA, 80 bp, synthetic construct
  source 1..80: mol_type = other DNA
acgtaatttagatgtcacatacgtcagagtccccaagaccacccccaggttgtgcgatttcacttgaaggaccacaggac

SEQ ID NO: 84194 - DNA, 80 bp, synthetic construct
  source 1..80: mol_type = other DNA
gtgtgcttcattcctcttactagttgtgacaacacatacaaagtgttctcattcgggaaagctccttagagacttggcac

SEQ ID NO: 84195 - DNA, 80 bp, synthetic construct
  source 1..80: mol_type = other DNA
gtgagttaccctcaccgtttccggtaagttttatatccatgtagggaactgtttaccatttgtgtacccgggcactggcc

SEQ ID NO: 84196 - DNA, 80 bp, synthetic construct; identical to SEQ ID NO: 15036
  source 1..80: mol_type = other DNA

SEQ ID NO: 84197 - DNA, 80 bp, synthetic construct
  source 1..80: mol_type = other DNA
ggtatatcttgtccagcaaccatttttgtgcccatgttttctcattcccttatagggatcgtggaagaataccaattgcc

SEQ ID NO: 84198 - DNA, 80 bp, synthetic construct
  source 1..80: mol_type = other DNA
gtcccctgaagaagtgattcgtaaatgccaccaaatatattctctgctcactgaacatctctttacttttcagtgtctac

SEQ ID NO: 84199 - DNA, 80 bp, synthetic construct
  source 1..80: mol_type = other DNA
gtttttacccatggcatgggtggaattagagtggaataaggatgttaacttggttctcagactctttcttcactacgtgt

SEQ ID NO: 84200 - DNA, 80 bp, synthetic construct; identical to SEQ ID NO: 15037
  source 1..80: mol_type = other DNA

SEQ ID NO: 84201 - DNA, 80 bp, synthetic construct
  source 1..80: mol_type = other DNA
gtgtctccatgcacatgcacgccgggattcctctgctgccatttgaattagaagaaaataatttatatgcatgcacagga

SEQ ID NO: 84202 - DNA, 80 bp, synthetic construct
  source 1..80: mol_type = other DNA
tctgtaaatttggactgttttccttcaaccaccattttttttgtggttattatttttgtcacggaaagcatcctctccaa

SEQ ID NO: 84203 - DNA, 80 bp, synthetic construct; identical to SEQ ID NO: 15038
  source 1..80: mol_type = other DNA

SEQ ID NO: 84204 - DNA, 80 bp, synthetic construct
  source 1..80: mol_type = other DNA
aatgaaaggattctctaattagaaatttatatgtcagagctgttataaatttatcaactgtcaaatatgttctggacagc

SEQ ID NO: 84205 - DNA, 80 bp, synthetic construct
  source 1..80: mol_type = other DNA
gtatctagtcagtatctgtagctacactgtataactgttcttcaataaaatggttcatattttatagatgccttgttatc

SEQ ID NO: 84206 - DNA, 80 bp, synthetic construct
  source 1..80: mol_type = other DNA
aatgggaggaaatcagcatatgtccacccattaccaaaatttgactatcatttaaggttaaaacttacaaatttgtctgc

SEQ ID NO: 84207 - DNA, 80 bp, synthetic construct; identical to SEQ ID NO: 15039
  source 1..80: mol_type = other DNA

SEQ ID NO: 84208 - DNA, 80 bp, synthetic construct
  source 1..80: mol_type = other DNA
cctcagcctcccgagtagctgggactacaggcgcccgccaccgcgcccggctaattttttgtatttttagtagagacggg

SEQ ID NO: 84209 - DNA, 80 bp, synthetic construct
  source 1..80: mol_type = other DNA
atatgagaccactattatggttttttaaaattaacttggtctagtaaaagtgatatcaagagttaatcttagaaacttgc

SEQ ID NO: 84210 - DNA, 80 bp, synthetic construct
  source 1..80: mol_type = other DNA
accagcctggccaacatggtgaaaccccatctctactaaaaataaaaaactcagccaggcgtggtggcgggtgcctgtaa

SEQ ID NO: 84211 - DNA, 80 bp, synthetic construct
  source 1..80: mol_type = other DNA
attaaacttagttcttgtctctcctttccactcttattcttaaatctgaagctcatcgactaagtgaaatatttaaagaa

SEQ ID NO: 84212 - DNA, 80 bp, synthetic construct; identical to SEQ ID NO: 15040
  source 1..80: mol_type = other DNA

SEQ ID NO: 84213 - DNA, 80 bp, synthetic construct
  source 1..80: mol_type = other DNA
tcacaaaagttattttaatcagtatttttacattgcctttccagtgtccagaagtgtttctaaacttagaaagtgaccta

SEQ ID NO: 84214 - DNA, 80 bp, synthetic construct
  source 1..80: mol_type = other DNA
atcatgcatctttgggttggcccaggatcaaatttgatattgaataatttattccagggcagctttcataaacatacttc

SEQ ID NO: 84215 - DNA, 80 bp, synthetic construct; identical to SEQ ID NO: 15041
  source 1..80: mol_type = other DNA

SEQ ID NO: 84216 - DNA, 80 bp, synthetic construct
  source 1..80: mol_type = other DNA
tattgtaattttagcttatgctctgtattctgttttctatggaattatttaagcccttttagtgacctttgtcctggccc

SEQ ID NO: 84217 - DNA, 80 bp, synthetic construct
  source 1..80: mol_type = other DNA
cacactaaatgtattttgtacagcatctggtttaaaaggtgccttaagagtttaccattacttgctttgttctatataca

SEQ ID NO: 84218 - DNA, 80 bp, synthetic construct
  source 1..80: mol_type = other DNA
gtaatgattaagttagtgtatatacatatgttcctgagatgtacacttcaactaccagaaacccagtatggagcacaggt

SEQ ID NO: 84219 - DNA, 80 bp, synthetic construct
  source 1..80: mol_type = other DNA
ggcacgatctcagctcactgcaacctttgcctcctgggttcaagcaattctcctgcctcagcctcccgaatagctggaac

SEQ ID NO: 84220 - DNA, 80 bp, synthetic construct; identical to SEQ ID NO: 15042
  source 1..80: mol_type = other DNA

SEQ ID NO: 84221 - DNA, 80 bp, synthetic construct
  source 1..80: mol_type = other DNA
tctcctgcctcagcctcccaagtagccgggattacaggtgtgcaccaccacgcccggctaatttttgtattttagtagag

SEQ ID NO: 84222 - DNA, 80 bp, synthetic construct
  source 1..80: mol_type = other DNA
tgccattaaatagccattgagaactttttttttaatgactgcacaatatttgactaagaagatggagtaatttctgtgct

SEQ ID NO: 84223 - DNA, 80 bp, synthetic construct; identical to SEQ ID NO: 15043
  source 1..80: mol_type = other DNA

SEQ ID NO: 84224 - DNA, 80 bp, synthetic construct
  source 1..80: mol_type = other DNA
agtgtgccttctgctgccttttcctagggaactgaacatgttaaatcacagacgcgatgtggcactgattattgttcctc

SEQ ID NO: 84225 - DNA, 80 bp, synthetic construct
  source 1..80: mol_type = other DNA
tcagtgatttctgggaactgcaaatgcttgccagctttccttctgtctgtggaaacactgaataaatgtattcatttctc

SEQ ID NO: 84226 - DNA, 80 bp, synthetic construct
  source 1..80: mol_type = other DNA
tttcacttggagaaacatttgctgatagtagtagcatattgaccatttctgacatgtcatccttatatcaagttaggtgc

SEQ ID NO: 84227 - DNA, 80 bp, synthetic construct; identical to SEQ ID NO: 15044
  source 1..80: mol_type = other DNA

SEQ ID NO: 84228 - DNA, 80 bp, synthetic construct
  source 1..80: mol_type = other DNA
acctgagaagttgggattacaggcgtgcaccaccacactcagctaattttgtatttttagtagagacggggtttaccatg

SEQ ID NO: 84229 - DNA, 80 bp, synthetic construct
  source 1..80: mol_type = other DNA
aatcttagcagcttcttggtctttgttcaaatgaaatctaagtcaattccatatctctcaatgtcgctacatccacctca

SEQ ID NO: 84230 - DNA, 80 bp, synthetic construct
  source 1..80: mol_type = other DNA
tgccaccatgcctggctcacattctaaacattatgcaggaagctcaaagtgaaaatcaatatggaatgtttatattgaaa

SEQ ID NO: 84231 - DNA, 80 bp, synthetic construct
  source 1..80: mol_type = other DNA
gtcccagctccttgggaagctgaggcaggagaatcacttgaacccaggaggcggaggttgcagtgagctgagatcgcacc

SEQ ID NO: 84232 - DNA, 80 bp, synthetic construct; identical to SEQ ID NO: 15045
  source 1..80: mol_type = other DNA

SEQ ID NO: 84233 - DNA, 80 bp, synthetic construct
  source 1..80: mol_type = other DNA
atactccatgatcttctagcatcccttgtcaccagtgagaagtctgatgtggatctaataagtgacatgttatacaggtt

SEQ ID NO: 84234 - DNA, 80 bp, synthetic construct
  source 1..80: mol_type = other DNA
ctttcttttccttttctctttctagaactttctagaacaaatctcaggtcccctagatgtttcttccataattgttacta

SEQ ID NO: 84235 - DNA, 80 bp, synthetic construct; identical to SEQ ID NO: 15046
  source 1..80: mol_type = other DNA

SEQ ID NO: 84236 - DNA, 80 bp, synthetic construct
  source 1..80: mol_type = other DNA
ccaacaataccataatctatagaccttactgaagttttgctaattgttattttggtgtggttgggttttttgtttgtttg

SEQ ID NO: 84237 - DNA, 80 bp, synthetic construct
  source 1..80: mol_type = other DNA
ttctcaaaaggattctggctttccctactgcattcatccacgtccactacccgctccaagagagctgagtaattgtcaag

SEQ ID NO: 84238 - DNA, 80 bp, synthetic construct
  source 1..80: mol_type = other DNA
ttgagctaaagacataacagggtgcagaggctgagaaaaggagagttctaagcaacatgtcacgagctatgtagcctctt

SEQ ID NO: 84239 - DNA, 80 bp, synthetic construct; identical to SEQ ID NO: 15047
  source 1..80: mol_type = other DNA

SEQ ID NO: 84240 - DNA, 80 bp, synthetic construct
  source 1..80: mol_type = other DNA
atcacctcaaagaaagcaacagcttccttcctggtgggatctgtcattttatagatatgaaatattcatgccagaggtct

SEQ ID NO: 84241 - DNA, 80 bp, synthetic construct
  source 1..80: mol_type = other DNA
tgtctttggaaaccggttcttgaaaatcttctgctgttttagaacacattctttagaaatctagcaaatatatctcagac

SEQ ID NO: 84242 - DNA, 80 bp, synthetic construct
  source 1..80: mol_type = other DNA
ctgggattacaggtgtccaccaccatgaccggctaatttctgtatttttagtagagatggggtttcaccatgttggccag

SEQ ID NO: 84243 - DNA, 80 bp, synthetic construct
  source 1..80: mol_type = other DNA
ctcagaatttcctccccaatgttccactccaacatttgagaactgcccaaggactattctgactttaagtcacataatcg

SEQ ID NO: 84244 - DNA, 80 bp, synthetic construct; identical to SEQ ID NO: 15048
  source 1..80: mol_type = other DNA

SEQ ID NO: 84245 - DNA, 80 bp, synthetic construct
  source 1..80: mol_type = other DNA
gaaaggccactttgtaagctcattcttggggtcctgtggctctgtacctgtggctggctgcagtcagtagtggctgtggg

SEQ ID NO: 84246 - DNA, 80 bp, synthetic construct
  source 1..80: mol_type = other DNA
aggctctaatcaatcgactccagggtcctggttgtatgagttcttaggattaatgaggtagaagctaatttttttttttt

SEQ ID NO: 84247 - DNA, 80 bp, synthetic construct
  source 1..80: mol_type = other DNA
tatttttagtagagacgggggtttcacaatgttggccaggctgctctggaactcctgacctcaggtgatccacccacctt

SEQ ID NO: 84248 - DNA, 80 bp, synthetic construct
  source 1..80: mol_type = other DNA
attctcctgcctcagcctcccaagtagcagggattacaggtgcctgccaccatgccaggctaattgttttttcttttttt

SEQ ID NO: 84249 - DNA, 80 bp, synthetic construct; identical to SEQ ID NO: 15049
  source 1..80: mol_type = other DNA

SEQ ID NO: 84250 - DNA, 80 bp, synthetic construct
  source 1..80: mol_type = other DNA
taggagtgactcctggtgacagtgaaagcccacagcctctggcaactgtattaacatgaacttcaatctgttaaaggaaa

SEQ ID NO: 84251 - DNA, 80 bp, synthetic construct
  source 1..80: mol_type = other DNA
cacatatgcctggtggagttttatggtgatcatctccaagtggtggaattactgggattattttattgtttttgtgtaaa

SEQ ID NO: 84252 - DNA, 80 bp, synthetic construct
  source 1..80: mol_type = other DNA
acacccagctactttttaaatttgttgtacagatgaagtctccttatgttgcccaggctggtctcgaacttctaggctcc

SEQ ID NO: 84253 - DNA, 80 bp, synthetic construct; identical to SEQ ID NO: 15050
  source 1..80: mol_type = other DNA

SEQ ID NO: 84254 - DNA, 80 bp, synthetic construct
  source 1..80: mol_type = other DNA
gtggacaccctggatccccaggaaggaaagagcattcaaagtgtcaaagtaggactactggaactgtcacttcatcattt

SEQ ID NO: 84255 - DNA, 80 bp, synthetic construct
  source 1..80: mol_type = other DNA
ctaatttttttgtatttttggtagagacagggttttgccatgttgcccaggctggtctcaaactcctgggctcaacttca

SEQ ID NO: 84256 - DNA, 80 bp, synthetic construct; identical to SEQ ID NO: 15051
  source 1..80: mol_type = other DNA

SEQ ID NO: 84257 - DNA, 80 bp, synthetic construct
  source 1..80: mol_type = other DNA
caggatggtctcgatctcttgacctcgtgatctgcccacctcagcctcccaaagtgctgggattacaggcgtgagccacc

SEQ ID NO: 84258 - DNA, 80 bp, synthetic construct
  source 1..80: mol_type = other DNA
caggcatgctccaccaggcctggctactttttgtttttttttttttagtacagatggggtttcaccatgttggccaggct

SEQ ID NO: 84259 - DNA, 80 bp, synthetic construct
  source 1..80: mol_type = other DNA
tgggaaaaagagttagagggaaaaagtcttccctcagtatatttaatatgtgcagttctcaaatccttacccatccctta

SEQ ID NO: 84260 - DNA, 80 bp, synthetic construct; identical to SEQ ID NO: 15052
  source 1..80: mol_type = other DNA

SEQ ID NO: 84261 - DNA, 80 bp, synthetic construct
  source 1..80: mol_type = other DNA
cactgatatgccatgtactctggttatcagtctccataaggccacttggtataaggtttgatagtctctcaaataaaatg

SEQ ID NO: 84262 - DNA, 80 bp, synthetic construct
  source 1..80: mol_type = other DNA
tgttggtaactgataatcacggccactgaaaataccatacttggtggtaattactgtaaatgtcaagagatgggaagata

SEQ ID NO: 84263 - DNA, 80 bp, synthetic construct
  source 1..80: mol_type = other DNA
tgtgtacctggaaaatcagaactgcccaatgggctctgttggctgtgttcttcaagacattcatgtatgttgctctttcc

SEQ ID NO: 84264 - DNA, 80 bp, synthetic construct
  source 1..80: mol_type = other DNA
ataaaaatccaattgataactaataaagaggatggaaacaaaattacattgcagccaggttttcttgctgtcactcatct

SEQ ID NO: 84265 - DNA, 80 bp, synthetic construct; identical to SEQ ID NO: 15053
  source 1..80: mol_type = other DNA

SEQ ID NO: 84266 - DNA, 80 bp, synthetic construct
  source 1..80: mol_type = other DNA
ctcagctatttgggaggctgaggcaggagaatcacttgaacccgggaggtggaggttgcagtgagccgagatcgcgccat

SEQ ID NO: 84267 - DNA, 80 bp, synthetic construct
  source 1..80: mol_type = other DNA
actcctccttgatttttacctatccaaagatattttctcactaacatgttggcactaacagcagctcaacgccatctgaa

SEQ ID NO: 84268 - DNA, 80 bp, synthetic construct; identical to SEQ ID NO: 15054
  source 1..80: mol_type = other DNA

SEQ ID NO: 84269 - DNA, 80 bp, synthetic construct
  source 1..80: mol_type = other DNA
gagagagggacaggggaatggagagaaggaaaatctagttataaaagaatattggcttttattcaaaaaacagactttca

SEQ ID NO: 84270 - DNA, 80 bp, synthetic construct
  source 1..80: mol_type = other DNA
tccagaacactactggatttcagaagatcttcttgaagtgcatatgtagttgacctgcactctacaggcattctttgtca

SEQ ID NO: 84271 - DNA, 80 bp, synthetic construct
  source 1..80: mol_type = other DNA
agaggcttggatggctagaaactcaaagttattggctgaagtttgatgtttatccagacttggtacctcaagtactcact

SEQ ID NO: 84272 - DNA, 80 bp, synthetic construct
  source 1..80: mol_type = other DNA
caagcgattctcctgccttagcctcctgagtagctgggattacaggcgcgcaccaccacgcccggctaatttttgtattt

SEQ ID NO: 84273 - DNA, 80 bp, synthetic construct; identical to SEQ ID NO: 15055
  source 1..80: mol_type = other DNA

SEQ ID NO: 84274 - DNA, 80 bp, synthetic construct
  source 1..80: mol_type = other DNA
caatgttctatatctatgctaataaggtagccatgagtcacatatagttattgagcactggagatgtggttagggtgaat

SEQ ID NO: 84275 - DNA, 80 bp, synthetic construct
  source 1..80: mol_type = other DNA
aatttaaatttaaacagtcccatgtggctggtggcaacagtgtgggacagtgcaaattctcataaacacactggcatagg

SEQ ID NO: 84276 - DNA, 80 bp, synthetic construct; identical to SEQ ID NO: 15056
  source 1..80: mol_type = other DNA

SEQ ID NO: 84277 - DNA, 80 bp, synthetic construct
  source 1..80: mol_type = other DNA
gagacgcagtcttgcactgtcgcctgggctggagtgcaatggtgccatctcggctcactgcaacctccacctcctgggtt

SEQ ID NO: 84278 - DNA, 80 bp, synthetic construct
  source 1..80: mol_type = other DNA
caaagacaagtctgtttgttttaagggacagcatccatctgtgccactctcactacctgtatgaataaaccgcaccccca

SEQ ID NO: 84279 - DNA, 80 bp, synthetic construct
  source 1..80: mol_type = other DNA
gtttcgggcttggcgtagtggctcacgcctgtaatcccagcactttgggaggctgaggcaggcggatcacgaggtcaaga

SEQ ID NO: 84280 - DNA, 80 bp, synthetic construct; identical to SEQ ID NO: 15057
  source 1..80: mol_type = other DNA

SEQ ID NO: 84281 - DNA, 80 bp, synthetic construct
  source 1..80: mol_type = other DNA
gctacttaggaggctgaggcaggagaatcacttgaaccctggaggcagagattgcggtgagccaagatcacgccattgta

SEQ ID NO: 84282 - DNA, 80 bp, synthetic construct
  source 1..80: mol_type = other DNA
tgctattctgcatggaggaaaaaatccaaagcactagaatttctttttaaagaggggaagaatctggtgctaatactgcc

SEQ ID NO: 84283 - DNA, 80 bp, synthetic construct
  source 1..80: mol_type = other DNA
caggcttcatttgtgatcatgtcccaaagcagttttccttaggaaattacctctactggttccctcttaagtttctataa

SEQ ID NO: 84284 - DNA, 80 bp, synthetic construct
  source 1..80: mol_type = other DNA
gaatacaagagtgtgctacgacacccaattaatttttaaatttttttgtagagacagggtcttactatgttgcccaggct

SEQ ID NO: 84285 - DNA, 80 bp, synthetic construct; identical to SEQ ID NO: 15058
  source 1..80: mol_type = other DNA

SEQ ID NO: 84286 - DNA, 80 bp, synthetic construct
  source 1..80: mol_type = other DNA
tgttctgaaatgcctggtagtgcacacttgaaaaaggaagaaaagcagactgggaacatagcacttagggagctgagaaa

SEQ ID NO: 84287 - DNA, 80 bp, synthetic construct
  source 1..80: mol_type = other DNA
cttgggtctcatctgcaaagttgttagaatgctccattttttttccctccgtgaagccttcaacaacttttcaagaaact

SEQ ID NO: 84288 - DNA, 80 bp, synthetic construct
  source 1..80: mol_type = other DNA
ctggccaacatggcaaaaccccatctctaataaaaatataaaaattaaggccgggtgcagtggctcatgcctgtaatccc

SEQ ID NO: 84289 - DNA, 80 bp, synthetic construct; identical to SEQ ID NO: 15059
  source 1..80: mol_type = other DNA

SEQ ID NO: 84290 - DNA, 80 bp, synthetic construct
  source 1..80: mol_type = other DNA
ggcccgaaaaataaattaacaaagaatttagacttggagctagacttcctgagttcaacttctagttccatcacttatta

SEQ ID NO: 84291 - DNA, 80 bp, synthetic construct
  source 1..80: mol_type = other DNA
tagctcatagagttgtcataaaattgttaattagttaaaacatggttgggcctttagagcagtcccagcataaagtgatc

SEQ ID NO: 84292 - DNA, 80 bp, synthetic construct
  source 1..80: mol_type = other DNA
ttccgagtagctggaactacaagtacatgccaccacgcctggctaatttttgtatattttttttggtagagatggggttt

SEQ ID NO: 84293 - DNA, 80 bp, synthetic construct; identical to SEQ ID NO: 15060
  source 1..80: mol_type = other DNA

SEQ ID NO: 84294 - DNA, 80 bp, synthetic construct
  source 1..80: mol_type = other DNA
gaaaagagcaaagtctttagattctcatctgcttaaagtcccagctcttccacttatcagctaagatctgaacccgagac

SEQ ID NO: 84295 - DNA, 80 bp, synthetic construct
  source 1..80: mol_type = other DNA
agcactgtgtatgtatgtaataagtcttacaaaatgaagcggcccatctctgcaaaggggagtggaatacagagtggtgg

SEQ ID NO: 84296 - DNA, 80 bp, synthetic construct; identical to SEQ ID NO: 15061
  source 1..80: mol_type = other DNA

SEQ ID NO: 84297 - DNA, 80 bp, synthetic construct
  source 1..80: mol_type = other DNA
gtggcaggcacctgtaatcccagctacttgggaggctgaggcaggagaatcttttgaatgcaggaggtggaggttgcagt

SEQ ID NO: 84298 - DNA, 80 bp, synthetic construct
  source 1..80: mol_type = other DNA
cacgaggtcaggagatcgagaccatcctggctaacacggtgaaaccccgtctctacttaaaatacaaaaaaattagccgg

SEQ ID NO: 84299 - DNA, 80 bp, synthetic construct
  source 1..80: mol_type = other DNA
acaaaaaaaccaaaaattagctgggcgtggtggcatgcacctgtagtcccagctactcgggaagctgaggcatgagaatt

SEQ ID NO: 84300 - DNA, 80 bp, synthetic construct; identical to SEQ ID NO: 15062
  source 1..80: mol_type = other DNA

SEQ ID NO: 84301 - DNA, 80 bp, synthetic construct
  source 1..80: mol_type = other DNA
aagaaagaaaaagaattgctgggcagagatttgaccaaaagcaagtaaaatcattctttttggtagaccaggtgaaatga

SEQ ID NO: 84302 - DNA, 80 bp, synthetic construct
  source 1..80: mol_type = other DNA
tcaaaacattcacttagcatttagattagactgctaatactgtgctgttataaaggtaactgaaaaattccctatctcct

SEQ ID NO: 84303 - DNA, 80 bp, synthetic construct
  source 1..80: mol_type = other DNA
aataaagaataatgagactggggagaaatttgaggaagaacgctcagaaacaattctgactgaaactcagattgtaggga

SEQ ID NO: 84304 - DNA, 80 bp, synthetic construct; identical to SEQ ID NO: 15063
  source 1..80: mol_type = other DNA

SEQ ID NO: 84305 - DNA, 80 bp, synthetic construct
  source 1..80: mol_type = other DNA
gtgcctgtaatcccagctactcgggaggctgaggcaggaaaatcacttgaaccgggaggcggaggttggagtgagctgag

SEQ ID NO: 84306 - DNA, 80 bp, synthetic construct
  source 1..80: mol_type = other DNA
cccatattccctaccatgccttcttcatctaatttaatattactaacaagatctattgttcaagccaaaacccaagtgtc

SEQ ID NO: 84307 - DNA, 80 bp, synthetic construct
  source 1..80: mol_type = other DNA
ataaaatctgaattccttaccaccaaatactatgtgatctggccctcatctatgaccttctcccattccttgtgtaatct

SEQ ID NO: 84308 - DNA, 80 bp, synthetic construct; identical to SEQ ID NO: 15064
  source 1..80: mol_type = other DNA

SEQ ID NO: 84309 - DNA, 80 bp, synthetic construct
  source 1..80: mol_type = other DNA
gtagagacagggtttctacctcagtgatctgtccgccttgacctcccaaagtgctgggattacaggaatgagccaccaca

SEQ ID NO: 84310 - DNA, 80 bp, synthetic construct
  source 1..80: mol_type = other DNA
cattattatttcttgagacaggagtcttgctctgtcgttcaggctggagtgcagtgatgcgatcttggctcactgtaact

SEQ ID NO: 84311 - DNA, 80 bp, synthetic construct
  source 1..80: mol_type = other DNA
gacctcaagtgatttgcctgccttggcttcccaaagtgctgggattataggcacgagccaccacacacgaccaacattgg

SEQ ID NO: 84312 - DNA, 80 bp, synthetic construct
  source 1..80: mol_type = other DNA
ctagtcgggtgtggtagcacgcgtgcctgtaataccagctactcaggaggccaaggcaggagaattgcttgaacccagga

SEQ ID NO: 84313 - DNA, 80 bp, synthetic construct; identical to SEQ ID NO: 15065
  source 1..80: mol_type = other DNA

SEQ ID NO: 84314 - DNA, 80 bp, synthetic construct
  source 1..80: mol_type = other DNA
acctgaatcctaccagggacttagttagtcttatttactgttgcattcctagtgcccagaacacagtaggctcccaataa

SEQ ID NO: 84315 - DNA, 80 bp, synthetic construct
  source 1..80: mol_type = other DNA
tcactgcaacctccgcctcccgggttcaagtgattctcctgcctcagcctccccagcagctaggattacaggcacatgcc

SEQ ID NO: 84316 - DNA, 80 bp, synthetic construct; identical to SEQ ID NO: 15066
  source 1..80: mol_type = other DNA

SEQ ID NO: 84317 - DNA, 80 bp, synthetic construct
  source 1..80: mol_type = other DNA
aagtgcaagagtgcaatggtatgatcatagctcactgcagccttgaactcctgggctcaagtgattcttctggcttagct

SEQ ID NO: 84318 - DNA, 80 bp, synthetic construct
  source 1..80: mol_type = other DNA
gtgagccactgcatctggactgcatattaatatgaagagcttttcttcaacaacagtgaacagttttctacaaaggtata

SEQ ID NO: 84319 - DNA, 80 bp, synthetic construct; identical to SEQ ID NO: 15067
  source 1..80: mol_type = other DNA

SEQ ID NO: 84320 - DNA, 80 bp, synthetic construct
  source 1..80: mol_type = other DNA
tcaagagattctcctgcctcagcctcctgagtagctggaactaaaggcgcatgccaccacgctgagtaattttttgtatt

SEQ ID NO: 84321 - DNA, 80 bp, synthetic construct
  source 1..80: mol_type = other DNA
ggttagagtgcaatgatgcgatctcagctcactgcaacccccgcctcccaggttcaagtgattctcctgcctcagcctcc

SEQ ID NO: 84322 - DNA, 80 bp, synthetic construct
  source 1..80: mol_type = other DNA
ccacagtgcaggcctgcataattcttgatgatcctcattatcatggaaaatttgtgcattgttaaggaaagtggtgcatt

SEQ ID NO: 84323 - DNA, 80 bp, synthetic construct
  source 1..80: mol_type = other DNA
taaagagatcatagaaaagacaggttacatacagcagaagaacgtgctcttttcacggagatagagaggtcagcgattca

SEQ ID NO: 84324 - DNA, 80 bp, synthetic construct; identical to SEQ ID NO: 15068
  source 1..80: mol_type = other DNA

SEQ ID NO: 84325 - DNA, 80 bp, synthetic construct
  source 1..80: mol_type = other DNA
gactcagcatcagcaaaaaccttaggtgttaaacgttaggtgtaaaaatgcaattctgaggtgttaaagggaggagggga

SEQ ID NO: 84326 - DNA, 80 bp, synthetic construct
  source 1..80: mol_type = other DNA
agaagctaaagagcctcagttttttacactcccaagatcaatctggatttatgattctaaaacccctggtgacagaatca

SEQ ID NO: 84327 - DNA, 80 bp, synthetic construct
  source 1..80: mol_type = other DNA
ttcaaggaattaggaattatccatgtcaatagttttgattaatgtggacggagaacatctatattactagatggcaatat

SEQ ID NO: 84328 - DNA, 80 bp, synthetic construct; identical to SEQ ID NO: 15069
  source 1..80: mol_type = other DNA

SEQ ID NO: 84329 - DNA, 80 bp, synthetic construct
  source 1..80: mol_type = other DNA
ttattacacttaaaaacttcagttcatttgtagttcaaagcaaatgtattggctttgagtttaaagactgaactacttta

SEQ ID NO: 84330 - DNA, 80 bp, synthetic construct
  source 1..80: mol_type = other DNA
tgcccgccaccatgcccggctaattttttgtatttttactagagatggggtttcaccgtgttagccaggatggtctcgat

SEQ ID NO: 84331 - DNA, 80 bp, synthetic construct
  source 1..80: mol_type = other DNA
ttgtaataacttgttctggcacctggctccaatgaacactaccctctgaccctgtggtataattttcatgagtaagtgga

SEQ ID NO: 84332 - DNA, 80 bp, synthetic construct
  source 1..80: mol_type = other DNA
ggtcgggagtccaagaccagcctgactgacatggaaaaaccctgtctctactaaaaatacaaaattaggtatggtggtgc

SEQ ID NO: 84333 - DNA, 80 bp, synthetic construct; identical to SEQ ID NO: 15070
  source 1..80: mol_type = other DNA

SEQ ID NO: 84334 - DNA, 80 bp, synthetic construct
  source 1..80: mol_type = other DNA
tccgggtaacggttcttcagatacttgaagacagtgtcttatttccttaaatcttctcatttcttcttcaaaagacagta

SEQ ID NO: 84335 - DNA, 80 bp, synthetic construct
  source 1..80: mol_type = other DNA
cacttgctccagagcctctgcttgtgttaatacggcccagtttcaaataagcatttttagcagccctgaaatgtgtactc

SEQ ID NO: 84336 - DNA, 80 bp, synthetic construct; identical to SEQ ID NO: 15071
  source 1..80: mol_type = other DNA

SEQ ID NO: 84337 - DNA, 80 bp, synthetic construct
  source 1..80: mol_type = other DNA
caagtagctgggattacaggtgcacaccaccacgcccagccaatttatgtatttttagtagagactgggttttaccatat

SEQ ID NO: 84338 - DNA, 80 bp, synthetic construct
  source 1..80: mol_type = other DNA
gctccacctcaccagtgtagtcccagcaggtagataggagttaatagttgactatctcagctcaccaccctccaaacctt

SEQ ID NO: 84339 - DNA, 80 bp, synthetic construct
  source 1..80: mol_type = other DNA
agcctcctgagtagctgggattacaggtgcctgccaccacgcccacctaatttttatatttttagtagagacggggtttc

SEQ ID NO: 84340 - DNA, 80 bp, synthetic construct; identical to SEQ ID NO: 15072
  source 1..80: mol_type = other DNA

SEQ ID NO: 84341 - DNA, 80 bp, synthetic construct
  source 1..80: mol_type = other DNA
cagctaatttttttattttttagtagagacggggtttcaccatgctggccaggatggtctcgatctcctaatctcgtgat

SEQ ID NO: 84342 - DNA, 80 bp, synthetic construct
  source 1..80: mol_type = other DNA
aaagtgatgtggtgttttctggcaaacttgtacacgagcatctgaaattaaatcaaatattccattatcatgagttacct

SEQ ID NO: 84343 - DNA, 80 bp, synthetic construct
  source 1..80: mol_type = other DNA
aaaaaaaaaaaaaaaaaatagaataccagttatcctagctttaagtctctgtttttctcagaaagggtacatttaaaaaa

SEQ ID NO: 84344 - DNA, 80 bp, synthetic construct
  source 1..80: mol_type = other DNA
ggcgtggtggcgggcacctgtagtctcagctactcaggaggctgaggcaggagaatggcgtgaacccaggaagcagagct

SEQ ID NO: 84345 - DNA, 80 bp, synthetic construct; identical to SEQ ID NO: 15073
  source 1..80: mol_type = other DNA

SEQ ID NO: 84346 - DNA, 80 bp, synthetic construct
  source 1..80: mol_type = other DNA
ttcgattccctaagatcgtttctttgcatagtgacactctactgtactataaatttatcagcctacactttataagctga

SEQ ID NO: 84347 - DNA, 80 bp, synthetic construct
  source 1..80: mol_type = other DNA
cgatcaattctctcgtaagaaggcttagaaggggttcatgttcttccccaaagaaatttagagtcctctagctattatct

SEQ ID NO: 84348 - DNA, 80 bp, synthetic construct; identical to SEQ ID NO: 15074
  source 1..80: mol_type = other DNA

SEQ ID NO: 84349 - DNA, 80 bp, synthetic construct
  source 1..80: mol_type = other DNA
aattgctgaaatcccagccttgaaactgttcagttagaagagcaatgctgaactgctgaaaagatcatcttaatatgggc

SEQ ID NO: 84350 - DNA, 80 bp, synthetic construct
  source 1..80: mol_type = other DNA
agccacttgtagtctaatctgcagctcagaattgcctttgccaagaaagattagaccattttagccatctctaaaaagct

SEQ ID NO: 84351 - DNA, 80 bp, synthetic construct
  source 1..80: mol_type = other DNA
aattgctggtctggacatgggattatgagatgaaaacatttatagccatcactgtgcacttactcattgtatctaccagg

SEQ ID NO: 84352 - DNA, 80 bp, synthetic construct; identical to SEQ ID NO: 15075
  source 1..80: mol_type = other DNA

SEQ ID NO: 84353 - DNA, 80 bp, synthetic construct
  source 1..80: mol_type = other DNA
tcctgagtagctgggattataggcatgcgccaccacgcccggctaattgtgtatttttagtaaagatggggtttcttcat

SEQ ID NO: 84354 - DNA, 80 bp, synthetic construct
  source 1..80: mol_type = other DNA
tcaggatgtctgaaatccacaaatagcccaagcagaaacgaggttttactggtcttaatattttaatgggtatttttcca

SEQ ID NO: 84355 - DNA, 80 bp, synthetic construct
  source 1..80: mol_type = other DNA
cagtctgaatttagttaaatatgctggtaaattcacccatgtgagacaagggggagaaaaagatgccttctggggaataa

SEQ ID NO: 84356 - DNA, 80 bp, synthetic construct
  source 1..80: mol_type = other DNA
tcagaaattagtaatcgaaattaaattacacagaactgtgattgttttctagatttcttcctctaggttattaattgaca

SEQ ID NO: 84357 - DNA, 80 bp, synthetic construct; identical to SEQ ID NO: 15076
  source 1..80: mol_type = other DNA

SEQ ID NO: 84358 - DNA, 80 bp, synthetic construct
  source 1..80: mol_type = other DNA
cagattccaggtaaggggttccctctgaaaggaatgggagaagtttaatttacacaacgatgaatgttgaattacaaagt

SEQ ID NO: 84359 - DNA, 80 bp, synthetic construct
  source 1..80: mol_type = other DNA
caacaatgctagttttagaaatatatcctagggagataaaagatatatgcaaaggtttagtcataggaatagtataattt

SEQ ID NO: 84360 - DNA, 80 bp, synthetic construct; identical to SEQ ID NO: 15077
  source 1..80: mol_type = other DNA

SEQ ID NO: 84361 - DNA, 80 bp, synthetic construct
  source 1..80: mol_type = other DNA
gaggcagagcttgcagtgagctgagattgagccattgcattccagcctgggcaacagagcgagactccgtctcaaaaaaa

SEQ ID NO: 84362 - DNA, 80 bp, synthetic construct
  source 1..80: mol_type = other DNA
gtcaagaggtcgagaccagtctgaccaacatggagaaaccctgtctctactaaaaatacaaaaaattagccgggcgtggt

SEQ ID NO: 84363 - DNA, 80 bp, synthetic construct
  source 1..80: mol_type = other DNA
ttttttgagaagggtctcggtctgtcatccaggctgcagtgcagtggcacaaacatggctcacctgcagccttgacctcc

SEQ ID NO: 84364 - DNA, 80 bp, synthetic construct
  source 1..80: mol_type = other DNA
cccaggttcaagcgattctcctgcctcagcctcccgagtagctgggactacaggcataagccaccaagcctggctaattt

SEQ ID NO: 84365 - DNA, 80 bp, synthetic construct; identical to SEQ ID NO: 15078
  source 1..80: mol_type = other DNA

SEQ ID NO: 84366 - DNA, 80 bp, synthetic construct
  source 1..80: mol_type = other DNA
cagcctcggcaacataacaagacccgtgtctaaccccaccccaaattatcttttttattccctatattgtccaatttggg

SEQ ID NO: 84367 - DNA, 80 bp, synthetic construct
  source 1..80: mol_type = other DNA
taagcatagctaagtagaatgtatgagattcctaaaatgaccctaatgaacatggccaaataccacatttgatgccaaac

SEQ ID NO: 84368 - DNA, 80 bp, synthetic construct
  source 1..80: mol_type = other DNA
ggatttgactcattttctaataaaggactggcctaaaactttattctttggcctttggactcttgtctaacagttgaaat

SEQ ID NO: 84369 - DNA, 80 bp, synthetic construct; identical to SEQ ID NO: 15079
  source 1..80: mol_type = other DNA

SEQ ID NO: 84370 - DNA, 80 bp, synthetic construct
  source 1..80: mol_type = other DNA
cctgaaataatacatttagagtacaccaagactccctcatcctcaaaatcattagttaaaccattaattaaaatatagat

SEQ ID NO: 84371 - DNA, 80 bp, synthetic construct
  source 1..80: mol_type = other DNA
aaagtgtttgttccaatacagcagatgaaatattacctagatcttgccttggcaagtaagatgtttccgtcaaatcgtgt

SEQ ID NO: 84372 - DNA, 80 bp, synthetic construct; identical to SEQ ID NO: 15080
  source 1..80: mol_type = other DNA

SEQ ID NO: 84373 - DNA, 80 bp, synthetic construct
  source 1..80: mol_type = other DNA
tatgtcagggttgacatataacatggggttgggttggtctgaggcaccatatctcccagctgtttaaaagcaggtcagta

SEQ ID NO: 84374 - DNA, 80 bp, synthetic construct
  source 1..80: mol_type = other DNA
tgagtgacagagcaagactctgtcaagaaagaaaggaaaggaaagaaaggaaagaaaaggaaaggaaagaaagaaaagaa

SEQ ID NO: 84375 - DNA, 80 bp, synthetic construct
  source 1..80: mol_type = other DNA
agaaaggaggaaagaataaaagcaggtcagcaaatttttaccaaattactcactgccactcactctatacacaatattct

SEQ ID NO: 84376 - DNA, 80 bp, synthetic construct
  source 1..80: mol_type = other DNA
caaaagccagctataaaatattgttagaaaagcatacacacccagtaaatagttcctctgctcttccaagtgcttaggac

SEQ ID NO: 84377 - DNA, 80 bp, synthetic construct; identical to SEQ ID NO: 15081
  source 1..80: mol_type = other DNA

SEQ ID NO: 84378 - DNA, 80 bp, synthetic construct
  source 1..80: mol_type = other DNA
aaggaaaagaatagtactggactacatagtccagtactggactgctatacagccctgtgttaatagtggtgtaaatacac

SEQ ID NO: 84379 - DNA, 80 bp, synthetic construct
  source 1..80: mol_type = other DNA
cccagctactcaggaggctaaggtgggaggattgcttgagcctgaaaaacggaggatgcagtgagccatgactgcaccac

SEQ ID NO: 84380 - DNA, 80 bp, synthetic construct; identical to SEQ ID NO: 15082
  source 1..80: mol_type = other DNA

SEQ ID NO: 84381 - DNA, 80 bp, synthetic construct
  source 1..80: mol_type = other DNA
ataccacagcatctttacattgatgtttcttacctttccactcctggttctttatttttactggtagaactatctgcaga

SEQ ID NO: 84382 - DNA, 80 bp, synthetic construct
  source 1..80: mol_type = other DNA
tcaaaagcatcaatctatgatacacaaattggtttttaaacaagtatatcaggcagaattttataaacacaagcaatgca

SEQ ID NO: 84383 - DNA, 80 bp, synthetic construct
  source 1..80: mol_type = other DNA
caaatttttatctctgcagcaaaataaattatgcccaaatcccctcagacaataggaaagaaagagtaccggagagcaca

SEQ ID NO: 84384 - DNA, 80 bp, synthetic construct; identical to SEQ ID NO: 15083
  source 1..80: mol_type = other DNA

SEQ ID NO: 84385 - DNA, 80 bp, synthetic construct
  source 1..80: mol_type = other DNA
ccacctcctgggttcaagcgattctcctgcctcagccttcctagtagctgacattacaggtgcctgccaccacgcccagc

SEQ ID NO: 84386 - DNA, 80 bp, synthetic construct
  source 1..80: mol_type = other DNA
tactcctccaaatgtatcactttgtgccactgccttctaggaagtggcttaaaggcagaagtacttatttatttattttt

SEQ ID NO: 84387 - DNA, 80 bp, synthetic construct
  source 1..80: mol_type = other DNA
ccaactaattttgtatttttagtagagatggggtttctccatgttggtcacgctggtctcgaactcccgacctcaggtga

SEQ ID NO: 84388 - DNA, 80 bp, synthetic construct
  source 1..80: mol_type = other DNA
aatacagtggcatgatctcggctcactgcaacctctgcctccaggttcaagcgattctcctgccttagcctcccaagaag

SEQ ID NO: 84389 - DNA, 80 bp, synthetic construct; identical to SEQ ID NO: 15084
  source 1..80: mol_type = other DNA

SEQ ID NO: 84390 - DNA, 80 bp, synthetic construct
  source 1..80: mol_type = other DNA
acaaaagattgtattaattaaactgtttttttaagacactgggtagcctggggggaaataatcattgatttcctgagtta

SEQ ID NO: 84391 - DNA, 80 bp, synthetic construct
  source 1..80: mol_type = other DNA
tcctccccacccccaatacagggtgataattgataaagggtaatgtgcaagttccaaggaaccatatcaaacggaattaa

SEQ ID NO: 84392 - DNA, 80 bp, synthetic construct
  source 1..80: mol_type = other DNA
catggtgaaaccctgtctctactaaaaatacaaaaattagctgggcgtggtggcgggtgcctgtaatcccagctacccag

SEQ ID NO: 84393 - DNA, 80 bp, synthetic construct; identical to SEQ ID NO: 15085
  source 1..80: mol_type = other DNA

SEQ ID NO: 84394 - DNA, 80 bp, synthetic construct
  source 1..80: mol_type = other DNA
acaacgtgacccagcatgctgttggcatcgctgtaaacaagttaagggcaagattcttgccaagagaattaatgtgcgta

SEQ ID NO: 84395 - DNA, 80 bp, synthetic construct
  source 1..80: mol_type = other DNA
ggagcctgagcagctggaacctattccctatgaattcatggcataataggtgttaaaaaaaaaaaaaaaagacctttgga

SEQ ID NO: 84396 - DNA, 80 bp, synthetic construct; identical to SEQ ID NO: 15086
  source 1..80: mol_type = other DNA

SEQ ID NO: 84397 - DNA, 80 bp, synthetic construct
  source 1..80: mol_type = other DNA
ccactgtgtgctaagcattgtacagggtattgtgaagaattaaggaagacactggaagacaacagatattaagaaataat

SEQ ID NO: 84398 - DNA, 80 bp, synthetic construct
  source 1..80: mol_type = other DNA
ccaaagtgctggggttacaggcgtgagccaccgtacccggcaacaatattctttttactagaagttctggccaggtgcca

SEQ ID NO: 84399 - DNA, 80 bp, synthetic construct
  source 1..80: mol_type = other DNA
gctacttgggaggctaaggcaggaggatcgcttgaggaggtcgagaggctgcagtgagctgtgattatgccactgccctc

SEQ ID NO: 84400 - DNA, 80 bp, synthetic construct
  source 1..80: mol_type = other DNA
atttgagtttcagttagactcacaccagatttagggagaaaaaggctcaaaacttatgttggtattaagttgtgatatcc

SEQ ID NO: 84401 - DNA, 80 bp, synthetic construct; identical to SEQ ID NO: 15087
  source 1..80: mol_type = other DNA

SEQ ID NO: 84402 - DNA, 80 bp, synthetic construct
  source 1..80: mol_type = other DNA
ttctgtataagtagcagacttgagttcctagaaagactccaagaaaggtcttaaagttcccagttggactgtggaacggg

SEQ ID NO: 84403 - DNA, 80 bp, synthetic construct
  source 1..80: mol_type = other DNA
ctagcatctcctatgtgtctgtttgtttgcccctatttaaaaatctgcctgatgtattgtctttccaattaaaaactcaa

SEQ ID NO: 84404 - DNA, 80 bp, synthetic construct
  source 1..80: mol_type = other DNA
aagcacttgactctattgcataattaggctttctgtgttgttcttttcttttccttttgaactaacaggagctctacatc

SEQ ID NO: 84405 - DNA, 80 bp, synthetic construct; identical to SEQ ID NO: 15088
  source 1..80: mol_type = other DNA

SEQ ID NO: 84406 - DNA, 80 bp, synthetic construct
  source 1..80: mol_type = other DNA
tgagcaaggatcataaaatgttggagctaggtccttactcttcagaaggagataaaggggaaggaaagaattttgcttaa

SEQ ID NO: 84407 - DNA, 80 bp, synthetic construct
  source 1..80: mol_type = other DNA
tgctggagctttatcaggttatgttgcatggtatccctctgcttcaaaaacgataaatggcaccaagaaaatgaaatact

SEQ ID NO: 84408 - DNA, 80 bp, synthetic construct; identical to SEQ ID NO: 15089
  source 1..80: mol_type = other DNA

SEQ ID NO: 84409 - DNA, 80 bp, synthetic construct
  source 1..80: mol_type = other DNA
ttagactgatgtaatgttgaaaaaagccctctatctatggcattttataaaaatacaacaaatataaaaatactatcagt

SEQ ID NO: 84410 - DNA, 80 bp, synthetic construct
  source 1..80: mol_type = other DNA
aagcgattctcccacctcagcctctcaagtagctggcattacaggtgcttgccaagacgcccggctaattttggtaattt

SEQ ID NO: 84411 - DNA, 80 bp, synthetic construct
  source 1..80: mol_type = other DNA
tcatgaatctatctgtttgctcagttaattagacaactatttactatctattaagcaccaggcgctgtcctagtactgag

SEQ ID NO: 84412 - DNA, 80 bp, synthetic construct; identical to SEQ ID NO: 15090
  source 1..80: mol_type = other DNA

SEQ ID NO: 84413 - DNA, 80 bp, synthetic construct
  source 1..80: mol_type = other DNA
ctgcctcagcctctcaagtagctgggattacaggcacctgttaccatgcccgactaatttttttttttttttttgagacg

SEQ ID NO: 84414 - DNA, 80 bp, synthetic construct
  source 1..80: mol_type = other DNA
agaaatggtgtttcaccgtgttagccaggatggtctggatctcctgaccacatgatcctcccgcctcggcctcccaaagt

SEQ ID NO: 84415 - DNA, 80 bp, synthetic construct
  source 1..80: mol_type = other DNA
tgtgcctggcttcaaaatatacatgtttaaaaatcacttttagaaggaacagcaatggttgccaaaaagtccagtggggg

SEQ ID NO: 84416 - DNA, 80 bp, synthetic construct
  source 1..80: mol_type = other DNA
aggaggtttttatgaccagaaaatgtattcctagcttcacaaaggtttctactgctactctaacactgctttgctgccaa

SEQ ID NO: 84417 - DNA, 80 bp, synthetic construct; identical to SEQ ID NO: 15091
  source 1..80: mol_type = other DNA

SEQ ID NO: 84418 - DNA, 80 bp, synthetic construct
  source 1..80: mol_type = other DNA
ctccttcaattagctctagccttctacttctactatgctgctctgatctctacttttaatacagctacattactgtagaa

SEQ ID NO: 84419 - DNA, 80 bp, synthetic construct
  source 1..80: mol_type = other DNA
gttccctaaaagccttgtttatcatgtctttttcttccataaagacccttagtgctccatcctggccatcacagtgaaac

SEQ ID NO: 84420 - DNA, 80 bp, synthetic construct; identical to SEQ ID NO: 15092
  source 1..80: mol_type = other DNA

SEQ ID NO: 84421 - DNA, 80 bp, synthetic construct
  source 1..80: mol_type = other DNA
gttgtgaaatatgagaagtaagggcaagtgggcagaatgtggctaattctaataagactcctgaaatgtgcagcagagca

SEQ ID NO: 84422 - DNA, 80 bp, synthetic construct
  source 1..80: mol_type = other DNA
tatttctaatgttcctactactacataataagcctaatccagatacaagctgaagtcttagcacaaatagtggctttatc

SEQ ID NO: 84423 - DNA, 80 bp, synthetic construct
  source 1..80: mol_type = other DNA
cacacacacacacagaagtccccaccaataatccatctcctatcgggaacagatgatctctcactacttgatttacattg

SEQ ID NO: 84424 - DNA, 80 bp, synthetic construct
  source 1..80: mol_type = other DNA
taggaggaagcttcccttaatcatatttgtctccctaatgcctagcagacagtaagcactcagcaagtgtttattaatga

SEQ ID NO: 84425 - DNA, 80 bp, synthetic construct; identical to SEQ ID NO: 15093
  source 1..80: mol_type = other DNA

SEQ ID NO: 84426 - DNA, 80 bp, synthetic construct
  source 1..80: mol_type = other DNA
ttagatgatgggtatattgacagagtcccaaacccacattcaaaaaggatcataggaattgcaaagagagaaaaggcctc

SEQ ID NO: 84427 - DNA, 80 bp, synthetic construct
  source 1..80: mol_type = other DNA
agaagataagccttctctaattgtagttctcatagcaatgcaagatttagattttaaaactggatatcacccagtgttgg

SEQ ID NO: 84428 - DNA, 80 bp, synthetic construct; identical to SEQ ID NO: 15094
  source 1..80: mol_type = other DNA

SEQ ID NO: 84429 - DNA, 80 bp, synthetic construct
  source 1..80: mol_type = other DNA
gagtttgagaccagcctggtcaacatggagaaaccctgtctctactaaaaatacaaagttagctgggcatggtggcacat

SEQ ID NO: 84430 - DNA, 80 bp, synthetic construct
  source 1..80: mol_type = other DNA
taatgatccagtaaaagctagattataatgcacagaattatctggatttcttgtttttgagacagggtctcaccatatca

SEQ ID NO: 84431 - DNA, 80 bp, synthetic construct
  source 1..80: mol_type = other DNA
ctaatttttttttttttcccagacaggggttgcccagaacagagtgcagtagcgtgatcacaactcactgcagccttgac

SEQ ID NO: 84432 - DNA, 80 bp, synthetic construct
  source 1..80: mol_type = other DNA
tgctaaccatttctggataacacaaattacaattaacttatcattttaatcattttaagtgtacagttcagtggcattat

SEQ ID NO: 84433 - DNA, 80 bp, synthetic construct; identical to SEQ ID NO: 15095
  source 1..80: mol_type = other DNA

SEQ ID NO: 84434 - DNA, 80 bp, synthetic construct
  source 1..80: mol_type = other DNA
ttctcaacttcatctaatctgacttcagaaagttcataaaaaaacatcattcacttactagcagctaaaagggtatttaa

SEQ ID NO: 84435 - DNA, 80 bp, synthetic construct
  source 1..80: mol_type = other DNA
tgtgtgtgtattctgcatagaaccctgtgctgggaatacaaagaaccaacctaattattagaagttgtcaatttagtggg

SEQ ID NO: 84436 - DNA, 80 bp, synthetic construct
  source 1..80: mol_type = other DNA
ttgaggtcaggagttcgagacgagcctggccaacatggtgaaaccctctctctactaaaaaaatacaaaaaaatgagctg

SEQ ID NO: 84437 - DNA, 80 bp, synthetic construct; identical to SEQ ID NO: 15096
  source 1..80: mol_type = other DNA

SEQ ID NO: 84438 - DNA, 80 bp, synthetic construct
  source 1..80: mol_type = other DNA
ttcactcttgttgcccaggctggagagcagcagcatgatctcagctcactgcaacctccgcctcctgggttcaagtgatt

SEQ ID NO: 84439 - DNA, 80 bp, synthetic construct
  source 1..80: mol_type = other DNA
tgggcaacatagtgagatgttgtctctagtaaaaacttaaaaattagctggaggtgttggtgggcgcctgtggtcccagc

SEQ ID NO: 84440 - DNA, 80 bp, synthetic construct
  source 1..80: mol_type = other DNA
aaaaaagaagaagagaaagaagtatccacaaaacagtgaaaggctagatggtctctattaggaagagaaccctatagtct

SEQ ID NO: 84441 - DNA, 80 bp, synthetic construct; identical to SEQ ID NO: 15097
  source 1..80: mol_type = other DNA

SEQ ID NO: 84442 - DNA, 80 bp, synthetic construct
  source 1..80: mol_type = other DNA
cagctaatttttgtatttttagtagatgtggggtttcaccatgttggccaggctggtctcaaacttctgacctgaggtga

SEQ ID NO: 84443 - DNA, 80 bp, synthetic construct
  source 1..80: mol_type = other DNA
gagttccatcaaggtgcttacagtctaatttaaggagacaatgaaccacaaacaattgtgccattaattcaaagagatga

SEQ ID NO: 84444 - DNA, 80 bp, synthetic construct; identical to SEQ ID NO: 15098
  source 1..80: mol_type = other DNA

SEQ ID NO: 84445 - DNA, 80 bp, synthetic construct
  source 1..80: mol_type = other DNA
cctagctgtgtgaaggacttttttctatgaaaagcaccttaggaggaacatgtttcaagtttaagaagcagttcctttaa

SEQ ID NO: 84446 - DNA, 80 bp, synthetic construct
  source 1..80: mol_type = other DNA
cttcatcatctgaaaccaattccttgtcactcagaccaactccctggctttcagactgatgcctcatttgtttggaagaa

SEQ ID NO: 84447 - DNA, 80 bp, synthetic construct
  source 1..80: mol_type = other DNA
tattcttcaatgataataaattctcctctgtgttcttagacagacactcggtagcaacggtgctatgcctagtagactga

SEQ ID NO: 84448 - DNA, 80 bp, synthetic construct
  source 1..80: mol_type = other DNA
gctctcctttctggacgcttttgctaaaaacagcagaactttccttaatgtcattttcagcaaaactagtatcttccttt

SEQ ID NO: 84449 - DNA, 80 bp, synthetic construct; identical to SEQ ID NO: 15099
  source 1..80: mol_type = other DNA

SEQ ID NO: 84450 - DNA, 80 bp, synthetic construct
  source 1..80: mol_type = other DNA
ttgtgctcactgtacttggaatgttctcatttcccatttctctttcaggtgacattgaatgttcctcaaagttttcctct

SEQ ID NO: 84451 - DNA, 80 bp, synthetic construct
  source 1..80: mol_type = other DNA
tactacatttggcattatcaactggcttatctttctgaccaaccacaggaaagcctgcagtgatattaactgtctgtaca

SEQ ID NO: 84452 - DNA, 80 bp, synthetic construct
  source 1..80: mol_type = other DNA
gctttgaaaccttgaatgtattctgcaaatactgagcatcaagttcactttcttccatttctatgcttgtttcccgactg

SEQ ID NO: 84453 - DNA, 80 bp, synthetic construct; identical to SEQ ID NO: 15100
  source 1..80: mol_type = other DNA

SEQ ID NO: 84454 - DNA, 80 bp, synthetic construct
  source 1..80: mol_type = other DNA
gtgcatttgttaacttcagctctgggaaagtatcgctgtcatgtcttttacttgtctgttcatttggcttgttactcttc

SEQ ID NO: 84455 - DNA, 80 bp, synthetic construct
  source 1..80: mol_type = other DNA
ctagttcaagcgcatgaatatgcctggtagaagacttcctcctcagcctattctttttaggtgcttttgaattgtggata

SEQ ID NO: 84456 - DNA, 80 bp, synthetic construct; identical to SEQ ID NO: 15101
  source 1..80: mol_type = other DNA

SEQ ID NO: 84457 - DNA, 80 bp, synthetic construct
  source 1..80: mol_type = other DNA
tcagttacatggcttaagttggggaggcttgccttcttccgataggttttcccaaatattttgtcttcaatattactctc

SEQ ID NO: 84458 - DNA, 80 bp, synthetic construct
  source 1..80: mol_type = other DNA
tgtgagtcatcagaacctaacagttcatcacttctggaaaaccactcattaactttctgaatgctgctatttagtgttat

SEQ ID NO: 84459 - DNA, 80 bp, synthetic construct
  source 1..80: mol_type = other DNA
ttatgttggctccttgctaagccaggctgtttgcttttattacagaattcagccttttctacattcattctgtctttagt

SEQ ID NO: 84460 - DNA, 80 bp, synthetic construct
  source 1..80: mol_type = other DNA
acgcttctcagtggtgttcaaatcattattactgggttgatgatgttcagtatttgttacatccgtctcagaaaattcac

SEQ ID NO: 84461 - DNA, 80 bp, synthetic construct; identical to SEQ ID NO: 15102
  source 1..80: mol_type = other DNA

SEQ ID NO: 84462 - DNA, 80 bp, synthetic construct
  source 1..80: mol_type = other DNA
aaaagcagattggccatcagaaaactggttctgatgtactctaaagattactggccattaagtctacttaatactctgtt

SEQ ID NO: 84463 - DNA, 80 bp, synthetic construct
  source 1..80: mol_type = other DNA
agtttgagaccagcctcggtaacatggtgaaaccccatctctataaaaccacaaaaaattaaccgggtgtggtggcatgc

SEQ ID NO: 84464 - DNA, 80 bp, synthetic construct
  source 1..80: mol_type = other DNA
cgaaagggcaacaatcagttacagaaggtcttattataggtacattagtctagtaccatttaaatctatcagaccatacc

SEQ ID NO: 84465 - DNA, 80 bp, synthetic construct; identical to SEQ ID NO: 15103
  source 1..80: mol_type = other DNA

SEQ ID NO: 84466 - DNA, 80 bp, synthetic construct
  source 1..80: mol_type = other DNA
tgctgggcacggtggctcaagcctgtaattccagcactttgggaggctgaggcgggtggaccacttgaggtcatgagttc

SEQ ID NO: 84467 - DNA, 80 bp, synthetic construct
  source 1..80: mol_type = other DNA
cctctgtactccagcctgggcaacagagcaagactctgtctcaaaaaaaaaaaaaaaaaagagagaaagaaagaaatgga

SEQ ID NO: 84468 - DNA, 80 bp, synthetic construct
  source 1..80: mol_type = other DNA
aaaaaaaaaaaaaaaacctgggtcaagcaataattcctaaggaaggtaggtaacatagttggggttgcttgtagtttatt

SEQ ID NO: 84469 - DNA, 80 bp, synthetic construct; identical to SEQ ID NO: 15104
  source 1..80: mol_type = other DNA

SEQ ID NO: 84470 - DNA, 80 bp, synthetic construct
  source 1..80: mol_type = other DNA
cagaaagaaagcaaacaaaaaactgtggggtatgcttagtacccggatgatgaaaaaaatctatacaccaaatcccaagt

SEQ ID NO: 84471 - DNA, 80 bp, synthetic construct
  source 1..80: mol_type = other DNA
ttcatagacaaaggttctctttgactcacctgcaataagttgccttattaacggtatcttcagaagaatcagatcctaaa

SEQ ID NO: 84472 - DNA, 80 bp, synthetic construct
  source 1..80: mol_type = other DNA
tacaatgctagttaagctagtatgtaatacagagaagtggttaaaggcatgggcttcgccaggcacagtggctctcacct

SEQ ID NO: 84473 - DNA, 80 bp, synthetic construct; identical to SEQ ID NO: 15105
  source 1..80: mol_type = other DNA

SEQ ID NO: 84474 - DNA, 80 bp, synthetic construct
  source 1..80: mol_type = other DNA
ttacaatgcctgttgtctaggaatttatgatcataaggggggaaaacagtaagtgttatgataaatagatggtggtgcct

SEQ ID NO: 84475 - DNA, 80 bp, synthetic construct
  source 1..80: mol_type = other DNA
attctaaaagaaaatccaatttgagagcccagtttgaattctgagctcagcagctcttttttttttttttttggaggtct

SEQ ID NO: 84476 - DNA, 80 bp, synthetic construct; identical to SEQ ID NO: 15106
  source 1..80: mol_type = other DNA

SEQ ID NO: 84477 - DNA, 80 bp, synthetic construct
  source 1..80: mol_type = other DNA
ttcaagcgattctcctgcctcagcctcccaagtagctgggattacaagcatgtgctaccacacccagctaattttttttt

SEQ ID NO: 84478 - DNA, 80 bp, synthetic construct
  source 1..80: mol_type = other DNA
acagggttcccctatgttggccaggctggtcttaaactcgtggactcaaccaatccttctgcctcggtcttccaaagcgt

SEQ ID NO: 84479 - DNA, 80 bp, synthetic construct
  source 1..80: mol_type = other DNA
agcctcctgagtagctgggattacaggcataagccaccaccccggctaatttttttttttttttttttagtagagatggg

SEQ ID NO: 84480 - DNA, 80 bp, synthetic construct; identical to SEQ ID NO: 15107
  source 1..80: mol_type = other DNA

SEQ ID NO: 84481 - DNA, 80 bp, synthetic construct
  source 1..80: mol_type = other DNA
attctcctgcctcagcctcccgagtagctgggattacagttatgtgccaccacacctggctaattttttattttttggta

SEQ ID NO: 84482 - DNA, 80 bp, synthetic construct
  source 1..80: mol_type = other DNA
gcgtcttttacattttttataactcaccatagggctcataaaattcacttcccaaagctgcctaccacaaatacaaatta

SEQ ID NO: 84483 - DNA, 80 bp, synthetic construct
  source 1..80: mol_type = other DNA
agttggacactgagactggtttcctgctaaacagtatggtaaagaacagtcaagcaattgttggccagttctgtgctttt

SEQ ID NO: 84484 - DNA, 80 bp, synthetic construct; identical to SEQ ID NO: 15108
  source 1..80: mol_type = other DNA

SEQ ID NO: 84485 - DNA, 80 bp, synthetic construct
  source 1..80: mol_type = other DNA
tttgaagctgatacttgatatacattccaatcacatctgataacttttttttttgttttggggggtgtacagagtcctgc

SEQ ID NO: 84486 - DNA, 80 bp, synthetic construct
  source 1..80: mol_type = other DNA
tacatatatatgtgtgtgtgtgtgtatatatatatataacatatatataacatatatatattatatatatataacatata

SEQ ID NO: 84487 - DNA, 80 bp, synthetic construct
  source 1..80: mol_type = other DNA
aggctagagtgcagtggcgtgatctcggcacactgcaacctccacctccctggttcagttgattctcctgcctcagcctc

SEQ ID NO: 84488 - DNA, 80 bp, synthetic construct; identical to SEQ ID NO: 15109
  source 1..80: mol_type = other DNA

SEQ ID NO: 84489 - DNA, 80 bp, synthetic construct
  source 1..80: mol_type = other DNA
ggcgtgatctcggttcactgcaacctctgtctcctgggttcaagtgatcctcccacctcagcctcccaaggagctgggac

SEQ ID NO: 84490 - DNA, 80 bp, synthetic construct
  source 1..80: mol_type = other DNA
agaacaattacttttttttcttttttgagacagagtctcactctacggcccaggctggagtgcagtggcgcgatcttggc

SEQ ID NO: 84491 - DNA, 80 bp, synthetic construct
  source 1..80: mol_type = other DNA
tacaggtgcaagctactacgcccagccccagaatgattactttttaagatctccatcattcatgcacatataagtaacaa

SEQ ID NO: 84492 - DNA, 80 bp, synthetic construct
  source 1..80: mol_type = other DNA
gcctcagcctcccaagtagctaggaccacaggtgcataccaccacgcccagctaagtttttttgttttttttttgagaca

SEQ ID NO: 84493 - DNA, 80 bp, synthetic construct; identical to SEQ ID NO: 15110
  source 1..80: mol_type = other DNA

SEQ ID NO: 84494 - DNA, 80 bp, synthetic construct
  source 1..80: mol_type = other DNA
caagtgattctccatcctcagcctctggagtagctgggattacaggcacgtgccaccacacccagctaatttttgtattt

SEQ ID NO: 84495 - DNA, 80 bp, synthetic construct
  source 1..80: mol_type = other DNA
agttctttttttttttgcaactagatcttgctttgccgcccacgctgaagtgcagtggagtgatcatagctcactgtagt

SEQ ID NO: 84496 - DNA, 80 bp, synthetic construct
  source 1..80: mol_type = other DNA
tcctcaagcctcctagtgctggaattacaggcgtgagccacggcacccagctacttttttttttttttaattgcagagac

SEQ ID NO: 84497 - DNA, 80 bp, synthetic construct; identical to SEQ ID NO: 15111
  source 1..80: mol_type = other DNA

SEQ ID NO: 84498 - DNA, 80 bp, synthetic construct
  source 1..80: mol_type = other DNA
cgtacccctgtagtcccaactactcaggaggctgaggcaggagaatcacttgaacctgggaggcggaggttgcagtgagc

SEQ ID NO: 84499 - DNA, 80 bp, synthetic construct
  source 1..80: mol_type = other DNA
ctggctgtaaggtctctctcttgattatatcaggtaccctgaccttctctgaactctaactgattagaacacttgtctaa

SEQ ID NO: 84500 - DNA, 80 bp, synthetic construct
  source 1..80: mol_type = other DNA
ccagcaatttggggagccgaggtgggtggatcacctgaggttaggagttcgagaccagcctggccaacatgatgaaaccc

SEQ ID NO: 84501 - DNA, 80 bp, synthetic construct; identical to SEQ ID NO: 15112
  source 1..80: mol_type = other DNA

SEQ ID NO: 84502 - DNA, 80 bp, synthetic construct
  source 1..80: mol_type = other DNA
agaaaccctatgtatgctctttgttgtgttaagacaatgcattaaggttacctgtgattttttttaaaaatcaaatttta

SEQ ID NO: 84503 - DNA, 80 bp, synthetic construct
  source 1..80: mol_type = other DNA
ttttctgtatcactaagaaagaaagcacacaaattaaacaaatgacacaccctcaatagtaaaatgttcccaatttcaga

SEQ ID NO: 84504 - DNA, 80 bp, synthetic construct; identical to SEQ ID NO: 15113
  source 1..80: mol_type = other DNA

SEQ ID NO: 84505 - DNA, 80 bp, synthetic construct
  source 1..80: mol_type = other DNA
tgcagcaacagtagaaaacctctataatcaatacatcattgacatctgtataaaccgtgtgatggcagtgatttagtaac

SEQ ID NO: 84506 - DNA, 80 bp, synthetic construct
  source 1..80: mol_type = other DNA
agtgccacaatcatagctcactgcagcctcagacttctgtactcaagctatcctcccactatagcctcccaagtagctag

SEQ ID NO: 84507 - DNA, 80 bp, synthetic construct
  source 1..80: mol_type = other DNA
cctgctgagcttactgttcttaacatctgaaccctgcccaatccctcacttagttctgcctctcaaggatttctgtcaaa

SEQ ID NO: 84508 - DNA, 80 bp, synthetic construct; identical to SEQ ID NO: 15114
  source 1..80: mol_type = other DNA

SEQ ID NO: 84509 - DNA, 80 bp, synthetic construct
  source 1..80: mol_type = other DNA
aaattggccgggcatggtagcgtgtgcctgtagtcccagctatttgggaggctaaggcaggaagaggctgggagacagag

SEQ ID NO: 84510 - DNA, 80 bp, synthetic construct
  source 1..80: mol_type = other DNA
agtctgcaagtttttacactagaagcattagagaaaggcagtaagtttctaatacctgtataaggcagatgtcccataaa

SEQ ID NO: 84511 - DNA, 80 bp, synthetic construct
  source 1..80: mol_type = other DNA
ccttttggttatatcattcttacataaaggacactgtgaaggccctttcttctggttgagaagtttcagcatgcaaaatc

SEQ ID NO: 84512 - DNA, 80 bp, synthetic construct; identical to SEQ ID NO: 15115
  source 1..80: mol_type = other DNA

SEQ ID NO: 84513 - DNA, 80 bp, synthetic construct
  source 1..80: mol_type = other DNA
tcaagaaagtgtggtaatagcataagaatagacacatacatcaataaaatggaattgacagtacagaaataaactcatac

SEQ ID NO: 84514 - DNA, 80 bp, synthetic construct
  source 1..80: mol_type = other DNA
ctgcctcagcctcccgagcagctgggactacaggcgcccagcaccatgcccggctaatttttttatttttagtagagacg

SEQ ID NO: 84515 - DNA, 80 bp, synthetic construct
  source 1..80: mol_type = other DNA
ctatcacccaggctggagggtagtgacacaatctcagctcactacaacctccacctcctaggctcaagcaattctcgtgc

SEQ ID NO: 84516 - DNA, 80 bp, synthetic construct; identical to SEQ ID NO: 15116
  source 1..80: mol_type = other DNA

SEQ ID NO: 84517 - DNA, 80 bp, synthetic construct
  source 1..80: mol_type = other DNA
tagatggaggggattcaatagaaaagcaaaataagatcctgcaaaataaaacataaaggacataatatactggtgaaggg

SEQ ID NO: 84518 - DNA, 80 bp, synthetic construct
  source 1..80: mol_type = other DNA
caagaccagcctggccaacatggtgaaaccctgtctctactaaatattcaaaaattagctgggtgtggtggtggtgcact

SEQ ID NO: 84519 - DNA, 80 bp, synthetic construct; identical to SEQ ID NO: 15117
  source 1..80: mol_type = other DNA

SEQ ID NO: 84520 - DNA, 80 bp, synthetic construct
  source 1..80: mol_type = other DNA
acacgcctgagtcccagctacttgggaggctgaggcatgagaatcactggaacccaggatggcagaggttgcaatgagct

SEQ ID NO: 84521 - DNA, 80 bp, synthetic construct
  source 1..80: mol_type = other DNA
aaaccctgtctctactaaaaatacaaaaattagccgggcatggtggcatatgcctgtaatcctggctactcaggaggctg

SEQ ID NO: 84522 - DNA, 80 bp, synthetic construct
  source 1..80: mol_type = other DNA
tacctatctatctgtctacagtcttgaactcccgacctcaagtgatcgcctgcttcagcctcccaaagtgctgggattac

SEQ ID NO: 84523 - DNA, 80 bp, synthetic construct; identical to SEQ ID NO: 15118
  source 1..80: mol_type = other DNA

SEQ ID NO: 84524 - DNA, 80 bp, synthetic construct
  source 1..80: mol_type = other DNA
ggagacttgggtccttcttcgccgatatagatgcttcaagtaccatattgcactcaacaaaacaatgactctatagtttg

SEQ ID NO: 84525 - DNA, 80 bp, synthetic construct
  source 1..80: mol_type = other DNA
caattcagagcaggggtagggaggaaattcccttatgatagtactgcagaatatagtacagtagagtgacaagctaagct

SEQ ID NO: 84526 - DNA, 80 bp, synthetic construct
  source 1..80: mol_type = other DNA
agctctgcctcctgggttcacgccattctcctgcctcagcctcctgagtagctgggactacaggtgcccgctaccacgcc

SEQ ID NO: 84527 - DNA, 80 bp, synthetic construct
  source 1..80: mol_type = other DNA
aaaaagaatacatgtataaaggttgttaactaaacttaaaagaaaatgaacttgtatatgacttgaaaagacagagctaa

SEQ ID NO: 84528 - DNA, 80 bp, synthetic construct; identical to SEQ ID NO: 15119
  source 1..80: mol_type = other DNA

SEQ ID NO: 84529 - DNA, 80 bp, synthetic construct
  source 1..80: mol_type = other DNA
ctgggtgcggtggctcatgcctataatcccaccattttgggaggtggaggtgggcggatcacttgaggtcagctcaagac

SEQ ID NO: 84530 - DNA, 80 bp, synthetic construct
  source 1..80: mol_type = other DNA
tactaaaaatacaaaaattagccatgcatggtggtgcacgcctgtaatcccagctacttgggaggctgaggcaggagaat

SEQ ID NO: 84531 - DNA, 80 bp, synthetic construct; identical to SEQ ID NO: 15120
  source 1..80: mol_type = other DNA

SEQ ID NO: 84532 - DNA, 80 bp, synthetic construct
  source 1..80: mol_type = other DNA
gaggctgaggcaggagatttgcttgaacccaggagatggaggtggcagtgagctgagatcatgccactgcactccagtct

SEQ ID NO: 84533 - DNA, 80 bp, synthetic construct
  source 1..80: mol_type = other DNA
actaaaaatacaaaaaaattagctgggcgtggtggcaggcgtctgtagtcccagctacttgggaggctgaggcaggagaa

SEQ ID NO: 84534 - DNA, 80 bp, synthetic construct; identical to SEQ ID NO: 15121
  source 1..80: mol_type = other DNA

SEQ ID NO: 84535 - DNA, 80 bp, synthetic construct
  source 1..80: mol_type = other DNA
gctagagtacagtggcacgatctcaactcactgcagcctctgcctcctgggttcaagaggttcctctgcctcagcctcct

SEQ ID NO: 84536 - DNA, 80 bp, synthetic construct
  source 1..80: mol_type = other DNA
cacacccggctttggacttttaattctaatataacattcaaaacacaatttaaaatatggctggcccatctctacaagaa

SEQ ID NO: 84537 - DNA, 80 bp, synthetic construct; identical to SEQ ID NO: 15122
  source 1..80: mol_type = other DNA

SEQ ID NO: 84538 - DNA, 80 bp, synthetic construct
  source 1..80: mol_type = other DNA
gcttgaaaccaagcttctcactcttctccagttgccaactctaatcctctcaatctcaacagctgttttttgttgttttt

SEQ ID NO: 84539 - DNA, 80 bp, synthetic construct
  source 1..80: mol_type = other DNA
gtatttttagtagagatggggtttctctatgttggtcaggctggtcttgagctcctgacctcaggtgatccacctgcctt

SEQ ID NO: 84540 - DNA, 80 bp, synthetic construct; identical to SEQ ID NO: 15123
  source 1..80: mol_type = other DNA

SEQ ID NO: 84541 - DNA, 80 bp, synthetic construct
  source 1..80: mol_type = other DNA
ctcccaggttcaagtgatacccctgccgcagcctaccaagtagctgggactacaggtacgtgccaccatgccaggctagt

SEQ ID NO: 84542 - DNA, 80 bp, synthetic construct
  source 1..80: mol_type = other DNA
ccgcgcccgtcctctattttcttttatttgtacatttgctcgtattattatctctgcctataagcctataatttccttct

SEQ ID NO: 84543 - DNA, 80 bp, synthetic construct
  source 1..80: mol_type = other DNA
gctgaagtcaggagtttgagagcagcctggccaacatggtgaaaaccctgtctcgactaaaaatacaaaaattagctggg

SEQ ID NO: 84544 - DNA, 80 bp, synthetic construct
  source 1..80: mol_type = other DNA
tctcactctgtcatctaggctggagtgcagtggtgtgatcatagctcactacagcttcgaactcctggccttaagtgatc

SEQ ID NO: 84545 - DNA, 80 bp, synthetic construct; identical to SEQ ID NO: 15124
  source 1..80: mol_type = other DNA

SEQ ID NO: 84546 - DNA, 80 bp, synthetic construct
  source 1..80: mol_type = other DNA
gaactctggaatttaaaaattcctcaaaggatacataagaaattgatcattgtggttgtctggggagggaacagggaggc

SEQ ID NO: 84547 - DNA, 80 bp, synthetic construct
  source 1..80: mol_type = other DNA
catagcttaacataaagaaaaggagaaagcccacttgttctactaaattacctactctactttttctgaaattcttttat

SEQ ID NO: 84548 - DNA, 80 bp, synthetic construct; identical to SEQ ID NO: 15125
  source 1..80: mol_type = other DNA

SEQ ID NO: 84549 - DNA, 80 bp, synthetic construct
  source 1..80: mol_type = other DNA
agttcgagaccagcctggccaatatggtgaaaccttatctctactaaaagtacaaaaattagccaagcatggtggcgggt

SEQ ID NO: 84550 - DNA, 80 bp, synthetic construct
  source 1..80: mol_type = other DNA
tttaccaggaactatgattacaaccaacttttgataactatatactctctgagaaagaatgaaatggagttggatttttc

SEQ ID NO: 84551 - DNA, 80 bp, synthetic construct
  source 1..80: mol_type = other DNA
taatggagccacataacacattcaaacttacttgcaaaatatgtggtcacactttgtggagacaggttccttgatcaact

SEQ ID NO: 84552 - DNA, 80 bp, synthetic construct; identical to SEQ ID NO: 15126
  source 1..80: mol_type = other DNA

SEQ ID NO: 84553 - DNA, 80 bp, synthetic construct
  source 1..80: mol_type = other DNA
tagttgataatagttcgtacgaattcatttccagtgatatatttttctgcactatcactgtgggtgcacatctcatcttt

SEQ ID NO: 84554 - DNA, 80 bp, synthetic construct
  source 1..80: mol_type = other DNA
caccctggtccaacaaccatcaactcatggccaagctgtttcacccatatccacccctaccccagattattttaattatt

SEQ ID NO: 84555 - DNA, 80 bp, synthetic construct
  source 1..80: mol_type = other DNA
tgagatggggttttgcttttgtagcccagactggcatgcaatggtgcgatctcggctcactgcaacctctgcctcccaag

SEQ ID NO: 84556 - DNA, 80 bp, synthetic construct; identical to SEQ ID NO: 15127
  source 1..80: mol_type = other DNA

SEQ ID NO: 84557 - DNA, 80 bp, synthetic construct
  source 1..80: mol_type = other DNA
ctttctggcaagaacactttacagatggtactgtgtactcttattagatcacttcagaagaggcatgatgtttggtttgt

SEQ ID NO: 84558 - DNA, 80 bp, synthetic construct
  source 1..80: mol_type = other DNA
aatatggtgaaaccctgtctacgctaaaaatacaaaaattagccgggcgtggtggcgcatgcctgtggtctcagctactt

SEQ ID NO: 84559 - DNA, 80 bp, synthetic construct
  source 1..80: mol_type = other DNA
acttgggaggccgaggcgggcggatcatgaggtcaggatttcgagaccagcctggccaacacagtgaaacgctgtctcta

SEQ ID NO: 84560 - DNA, 80 bp, synthetic construct
  source 1..80: mol_type = other DNA
tctcaaaataataataagcttaaaaataaaaacttcagaaaatacatcacccaagttcccatccctacctgtctatccac

SEQ ID NO: 84561 - DNA, 80 bp, synthetic construct; identical to SEQ ID NO: 15128
  source 1..80: mol_type = other DNA

SEQ ID NO: 84562 - DNA, 80 bp, synthetic construct
  source 1..80: mol_type = other DNA
tcaggaaaggtttcactgaggtgagactagaggatagcttaataatgtaaagaaacacactatgcaacaattaggggaag

SEQ ID NO: 84563 - DNA, 80 bp, synthetic construct
  source 1..80: mol_type = other DNA
aagactatcagagaggtagctggtaacttctggtaggaacctataggctattttaaatctttagctttattctggtcttt

SEQ ID NO: 84564 - DNA, 80 bp, synthetic construct
  source 1..80: mol_type = other DNA
ccttggcctcccaaagtactgggattacaggagtgagccaccatgccagccatctttttaatttttaatgttaattaatt

SEQ ID NO: 84565 - DNA, 80 bp, synthetic construct; identical to SEQ ID NO: 15129
  source 1..80: mol_type = other DNA

SEQ ID NO: 84566 - DNA, 80 bp, synthetic construct
  source 1..80: mol_type = other DNA
taaatgtgaatttttgaaacggattttttggataaagtccaggcaagatatcaaagaacgactaacctggcagtgtgaca

SEQ ID NO: 84567 - DNA, 80 bp, synthetic construct
  source 1..80: mol_type = other DNA
gatcacaagaaaagcttgtggacagtaaccttattgtgaagggttgtaatacaactcttgtaatcatggggtttttgaca

SEQ ID NO: 84568 - DNA, 80 bp, synthetic construct
  source 1..80: mol_type = other DNA
ctcttgccattcaccctgccagactccttgggctattgcaagaataaaattaaatgctacttgggaaaatgcttcacaac

SEQ ID NO: 84569 - DNA, 80 bp, synthetic construct; identical to SEQ ID NO: 15130
  source 1..80: mol_type = other DNA

SEQ ID NO: 84570 - DNA, 80 bp, synthetic construct
  source 1..80: mol_type = other DNA
aggtcctgatgagagtaaatgtttactataaaaatgattcaaatattttaaacacttttcaaaccaggcaatattttagg

SEQ ID NO: 84571 - DNA, 80 bp, synthetic construct
  source 1..80: mol_type = other DNA
taccaattgtcagaaatagctgccaatattgacttagaagacagcagaaggaattttagttcaagaaacctaaaacaggc

SEQ ID NO: 84572 - DNA, 80 bp, synthetic construct; identical to SEQ ID NO: 15131
  source 1..80: mol_type = other DNA

SEQ ID NO: 84573 - DNA, 80 bp, synthetic construct
  source 1..80: mol_type = other DNA
cttggggggccgaggcaggagaatggcgtgaacccgggaggcggagcttgcagtgagccgagatggcgccactgcactcc

SEQ ID NO: 84574 - DNA, 80 bp, synthetic construct
  source 1..80: mol_type = other DNA
tctctactaaaaatacaaaattagccggccacggtggcgtgcgcctataatcccagctactcaggaggctgaggcaggag

SEQ ID NO: 84575 - DNA, 80 bp, synthetic construct
  source 1..80: mol_type = other DNA
gaaggctgaggcgggtggatcacaaggtcaggagatcgagaccatcttggctaacatggtgaaaccccgtctctactaaa

SEQ ID NO: 84576 - DNA, 80 bp, synthetic construct; identical to SEQ ID NO: 15132
  source 1..80: mol_type = other DNA

SEQ ID NO: 84577 - DNA, 80 bp, synthetic construct
  source 1..80: mol_type = other DNA
ggaggttgtagtgagccgagattgtgccactgcactccagcctgggcaacaagagccaaagtctgtctcaaaaaaaaaaa

SEQ ID NO: 84578 - DNA, 80 bp, synthetic construct
  source 1..80: mol_type = other DNA
atgagaaagaacatcctatttttatgactctctcccatggaaatgaaacataaatgtatccaaatgccacactattgagg

SEQ ID NO: 84579 - DNA, 80 bp, synthetic construct
  source 1..80: mol_type = other DNA
ggcaagggagaggatggttatttataaatcttgtatcgctctgaaaacacaacatacattttccttaatctgattaactt

SEQ ID NO: 84580 - DNA, 80 bp, synthetic construct
  source 1..80: mol_type = other DNA
gtttattatttatttgacaaatgtttattgagtggcaactaggtcccaagtaccgttctaactactgaacatacagatgt

SEQ ID NO: 84581 - DNA, 80 bp, synthetic construct; identical to SEQ ID NO: 15133
  source 1..80: mol_type = other DNA

SEQ ID NO: 84582 - DNA, 80 bp, synthetic construct
  source 1..80: mol_type = other DNA
agtggcttatgcctgtaatcctagcactttgggaggcccaggcgggtggatcacaaggtcaggagatcaagactatcctg

SEQ ID NO: 84583 - DNA, 80 bp, synthetic construct
  source 1..80: mol_type = other DNA
ccactgcactccagcctgggcaacagagcaagactccatctcaaaaaaagaaaaaaaaatacaaaaattagctgggcatg

SEQ ID NO: 84584 - DNA, 80 bp, synthetic construct
  source 1..80: mol_type = other DNA
gtaaataagtatgtaatttcattgtatgtacagagccagtttcaaacaaaggttcttccaaatacctatcctctcaacga

SEQ ID NO: 84585 - DNA, 80 bp, synthetic construct
  source 1..80: mol_type = other DNA
acatgccactacgcccagctaatttttgtatttttagtggagagggggtttcaccatgttggccaggatggtctcgatct

SEQ ID NO: 84586 - DNA, 80 bp, synthetic construct; identical to SEQ ID NO: 15134
  source 1..80: mol_type = other DNA

SEQ ID NO: 84587 - DNA, 80 bp, synthetic construct
  source 1..80: mol_type = other DNA
atcataggaatcccaaattaatacactcttgtgctgacttaccagatgggacactctaagattttctgcatagcattaat

SEQ ID NO: 84588 - DNA, 80 bp, synthetic construct
  source 1..80: mol_type = other DNA
ggaaggttttagaataatacaaaccaaagaactaatgacaacgtcctttatttttaaagattctagaagttgctttttgt

SEQ ID NO: 84589 - DNA, 80 bp, synthetic construct; identical to SEQ ID NO: 15135
  source 1..80: mol_type = other DNA

SEQ ID NO: 84590 - DNA, 80 bp, synthetic construct
  source 1..80: mol_type = other DNA
tctcaatggcgcaaatggatccagttcttaagttctccctcccacaaaatcctgtctcctccccttcccagacatattcc

SEQ ID NO: 84591 - DNA, 80 bp, synthetic construct
  source 1..80: mol_type = other DNA
ctagcgattctcctgcctcagcctcctgagtagctggagcggcaccacgcccggctaatttttgtatttttagtagagac

SEQ ID NO: 84592 - DNA, 80 bp, synthetic construct
  source 1..80: mol_type = other DNA
ctcgcgacctacaaactgcccccctccccagggttcacaacgccttacgcctctcaggttccgcccctaccccccgtcaa

SEQ ID NO: 84593 - DNA, 80 bp, synthetic construct; identical to SEQ ID NO: 15136
  source 1..80: mol_type = other DNA

SEQ ID NO: 84594 - DNA, 80 bp, synthetic construct
  source 1..80: mol_type = other DNA
attggccacccagtctgcccccggatgacgtaaaaggaaagagacggaagaggaagaattctacctgagtttgccataaa

SEQ ID NO: 84595 - DNA, 80 bp, synthetic construct
  source 1..80: mol_type = other DNA
atataagtaataaggattgttgggggggtggagggaaataattatttccagcatgcgttgcggaatgaaaggtcttcgcc

SEQ ID NO: 84596 - DNA, 80 bp, synthetic construct
  source 1..80: mol_type = other DNA
gttatggactggagtgttatgttttcgtattttgaaagcagaaactaggccttaaaaagatacgtacaactctttaggga

SEQ ID NO: 84597 - DNA, 80 bp, synthetic construct; identical to SEQ ID NO: 15137
  source 1..80: mol_type = other DNA

SEQ ID NO: 84598 - DNA, 80 bp, synthetic construct
  source 1..80: mol_type = other DNA
aggaagcagcctgggttagctaggggtggggtcacgtcacactaagagggtttggagaagttcaagggaggaatcctgca

SEQ ID NO: 84599 - DNA, 80 bp, synthetic construct
  source 1..80: mol_type = other DNA
cgctcgctctcggcgcctcctcggccttggcgtccattctggccgtgctggaggagcccttcagcccgccactgcgctgt

SEQ ID NO: 84600 - DNA, 80 bp, synthetic construct
  source 1..80: mol_type = other DNA
ccccgggcagtcaggggcctagcacccgggccagcagctgcagagggtgcgccgggtcccccagcactgccggcccgcct

SEQ ID NO: 84601 - DNA, 80 bp, synthetic construct; identical to SEQ ID NO: 15138
  source 1..80: mol_type = other DNA

SEQ ID NO: 84602 - DNA, 80 bp, synthetic construct
  source 1..80: mol_type = other DNA
gctaaaggattgtaaatgcaccaatcagtgctctgtgtctagctcaaggtttgcaaatgcaccaatcagcactctgtgtc

SEQ ID NO: 84603 - DNA, 80 bp, synthetic construct
  source 1..80: mol_type = other DNA
tcaaaacggaccaattagctctctgtaaaatggaccaatcaacaggatgtgggtggggtcagataagggaataaaagcag

SEQ ID NO: 84604 - DNA, 80 bp, synthetic construct
  source 1..80: mol_type = other DNA
gtgcctgtaatcccctctactggggaggttgaggcaggagaatggcgtgaacccgggaggcggagcttgcagtgagccca

SEQ ID NO: 84605 - DNA, 80 bp, synthetic construct; identical to SEQ ID NO: 15139
  source 1..80: mol_type = other DNA

SEQ ID NO: 84606 - DNA, 80 bp, synthetic construct
  source 1..80: mol_type = other DNA
ggaggtaactctgaacacgtccgaacatcagaaggaacaaactctggacacatcatctttaagaactgtaccactcaccg

SEQ ID NO: 84607 - DNA, 80 bp, synthetic construct
  source 1..80: mol_type = other DNA
tcttgggaacatggagtgctaggaaacgataactggaagactaggatgaaatctgcaagttaaaaaatgacactacccat

SEQ ID NO: 84608 - DNA, 80 bp, synthetic construct
  source 1..80: mol_type = other DNA
aaagaccagcccaggctggtcttgaactcctgagctcaagcgatcctcctgccttggcctcccaaagtgctgggattaca

SEQ ID NO: 84609 - DNA, 80 bp, synthetic construct
  source 1..80: mol_type = other DNA
tgccaagacaaggtgagtcagtcacatggacttaacaataatgtcaattatgaaagctgaaggcctaggacccagctatc

SEQ ID NO: 84610 - DNA, 80 bp, synthetic construct; identical to SEQ ID NO: 15140
  source 1..80: mol_type = other DNA

SEQ ID NO: 84611 - DNA, 80 bp, synthetic construct
  source 1..80: mol_type = other DNA
gccattctcctgcctcagcctcccgagtagctgggactacaggcacccgccatcacgcccagctaattttttgtgttttt

SEQ ID NO: 84612 - DNA, 80 bp, synthetic construct
  source 1..80: mol_type = other DNA
ccgcttttggcagactgagtcagtcacttcattttcctgattttttgcctaaggtcctggtgaattgacaaagattctgc

SEQ ID NO: 84613 - DNA, 80 bp, synthetic construct
  source 1..80: mol_type = other DNA
agacttcagggtccttaaaataacagtcttaattgtagtgttttacagggcagtgcattacattgtcaaaaacagtacag

SEQ ID NO: 84614 - DNA, 80 bp, synthetic construct; identical to SEQ ID NO: 15141
  source 1..80: mol_type = other DNA

SEQ ID NO: 84615 - DNA, 80 bp, synthetic construct
  source 1..80: mol_type = other DNA
aactcctggactcaagcgatctgcctgcctctgcttcccaaaatcctgggattacagacatgagccactgtgcctggcct

SEQ ID NO: 84616 - DNA, 80 bp, synthetic construct
  source 1..80: mol_type = other DNA
cagttttatgtctagtaatgggccagagctgtgtctagaacccaagtcttcccattttttgtgctcacacacatacacac

SEQ ID NO: 84617 - DNA, 80 bp, synthetic construct
  source 1..80: mol_type = other DNA
gttttgctgatactctgggtgtgttgcagatattaaccctttgctgtgggttgtgatggttgtttgttgtcttctgattt

SEQ ID NO: 84618 - DNA, 80 bp, synthetic construct; identical to SEQ ID NO: 15142
  source 1..80: mol_type = other DNA

SEQ ID NO: 84619 - DNA, 80 bp, synthetic construct
  source 1..80: mol_type = other DNA
ttttattgaaccccgtctctactaaaaatacaaaaaattagccaaatgtggcagcaggcgcctgtagtcctagctacttg

SEQ ID NO: 84620 - DNA, 80 bp, synthetic construct
  source 1..80: mol_type = other DNA
tctttgctttgcttttctttttgttttgggacagagtctcactctgtcatccaggctgcagtgcagtggcgcaatctcag

SEQ ID NO: 84621 - DNA, 80 bp, synthetic construct
  source 1..80: mol_type = other DNA
ctcaagcaatccagcggcctcagcctcccaaagttatgggattacaggcatgagccattgtgcccagccaggatatcatc

SEQ ID NO: 84622 - DNA, 80 bp, synthetic construct
  source 1..80: mol_type = other DNA
aataaaattcaatttagaaatttctgtcttcagtgctatctcgaggggcctgtgaaaaatgctgactcggtggcagctgt

SEQ ID NO: 84623 - DNA, 80 bp, synthetic construct; identical to SEQ ID NO: 15143
  source 1..80: mol_type = other DNA

SEQ ID NO: 84624 - DNA, 80 bp, synthetic construct
  source 1..80: mol_type = other DNA
tgcccagctaattctttttttctttattttattttatttttttttttgagatggagtctcgctctgtcgcccaggctgga

SEQ ID NO: 84625 - DNA, 80 bp, synthetic construct
  source 1..80: mol_type = other DNA
tgttagccaggatggtctcgatcccctgacatcgtgatccgctgtcctcggtctcccaaagtgctgggattacaggcgtg

SEQ ID NO: 84626 - DNA, 80 bp, synthetic construct
  source 1..80: mol_type = other DNA
tctcctaggttagtcccagaggacagatttgaagtttgaaaacagaaagtaactgccaaaagggattatttagggcagag

SEQ ID NO: 84627 - DNA, 80 bp, synthetic construct; identical to SEQ ID NO: 15144
  source 1..80: mol_type = other DNA

SEQ ID NO: 84628 - DNA, 80 bp, synthetic construct
  source 1..80: mol_type = other DNA
catgatcttcgctcactgcaagctccgcctcccgggttcaagcaattatcataccttagcctcctgagtagctgggacta

SEQ ID NO: 84629 - DNA, 80 bp, synthetic construct
  source 1..80: mol_type = other DNA
tcctttttcacttcctaccttcctccccacctctgggtgtaccctcccctgagctcagcctgtatttctatctgctggcc

SEQ ID NO: 84630 - DNA, 80 bp, synthetic construct; identical to SEQ ID NO: 15145
  source 1..80: mol_type = other DNA

SEQ ID NO: 84631 - DNA, 80 bp, synthetic construct
  source 1..80: mol_type = other DNA
ttcaaagaagtggggtggcttgggaagtaaaagaagatctggagataggagttcctaaaaagcagacaagagattaccga

SEQ ID NO: 84632 - DNA, 80 bp, synthetic construct
  source 1..80: mol_type = other DNA
tgaaaggatttccctactaaatcctttactttccactttgtttaaaatgagtttaacaccaagaaaatagttgtctctat

SEQ ID NO: 84633 - DNA, 80 bp, synthetic construct
  source 1..80: mol_type = other DNA
tatatttgaaagcagacactgggactctgacctttgcagagataaaagggatactttcctaacccagagaggccaaagga

SEQ ID NO: 84634 - DNA, 80 bp, synthetic construct; identical to SEQ ID NO: 15146
  source 1..80: mol_type = other DNA

SEQ ID NO: 84635 - DNA, 80 bp, synthetic construct
  source 1..80: mol_type = other DNA
gaactttcttccaactgccgtttgggatggttgattaggacgcgttgctgtggcggtagctcaccaatccaatgcatgca

SEQ ID NO: 84636 - DNA, 80 bp, synthetic construct
  source 1..80: mol_type = other DNA
gaaccttcccatggttcgcaggtcgcggtcttcggagccttcagcctcgtgagcccgaacagtccatagggcggcgccag

SEQ ID NO: 84637 - DNA, 80 bp, synthetic construct
  source 1..80: mol_type = other DNA
ggcgagaggccctgacctctggggtagggtggcagcgtccccttgaagatgcggtcccgcctcccatccccaggcgcccg

SEQ ID NO: 84638 - DNA, 80 bp, synthetic construct; identical to SEQ ID NO: 15147
  source 1..80: mol_type = other DNA

SEQ ID NO: 84639 - DNA, 80 bp, synthetic construct
  source 1..80: mol_type = other DNA
taaaaacttaaacataagatctaaaaccataaaaaccctaaaagaaaacctaggcaataccattcaggacataggcaggg

SEQ ID NO: 84640 - DNA, 80 bp, synthetic construct
  source 1..80: mol_type = other DNA
tctgacaaagggctaatatccagaatctacaaagaacttaaacaaatttacaataaaaaatcaaacaaccccatcaaaaa

SEQ ID NO: 84641 - DNA, 80 bp, synthetic construct
  source 1..80: mol_type = other DNA
gaaacaacaggtgctggagaggatgtggagaaataggaacgcttttacgccattggtgggactgtaaactagttcaacca

SEQ ID NO: 84642 - DNA, 80 bp, synthetic construct
  source 1..80: mol_type = other DNA
agacttggaaccaacccaaatgtccatcaatgatagactggattaagaaaatgtggcacatatacaccataatatactat

SEQ ID NO: 84643 - DNA, 80 bp, synthetic construct; identical to SEQ ID NO: 15148
  source 1..80: mol_type = other DNA

SEQ ID NO: 84644 - DNA, 80 bp, synthetic construct; identical to SEQ ID NO: 15149
  source 1..80: mol_type = other DNA

SEQ ID NO: 84645 - DNA, 80 bp, synthetic construct
  source 1..80: mol_type = other DNA
ggcatggtggtgagcacctgtattcccagctattcaggaggctgaggcaggagaatcatttgaacctggaaggcagaggt

SEQ ID NO: 84646 - DNA, 80 bp, synthetic construct
  source 1..80: mol_type = other DNA
tcaggagtttgagaccagtctgaccagcatggtgaaaccctgtctctactaaaaatacaaaaattagccgggcatggtgg

SEQ ID NO: 84647 - DNA, 80 bp, synthetic construct; identical to SEQ ID NO: 15150
  source 1..80: mol_type = other DNA

SEQ ID NO: 84648 - DNA, 80 bp, synthetic construct
  source 1..80: mol_type = other DNA
ctaggtctccaccatgtgactccaccgtagactccatgccttcttcttttgcaaagcctcggacacccaaacacctacca

SEQ ID NO: 84649 - DNA, 80 bp, synthetic construct
  source 1..80: mol_type = other DNA
gccagcagggtgctgccaataaaaggtagtcacgtggaatttggaatgtggaaaggaggtagaagtcatcctttcctccc

SEQ ID NO: 84650 - DNA, 80 bp, synthetic construct
  source 1..80: mol_type = other DNA
gaaagccagtggtacaaccccctccccacaaccttcaccacctctagcccctccaatgaaaagcactaattgcctatata

SEQ ID NO: 84651 - DNA, 80 bp, synthetic construct; identical to SEQ ID NO: 15151
  source 1..80: mol_type = other DNA

SEQ ID NO: 84652 - DNA, 80 bp, synthetic construct
  source 1..80: mol_type = other DNA
tttttttgagatagagtctcgctctgttgcccaggctagaggcacgatctcggctcactgcaacttccgcctcccaggtt

SEQ ID NO: 84653 - DNA, 80 bp, synthetic construct
  source 1..80: mol_type = other DNA
gtacccagtagtttttttggctcctctccctcctcccacccttcaccctcaggtagggcccagtgtctgttgttcccttc

SEQ ID NO: 84654 - DNA, 80 bp, synthetic construct; identical to SEQ ID NO: 15152
  source 1..80: mol_type = other DNA

SEQ ID NO: 84655 - DNA, 80 bp, synthetic construct
  source 1..80: mol_type = other DNA
aaagcctccagaaaaatccttgaaagacaggacatggagagctgctgggttggcgaacacatccatgtgccgggaggatg

SEQ ID NO: 84656 - DNA, 80 bp, synthetic construct
  source 1..80: mol_type = other DNA
tttcctgggttttgtgagctgttctagcaaatggtcaaacctgaggagggagttgtggggacctccaatttatagccagt

SEQ ID NO: 84657 - DNA, 80 bp, synthetic construct
  source 1..80: mol_type = other DNA
tttgtagtgtcctgtctagaaggcctttccttcctcttttctgctcagaaaacttttcttccacttcccttcttctaagc

SEQ ID NO: 84658 - DNA, 80 bp, synthetic construct
  source 1..80: mol_type = other DNA
gtctaggagccctttgaggaaagggatgctgtcctagtcaactctttcccagcgccaggcacaacgtctggcatgttcca

SEQ ID NO: 84659 - DNA, 80 bp, synthetic construct; identical to SEQ ID NO: 15153
  source 1..80: mol_type = other DNA

SEQ ID NO: 84660 - DNA, 80 bp, synthetic construct
  source 1..80: mol_type = other DNA
gctcagacaaaactgctcaattgaggacaaactgggcaaaatagaatcttactttgggagtttttagaaatatggttggg

SEQ ID NO: 84661 - DNA, 80 bp, synthetic construct
  source 1..80: mol_type = other DNA
gagctatgaatgcaccactgcactccaggctgggtgacacatcaagaccctgtctcaaaagaaaaatgtgcacatttgag

SEQ ID NO: 84662 - DNA, 80 bp, synthetic construct
  source 1..80: mol_type = other DNA
acaaaaaattagccaggtgtggtgacgggcacctgtagtcccagctacttgggaggctgaggcaggagaatggcgtgaac

SEQ ID NO: 84663 - DNA, 80 bp, synthetic construct; identical to SEQ ID NO: 15154
  source 1..80: mol_type = other DNA

SEQ ID NO: 84664 - DNA, 80 bp, synthetic construct
  source 1..80: mol_type = other DNA
aactcctgacctcaggtggtccacccacctcagcctcccaaagtgctggaattacaggcgtgagccactgtgcccagcct

SEQ ID NO: 84665 - DNA, 80 bp, synthetic construct
  source 1..80: mol_type = other DNA
ttctcaccatccgtatgttattgttattgactcttcaatggcaaccatggcttatccccctttatctccctatgtcctac

SEQ ID NO: 84666 - DNA, 80 bp, synthetic construct; identical to SEQ ID NO: 15155
  source 1..80: mol_type = other DNA

SEQ ID NO: 84667 - DNA, 80 bp, synthetic construct
  source 1..80: mol_type = other DNA
tacctcagcctcctgagtagctgggattacaggcatgtgccaccatgcccggctaatttttgtgtgtgtgtgtgtgtgtg

SEQ ID NO: 84668 - DNA, 80 bp, synthetic construct
  source 1..80: mol_type = other DNA
tatttatttatttattttattttttttggtagacacgggtttctccatgttggttaggctggtcttgaactcccaacctc

SEQ ID NO: 84669 - DNA, 80 bp, synthetic construct
  source 1..80: mol_type = other DNA
ataaagacacttttcattctcagtaaggaactttgggagataattggggcaggcagctaaagaacaggtgtcttttgtct

SEQ ID NO: 84670 - DNA, 80 bp, synthetic construct; identical to SEQ ID NO: 15156
  source 1..80: mol_type = other DNA

SEQ ID NO: 84671 - DNA, 80 bp, synthetic construct
  source 1..80: mol_type = other DNA
agcgggggatggggagaggctagggcagtacacgtgaatggagaggtagccccaccagtatgttttctgaaatacagtcc

SEQ ID NO: 84672 - DNA, 80 bp, synthetic construct
  source 1..80: mol_type = other DNA
ctttgggaggctgaggcgggcagatcacaaggtcaggagatcgagaccatcctggctaagatggtgaaaccctgtctcta

SEQ ID NO: 84673 - DNA, 80 bp, synthetic construct
  source 1..80: mol_type = other DNA
tccatctcaataaaaaaaataaagtgaattttcctccatcttgtaagggcgaaaagccccctaccatgtctgaatgaaca

SEQ ID NO: 84674 - DNA, 80 bp, synthetic construct; identical to SEQ ID NO: 15157
  source 1..80: mol_type = other DNA

SEQ ID NO: 84675 - DNA, 80 bp, synthetic construct
  source 1..80: mol_type = other DNA
ctgcctttgtggatgcgtgggccgccagcttcagtcctgcttttctttctgatggcccttgttatttatgcataaatatt

SEQ ID NO: 84676 - DNA, 80 bp, synthetic construct
  source 1..80: mol_type = other DNA
gttcgagaccagcctggccaacatagcgagagcagctccggtggcgggaggagtggcagcggccaggcagcccagcttcg

SEQ ID NO: 84677 - DNA, 80 bp, synthetic construct
  source 1..80: mol_type = other DNA
gcgaagccgaaaaaggcagcagcgaaggataaattttcagacacaaaagtgcaaaaaaagggaaaaggggagcaaaggga

SEQ ID NO: 84678 - DNA, 80 bp, synthetic construct; identical to SEQ ID NO: 15158
  source 1..80: mol_type = other DNA

SEQ ID NO: 84679 - DNA, 80 bp, synthetic construct
  source 1..80: mol_type = other DNA
tttttgtatttttagtagagatggggtttcaccgcattagccaggatggtctcgatctcctgacctcgtgatccgcccgc

SEQ ID NO: 84680 - DNA, 80 bp, synthetic construct
  source 1..80: mol_type = other DNA
attttttggtacaaccagaaaattgtgtaggatattgaattatgggagactttgacagtctcgggtgtcagcttaacatt

SEQ ID NO: 84681 - DNA, 80 bp, synthetic construct
  source 1..80: mol_type = other DNA
gtagtagaattgtttcctaaagaaaacaactccttgattatggctcaccctgttggagttgtgggcactctgtaacatct

SEQ ID NO: 84682 - DNA, 80 bp, synthetic construct; identical to SEQ ID NO: 15159
  source 1..80: mol_type = other DNA

SEQ ID NO: 84683 - DNA, 80 bp, synthetic construct
  source 1..80: mol_type = other DNA
ccctccaccatgcctggctaatttttcgtatttttagtagagacggggtttcactgtattagccaggatggtctcgatct

SEQ ID NO: 84684 - DNA, 80 bp, synthetic construct
  source 1..80: mol_type = other DNA
aaaaaagaaaaataagtaattttacaggaggcctgaggtgggctagggtcactctgtgttctcctcctagggcagggcct

SEQ ID NO: 84685 - DNA, 80 bp, synthetic construct
  source 1..80: mol_type = other DNA
cccgtcgtttaccccgcatcactgttgaagatctcatcctcactggaagactccttgtcctgcagcctcatggctttttt

SEQ ID NO: 84686 - DNA, 80 bp, synthetic construct; identical to SEQ ID NO: 15160
  source 1..80: mol_type = other DNA

SEQ ID NO: 84687 - DNA, 80 bp, synthetic construct
  source 1..80: mol_type = other DNA
gagacggggtttcactgtgttagccaggatggtctcgatctcctgacctcgtgatctgcccgcctcggcctcccaaagtg

SEQ ID NO: 84688 - DNA, 80 bp, synthetic construct
  source 1..80: mol_type = other DNA
ttagaattctgtgaggtttgtataaaaggaatagagtgggggcccaaaaaccagtaagatgagaaagtactgtttgctca

SEQ ID NO: 84689 - DNA, 80 bp, synthetic construct
  source 1..80: mol_type = other DNA
gcctccaagaaggcccctggcctagcctgatgcccactatcagcaggaacaggcacgacaaactttccccttcctatccc

SEQ ID NO: 84690 - DNA, 80 bp, synthetic construct; identical to SEQ ID NO: 15161
  source 1..80: mol_type = other DNA

SEQ ID NO: 84691 - DNA, 80 bp, synthetic construct
  source 1..80: mol_type = other DNA
cgcatccatgtgaagagaccaccaaacaggctttgtgtgagcaatagttttttaatcacctggagtcagcaaaaggagat

SEQ ID NO: 84692 - DNA, 80 bp, synthetic construct
  source 1..80: mol_type = other DNA
tagggtggagcaggaacaaatcacaatggtggaatgtcatcagttaaggcaggaactggctatttcacgtttatggttct

SEQ ID NO: 84693 - DNA, 80 bp, synthetic construct
  source 1..80: mol_type = other DNA
ccatcacaacaaccactatctccaaatctgtattcattccttttaattcattataagtctcatctacctaatgagataac

SEQ ID NO: 84694 - DNA, 80 bp, synthetic construct; identical to SEQ ID NO: 15162
  source 1..80: mol_type = other DNA

SEQ ID NO: 84695 - DNA, 80 bp, synthetic construct
  source 1..80: mol_type = other DNA
ttagtagagatggggtttcaccatgttagcgggtggaccttgtgatccgcccaccttggcctcccaaagtgctgggatta

SEQ ID NO: 84696 - DNA, 80 bp, synthetic construct
  source 1..80: mol_type = other DNA
tcagactaaactataataaaagagaaagcagagagagtaagagcacctcatatggaatcacctacatttcagaagctgga

SEQ ID NO: 84697 - DNA, 80 bp, synthetic construct; identical to SEQ ID NO: 15163
  source 1..80: mol_type = other DNA

SEQ ID NO: 84698 - DNA, 80 bp, synthetic construct
  source 1..80: mol_type = other DNA
ctgacctcaggtgatccacccacctcaagcctcccaaagtgctgggattataggcatgagccaccatgtccggcaagttt

SEQ ID NO: 84699 - DNA, 80 bp, synthetic construct
  source 1..80: mol_type = other DNA
tgtcactactacacctggctaaatgttgtatttttagtagagacagggtttcatcatgttggccaggctggtctcgaact

SEQ ID NO: 84700 - DNA, 80 bp, synthetic construct
  source 1..80: mol_type = other DNA
agtccagtctcatgatatttgccacccaatgtgctcatgtttcccaaaccagcatctcttctctagacccatcctctaat

SEQ ID NO: 84701 - DNA, 80 bp, synthetic construct; identical to SEQ ID NO: 15164
  source 1..80: mol_type = other DNA

SEQ ID NO: 84702 - DNA, 80 bp, synthetic construct
  source 1..80: mol_type = other DNA
gaggtgtcctttatgaggtatggcaagagtgaaggcttggcaaagggtggctgtgcccatcaaacacagacagtttatga

SEQ ID NO: 84703 - DNA, 80 bp, synthetic construct
  source 1..80: mol_type = other DNA
tcatttaaaatcacaggctggagaggcccagggactttgggtatctatttacatagccaagataacatcagattcaaatt

SEQ ID NO: 84704 - DNA, 80 bp, synthetic construct
  source 1..80: mol_type = other DNA
tttgagaccagcctggccaacataacaagaccacatctctactaaaaatacaaaaatgagccacatgtggtggcgcatgc

SEQ ID NO: 84705 - DNA, 80 bp, synthetic construct
  source 1..80: mol_type = other DNA
tgcagtggctcatgcctgtaatcccaacattttgggaggccaaggtagaaggattgcttgaggccaatagtttgaaacta

SEQ ID NO: 84706 - DNA, 80 bp, synthetic construct; identical to SEQ ID NO: 15165
  source 1..80: mol_type = other DNA

SEQ ID NO: 84707 - DNA, 80 bp, synthetic construct
  source 1..80: mol_type = other DNA
tggagccaagatttgaaatcagcaccaccacatactttcaaaatatgttgatggtgaattttggtttgtttacagctgtg

SEQ ID NO: 84708 - DNA, 80 bp, synthetic construct
  source 1..80: mol_type = other DNA
caagtggagggtagaactgcatttattcatccttttccaacacatctagcaagacgtagtagagacgcaagagaaatttg

SEQ ID NO: 84709 - DNA, 80 bp, synthetic construct
  source 1..80: mol_type = other DNA
ctgggcgtggtggctcacacctgtaatcccagcactctgggaggctgaggtgggcggatcacaaggttaggagatcgaga

SEQ ID NO: 84710 - DNA, 80 bp, synthetic construct
  source 1..80: mol_type = other DNA
actgtactccagcactccagcctgggtgacagagcaagactccgtctcaaaaataaaaaaataaaaaaaaataagctggg

SEQ ID NO: 84711 - DNA, 80 bp, synthetic construct; identical to SEQ ID NO: 15166
  source 1..80: mol_type = other DNA

SEQ ID NO: 84712 - DNA, 80 bp, synthetic construct
  source 1..80: mol_type = other DNA
aaaaagaaggagctgaagtcctttaaaaattaactgcctgtttttctgtggctagtgagccttatctctcctcctttccc

SEQ ID NO: 84713 - DNA, 80 bp, synthetic construct
  source 1..80: mol_type = other DNA
gcttccccctgcacagatctcccccaccccaccaaatgcttaaaaggtaacttaactctttgttcagggctcagtccttt

SEQ ID NO: 84714 - DNA, 80 bp, synthetic construct; identical to SEQ ID NO: 15167
  source 1..80: mol_type = other DNA

SEQ ID NO: 84715 - DNA, 80 bp, synthetic construct
  source 1..80: mol_type = other DNA
cgtctctactaaaaatacaaaaattagccaggcgtggtgtcccatgcctgtggtgccagctacttggaggctaaggcaga

SEQ ID NO: 84716 - DNA, 80 bp, synthetic construct
  source 1..80: mol_type = other DNA
gccggcagatcacgaggtcaggatttcgagaccagcctggccaacatggtgaaaccccatctctactaaaaatacaaaaa

SEQ ID NO: 84717 - DNA, 80 bp, synthetic construct
  source 1..80: mol_type = other DNA
ctttagaaaatacatcaccccagttcccatccctacctgtctatccacaaaaccaaggcattcctgagagtaattcattt

SEQ ID NO: 84718 - DNA, 80 bp, synthetic construct; identical to SEQ ID NO: 15168
  source 1..80: mol_type = other DNA

SEQ ID NO: 84719 - DNA, 80 bp, synthetic construct
  source 1..80: mol_type = other DNA
tgctaaaatgtaataatccaggaggatattgtagggaaagagcatcagagaggtagctggtaacttttggtaggaacctg

SEQ ID NO: 84720 - DNA, 80 bp, synthetic construct
  source 1..80: mol_type = other DNA
agcatcagagaggtagctggtaacttttggtaggaacctgccagctattttaaatctttagctttattctggtcttttta

SEQ ID NO: 84721 - DNA, 80 bp, synthetic construct
  source 1..80: mol_type = other DNA
ctcccaaagtactgggattacaggagtgagccaccatgcccggccatctttttaatttttaatgttaattaatttttata

SEQ ID NO: 84722 - DNA, 80 bp, synthetic construct
  source 1..80: mol_type = other DNA
caggctggagtgcagtggtgtggtcttggctcactgcaacctctgcctctcggattgaagtgattcttgtgcctcagcct

SEQ ID NO: 84723 - DNA, 80 bp, synthetic construct; identical to SEQ ID NO: 15169
  source 1..80: mol_type = other DNA

SEQ ID NO: 84724 - DNA, 80 bp, synthetic construct
  source 1..80: mol_type = other DNA
ggggaaaccccgcctctgctaaaactacaaaaattaaccaggcatggtggcacgcacctgtagtcctggctactcgggag

SEQ ID NO: 84725 - DNA, 80 bp, synthetic construct
  source 1..80: mol_type = other DNA
aaggatttagtaatactactcttgtaatcatggtgtttctgacgtagcacagggcagtgaaaagagaaacactgaactaa

SEQ ID NO: 84726 - DNA, 80 bp, synthetic construct
  source 1..80: mol_type = other DNA
ttccttctctgtcattcaccctgccagtctccttgggctattgcaagaataaaattaaatgctacttgggaaaatacttc

SEQ ID NO: 84727 - DNA, 80 bp, synthetic construct; identical to SEQ ID NO: 15170
  source 1..80: mol_type = other DNA

SEQ ID NO: 84728 - DNA, 80 bp, synthetic construct
  source 1..80: mol_type = other DNA
ttgaaggaagactgtgaaaagggaaaaggaaaaaaattaaaatgttccccttctaggtcctgatgagagtaaatgtttac

SEQ ID NO: 84729 - DNA, 80 bp, synthetic construct
  source 1..80: mol_type = other DNA
ggttgaaaaacaacaacccaccggggaacacattttagcaaattcttctgaaagtcaaaaatgttacagtcataggtaaa

SEQ ID NO: 84730 - DNA, 80 bp, synthetic construct; identical to SEQ ID NO: 15171
  source 1..80: mol_type = other DNA

SEQ ID NO: 84731 - DNA, 80 bp, synthetic construct
  source 1..80: mol_type = other DNA
aagaatacaaaattagctgggcatggtggcacacgcctgtaatcctagctactcaggaggctcaggcaggagaagcactt

SEQ ID NO: 84732 - DNA, 80 bp, synthetic construct
  source 1..80: mol_type = other DNA
tcacctgaggctgggagtttgagaccagcctgatcaacatggagacaccccgtctctactaagaaatacaaaattagctg

SEQ ID NO: 84733 - DNA, 80 bp, synthetic construct; identical to SEQ ID NO: 15172
  source 1..80: mol_type = other DNA

SEQ ID NO: 84734 - DNA, 80 bp, synthetic construct
  source 1..80: mol_type = other DNA
tcactctgattgtcatgagtaagttgtgctttttcaaaagcagttttttcctacaatgtcatttcctgcttctctggctc

SEQ ID NO: 84735 - DNA, 80 bp, synthetic construct
  source 1..80: mol_type = other DNA
atgaaaaacaactttcataaagcacaaaagaaaatttccttgaatttacccttttttattgtgggtaagaggcaataggt

SEQ ID NO: 84736 - DNA, 80 bp, synthetic construct; identical to SEQ ID NO: 15173
  source 1..80: mol_type = other DNA

SEQ ID NO: 84737 - DNA, 80 bp, synthetic construct
  source 1..80: mol_type = other DNA
tttaaatagcggtgtctggaaatgaaaaggtggtatttcaatcaagattttcagaccatggctgggtgcagaggctcata

SEQ ID NO: 84738 - DNA, 80 bp, synthetic construct
  source 1..80: mol_type = other DNA
ctgctactctggaggctgaggtgggaggatcgcttgagcctggcgaggttgaggctgcagtgagctgtgatagcaccact

SEQ ID NO: 84739 - DNA, 80 bp, synthetic construct
  source 1..80: mol_type = other DNA
acctccctcccggacggggcggctggcctggcgggggctgacccccacctccctcccggacggggtggctgccgggctga

SEQ ID NO: 84740 - DNA, 80 bp, synthetic construct; identical to SEQ ID NO: 15174
  source 1..80: mol_type = other DNA

SEQ ID NO: 84741 - DNA, 80 bp, synthetic construct
  source 1..80: mol_type = other DNA
ataaataaatgtgaacagtacagtccccttttccttttataaatgaagaaaaacaaaggctcactccaagagtcagactt

SEQ ID NO: 84742 - DNA, 80 bp, synthetic construct
  source 1..80: mol_type = other DNA
gctaaaggctttgatgatttgcagtattcttatttaaatgtacagagccagcttcagaggaaggttcttccaaagaccta

SEQ ID NO: 84743 - DNA, 80 bp, synthetic construct
  source 1..80: mol_type = other DNA
gggactacaggcacccgccaccacacctggctaatttttttgtatttttttagtagagatggggtttcacctgtagcagg

SEQ ID NO: 84744 - DNA, 80 bp, synthetic construct; identical to SEQ ID NO: 15175
  source 1..80: mol_type = other DNA

SEQ ID NO: 84745 - DNA, 80 bp, synthetic construct
  source 1..80: mol_type = other DNA
tactttttctttctttggaggcagaaattgggcataagacaatatgaggggtggtctcctcccttattcccccactttga

SEQ ID NO: 84746 - DNA, 80 bp, synthetic construct
  source 1..80: mol_type = other DNA
gagggagcagtaagtaggttcctattactattataactcttattataagagttttaaatcctcctagcgctgggaaccat

SEQ ID NO: 84747 - DNA, 80 bp, synthetic construct
  source 1..80: mol_type = other DNA
ctgctagcaagtagtcgagagctaatctattttgatagatagcatttctcatctgagtttcttgctgggccagaatagtc

SEQ ID NO: 84748 - DNA, 80 bp, synthetic construct; identical to SEQ ID NO: 15176
  source 1..80: mol_type = other DNA

SEQ ID NO: 84749 - DNA, 80 bp, synthetic construct
  source 1..80: mol_type = other DNA
tggatttttctctgtgtggtttgaactccaccatgtagtcttcctacaggaagggtgaagtccttctccactcttgctat

SEQ ID NO: 84750 - DNA, 80 bp, synthetic construct
  source 1..80: mol_type = other DNA
gtgacagtgagagactgggctacatgctcggctaattgcaaaaacaaatttcttgtttttcctggaaattctgttattgg

SEQ ID NO: 84751 - DNA, 80 bp, synthetic construct
  source 1..80: mol_type = other DNA
attactagctctaaggggttacattgtcccttagcacaggaagggccatttttttcctttctgaaggtggactggatcct

SEQ ID NO: 84752 - DNA, 80 bp, synthetic construct; identical to SEQ ID NO: 15177
  source 1..80: mol_type = other DNA

SEQ ID NO: 84753 - DNA, 80 bp, synthetic construct
  source 1..80: mol_type = other DNA
cagtacacttataataaccataaaataataggactgtagcaaccttttgtcctacctcagtgacttgatgtatacactgg

SEQ ID NO: 84754 - DNA, 80 bp, synthetic construct
  source 1..80: mol_type = other DNA
tcactttgcaggggttggcgaagctactcccgtccacgtacccctcacagtctactgatgtttaaggatagtctcggagg

SEQ ID NO: 84755 - DNA, 80 bp, synthetic construct
  source 1..80: mol_type = other DNA
atttgtaaccaatgaggtcctttggtagtcattaaagttaccacagcatggggggcctttatattcaggttttcctaagg

SEQ ID NO: 84756 - DNA, 80 bp, synthetic construct
  source 1..80: mol_type = other DNA
ctctttctgacacatagagtgtaaagagttttgtcaggtcaggtagcctcagggctgggaccaacatgaggttttctttt

SEQ ID NO: 84757 - DNA, 80 bp, synthetic construct; identical to SEQ ID NO: 15178
  source 1..80: mol_type = other DNA

SEQ ID NO: 84758 - DNA, 80 bp, synthetic construct
  source 1..80: mol_type = other DNA
gctaactgcatcctttcaggtctccaaggaacgctaagtttcctccctgttgtgagagacatgaagtgaacttagtgttg

SEQ ID NO: 84759 - DNA, 80 bp, synthetic construct
  source 1..80: mol_type = other DNA
ggaaaggggacaatctgggcctctggcctgccatgtgcacaagcataacaattgcttttgtttaacgtgcagatggaata

SEQ ID NO: 84760 - DNA, 80 bp, synthetic construct; identical to SEQ ID NO: 15179
  source 1..80: mol_type = other DNA

SEQ ID NO: 84761 - DNA, 80 bp, synthetic construct
  source 1..80: mol_type = other DNA
aattgacttggttatgttaataactagatggtcagcaatagcacgaggaaagaaagaagagtaatagaatagatgaaaag

SEQ ID NO: 84762 - DNA, 80 bp, synthetic construct
  source 1..80: mol_type = other DNA
aggctggctcgagtttttcttctttccacctttcgatgagaatgtgatcttcaggctggtgctggtttactagaaattct

SEQ ID NO: 84763 - DNA, 80 bp, synthetic construct
  source 1..80: mol_type = other DNA
tttagcacctatttttattagtttttaaaccaaagaaagccaaataccattttacatttaacagtgcttctcgtatgatt

SEQ ID NO: 84764 - DNA, 80 bp, synthetic construct
  source 1..80: mol_type = other DNA
gagcaggttggtgctttaagaaaaaacctgttatgcttttactttaatgtccagttcacagaaaaactggatgatacttc

SEQ ID NO: 84765 - DNA, 80 bp, synthetic construct; identical to SEQ ID NO: 15180
  source 1..80: mol_type = other DNA

SEQ ID NO: 84766 - DNA, 80 bp, synthetic construct
  source 1..80: mol_type = other DNA
ctctttttatataaattccgccccccctttttttccttttttttttcgaagatgataaccattcttttccaaagcgaacc

SEQ ID NO: 84767 - DNA, 80 bp, synthetic construct; identical to SEQ ID NO: 15181
  source 1..80: mol_type = other DNA

SEQ ID NO: 84768 - DNA, 80 bp, synthetic construct
  source 1..80: mol_type = other DNA
tctatccttgactctctgtctgtctcttcctgtctcttcctctctctcttttcctcttttcctctctgtctctttccttt

SEQ ID NO: 84769 - DNA, 80 bp, synthetic construct
  source 1..80: mol_type = other DNA
tacctttgaaacaagggacctgtccaggcttccttctaatggccaacctacctctaatgctggccagtctatcttacaca

SEQ ID NO: 84770 - DNA, 80 bp, synthetic construct
  source 1..80: mol_type = other DNA
aaagaaccggtaaaaagggcgcacacacagttttgcagtttgcaccaaaccaaaatcagagtatccagaaatccaagcca

SEQ ID NO: 84771 - DNA, 80 bp, synthetic construct; identical to SEQ ID NO: 15182
  source 1..80: mol_type = other DNA

SEQ ID NO: 84772 - DNA, 80 bp, synthetic construct
  source 1..80: mol_type = other DNA
ggctggttggagtcccctgcagggatgttccacagggcaggtttaagccgcctaaggagctgccttgaccatccgccatt

SEQ ID NO: 84773 - DNA, 80 bp, synthetic construct
  source 1..80: mol_type = other DNA
ggctcacaactctaagggggtgcacgtgagagggtcgtgatcaattgagcaagcagggggtacgtgactgggggctgcat

SEQ ID NO: 84774 - DNA, 80 bp, synthetic construct
  source 1..80: mol_type = other DNA
tttctgccctttagtttttactttttctttctttggaggcagaaattgggcataagacaatatgaggggtggtctcctcc

SEQ ID NO: 84775 - DNA, 80 bp, synthetic construct; identical to SEQ ID NO: 15183
  source 1..80: mol_type = other DNA

SEQ ID NO: 84776 - DNA, 80 bp, synthetic construct
  source 1..80: mol_type = other DNA
aggtcaattctgttcatttgcataggagataatcatataggaatcccaaattaataccctcttctggtgacttaccagat

SEQ ID NO: 84777 - DNA, 80 bp, synthetic construct
  source 1..80: mol_type = other DNA
attttaaaataaggtaaattgggctgggcgtggtggctcacgcctgtaatcacagcacttagggaggccgaggcgggcgg

SEQ ID NO: 84778 - DNA, 80 bp, synthetic construct
  source 1..80: mol_type = other DNA
gttgcggtgagcccaaatcacgccattacactccagcctgggcaacaagagcgaagctccgtctcaaaaataaataaaat

SEQ ID NO: 84779 - DNA, 80 bp, synthetic construct; identical to SEQ ID NO: 15184
  source 1..80: mol_type = other DNA

SEQ ID NO: 84780 - DNA, 80 bp, synthetic construct
  source 1..80: mol_type = other DNA
ctgacgctcctctacttccctcttgcgctttctcaatagcacaaatggatccagttcttaagttctccctcccacaaaat

SEQ ID NO: 84781 - DNA, 80 bp, synthetic construct
  source 1..80: mol_type = other DNA
gccacccaggctggagtgcaatggcgcgatctcggctcactgcaacctccgcctcctgggttcaagcgattctcctgcct

SEQ ID NO: 84782 - DNA, 80 bp, synthetic construct
  source 1..80: mol_type = other DNA
ccatccccggcgaccagctgatgttcttatacacatggtgtccccttcaaggcacattccagttcctatcaggaggattc

SEQ ID NO: 84783 - DNA, 80 bp, synthetic construct
  source 1..80: mol_type = other DNA
ttcccccgcccgtcccccggagcatcccttgggcccctgtccctttcccggggctcttctaccttaacccagagcagagg

SEQ ID NO: 84784 - DNA, 80 bp, synthetic construct; identical to SEQ ID NO: 15185
  source 1..80: mol_type = other DNA

SEQ ID NO: 84785 - DNA, 80 bp, synthetic construct
  source 1..80: mol_type = other DNA
tgagggtctcaccccaacgcggccttagcttcctcggaaggaccgaacaccttggcggcagccgaggaaaggggttccac

SEQ ID NO: 84786 - DNA, 80 bp, synthetic construct; identical to SEQ ID NO: 15186
  source 1..80: mol_type = other DNA

SEQ ID NO: 84787 - DNA, 80 bp, synthetic construct
  source 1..80: mol_type = other DNA
ctttattcggtcagatactgacggttgggatgcctgacaaggaatttcctttcgccacactgagaaatacccgcagcggc

SEQ ID NO: 84788 - DNA, 80 bp, synthetic construct
  source 1..80: mol_type = other DNA
gcggtgggtcgccgccgggagaagcgtgaggggacagatttgtgaccggcgcggtttttgtcagcttactccggccaaaa

SEQ ID NO: 84789 - DNA, 80 bp, synthetic construct
  source 1..80: mol_type = other DNA
ttcttgcccttttgtctctgccaacccccacccatgcctgagagaaaggtccttgcccgaaggcagattttcgccaagca

SEQ ID NO: 84790 - DNA, 80 bp, synthetic construct; identical to SEQ ID NO: 15187
  source 1..80: mol_type = other DNA

SEQ ID NO: 84791 - DNA, 80 bp, synthetic construct
  source 1..80: mol_type = other DNA
gattgaaactaaatcgtatgaaaatcctcttctctagtcgcactagccacgtttcgagtgcttaatgtggctagtggcac

SEQ ID NO: 84792 - DNA, 80 bp, synthetic construct
  source 1..80: mol_type = other DNA
gtcttctgttttgcagacttatttaccaagcattggaggaatatcgtaggtaaaaatgcctattggatccaaagagaggc

SEQ ID NO: 84793 - DNA, 80 bp, synthetic construct; identical to SEQ ID NO: 15188
  source 1..80: mol_type = other DNA

SEQ ID NO: 84794 - DNA, 80 bp, synthetic construct
  source 1..80: mol_type = other DNA
ccaactttttggtttcagtactccttatactcttaaaaatgatctaggacccccggagtgcttttgtttatgtagcttac

SEQ ID NO: 84795 - DNA, 80 bp, synthetic construct
  source 1..80: mol_type = other DNA
tggccaacatggtgaaaccctatctctactaaaaatacaaaaaatgtgctgcgtgtggtggtgcgtgcctgtaatcccag

SEQ ID NO: 84796 - DNA, 80 bp, synthetic construct; identical to SEQ ID NO: 15189
  source 1..80: mol_type = other DNA

SEQ ID NO: 84797 - DNA, 80 bp, synthetic construct
  source 1..80: mol_type = other DNA
ggtatttttccttgtactttgcatagatttttcaaagatctaatagatataccataggtctttcccatgtcgcaacatca

SEQ ID NO: 84798 - DNA, 80 bp, synthetic construct
  source 1..80: mol_type = other DNA
aaaaatctcattcattaataccaccatggatgtcagaaaagtcttttaagattgggtagaaatgagccactggaaattct

SEQ ID NO: 84799 - DNA, 80 bp, synthetic construct
  source 1..80: mol_type = other DNA
aaaattgcttgttcagatcacagctcaacatgagtgcttttctaggcagtattgtacttcagtatgcagaagtgctttat

SEQ ID NO: 84800 - DNA, 80 bp, synthetic construct; identical to SEQ ID NO: 15190
  source 1..80: mol_type = other DNA

SEQ ID NO: 84801 - DNA, 80 bp, synthetic construct
  source 1..80: mol_type = other DNA
gagagaattcccattttatgtgagagtccacatgttcctcatacccatagtttgccacatcttgagtactcttcagaatt

SEQ ID NO: 84802 - DNA, 80 bp, synthetic construct
  source 1..80: mol_type = other DNA
ccgcctcctgggttcaagtgattctcctgtggcagcctccggagtagctgggactacaggcgtgtgccaccatgcttggc

SEQ ID NO: 84803 - DNA, 80 bp, synthetic construct; identical to SEQ ID NO: 15191
  source 1..80: mol_type = other DNA

SEQ ID NO: 84804 - DNA, 80 bp, synthetic construct
  source 1..80: mol_type = other DNA
aatccatagtcaagatcttaagcatttttttccttatgatctttaactgttctgggtcacaaatttgtctgtcactggtt

SEQ ID NO: 84805 - DNA, 80 bp, synthetic construct
  source 1..80: mol_type = other DNA
aaaggaaaccatcttataatcagctggcttcaactccaataatattcaaagagcaagggctgactctgccgctgtaccaa

SEQ ID NO: 84806 - DNA, 80 bp, synthetic construct
  source 1..80: mol_type = other DNA
cattaattgtgtcatgctgggcaaatcagtctctctggcctctttttcctcactcgaaaaatggagacgatgaaaataat

SEQ ID NO: 84807 - DNA, 80 bp, synthetic construct; identical to SEQ ID NO: 15192
  source 1..80: mol_type = other DNA

SEQ ID NO: 84808 - DNA, 80 bp, synthetic construct
  source 1..80: mol_type = other DNA
aaggttgaatgtagtatgtgctaagagaaaaatataaaaaagtataatgagagttgagaagaaagagcaaatagtattgg

SEQ ID NO: 84809 - DNA, 80 bp, synthetic construct
  source 1..80: mol_type = other DNA
ttggttgttttgtgtctgaaagggaccaatagacaaggcaaaaaggcagactaaaggcaggcattgaatgccaagctaaa

SEQ ID NO: 84810 - DNA, 80 bp, synthetic construct
  source 1..80: mol_type = other DNA
acactcttggctcagcttgccatattcatcctctcacctatcttcatttgccattcattcctactgaatttcttttcgtt

SEQ ID NO: 84811 - DNA, 80 bp, synthetic construct; identical to SEQ ID NO: 15193
  source 1..80: mol_type = other DNA

SEQ ID NO: 84812 - DNA, 80 bp, synthetic construct
  source 1..80: mol_type = other DNA
agcctaatgatcaaacagcagtctttggagataacgtttttcaaaatgtcatgtctgtgccattagaatcttctagactg

SEQ ID NO: 84813 - DNA, 80 bp, synthetic construct
  source 1..80: mol_type = other DNA
gtgatagagacaagtgcctgaattacagtaataacagtgaaagtaaatatggaacataaaactataggaccttgcagtag

SEQ ID NO: 84814 - DNA, 80 bp, synthetic construct
  source 1..80: mol_type = other DNA
atgaataagatgtcctttgacctctaagtactcagtctcgtaagcacgtcttgtaagcacatcttggttgcttccataaa

SEQ ID NO: 84815 - DNA, 80 bp, synthetic construct
  source 1..80: mol_type = other DNA
ctagaattgatctataaccaaggaaggatagtaaggaattaataaggccactctcaactcactgcaaaggagttaacttt

SEQ ID NO: 84816 - DNA, 80 bp, synthetic construct; identical to SEQ ID NO: 15194
  source 1..80: mol_type = other DNA

SEQ ID NO: 84817 - DNA, 80 bp, synthetic construct
  source 1..80: mol_type = other DNA
aactccttagtttactttagagttcaccctttgtatggttctatggattttgacaaattgtataatgtcgtatatctgcc

SEQ ID NO: 84818 - DNA, 80 bp, synthetic construct
  source 1..80: mol_type = other DNA
gccttttccagaatgtcatgtagttggaatcatacagaatatagcattttcagactggcttctttcacttagcaatatgc

SEQ ID NO: 84819 - DNA, 80 bp, synthetic construct
  source 1..80: mol_type = other DNA
gtattccttaggggaaataaagggctgggccgaagtaaagggatgggtctggctagttatctgcagcaggagaatgtcct

SEQ ID NO: 84820 - DNA, 80 bp, synthetic construct; identical to SEQ ID NO: 15195
  source 1..80: mol_type = other DNA

SEQ ID NO: 84821 - DNA, 80 bp, synthetic construct
  source 1..80: mol_type = other DNA
catacaggtttgtgtgtgaatatattttcaactcattttggttcacaccaaagagcacgattgtgggatcatatagtaag

SEQ ID NO: 84822 - DNA, 80 bp, synthetic construct
  source 1..80: mol_type = other DNA
ggtacctcattgtttgttttatttaattttttttttttttttttggagatgaaatctcgctttgtcgcccaggctggagt

SEQ ID NO: 84823 - DNA, 80 bp, synthetic construct
  source 1..80: mol_type = other DNA
tgtatttttagtagagacggggtttcactgtgttagccaggatggtcttgatctcctgacctcgtgatccgctcgcctcg

SEQ ID NO: 84824 - DNA, 80 bp, synthetic construct; identical to SEQ ID NO: 15196
  source 1..80: mol_type = other DNA

SEQ ID NO: 84825 - DNA, 80 bp, synthetic construct
  source 1..80: mol_type = other DNA
ctaagagtaataataagtgactcaggtgccaaatttgtagttaccatcaactattggaaccatatgagtacttaatgccc

SEQ ID NO: 84826 - DNA, 80 bp, synthetic construct
  source 1..80: mol_type = other DNA
tgtctgcaactcactttgtctaattatatccaatttattcatccagtcaatatttcaggagtgactaatataccagacat

SEQ ID NO: 84827 - DNA, 80 bp, synthetic construct; identical to SEQ ID NO: 15197
  source 1..80: mol_type = other DNA

SEQ ID NO: 84828 - DNA, 80 bp, synthetic construct
  source 1..80: mol_type = other DNA
ttaagtaaattgtgaaaggccttcatactatggagtttgacttgatcttgaaaagtaagatcttgaaaggtttttagcac

SEQ ID NO: 84829 - DNA, 80 bp, synthetic construct
  source 1..80: mol_type = other DNA
taaatgtcttcccttactccttttttctctttccttctgcttttgtttaaagcgacaagatgttgctcttttcccaggct

SEQ ID NO: 84830 - DNA, 80 bp, synthetic construct
  source 1..80: mol_type = other DNA
attataagccactgtgctcggggcatcctttttggggggtaatcagcaaactgaaaaacctcttcttacaactccctata

SEQ ID NO: 84831 - DNA, 80 bp, synthetic construct; identical to SEQ ID NO: 15198
  source 1..80: mol_type = other DNA

SEQ ID NO: 84832 - DNA, 80 bp, synthetic construct
  source 1..80: mol_type = other DNA
atgtaagttgttgttcttgtgatgttgaattggctggttttctgtatattctgtgattttttaagtaacaaaaataacag

SEQ ID NO: 84833 - DNA, 80 bp, synthetic construct
  source 1..80: mol_type = other DNA
tctcagctcactgcaagctccgcctcccgggttcacgccattctcctgcctcagcctcccaagtagctgggactacaggc

SEQ ID NO: 84834 - DNA, 80 bp, synthetic construct
  source 1..80: mol_type = other DNA
acaaaatttttgagtttaaaatacacggtttccagcagctgaaatttgtgagtacatatgtgttggcattttaaacatca

SEQ ID NO: 84835 - DNA, 80 bp, synthetic construct
  source 1..80: mol_type = other DNA
tttgttttattttagtcctgttgttctacaatgtacacatgtaacaccacaaagagataagtcaggtatgattaaaaaca

SEQ ID NO: 84836 - DNA, 80 bp, synthetic construct; identical to SEQ ID NO: 15199
  source 1..80: mol_type = other DNA

SEQ ID NO: 84837 - DNA, 80 bp, synthetic construct
  source 1..80: mol_type = other DNA
caagttctttagctacaccacccacccttagttctactgtgctcataggtaataatagcaaatgtgtatttacaagaaag

SEQ ID NO: 84838 - DNA, 80 bp, synthetic construct
  source 1..80: mol_type = other DNA
ccagtggtgtcaagcattatgttttagtacgatgtgattaacgtagaatagcttacaaatattcctttactggcctatat

SEQ ID NO: 84839 - DNA, 80 bp, synthetic construct
  source 1..80: mol_type = other DNA
acaagtgtaattacacaactatgtgataaactgcaatatttatccattcattaaactgtaaactctttgcagtctcacca

SEQ ID NO: 84840 - DNA, 80 bp, synthetic construct; identical to SEQ ID NO: 15200
  source 1..80: mol_type = other DNA

SEQ ID NO: 84841 - DNA, 80 bp, synthetic construct
  source 1..80: mol_type = other DNA
tgggcgtggtggcagacacctgtagtcccagctactcaggaggctgaggcaggagaatggcatgaacccgggaggcggat

SEQ ID NO: 84842 - DNA, 80 bp, synthetic construct
  source 1..80: mol_type = other DNA
ctattttttttttttttaattgagacaaggttcttctctgttgcccaggctggagtgcagtggcaccgtcgcagttcact

SEQ ID NO: 84843 - DNA, 80 bp, synthetic construct; identical to SEQ ID NO: 15201
  source 1..80: mol_type = other DNA

SEQ ID NO: 84844 - DNA, 80 bp, synthetic construct
  source 1..80: mol_type = other DNA
ttttttttttttttgaggcggagtcttgcccttttgcccaggctggagtacagtggcaccatctcggctcacagcaacct

SEQ ID NO: 84845 - DNA, 80 bp, synthetic construct
  source 1..80: mol_type = other DNA
tttgtctcagccacattttttttgtctaagaagatactgggccagatcattgtttctcaaattgcagattatgacctgtt

SEQ ID NO: 84846 - DNA, 80 bp, synthetic construct
  source 1..80: mol_type = other DNA
taacactaaaaaattattcattgtttatctgaaattcaaatttaatgaggtgtcctgtattttatccagaagtcctacac

SEQ ID NO: 84847 - DNA, 80 bp, synthetic construct
  source 1..80: mol_type = other DNA
ctagcaaaatagcattctgttttgattcctctttagctgggagtaagttaaccctattctgttgcttagatgaaataata

SEQ ID NO: 84848 - DNA, 80 bp, synthetic construct; identical to SEQ ID NO: 15202
  source 1..80: mol_type = other DNA

SEQ ID NO: 84849 - DNA, 80 bp, synthetic construct
  source 1..80: mol_type = other DNA
gaaatgaagaagcatctgaaactgtatttcctcatgatactactgctgtaagtaaatatgacattgattagactgttgaa

SEQ ID NO: 84850 - DNA, 80 bp, synthetic construct
  source 1..80: mol_type = other DNA
atatacaatatataccgtagtcccctattcatggggtatacattccaatatcccccagtgaatgcttgaaaccttagata

SEQ ID NO: 84851 - DNA, 80 bp, synthetic construct
  source 1..80: mol_type = other DNA
acaaaataccgtaataaaagttatgtgaatgttgtctctctgtctcaaaatatcttattgttctgtactcatgtggcagc

SEQ ID NO: 84852 - DNA, 80 bp, synthetic construct; identical to SEQ ID NO: 15203
  source 1..80: mol_type = other DNA

SEQ ID NO: 84853 - DNA, 80 bp, synthetic construct
  source 1..80: mol_type = other DNA
tcaattaaaggaagcactttatggcttctttttggcatatttgaattgccagcatcattatacttgtgctttggggccat

SEQ ID NO: 84854 - DNA, 80 bp, synthetic construct
  source 1..80: mol_type = other DNA
gatggtgcaagtttttttttctccatttccattttcctttcctaagatttccacatcctagtggtgcaagatttcatcac

SEQ ID NO: 84855 - DNA, 80 bp, synthetic construct
  source 1..80: mol_type = other DNA
tatactagtgattttaaactataatttttgcagaatgtgaaaagctatttttccaatcatgatgaaagtctgaagaaaaa

SEQ ID NO: 84856 - DNA, 80 bp, synthetic construct; identical to SEQ ID NO: 15204
  source 1..80: mol_type = other DNA

SEQ ID NO: 84857 - DNA, 80 bp, synthetic construct
  source 1..80: mol_type = other DNA
acctttcctttcttgactactgaagtagtattttatctcaaagtattgagagtagaaactaacttggtgtgcctgtgatc

SEQ ID NO: 84858 - DNA, 80 bp, synthetic construct
  source 1..80: mol_type = other DNA
taaatactgtgtaagacagtactatttaatatgtggttgtgacacaaaaacaaagcctattgaaaattttcagagacaat

SEQ ID NO: 84859 - DNA, 80 bp, synthetic construct
  source 1..80: mol_type = other DNA
tgtctgtgtggtatcatgtacgtatgtatatgcatatgtaaaatcagatttacccttgttatagggccacagaattgatt

SEQ ID NO: 84860 - DNA, 80 bp, synthetic construct; identical to SEQ ID NO: 15205
  source 1..80: mol_type = other DNA

SEQ ID NO: 84861 - DNA, 80 bp, synthetic construct
  source 1..80: mol_type = other DNA
ttggaaagtcaatgccaaatgtcctagaagatgaagtatatgaaacagttgtagatacctctgaagaagatagtttttca

SEQ ID NO: 84862 - DNA, 80 bp, synthetic construct
  source 1..80: mol_type = other DNA
ctgatccattagattcaaatgtagcaaatcagaagccctttgagagtggaagtgacaaaatctccaaggaagttgtaccg

SEQ ID NO: 84863 - DNA, 80 bp, synthetic construct; identical to SEQ ID NO: 15206
  source 1..80: mol_type = other DNA

SEQ ID NO: 84864 - DNA, 80 bp, synthetic construct
  source 1..80: mol_type = other DNA
atatgactgatccaaactttaaaaaagaaactgaagcctctgaaagtggactggaaatacatactgtttgctcacagaag

SEQ ID NO: 84865 - DNA, 80 bp, synthetic construct
  source 1..80: mol_type = other DNA
aaaaaataccgaaagaccaaaaatcagaactaattaactgttcagcccagtttgaagcaaatgcttttgaagcaccactt

SEQ ID NO: 84866 - DNA, 80 bp, synthetic construct
  source 1..80: mol_type = other DNA
gtctttaattaccagtgtttagaatcaggtcactcaaacatggtagataagtttgcatagtttgtgtatatccatcactc

SEQ ID NO: 84867 - DNA, 80 bp, synthetic construct; identical to SEQ ID NO: 15207
  source 1..80: mol_type = other DNA

SEQ ID NO: 84868 - DNA, 80 bp, synthetic construct
  source 1..80: mol_type = other DNA
tatccagtctatcattgatgggcatttgggttgattccatgtctgtgctattgtgaatagtgctgcagtgaatgtacagg

SEQ ID NO: 84869 - DNA, 80 bp, synthetic construct
  source 1..80: mol_type = other DNA
gacagtttttgactcataaacattcagagcttggctagctaattcctgctttaatttaaaaagtgtttattatatgcaaa

SEQ ID NO: 84870 - DNA, 80 bp, synthetic construct
  source 1..80: mol_type = other DNA
ggcaacatagcgagaccccatctctacaaaaaatttaaaatacccaggcatggtggcatgcttctgatgttgtagctact

SEQ ID NO: 84871 - DNA, 80 bp, synthetic construct
  source 1..80: mol_type = other DNA
ttaatgtaggccagttctaaaataatgatttattgctgctgttgttacataattttcttaaatattttaaagattgcata

SEQ ID NO: 84872 - DNA, 80 bp, synthetic construct; identical to SEQ ID NO: 15208
  source 1..80: mol_type = other DNA

SEQ ID NO: 84873 - DNA, 80 bp, synthetic construct
  source 1..80: mol_type = other DNA
gtggtggcatgtgcctgtaatcccagctactcgggacgctaaggcaggagaatcacttgaacctgggagatggaggttgc

SEQ ID NO: 84874 - DNA, 80 bp, synthetic construct
  source 1..80: mol_type = other DNA
gttgaactcatttgcctttatcgttgagattagatcatctttcaggctgttagtatatggaccctgtttttaaaaattgt

SEQ ID NO: 84875 - DNA, 80 bp, synthetic construct
  source 1..80: mol_type = other DNA
gctacttccttgacctagatactaattttgattgagttggtaactattattaaaaaaacaacttaggtctaatttatctt

SEQ ID NO: 84876 - DNA, 80 bp, synthetic construct
  source 1..80: mol_type = other DNA
gtctggagtgcactagtgtgatctcagctcaccgtagcctcaccctcctgggctcaagcagtccttgcacctcaccctcc

SEQ ID NO: 84877 - DNA, 80 bp, synthetic construct; identical to SEQ ID NO: 15209
  source 1..80: mol_type = other DNA

SEQ ID NO: 84878 - DNA, 80 bp, synthetic construct
  source 1..80: mol_type = other DNA
aggatcttgattataaagaagcaaaatgtaataaggaaaaactacagttatttattaccccagaagctgattctctgtca

SEQ ID NO: 84879 - DNA, 80 bp, synthetic construct
  source 1..80: mol_type = other DNA
aaaatgccagcactcttattttaactcctacttccaaggatgttctgtcaaacctagtcatgatttctagaggcaaagaa

SEQ ID NO: 84880 - DNA, 80 bp, synthetic construct; identical to SEQ ID NO: 15210
  source 1..80: mol_type = other DNA

SEQ ID NO: 84881 - DNA, 80 bp, synthetic construct
  source 1..80: mol_type = other DNA
gaaacagacttgacttgtgtaaacgaacccattttcaagaactctaccatggttttatatggagacacaggtgataaaca

SEQ ID NO: 84882 - DNA, 80 bp, synthetic construct
  source 1..80: mol_type = other DNA
aacaaatgggcaggactcttaggtccaatttcaaatcacagttttggaggtagcttcagaacagcttcaaataaggaaat

SEQ ID NO: 84883 - DNA, 80 bp, synthetic construct
  source 1..80: mol_type = other DNA
catttacagagtagtgtagttgtttctgattgtaaaaatagtcatataacccctcagatgttattttccaagcaggattt

SEQ ID NO: 84884 - DNA, 80 bp, synthetic construct; identical to SEQ ID NO: 15211
  source 1..80: mol_type = other DNA

SEQ ID NO: 84885 - DNA, 80 bp, synthetic construct
  source 1..80: mol_type = other DNA
actgaagctctgcaaaaagctgtgaaactgtttagtgatattgagaatattagtgaggaaacttctgcagaggtacatcc

SEQ ID NO: 84886 - DNA, 80 bp, synthetic construct
  source 1..80: mol_type = other DNA
gaaaattacaagagaaatactgaaaatgaagataacaaatatactgctgccagtagaaattctcataacttagaatttga

SEQ ID NO: 84887 - DNA, 80 bp, synthetic construct
  source 1..80: mol_type = other DNA
gaagttgcgaaagctcaagaagcatgtcatggtaatacttcaaataaagaacagttaactgctactaaaacggagcaaaa

SEQ ID NO: 84888 - DNA, 80 bp, synthetic construct; identical to SEQ ID NO: 15212
  source 1..80: mol_type = other DNA

SEQ ID NO: 84889 - DNA, 80 bp, synthetic construct
  source 1..80: mol_type = other DNA
caaagaccctaaagtacagagaggcctgtaaagaccttgaattagcatgtgagaccattgagatcacagctgccccaaag

SEQ ID NO: 84890 - DNA, 80 bp, synthetic construct
  source 1..80: mol_type = other DNA
aaaaagaaacagcaaaaagtcctgcaacttgttacacaaatcagtccccttattcagtcattgaaaattcagccttagct

SEQ ID NO: 84891 - DNA, 80 bp, synthetic construct
  source 1..80: mol_type = other DNA
tagctgaaaatgacaaaaatcatctctccgaaaaacaagatacttatttaagtaacagtagcatgtctaacagctattcc

SEQ ID NO: 84892 - DNA, 80 bp, synthetic construct
  source 1..80: mol_type = other DNA
taaatgaagatatttgcgttgaggaacttgtgactagctcttcaccctgcaaaaataaaaatgcagccattaaattgtcc

SEQ ID NO: 84893 - DNA, 80 bp, synthetic construct; identical to SEQ ID NO: 15213
  source 1..80: mol_type = other DNA

SEQ ID NO: 84894 - DNA, 80 bp, synthetic construct
  source 1..80: mol_type = other DNA
agcttcataagtcagtctcatctgcaaatacttgtgggatttttagcacagcaagtggaaaatctgtccaggtatcagat

SEQ ID NO: 84895 - DNA, 80 bp, synthetic construct
  source 1..80: mol_type = other DNA
actgctatacgtactccagaacatttaatatcccaaaaaggcttttcatataatgtggtaaattcatctgctttctctgg

SEQ ID NO: 84896 - DNA, 80 bp, synthetic construct
  source 1..80: mol_type = other DNA
gtctagacaaaatgtatcaaaaatacttcctcgtgttgataagagaaacccagagcactgtgtaaactcagaaatggaaa

SEQ ID NO: 84897 - DNA, 80 bp, synthetic construct; identical to SEQ ID NO: 15214
  source 1..80: mol_type = other DNA

SEQ ID NO: 84898 - DNA, 80 bp, synthetic construct
  source 1..80: mol_type = other DNA
aactgccaagtcatgccacacattctctttttacatgtcccgaaaatgaggaaatggttttgtcaaattcaagaattgga

SEQ ID NO: 84899 - DNA, 80 bp, synthetic construct
  source 1..80: mol_type = other DNA
tgggggagtatggtttgatatacagatacacagattcagtattcgtatacagatttgatatcttggtatacagattcgat

SEQ ID NO: 84900 - DNA, 80 bp, synthetic construct; identical to SEQ ID NO: 15215
  source 1..80: mol_type = other DNA

SEQ ID NO: 84901 - DNA, 80 bp, synthetic construct
  source 1..80: mol_type = other DNA
tgcagtgagccgagatcccgccactgcactccagcctgggcgacagagcgagactccgtctcaaaaaaaaaaaaaaagtt

SEQ ID NO: 84902 - DNA, 80 bp, synthetic construct
  source 1..80: mol_type = other DNA
tggatcacctgaggtcaggagtttgagaccagcctgaccaacatggtgaaaccccatctttactaaaaatacaaaaaatt

SEQ ID NO: 84903 - DNA, 80 bp, synthetic construct
  source 1..80: mol_type = other DNA
aaagtgtatttaaagcacttagcagtgaacttgacatatagtaggcagagagcattcagtaagtgttggcttgctccctt

SEQ ID NO: 84904 - DNA, 80 bp, synthetic construct; identical to SEQ ID NO: 15216
  source 1..80: mol_type = other DNA

SEQ ID NO: 84905 - DNA, 80 bp, synthetic construct
  source 1..80: mol_type = other DNA
gaggctgaggcaggcggatcacctgaggtcaggagtttgagaccagcctggccaacatggtaaaaccttgtctctactaa

SEQ ID NO: 84906 - DNA, 80 bp, synthetic construct
  source 1..80: mol_type = other DNA
ctgaaaaaaaaaaaaaatcttatgggaccactattaaagtcttataggatgaccattgcatatgtggtctattgttgacc

SEQ ID NO: 84907 - DNA, 80 bp, synthetic construct
  source 1..80: mol_type = other DNA
agcaaatgccaaaactccaacatttcagtggataatcttaaataactagttcctttttaaaaaacctataaactcataaa

SEQ ID NO: 84908 - DNA, 80 bp, synthetic construct
  source 1..80: mol_type = other DNA
atttactttatggacaaagtagtacgtttatagtacttaaactatttgctgtcctttagtgtgaaattctgaggtatata

SEQ ID NO: 84909 - DNA, 80 bp, synthetic construct; identical to SEQ ID NO: 15217
  source 1..80: mol_type = other DNA

SEQ ID NO: 84910 - DNA, 80 bp, synthetic construct
  source 1..80: mol_type = other DNA
attatctcagcatgacatggaaatgcctaccttgaattatggtttaatcttaccctcttagcctctgtagaatttttaaa

SEQ ID NO: 84911 - DNA, 80 bp, synthetic construct
  source 1..80: mol_type = other DNA
aaattttgttaggccttattgccagtaaacctagagttatatttagtgtcagtttttcaaaaagtagcttatctgtggta

SEQ ID NO: 84912 - DNA, 80 bp, synthetic construct
  source 1..80: mol_type = other DNA
ctttcaaacattaggtcactatttgttgtaagtatttttgtttaacatttaaagagtcaatactttagctttaaaaaaat

SEQ ID NO: 84913 - DNA, 80 bp, synthetic construct; identical to SEQ ID NO: 15218
  source 1..80: mol_type = other DNA

SEQ ID NO: 84914 - DNA, 80 bp, synthetic construct
  source 1..80: mol_type = other DNA
tgttaaaattagtaatattatgcgttggtcatttggaagatatgagttcactgagttatgcggatcttccgaaagttgac

SEQ ID NO: 84915 - DNA, 80 bp, synthetic construct
  source 1..80: mol_type = other DNA
ttgtcacttatttttcttgtaggtgacaagcttattttcattcatttttgaaaagatgtctgccgaatacccaagtctga

SEQ ID NO: 84916 - DNA, 80 bp, synthetic construct
  source 1..80: mol_type = other DNA
acatacataacattttactaataagacagttttgacagcttggattccctaaaatggttgtagatacctaacaggattcc

SEQ ID NO: 84917 - DNA, 80 bp, synthetic construct
  source 1..80: mol_type = other DNA
atgcttgggaccaggactatttcagatttcagattttttcagattttgaaatgcttgcatatacaatacataatgagata

SEQ ID NO: 84918 - DNA, 80 bp, synthetic construct; identical to SEQ ID NO: 15219
  source 1..80: mol_type = other DNA

SEQ ID NO: 84919 - DNA, 80 bp, synthetic construct
  source 1..80: mol_type = other DNA
ataaaacattacatagttcattcatcagaactacaaaaaggtatacttagagtttttattcacccacctcttgcttacta

SEQ ID NO: 84920 - DNA, 80 bp, synthetic construct
  source 1..80: mol_type = other DNA
tttgtggttacatagtagttgatcatctggctgtgtcagtgtttcctagtttatttaaccaatttccaactagtggactt

SEQ ID NO: 84921 - DNA, 80 bp, synthetic construct; identical to SEQ ID NO: 15220
  source 1..80: mol_type = other DNA

SEQ ID NO: 84922 - DNA, 80 bp, synthetic construct
  source 1..80: mol_type = other DNA
attgtttatgcatcatgtttctttagagccgattacctgtgtaccctttcggtaagacatgtttaaatttttctaaattc

SEQ ID NO: 84923 - DNA, 80 bp, synthetic construct
  source 1..80: mol_type = other DNA
tggatgaagtactaaggttgagaggaattaaggaaattgctccgaatcagttaacaaaaagattgcagatattaaaaata

SEQ ID NO: 84924 - DNA, 80 bp, synthetic construct
  source 1..80: mol_type = other DNA
aaacagagatgctttcccctaaaaaacctgaaaaagattcaaattggcagcaacaggtacttctgaaggtgaagtagaaa

SEQ ID NO: 84925 - DNA, 80 bp, synthetic construct; identical to SEQ ID NO: 15221
  source 1..80: mol_type = other DNA

SEQ ID NO: 84926 - DNA, 80 bp, synthetic construct
  source 1..80: mol_type = other DNA
tgttgacatgcacagagcttccaggaagctacttagtgcttcacttttaaataagaaaagatagtcaaagataactagtc

SEQ ID NO: 84927 - DNA, 80 bp, synthetic construct
  source 1..80: mol_type = other DNA
aagctcttagaaattaaaaatatgatagcacaaataaattaactcagtagaaataatggaagaatcatgaaagttcccag

SEQ ID NO: 84928 - DNA, 80 bp, synthetic construct
  source 1..80: mol_type = other DNA
tttccttaattaaaagggcccactgagtgagcacacaagtaaaaatgacccacagtaaggcacatccttgtgaattttta

SEQ ID NO: 84929 - DNA, 80 bp, synthetic construct
  source 1..80: mol_type = other DNA
gagagaaaatgatttccaacctagaatctgaattaagtgtgagggtagacatttttcagatgtgaagtactaaaagatct

SEQ ID NO: 84930 - DNA, 80 bp, synthetic construct; identical to SEQ ID NO: 15222
  source 1..80: mol_type = other DNA

SEQ ID NO: 84931 - DNA, 80 bp, synthetic construct
  source 1..80: mol_type = other DNA
gaggccaggagttcgagactagcctggccaacatggtaaaatcccatctctactgaaaatacaaaaattagccaggcgtg

SEQ ID NO: 84932 - DNA, 80 bp, synthetic construct
  source 1..80: mol_type = other DNA
gaattgaacatactcatatcctttctttgccttccaaacttttaccaaaacatcattgaagaaacttacacacacacaaa

SEQ ID NO: 84933 - DNA, 80 bp, synthetic construct; identical to SEQ ID NO: 15223
  source 1..80: mol_type = other DNA

SEQ ID NO: 84934 - DNA, 80 bp, synthetic construct
  source 1..80: mol_type = other DNA
tgcccctgtaatccagctactcaggaggctgaggtgggagaactgcttgaacccaggaggtggaggctgcagtgagccaa

SEQ ID NO: 84935 - DNA, 80 bp, synthetic construct
  source 1..80: mol_type = other DNA
aaggtgaacacactaggcacagttgaaggcagaagcaactacttgaaagcaagaagaagttaatatatgcatattgaatg

SEQ ID NO: 84936 - DNA, 80 bp, synthetic construct
  source 1..80: mol_type = other DNA
ccctcactcttaactataaacagacatccaaagattatgagacatcagaaaaagcaaaaataaaataaccaaaaaacaca

SEQ ID NO: 84937 - DNA, 80 bp, synthetic construct; identical to SEQ ID NO: 15224
  source 1..80: mol_type = other DNA

SEQ ID NO: 84938 - DNA, 80 bp, synthetic construct
  source 1..80: mol_type = other DNA
gggaggctgaggcaggagaatggcatcaacccaggaggcggagctttcagtgagccgagattgcaccactgcactccagc

SEQ ID NO: 84939 - DNA, 80 bp, synthetic construct
  source 1..80: mol_type = other DNA
ggtcgtgtggggacttggagaacttttctgtccggctaaaggattgtaaacacaccaatcagcgctctgtgtctagctaa

SEQ ID NO: 84940 - DNA, 80 bp, synthetic construct
  source 1..80: mol_type = other DNA
cacttccatgccatggaatctttgttttttcactctttgcaatgaatcttgctgctgctcactctttagtgagcactacc

SEQ ID NO: 84941 - DNA, 80 bp, synthetic construct
  source 1..80: mol_type = other DNA
gaccacaaacccaccagaaagaagaaactctggacacatctgaacatcaggaagaacaaactcgggacacactatcttta

SEQ ID NO: 84942 - DNA, 80 bp, synthetic construct; identical to SEQ ID NO: 15225
  source 1..80: mol_type = other DNA

SEQ ID NO: 84943 - DNA, 80 bp, synthetic construct
  source 1..80: mol_type = other DNA
ggctggagtacagtggcacgatcttggctcactgcaacctctgcctcctaggttcaagcgactctcctgcttcagcctcc

SEQ ID NO: 84944 - DNA, 80 bp, synthetic construct
  source 1..80: mol_type = other DNA
ccactgtaccaggcctaatgttaccttttcaaaaacacctgattgtggaattgttgaagtcactgagttgtatttctgga

SEQ ID NO: 84945 - DNA, 80 bp, synthetic construct
  source 1..80: mol_type = other DNA
taatgtatttaacaaacaaacatttgttaaagtacctgctcaaactacctaatatatactatagtgaaagatataaggat

SEQ ID NO: 84946 - DNA, 80 bp, synthetic construct; identical to SEQ ID NO: 15226
  source 1..80: mol_type = other DNA

SEQ ID NO: 84947 - DNA, 80 bp, synthetic construct
  source 1..80: mol_type = other DNA
aatacaggtcttaacctagcagaggaggtagagggtagagaatgattgagatagaaattcagtagatttggccagatagt

SEQ ID NO: 84948 - DNA, 80 bp, synthetic construct
  source 1..80: mol_type = other DNA
tcttgtgcattagatctcatctagatcacctgtttgaagaaatcattccagcaattatcttgtctctctcctgcatggat

SEQ ID NO: 84949 - DNA, 80 bp, synthetic construct
  source 1..80: mol_type = other DNA
attagaattgtccctcctcttttcacttatctctttgagtactctcctgaacccagtctagtcagtcctttcagtagaac

SEQ ID NO: 84950 - DNA, 80 bp, synthetic construct; identical to SEQ ID NO: 15227
  source 1..80: mol_type = other DNA

SEQ ID NO: 84951 - DNA, 80 bp, synthetic construct
  source 1..80: mol_type = other DNA
gtaggaattcattaaatagttgatggatgggcgaacggataactaaaggaacaacttcaagttccaggtatccagggttt

SEQ ID NO: 84952 - DNA, 80 bp, synthetic construct
  source 1..80: mol_type = other DNA
ccctaggagaaaaatcgggcatgaggataaaggatattttcattgttaggtgataatttaagcaatggaaatgactcaca

SEQ ID NO: 84953 - DNA, 80 bp, synthetic construct; identical to SEQ ID NO: 15228
  source 1..80: mol_type = other DNA

SEQ ID NO: 84954 - DNA, 80 bp, synthetic construct
  source 1..80: mol_type = other DNA
ctaaataaaaagggcactttaaaaaaggtataaataggtagaagagagaaaagggagcgaggtgggataattgaaagagg

SEQ ID NO: 84955 - DNA, 80 bp, synthetic construct
  source 1..80: mol_type = other DNA
aattagaggggacacactgagagggtccacacttgacagactctcttctattatgtgttatgtgaggtagattgtaaagt

SEQ ID NO: 84956 - DNA, 80 bp, synthetic construct
  source 1..80: mol_type = other DNA
ttctccccattgcagcacaactaaggaacgtcaagagatacagaatccaaattttaccgcacctggtcaagaatttctgt

SEQ ID NO: 84957 - DNA, 80 bp, synthetic construct; identical to SEQ ID NO: 15229
  source 1..80: mol_type = other DNA

SEQ ID NO: 84958 - DNA, 80 bp, synthetic construct
  source 1..80: mol_type = other DNA
gcagtagctgtaactttcacaaagtgtgaagaagaacctttaggtattgtatgacaatttgtgtgatgaatttttgcctt

SEQ ID NO: 84959 - DNA, 80 bp, synthetic construct
  source 1..80: mol_type = other DNA
taaaaaaaattagacacacaatctaggactgctgttactggaatatattttctatcatgctactaattttctttttaaaa

SEQ ID NO: 84960 - DNA, 80 bp, synthetic construct
  source 1..80: mol_type = other DNA
aataaatagctgagcgtggtggcaggcacctgtaatcccagctgcttgggaggctgaggcaggagaatcgtttgaacccg

SEQ ID NO: 84961 - DNA, 80 bp, synthetic construct; identical to SEQ ID NO: 15230
  source 1..80: mol_type = other DNA

SEQ ID NO: 84962 - DNA, 80 bp, synthetic construct
  source 1..80: mol_type = other DNA
ctacttttgtgttttttttacttttatatattttttttttgtttagtagagacagggtttctccattttggtcaggctgg

SEQ ID NO: 84963 - DNA, 80 bp, synthetic construct
  source 1..80: mol_type = other DNA
agaatgccagagatatacaggatatgcgaattaagaagaaacaaaggcaacgcgtctttccacagccaggcagtctgtat

SEQ ID NO: 84964 - DNA, 80 bp, synthetic construct
  source 1..80: mol_type = other DNA
gctttgtttaaagaatgaacacattagtgcaggaatggatgaatgaaatcatcatattttctaattagcctgcagtggca

SEQ ID NO: 84965 - DNA, 80 bp, synthetic construct
  source 1..80: mol_type = other DNA
atagccctgaaccttctatgagctatttatattttccaaagaggattctccttaagccaatattatctaggtagaatttt

SEQ ID NO: 84966 - DNA, 80 bp, synthetic construct; identical to SEQ ID NO: 15231
  source 1..80: mol_type = other DNA

SEQ ID NO: 84967 - DNA, 80 bp, synthetic construct
  source 1..80: mol_type = other DNA
tctgaccacctgaggtcacattccctaaaatacttaaacttctcccttttgtttcccatctaagtttttgaacttaagag

SEQ ID NO: 84968 - DNA, 80 bp, synthetic construct
  source 1..80: mol_type = other DNA
tttttgtagtgaagattctagtagttaatgaaaatttttggtaaattcagttttggtttgttataattgtttttattgtg

SEQ ID NO: 84969 - DNA, 80 bp, synthetic construct
  source 1..80: mol_type = other DNA
agtttcacactgaagattattttggtaaggaaagtttatggactggaaaaggaatacagttggctgatggtggatggctc

SEQ ID NO: 84970 - DNA, 80 bp, synthetic construct; identical to SEQ ID NO: 15232
  source 1..80: mol_type = other DNA

SEQ ID NO: 84971 - DNA, 80 bp, synthetic construct
  source 1..80: mol_type = other DNA
gccaacgtggcgaaaccccatctctactaaaagtacaagaactatctgggcgtggtggcaggcacctgtaatcccggcta

SEQ ID NO: 84972 - DNA, 80 bp, synthetic construct
  source 1..80: mol_type = other DNA
tcatgcctgtaatcccagcactttgggaggctgaggtgggcagatctcttgagcacaggagtttgagaccagcctgggca

SEQ ID NO: 84973 - DNA, 80 bp, synthetic construct
  source 1..80: mol_type = other DNA
tctactaaaaatacaaaaattagccaggtatggtgatgcatgcccgtaatcccagctactcgggaggctgaggcaggaga

SEQ ID NO: 84974 - DNA, 80 bp, synthetic construct
  source 1..80: mol_type = other DNA
gaggtcaggaatttgaaaccagcctggccaacatggcaaaaccccatctctactaaaaatacaaaaattagctggacgtg

SEQ ID NO: 84975 - DNA, 80 bp, synthetic construct; identical to SEQ ID NO: 15233
  source 1..80: mol_type = other DNA

SEQ ID NO: 84976 - DNA, 80 bp, synthetic construct
  source 1..80: mol_type = other DNA
tttttgttatcagagatatattacattatgccagtggcaaaagatgggatttatttcctcagcatccttatctttaaatt

SEQ ID NO: 84977 - DNA, 80 bp, synthetic construct
  source 1..80: mol_type = other DNA
gaagttaagaatgattgccctgtagtctaagtggaaatgtggaggctttcgttagttttttctgataattcagcaaatct

SEQ ID NO: 84978 - DNA, 80 bp, synthetic construct; identical to SEQ ID NO: 15234
  source 1..80: mol_type = other DNA

SEQ ID NO: 84979 - DNA, 80 bp, synthetic construct
  source 1..80: mol_type = other DNA
gaagagtagtagtagatgagatacaaaaggaagacctcatagaccttcgtaagacccttaccttttactctgcacgattt

SEQ ID NO: 84980 - DNA, 80 bp, synthetic construct
  source 1..80: mol_type = other DNA
acctcccaggttcaagcgattctcctgcctcagcctcccgtgtagctgggactacaggcgcgcaccaccgtgcccggctg

SEQ ID NO: 84981 - DNA, 80 bp, synthetic construct; identical to SEQ ID NO: 15235
  source 1..80: mol_type = other DNA

SEQ ID NO: 84982 - DNA, 80 bp, synthetic construct
  source 1..80: mol_type = other DNA
gagaataagaatggctgtgaagattttggccttagcagctggaaggatagagttgtatgtaactactagaattgagaaga

SEQ ID NO: 84983 - DNA, 80 bp, synthetic construct
  source 1..80: mol_type = other DNA
agtataggccaaataaatcaattcacaagtcatcggcatatagatggacttgaaggccatgaaaaagagactgagaaaga

SEQ ID NO: 84984 - DNA, 80 bp, synthetic construct
  source 1..80: mol_type = other DNA
ggactgagattggccgctggatttagcactgcagaagacattactaatgttattaaaaatagctcaatagattggtggag

SEQ ID NO: 84985 - DNA, 80 bp, synthetic construct; identical to SEQ ID NO: 15236
  source 1..80: mol_type = other DNA

SEQ ID NO: 84986 - DNA, 80 bp, synthetic construct
  source 1..80: mol_type = other DNA
aagttctcttttgattacttctgttgtcttagtgctaagagtatgaatgagaaaggaggagttagagatttgagaacaga

SEQ ID NO: 84987 - DNA, 80 bp, synthetic construct
  source 1..80: mol_type = other DNA
ctgttaagtggaattttttgttttgtttttatattttgagatagggtctcactcttgtccaggctggagtgcagtggcac

SEQ ID NO: 84988 - DNA, 80 bp, synthetic construct
  source 1..80: mol_type = other DNA
tctcaaacttctggcctcaagcaatcctcctgcctcagcttcccaaaatgctgggagtataggcatgagccaccatgctc

SEQ ID NO: 84989 - DNA, 80 bp, synthetic construct; identical to SEQ ID NO: 15237
  source 1..80: mol_type = other DNA

SEQ ID NO: 84990 - DNA, 80 bp, synthetic construct
  source 1..80: mol_type = other DNA
aaatacaggcaagtttaaagcattacattacgtaatcatatacggcagtatggttaaggtttctgtgtagtctgtgactt

SEQ ID NO: 84991 - DNA, 80 bp, synthetic construct
  source 1..80: mol_type = other DNA
ctctttccccaccccctccttaacctcttgatgtatgagaagaatatgagttactaatttgatccactatttggggattg

SEQ ID NO: 84992 - DNA, 80 bp, synthetic construct
  source 1..80: mol_type = other DNA
cagtttttattctcagttattcagtgacttgtttaaacagtggaattctagagtcacacttcctaaaatatgcatttttg

SEQ ID NO: 84993 - DNA, 80 bp, synthetic construct
  source 1..80: mol_type = other DNA
cattgagcgcaaatatatctgaaacttctagcaataaaactagtagtgcagatacccaaaaagtggccattattgaactt

SEQ ID NO: 84994 - DNA, 80 bp, synthetic construct; identical to SEQ ID NO: 15238
  source 1..80: mol_type = other DNA

SEQ ID NO: 84995 - DNA, 80 bp, synthetic construct
  source 1..80: mol_type = other DNA
tgagcttaaataatgcatttccaattaaaaagcaaaataaatttgcaccatttgattttggtatctgtagcttgctgccc

SEQ ID NO: 84996 - DNA, 80 bp, synthetic construct
  source 1..80: mol_type = other DNA
tacataacaggactctttgtcatattgaatggtctgcagtattgctatctgaaattaccgataatattgtacattcagat

SEQ ID NO: 84997 - DNA, 80 bp, synthetic construct
  source 1..80: mol_type = other DNA
catgttggattgattgctttttactgaaagcattccatcaagctgaaacagtcttttgttttatgttgcttagaacatca

SEQ ID NO: 84998 - DNA, 80 bp, synthetic construct; identical to SEQ ID NO: 15239
  source 1..80: mol_type = other DNA

SEQ ID NO: 84999 - DNA, 80 bp, synthetic construct
  source 1..80: mol_type = other DNA
atacctaatcgactgtgatcacatttcctttctttacagcttactgctttccatgaagttattaactgtccttttcattt

SEQ ID NO: 85000 - DNA, 80 bp, synthetic construct
  source 1..80: mol_type = other DNA
ccattctgaagtgctcattttctatgtgtgccatacagctctcattctgtaaattattcttacctcttttctgtgttaga

SEQ ID NO: 85001 - DNA, 80 bp, synthetic construct
  source 1..80: mol_type = other DNA
tcagaatttttaagacatttcatttatcttctttagcatagctcctgctaattgcagtgcattctttttttttttttttt

SEQ ID NO: 85002 - DNA, 80 bp, synthetic construct; identical to SEQ ID NO: 15240
  source 1..80: mol_type = other DNA

SEQ ID NO: 85003 - DNA, 80 bp, synthetic construct
  source 1..80: mol_type = other DNA
acctgccaccacacccagccaaattttgtatttttagtagagacagggtttcaccatattggccaggctggtctcatcct

SEQ ID NO: 85004 - DNA, 80 bp, synthetic construct
  source 1..80: mol_type = other DNA
ttggcccagatgcttactggcacttactctagaaacacatagtccttcattgagttctggaaaattttctttaagtggtt

SEQ ID NO: 85005 - DNA, 80 bp, synthetic construct
  source 1..80: mol_type = other DNA
tgtctttttttattctaacttctgggatggtttttaatttttttcttctaattctttattaatatgccatgttttataga

SEQ ID NO: 85006 - DNA, 80 bp, synthetic construct; identical to SEQ ID NO: 15241
  source 1..80: mol_type = other DNA

SEQ ID NO: 85007 - DNA, 80 bp, synthetic construct
  source 1..80: mol_type = other DNA
agagaacagggatctttttatcagagaaaggtgcagatgtgagattgaagtaaaagaaaacttgtggttctgcatttgta

SEQ ID NO: 85008 - DNA, 80 bp, synthetic construct
  source 1..80: mol_type = other DNA
accccgtctctactaaaaatataaaacttagccaggcatgatggcatgctcctgtagtcccagctactgtggaggctgag

SEQ ID NO: 85009 - DNA, 80 bp, synthetic construct
  source 1..80: mol_type = other DNA
gaataatccagtagtagtgagtaaccctagctctcagactgttttctaagtactgttttctcttaaaaggatgcaaggtg

SEQ ID NO: 85010 - DNA, 80 bp, synthetic construct; identical to SEQ ID NO: 15242
  source 1..80: mol_type = other DNA

SEQ ID NO: 85011 - DNA, 80 bp, synthetic construct
  source 1..80: mol_type = other DNA
tttgggaggctgaggcagggagaattgcttgaacccaggaagcggaggttgcagtgagccgagattgtgccactgcattc

SEQ ID NO: 85012 - DNA, 80 bp, synthetic construct
  source 1..80: mol_type = other DNA
ggctgaggtgggcatactcaggagtatgagaccagcctgggcaacatgacaaaaccccatctctacaaaaaatacaaaaa

SEQ ID NO: 85013 - DNA, 80 bp, synthetic construct
  source 1..80: mol_type = other DNA
aacaacaaaaactaggtaaaaggagaaaaaaatcaagcatttatctttcttctcttatatgatctatattttgggaccct

SEQ ID NO: 85014 - DNA, 80 bp, synthetic construct
  source 1..80: mol_type = other DNA
gtctcgcactgtcgcccaggctggagtgcagtggcacgatcttggctcactgcaacctctgcctcctggattcaagcgat

SEQ ID NO: 85015 - DNA, 80 bp, synthetic construct; identical to SEQ ID NO: 15243
  source 1..80: mol_type = other DNA

SEQ ID NO: 85016 - DNA, 80 bp, synthetic construct
  source 1..80: mol_type = other DNA
ttttttttaatgaaaacctttgtctatttgagtctctctggttagagactttcctcaatggtgatcattcactgatccag

SEQ ID NO: 85017 - DNA, 80 bp, synthetic construct
  source 1..80: mol_type = other DNA
atcagtgactgttctgagagctgagcagagtaaggaaattaatagggagactcattgtcagtgtaagaattttatttcag

SEQ ID NO: 85018 - DNA, 80 bp, synthetic construct
  source 1..80: mol_type = other DNA
tcagcctcccgagtagctgggactacaggcgcctgccaccacccctggctaattttttatttttagtagagacggggttt

SEQ ID NO: 85019 - DNA, 80 bp, synthetic construct; identical to SEQ ID NO: 15244
  source 1..80: mol_type = other DNA

SEQ ID NO: 85020 - DNA, 80 bp, synthetic construct
  source 1..80: mol_type = other DNA
gcctccaatttctgagtgttttcctttaattattttgtttcatgttaactccttacaacaagtttggtggctgaataacc

SEQ ID NO: 85021 - DNA, 80 bp, synthetic construct
  source 1..80: mol_type = other DNA
tcactgcaccctctgcctcccaggttcaagcagttctcctgcctcagcctcccgagtagctgggattacaggcgcccacc

SEQ ID NO: 85022 - DNA, 80 bp, synthetic construct
  source 1..80: mol_type = other DNA
ttaatatacataaagcgcttaacaccatgccaggtaccttagtaagtgttcgatgaatatttgctttttgtattagccat

SEQ ID NO: 85023 - DNA, 80 bp, synthetic construct; identical to SEQ ID NO: 15245
  source 1..80: mol_type = other DNA

SEQ ID NO: 85024 - DNA, 80 bp, synthetic construct
  source 1..80: mol_type = other DNA
gttttttacttatttactgtcttactaatcttcctaagactttttaaagtgaatatttttaaggcagttctagaagaatg

SEQ ID NO: 85025 - DNA, 80 bp, synthetic construct
  source 1..80: mol_type = other DNA
tcatcgcttttcagtgatggaggaaatgttggttgtgttgatgtaattattcaaagagcataccctatacaggtatgatg

SEQ ID NO: 85026 - DNA, 80 bp, synthetic construct
  source 1..80: mol_type = other DNA
gcctctcaagtagctgagccaccacacctggctaattttgtatttttggtagagaaggggtttcatcatgttggtcaggc

SEQ ID NO: 85027 - DNA, 80 bp, synthetic construct; identical to SEQ ID NO: 15246
  source 1..80: mol_type = other DNA

SEQ ID NO: 85028 - DNA, 80 bp, synthetic construct
  source 1..80: mol_type = other DNA
agtaaattgactttattttttagtatctagggtattcttttttggtgttagacaaagaatagcaacaagggacagaaata

SEQ ID NO: 85029 - DNA, 80 bp, synthetic construct
  source 1..80: mol_type = other DNA
ttagctttcatgtgttattatgcctggaactaggacctattgtggtgtcaattttaatattaaaaatcatggtgttttga

SEQ ID NO: 85030 - DNA, 80 bp, synthetic construct; identical to SEQ ID NO: 15247
  source 1..80: mol_type = other DNA

SEQ ID NO: 85031 - DNA, 80 bp, synthetic construct
  source 1..80: mol_type = other DNA
taatctcttaaatgtgtagtagcattgtatctaaaaaaaacaatgcacataccttaatacactttattgctaaaaaatgc

SEQ ID NO: 85032 - DNA, 80 bp, synthetic construct
  source 1..80: mol_type = other DNA
ggcttttcctttcatgaaagatttctctgtagcatgcaatgctgtttgatagcattttatccatggtagaactgctttca

SEQ ID NO: 85033 - DNA, 80 bp, synthetic construct
  source 1..80: mol_type = other DNA
ttaatctgttcccacactgctataaagaatacctgagactgggtaatttctaaaggaaagaagcttaattgacttacagt

SEQ ID NO: 85034 - DNA, 80 bp, synthetic construct
  source 1..80: mol_type = other DNA
gcatgggggaaaccacccccatgatccaatcacctcccaccaggtctctccctcaacacatggggattacaatttgagat

SEQ ID NO: 85035 - DNA, 80 bp, synthetic construct; identical to SEQ ID NO: 15248
  source 1..80: mol_type = other DNA

SEQ ID NO: 85036 - DNA, 80 bp, synthetic construct
  source 1..80: mol_type = other DNA
gcagtggagagatactggctcactgcaacctccgcctcctgtttcaagcaattctcatgcctcagcctcccaagtagctg

SEQ ID NO: 85037 - DNA, 80 bp, synthetic construct
  source 1..80: mol_type = other DNA
tcacaaggtcaggagttgaagaccagcctggccaacatggtgaaaccctgtttctatgaaaaattcaaaaattagctggg

SEQ ID NO: 85038 - DNA, 80 bp, synthetic construct; identical to SEQ ID NO: 15249
  source 1..80: mol_type = other DNA

SEQ ID NO: 85039 - DNA, 80 bp, synthetic construct
  source 1..80: mol_type = other DNA
ctcttctcacagctccactaggcagttccccactgaggactgtgggaggtggctccaaccccgtatttccctcacagttt

SEQ ID NO: 85040 - DNA, 80 bp, synthetic construct
  source 1..80: mol_type = other DNA
gcccagcatcacatggaggccaccaaggcttagggcttgcaccctctcaagcaatggcctgatctgtaccttggcccttt

SEQ ID NO: 85041 - DNA, 80 bp, synthetic construct
  source 1..80: mol_type = other DNA
tggagacactgtctccattgccttggctattaacgtttgtttccttgttacttatgcaaacttctgcagctggcttgaat

SEQ ID NO: 85042 - DNA, 80 bp, synthetic construct; identical to SEQ ID NO: 15250
  source 1..80: mol_type = other DNA

SEQ ID NO: 85043 - DNA, 80 bp, synthetic construct
  source 1..80: mol_type = other DNA
agtctctagggagttccagactttcccacatcttcctgtcttcttctgagccctccaaactcttccaatctctgcctgtt

SEQ ID NO: 85044 - DNA, 80 bp, synthetic construct
  source 1..80: mol_type = other DNA
acatggctggggaggcctcaggaaacttacaatcatagtggaagatgaaggagaagcaagtaccttcttcacaaggtggc

SEQ ID NO: 85045 - DNA, 80 bp, synthetic construct
  source 1..80: mol_type = other DNA
tttgggtgaggacacagagccaaatcgtatgaagctccttatcatttaagttttattgtgacattgcagtaattcagtca

SEQ ID NO: 85046 - DNA, 80 bp, synthetic construct; identical to SEQ ID NO: 15251
  source 1..80: mol_type = other DNA

SEQ ID NO: 85047 - DNA, 80 bp, synthetic construct
  source 1..80: mol_type = other DNA
gagtagctaggattacaggcatgtgccaccacgcccggctaattttgtatttttagtagagacggggtttcaccatgttg

SEQ ID NO: 85048 - DNA, 80 bp, synthetic construct
  source 1..80: mol_type = other DNA
ggatattgtgttaggagtcatgaaaataacattaatcactctatacatctctgtcagagctctgtgacagagacatgaag

SEQ ID NO: 85049 - DNA, 80 bp, synthetic construct
  source 1..80: mol_type = other DNA
ttaaactctgtatgactttttttttttttaaacatgagtacactggtttcaaaatttcctggaaaacttatagcaggcca

SEQ ID NO: 85050 - DNA, 80 bp, synthetic construct
  source 1..80: mol_type = other DNA
agctactcgggaggctgaggcaggagaaccacttgaacccaggagacagaggttgcaatgagccgagatcacaccactgc

SEQ ID NO: 85051 - DNA, 80 bp, synthetic construct; identical to SEQ ID NO: 15252
  source 1..80: mol_type = other DNA

SEQ ID NO: 85052 - DNA, 80 bp, synthetic construct
  source 1..80: mol_type = other DNA
gaaatgctgcatttctcaaaagggatgtgtacatttctgggattttcagtgatgtgccagacgagtgtggtggtatgttt

SEQ ID NO: 85053 - DNA, 80 bp, synthetic construct
  source 1..80: mol_type = other DNA
aatggcttagtttccatgttcttagctgtttctcaagtccttcctggagtgtacttgataatcctctaccctaagggtac

SEQ ID NO: 85054 - DNA, 80 bp, synthetic construct; identical to SEQ ID NO: 15253
  source 1..80: mol_type = other DNA

SEQ ID NO: 85055 - DNA, 80 bp, synthetic construct
  source 1..80: mol_type = other DNA
aggctcaggcaggagaatcgcttgaatccaggaggcagaggttgcagtgagccaaggtcatgccattgcactccagccta

SEQ ID NO: 85056 - DNA, 80 bp, synthetic construct
  source 1..80: mol_type = other DNA
aatttttagacaggtagatagctaaaaaaaaattcaaattctaagattagtttgttagggaggaaggagcaaatatttta

SEQ ID NO: 85057 - DNA, 80 bp, synthetic construct
  source 1..80: mol_type = other DNA
cgaaatgttacaatttgggttctccctgtgagaagtgagtccggttttaaaacctgtgagtatacttgctgcaggtctga

SEQ ID NO: 85058 - DNA, 80 bp, synthetic construct; identical to SEQ ID NO: 15254
  source 1..80: mol_type = other DNA

SEQ ID NO: 85059 - DNA, 80 bp, synthetic construct
  source 1..80: mol_type = other DNA
aatgttgaatgatggccttttgaaatcaggttttacaacaaaattgtttaaacactgcctgcatatttagaatctctata

SEQ ID NO: 85060 - DNA, 80 bp, synthetic construct
  source 1..80: mol_type = other DNA
gatttatctgtttatttttgttacactgggtaagattcccaagaggtacaagtagaaatttgctaaagtgagtaggacag

SEQ ID NO: 85061 - DNA, 80 bp, synthetic construct
  source 1..80: mol_type = other DNA
ctactacctatgtggcttgtgcaaattagttgtcccctttgtgcctcagttttacctacaacacagaaacaatgatatta

SEQ ID NO: 85062 - DNA, 80 bp, synthetic construct
  source 1..80: mol_type = other DNA
ccgtagggaaatagaattattaatagtttgaggcacctgagaatattatgtgagaaactgattacattaaccacaccctt

SEQ ID NO: 85063 - DNA, 80 bp, synthetic construct; identical to SEQ ID NO: 15255
  source 1..80: mol_type = other DNA

SEQ ID NO: 85064 - DNA, 80 bp, synthetic construct
  source 1..80: mol_type = other DNA
aagttagtttatatcagagaagcaaaatccactactaatgcccacaaagagataatataaaagaggatctgtatttattt

SEQ ID NO: 85065 - DNA, 80 bp, synthetic construct
  source 1..80: mol_type = other DNA
aaagtaaatctgaaagagctaacatacagttagcagcgacaaaaaaaactcagtatcaacaactaccggtacaaaccttt

SEQ ID NO: 85066 - DNA, 80 bp, synthetic construct; identical to SEQ ID NO: 15256
  source 1..80: mol_type = other DNA

SEQ ID NO: 85067 - DNA, 80 bp, synthetic construct
  source 1..80: mol_type = other DNA
atctcttatgattagttggagctaccagttggcaaatttgctagctaactagtgatctgaaagtaagcctctttgaacct

SEQ ID NO: 85068 - DNA, 80 bp, synthetic construct
  source 1..80: mol_type = other DNA
tgatgttatattggtgtcctcaatttatttccttagccatacactctacttttcattgtacagggctatttattatctca

SEQ ID NO: 85069 - DNA, 80 bp, synthetic construct
  source 1..80: mol_type = other DNA
acccgccaccgagcctggccaattttttgtatttttagtagagtcggggtttcaccgtgttaaccaggatagtctaaatc

SEQ ID NO: 85070 - DNA, 80 bp, synthetic construct
  source 1..80: mol_type = other DNA
tcttttgctgtgttttctccttattttttaaatgtgtttgtgtttggtgagttatgttttagtgcttcgtaggtttttct

SEQ ID NO: 85071 - DNA, 80 bp, synthetic construct; identical to SEQ ID NO: 15257
  source 1..80: mol_type = other DNA

SEQ ID NO: 85072 - DNA, 80 bp, synthetic construct
  source 1..80: mol_type = other DNA
taattttagattgagaggtgaggagagagacctccctggaaagctgacatttgagtgaagcttgaaggaattgagggagt

SEQ ID NO: 85073 - DNA, 80 bp, synthetic construct
  source 1..80: mol_type = other DNA
gtccttgtgtggactgtaacttcctgtgatgacaggaagtcacaggaaaattccaggtagagggacactgtctgacaggt

SEQ ID NO: 85074 - DNA, 80 bp, synthetic construct; identical to SEQ ID NO: 15258
  source 1..80: mol_type = other DNA

SEQ ID NO: 85075 - DNA, 80 bp, synthetic construct
  source 1..80: mol_type = other DNA
gtctacttgatggttacataggaatctgttcagaggaatggctggatatgaatttgggagtctttactacaaattttttt

SEQ ID NO: 85076 - DNA, 80 bp, synthetic construct
  source 1..80: mol_type = other DNA
gatgaggtcactgtgggcatgggagtagatagagacgggaagagatccaagacctgattgaagccttttatacttagaag

SEQ ID NO: 85077 - DNA, 80 bp, synthetic construct
  source 1..80: mol_type = other DNA
agtgagagtgattaagtctgccaaatgctatttcatagaattgataatgaagtgaggaccaagaattgatcattggcttt

SEQ ID NO: 85078 - DNA, 80 bp, synthetic construct; identical to SEQ ID NO: 15259
  source 1..80: mol_type = other DNA

SEQ ID NO: 85079 - DNA, 80 bp, synthetic construct
  source 1..80: mol_type = other DNA
aatcacaggaaaaaagtaaagtacgtaggtatagataccaatggaagagttgatatacaagaggaaacttgtggcagacc

SEQ ID NO: 85080 - DNA, 80 bp, synthetic construct
  source 1..80: mol_type = other DNA
ctggataacacggtgaaaccccgtctctactaaaaatacaaaaaattagccgggtgtggtggcgggcgcctgcagtctca

SEQ ID NO: 85081 - DNA, 80 bp, synthetic construct
  source 1..80: mol_type = other DNA
tgaaatcattatctaagaaagtggtagagtaaatggactaagtaaacacatcatgactgccagggcccactggaggttta

SEQ ID NO: 85082 - DNA, 80 bp, synthetic construct
  source 1..80: mol_type = other DNA
aaaaggaggatttaaataattgaccttggacacaatgcagagcaaagaagagacattagaagacgtggatcaatgaacag

SEQ ID NO: 85083 - DNA, 80 bp, synthetic construct; identical to SEQ ID NO: 15260
  source 1..80: mol_type = other DNA

SEQ ID NO: 85084 - DNA, 80 bp, synthetic construct
  source 1..80: mol_type = other DNA
ctgataacacgaggttcaaaactgagtgtttttagagtgggaggagcagcaatgaagcatgaggaagacatctgcctcat

SEQ ID NO: 85085 - DNA, 80 bp, synthetic construct
  source 1..80: mol_type = other DNA
caaagcctggaagcggaatccagggaatttggcatgactgagagcctgtgctgccttttttaaatgttttaatttttgtg

SEQ ID NO: 85086 - DNA, 80 bp, synthetic construct
  source 1..80: mol_type = other DNA
aattcacagcaaccatgagtaaaaatgctgatgatcatcaggtcaaggatagtctggagcagttaagatgttactttaca

SEQ ID NO: 85087 - DNA, 80 bp, synthetic construct; identical to SEQ ID NO: 15261
  source 1..80: mol_type = other DNA

SEQ ID NO: 85088 - DNA, 80 bp, synthetic construct
  source 1..80: mol_type = other DNA
acttacctggacaaggtagagaacatttgcaagaagttttcaagtcctttctgtcacagaatggaatgtccagagatgga

SEQ ID NO: 85089 - DNA, 80 bp, synthetic construct
  source 1..80: mol_type = other DNA
ggggatcacaagtcattttctttgcctaccctaaggcaggctgtcaggctaaatgtagatgatagatatagtaaggttct

SEQ ID NO: 85090 - DNA, 80 bp, synthetic construct; identical to SEQ ID NO: 15262
  source 1..80: mol_type = other DNA

SEQ ID NO: 85091 - DNA, 80 bp, synthetic construct
  source 1..80: mol_type = other DNA
atttgaggttgcctatatagaactggcaggaaagtatatagaagcaggcaatcacagaaaagctgaagacacttttcaaa

SEQ ID NO: 85092 - DNA, 80 bp, synthetic construct
  source 1..80: mol_type = other DNA
gtgtcaattctttggagaaactggttttaaggaaacttcagagaaatgcgttagacctggaaagcttaagcctccttagg

SEQ ID NO: 85093 - DNA, 80 bp, synthetic construct
  source 1..80: mol_type = other DNA
gaactctgtgggacagggtccttaggcactcaaatattgaccactttcatatttcatttgattttctgttaacgtgctaa

SEQ ID NO: 85094 - DNA, 80 bp, synthetic construct
  source 1..80: mol_type = other DNA
taatcccagctactcaggaggctgaggcaggagaattgcttgaacctgggaagcggaggttgcagtgaaatgagatcgca

SEQ ID NO: 85095 - DNA, 80 bp, synthetic construct; identical to SEQ ID NO: 15263
  source 1..80: mol_type = other DNA

SEQ ID NO: 85096 - DNA, 80 bp, synthetic construct
  source 1..80: mol_type = other DNA
agtatgtatccctggaagatgtctctggttctagatcatttttcccagttcagtgagtaacgccgtgtatttatttgcta

SEQ ID NO: 85097 - DNA, 80 bp, synthetic construct
  source 1..80: mol_type = other DNA
acctttgcttcattgtaaggtggtggtctcccaatgtacatgtctgtgtctaaatttccccatatattaggacaccagtc

SEQ ID NO: 85098 - DNA, 80 bp, synthetic construct; identical to SEQ ID NO: 15264
  source 1..80: mol_type = other DNA

SEQ ID NO: 85099 - DNA, 80 bp, synthetic construct
  source 1..80: mol_type = other DNA
ctcatttccttggaggagtcagggaacactctgctccaccagcttcttgtggaagcctggatattacgcaggcctgcccg

SEQ ID NO: 85100 - DNA, 80 bp, synthetic construct
  source 1..80: mol_type = other DNA
cttataagtgcagagaagaaaacgctgacgtatgctgccttccctctctgtttcggctacctaaaaggaaagggccccct

SEQ ID NO: 85101 - DNA, 80 bp, synthetic construct
  source 1..80: mol_type = other DNA
gctgttttctctttatctctttgtcttgtgtctttatttcttacaatctcttgtctccgcacacgagaacacccgctaag

SEQ ID NO: 85102 - DNA, 80 bp, synthetic construct
  source 1..80: mol_type = other DNA
gtagctgggacgacaggcacgtgccaccacacacggctaattttttgtattttaatagagctggggtttcaccatgttgc

SEQ ID NO: 85103 - DNA, 80 bp, synthetic construct; identical to SEQ ID NO: 15265
  source 1..80: mol_type = other DNA

SEQ ID NO: 85104 - DNA, 80 bp, synthetic construct
  source 1..80: mol_type = other DNA
gtcaaattgattaatgtttgcagagtatatctgtttcgatccttttgtttttaatctacctttgtcgaatttaaagtgag

SEQ ID NO: 85105 - DNA, 80 bp, synthetic construct
  source 1..80: mol_type = other DNA
cttttcattcctccatttctcttttcttgccttcctgaaggttacttaaatatattttaggattccatcttgatttattt

SEQ ID NO: 85106 - DNA, 80 bp, synthetic construct
  source 1..80: mol_type = other DNA
agaattttgctttcattttgattttggagggaaagggattggatagtgaccatatacagacctttttcttccctactttt

SEQ ID NO: 85107 - DNA, 80 bp, synthetic construct
  source 1..80: mol_type = other DNA
attgtttcttcctccatcctattgtcctcagtcctgatgctctgagagtcttcctttaatcttctcttttctgtttaaac

SEQ ID NO: 85108 - DNA, 80 bp, synthetic construct; identical to SEQ ID NO: 15266
  source 1..80: mol_type = other DNA

SEQ ID NO: 85109 - DNA, 80 bp, synthetic construct
  source 1..80: mol_type = other DNA
ccttatgtcagtcagtcctggtcacctgtttggtccctggcagttttttctcatttctgttcagaagaagaaaaaggtaa

SEQ ID NO: 85110 - DNA, 80 bp, synthetic construct
  source 1..80: mol_type = other DNA
ttaatcaccagattttaaattttatatcatgatattccacgtttgtagattttgggtgaatgtttcctttttaaaattta

SEQ ID NO: 85111 - DNA, 80 bp, synthetic construct; identical to SEQ ID NO: 15267
  source 1..80: mol_type = other DNA

SEQ ID NO: 85112 - DNA, 80 bp, synthetic construct
  source 1..80: mol_type = other DNA
gttcatattcctgatgcatgataacatttaatgcttcctacctttaaaaatcttctttgttttgcatagatgctcttttg

SEQ ID NO: 85113 - DNA, 80 bp, synthetic construct
  source 1..80: mol_type = other DNA
cctgtacacttctgaataagccacctactagcctcagtaatacaatgatctcttcaaggacagggactctgtttggattt

SEQ ID NO: 85114 - DNA, 80 bp, synthetic construct
  source 1..80: mol_type = other DNA
gctcagggtcacaatgctataaattgatttgaacttatactttcaggccctaaagctcttaggttctttcttatacttca

SEQ ID NO: 85115 - DNA, 80 bp, synthetic construct; identical to SEQ ID NO: 15268
  source 1..80: mol_type = other DNA

SEQ ID NO: 85116 - DNA, 80 bp, synthetic construct
  source 1..80: mol_type = other DNA
caagacaatgcctttcgacagagggcaagtccaggagggaactcagaggtgagttgtcaatagctagctctccccagaag

SEQ ID NO: 85117 - DNA, 80 bp, synthetic construct
  source 1..80: mol_type = other DNA
agttcagagtaggccagaccacaaagctgcaaaataagtttcttcttttccttttgtcttgtgaagatttacctagtgta

SEQ ID NO: 85118 - DNA, 80 bp, synthetic construct
  source 1..80: mol_type = other DNA
ttttgatggaatttgatccagacatggaaacctccacttacgtaaaagtgcaatgaggaaactacactgtttacttttta

SEQ ID NO: 85119 - DNA, 80 bp, synthetic construct
  source 1..80: mol_type = other DNA
aaacttataatttctttaaaagcagtgtttaaaattaagatccattaaataaatttgaaatgaaaagaaagaaaagatga

SEQ ID NO: 85120 - DNA, 80 bp, synthetic construct; identical to SEQ ID NO: 15269
  source 1..80: mol_type = other DNA

SEQ ID NO: 85121 - DNA, 80 bp, synthetic construct
  source 1..80: mol_type = other DNA
ggccacagagtgagactgcgtctcaaaaaaaaaaaaaaaaaattataactctttattttgaactaatttcagacctttaa

SEQ ID NO: 85122 - DNA, 80 bp, synthetic construct
  source 1..80: mol_type = other DNA
tattttaccctgtttccccttttttgttctgggatcccaaattgcatttagtcatttttcccctgtattttctaccagtc

SEQ ID NO: 85123 - DNA, 80 bp, synthetic construct
  source 1..80: mol_type = other DNA
tctgatgttttctcatgactaggatgaagttatgcatttctggcaagactaccactgaagtgatgatgtgtctttctcag

SEQ ID NO: 85124 - DNA, 80 bp, synthetic construct
  source 1..80: mol_type = other DNA
cattcatcagttgattttgtttgcaacaatgattactgtggtatttgcctaattatgatttttctccctttctttccttc

SEQ ID NO: 85125 - DNA, 80 bp, synthetic construct; identical to SEQ ID NO: 15270
  source 1..80: mol_type = other DNA

SEQ ID NO: 85126 - DNA, 80 bp, synthetic construct
  source 1..80: mol_type = other DNA
tttttagtagaaaatggtgtttagatccaagatctggttgctagataggctcattactttactgtggaggcatcagtact

SEQ ID NO: 85127 - DNA, 80 bp, synthetic construct
  source 1..80: mol_type = other DNA
tagggagtcagacctgtacaaaaagatatacttcatgtcacttcctccttatccttgcagtcccaatcctaatcctcctt

SEQ ID NO: 85128 - DNA, 80 bp, synthetic construct; identical to SEQ ID NO: 15271
  source 1..80: mol_type = other DNA

SEQ ID NO: 85129 - DNA, 80 bp, synthetic construct
  source 1..80: mol_type = other DNA
ggagtacaagaaatgggattactgggtgcaaaggtaaatggatatgtgtctttgctaggtattgccaaatttatctccag

SEQ ID NO: 85130 - DNA, 80 bp, synthetic construct
  source 1..80: mol_type = other DNA
gtatacctgcttccacatgacctcagtaaaagaatgtgttgtcatattggtattgaaattttagcactgtaagcaacagg

SEQ ID NO: 85131 - DNA, 80 bp, synthetic construct
  source 1..80: mol_type = other DNA
taggacttgcccctttcgtctatttgtcagacgaatgttacaatttactggcaataaagttttggatagaccttaatgag

SEQ ID NO: 85132 - DNA, 80 bp, synthetic construct
  source 1..80: mol_type = other DNA
gagggccactttcaagagacattcaacaaaatgaaaaatactgttgaggtaaggttacttttcagcatcaccacacattt

SEQ ID NO: 85133 - DNA, 80 bp, synthetic construct; identical to SEQ ID NO: 15272
  source 1..80: mol_type = other DNA

SEQ ID NO: 85134 - DNA, 80 bp, synthetic construct
  source 1..80: mol_type = other DNA
tttctttgacttgatttaatcccagataagagacactgatattattttccctagatcatgtatgcattttctgcttaaat

SEQ ID NO: 85135 - DNA, 80 bp, synthetic construct
  source 1..80: mol_type = other DNA
tcaaatgccaagttagtaaaactaggattcatacttaggccatcgaatgcagaacccagactaggaactgctatgcaatg

SEQ ID NO: 85136 - DNA, 80 bp, synthetic construct; identical to SEQ ID NO: 15273
  source 1..80: mol_type = other DNA

SEQ ID NO: 85137 - DNA, 80 bp, synthetic construct
  source 1..80: mol_type = other DNA
tcactgcagtgtctgcctcctgggctcaagcgattctcgtgccttagcctcccaagtagctgggactacaggtgcgtgcc

SEQ ID NO: 85138 - DNA, 80 bp, synthetic construct
  source 1..80: mol_type = other DNA
gtcttcaaaggcagtttactaatcctgctgaagagacaactgtcatttacacagcattttaaagttttacaaaatactgt

SEQ ID NO: 85139 - DNA, 80 bp, synthetic construct
  source 1..80: mol_type = other DNA
acctttatagatgtgagatgattcccagctattaagtagtaaatagagctaggacttgagccccaatcttccagcttcaa

SEQ ID NO: 85140 - DNA, 80 bp, synthetic construct; identical to SEQ ID NO: 15274
  source 1..80: mol_type = other DNA

SEQ ID NO: 85141 - DNA, 80 bp, synthetic construct
  source 1..80: mol_type = other DNA
aaaacaagcttatgcatatactgcatgcaaatgatcccaagtggtccaccccaactaaagactgtacttcagggccgtac

SEQ ID NO: 85142 - DNA, 80 bp, synthetic construct
  source 1..80: mol_type = other DNA
tatgtggctcctgtaagtatagttatttagaaattttatttattgaagcaagatatgaaactctgggtgcacactttcca

SEQ ID NO: 85143 - DNA, 80 bp, synthetic construct
  source 1..80: mol_type = other DNA
aaatcacagtagatgcaaatcaagctaaagtctttaacattggctaatggctgattcttaaatagctaatacttgctaag

SEQ ID NO: 85144 - DNA, 80 bp, synthetic construct
  source 1..80: mol_type = other DNA
accatttttttttctcatcactgttctaacaaaatgatgttgaagatttaaatgacattgctcaaagacctgctatacat

SEQ ID NO: 85145 - DNA, 80 bp, synthetic construct; identical to SEQ ID NO: 15275
  source 1..80: mol_type = other DNA

SEQ ID NO: 85146 - DNA, 80 bp, synthetic construct
  source 1..80: mol_type = other DNA
aatgtgaactgaaatcacctaacctattaggagttaggggagggagactgtgtgtaatatttgcgtgcttaaatattttc

SEQ ID NO: 85147 - DNA, 80 bp, synthetic construct
  source 1..80: mol_type = other DNA
tcagcccagatgacttcaaagtcttgtaaaggggagaaagagattgatgaccaaaagaactgcaaaaagagaagagcctt

SEQ ID NO: 85148 - DNA, 80 bp, synthetic construct; identical to SEQ ID NO: 15276
  source 1..80: mol_type = other DNA

SEQ ID NO: 85149 - DNA, 80 bp, synthetic construct
  source 1..80: mol_type = other DNA
attatctcagactgaaacgacgttgtactacatctctgatcaaagaacaggagagttcccaggccagtacggaagaatgt

SEQ ID NO: 85150 - DNA, 80 bp, synthetic construct
  source 1..80: mol_type = other DNA
gtttcaaatttacctcagcgtttgtgtatcgggcaaaaatcgttttgcccgattccgtattggtatacttttgcttcagt

SEQ ID NO: 85151 - DNA, 80 bp, synthetic construct
  source 1..80: mol_type = other DNA
cccccatctttacaaagaaaaaaaaaaggggaaaagaaaatcttttaaatctttggatttgatcactacaagtattattt

SEQ ID NO: 85152 - DNA, 80 bp, synthetic construct; identical to SEQ ID NO: 15277
  source 1..80: mol_type = other DNA

SEQ ID NO: 85153 - DNA, 80 bp, synthetic construct
  source 1..80: mol_type = other DNA
ttttcaacaaaatggtcatccaaactcaaacttgagaaaatatcttgctttcaaattggcactgattctgcctgctttat

SEQ ID NO: 85154 - DNA, 80 bp, synthetic construct
  source 1..80: mol_type = other DNA
atgatcctggctcactgcagcctccacttcccgggttcacgtaattctcccacctcaagcctccctagtagctgggatta

SEQ ID NO: 85155 - DNA, 80 bp, synthetic construct
  source 1..80: mol_type = other DNA
aatatttgttactttcttaggtttaatagagaaaagggataaaacatttctaactgggagttaattgcatggagaaggtc

SEQ ID NO: 85156 - DNA, 80 bp, synthetic construct; identical to SEQ ID NO: 15278
  source 1..80: mol_type = other DNA

SEQ ID NO: 85157 - DNA, 80 bp, synthetic construct
  source 1..80: mol_type = other DNA
gggcaaccaactgccttaaacaacgggaaggaagaggcggtctaaattcgtccacttcccgggagaggtgagaatgtaaa

SEQ ID NO: 85158 - DNA, 80 bp, synthetic construct
  source 1..80: mol_type = other DNA
ctggagcgttttcggggctgtaaagggagaatggcgcatgcgcatattcagggcggaaggcgcgctaagagcaggtacgg

SEQ ID NO: 85159 - DNA, 80 bp, synthetic construct
  source 1..80: mol_type = other DNA
gctaccgcgttgcgttttctaggcatttacttacacgctttgtggtttacgctctcataaccttgtggttttatagtcct

SEQ ID NO: 85160 - DNA, 80 bp, synthetic construct; identical to SEQ ID NO: 15279
  source 1..80: mol_type = other DNA

SEQ ID NO: 85161 - DNA, 80 bp, synthetic construct
  source 1..80: mol_type = other DNA
catttttgtgtgaaaatcgtttgcaatgtgcaatatctgaaactactgccttggagtcattagaccctctgctcagtgac

SEQ ID NO: 85162 - DNA, 80 bp, synthetic construct
  source 1..80: mol_type = other DNA
aacgatttctaaacccagacattttcaaactgtagtcctgggtcttttcaaaaggtcttcccctctttttctcaacccct

SEQ ID NO: 85163 - DNA, 80 bp, synthetic construct
  source 1..80: mol_type = other DNA
gaggtttaatggtctcacagttccaaatggctacggaggcctcacaatcatggcagaaggtgaaggaggagcaaaggcat

SEQ ID NO: 85164 - DNA, 80 bp, synthetic construct; identical to SEQ ID NO: 15280
  source 1..80: mol_type = other DNA

SEQ ID NO: 85165 - DNA, 80 bp, synthetic construct
  source 1..80: mol_type = other DNA
ggcgcagtggctcacacctgtaatcccagcactttgggaggccgaggcgggcggatcatgaggtcaagagatggagacca

SEQ ID NO: 85166 - DNA, 80 bp, synthetic construct
  source 1..80: mol_type = other DNA
cactccagcctgggggacagatcgagactccgtctcaaaaaaaataataaaattaaatttaaaaataaataaataaaagc

SEQ ID NO: 85167 - DNA, 80 bp, synthetic construct; identical to SEQ ID NO: 15281
  source 1..80: mol_type = other DNA

SEQ ID NO: 85168 - DNA, 80 bp, synthetic construct
  source 1..80: mol_type = other DNA
gacggtggccctcttctcacagttccaccagcagtgccccaggagggactctgtatgggggctcccaccccacatttccc

SEQ ID NO: 85169 - DNA, 80 bp, synthetic construct
  source 1..80: mol_type = other DNA
gaagctgccaaggcttcaggcttgcactgtctgaagccaggcctgagctgtacattggccctttttagccatggctggca

SEQ ID NO: 85170 - DNA, 80 bp, synthetic construct
  source 1..80: mol_type = other DNA
tggtgattaatagttagcttcttattacctatgcaaatttctgctgccagcttgaatttctccctagaaaatgggttttt

SEQ ID NO: 85171 - DNA, 80 bp, synthetic construct; identical to SEQ ID NO: 15282
  source 1..80: mol_type = other DNA

SEQ ID NO: 85172 - DNA, 80 bp, synthetic construct
  source 1..80: mol_type = other DNA
aaactgttccaacttctgccagttacccagttccaaagttatttccacagtttcggctgtctttacagtagtgccccact

SEQ ID NO: 85173 - DNA, 80 bp, synthetic construct
  source 1..80: mol_type = other DNA
gcacgtcttacatggcgacaggcaagagagtgtgtgcagggaaactcccatttataaaaccatcacagcttgagacttat

SEQ ID NO: 85174 - DNA, 80 bp, synthetic construct
  source 1..80: mol_type = other DNA
ggacataaccaaaccatatcagggacccatctcagagggtgacttctttcaagtctcagagtgtatctaaaaagaaaatg

SEQ ID NO: 85175 - DNA, 80 bp, synthetic construct; identical to SEQ ID NO: 15283
  source 1..80: mol_type = other DNA

SEQ ID NO: 85176 - DNA, 80 bp, synthetic construct
  source 1..80: mol_type = other DNA
actgaggtgggagaatcgtgtgagccagggaggtagatgttgcagtaaaccaagattgcaccactgtactctagcctggg

SEQ ID NO: 85177 - DNA, 80 bp, synthetic construct
  source 1..80: mol_type = other DNA
gacagtctctgcccctgttgcattagagtcacttggaaagctttttccaaatagttacttgggccctaccccagatctcc

SEQ ID NO: 85178 - DNA, 80 bp, synthetic construct
  source 1..80: mol_type = other DNA
tgattaatttggattgacaggttcaagactgatttgacattgacagaacaagctgtatcgatggtagtcagttcactggg

SEQ ID NO: 85179 - DNA, 80 bp, synthetic construct; identical to SEQ ID NO: 15284
  source 1..80: mol_type = other DNA

SEQ ID NO: 85180 - DNA, 80 bp, synthetic construct
  source 1..80: mol_type = other DNA
ggctttgaatgcggcccaacacaaattcataaactttcttaaaacattatgagatttatgcaccgacccttttttttgtt

SEQ ID NO: 85181 - DNA, 80 bp, synthetic construct
  source 1..80: mol_type = other DNA
tcagaggccctctgtgcatactccgtaaggactatccacattctttattactttcattggcaataggtataaaattttat

SEQ ID NO: 85182 - DNA, 80 bp, synthetic construct
  source 1..80: mol_type = other DNA
ccaattactctatttgtaggttctggatttgagattatgaaaaagagcaaattggtggttttcttctctctgggccaggg

SEQ ID NO: 85183 - DNA, 80 bp, synthetic construct
  source 1..80: mol_type = other DNA
gtgcattttaatttccgtatactaacaaggacactaaaaatccttgtgattattttaaagcataacactagctgaacttg

SEQ ID NO: 85184 - DNA, 80 bp, synthetic construct; identical to SEQ ID NO: 15285
  source 1..80: mol_type = other DNA

SEQ ID NO: 85185 - DNA, 80 bp, synthetic construct
  source 1..80: mol_type = other DNA
attgagctgaggattgatatcagtaataactcattaataaaaaagcttgataataaaaactcccagtgcctgatgccagc

SEQ ID NO: 85186 - DNA, 80 bp, synthetic construct
  source 1..80: mol_type = other DNA
ggaactggagaagggagtgctgtgggaagaaaacagaaggaatgttgttcccttgttttagctttgtgttcatccattat

SEQ ID NO: 85187 - DNA, 80 bp, synthetic construct; identical to SEQ ID NO: 15286
  source 1..80: mol_type = other DNA

SEQ ID NO: 85188 - DNA, 80 bp, synthetic construct
  source 1..80: mol_type = other DNA
ctgggcatggtgatgtgcgcctgtaatcccagctaccggggaggctgaggcaggagaaccacttgaacccaggagttgga

SEQ ID NO: 85189 - DNA, 80 bp, synthetic construct
  source 1..80: mol_type = other DNA
cgggggagtgtcccacagggtaggcaagcagctatcacccatgtaatatggtactagtgttgaaatattttctgttttca

SEQ ID NO: 85190 - DNA, 80 bp, synthetic construct
  source 1..80: mol_type = other DNA
ataatctattctccatgtcagcaaaacaaagatttatctctagggaagaatctctgagtgattcccagggtttgggggtt

SEQ ID NO: 85191 - DNA, 80 bp, synthetic construct; identical to SEQ ID NO: 15287
  source 1..80: mol_type = other DNA

SEQ ID NO: 85192 - DNA, 80 bp, synthetic construct
  source 1..80: mol_type = other DNA
aacagtgtgctctgaaattcttgcatgtttccttcttgtgcacatgtgtgagagtttctacatatatatcaaggtggagg

SEQ ID NO: 85193 - DNA, 80 bp, synthetic construct
  source 1..80: mol_type = other DNA
gcttctcagttccatttctctgactacaaatgaggttaagttatatttgtatatatatattggccatgcgtgtttctttt

SEQ ID NO: 85194 - DNA, 80 bp, synthetic construct
  source 1..80: mol_type = other DNA
atttgacaactggtcttccttattttttttttaatttttttatttttttggtaacttgctaaagaaaactttttgtaacc

SEQ ID NO: 85195 - DNA, 80 bp, synthetic construct
  source 1..80: mol_type = other DNA
ttaaaagaaccaccatttatttaacatatattcctatgaggctggtctcaactgggctcacccatgtatctgttagtcag

SEQ ID NO: 85196 - DNA, 80 bp, synthetic construct; identical to SEQ ID NO: 15288
  source 1..80: mol_type = other DNA

SEQ ID NO: 85197 - DNA, 80 bp, synthetic construct
  source 1..80: mol_type = other DNA
caagctcgcatatttatgggagtatttctgtactctctgttcttttcctatcctaacaccaatcccacactatcttaatt

SEQ ID NO: 85198 - DNA, 80 bp, synthetic construct
  source 1..80: mol_type = other DNA
atggacaagactaaactacagtgtctagggatgcacattgggtgataaagctattttaaaaaacaaagaagtgatgagta

SEQ ID NO: 85199 - DNA, 80 bp, synthetic construct
  source 1..80: mol_type = other DNA
aaagttaaatttaactgggccacctgtattttacctggaaaaatcctgattttattcaaggtgataatgcagtttacatt

SEQ ID NO: 85200 - DNA, 80 bp, synthetic construct; identical to SEQ ID NO: 15289
  source 1..80: mol_type = other DNA

SEQ ID NO: 85201 - DNA, 80 bp, synthetic construct
  source 1..80: mol_type = other DNA
ctttatagttagaaagaattcttctagaaactatttgggcctgttttgagggtggagaatgggagggaatgattgtttga

SEQ ID NO: 85202 - DNA, 80 bp, synthetic construct
  source 1..80: mol_type = other DNA
gcactccaacctgggtgatggcgtgagacagtctcaaaaaaaaaaaagaaaaaacaaataatgtattttttttctaggaa

SEQ ID NO: 85203 - DNA, 80 bp, synthetic construct
  source 1..80: mol_type = other DNA
tttttttctctaaacaacaactccttggacatacttattcattctgtcatttttctgttttctaatttaatttccactct

SEQ ID NO: 85204 - DNA, 80 bp, synthetic construct; identical to SEQ ID NO: 15290
  source 1..80: mol_type = other DNA

SEQ ID NO: 85205 - DNA, 80 bp, synthetic construct
  source 1..80: mol_type = other DNA
aagtctgaggacagcctgattattttgcccctaataaatacccttgatctttttatttagcttcccaaatgattcttact

SEQ ID NO: 85206 - DNA, 80 bp, synthetic construct
  source 1..80: mol_type = other DNA
tgcttcattatatgttgtctattgttgtataaaaatttaccctacgacctattcagcagcttaaaacaagacccatttat

SEQ ID NO: 85207 - DNA, 80 bp, synthetic construct
  source 1..80: mol_type = other DNA
tttcttccaaattcaactgatcgttgaaagaatgaatttccttgcagttgtagtattcatggtggcttgcttcttcaagg

SEQ ID NO: 85208 - DNA, 80 bp, synthetic construct; identical to SEQ ID NO: 15291
  source 1..80: mol_type = other DNA

SEQ ID NO: 85209 - DNA, 80 bp, synthetic construct
  source 1..80: mol_type = other DNA
ctgcttctatctttgccataatttcttgatgttttaattttttcttctgcttctttcctgagccctgccagataatattt

SEQ ID NO: 85210 - DNA, 80 bp, synthetic construct
  source 1..80: mol_type = other DNA
ataagcagttttttttcactcgtggcagaatgttttgtcacagtttttatttgtgttgtggcaattttctggggtataac

SEQ ID NO: 85211 - DNA, 80 bp, synthetic construct; identical to SEQ ID NO: 15292
  source 1..80: mol_type = other DNA

SEQ ID NO: 85212 - DNA, 80 bp, synthetic construct
  source 1..80: mol_type = other DNA
atggatttctgtattttattattaaaattctcacctattataccttcaaacatgtgtaatgtgtcatgtgtcattttatg

SEQ ID NO: 85213 - DNA, 80 bp, synthetic construct
  source 1..80: mol_type = other DNA
ccgcaggtgtacaccaccatgcccagctaatacttttttactttttgtagagattatattgcccaggctggtcttgaatt

SEQ ID NO: 85214 - DNA, 80 bp, synthetic construct
  source 1..80: mol_type = other DNA
tgtcatctctgtggtacattctaaacaaattttttaatgattctaacggccatgccacaaaatgtctccatttggtttta

SEQ ID NO: 85215 - DNA, 80 bp, synthetic construct
  source 1..80: mol_type = other DNA
catgcaccaccacacacagctaatttttgtattttttgtagagatggggttttgccatgttgcccatgctggcctccaac

SEQ ID NO: 85216 - DNA, 80 bp, synthetic construct; identical to SEQ ID NO: 15293
  source 1..80: mol_type = other DNA

SEQ ID NO: 85217 - DNA, 80 bp, synthetic construct
  source 1..80: mol_type = other DNA
atctcaaaatcactttgtgctcatttcttggcatagagttacctgggtcatgtatgttgtgagtttttgaatcatgaacc

SEQ ID NO: 85218 - DNA, 80 bp, synthetic construct
  source 1..80: mol_type = other DNA
attccttaaggttcctagctatatgcacagatctcactccaacctccacatcttgtctttctgtccttcatggtctttaa

SEQ ID NO: 85219 - DNA, 80 bp, synthetic construct; identical to SEQ ID NO: 15294
  source 1..80: mol_type = other DNA

SEQ ID NO: 85220 - DNA, 80 bp, synthetic construct
  source 1..80: mol_type = other DNA
atgtagcctttacagattggtttctttcctttagtaatatacatctaaggttcctccatatcttttcatggcttgatagc

SEQ ID NO: 85221 - DNA, 80 bp, synthetic construct
  source 1..80: mol_type = other DNA
tttctactcctttgggtaaatacaaagaatacgattgctgaatcatatgataagagtatgcttcattttgtaagaaaatg

SEQ ID NO: 85222 - DNA, 80 bp, synthetic construct
  source 1..80: mol_type = other DNA
cgaggtgggtggatcacctgaggtcaggagtttgagacaagcctgaccaaaatagagaaaccctgtctctactaaaaata

SEQ ID NO: 85223 - DNA, 80 bp, synthetic construct; identical to SEQ ID NO: 15295
  source 1..80: mol_type = other DNA

SEQ ID NO: 85224 - DNA, 80 bp, synthetic construct
  source 1..80: mol_type = other DNA
tttgcttattttattttatttatgtatttttttttcgagtctcactctgtcacccaggctggagtgcagtggtgcaatct

SEQ ID NO: 85225 - DNA, 80 bp, synthetic construct
  source 1..80: mol_type = other DNA
ttgacctcgtgatctgcctgccttggcctcccaaagtgctgggattataggcatgagccaccatgcccggccttttgcct

SEQ ID NO: 85226 - DNA, 80 bp, synthetic construct
  source 1..80: mol_type = other DNA
ttttacatttagtgaagtgcagtgtatcaattctttcttttttgtccaacacaagatcatctagctattctcctatgtta

SEQ ID NO: 85227 - DNA, 80 bp, synthetic construct; identical to SEQ ID NO: 15296
  source 1..80: mol_type = other DNA

SEQ ID NO: 85228 - DNA, 80 bp, synthetic construct
  source 1..80: mol_type = other DNA
tctctattctgttccatctatttgtctgttctttggccaattgataaaatatcatgttgtcttgattactacagttttat

SEQ ID NO: 85229 - DNA, 80 bp, synthetic construct
  source 1..80: mol_type = other DNA
tcatagctcactataaccttgaactcctgggatcaagtgatcttcccacttccatctgctgaatagccaggactataggc

SEQ ID NO: 85230 - DNA, 80 bp, synthetic construct
  source 1..80: mol_type = other DNA
cctcttaaagtgctgagcttacaggcataagccactgctccatatgcagtttagaatcagtttgttgatacctacaaaat

SEQ ID NO: 85231 - DNA, 80 bp, synthetic construct; identical to SEQ ID NO: 15297
  source 1..80: mol_type = other DNA

SEQ ID NO: 85232 - DNA, 80 bp, synthetic construct
  source 1..80: mol_type = other DNA
gactacagacgcctgccaccacacctggctaatgttttgtatttttcatagagatggggtttcaccatgttagccaggat

SEQ ID NO: 85233 - DNA, 80 bp, synthetic construct
  source 1..80: mol_type = other DNA
ttttgctgatatatgagaaataaattgatgtttgcatatgaaccttgtatcctacaacattggtataataacttattagt

SEQ ID NO: 85234 - DNA, 80 bp, synthetic construct
  source 1..80: mol_type = other DNA
aagggacatcattaccttgctcccgatctttgtataaagtctctagtttctcaccactaactgtgatgttagctgtaggt

SEQ ID NO: 85235 - DNA, 80 bp, synthetic construct
  source 1..80: mol_type = other DNA
gacagggtatcactctgtcacaccagctggagtgcagtggtacaaacacagctcactgcagcctccacctcctaggccat

SEQ ID NO: 85236 - DNA, 80 bp, synthetic construct; identical to SEQ ID NO: 15298
  source 1..80: mol_type = other DNA

SEQ ID NO: 85237 - DNA, 80 bp, synthetic construct
  source 1..80: mol_type = other DNA
cagctgggccgccaggggtgacatcacatatcagcaggaccatgatgcctgcctgagtctcagaccagcaagtttttatt

SEQ ID NO: 85238 - DNA, 80 bp, synthetic construct
  source 1..80: mol_type = other DNA
caacaaagatcacagggcaaagggcaaaagcagaaccactgataatggtctatgttcagcggtgcacatattgtcttgat

SEQ ID NO: 85239 - DNA, 80 bp, synthetic construct
  source 1..80: mol_type = other DNA
cagaacggccgtttatagacctccccccaggagcgcattcctttcccagggtattaatattaatattccttgctaggaaa

SEQ ID NO: 85240 - DNA, 80 bp, synthetic construct
  source 1..80: mol_type = other DNA
actgatttcatatttttcaactacacatgttttacaatcaatttgtacagttagcacaattatcacagtggtcctgaggt

SEQ ID NO: 85241 - DNA, 80 bp, synthetic construct; identical to SEQ ID NO: 15299
  source 1..80: mol_type = other DNA

SEQ ID NO: 85242 - DNA, 80 bp, synthetic construct
  source 1..80: mol_type = other DNA
ctaacacgcaagggcaggagaggaagggtatatcccagctcctgcagataaatcaacacacttgctttttctgttttcgt

SEQ ID NO: 85243 - DNA, 80 bp, synthetic construct
  source 1..80: mol_type = other DNA
attcaagttgacacctaaaattaatcctcacagtagttttcttttcttgtaatgtctttgtctgtttcagtattggggta

SEQ ID NO: 85244 - DNA, 80 bp, synthetic construct
  source 1..80: mol_type = other DNA
tgattcaatttctctaatacatataggcctcttcagattgtctgtttttcttgtgtgagttttagtaaattctgtctttt

SEQ ID NO: 85245 - DNA, 80 bp, synthetic construct
  source 1..80: mol_type = other DNA
aggtgcccaccaccacgcctggctaatttttgtatttttagtagagatggggtttcaccatgttggccaggctggtctca

SEQ ID NO: 85246 - DNA, 80 bp, synthetic construct; identical to SEQ ID NO: 15300
  source 1..80: mol_type = other DNA

SEQ ID NO: 85247 - DNA, 80 bp, synthetic construct
  source 1..80: mol_type = other DNA
tatcttaattcttttgtacatttctcttgagatttcttttctgacccatttgttatttaaaactgtgcagttttatttcc

SEQ ID NO: 85248 - DNA, 80 bp, synthetic construct
  source 1..80: mol_type = other DNA
gcttgagaagagtctgtactttgctgttattagatgaagtagtctatagatgtcccttgtatacagttgattgatggtgc

SEQ ID NO: 85249 - DNA, 80 bp, synthetic construct; identical to SEQ ID NO: 15301
  source 1..80: mol_type = other DNA

SEQ ID NO: 85250 - DNA, 80 bp, synthetic construct
  source 1..80: mol_type = other DNA
gcagaggagcttccatttataaaaccatcagatttcatgagacttattcactaccatgagaacagtatgtgggaaaccac

SEQ ID NO: 85251 - DNA, 80 bp, synthetic construct
  source 1..80: mol_type = other DNA
gtgggtttcttgtagacaacatatagttgagtcatgttttttatctactgtaatgatctcttgtttcgaattgatatatt

SEQ ID NO: 85252 - DNA, 80 bp, synthetic construct; identical to SEQ ID NO: 15302
  source 1..80: mol_type = other DNA

SEQ ID NO: 85253 - DNA, 80 bp, synthetic construct
  source 1..80: mol_type = other DNA
agctctctccatcttctgccaccatgtgaagatgtgcttgcttcccctttgcccttctgccgtgattctaagtttcctga

SEQ ID NO: 85254 - DNA, 80 bp, synthetic construct
  source 1..80: mol_type = other DNA
tttaaatatttcacatcactgtcttattgtttacatgatttctgagaagtcagatatctttcttatctttgctcctctat

SEQ ID NO: 85255 - DNA, 80 bp, synthetic construct; identical to SEQ ID NO: 15303
  source 1..80: mol_type = other DNA

SEQ ID NO: 85256 - DNA, 80 bp, synthetic construct
  source 1..80: mol_type = other DNA
gctgttgttttttttttcagtagagcctgtggcatattcatcatatttattttaaattgctagtctgataattacaacat

SEQ ID NO: 85257 - DNA, 80 bp, synthetic construct
  source 1..80: mol_type = other DNA
tagctgggactataggcgtgtgccaccaagcctggccaatttttgtatttttagtaaagacagggttttgccatgttggc

SEQ ID NO: 85258 - DNA, 80 bp, synthetic construct; identical to SEQ ID NO: 15304
  source 1..80: mol_type = other DNA

SEQ ID NO: 85259 - DNA, 80 bp, synthetic construct
  source 1..80: mol_type = other DNA
ccccaggtcagttaagctttgataaaaccccaataggtaaaaatagtttctctggaggagaggcctgctaaagaccagaa

SEQ ID NO: 85260 - DNA, 80 bp, synthetic construct
  source 1..80: mol_type = other DNA
gaactcctagaggtaaaacctacaaaagtgcgggtgcctccatctaagactgggtccctctggagttgttttttgtttgt

SEQ ID NO: 85261 - DNA, 80 bp, synthetic construct
  source 1..80: mol_type = other DNA
acccgccccctcgcccagctaattttttgtatttttagtagagatggggtttcaccgtgttagccaggatggtctcgatc

SEQ ID NO: 85262 - DNA, 80 bp, synthetic construct; identical to SEQ ID NO: 15305
  source 1..80: mol_type = other DNA

SEQ ID NO: 85263 - DNA, 80 bp, synthetic construct
  source 1..80: mol_type = other DNA
ggcctaagatgctattattcctgttgttattcatccatcccagtatcatattcaatcaacctcccccaccaccaccacta

SEQ ID NO: 85264 - DNA, 80 bp, synthetic construct
  source 1..80: mol_type = other DNA
tagatgatcctctgctttgcctctaatgctgaggaatgttgcacctacaactatcatggaagacgctgaaacctccatta

SEQ ID NO: 85265 - DNA, 80 bp, synthetic construct
  source 1..80: mol_type = other DNA
agcctgagtcacatagcaagaccccatctctacaaaaaattaaaaaattagtcacacatggtagcatgcacctgtagtcc

SEQ ID NO: 85266 - DNA, 80 bp, synthetic construct; identical to SEQ ID NO: 15306
  source 1..80: mol_type = other DNA

SEQ ID NO: 85267 - DNA, 80 bp, synthetic construct
  source 1..80: mol_type = other DNA
atgggtgaagaagacagccaagttggtgaacagatctggaaaggttaccatcattcttgattgagctctgccctccaacc

SEQ ID NO: 85268 - DNA, 80 bp, synthetic construct
  source 1..80: mol_type = other DNA
caacccctgcctcccaggctcaagtgatgctcccatctcatccttccgagtagctaggactacaagtgcatgccaccatg

SEQ ID NO: 85269 - DNA, 80 bp, synthetic construct; identical to SEQ ID NO: 15307
  source 1..80: mol_type = other DNA

SEQ ID NO: 85270 - DNA, 80 bp, synthetic construct
  source 1..80: mol_type = other DNA
gcacgatctcggctcactgcaatctctgcctccgaggttcaagctattctcttgcttcagcctcccaagtagctgggatt

SEQ ID NO: 85271 - DNA, 80 bp, synthetic construct
  source 1..80: mol_type = other DNA
cccaagggttattcttttgatttggggaacagggttccttggccctattacccaccacattgttctccactctttgcatc

SEQ ID NO: 85272 - DNA, 80 bp, synthetic construct
  source 1..80: mol_type = other DNA
aagcttagagattctgtatccaccacaggcttagagaggttgtatccatcatacagttatgttgcatccaccatacatct

SEQ ID NO: 85273 - DNA, 80 bp, synthetic construct; identical to SEQ ID NO: 15308
  source 1..80: mol_type = other DNA

SEQ ID NO: 85274 - DNA, 80 bp, synthetic construct
  source 1..80: mol_type = other DNA
gctttatgtgtgtgtattttccttgctgcctggtcaaggtctccaatcaatagtttaagactttttcacagttcattttc

SEQ ID NO: 85275 - DNA, 80 bp, synthetic construct
  source 1..80: mol_type = other DNA
aaccaataacaacctggttcttcaatggtattcctgccatagctaagacaagcactgagtcctttaactgacctgcatca

SEQ ID NO: 85276 - DNA, 80 bp, synthetic construct
  source 1..80: mol_type = other DNA
actttctttgacataagggaacaataggagtcagaatataggatatacattcctctatcttctactcaattggttctcca

SEQ ID NO: 85277 - DNA, 80 bp, synthetic construct; identical to SEQ ID NO: 15309
  source 1..80: mol_type = other DNA

SEQ ID NO: 85278 - DNA, 80 bp, synthetic construct
  source 1..80: mol_type = other DNA
tttttagtacagacagggtttcacctccgcagtggtcattaaagcttgaccactaaattgccctggttcttcaacatgca

SEQ ID NO: 85279 - DNA, 80 bp, synthetic construct
  source 1..80: mol_type = other DNA
caaacggtttatattgcatgtaaaatgcaatgtggcattgattgtagatcccttaattcagacagatttccccacgcaga

SEQ ID NO: 85280 - DNA, 80 bp, synthetic construct
  source 1..80: mol_type = other DNA
gatgccatcgtgggagtgtggtgagtaaaaaacagctttcatgaaactcaaatcttgaaagtcagatgctttctgggtct

SEQ ID NO: 85281 - DNA, 80 bp, synthetic construct; identical to SEQ ID NO: 15310
  source 1..80: mol_type = other DNA

SEQ ID NO: 85282 - DNA, 80 bp, synthetic construct
  source 1..80: mol_type = other DNA
aggataaattattctagccaatggagcagaaactggctaatcaaaggcacagtgcacagttacacttctgtatatcattc

SEQ ID NO: 85283 - DNA, 80 bp, synthetic construct
  source 1..80: mol_type = other DNA
ttgataacttattcacagttgctggtgagttcaggcttaaatcatcagctgtcactcacaagtgtttacccttgaacttt

SEQ ID NO: 85284 - DNA, 80 bp, synthetic construct
  source 1..80: mol_type = other DNA
tcagatgtgacaatcagataacaagaggcaagagaagactttctgggaaataaaagatcatttttgtgatttctttaaat

SEQ ID NO: 85285 - DNA, 80 bp, synthetic construct; identical to SEQ ID NO: 15311
  source 1..80: mol_type = other DNA

SEQ ID NO: 85286 - DNA, 80 bp, synthetic construct
  source 1..80: mol_type = other DNA
aattattaagaatgccttaataataatccctctcattttatttcagaagacactattgtaatagcatggctaggaaggaa

SEQ ID NO: 85287 - DNA, 80 bp, synthetic construct
  source 1..80: mol_type = other DNA
actgatttttcctattagatggaaagaaccttcctgatcaggactggtgttgggggaatgttttccttatgaaatcagaa

SEQ ID NO: 85288 - DNA, 80 bp, synthetic construct
  source 1..80: mol_type = other DNA
aagagtttcagaggtgcaccttggtagactcaggctttctctggatctcactggctgctcttatgagtccagaatggaag

SEQ ID NO: 85289 - DNA, 80 bp, synthetic construct
  source 1..80: mol_type = other DNA
tgcctcaggctctctgcctgccgtgctctcacctcgcagacccacgtgatttcctcccgaacccccttcaggcctcggtc

SEQ ID NO: 85290 - DNA, 80 bp, synthetic construct; identical to SEQ ID NO: 15312
  source 1..80: mol_type = other DNA

SEQ ID NO: 85291 - DNA, 80 bp, synthetic construct
  source 1..80: mol_type = other DNA
tacattgccaccttgtcacacctctagttaccattttctttatggtccaggtcctgaccagctctaaagatgggtcagct

SEQ ID NO: 85292 - DNA, 80 bp, synthetic construct
  source 1..80: mol_type = other DNA
cactttacaactgagcacctcccgctgctgcctgctgaacccttcagagtccttgccacaggccctatttactttttcct

SEQ ID NO: 85293 - DNA, 80 bp, synthetic construct
  source 1..80: mol_type = other DNA
cttatatcaaatggtgtagaatttacatgtaacctaaacacttcctcctgtacactttaaatcatctctagatcccttac

SEQ ID NO: 85294 - DNA, 80 bp, synthetic construct; identical to SEQ ID NO: 15313
  source 1..80: mol_type = other DNA

SEQ ID NO: 85295 - DNA, 80 bp, synthetic construct
  source 1..80: mol_type = other DNA
ttttatcttctccagatagaaagaaatgtgataccttgcggattttgcggtttccttgttttgctggattgcaagtcctt

SEQ ID NO: 85296 - DNA, 80 bp, synthetic construct
  source 1..80: mol_type = other DNA
tcttagtgaggcctttgcgttatacttcagaaatattgtcagtatgactttgaagatgaaagtttgcccccaaaatcact

SEQ ID NO: 85297 - DNA, 80 bp, synthetic construct; identical to SEQ ID NO: 15314
  source 1..80: mol_type = other DNA

SEQ ID NO: 85298 - DNA, 80 bp, synthetic construct
  source 1..80: mol_type = other DNA
aaaaataaagaaatttgtagcctggggagtttggttttaaaatgcaaacacaggagttatgagttgagacttggacaggg

SEQ ID NO: 85299 - DNA, 80 bp, synthetic construct
  source 1..80: mol_type = other DNA
acgctttagctgggaggccaggctgatttttaaaggcagaattggactatttactctaaaacagtaatgcacactgttta

SEQ ID NO: 85300 - DNA, 80 bp, synthetic construct
  source 1..80: mol_type = other DNA
ttccaaatgagtaggcttttgagcaagagttttggagtcacagagatggggttaagaaagtgataatgtgcaatggcgat

SEQ ID NO: 85301 - DNA, 80 bp, synthetic construct; identical to SEQ ID NO: 15315
  source 1..80: mol_type = other DNA

SEQ ID NO: 85302 - DNA, 80 bp, synthetic construct
  source 1..80: mol_type = other DNA
tcttgctgaacactgggtaagaaaatcatagcaaacgttgagtctgttttggaaatgttctaaaaccagactattaacac

SEQ ID NO: 85303 - DNA, 80 bp, synthetic construct
  source 1..80: mol_type = other DNA
attctttattcagctgttttccccttgccccattacattccagatttgtggtctgcattatgtctggagccagaagtaag

SEQ ID NO: 85304 - DNA, 80 bp, synthetic construct
  source 1..80: mol_type = other DNA
aggccttggagctcatgaaccagaaccttgacatctatgaacagcaagtgatgactgcagcccaaaaggcaagaatgctc

SEQ ID NO: 85305 - DNA, 80 bp, synthetic construct
  source 1..80: mol_type = other DNA
ccaccctctgaaaaagcatccaggtagttaacctgagttgagttagtcagttgaattaggagccttacccctcagagagt

SEQ ID NO: 85306 - DNA, 80 bp, synthetic construct; identical to SEQ ID NO: 15316
  source 1..80: mol_type = other DNA

SEQ ID NO: 85307 - DNA, 80 bp, synthetic construct
  source 1..80: mol_type = other DNA
aagtagtaagcatctgcaagaatgccgtttgctcccttcagactgtttgaggctcgtttccggtctctatgtcggactac

SEQ ID NO: 85308 - DNA, 80 bp, synthetic construct
  source 1..80: mol_type = other DNA
tatcagaggttgcctaagaaaatgccctgctggaaaacacaaacccgaagggaagtttgggctgtaactctggtggcagg

SEQ ID NO: 85309 - DNA, 80 bp, synthetic construct; identical to SEQ ID NO: 15317
  source 1..80: mol_type = other DNA

SEQ ID NO: 85310 - DNA, 80 bp, synthetic construct
  source 1..80: mol_type = other DNA
tcttttttttcaaccaagacaacttttgcaagggtgacacttttctttagtcccaacctgacatacggtttctccttgaa

SEQ ID NO: 85311 - DNA, 80 bp, synthetic construct
  source 1..80: mol_type = other DNA
gccatcttctccacctttgaggacagctgtcatgatccccctggcatctgtcccccaggctgtatcctcagtcccttcca

SEQ ID NO: 85312 - DNA, 80 bp, synthetic construct
  source 1..80: mol_type = other DNA
cagccacatgtctcattatgggtgtataaggcacttgctgtcaactaaaacaccttttcacatgagcagacacacatgct

SEQ ID NO: 85313 - DNA, 80 bp, synthetic construct
  source 1..80: mol_type = other DNA
ctgacatcccaagtatcagttacctttacgtcattcacacatatgatacacacctcatttatgtctatgctgaagtcagt

SEQ ID NO: 85314 - DNA, 80 bp, synthetic construct; identical to SEQ ID NO: 15318
  source 1..80: mol_type = other DNA

SEQ ID NO: 85315 - DNA, 80 bp, synthetic construct
  source 1..80: mol_type = other DNA
ttgtttgttttccagcagcacttttatttttccttacacgatgacatgttgctggggcctattgttctcacataacagta

SEQ ID NO: 85316 - DNA, 80 bp, synthetic construct
  source 1..80: mol_type = other DNA
aagaaaggaaactgggtcctaagtcttggactttccaacccttacagaccggcagaacagaaacaactggttcaggagcc

SEQ ID NO: 85317 - DNA, 80 bp, synthetic construct
  source 1..80: mol_type = other DNA
agggttgaaatcaaagatatgtacagggtattaagcaaatctggttatatgttttaaaacaacttctaagacaaattgat

SEQ ID NO: 85318 - DNA, 80 bp, synthetic construct; identical to SEQ ID NO: 15319
  source 1..80: mol_type = other DNA

SEQ ID NO: 85319 - DNA, 80 bp, synthetic construct
  source 1..80: mol_type = other DNA
tgactatatttctgtctcagtaggggcattcataggggaaaaacggagtctagtttcaagatgattaggctgggcagtca

SEQ ID NO: 85320 - DNA, 80 bp, synthetic construct
  source 1..80: mol_type = other DNA
tcacatcagacccaaaattttgcccagctcaggtttggttcctctcctcattcctggttgataataatctagtatgtata

SEQ ID NO: 85321 - DNA, 80 bp, synthetic construct; identical to SEQ ID NO: 15320
  source 1..80: mol_type = other DNA

SEQ ID NO: 85322 - DNA, 80 bp, synthetic construct
  source 1..80: mol_type = other DNA
tgcatctccatcttgccttatttttaggtttgagataatttttctttacatggtcattgctaagtgtgcaatgagatgat

SEQ ID NO: 85323 - DNA, 80 bp, synthetic construct
  source 1..80: mol_type = other DNA
ggagtttgagaccagcctgatggtgaaaccccatctccactaaaaatacaaaatttagccaggtgtggtggcgcatgtct

SEQ ID NO: 85324 - DNA, 80 bp, synthetic construct
  source 1..80: mol_type = other DNA
ccctttgatccagtaatttcacttgtaagactttattccaaagaaataatcaaaagatgcaatcaaagatttgtgtgaag

SEQ ID NO: 85325 - DNA, 80 bp, synthetic construct; identical to SEQ ID NO: 15321
  source 1..80: mol_type = other DNA

SEQ ID NO: 85326 - DNA, 80 bp, synthetic construct
  source 1..80: mol_type = other DNA
gctcaggtgatctgcccacctgggcctcctgaagtgctgggattacaggcgtgaactgccatgcttggccgtatttttta

SEQ ID NO: 85327 - DNA, 80 bp, synthetic construct
  source 1..80: mol_type = other DNA
tccaaattttctacagtaaaacttttgaagcttttataaccaggaaaaaaatttaaaagtttgcaatgcattccagaaat

SEQ ID NO: 85328 - DNA, 80 bp, synthetic construct
  source 1..80: mol_type = other DNA
tgtttgtattttcttaggttgctgtagatgtcacagggagttccgggccatcacagccagggaacacaggatgttgccag

SEQ ID NO: 85329 - DNA, 80 bp, synthetic construct
  source 1..80: mol_type = other DNA
agaatcacccgggggacctttaaacaaacactgttgccactatcccacccacagtcaatcaaatcagactttgtaggggt

SEQ ID NO: 85330 - DNA, 80 bp, synthetic construct; identical to SEQ ID NO: 15322
  source 1..80: mol_type = other DNA

SEQ ID NO: 85331 - DNA, 80 bp, synthetic construct
  source 1..80: mol_type = other DNA
ccaaaagaatgaacagaagaatgaatgaatgcagcggttcttcctgccatctgataacagactattctttgatgttttca

SEQ ID NO: 85332 - DNA, 80 bp, synthetic construct
  source 1..80: mol_type = other DNA
attcatggattcaactttacaagaacatccatttatccatttttggacttcatgccgtctccccaggtggtcaggtggaa

SEQ ID NO: 85333 - DNA, 80 bp, synthetic construct; identical to SEQ ID NO: 15323
  source 1..80: mol_type = other DNA

SEQ ID NO: 85334 - DNA, 80 bp, synthetic construct
  source 1..80: mol_type = other DNA
gaaactgccatcaacaatttgatgtgcattcagttgtattcttttctatgcatttcatagttattgacatcctctttttt

SEQ ID NO: 85335 - DNA, 80 bp, synthetic construct
  source 1..80: mol_type = other DNA
attttttttgtgtgtgtatttttagtagagatggggtttcaccatgttagccaggatggtctcgatctcctgaccttgtg

SEQ ID NO: 85336 - DNA, 80 bp, synthetic construct
  source 1..80: mol_type = other DNA
tttagaaatgaaatccctcaggccaggtgtggtggctcacacctgtaatcccagctacttgggaggctgaggcaggagaa

SEQ ID NO: 85337 - DNA, 80 bp, synthetic construct; identical to SEQ ID NO: 15324
  source 1..80: mol_type = other DNA

SEQ ID NO: 85338 - DNA, 80 bp, synthetic construct
  source 1..80: mol_type = other DNA
aaatacaaaaattagctgggtgtggtggtgcatgcctgtagtcccagccactcagaaggctgagataggaggatggcttg

SEQ ID NO: 85339 - DNA, 80 bp, synthetic construct
  source 1..80: mol_type = other DNA
aatttgcacttctctctcactaatgagattgagcatcttttgagatgtttgtgggtcacttttctttgtccttctgtgaa

SEQ ID NO: 85340 - DNA, 80 bp, synthetic construct
  source 1..80: mol_type = other DNA
ctgagacgagaggattgcttgaggccaggagtttgagtccagcctgggcaatgtaacaagaccctgtctctgaaaaaaaa

SEQ ID NO: 85341 - DNA, 80 bp, synthetic construct
  source 1..80: mol_type = other DNA
cgcgatctcggctcactgcaagctccgcctactgggttcacgccattctcctgcctcagcctcccgagtagctgggacta

SEQ ID NO: 85342 - DNA, 80 bp, synthetic construct; identical to SEQ ID NO: 15325
  source 1..80: mol_type = other DNA

SEQ ID NO: 85343 - DNA, 80 bp, synthetic construct
  source 1..80: mol_type = other DNA
ctcatcacctttgataccccctttgctggcaggtttggcatcttcacatgctttgatatattgttctttgaccctgccat

SEQ ID NO: 85344 - DNA, 80 bp, synthetic construct
  source 1..80: mol_type = other DNA
acaggaagtggcatacacacccctctggagtccttttggtaccatgacatggaaaatcccaaaagtcaccttataattgc

SEQ ID NO: 85345 - DNA, 80 bp, synthetic construct; identical to SEQ ID NO: 15326
  source 1..80: mol_type = other DNA

SEQ ID NO: 85346 - DNA, 80 bp, synthetic construct
  source 1..80: mol_type = other DNA
gacacctgtggacaggaaatcacagaggccacggggatatttgagtttcacctgtggggcaacttcagtacttcctatat

SEQ ID NO: 85347 - DNA, 80 bp, synthetic construct
  source 1..80: mol_type = other DNA
ctatgggcgcttgtatgagagggactaggaaaagtgtgtggtctgtggggcggactctggccatcatgttgacagccttg

SEQ ID NO: 85348 - DNA, 80 bp, synthetic construct
  source 1..80: mol_type = other DNA
gtgtcttcctcttaaacctcaatcatcgagacattagggggtattttctgttcacatttatctttttcaagccacatctt

SEQ ID NO: 85349 - DNA, 80 bp, synthetic construct; identical to SEQ ID NO: 15327
  source 1..80: mol_type = other DNA

SEQ ID NO: 85350 - DNA, 80 bp, synthetic construct
  source 1..80: mol_type = other DNA
ggcttttaaaaatagaaaagaagcgttcctcacatctgccagtaatggaattttctgtcagtaaatggaatgtgtaggca

SEQ ID NO: 85351 - DNA, 80 bp, synthetic construct
  source 1..80: mol_type = other DNA
tagctttgggcaagagttgggcacgttgcccgactgtgcaggatggattgatgctggtataatttgatctggagccctat

SEQ ID NO: 85352 - DNA, 80 bp, synthetic construct
  source 1..80: mol_type = other DNA
aaaattatcagactcaatatggtgaagacatttttaggccactgatttctgtgtaatttgtgtccaatatttcaaagcca

SEQ ID NO: 85353 - DNA, 80 bp, synthetic construct; identical to SEQ ID NO: 15328
  source 1..80: mol_type = other DNA

SEQ ID NO: 85354 - DNA, 80 bp, synthetic construct
  source 1..80: mol_type = other DNA
cctgctgactcactgatccctcggaaaggtctgggatgagtcaagtcttcagggaataagcagcaaggacttggaattcc

SEQ ID NO: 85355 - DNA, 80 bp, synthetic construct
  source 1..80: mol_type = other DNA
agtctgcttccctgcctcaaaccccagggagacagaaattacctaaaaatgcatatcattgccttatgccaagatgattc

SEQ ID NO: 85356 - DNA, 80 bp, synthetic construct
  source 1..80: mol_type = other DNA
gaactttccctgagttattttctaccaacaatttagaatgaattgctcgtgaagtagaaatgaggggaaaagcaactaat

SEQ ID NO: 85357 - DNA, 80 bp, synthetic construct; identical to SEQ ID NO: 15329
  source 1..80: mol_type = other DNA

SEQ ID NO: 85358 - DNA, 80 bp, synthetic construct
  source 1..80: mol_type = other DNA
ccaccatgtctgctctcaagacacaggcctgtccagagcccctgctgagggaaacccacccaggccacttttccccacag

SEQ ID NO: 85359 - DNA, 80 bp, synthetic construct
  source 1..80: mol_type = other DNA
cgctcttgattctcaatgaaactcagaaccgctcaagtgaaatgaccactcaaagaacaatttctcaacaaagtggattt

SEQ ID NO: 85360 - DNA, 80 bp, synthetic construct
  source 1..80: mol_type = other DNA
tttcattccctaacctccctttgaatgttagttacctattcccacataacaaagtgccccaaaacttaatggcataaaac

SEQ ID NO: 85361 - DNA, 80 bp, synthetic construct; identical to SEQ ID NO: 15330
  source 1..80: mol_type = other DNA

SEQ ID NO: 85362 - DNA, 80 bp, synthetic construct
  source 1..80: mol_type = other DNA
atgtgacaacaggggcagagatcacagggatgcctctactagacaaggcacaccagaaattgcttgccaacaaacaccag

SEQ ID NO: 85363 - DNA, 80 bp, synthetic construct
  source 1..80: mol_type = other DNA
gatatggcagacctaggaaacaaatacagaggatcacttgcaaaatggcccattcacacagctggcacgttggtgctggc

SEQ ID NO: 85364 - DNA, 80 bp, synthetic construct
  source 1..80: mol_type = other DNA
ccatgatgtcttttattaactagtctcagaagtcacactgcatcatttggcaccatcttattgagttacacaggtcagcc

SEQ ID NO: 85365 - DNA, 80 bp, synthetic construct
  source 1..80: mol_type = other DNA
cactctgctcaatccaaatcacagctctcccgtttctcacctcccaacagttgctgttcctcaggccaaagttcacattc

SEQ ID NO: 85366 - DNA, 80 bp, synthetic construct; identical to SEQ ID NO: 15331
  source 1..80: mol_type = other DNA

SEQ ID NO: 85367 - DNA, 80 bp, synthetic construct
  source 1..80: mol_type = other DNA
ctacagctattttacagatggggaaaactgacagagagatattaatgaattgcccacatgcaaatatgtgctgagtcttg

SEQ ID NO: 85368 - DNA, 80 bp, synthetic construct
  source 1..80: mol_type = other DNA
gtagtcacaaagaatgtttagaatgtttctcagacaggctgagaaaaaacacaacgaaacattatttccgtttggaaagt

SEQ ID NO: 85369 - DNA, 80 bp, synthetic construct
  source 1..80: mol_type = other DNA
tttctttttgtttgagcaaaaaaaaaaaagaatatattaactcgtaactggggagtctaagaataaattctcttcagcca

SEQ ID NO: 85370 - DNA, 80 bp, synthetic construct; identical to SEQ ID NO: 15332
  source 1..80: mol_type = other DNA

SEQ ID NO: 85371 - DNA, 80 bp, synthetic construct
  source 1..80: mol_type = other DNA
ccgagttcaagcgattctcctgcctcagccttccgagtagctgggactacaggcacgtgccaccacgcccagctaatttt

SEQ ID NO: 85372 - DNA, 80 bp, synthetic construct
  source 1..80: mol_type = other DNA
tcacatggccactattagggtgagggatgataggcttagctctgacctgaaattcatggattgaggggtggggactgttt

SEQ ID NO: 85373 - DNA, 80 bp, synthetic construct; identical to SEQ ID NO: 15333
  source 1..80: mol_type = other DNA

SEQ ID NO: 85374 - DNA, 80 bp, synthetic construct
  source 1..80: mol_type = other DNA
gtgacaggcagagagccaggcgatccatatcctgtctcctctctcttctccgctcctgactcctgctgcggcctcccact

SEQ ID NO: 85375 - DNA, 80 bp, synthetic construct
  source 1..80: mol_type = other DNA
ggaccagttcatttgagaagaaatagaggagttaggggagagagaagcttcttaatgaaaataaccttggtagctagtct

SEQ ID NO: 85376 - DNA, 80 bp, synthetic construct
  source 1..80: mol_type = other DNA
aaccaataaaatatggcagatgcgatggcatgttacttctgaaattgggttataaaaggtactgcagaccgggcacggtg

SEQ ID NO: 85377 - DNA, 80 bp, synthetic construct
  source 1..80: mol_type = other DNA
gaggctgaggcagaagaatcgcttgaacccgggaggcggaggttacaatgagctgagatagcaccactgcactccagtct

SEQ ID NO: 85378 - DNA, 80 bp, synthetic construct; identical to SEQ ID NO: 15334
  source 1..80: mol_type = other DNA

SEQ ID NO: 85379 - DNA, 80 bp, synthetic construct
  source 1..80: mol_type = other DNA
gctaccagcaccttaatctcccacatccaagttaaaattcatccaacactcaatctcccagctatcctgactgctcctat

SEQ ID NO: 85380 - DNA, 80 bp, synthetic construct
  source 1..80: mol_type = other DNA
tgcaacagggagatgttctcagatagagggagaacaacaaaaagaagggtccatgctgaacaaacttgtttgctttgaaa

SEQ ID NO: 85381 - DNA, 80 bp, synthetic construct
  source 1..80: mol_type = other DNA
gggaaattgttggaaatgcaaattcttgggctccaccccagatcaacttaatcggactctctgggagtagggcccatcaa

SEQ ID NO: 85382 - DNA, 80 bp, synthetic construct; identical to SEQ ID NO: 15335
  source 1..80: mol_type = other DNA

SEQ ID NO: 85383 - DNA, 80 bp, synthetic construct
  source 1..80: mol_type = other DNA
ctaaaggcaattatatttacattttctctaagtactggaatgtaatggttgaaattcctattcagtgatctggaagaact

SEQ ID NO: 85384 - DNA, 80 bp, synthetic construct
  source 1..80: mol_type = other DNA
atggatgtcttgcaactctcaaaaaatcacgtgtgaaagttaagcattagttccgtgtaaaatactgtgctagaaattgt

SEQ ID NO: 85385 - DNA, 80 bp, synthetic construct
  source 1..80: mol_type = other DNA
caagactgttacctttagcgagagcttattatcacctagtgttcatataaacatgggatttaaatacacacacaaccccc

SEQ ID NO: 85386 - DNA, 80 bp, synthetic construct
  source 1..80: mol_type = other DNA
tccaaatggctacaacagtatttgaagaactaacaagtttaaaaatgtaaaaggccagtaaggcaacattgggcactggg

SEQ ID NO: 85387 - DNA, 80 bp, synthetic construct; identical to SEQ ID NO: 15336
  source 1..80: mol_type = other DNA

SEQ ID NO: 85388 - DNA, 80 bp, synthetic construct
  source 1..80: mol_type = other DNA
aatatagtcctgcatccttttttttgtttttgagatgaagtctcactctgtggcaatcttggctcactgcaccctctgcc

SEQ ID NO: 85389 - DNA, 80 bp, synthetic construct
  source 1..80: mol_type = other DNA
gcgtcccgggttcaagcaattctcctgcctcagcctcccatgtagctgggattacaggcatgcgccaccatacccggcta

SEQ ID NO: 85390 - DNA, 80 bp, synthetic construct; identical to SEQ ID NO: 15337
  source 1..80: mol_type = other DNA

SEQ ID NO: 85391 - DNA, 80 bp, synthetic construct
  source 1..80: mol_type = other DNA
tcctctaaattgctgcatattaggggttgaagcatgctgggagtttgacgtatgtaaggaaaattattaggttgatggaa

SEQ ID NO: 85392 - DNA, 80 bp, synthetic construct
  source 1..80: mol_type = other DNA
ccctgaaaattgtttcagatctttccttggtgcagtgtatattgaatagtaaaagggacatatgtcacaaaacagattta

SEQ ID NO: 85393 - DNA, 80 bp, synthetic construct
  source 1..80: mol_type = other DNA
aaaagaggggactacatgagatgatttcagctcaaatatccttggagactctcattgttttctagttgtaaattatgctt

SEQ ID NO: 85394 - DNA, 80 bp, synthetic construct
  source 1..80: mol_type = other DNA
caagcaattctcctgcctcagcctcccatgtagctgggattacaggctcctgccaccatgtctggctaatttttgtattt

SEQ ID NO: 85395 - DNA, 80 bp, synthetic construct; identical to SEQ ID NO: 15338
  source 1..80: mol_type = other DNA

SEQ ID NO: 85396 - DNA, 80 bp, synthetic construct
  source 1..80: mol_type = other DNA
caccactgtacctcacgtccccttcccctccatatttagaaaaatatttccaagtagccagtcaggtcagctcagattgc

SEQ ID NO: 85397 - DNA, 80 bp, synthetic construct
  source 1..80: mol_type = other DNA
gcctgggtgctggttttactttgcggcactgagcacttattcctagagcatttttatatccaacatagaatattttataa

SEQ ID NO: 85398 - DNA, 80 bp, synthetic construct
  source 1..80: mol_type = other DNA
aagttccactaacttaagtttcactaagttccacttagtttctaagtttcaactatgaaacgtaatggcttgaacagcca

SEQ ID NO: 85399 - DNA, 80 bp, synthetic construct; identical to SEQ ID NO: 15339
  source 1..80: mol_type = other DNA

SEQ ID NO: 85400 - DNA, 80 bp, synthetic construct
  source 1..80: mol_type = other DNA
ttgtggctatttaaagtctacctcaaagtaggctgctgtactgatgtcagtttttatttattgagtgcttagcaggcata

SEQ ID NO: 85401 - DNA, 80 bp, synthetic construct
  source 1..80: mol_type = other DNA
gtatgtgagctaggttttgaacataagcagtttgtacatgggaaattaatgagctaattaggctatttattatcataact

SEQ ID NO: 85402 - DNA, 80 bp, synthetic construct; identical to SEQ ID NO: 15340
  source 1..80: mol_type = other DNA

SEQ ID NO: 85403 - DNA, 80 bp, synthetic construct
  source 1..80: mol_type = other DNA
aacgtggtgaaaacccatctctactaaaaatacgaaagttagctgggcatggtggtgcacacctataatcccagctcctc

SEQ ID NO: 85404 - DNA, 80 bp, synthetic construct
  source 1..80: mol_type = other DNA
cagagagagaatacaagttacactggtgctcctgtccacagtgtcctatggacaagttacagatggcacagctaacaaag

SEQ ID NO: 85405 - DNA, 80 bp, synthetic construct
  source 1..80: mol_type = other DNA
tgccaggcactcgggtatagcctttgtacatgtagcccacttttatcttgcccaaacttcagaccgatttttttttttaa

SEQ ID NO: 85406 - DNA, 80 bp, synthetic construct
  source 1..80: mol_type = other DNA
ttttccctgactcttctgggaaaacgaactgctctccaatctgtattcaatgcattcctctagaatagcttattgagtac

SEQ ID NO: 85407 - DNA, 80 bp, synthetic construct; identical to SEQ ID NO: 15341
  source 1..80: mol_type = other DNA

SEQ ID NO: 85408 - DNA, 80 bp, synthetic construct
  source 1..80: mol_type = other DNA
aatgcttgaatcaagtttataaaggttgagggcatctccagggctctatgggcccaagaatcctaactcaaaattagtat

SEQ ID NO: 85409 - DNA, 80 bp, synthetic construct
  source 1..80: mol_type = other DNA
gggcactctaggtcagtggctcacttcagttcaaagactcccaagtgctttgccaaatgttcattagacacacatggcag

SEQ ID NO: 85410 - DNA, 80 bp, synthetic construct
  source 1..80: mol_type = other DNA
cgctttctctagtaaaattcttgcatgtttaaaactgtcttgacatctgctttttggaggacccagactaacagagttaa

SEQ ID NO: 85411 - DNA, 80 bp, synthetic construct; identical to SEQ ID NO: 15342
  source 1..80: mol_type = other DNA

SEQ ID NO: 85412 - DNA, 80 bp, synthetic construct
  source 1..80: mol_type = other DNA
agcaagaataagaaaagctaacactcactggacgcttaggtgtcaggcacttcccatgtattttttcatttaattcctac

SEQ ID NO: 85413 - DNA, 80 bp, synthetic construct
  source 1..80: mol_type = other DNA
ttcttgcctcccactcgtggcaatactgtcccagccatacggaaaggtgctttaccttagctgctattcatgtggttttc

SEQ ID NO: 85414 - DNA, 80 bp, synthetic construct; identical to SEQ ID NO: 15343
  source 1..80: mol_type = other DNA

SEQ ID NO: 85415 - DNA, 80 bp, synthetic construct
  source 1..80: mol_type = other DNA
taaaaccaatttatgtgtttatgatctcttagtggcaagtttacaggtggttttgtttaaagtatcatacagagtaactt

SEQ ID NO: 85416 - DNA, 80 bp, synthetic construct
  source 1..80: mol_type = other DNA
ccaggagtaggattgctggatcatatggtttaagtatgtttagttttgtaagaaactaccaaaatgtcttccgaagtggc

SEQ ID NO: 85417 - DNA, 80 bp, synthetic construct
  source 1..80: mol_type = other DNA
actaaaaatacaaaaattagccgggcgtggtggtgcatgcctgtaatcccagctactcgggaggctgaggcaggagaatc

SEQ ID NO: 85418 - DNA, 80 bp, synthetic construct; identical to SEQ ID NO: 15344
  source 1..80: mol_type = other DNA

SEQ ID NO: 85419 - DNA, 80 bp, synthetic construct
  source 1..80: mol_type = other DNA
tctcacagagcagaaatttaaaaattgtaatgaagtctagcttatcatttttcatgggtggtgcctttggtgttatatct

SEQ ID NO: 85420 - DNA, 80 bp, synthetic construct
  source 1..80: mol_type = other DNA
cagcaccatttgttgaaaatactgtcttcactctgtcacattgcctttgctcctttgtcaaagatcagttaactatattt

SEQ ID NO: 85421 - DNA, 80 bp, synthetic construct
  source 1..80: mol_type = other DNA
tattcttggcttttgcctctccatataaactttaaaatcagtttgttgatacccacagaataacttgctgggattttaat

SEQ ID NO: 85422 - DNA, 80 bp, synthetic construct; identical to SEQ ID NO: 15345
  source 1..80: mol_type = other DNA

SEQ ID NO: 85423 - DNA, 80 bp, synthetic construct
  source 1..80: mol_type = other DNA
ttttatttccttttcttgtcttatattgcattagctaaaactttcagtatgatgttgaaaagcagtggtgaagggggcca

SEQ ID NO: 85424 - DNA, 80 bp, synthetic construct
  source 1..80: mol_type = other DNA
tacagggtttcatcatcttgcccaggctggaggttttttttttttttttttaatagatgttctttatctagttgaggaag

SEQ ID NO: 85425 - DNA, 80 bp, synthetic construct
  source 1..80: mol_type = other DNA
gatcttggcttactgaaacctccacctcccggtttcaagtgattctcatgcctcagcctcccaagtagctgggattatag

SEQ ID NO: 85426 - DNA, 80 bp, synthetic construct
  source 1..80: mol_type = other DNA
ttcttataatctttggttttgaaattgaggtaatgctggcctccttgaccaagttaggatatattttttctgcttctatc

SEQ ID NO: 85427 - DNA, 80 bp, synthetic construct; identical to SEQ ID NO: 15346
  source 1..80: mol_type = other DNA

SEQ ID NO: 85428 - DNA, 80 bp, synthetic construct
  source 1..80: mol_type = other DNA
tttttccccctttagcttggctagagttttactgatgttattaatctttaaaaaaacccaagtcttgattttgttgtttc

SEQ ID NO: 85429 - DNA, 80 bp, synthetic construct
  source 1..80: mol_type = other DNA
gcccaggctggagtgcaatggcgcgatctcagctcacggcaacctccacctcccaggttcaagcaattctcctgcttcag

SEQ ID NO: 85430 - DNA, 80 bp, synthetic construct; identical to SEQ ID NO: 15347
  source 1..80: mol_type = other DNA

SEQ ID NO: 85431 - DNA, 80 bp, synthetic construct
  source 1..80: mol_type = other DNA
cttctacagctgaacagtgaaaaaggcaactaatccaagttaaaacatgaccaaggctgttggtcttaggtagattcagt

SEQ ID NO: 85432 - DNA, 80 bp, synthetic construct
  source 1..80: mol_type = other DNA
tcggaggtcattcctcttgccattttcactgacatcatttagcaaaagctttttgaccatttgggctttaaagatgaaaa

SEQ ID NO: 85433 - DNA, 80 bp, synthetic construct
  source 1..80: mol_type = other DNA
gaaaggtggcaagaggaagactgttcaaaaaactacctattaagtacgacgcctattacctgggtgatgaaataatctgt

SEQ ID NO: 85434 - DNA, 80 bp, synthetic construct; identical to SEQ ID NO: 15348
  source 1..80: mol_type = other DNA

SEQ ID NO: 85435 - DNA, 80 bp, synthetic construct
  source 1..80: mol_type = other DNA
aacacaccagagaggggactggtgctacattcttctggagactgaagtagggaagaggttggttttctacctttgaaaaa

SEQ ID NO: 85436 - DNA, 80 bp, synthetic construct
  source 1..80: mol_type = other DNA
agagaaggaacaggaacaaaggaaaggctaccaagcattcccatggaaaagttgaaacagcaacaaatcggttggcatca

SEQ ID NO: 85437 - DNA, 80 bp, synthetic construct
  source 1..80: mol_type = other DNA
ttgggcttgccttcttgtgcttctaccatcagtgtggaaacttctgtataacttttctattttagcccaggcccaagaat

SEQ ID NO: 85438 - DNA, 80 bp, synthetic construct; identical to SEQ ID NO: 15349
  source 1..80: mol_type = other DNA

SEQ ID NO: 85439 - DNA, 80 bp, synthetic construct
  source 1..80: mol_type = other DNA
atcaacaatttcaacaaagaccagattgcacgtcagcagtcattagggggttaagagcaccgacaatggacatgactgcc

SEQ ID NO: 85440 - DNA, 80 bp, synthetic construct
  source 1..80: mol_type = other DNA
attattattacctgcataaagaccactttgagaaaggttattaaagccctcttcacctgttcctcccatcgcctatttat

SEQ ID NO: 85441 - DNA, 80 bp, synthetic construct
  source 1..80: mol_type = other DNA
tgctgattttgttcttttcacatagggtttgcacccttctccatctgttcaaatctgattctcaatgtccgcacctagtc

SEQ ID NO: 85442 - DNA, 80 bp, synthetic construct; identical to SEQ ID NO: 15350
  source 1..80: mol_type = other DNA

SEQ ID NO: 85443 - DNA, 80 bp, synthetic construct
  source 1..80: mol_type = other DNA
cttttaaaaggtccaatataagccaaattaaccccaaaatttacagctacacttagagatctcctgaactaaatggcatt

SEQ ID NO: 85444 - DNA, 80 bp, synthetic construct
  source 1..80: mol_type = other DNA
tgtgaggataagaaacactacagaacagggcctgaatgctttagacatacaaggtgtaaccataaaggaaatttctacgg

SEQ ID NO: 85445 - DNA, 80 bp, synthetic construct
  source 1..80: mol_type = other DNA
gttaagctggggggcagactctcacagatggattacaaaagtaatgaaatagttttcttagtggggtggcattcgcaaga

SEQ ID NO: 85446 - DNA, 80 bp, synthetic construct
  source 1..80: mol_type = other DNA
tggaaatcacttcagcagagaagtcaaacagcctgtaaaagagaagacatggcagaatgtgcgagattcatccttccaac

SEQ ID NO: 85447 - DNA, 80 bp, synthetic construct; identical to SEQ ID NO: 15351
  source 1..80: mol_type = other DNA

SEQ ID NO: 85448 - DNA, 80 bp, synthetic construct
  source 1..80: mol_type = other DNA
ttcctactactaataattaggaagggttcattatgacttctttatattataaagaaaagatgggggattagatttataat

SEQ ID NO: 85449 - DNA, 80 bp, synthetic construct
  source 1..80: mol_type = other DNA
tactgaaagagtgcaagtaaatacagtattcaagcagtcactatttctatgtacatgctcattaattcttcaaaaaaccc

SEQ ID NO: 85450 - DNA, 80 bp, synthetic construct; identical to SEQ ID NO: 15352
  source 1..80: mol_type = other DNA

SEQ ID NO: 85451 - DNA, 80 bp, synthetic construct
  source 1..80: mol_type = other DNA
tactttaaatatgaataggacctaaggctttagtattttaaatcttgcccaatacagaaatgcctttcaagagactttag

SEQ ID NO: 85452 - DNA, 80 bp, synthetic construct
  source 1..80: mol_type = other DNA
tccatgccccaggaccacttagctgcaatagggtgaaatagtctactttttgatttcatgaatttttttctaggaaattc

SEQ ID NO: 85453 - DNA, 80 bp, synthetic construct
  source 1..80: mol_type = other DNA
atttgaaatagttctgtaaaagaaaaaaatgtaaaaatacatctgctttctctcatggtttaatacagcattggaaggct

SEQ ID NO: 85454 - DNA, 80 bp, synthetic construct
  source 1..80: mol_type = other DNA
agttatttggtccttttgcaatttgctgtgcacataatgcctactgtaccaaacttttattgcctttaaatttagttgta

SEQ ID NO: 85455 - DNA, 80 bp, synthetic construct; identical to SEQ ID NO: 15353
  source 1..80: mol_type = other DNA

SEQ ID NO: 85456 - DNA, 80 bp, synthetic construct
  source 1..80: mol_type = other DNA
tcatccacgtcagtgtataagtactcctgttcccctccaatgttattgaaactgcaataggagctaggttcattcctcat

SEQ ID NO: 85457 - DNA, 80 bp, synthetic construct
  source 1..80: mol_type = other DNA
agccaggcaatcagccacatccttattgggagcacaggccaaagctggggtatagcctagaattaaagataaaatttaaa

SEQ ID NO: 85458 - DNA, 80 bp, synthetic construct
  source 1..80: mol_type = other DNA
agggtggaaggggatgttagactagacaacagaagaggaagcaggcccagagaagaatgattccccaaggtctcacaact

SEQ ID NO: 85459 - DNA, 80 bp, synthetic construct; identical to SEQ ID NO: 15354
  source 1..80: mol_type = other DNA

SEQ ID NO: 85460 - DNA, 80 bp, synthetic construct
  source 1..80: mol_type = other DNA
agacaactgaccttagtcgtaagttaccacaaagtgtcaacacagcaaaccaaggaggaaacatttggtacctcagttgg

SEQ ID NO: 85461 - DNA, 80 bp, synthetic construct
  source 1..80: mol_type = other DNA
gcctccatatatcctctacccagtcgttacacctttcttcttccacaatggtaactactatcctgacttatggggtagta

SEQ ID NO: 85462 - DNA, 80 bp, synthetic construct
  source 1..80: mol_type = other DNA
agcctcctgagtagctgggattacacgtgtgtgccaccatgaccagctaattttttatatttttagtagagatgggattt

SEQ ID NO: 85463 - DNA, 80 bp, synthetic construct; identical to SEQ ID NO: 15355
  source 1..80: mol_type = other DNA

SEQ ID NO: 85464 - DNA, 80 bp, synthetic construct
  source 1..80: mol_type = other DNA
agccccctgactagctctgactataggcacatgccatgcctggctaatttttaaacttttttgtagatacagggtctcgc

SEQ ID NO: 85465 - DNA, 80 bp, synthetic construct
  source 1..80: mol_type = other DNA
aactgatgtccttccaagtttggcagcagtggctgaaggctgtccgtatttttaattaaattttatttgttcaaagtagc

SEQ ID NO: 85466 - DNA, 80 bp, synthetic construct; identical to SEQ ID NO: 15356
  source 1..80: mol_type = other DNA

SEQ ID NO: 85467 - DNA, 80 bp, synthetic construct
  source 1..80: mol_type = other DNA
aagtagctaggattacaggcacatgccaccacacctggctaatttttgtatttttagtagagacggggttttgccatgtt

SEQ ID NO: 85468 - DNA, 80 bp, synthetic construct
  source 1..80: mol_type = other DNA
ctttggattttggcttagcagttgcattttttgggatgccttctctgatcctgcaagaaaggatttgaagaccctcttaa

SEQ ID NO: 85469 - DNA, 80 bp, synthetic construct
  source 1..80: mol_type = other DNA
gcaaatattcactgagcctccacttgctcaggcactatttagaacactaagaatatatcagtgaatgcaactgacaaaga

SEQ ID NO: 85470 - DNA, 80 bp, synthetic construct; identical to SEQ ID NO: 15357
  source 1..80: mol_type = other DNA

SEQ ID NO: 85471 - DNA, 80 bp, synthetic construct
  source 1..80: mol_type = other DNA
gaaaggagaagagtaggaaataatatcagaaaggtaacaaggtggaggacacatcatgtagggcctagtaaggtcatttt

SEQ ID NO: 85472 - DNA, 80 bp, synthetic construct
  source 1..80: mol_type = other DNA
acttgggaggctgaggtgagaggttctcttgagcccaggagttcaaggttacaatcagctatgatctcaccactgtactc

SEQ ID NO: 85473 - DNA, 80 bp, synthetic construct
  source 1..80: mol_type = other DNA
actttagaggtggagtcaatagtatatgctgatggactatacattgagtatgagtgagaggaatcaaggatgactctagg

SEQ ID NO: 85474 - DNA, 80 bp, synthetic construct; identical to SEQ ID NO: 15358
  source 1..80: mol_type = other DNA

SEQ ID NO: 85475 - DNA, 80 bp, synthetic construct
  source 1..80: mol_type = other DNA
aaacgatcagttgtgccaaaagctgatctatcaagtaaaatgagagctaagtagtagttaacacagtagaagtcattggt

SEQ ID NO: 85476 - DNA, 80 bp, synthetic construct
  source 1..80: mol_type = other DNA
ggggtttgagaccagcctggccaatatggtgaaactccgtctctactaaaaatacaaaatttagccaggcgtcgtggcag

SEQ ID NO: 85477 - DNA, 80 bp, synthetic construct; identical to SEQ ID NO: 15359
  source 1..80: mol_type = other DNA

SEQ ID NO: 85478 - DNA, 80 bp, synthetic construct
  source 1..80: mol_type = other DNA
ctgtcaaactgacattatgaagtaggcaaaaggggacaggatctagtgcatgagtagaaacactggctttaaataagaat

SEQ ID NO: 85479 - DNA, 80 bp, synthetic construct
  source 1..80: mol_type = other DNA
taggaattcggaagtacatctgttagataacttttcctatttcttttgcccttattcctttgccacaaactactcttcaa

SEQ ID NO: 85480 - DNA, 80 bp, synthetic construct
  source 1..80: mol_type = other DNA
ctctaggttaagggaagagaatatagaaccaacttaccattttcatctactgcaagcacacttgctccttttcccaaaag

SEQ ID NO: 85481 - DNA, 80 bp, synthetic construct
  source 1..80: mol_type = other DNA
caaagagcatttttgtcaacttgtgaagaccaagaggtacaaactcgagaaacctagtcctaataacaaagatgggggca

SEQ ID NO: 85482 - DNA, 80 bp, synthetic construct; identical to SEQ ID NO: 15360
  source 1..80: mol_type = other DNA

SEQ ID NO: 85483 - DNA, 80 bp, synthetic construct
  source 1..80: mol_type = other DNA
ctgtcagtctatctggaggttggctgctcacattattaaaaattttgattctttaagaaaccttattggcttacagacac

SEQ ID NO: 85484 - DNA, 80 bp, synthetic construct
  source 1..80: mol_type = other DNA
ttcaaaagcattttaaataatatggcttttagttgtgatcattttagaaatgagttttgacagttgtaaaactattaaaa

SEQ ID NO: 85485 - DNA, 80 bp, synthetic construct
  source 1..80: mol_type = other DNA
cttttccagtattaacaaggcactagtttcatgaccctataattgtggcagataagttataaaaacttgagcaccattaa

SEQ ID NO: 85486 - DNA, 80 bp, synthetic construct
  source 1..80: mol_type = other DNA
aggataattatgcttagacttgtgttccaaaacttatttggcttactggagactttgatacgccatggtgccttataagt

SEQ ID NO: 85487 - DNA, 80 bp, synthetic construct; identical to SEQ ID NO: 15361
  source 1..80: mol_type = other DNA

SEQ ID NO: 85488 - DNA, 80 bp, synthetic construct
  source 1..80: mol_type = other DNA
atattgttgtataagtcacacactctaacaatggcaattaacatttattttgtgactgtgcactaaattttaaatactgt

SEQ ID NO: 85489 - DNA, 80 bp, synthetic construct
  source 1..80: mol_type = other DNA
gtgttcttaaccactatgttataaggccatggtaaagtagactcctcaatagtcagggcaaactaaaacattgtatccct

SEQ ID NO: 85490 - DNA, 80 bp, synthetic construct; identical to SEQ ID NO: 15362
  source 1..80: mol_type = other DNA

SEQ ID NO: 85491 - DNA, 80 bp, synthetic construct
  source 1..80: mol_type = other DNA
gctacaaaagcactgcctgtacacaaacaaataggctcaatggagcttactaatttctctcatagaaatttgtactttca

SEQ ID NO: 85492 - DNA, 80 bp, synthetic construct
  source 1..80: mol_type = other DNA
accaccacttattacaactgctggacttttttccaggctttattcccatttagaaaactgttaactttgttaacaataat

SEQ ID NO: 85493 - DNA, 80 bp, synthetic construct
  source 1..80: mol_type = other DNA
ttaataatgggttttctgtaaattctctcacaccagccagtagttaaaatttatttcttattgaaaataaaacctttttg

SEQ ID NO: 85494 - DNA, 80 bp, synthetic construct; identical to SEQ ID NO: 15363
  source 1..80: mol_type = other DNA

SEQ ID NO: 85495 - DNA, 80 bp, synthetic construct
  source 1..80: mol_type = other DNA
tatcctgtgtaaggtaacaaggtgatcattctcacagcaatggtgtatttcttaaaacactcaaaccaaatctgattcat

SEQ ID NO: 85496 - DNA, 80 bp, synthetic construct
  source 1..80: mol_type = other DNA
caggtacatgtaagtgtttaaaggaaaaatgtaaaagtctctccctcatcccatctcccagatcccctctctggaatata

SEQ ID NO: 85497 - DNA, 80 bp, synthetic construct
  source 1..80: mol_type = other DNA
ccaaccccaaattaaaaatatttgggggaaaaaaaaaacagagcagactttttttcttgtcatataccctaaatacagca

SEQ ID NO: 85498 - DNA, 80 bp, synthetic construct; identical to SEQ ID NO: 15364
  source 1..80: mol_type = other DNA

SEQ ID NO: 85499 - DNA, 80 bp, synthetic construct
  source 1..80: mol_type = other DNA
ttcaagtgattctcctgtctcagcctcccaagtagctggactacaggcgcccaccaccatgcccagctagcttttttcgt

SEQ ID NO: 85500 - DNA, 80 bp, synthetic construct
  source 1..80: mol_type = other DNA
ccggctaaaatcttattctttaatgttctgaagagcttcacagtatcaaagtatatcataaattatttaatctaattatg

SEQ ID NO: 85501 - DNA, 80 bp, synthetic construct
  source 1..80: mol_type = other DNA
ctgcagtctcaacctcctgggctcaagtgatcctcccacctcagcctcctgagttgctaagacaacaggtgcaaggctac

SEQ ID NO: 85502 - DNA, 80 bp, synthetic construct
  source 1..80: mol_type = other DNA
taggaagtatttttgtaggacaatttcctaccaaagtgatattgctgtggtaaaggagaagtatccagccttggtattct

SEQ ID NO: 85503 - DNA, 80 bp, synthetic construct; identical to SEQ ID NO: 15365
  source 1..80: mol_type = other DNA

SEQ ID NO: 85504 - DNA, 80 bp, synthetic construct
  source 1..80: mol_type = other DNA
ttttatttcattagtcatttgggatctactttaggaataagattcttacatggcctctttatacattttcatggtttaat

SEQ ID NO: 85505 - DNA, 80 bp, synthetic construct
  source 1..80: mol_type = other DNA
aagtggattttgcccatcagcagatattgtatgtggcaatgcctacagacatttttgtttatcacaactgaaggtggggc

SEQ ID NO: 85506 - DNA, 80 bp, synthetic construct; identical to SEQ ID NO: 15366
  source 1..80: mol_type = other DNA

SEQ ID NO: 85507 - DNA, 80 bp, synthetic construct
  source 1..80: mol_type = other DNA
aaaatttctcaattacaatttctaatacagtcagtatcaatccatagttcctgagaccaaagggtttgagaaccactcac

SEQ ID NO: 85508 - DNA, 80 bp, synthetic construct
  source 1..80: mol_type = other DNA
ataggatggtaaactgggtcctcctgagtttcagaggctagtctgaggatgtttagagcttcataaaaatgaacacattt

SEQ ID NO: 85509 - DNA, 80 bp, synthetic construct
  source 1..80: mol_type = other DNA
ttttaagaggttgttttctgttctgttggcatgcttccacttttctttccagctgtacaataattactagttaaagtaaa

SEQ ID NO: 85510 - DNA, 80 bp, synthetic construct; identical to SEQ ID NO: 15367
  source 1..80: mol_type = other DNA

SEQ ID NO: 85511 - DNA, 80 bp, synthetic construct
  source 1..80: mol_type = other DNA
acagttacagcagtacatttacaactaaatgctcttcctgaggaaaaatatctcactgtgtgatttttccaatggttaat

SEQ ID NO: 85512 - DNA, 80 bp, synthetic construct
  source 1..80: mol_type = other DNA
cattacagaaacaaatcaaacatcaatggcaaaatacagtatcttctttgttctagtatgagtactagtctctggccact

SEQ ID NO: 85513 - DNA, 80 bp, synthetic construct
  source 1..80: mol_type = other DNA
tattcaagtttttatggtgctatcagtactcagctgaaggataaccaacagtataacaggacaaacctcaagaacccaaa

SEQ ID NO: 85514 - DNA, 80 bp, synthetic construct; identical to SEQ ID NO: 15368
  source 1..80: mol_type = other DNA

SEQ ID NO: 85515 - DNA, 80 bp, synthetic construct
  source 1..80: mol_type = other DNA
actgaaattgaaaacaaattttaaaaacctctaatttctctactaaagcctgaagcttgaactttgacaacactgatgct

SEQ ID NO: 85516 - DNA, 80 bp, synthetic construct
  source 1..80: mol_type = other DNA
ccttttatgagtctacctataaaagcgatgactgtgactgtgagcctgtaggaggccaaagaaaatctcttttaaccatg

SEQ ID NO: 85517 - DNA, 80 bp, synthetic construct
  source 1..80: mol_type = other DNA
tgtttctcctacttttggttatttttcccctaatatgattgtatttagaaagtaaaagaacatggctgggtgcaatggct

SEQ ID NO: 85518 - DNA, 80 bp, synthetic construct
  source 1..80: mol_type = other DNA
cattctaaaaacctcctaaaaatgcaaaatatttgtggaaataaggatctaagaaaaacttcaggctacatggtggctca

SEQ ID NO: 85519 - DNA, 80 bp, synthetic construct; identical to SEQ ID NO: 15369
  source 1..80: mol_type = other DNA

SEQ ID NO: 85520 - DNA, 80 bp, synthetic construct
  source 1..80: mol_type = other DNA
tctgttcactacacaatgatatgcatttgtgtttgtatacttaaccattgtagcaagcccagtgaagtgccgtatatcca

SEQ ID NO: 85521 - DNA, 80 bp, synthetic construct
  source 1..80: mol_type = other DNA
cacattcttcatggcctgtaactgcctgaaagaaaataatttaaaggtagtcaaacatattatgctaaacattacatgcc

SEQ ID NO: 85522 - DNA, 80 bp, synthetic construct
  source 1..80: mol_type = other DNA
ggaagagagaaacttggtattcaatgaaaataatgatatttcaaaggtgaaaaaagattaaagtgtataagaaaataagt

SEQ ID NO: 85523 - DNA, 80 bp, synthetic construct; identical to SEQ ID NO: 15370
  source 1..80: mol_type = other DNA

SEQ ID NO: 85524 - DNA, 80 bp, synthetic construct
  source 1..80: mol_type = other DNA
tacgcccttctgtgatgcaacaattatttatcgaaacttactgtccatttccatcttgaatatccactgcattctgtggt

SEQ ID NO: 85525 - DNA, 80 bp, synthetic construct
  source 1..80: mol_type = other DNA
taatatgcaagaatgaaaactataggtaaaaagaaggtttctacggcctttgactgttaaagctggaataaatgtgaatt

SEQ ID NO: 85526 - DNA, 80 bp, synthetic construct; identical to SEQ ID NO: 15371
  source 1..80: mol_type = other DNA

SEQ ID NO: 85527 - DNA, 80 bp, synthetic construct
  source 1..80: mol_type = other DNA
atgtaagagaataacagaatttaatccagagctctgacaccgttgtagaatcaaccaaccctggaactgcatctgcctga

SEQ ID NO: 85528 - DNA, 80 bp, synthetic construct
  source 1..80: mol_type = other DNA
cccggcgattttttttgtatttttaggagagatgaggtttcaccatctaggcatggctggtcttgaactcctgacctcat

SEQ ID NO: 85529 - DNA, 80 bp, synthetic construct
  source 1..80: mol_type = other DNA
atatatacatacagtacaagaaaaatgatccatctaaagaatgcatgtgttaagtccaaatgcataaaatgggcaagggt

SEQ ID NO: 85530 - DNA, 80 bp, synthetic construct
  source 1..80: mol_type = other DNA
ttctaattaaaagatgacaaaactagcaaaagcaagctaggtgctgaatattccacagtatgttcccacagttatattaa

SEQ ID NO: 85531 - DNA, 80 bp, synthetic construct; identical to SEQ ID NO: 15372
  source 1..80: mol_type = other DNA

SEQ ID NO: 85532 - DNA, 80 bp, synthetic construct
  source 1..80: mol_type = other DNA
gtggttctttttgtgggtaggatttatgctgaactatatggcattggttaactacttctaagggactggctaatgtctca

SEQ ID NO: 85533 - DNA, 80 bp, synthetic construct
  source 1..80: mol_type = other DNA
tatattttaggaacagggtttcatcatgttgcctagagtgcaatgaaactgaactcaagtgaccctcttgcctcagcctc

SEQ ID NO: 85534 - DNA, 80 bp, synthetic construct; identical to SEQ ID NO: 15373
  source 1..80: mol_type = other DNA

SEQ ID NO: 85535 - DNA, 80 bp, synthetic construct
  source 1..80: mol_type = other DNA
cagtgatacgcagtgggtagcaagtcatttaactgacttggttatagaccttcgtattttaacgtatctgctacatcata

SEQ ID NO: 85536 - DNA, 80 bp, synthetic construct
  source 1..80: mol_type = other DNA
aaagcctgtctgcataaatgtttaatgcagtacactggtaaaataagtcaaaacgtgtatcacttgttaaatgaaagatt

SEQ ID NO: 85537 - DNA, 80 bp, synthetic construct
  source 1..80: mol_type = other DNA
cattttaccacttaaagtcaaaaatttccccagacagttgtagctcttggtaatctccttgggtctggaaacttttgaag

SEQ ID NO: 85538 - DNA, 80 bp, synthetic construct; identical to SEQ ID NO: 15374
  source 1..80: mol_type = other DNA

SEQ ID NO: 85539 - DNA, 80 bp, synthetic construct
  source 1..80: mol_type = other DNA
ttaatgacttcttaaacacttgtgtgggacaggctggagcatgagggaggttttaagccaggcacaaagttagtttcaaa

SEQ ID NO: 85540 - DNA, 80 bp, synthetic construct
  source 1..80: mol_type = other DNA
acactgtatttaagttccctgaacactgggatactcctaatgtttatgaatgacggaggctttgtaaattcatttgtgtg

SEQ ID NO: 85541 - DNA, 80 bp, synthetic construct
  source 1..80: mol_type = other DNA
gctgcatgaataggtgtcctcttcaaaatgtaatcttttactaagattgaggctccctgattaatgagtacatccacaca

SEQ ID NO: 85542 - DNA, 80 bp, synthetic construct
  source 1..80: mol_type = other DNA
tagactgacttcctaaatacttgaataaatgtaaataagcaaacttgtcttcatattattatcctacttgagataatcca

SEQ ID NO: 85543 - DNA, 80 bp, synthetic construct; identical to SEQ ID NO: 15375
  source 1..80: mol_type = other DNA

SEQ ID NO: 85544 - DNA, 80 bp, synthetic construct
  source 1..80: mol_type = other DNA
accagaggtacacgtcaccatgcccagctaatttttcttttaatttttgtagtgatgagggtctcgctatgctatccggg

SEQ ID NO: 85545 - DNA, 80 bp, synthetic construct
  source 1..80: mol_type = other DNA
cttgaatattcggatttctcaaattaaactgaccatacccaccccataatgtgccatagctaaaaaagaagtaattcttt

SEQ ID NO: 85546 - DNA, 80 bp, synthetic construct
  source 1..80: mol_type = other DNA
ggcacaatctcagctcactgcaacctccgcctccctgggttcaagcgattctcctgtctcagtctcccgagtagctggga

SEQ ID NO: 85547 - DNA, 80 bp, synthetic construct; identical to SEQ ID NO: 15376
  source 1..80: mol_type = other DNA

SEQ ID NO: 85548 - DNA, 80 bp, synthetic construct
  source 1..80: mol_type = other DNA
tgtagaaaatgtcagaaagtagcagcaagagataaacttgctctgggcctcactgatctctttataatgaatctgtgtag

SEQ ID NO: 85549 - DNA, 80 bp, synthetic construct
  source 1..80: mol_type = other DNA
aaaagacaatataaaaagaagagtttagccagttgtggtggctcacacctataatcccagcactttggggaggctgaggt

SEQ ID NO: 85550 - DNA, 80 bp, synthetic construct; identical to SEQ ID NO: 15377
  source 1..80: mol_type = other DNA

SEQ ID NO: 85551 - DNA, 80 bp, synthetic construct
  source 1..80: mol_type = other DNA
tagtcgggaatggtggtgtgcacctatagtcctagctactcagaaggctgagggagggaggctcactggagctcaggaat

SEQ ID NO: 85552 - DNA, 80 bp, synthetic construct
  source 1..80: mol_type = other DNA
gatatccttgtatgggactgagagaagaagtccaaatgtccagtatgactaaaattaggaatcaaggccagtctccttaa

SEQ ID NO: 85553 - DNA, 80 bp, synthetic construct
  source 1..80: mol_type = other DNA
atttttagtttaaaaacactatttagtatacctatggcatagcagcacttattcataatagccaagagaagaaagcaacc

SEQ ID NO: 85554 - DNA, 80 bp, synthetic construct; identical to SEQ ID NO: 15378
  source 1..80: mol_type = other DNA

SEQ ID NO: 85555 - DNA, 80 bp, synthetic construct
  source 1..80: mol_type = other DNA
cttttttctaccattaccaccatatacacatacaaaatctctgacaaaaaaatagtaatgggggggcagagagagagaga

SEQ ID NO: 85556 - DNA, 80 bp, synthetic construct
  source 1..80: mol_type = other DNA
ttttgggagtctttaatatgctactagttgaatctccacaaggcggaaatagtctggcacctagaaagtgctcaagaaat

SEQ ID NO: 85557 - DNA, 80 bp, synthetic construct
  source 1..80: mol_type = other DNA
ttccaaggactcaaagggcaaagaagtagaaagcttcaagaatgctttcttagttatttagaacatgataggaagtatca

SEQ ID NO: 85558 - DNA, 80 bp, synthetic construct; identical to SEQ ID NO: 15379
  source 1..80: mol_type = other DNA

SEQ ID NO: 85559 - DNA, 80 bp, synthetic construct
  source 1..80: mol_type = other DNA
aatttagaggaatcttaaagtggaagggacataacagacaatgtagccaaatcctatagtgtgagcaactaaaggaccag

SEQ ID NO: 85560 - DNA, 80 bp, synthetic construct
  source 1..80: mol_type = other DNA
tttctccctttctctccccagaaggccctgggggaagcctaaggatcactgtctgtcttttttttttttttctaaagcaa

SEQ ID NO: 85561 - DNA, 80 bp, synthetic construct
  source 1..80: mol_type = other DNA
ccagcagccatcaagtcggctatgaaggcagtactcacagccaagtgtaaagggcttattgttgctctattatctgaatc

SEQ ID NO: 85562 - DNA, 80 bp, synthetic construct; identical to SEQ ID NO: 15380
  source 1..80: mol_type = other DNA

SEQ ID NO: 85563 - DNA, 80 bp, synthetic construct
  source 1..80: mol_type = other DNA
ggaactgaccaatactaattggtgggagggaattgactaatacttacaacatctagaggagtttcacttgcaatctgaaa

SEQ ID NO: 85564 - DNA, 80 bp, synthetic construct
  source 1..80: mol_type = other DNA
atctatatacataggtctaaaattttggtgtgaatatccataacgtaggaaaatagttatttttgtagcagggctctaag

SEQ ID NO: 85565 - DNA, 80 bp, synthetic construct
  source 1..80: mol_type = other DNA
tccttgactttccttctggtttggtaaatttgggtgaatggtggtattctattccagaatcagaccacagcagaaataaa

SEQ ID NO: 85566 - DNA, 80 bp, synthetic construct
  source 1..80: mol_type = other DNA
attaatttaaaggggcaggagaagtaaatagtgtagacatgaacatggggtaatcagtagccctcttcagagatctaatt

SEQ ID NO: 85567 - DNA, 80 bp, synthetic construct; identical to SEQ ID NO: 15381
  source 1..80: mol_type = other DNA

SEQ ID NO: 85568 - DNA, 80 bp, synthetic construct
  source 1..80: mol_type = other DNA
gtttcttaataagtattccaggcacctatatacaacaacaacaacatactgaaaatcctaaatcctgcatattaaccaat

SEQ ID NO: 85569 - DNA, 80 bp, synthetic construct
  source 1..80: mol_type = other DNA
gtggatacctcaaaagtctgtcagacagctttttttttcatatgtgaaggctatcttttacacagtctctatctatacca

SEQ ID NO: 85570 - DNA, 80 bp, synthetic construct; identical to SEQ ID NO: 15382
  source 1..80: mol_type = other DNA

SEQ ID NO: 85571 - DNA, 80 bp, synthetic construct
  source 1..80: mol_type = other DNA
ctacccaggggaaaagaagtcattatttgaaaaaggcacttgcacatgcatgtttatagcagtacaattcgcaattgcaa

SEQ ID NO: 85572 - DNA, 80 bp, synthetic construct
  source 1..80: mol_type = other DNA
ttcagggatggaaaacgaatatcgtatgttctcgctcataagtgggagctatgaggagacgcgaaggcacaaaaatgata

SEQ ID NO: 85573 - DNA, 80 bp, synthetic construct
  source 1..80: mol_type = other DNA
taaagaacttatctatgtaaccaaaaaccacctgttccccaggaactattgaaataaaatacaataaaaataaatttaat

SEQ ID NO: 85574 - DNA, 80 bp, synthetic construct; identical to SEQ ID NO: 15383
  source 1..80: mol_type = other DNA

SEQ ID NO: 85575 - DNA, 80 bp, synthetic construct
  source 1..80: mol_type = other DNA
aatttcagaacctgttatttgtctattcagagattcaacttcttcctggtttagtcttgggagggtgtatatgtccaaga

SEQ ID NO: 85576 - DNA, 80 bp, synthetic construct; identical to SEQ ID NO: 15384
  source 1..80: mol_type = other DNA

SEQ ID NO: 85577 - DNA, 80 bp, synthetic construct
  source 1..80: mol_type = other DNA
tctggctagggcaatcaggcaagagaaagaaataaagggtattcaattaggaaaagaggaagtcaaattgtctctgtttg

SEQ ID NO: 85578 - DNA, 80 bp, synthetic construct; identical to SEQ ID NO: 15385
  source 1..80: mol_type = other DNA

SEQ ID NO: 85579 - DNA, 80 bp, synthetic construct
  source 1..80: mol_type = other DNA
gactttcttcacagaattggaaaaaactactttaaagttcatatggaaccaaaaaagagcccgcattgccaagacaatcc

SEQ ID NO: 85580 - DNA, 80 bp, synthetic construct
  source 1..80: mol_type = other DNA
aaggatttcttatttaataaatggtgctgggaaaactggctagccatatgtagaaagctgaaactggatcccttccttac

SEQ ID NO: 85581 - DNA, 80 bp, synthetic construct
  source 1..80: mol_type = other DNA
aatagacaaatgggatctaattaaactaaagagcttctgcacagcaaaagaaactatcatcagagtgaacaggcaatcta

SEQ ID NO: 85582 - DNA, 80 bp, synthetic construct; identical to SEQ ID NO: 15386
  source 1..80: mol_type = other DNA

SEQ ID NO: 85583 - DNA, 80 bp, synthetic construct
  source 1..80: mol_type = other DNA
ttgacccagccatcccattactgggtatatacccaaaggattataaatcatgctgctataaagacacatgcacacgtatg

SEQ ID NO: 85584 - DNA, 80 bp, synthetic construct
  source 1..80: mol_type = other DNA
tggaaaccatcattctcagcaaactatcacaagatcagaaaaccaaacactgcatgttctcactcatacgtgggagctga

SEQ ID NO: 85585 - DNA, 80 bp, synthetic construct; identical to SEQ ID NO: 15387
  source 1..80: mol_type = other DNA

SEQ ID NO: 85586 - DNA, 80 bp, synthetic construct
  source 1..80: mol_type = other DNA
ctggccaacatggtgaaatcttgtctctaccaagagtacaaaaattagctgggtgtggtggcgggcgcctgtagtcccag

SEQ ID NO: 85587 - DNA, 80 bp, synthetic construct
  source 1..80: mol_type = other DNA
tacagcagaaaaaaaaagcactgaaatagcactggtaccagtgatcttgggccataaaagtgaaatagcctctgtttatt

SEQ ID NO: 85588 - DNA, 80 bp, synthetic construct; identical to SEQ ID NO: 15388
  source 1..80: mol_type = other DNA

SEQ ID NO: 85589 - DNA, 80 bp, synthetic construct
  source 1..80: mol_type = other DNA
ttttgatatttatgtacagctaaaattctttggagtcaagcataataaaaaaaagaagattaagctgggtgcagtggctc

SEQ ID NO: 85590 - DNA, 80 bp, synthetic construct
  source 1..80: mol_type = other DNA
ggctgaggcaggagaatcacttgaacccaggaggcggaggttgcagtaagctgagattgcaccattgcactccagcctgg

SEQ ID NO: 85591 - DNA, 80 bp, synthetic construct; identical to SEQ ID NO: 15389
  source 1..80: mol_type = other DNA

SEQ ID NO: 85592 - DNA, 80 bp, synthetic construct
  source 1..80: mol_type = other DNA
aaaaaaaatctttaatcaagttctctagatgttagtgataaaacagaaatgggtcttccttactgagacctgaatacaaa

SEQ ID NO: 85593 - DNA, 80 bp, synthetic construct
  source 1..80: mol_type = other DNA
aagttaaatgacttttcccaaatccttttggctagaatatggcaaaccaaggactaaaccacctcaggtcttccctttat

SEQ ID NO: 85594 - DNA, 80 bp, synthetic construct; identical to SEQ ID NO: 15390
  source 1..80: mol_type = other DNA

SEQ ID NO: 85595 - DNA, 80 bp, synthetic construct
  source 1..80: mol_type = other DNA
aaatcggaatgcatttcaaactatttaaatttctcctactcttaccctaccactcatgaaccctactattttgagttctg

SEQ ID NO: 85596 - DNA, 80 bp, synthetic construct
  source 1..80: mol_type = other DNA
ccaccaccccacccctggcccaaaaaatcagttttaaaaaatacaactaacctttataggaagattaggatacgtcagaa

SEQ ID NO: 85597 - DNA, 80 bp, synthetic construct
  source 1..80: mol_type = other DNA
aaggtccccatagtaaaaggcagagctagtatcaaacactgctcttacatatatatacacaataagcttaacaaggttgt

SEQ ID NO: 85598 - DNA, 80 bp, synthetic construct
  source 1..80: mol_type = other DNA
aagtttgaaaacagacaaaaataaactgccattagaagtcaaaatgtagcctcatttcctaagagtgttgctatggtcta

SEQ ID NO: 85599 - DNA, 80 bp, synthetic construct; identical to SEQ ID NO: 15391
  source 1..80: mol_type = other DNA

SEQ ID NO: 85600 - DNA, 80 bp, synthetic construct
  source 1..80: mol_type = other DNA
gttattgcgaagttacgatgttgctgaaacaaatatctaaaatgtggaagaggttttggaactgggtaatggatagagga

SEQ ID NO: 85601 - DNA, 80 bp, synthetic construct
  source 1..80: mol_type = other DNA
ctgttgatgatggttatctcaggagagctggtatgaggggaatttcttccttataatcaggaaaaacagccctcaacctt

SEQ ID NO: 85602 - DNA, 80 bp, synthetic construct; identical to SEQ ID NO: 15392
  source 1..80: mol_type = other DNA

SEQ ID NO: 85603 - DNA, 80 bp, synthetic construct
  source 1..80: mol_type = other DNA
tgttaaaaattccaaagtataaacaacaacttttcctggggagctttaaaggtagaaactgtgatgctgacaggggattt

SEQ ID NO: 85604 - DNA, 80 bp, synthetic construct
  source 1..80: mol_type = other DNA
gttatgcctgattctcttattactcaagctattcctgggaatacaattacaattgggtacaattgtacccaatttaagaa

SEQ ID NO: 85605 - DNA, 80 bp, synthetic construct
  source 1..80: mol_type = other DNA
tccactaggctcccatggaacaaatcattgaatcaataaatgatggcactcgacaggctctctgggattttgatacttaa

SEQ ID NO: 85606 - DNA, 80 bp, synthetic construct; identical to SEQ ID NO: 15393
  source 1..80: mol_type = other DNA

SEQ ID NO: 85607 - DNA, 80 bp, synthetic construct
  source 1..80: mol_type = other DNA
agtgattttagtactagtacccttctataggaaaagtagattggcttacaatgaaaccacacatctccaacactatgggt

SEQ ID NO: 85608 - DNA, 80 bp, synthetic construct
  source 1..80: mol_type = other DNA
aaccagtctgtgaaagtagtggtaaaggactacagatggtgataaaaggtataacttattttaagcaaatcaataaatca

SEQ ID NO: 85609 - DNA, 80 bp, synthetic construct
  source 1..80: mol_type = other DNA
ctttaagattagaattttaggctgggcgcagtggctcactcctgtaatcccagcattttggaaggccaaggtgggcggat

SEQ ID NO: 85610 - DNA, 80 bp, synthetic construct; identical to SEQ ID NO: 15394
  source 1..80: mol_type = other DNA

SEQ ID NO: 85611 - DNA, 80 bp, synthetic construct
  source 1..80: mol_type = other DNA
gctgcacccattaactcgtcacttacattaggtatacctcctaatgctatccctccccctcctccccaccccatgacagg

SEQ ID NO: 85612 - DNA, 80 bp, synthetic construct
  source 1..80: mol_type = other DNA
ctccttttttatggctgcatagtattccatgatgtatatgtgccacattttcttaatccagtctatcattgatggacatt

SEQ ID NO: 85613 - DNA, 80 bp, synthetic construct
  source 1..80: mol_type = other DNA
ccacactgtcttccacaatggttgaactagtttatagtcccaccaacagtataaaagtgttcctatttctccacatcctc

SEQ ID NO: 85614 - DNA, 80 bp, synthetic construct
  source 1..80: mol_type = other DNA
tctgttcatatccttcacccaatttttgatggggttgtttgaaaaacccctagaattttagccacaatccaacataaaaa

SEQ ID NO: 85615 - DNA, 80 bp, synthetic construct; identical to SEQ ID NO: 15395
  source 1..80: mol_type = other DNA

SEQ ID NO: 85616 - DNA, 80 bp, synthetic construct
  source 1..80: mol_type = other DNA
catttacttattctgccatctaatttacctatttaagcaacatgtagtacctactacgtaccagattctgccagttcaat

SEQ ID NO: 85617 - DNA, 80 bp, synthetic construct
  source 1..80: mol_type = other DNA
aagaagtcaggtggaaaaaaacataaaagtgatattaagatgctcttttggcagataggacaagaagggacctttatctt

SEQ ID NO: 85618 - DNA, 80 bp, synthetic construct; identical to SEQ ID NO: 15396
  source 1..80: mol_type = other DNA

SEQ ID NO: 85619 - DNA, 80 bp, synthetic construct
  source 1..80: mol_type = other DNA
cagagacataactagtaaacaaaagcatagttgactcttactcctcccagttacaaatactttatttacagtgagactta

SEQ ID NO: 85620 - DNA, 80 bp, synthetic construct
  source 1..80: mol_type = other DNA
ggcagtagcagcaatcccagtcccagtcctttgagtgactttcaaataaccttcatattctgctcagaaatgtgaaaact

SEQ ID NO: 85621 - DNA, 80 bp, synthetic construct
  source 1..80: mol_type = other DNA
aactcaaagcatttttcagaagccctctctgttatttgtagtatagaatgcctgaagtactaaaaattaatataaactgg

SEQ ID NO: 85622 - DNA, 80 bp, synthetic construct
  source 1..80: mol_type = other DNA
tcttctattcatttctgatttcctaccatgcataattctttttacttctcttctgcactggttctatcacatgcattgac

SEQ ID NO: 85623 - DNA, 80 bp, synthetic construct; identical to SEQ ID NO: 15397
  source 1..80: mol_type = other DNA

SEQ ID NO: 85624 - DNA, 80 bp, synthetic construct
  source 1..80: mol_type = other DNA
gaacaagatatgggcagtagaatccctcaccaagaaatgacttggagaaaggagaactgtatcattattttctaggtatt

SEQ ID NO: 85625 - DNA, 80 bp, synthetic construct
  source 1..80: mol_type = other DNA
gtgagaacgaatatttggaagttactgacttcagctgggactctcaatgaatcatgatcagtgtacaagatgctaaattg

SEQ ID NO: 85626 - DNA, 80 bp, synthetic construct; identical to SEQ ID NO: 15398
  source 1..80: mol_type = other DNA

SEQ ID NO: 85627 - DNA, 80 bp, synthetic construct
  source 1..80: mol_type = other DNA
gaaataacacacgattcatgttgtcattgtttaaaaggaagatcacatttgcaaaagagattctgaggaggctttaggaa

SEQ ID NO: 85628 - DNA, 80 bp, synthetic construct
  source 1..80: mol_type = other DNA
gtgagccactgcatgagtcctgtcagctttcccttatcttctcctatactatgactgtttacatatatgtatctttagtt

SEQ ID NO: 85629 - DNA, 80 bp, synthetic construct
  source 1..80: mol_type = other DNA
tttaactggaaggttctctggcgaccttggaagaacaagaaaaccagtcacatgctcacaatccatctctacaacttaga

SEQ ID NO: 85630 - DNA, 80 bp, synthetic construct; identical to SEQ ID NO: 15399
  source 1..80: mol_type = other DNA

SEQ ID NO: 85631 - DNA, 80 bp, synthetic construct
  source 1..80: mol_type = other DNA
ttacttatccagaaattatgttcttttacagaaggcagtatttccttttgtaggtttattctctctctctctctcactca

SEQ ID NO: 85632 - DNA, 80 bp, synthetic construct
  source 1..80: mol_type = other DNA
cttaaagaaataaaaatactattaacataccctccagctgcagctgcatgtagacaagtcctgccaaaatcatctggggt

SEQ ID NO: 85633 - DNA, 80 bp, synthetic construct
  source 1..80: mol_type = other DNA
aacatcaagaatcacatcctcccctccaatcccaaacaaaactatgggttcttaagtgctagagtgcctgtttaaaaggc

SEQ ID NO: 85634 - DNA, 80 bp, synthetic construct; identical to SEQ ID NO: 15400
  source 1..80: mol_type = other DNA

SEQ ID NO: 85635 - DNA, 80 bp, synthetic construct
  source 1..80: mol_type = other DNA
ttgtattttttttttagtagagatgggctttcaccatgttggccatgctggtcttgaactcctgacctcaagtgatctgc

SEQ ID NO: 85636 - DNA, 80 bp, synthetic construct
  source 1..80: mol_type = other DNA
ttgaggagacatacaaaaggctgcaaaggttacacttacctgaagaaagaagttttctgcagcaatctgaaaagccgctt

SEQ ID NO: 85637 - DNA, 80 bp, synthetic construct
  source 1..80: mol_type = other DNA
cttcggagagtaatttggttaaagtttgatggtgggcataacttattagccagctatttttctccaaaagtcaggtttct

SEQ ID NO: 85638 - DNA, 80 bp, synthetic construct; identical to SEQ ID NO: 15401
  source 1..80: mol_type = other DNA

SEQ ID NO: 85639 - DNA, 80 bp, synthetic construct
  source 1..80: mol_type = other DNA
tatctagatggctaaattaataagctcatgtaatttttttggaaaaagttacaaaacagataggtgcagtaccataccat

SEQ ID NO: 85640 - DNA, 80 bp, synthetic construct
  source 1..80: mol_type = other DNA
taaatacaagcaaactgttctgaccaaaatgggggtgggggtaagaactccttcgtaggattccaaggaatccctgagct

SEQ ID NO: 85641 - DNA, 80 bp, synthetic construct
  source 1..80: mol_type = other DNA
aaaaattaacagctctgatcaaaactgcgttattactcaaagtgagaaagaactggggtaacatacataaaaatacactg

SEQ ID NO: 85642 - DNA, 80 bp, synthetic construct; identical to SEQ ID NO: 15402
  source 1..80: mol_type = other DNA

SEQ ID NO: 85643 - DNA, 80 bp, synthetic construct
  source 1..80: mol_type = other DNA
atagatacagcaattttaactagatttcattcatagctcatttattgggccaggcaatggatttatagcttttatactta

SEQ ID NO: 85644 - DNA, 80 bp, synthetic construct
  source 1..80: mol_type = other DNA
gcaagacttcagagctttaatgtgcatactctgtcatcaagactgcatgcaatgcttcaaaaaatattggatcatgaacc

SEQ ID NO: 85645 - DNA, 80 bp, synthetic construct
  source 1..80: mol_type = other DNA
aaactcaagaaattaaaatcctgaaaatagttgcagatactcaacaggggaaaatgatacatgtataatgtatatacaga

SEQ ID NO: 85646 - DNA, 80 bp, synthetic construct
  source 1..80: mol_type = other DNA
ctctttaatattttattttcatgagctctgaaatcatgtattaaaaatacacaaaatgcgatgacaattcctcaatacca

SEQ ID NO: 85647 - DNA, 80 bp, synthetic construct; identical to SEQ ID NO: 15403
  source 1..80: mol_type = other DNA

SEQ ID NO: 85648 - DNA, 80 bp, synthetic construct
  source 1..80: mol_type = other DNA
agtaaggatgtgtctcccaagtttcagattcaaaatttcacactgctccaacatttccattctaagaaattctgaatcct

SEQ ID NO: 85649 - DNA, 80 bp, synthetic construct
  source 1..80: mol_type = other DNA
tgcacacatatatatttcatgtagaagttctaaaggagttccaaatatgaagaaaaacaatccctgatttaggttatctt

SEQ ID NO: 85650 - DNA, 80 bp, synthetic construct
  source 1..80: mol_type = other DNA
gcatgccttctgcataggtactaaaatggaaatgtcacaagtattctaagtttatgctaacactgtacaacgcagatatt

SEQ ID NO: 85651 - DNA, 80 bp, synthetic construct; identical to SEQ ID NO: 15404
  source 1..80: mol_type = other DNA

SEQ ID NO: 85652 - DNA, 80 bp, synthetic construct
  source 1..80: mol_type = other DNA
ttatttgttcaaccagaaaaaaaaagggcaaaaaagcatcttggcaaaaggattctgtctttccaaaatgttccagatag

SEQ ID NO: 85653 - DNA, 80 bp, synthetic construct
  source 1..80: mol_type = other DNA
gcctcctgagtagctgggattacaggcatgcaccaccatgcccagctaatttttgtattttagtagagatggggtttcac

SEQ ID NO: 85654 - DNA, 80 bp, synthetic construct; identical to SEQ ID NO: 15405
  source 1..80: mol_type = other DNA

SEQ ID NO: 85655 - DNA, 80 bp, synthetic construct
  source 1..80: mol_type = other DNA
gccagctatagccaatttttacagacataaggaaaaacatagattccattgataagaaggataagaaaaacaagaggaaa

SEQ ID NO: 85656 - DNA, 80 bp, synthetic construct
  source 1..80: mol_type = other DNA
gcacggtggctcatatctataattccagcgcttggggaggccaaagcggaaggactgcttgaactcaggagtttgaggct

SEQ ID NO: 85657 - DNA, 80 bp, synthetic construct
  source 1..80: mol_type = other DNA
atagatgaggaaatgtaggccccagggttaagtgattttactaggtctcatagctaataagtgatgagtcctttatttat

SEQ ID NO: 85658 - DNA, 80 bp, synthetic construct
  source 1..80: mol_type = other DNA
acacaactgggcctggttagaatcctttattataagcctatatgtggcactggatcaacatttttactttctacatactg

SEQ ID NO: 85659 - DNA, 80 bp, synthetic construct; identical to SEQ ID NO: 15406
  source 1..80: mol_type = other DNA

SEQ ID NO: 85660 - DNA, 80 bp, synthetic construct
  source 1..80: mol_type = other DNA
aagcatttggtgtattttgcttagctgaccaaaatctattcttaaagaacaatgtgggtgggaaaacgtgtgcatataaa

SEQ ID NO: 85661 - DNA, 80 bp, synthetic construct
  source 1..80: mol_type = other DNA
ctagtcatctataacttgatcaaggtcagaaacaacaaaatggagaatgtagtaggaggaaaagattaagcaggaaaaaa

SEQ ID NO: 85662 - DNA, 80 bp, synthetic construct; identical to SEQ ID NO: 15407
  source 1..80: mol_type = other DNA

SEQ ID NO: 85663 - DNA, 80 bp, synthetic construct
  source 1..80: mol_type = other DNA
cacttgtcatatatgaaattcaccactgagttttctaaattattaaggaggtaacttcaaataggaccactggtttgagc

SEQ ID NO: 85664 - DNA, 80 bp, synthetic construct
  source 1..80: mol_type = other DNA
aaatggcagtgcataaaacaggaagcccaatctctaccttttaaagacagcatcatgtgaaccaaaaaatgcatagtagc

SEQ ID NO: 85665 - DNA, 80 bp, synthetic construct
  source 1..80: mol_type = other DNA
gaaatagcctaactttcattaaagaaacattactgcgcctttgaggaaaaaactaacttttctcctcacaactgtctaga

SEQ ID NO: 85666 - DNA, 80 bp, synthetic construct
  source 1..80: mol_type = other DNA
gctctaatcatattagggcactttgtgacatctcatgttttttcttccttgggtgtagtatgtatacattttgtcctgta

SEQ ID NO: 85667 - DNA, 80 bp, synthetic construct; identical to SEQ ID NO: 15408
  source 1..80: mol_type = other DNA

SEQ ID NO: 85668 - DNA, 80 bp, synthetic construct
  source 1..80: mol_type = other DNA
tatatagtgaaagcatatttatttgggtacagaatattcattcatttgaggcaaggtctcacctgtcgcccaggctagag

SEQ ID NO: 85669 - DNA, 80 bp, synthetic construct
  source 1..80: mol_type = other DNA
atagaggtcttgctatgttgcccaggctggtcttgaactcctggcctcaagtgatcttctcgccttggcctcctaaagca

SEQ ID NO: 85670 - DNA, 80 bp, synthetic construct
  source 1..80: mol_type = other DNA
gctcactgcagccttgacctccaaggctcaaaaatcctcccacttcaacctcccaagtagctgggactacaagcatgagc

SEQ ID NO: 85671 - DNA, 80 bp, synthetic construct; identical to SEQ ID NO: 15409
  source 1..80: mol_type = other DNA

SEQ ID NO: 85672 - DNA, 80 bp, synthetic construct
  source 1..80: mol_type = other DNA
tctatccttccatccacccagttatttgatgctttttaaaattagatacagacatcatacatgtcacctctaaacacaac

SEQ ID NO: 85673 - DNA, 80 bp, synthetic construct
  source 1..80: mol_type = other DNA
catgcccctttcccagttgatccctcctcacaatggcaataattgttgtgatttttttcaattatagattctggaacccc

SEQ ID NO: 85674 - DNA, 80 bp, synthetic construct
  source 1..80: mol_type = other DNA
gttgttttaacagtgacatatgaaatacttatagattctgattttgttccttaccttcatattgacatcggccccattgc

SEQ ID NO: 85675 - DNA, 80 bp, synthetic construct; identical to SEQ ID NO: 15410
  source 1..80: mol_type = other DNA

SEQ ID NO: 85676 - DNA, 80 bp, synthetic construct
  source 1..80: mol_type = other DNA
gacaagcattttggtattacattgattttatacattcagggaatataattcacatacacaatgtctacttcatgacaaaa

SEQ ID NO: 85677 - DNA, 80 bp, synthetic construct
  source 1..80: mol_type = other DNA
ttcattttgcagtgacaaaggctaaccttagtaataaagtacagatcaagatttaaaaaaaaatgaacggcatgttctat

SEQ ID NO: 85678 - DNA, 80 bp, synthetic construct
  source 1..80: mol_type = other DNA
cgaaacctctgcctcctaggctcaagtgattctcctgcctcagcctcctgagtaactgggattacatgcacacaccacta

SEQ ID NO: 85679 - DNA, 80 bp, synthetic construct; identical to SEQ ID NO: 15411
  source 1..80: mol_type = other DNA

SEQ ID NO: 85680 - DNA, 80 bp, synthetic construct
  source 1..80: mol_type = other DNA
tatcatgtatttggagactgaaatcaaccacatggacaaccaatcaagccatataatggagccccaataaaaaccgaaaa

SEQ ID NO: 85681 - DNA, 80 bp, synthetic construct; identical to SEQ ID NO: 15412
  source 1..80: mol_type = other DNA

SEQ ID NO: 85682 - DNA, 80 bp, synthetic construct
  source 1..80: mol_type = other DNA
tagcccttctccaccccagcaacttccccacccccattggtcatgccagctctaagcccatgctgatgctgtgtgggcat

SEQ ID NO: 85683 - DNA, 80 bp, synthetic construct
  source 1..80: mol_type = other DNA
ttcagtagctctgttgccatgatctccacttcctctggttccatttggcaggcatctgccagggcctggcctgttgccat

SEQ ID NO: 85684 - DNA, 80 bp, synthetic construct
  source 1..80: mol_type = other DNA
ctcaatgcagccactgctgtgacccagcccctggctcaccttttggatcagcagggctgtagctggtgctgagcacctgg

SEQ ID NO: 85685 - DNA, 80 bp, synthetic construct; identical to SEQ ID NO: 15413
  source 1..80: mol_type = other DNA

SEQ ID NO: 85686 - DNA, 80 bp, synthetic construct
  source 1..80: mol_type = other DNA
gcagtcccttcagcatctccacacagggtttgctgtggggtcctgtatgcaagaaggggcaaggataagaggggctgctg

SEQ ID NO: 85687 - DNA, 80 bp, synthetic construct
  source 1..80: mol_type = other DNA
ccaatcaactccaggccaggcagggctgccccaactttactggccctggtcgctgttcttgaaggtttgggagaggggat

SEQ ID NO: 85688 - DNA, 80 bp, synthetic construct; identical to SEQ ID NO: 15414
  source 1..80: mol_type = other DNA

SEQ ID NO: 85689 - DNA, 80 bp, synthetic construct
  source 1..80: mol_type = other DNA
tgccctgcttcccccctggacaagtagctggtcctgatggttttcccattccagggcccagatgactgccattgtaacag

SEQ ID NO: 85690 - DNA, 80 bp, synthetic construct
  source 1..80: mol_type = other DNA
tctctgtctcttctgggaactccctttcatagtggacactgaaatggaagcaaggctgggtgaaccagagaaggctgcta

SEQ ID NO: 85691 - DNA, 80 bp, synthetic construct
  source 1..80: mol_type = other DNA
ctgactccactcctttgctcagttgctccctctaccctttctacattctgttcatcttccaaggcccagctgcagcctcc

SEQ ID NO: 85692 - DNA, 80 bp, synthetic construct; identical to SEQ ID NO: 15415
  source 1..80: mol_type = other DNA

SEQ ID NO: 85693 - DNA, 80 bp, synthetic construct
  source 1..80: mol_type = other DNA
tttcaggcatgcgccaccacacctgactaattttttgtgtgtttttagtagagacacggtttctccatgttggccaggca

SEQ ID NO: 85694 - DNA, 80 bp, synthetic construct
  source 1..80: mol_type = other DNA
cccagggctgatgcttctgtatttccacgttaccttgcaccatggtgacccaaaaaggtacatgcacccttcaaggcttg

SEQ ID NO: 85695 - DNA, 80 bp, synthetic construct
  source 1..80: mol_type = other DNA
gaagctttgcctgagcctagcccctaagttatgattgctgagaagttctccccctcatcctgctgttttttatgacactt

SEQ ID NO: 85696 - DNA, 80 bp, synthetic construct; identical to SEQ ID NO: 15416
  source 1..80: mol_type = other DNA

SEQ ID NO: 85697 - DNA, 80 bp, synthetic construct
  source 1..80: mol_type = other DNA
gattggggcacaaaggcaagcaaaagacaccctacaaatttggggtaccctcttccaatccaacctggaacctgctgaca

SEQ ID NO: 85698 - DNA, 80 bp, synthetic construct
  source 1..80: mol_type = other DNA
tcctccaagaagacaggtgactccatctcttccatctctatctcagcaaactggaggggtctctgattggccatgacggg

SEQ ID NO: 85699 - DNA, 80 bp, synthetic construct
  source 1..80: mol_type = other DNA
ggagacaaatcttataaggccaaaggaggatggactgagtggtgagatcaaaagaagaaaattcccacccttagaaagtt

SEQ ID NO: 85700 - DNA, 80 bp, synthetic construct; identical to SEQ ID NO: 15417
  source 1..80: mol_type = other DNA

SEQ ID NO: 85701 - DNA, 80 bp, synthetic construct
  source 1..80: mol_type = other DNA
atgtgggaaagagtgtgttgcatttgacacctctagtagatcaggtcattgattctgagtcccaggagaggtgggtggtg

SEQ ID NO: 85702 - DNA, 80 bp, synthetic construct
  source 1..80: mol_type = other DNA
agcctccaccatggctctctccagctcctcctcagcagccaggtctcctgagaccgtgcgacagatctcgggggctgcct

SEQ ID NO: 85703 - DNA, 80 bp, synthetic construct
  source 1..80: mol_type = other DNA
cctctgcttcccgggttcaagtgattctcctgcctcagcctcctgagtagctgggattataggcatgtgccaccactccc

SEQ ID NO: 85704 - DNA, 80 bp, synthetic construct; identical to SEQ ID NO: 15418
  source 1..80: mol_type = other DNA

SEQ ID NO: 85705 - DNA, 80 bp, synthetic construct
  source 1..80: mol_type = other DNA
ggttgagaagtgttcttactcagtacagtcttctagattggtgatctttattgattggatatgtcatatatatatagttg

SEQ ID NO: 85706 - DNA, 80 bp, synthetic construct
  source 1..80: mol_type = other DNA
aagtgtcaagatcgtgtcaaggaaagactgatgaactcttccagatggaagagatgaaagagataaggcaactcaatgca

SEQ ID NO: 85707 - DNA, 80 bp, synthetic construct
  source 1..80: mol_type = other DNA
atcacttgaggtcaggagtttgagaccagtctggccagcatagcgaaaccccatctctactaaaaatacaaaaagtagcc

SEQ ID NO: 85708 - DNA, 80 bp, synthetic construct; identical to SEQ ID NO: 15419
  source 1..80: mol_type = other DNA

SEQ ID NO: 85709 - DNA, 80 bp, synthetic construct
  source 1..80: mol_type = other DNA
taaaaatagccattgaaataaatttttgagcacagctcaaatgcatgtgtatttgggggttttataaattatgtgcatta

SEQ ID NO: 85710 - DNA, 80 bp, synthetic construct
  source 1..80: mol_type = other DNA
agtgcagtggtgcaatctcacctcactgcaacctctgcctcccaggttccagtgatgctcccgcctcaacctcccaaata

SEQ ID NO: 85711 - DNA, 80 bp, synthetic construct; identical to SEQ ID NO: 15420
  source 1..80: mol_type = other DNA

SEQ ID NO: 85712 - DNA, 80 bp, synthetic construct
  source 1..80: mol_type = other DNA
gctgggcacatgccgccacacctgactaatttttgtatttttggtagagatggggtttcgccgtgttggccaggctggtc

SEQ ID NO: 85713 - DNA, 80 bp, synthetic construct
  source 1..80: mol_type = other DNA
agcgccctggttctttttttgaggttgaaacatcttcaatcatggactacccagaactgtcttgacattttttcactctt

SEQ ID NO: 85714 - DNA, 80 bp, synthetic construct
  source 1..80: mol_type = other DNA
taatactcctcttggcgtttcatgaacttccggaagtgctcctggatgaggaatgtggcgtagaacttccccactgtcac

SEQ ID NO: 85715 - DNA, 80 bp, synthetic construct
  source 1..80: mol_type = other DNA
gcccgtgggatctacctaaggcatttatggaggatctggtccgttctcagattcccatggggctccttggagaagctccc

SEQ ID NO: 85716 - DNA, 80 bp, synthetic construct; identical to SEQ ID NO: 15421
  source 1..80: mol_type = other DNA

SEQ ID NO: 85717 - DNA, 80 bp, synthetic construct
  source 1..80: mol_type = other DNA
ggttttacaggctgtcatctcctgctcttcttccaaaatctttcaattccccaggcactgtggtctggcccaaatacccc

SEQ ID NO: 85718 - DNA, 80 bp, synthetic construct
  source 1..80: mol_type = other DNA
gatggacctgatacagctggagacttgagcttgatacagtgtgagccctgagcaagggctcagagacaatactgagaccc

SEQ ID NO: 85719 - DNA, 80 bp, synthetic construct
  source 1..80: mol_type = other DNA
ccctgtgccagcactggcccttctctggcccccagacacagctgaggagtgtgggaacagacccttgatgatctttgccc

SEQ ID NO: 85720 - DNA, 80 bp, synthetic construct; identical to SEQ ID NO: 15422
  source 1..80: mol_type = other DNA

SEQ ID NO: 85721 - DNA, 80 bp, synthetic construct
  source 1..80: mol_type = other DNA
ggggtgtcagctgaccaggacatcctttgtgaggggacagaatgatgagttgggtgacattgctgagacttcaggccctt

SEQ ID NO: 85722 - DNA, 80 bp, synthetic construct
  source 1..80: mol_type = other DNA
tcccaaagcccagagggggctgaatccttctcagcagggtcaccacgtccaggtgtttgattctccccctgcgggaggac

SEQ ID NO: 85723 - DNA, 80 bp, synthetic construct; identical to SEQ ID NO: 15423
  source 1..80: mol_type = other DNA

SEQ ID NO: 85724 - DNA, 80 bp, synthetic construct
  source 1..80: mol_type = other DNA
ttttcattggcaccgtgactcccagaatagacataaaacagaacaaccagggaggtcagatcaaaagacaagcatggcaa

SEQ ID NO: 85725 - DNA, 80 bp, synthetic construct
  source 1..80: mol_type = other DNA
tttggctcctgctgatggaggcactttaaagcacggttgctataggcaccaaacagacctgcactgtatcttggcaccat

SEQ ID NO: 85726 - DNA, 80 bp, synthetic construct
  source 1..80: mol_type = other DNA
ctcaggttcagagcaatgcaagagttagattcagtcagcctgggaggggcctgcgactctgcattttaatcaagctcagc

SEQ ID NO: 85727 - DNA, 80 bp, synthetic construct; identical to SEQ ID NO: 15424
  source 1..80: mol_type = other DNA

SEQ ID NO: 85728 - DNA, 80 bp, synthetic construct
  source 1..80: mol_type = other DNA
gtagtcaaaattgtccatgatgacagccacaaagaggttgatgacctgcaagagaagaaccaaggggtcccaacacagaa

SEQ ID NO: 85729 - DNA, 80 bp, synthetic construct
  source 1..80: mol_type = other DNA
ctggccttgctaaattccttttgatgagtgctaaccaaaacaaaaaaaaaaagtaagaacttttggcagcctctctggag

SEQ ID NO: 85730 - DNA, 80 bp, synthetic construct
  source 1..80: mol_type = other DNA
tctccctgccccgcaggccctcagcatctcaccaggaaggcacagagcatgtagaagctgatgaagtagtagtatgcaaa

SEQ ID NO: 85731 - DNA, 80 bp, synthetic construct
  source 1..80: mol_type = other DNA
cagaagaggctcctgtcacctatctgctcctgcctggcccctcagaaggctggcagtcaggtggcagcagggtgtggaca

SEQ ID NO: 85732 - DNA, 80 bp, synthetic construct; identical to SEQ ID NO: 15425
  source 1..80: mol_type = other DNA

SEQ ID NO: 85733 - DNA, 80 bp, synthetic construct
  source 1..80: mol_type = other DNA
ctgttgaatgaagaatctcaatgcatccgaggtgcatatgcatgacatgtttgcatttttccagtaactgctacaacctg

SEQ ID NO: 85734 - DNA, 80 bp, synthetic construct
  source 1..80: mol_type = other DNA
ggtttggagttgaggtgcagagctggggcgaggtgggaatctctgcctgcacacggtgaggtgccggtctccttttcaca

SEQ ID NO: 85735 - DNA, 80 bp, synthetic construct
  source 1..80: mol_type = other DNA
cagcaggcctgcagcccaggatcctcggttgcaatccaagctctagctcctgtgccctggccaagcataggcccctgcgc

SEQ ID NO: 85736 - DNA, 80 bp, synthetic construct; identical to SEQ ID NO: 15426
  source 1..80: mol_type = other DNA

SEQ ID NO: 85737 - DNA, 80 bp, synthetic construct
  source 1..80: mol_type = other DNA
cgtgcctgaagagcagtagcacagcttgtgggaaggtctggaagttgttgttccggtttatttgggtcccatccaccaag

SEQ ID NO: 85738 - DNA, 80 bp, synthetic construct
  source 1..80: mol_type = other DNA
agccaaaaaaaacgggattattttctagatcaggtaaagttcttcttagcaagccaaagaaaagagggagggtagacccg

SEQ ID NO: 85739 - DNA, 80 bp, synthetic construct
  source 1..80: mol_type = other DNA
gcatctgacactccagccatccacgatcagggaggttgtccctccttctttctcacgagcaaggcagggagggcggaggg

SEQ ID NO: 85740 - DNA, 80 bp, synthetic construct
  source 1..80: mol_type = other DNA
ggcctgcagggcgggcgggagcgccagtcagtgtcttagggctccactgtgtgtctgcagccctgccctctgttagctcc

SEQ ID NO: 85741 - DNA, 80 bp, synthetic construct; identical to SEQ ID NO: 15427
  source 1..80: mol_type = other DNA

SEQ ID NO: 85742 - DNA, 80 bp, synthetic construct
  source 1..80: mol_type = other DNA
ttgggcacagggctctggggctgttcagctgggaggcagggaagaggacgtggggcaccaggcagcgtggtgaagcccac

SEQ ID NO: 85743 - DNA, 80 bp, synthetic construct
  source 1..80: mol_type = other DNA
tgcaaagatttcccaaagcttggctgctctattgccacaaactcaatgtggctactccccatcactcccaccctgcacac

SEQ ID NO: 85744 - DNA, 80 bp, synthetic construct; identical to SEQ ID NO: 15428
  source 1..80: mol_type = other DNA

SEQ ID NO: 85745 - DNA, 80 bp, synthetic construct
  source 1..80: mol_type = other DNA
caggcccatgcatgcaagtggcagggcaggagctggtgagcgtgccaggcaggctcgtgcagcctgaaattacaacgttc

SEQ ID NO: 85746 - DNA, 80 bp, synthetic construct
  source 1..80: mol_type = other DNA
gaagagacgtgtcagaaaggacagacacacagaagagttaaagagaaaaagaggcaggggctaaagaccccacatggctg

SEQ ID NO: 85747 - DNA, 80 bp, synthetic construct
  source 1..80: mol_type = other DNA
tttcttatgtgtttgggttatgtgatgctggggacgtccctaatgaaggcgcattggaagatgcctgctcattgtaaatg

SEQ ID NO: 85748 - DNA, 80 bp, synthetic construct
  source 1..80: mol_type = other DNA
tcttgaagagcaggtgggtaggtgtgtgggagcaatttcttcctgtttactcccttgggccacacttcatgagaagccct

SEQ ID NO: 85749 - DNA, 80 bp, synthetic construct; identical to SEQ ID NO: 15429
  source 1..80: mol_type = other DNA

SEQ ID NO: 85750 - DNA, 80 bp, synthetic construct
  source 1..80: mol_type = other DNA
aattacaatgaaaattgaataaaaccagaaatttggttcctcagttcctctagccacctttccagtgacaagtagacatg

SEQ ID NO: 85751 - DNA, 80 bp, synthetic construct
  source 1..80: mol_type = other DNA
caccaccaaagacactgttttgatatatccaggcttccgctacacagacctcagattttaagaagtaactatttttagtt

SEQ ID NO: 85752 - DNA, 80 bp, synthetic construct
  source 1..80: mol_type = other DNA
cacacacacacacacacacacacacacacacacactggttttgctcagagcccaccctgcccctcgctagctcagcgccc

SEQ ID NO: 85753 - DNA, 80 bp, synthetic construct; identical to SEQ ID NO: 15430
  source 1..80: mol_type = other DNA

SEQ ID NO: 85754 - DNA, 80 bp, synthetic construct
  source 1..80: mol_type = other DNA
gcccttgggtgacatcccaccatggctcagaaagaagaatgctcatctttctctcttttccactgtgtccctcccaggat

SEQ ID NO: 85755 - DNA, 80 bp, synthetic construct
  source 1..80: mol_type = other DNA
tccctgctcctttcatccccttcataaggcaggtcctgctgctgtttctcattccacctccaaaccctcatccccttggt

SEQ ID NO: 85756 - DNA, 80 bp, synthetic construct; identical to SEQ ID NO: 15431
  source 1..80: mol_type = other DNA

SEQ ID NO: 85757 - DNA, 80 bp, synthetic construct
  source 1..80: mol_type = other DNA
caagggcctcctgctcttcctcaaactcagcaagcaccatcctgctgcagggcctttgcactgctgtcgtgttctgccaa

SEQ ID NO: 85758 - DNA, 80 bp, synthetic construct
  source 1..80: mol_type = other DNA
gagattgatttatttattgccagtttgttccacaattttgttcactgctgtatctcaggcagcaagaatcatgcctggca

SEQ ID NO: 85759 - DNA, 80 bp, synthetic construct
  source 1..80: mol_type = other DNA
agcactttgggaggctgaggcaggtggatcacttgagcccaggacttggagaccagcctgggcaacacgaggagactcca

SEQ ID NO: 85760 - DNA, 80 bp, synthetic construct
  source 1..80: mol_type = other DNA
tctgcatgttcttatgcttccaataaactggaccactcagcatgccctgaaccttctttgcatttcctgcgctgtgcctc

SEQ ID NO: 85761 - DNA, 80 bp, synthetic construct; identical to SEQ ID NO: 15432
  source 1..80: mol_type = other DNA

SEQ ID NO: 85762 - DNA, 80 bp, synthetic construct
  source 1..80: mol_type = other DNA
cctgcctgatactcacgtcgatctcactgaggatgacatcaatgatgctgccaatgacaatcaggaagtcaaacacattc

SEQ ID NO: 85763 - DNA, 80 bp, synthetic construct
  source 1..80: mol_type = other DNA
ccactggtgctccagtgggctcccccaactccaacactcctctcccctttgctctttagttcccttcctccagagcagaa

SEQ ID NO: 85764 - DNA, 80 bp, synthetic construct; identical to SEQ ID NO: 15433
  source 1..80: mol_type = other DNA

SEQ ID NO: 85765 - DNA, 80 bp, synthetic construct
  source 1..80: mol_type = other DNA
ggccttgaaggccatgagcttgaggatcatctccagggtgaagatgatagtgaaggccacattgaggatgtctgagatgt

SEQ ID NO: 85766 - DNA, 80 bp, synthetic construct
  source 1..80: mol_type = other DNA
agctcagaaaactagaagctgctttagcaatcccctgagttccgccaaattttatgaacaccctccccctaccccaccac

SEQ ID NO: 85767 - DNA, 80 bp, synthetic construct
  source 1..80: mol_type = other DNA
ttagtcatttgggtacaggactgggaaagaagacccctggattccatagtccatgttatcactggctactagtgggaaac

SEQ ID NO: 85768 - DNA, 80 bp, synthetic construct; identical to SEQ ID NO: 15434
  source 1..80: mol_type = other DNA

SEQ ID NO: 85769 - DNA, 80 bp, synthetic construct
  source 1..80: mol_type = other DNA
cctagttacaccatcctatttatacagggcttaaggaatcagatgcttaatcgaggcttgataacgatgctgctaattat

SEQ ID NO: 85770 - DNA, 80 bp, synthetic construct
  source 1..80: mol_type = other DNA
ctttctcctccttctgtggtagctatctcctgtttgcagaattaccgtactatttttatgcttgaattacctccttaata

SEQ ID NO: 85771 - DNA, 80 bp, synthetic construct; identical to SEQ ID NO: 15435
  source 1..80: mol_type = other DNA

SEQ ID NO: 85772 - DNA, 80 bp, synthetic construct
  source 1..80: mol_type = other DNA
acacccacatccatgggattgacgggcaagtcaggagcagctgtggccaggggctgtggctgaggactgtgaactgttta

SEQ ID NO: 85773 - DNA, 80 bp, synthetic construct
  source 1..80: mol_type = other DNA
caagaagacccactctaccaacttgtattgcttcagtttggagatagggtagggtgcatggaggctagggcttggcatca

SEQ ID NO: 85774 - DNA, 80 bp, synthetic construct
  source 1..80: mol_type = other DNA
ctcctggaaggtgacaatgacgaagcccacaaagatgttcatcatgaagaaggcaatgaggatgatgtagatgatgaaga

SEQ ID NO: 85775 - DNA, 80 bp, synthetic construct; identical to SEQ ID NO: 15436
  source 1..80: mol_type = other DNA

SEQ ID NO: 85776 - DNA, 80 bp, synthetic construct
  source 1..80: mol_type = other DNA
caacataccatcaaaccatcagagagttggtgggtttgttggacgcctgccacaggtagcagtagcaccgtgggggctgc

SEQ ID NO: 85777 - DNA, 80 bp, synthetic construct
  source 1..80: mol_type = other DNA
cgcggtgacgcagctctatctgcatggggtccccgtccttgtacacgtagtagtagcccctgtggcagggaggcccagtc

SEQ ID NO: 85778 - DNA, 80 bp, synthetic construct
  source 1..80: mol_type = other DNA
aaggctgagcttccccagtttccagcttgaagggccgtcatccaccaacacacagtcccctgccctgtgatcgtcctgcc

SEQ ID NO: 85779 - DNA, 80 bp, synthetic construct; identical to SEQ ID NO: 15437
  source 1..80: mol_type = other DNA

SEQ ID NO: 85780 - DNA, 80 bp, synthetic construct
  source 1..80: mol_type = other DNA
agcctagatgctgccaagaccgagaaggcagtgcctcagaggggcatttactgagtgccccctgatgggctgaggggatg

SEQ ID NO: 85781 - DNA, 80 bp, synthetic construct
  source 1..80: mol_type = other DNA
gagcagcagagttggagcccagctgggctctgatgactcaacttgtctcagagtcaagcggggtcccatgtcccagccca

SEQ ID NO: 85782 - DNA, 80 bp, synthetic construct
  source 1..80: mol_type = other DNA
ccttttatctgtgtctcagattgggtccctgagcaacatgtttgaaggaaagtagtggatggctaggtcttttttttttt

SEQ ID NO: 85783 - DNA, 80 bp, synthetic construct
  source 1..80: mol_type = other DNA
ggtatgtgccatcatgcccagctaatttttgtatttttagtgagaaggggtttcaccatgttggtcaggctggttttgaa

SEQ ID NO: 85784 - DNA, 80 bp, synthetic construct; identical to SEQ ID NO: 15438
  source 1..80: mol_type = other DNA

SEQ ID NO: 85785 - DNA, 80 bp, synthetic construct
  source 1..80: mol_type = other DNA
acaccaaatgcccagtttactatggaaagcaaagcttgactctgctataatgtggaatgcacgtggtgtttccacagagt

SEQ ID NO: 85786 - DNA, 80 bp, synthetic construct
  source 1..80: mol_type = other DNA
ttgctcttgcttgtctggaagggacgtggaagccaaagggagggcagcggctcattcattccttcagggagcgtgtctgg

SEQ ID NO: 85787 - DNA, 80 bp, synthetic construct
  source 1..80: mol_type = other DNA
gcacgcagctggcagagtggccagacacaataaacactcccatccctcccgtccctccaggacagggaccaacaagacct

SEQ ID NO: 85788 - DNA, 80 bp, synthetic construct; identical to SEQ ID NO: 15439
  source 1..80: mol_type = other DNA

SEQ ID NO: 85789 - DNA, 80 bp, synthetic construct
  source 1..80: mol_type = other DNA
tgagggacatctttgtagggctaattcctagagaggaactgaatagctgtgttctcctaggaaaatgagaaaagtataag

SEQ ID NO: 85790 - DNA, 80 bp, synthetic construct
  source 1..80: mol_type = other DNA
ctggcaggatgggaggaagcgggcaagggtgggaagggagaagaatggctgtggggccctgggaggaggggcctccctcc

SEQ ID NO: 85791 - DNA, 80 bp, synthetic construct
  source 1..80: mol_type = other DNA
tttgagtctcaataatgtgttgtgttgcttgtgtatttaatttttaaaagagcttaagatagttgctgtcaggttttcat

SEQ ID NO: 85792 - DNA, 80 bp, synthetic construct; identical to SEQ ID NO: 15440
  source 1..80: mol_type = other DNA

SEQ ID NO: 85793 - DNA, 80 bp, synthetic construct
  source 1..80: mol_type = other DNA
tattctcatatggaaatctgtgcattcgaagacatctgttttcacaatgtggggctccttgtgcttgagagtgggcacca

SEQ ID NO: 85794 - DNA, 80 bp, synthetic construct
  source 1..80: mol_type = other DNA
acagaggggccaatggggactgggggtgcacccacagtaaccctgctagcccagttgaggaaaccccaggagtgcaagac

SEQ ID NO: 85795 - DNA, 80 bp, synthetic construct
  source 1..80: mol_type = other DNA
attcctctctggggctcctgcccgggccctctctcaccttcaaccccttggctctgttgatggctctgagtggtcggagc

SEQ ID NO: 85796 - DNA, 80 bp, synthetic construct; identical to SEQ ID NO: 15441
  source 1..80: mol_type = other DNA

SEQ ID NO: 85797 - DNA, 80 bp, synthetic construct
  source 1..80: mol_type = other DNA
gtcggggagggagggaccacttcctcctctctgcatctcctgccagtctctagaacagagcgctgcccacttcactggtg

SEQ ID NO: 85798 - DNA, 80 bp, synthetic construct
  source 1..80: mol_type = other DNA
cttgccgctgctcactcaagtcccatggagatgagggacacggccaccaccagcaggtccagcatgttgaagtaattgcg

SEQ ID NO: 85799 - DNA, 80 bp, synthetic construct; identical to SEQ ID NO: 15442
  source 1..80: mol_type = other DNA

SEQ ID NO: 85800 - DNA, 80 bp, synthetic construct
  source 1..80: mol_type = other DNA
ataaaacttctccttcctggaaagcttcttgggcaatcccctctgccttgtggtttgctaagtcaggctgaacaagccct

SEQ ID NO: 85801 - DNA, 80 bp, synthetic construct
  source 1..80: mol_type = other DNA
acaaatgcattttgcccttaaaatcgaacagggttgaaacctttcccagcattcagggacctatatgattttgtcttaat

SEQ ID NO: 85802 - DNA, 80 bp, synthetic construct
  source 1..80: mol_type = other DNA
caatgtccccagatctccttataatgcacttgctactgtctgtcctaggccgccctagctatctctacccagtgaaggcc

SEQ ID NO: 85803 - DNA, 80 bp, synthetic construct
  source 1..80: mol_type = other DNA
gggctcggctagcttctcctctcttagtttgtgaatgtgcacgcgggggctactgggtttcagttatagatgggttctcc

SEQ ID NO: 85804 - DNA, 80 bp, synthetic construct; identical to SEQ ID NO: 15443
  source 1..80: mol_type = other DNA

SEQ ID NO: 85805 - DNA, 80 bp, synthetic construct
  source 1..80: mol_type = other DNA
gccgccatgcctgcctaatttttgtacttttagtagagacagggtttcatcatgttggccaggctggtctgaaactcttg

SEQ ID NO: 85806 - DNA, 80 bp, synthetic construct
  source 1..80: mol_type = other DNA
ggaggctgaggtgggcggatcacaaggtcagcatatcaagaccatcccagccaacatggtgaaaccctgtctctgttaaa

SEQ ID NO: 85807 - DNA, 80 bp, synthetic construct; identical to SEQ ID NO: 15444
  source 1..80: mol_type = other DNA

SEQ ID NO: 85808 - DNA, 80 bp, synthetic construct
  source 1..80: mol_type = other DNA
gggctgccccacagccttcactcaccttgaggacaatctccacagtgaagacagaggtgaacccgatgtcaaagtgttta

SEQ ID NO: 85809 - DNA, 80 bp, synthetic construct
  source 1..80: mol_type = other DNA
ctgaactctaagaaactctgatgcttgtagccacatagaggatacagctgaaccctgggcaccagactgaggctggaggg

SEQ ID NO: 85810 - DNA, 80 bp, synthetic construct
  source 1..80: mol_type = other DNA
cctgcggacgaacatggaatacacctcctgctcctccctggccaggagagaagtgcagccctgcacctgcagggtcctct

SEQ ID NO: 85811 - DNA, 80 bp, synthetic construct; identical to SEQ ID NO: 15445
  source 1..80: mol_type = other DNA

SEQ ID NO: 85812 - DNA, 80 bp, synthetic construct
  source 1..80: mol_type = other DNA
aaacactgagtttctcatagtataactgtaggcatggagagtcagacagggttttttctagggcagggaagcagatgaga

SEQ ID NO: 85813 - DNA, 80 bp, synthetic construct
  source 1..80: mol_type = other DNA
tcctcgtcatcccctgtggggagagagagaggaattaggggtgtcttcccatgctttgctatgcccatggcttctgtgct

SEQ ID NO: 85814 - DNA, 80 bp, synthetic construct
  source 1..80: mol_type = other DNA
aagtggggcaaggagcaagcccaagtaactttgtggctgcatgttgtgtctcaaggctcgatccacacagcctcaaatat

SEQ ID NO: 85815 - DNA, 80 bp, synthetic construct; identical to SEQ ID NO: 15446
  source 1..80: mol_type = other DNA

SEQ ID NO: 85816 - DNA, 80 bp, synthetic construct
  source 1..80: mol_type = other DNA
cattccaagcacattcactgagtctcatgacctcaagaggaagctgagtacccgaaatcctcagctcccagggtgggaga

SEQ ID NO: 85817 - DNA, 80 bp, synthetic construct
  source 1..80: mol_type = other DNA
ggggttctcaaatccaccaagtcacattccaatttttctgttcccccgagaagctagaactcttattccttggaatgagt

SEQ ID NO: 85818 - DNA, 80 bp, synthetic construct; identical to SEQ ID NO: 15447
  source 1..80: mol_type = other DNA

SEQ ID NO: 85819 - DNA, 80 bp, synthetic construct
  source 1..80: mol_type = other DNA
gtcactgccatctaagaggtgataactgttagatgaaacaactcaaaatgagttattctaaaacacaaatattcattgct

SEQ ID NO: 85820 - DNA, 80 bp, synthetic construct
  source 1..80: mol_type = other DNA
gcttagagtcactggggcaaacagatgctaatcagctgattccataagtagacatacaagtagctgatcagctgatggga

SEQ ID NO: 85821 - DNA, 80 bp, synthetic construct
  source 1..80: mol_type = other DNA
tgtcctcttcttggtccagataaatgggatttctgcagcagtcactggctatttgcatttatgagatgtttgtggtttat

SEQ ID NO: 85822 - DNA, 80 bp, synthetic construct; identical to SEQ ID NO: 15448
  source 1..80: mol_type = other DNA

SEQ ID NO: 85823 - DNA, 80 bp, synthetic construct
  source 1..80: mol_type = other DNA
agatggcttatttgcacagaagggatgtctccggtgttctgatctccacatggaggggtacaggtagggacacacaagag

SEQ ID NO: 85824 - DNA, 80 bp, synthetic construct
  source 1..80: mol_type = other DNA
aaggaacacaatgactataacaatgaaaaagaagttgcggtttcccctcaatgagcatatactggagagcctgttagcgt

SEQ ID NO: 85825 - DNA, 80 bp, synthetic construct; identical to SEQ ID NO: 15449
  source 1..80: mol_type = other DNA

SEQ ID NO: 85826 - DNA, 80 bp, synthetic construct
  source 1..80: mol_type = other DNA
tggctctccctccagtcgtacgcagggagatgccctcacctggctgataactctcctacctccccaccctaccccacctg

SEQ ID NO: 85827 - DNA, 80 bp, synthetic construct
  source 1..80: mol_type = other DNA
ctgggagacccctgagttagaaaacccaaagtggaagccaaaccagaaagttctcagggatctgctgaacctgacaacac

SEQ ID NO: 85828 - DNA, 80 bp, synthetic construct
  source 1..80: mol_type = other DNA
ccatgtttaacgttggttgatagtgaatgggtggagtgtggctttgtactgggtttatacgagattcatagagtggaagc

SEQ ID NO: 85829 - DNA, 80 bp, synthetic construct
  source 1..80: mol_type = other DNA
aatcctccaaccagcagcatgggcaccaccggggagcctgttcgatgtagaactccaaccccgcccagaggcatagcgac

SEQ ID NO: 85830 - DNA, 80 bp, synthetic construct; identical to SEQ ID NO: 15450
  source 1..80: mol_type = other DNA

SEQ ID NO: 85831 - DNA, 80 bp, synthetic construct
  source 1..80: mol_type = other DNA
aatggccaggaagacattgagcaggatgtctgagcgggtttagctaaggagcctttggttgtaggtggaagggagcctgc

SEQ ID NO: 85832 - DNA, 80 bp, synthetic construct
  source 1..80: mol_type = other DNA
gagagtacccaggaaggagcctgaatcctgtggccttgaatcccatccgtttcctgtccagactggtcccagctcccaca

SEQ ID NO: 85833 - DNA, 80 bp, synthetic construct
  source 1..80: mol_type = other DNA
ccatccaccttaccctcatatctgctcctctcatctctcagcctgttctggctccgtccttctggtcccagcgctcagac

SEQ ID NO: 85834 - DNA, 80 bp, synthetic construct; identical to SEQ ID NO: 15451
  source 1..80: mol_type = other DNA

SEQ ID NO: 85835 - DNA, 80 bp, synthetic construct
  source 1..80: mol_type = other DNA
aggatgatgaagtaaatgcacacaagcatgccagggtaggacggcccgccgtaggccatgatcccattgtacatcattga

SEQ ID NO: 85836 - DNA, 80 bp, synthetic construct
  source 1..80: mol_type = other DNA
ggccagcccctgctatccccaaaacccctattccagctggggaatagtggctcacgcctgttacttatcactttgggagg

SEQ ID NO: 85837 - DNA, 80 bp, synthetic construct; identical to SEQ ID NO: 15452
  source 1..80: mol_type = other DNA

SEQ ID NO: 85838 - DNA, 80 bp, synthetic construct
  source 1..80: mol_type = other DNA
gacgatcacacactgcctttctcactggtacaaaagggaggtgtcactcatgaaatatgggccactccagagaggaatgt

SEQ ID NO: 85839 - DNA, 80 bp, synthetic construct
  source 1..80: mol_type = other DNA
tcgggagaaaaagctccccttatctgactttgccctgagacctgagtggcacatgaaagcacgcatccggactcccaggc

SEQ ID NO: 85840 - DNA, 80 bp, synthetic construct
  source 1..80: mol_type = other DNA
gacattgcactcaaccagcagatcagacaaggcttcctggagaaggtgatgcccaccttgatcttgaaggacaagaagca

SEQ ID NO: 85841 - DNA, 80 bp, synthetic construct
  source 1..80: mol_type = other DNA
atgacgatgaagaggaagagcagcagcagcagggaggcgatggagcggatggagttgagcagggatgccaccaggttgct

SEQ ID NO: 85842 - DNA, 80 bp, synthetic construct; identical to SEQ ID NO: 15453
  source 1..80: mol_type = other DNA

SEQ ID NO: 85843 - DNA, 80 bp, synthetic construct
  source 1..80: mol_type = other DNA
tgcaagcagatgaacctctctccacttccctcaccacctcacaaaggccctgatagtctgtgttcctccttctttcttat

SEQ ID NO: 85844 - DNA, 80 bp, synthetic construct
  source 1..80: mol_type = other DNA
aaaaaaaacagagaaatgagttcaaagtggggaagtgattcttttttcacagaaggaggttatttcaaggagggagggaa

SEQ ID NO: 85845 - DNA, 80 bp, synthetic construct
  source 1..80: mol_type = other DNA
cagcggagcacggagatgcccaggggtgtcatggcacccgactccaccagcaggatctccaggataccgctacacaccac

SEQ ID NO: 85846 - DNA, 80 bp, synthetic construct; identical to SEQ ID NO: 15454
  source 1..80: mol_type = other DNA

SEQ ID NO: 85847 - DNA, 80 bp, synthetic construct
  source 1..80: mol_type = other DNA
ccacatccagctagttttttgtatttttaatagagacagggtttcgtcatgttgcccaggctggtcttgaactcctgggc

SEQ ID NO: 85848 - DNA, 80 bp, synthetic construct
  source 1..80: mol_type = other DNA
acaggaagaggattttattactcttaattctactgaagttcattaagtctgctactctctcattcctatacacctccctc

SEQ ID NO: 85849 - DNA, 80 bp, synthetic construct; identical to SEQ ID NO: 15455
  source 1..80: mol_type = other DNA

SEQ ID NO: 85850 - DNA, 80 bp, synthetic construct
  source 1..80: mol_type = other DNA
ctctactaaaaatacaaaaagtagctgggtgtggtggcatgagcctgtagtcccagctactcgggaggctgaggcaagag

SEQ ID NO: 85851 - DNA, 80 bp, synthetic construct
  source 1..80: mol_type = other DNA
cccattttccctctatcttctatcctagctctctcctccctgtcaccgtcaaactcccgaaagttgtctatattgctctc

SEQ ID NO: 85852 - DNA, 80 bp, synthetic construct
  source 1..80: mol_type = other DNA
gcactgttgaccattctcttgctttttcaagcattctgtccttggtttctgtggtgccacatccttctgggtttcctcta

SEQ ID NO: 85853 - DNA, 80 bp, synthetic construct
  source 1..80: mol_type = other DNA
tttcctcagcaggcttgacctcaaactggggccttgaacattcctaggcactaataaaggtaataggtgttgccccaaac

SEQ ID NO: 85854 - DNA, 80 bp, synthetic construct; identical to SEQ ID NO: 15456
  source 1..80: mol_type = other DNA

SEQ ID NO: 85855 - DNA, 80 bp, synthetic construct
  source 1..80: mol_type = other DNA
gagtcattgaatgcttgatttgagtgatacccttgagtatacactctcccctggagatctggtgttatctaagaccacag

SEQ ID NO: 85856 - DNA, 80 bp, synthetic construct
  source 1..80: mol_type = other DNA
ctgctcatcctcccccactaccccaaatacttggtcattaaccattttctcagtaggtggcactactagccatttatctg

SEQ ID NO: 85857 - DNA, 80 bp, synthetic construct; identical to SEQ ID NO: 15457
  source 1..80: mol_type = other DNA

SEQ ID NO: 85858 - DNA, 80 bp, synthetic construct
  source 1..80: mol_type = other DNA
tccattgattgtacctgatgactctttctcagggtggctctgttccttatttggtttgcagtttttttttgttgttgttt

SEQ ID NO: 85859 - DNA, 80 bp, synthetic construct
  source 1..80: mol_type = other DNA
tactatcttagtttagaatccttggaccatgagaggtagtgtatattggaccccatacctatataaggcactgataggat

SEQ ID NO: 85860 - DNA, 80 bp, synthetic construct
  source 1..80: mol_type = other DNA
acctcatgcaggtccagggccctgtctccagccctgcacaggccttaggaacccagctgctacccattagggtttaggcc

SEQ ID NO: 85861 - DNA, 80 bp, synthetic construct
  source 1..80: mol_type = other DNA
tatgcagcagtgttacttgtttgtagtggggagggcactgagtttgtccaccgtgttgttggaactggtcagtcttttct

SEQ ID NO: 85862 - DNA, 80 bp, synthetic construct; identical to SEQ ID NO: 15458
  source 1..80: mol_type = other DNA

SEQ ID NO: 85863 - DNA, 80 bp, synthetic construct
  source 1..80: mol_type = other DNA
cctcccactctttctctctcttgctcctgctttcgccatgtgacatgcctgccctccctttgccttccatcacgattgta

SEQ ID NO: 85864 - DNA, 80 bp, synthetic construct
  source 1..80: mol_type = other DNA
aggctggagtgcagtggtgcaatctcggctcactgcaatctccaccttccaggttcaagcgattctcctgcctcagcctc

SEQ ID NO: 85865 - DNA, 80 bp, synthetic construct
  source 1..80: mol_type = other DNA
ccaccgcgcccggcctcaggtattttttttatagcaacacaagaatggcctaacacaaggcccccatgagcaaacacatg

SEQ ID NO: 85866 - DNA, 80 bp, synthetic construct; identical to SEQ ID NO: 15459
  source 1..80: mol_type = other DNA

SEQ ID NO: 85867 - DNA, 80 bp, synthetic construct
  source 1..80: mol_type = other DNA
ttgaacttgggtgcttagagttccaaattactagcaattttatgtccagtgatctgtgattggaataatctgcccggaca

SEQ ID NO: 85868 - DNA, 80 bp, synthetic construct
  source 1..80: mol_type = other DNA
taatttttagaaaaatgatgtcaatatctaattgacctcttctgcacaacctgtggtgccattggctgattttgacatca

SEQ ID NO: 85869 - DNA, 80 bp, synthetic construct
  source 1..80: mol_type = other DNA
gatgagaatcaccagccaatagaagaccttggacttcacgatgtcatggcacttccagcgaaagatgcggttccactgcc

SEQ ID NO: 85870 - DNA, 80 bp, synthetic construct; identical to SEQ ID NO: 15460
  source 1..80: mol_type = other DNA

SEQ ID NO: 85871 - DNA, 80 bp, synthetic construct
  source 1..80: mol_type = other DNA
aattaataatatctggggagggtgaggggaaatgagctttgacagtacaatctttttgggatgaattggcagcacttacc

SEQ ID NO: 85872 - DNA, 80 bp, synthetic construct
  source 1..80: mol_type = other DNA
gcaagtctatttctagagttcctttggcagaagtggtcatactcatccacaactgttccctgcagcactgtttgtatcgc

SEQ ID NO: 85873 - DNA, 80 bp, synthetic construct
  source 1..80: mol_type = other DNA
tcctttagtgtgtattatattcatttatttgacaaatatttggcaacacctcatatgtgctaggcactcttctagtccct

SEQ ID NO: 85874 - DNA, 80 bp, synthetic construct; identical to SEQ ID NO: 15461
  source 1..80: mol_type = other DNA

SEQ ID NO: 85875 - DNA, 80 bp, synthetic construct
  source 1..80: mol_type = other DNA
acactttccctcttccctcgcagaggtttccaacatgaatgacctcacccagctctgccctgatcagggtgaagtagcag

SEQ ID NO: 85876 - DNA, 80 bp, synthetic construct
  source 1..80: mol_type = other DNA
ctcagagcaggaactggccctattttcttaaaaaggctgcctttctaaaggattagacaagtgactctgaaaccactgag

SEQ ID NO: 85877 - DNA, 80 bp, synthetic construct; identical to SEQ ID NO: 15462
  source 1..80: mol_type = other DNA

SEQ ID NO: 85878 - DNA, 80 bp, synthetic construct
  source 1..80: mol_type = other DNA
tccaagagctaaagagcccactttatctgcaggggaggcgctatgaggatgggcagcaagtacctttgggaagagctctg

SEQ ID NO: 85879 - DNA, 80 bp, synthetic construct
  source 1..80: mol_type = other DNA
aaaccttctctgaagtcctcaacatccatgacctcgccctgcgtgatccagctcatgtagccccgaaggtcctcatctag

SEQ ID NO: 85880 - DNA, 80 bp, synthetic construct
  source 1..80: mol_type = other DNA
tgtgactggagcgctcctttttctggccccggggtgttgcctggggtccaggtgcccctcaaggtggctgagagacagcc

SEQ ID NO: 85881 - DNA, 80 bp, synthetic construct; identical to SEQ ID NO: 15463
  source 1..80: mol_type = other DNA

SEQ ID NO: 85882 - DNA, 80 bp, synthetic construct
  source 1..80: mol_type = other DNA
accacctgccccgcagggcaggaggaagaagacagcacaggggtagtctctgaggagctgcgcctggcagccaggagggg

SEQ ID NO: 85883 - DNA, 80 bp, synthetic construct
  source 1..80: mol_type = other DNA
aatgtgaaatgcacaaaataaaaccatagcatgacaaagaagccagttacagctaggcttcacttaatgactgggatgcg

SEQ ID NO: 85884 - DNA, 80 bp, synthetic construct
  source 1..80: mol_type = other DNA
tagagaaggtacagtaaagatacaatcttagcgcaccactgttgtggatgcagcccgtcattgactgaaatgtcatcatg

SEQ ID NO: 85885 - DNA, 80 bp, synthetic construct; identical to SEQ ID NO: 15464
  source 1..80: mol_type = other DNA

SEQ ID NO: 85886 - DNA, 80 bp, synthetic construct
  source 1..80: mol_type = other DNA
gcaggactggtctcaaagagaacagctctcattaataatgaccattagtatttagtgcttattttgtgctggactctgtt

SEQ ID NO: 85887 - DNA, 80 bp, synthetic construct
  source 1..80: mol_type = other DNA
taaagctcacacagccaccaagcagtagtgcagggatttaaatgtgggcattctagctccagagtctgtgtgcttaaccg

SEQ ID NO: 85888 - DNA, 80 bp, synthetic construct
  source 1..80: mol_type = other DNA
gaagggctcctgtgtgcctctcctctcttcctgctcaccaggaaggaagcgctcttggcccaactgagatgacagggaac

SEQ ID NO: 85889 - DNA, 80 bp, synthetic construct; identical to SEQ ID NO: 15465
  source 1..80: mol_type = other DNA

SEQ ID NO: 85890 - DNA, 80 bp, synthetic construct
  source 1..80: mol_type = other DNA
gccacgctgggatattgaggggacatttttcctaacctgaggactagtctggaagaacttttccagcctgaggactagga

SEQ ID NO: 85891 - DNA, 80 bp, synthetic construct
  source 1..80: mol_type = other DNA
ctcatagactctatctccagttgatttatttaaagccaagatttttcaaatgaacaacgtctgtgaccccggacaagtca

SEQ ID NO: 85892 - DNA, 80 bp, synthetic construct
  source 1..80: mol_type = other DNA
actaatccttggtatttgcaaagcatttgacagttttacaatccccccacccccacaataggcggcgtcatattgtggtt

SEQ ID NO: 85893 - DNA, 80 bp, synthetic construct
  source 1..80: mol_type = other DNA
tctagctcttaacaaacaccaaataaataatatactccaacaaagaaactcttactggagtgttgactgtgtgccgggca

SEQ ID NO: 85894 - DNA, 80 bp, synthetic construct; identical to SEQ ID NO: 15466
  source 1..80: mol_type = other DNA

SEQ ID NO: 85895 - DNA, 80 bp, synthetic construct
  source 1..80: mol_type = other DNA
acatattgtatcatggggatttccccataggatgctggggcacatacctgggaaccagaaagggacacacatcctgtata

SEQ ID NO: 85896 - DNA, 80 bp, synthetic construct
  source 1..80: mol_type = other DNA
cagtccatccctccatggtaatgcactggtacacggtgagcatggagaagccgaagttgtcgaagtgggtgatgccatgg

SEQ ID NO: 85897 - DNA, 80 bp, synthetic construct
  source 1..80: mol_type = other DNA
agaaggcaaagggaacatcagacaacagtagtaggtggacaacgacaggaggaaaggtgtataagagcaatttaagagaa

SEQ ID NO: 85898 - DNA, 80 bp, synthetic construct; identical to SEQ ID NO: 15467
  source 1..80: mol_type = other DNA

SEQ ID NO: 85899 - DNA, 80 bp, synthetic construct
  source 1..80: mol_type = other DNA
tcacatgttctgacttgagagttctgtctgggaggtgaaattggagaagctccaaaagcactgggctgagctttacaaga

SEQ ID NO: 85900 - DNA, 80 bp, synthetic construct
  source 1..80: mol_type = other DNA
tccttttgtgttcagagattagattggctcatcagaactggaacaccctgccttacccatatttatctatttaccatgta

SEQ ID NO: 85901 - DNA, 80 bp, synthetic construct
  source 1..80: mol_type = other DNA
gttgaaggtgtgatcaaaggtcacctcctatccatcctgataatgcttatgataggatgtagattgtggtggtgatggga

SEQ ID NO: 85902 - DNA, 80 bp, synthetic construct
  source 1..80: mol_type = other DNA
ttattctggtgagttcaatgccagggcttatggaggaggctaagtcccagtgagctgctggcagggtagagcagccagtc

SEQ ID NO: 85903 - DNA, 80 bp, synthetic construct; identical to SEQ ID NO: 15468
  source 1..80: mol_type = other DNA

SEQ ID NO: 85904 - DNA, 80 bp, synthetic construct
  source 1..80: mol_type = other DNA
catgaatatcaacagatcaaaacctatataaacaaaagctctctgaggtcctcagtaatttatatgagagaaaaggggtc

SEQ ID NO: 85905 - DNA, 80 bp, synthetic construct
  source 1..80: mol_type = other DNA
gctcagactaaagctaaaactatgcgacaggaaatgtacacatagaaattcaagcttatcccatgcctatgtctccatct

SEQ ID NO: 85906 - DNA, 80 bp, synthetic construct
  source 1..80: mol_type = other DNA
ccattctcaaggtcaacagatgtgggcggcaatggctgagctccgggctccttcaccaggtagggtggctcccccttctg

SEQ ID NO: 85907 - DNA, 80 bp, synthetic construct; identical to SEQ ID NO: 15469
  source 1..80: mol_type = other DNA

SEQ ID NO: 85908 - DNA, 80 bp, synthetic construct
  source 1..80: mol_type = other DNA
cggaggggtctgagcactcggaaggctctgagggccttgacatccaagccggctcctttgctgctcattggggctgtgtg

SEQ ID NO: 85909 - DNA, 80 bp, synthetic construct
  source 1..80: mol_type = other DNA
acggcaaatacgggtgcatcaactaacaaatgatctgatcatgcttatctggggaatttcacttaaaaggattctgacat

SEQ ID NO: 85910 - DNA, 80 bp, synthetic construct; identical to SEQ ID NO: 15470
  source 1..80: mol_type = other DNA

SEQ ID NO: 85911 - DNA, 80 bp, synthetic construct
  source 1..80: mol_type = other DNA
ctttcctactggcctcctcttcctctcttaatttactcaaatttccattatcctttgaagtctacctcaaattcctttgc

SEQ ID NO: 85912 - DNA, 80 bp, synthetic construct
  source 1..80: mol_type = other DNA
ttctattttctctactgagccaaaagtagcactggatggttagcaggtaaccaacaccatccttacggaactgaaggaca

SEQ ID NO: 85913 - DNA, 80 bp, synthetic construct
  source 1..80: mol_type = other DNA
ttaagtgagagggtacatgtaagcacatattaagtgcttgataaatgctattgttatcattacgtggtagttactcatgg

SEQ ID NO: 85914 - DNA, 80 bp, synthetic construct
  source 1..80: mol_type = other DNA
ccttataagaagaggaactctggacacacaaagagacaccaaggatgcacaggcacagaggagagactgtgtgaacccaa

SEQ ID NO: 85915 - DNA, 80 bp, synthetic construct; identical to SEQ ID NO: 15471
  source 1..80: mol_type = other DNA

SEQ ID NO: 85916 - DNA, 80 bp, synthetic construct
  source 1..80: mol_type = other DNA
ggctgctccatgcagtggttagcacaatgctggagtcccaccccacctctaagatgctggtggtggtggcagtgggcaca

SEQ ID NO: 85917 - DNA, 80 bp, synthetic construct
  source 1..80: mol_type = other DNA
gacaatgaggaagaaatactccagcttctcctgtgggagcaaacgtggtcacagcatgcctctgtgctctctgagtgcac

SEQ ID NO: 85918 - DNA, 80 bp, synthetic construct
  source 1..80: mol_type = other DNA
attccttcactgaggccttttctggccactaagtgtaatgcgagccatctccagcatttcatgttcctctcctctgctta

SEQ ID NO: 85919 - DNA, 80 bp, synthetic construct; identical to SEQ ID NO: 15472
  source 1..80: mol_type = other DNA

SEQ ID NO: 85920 - DNA, 80 bp, synthetic construct
  source 1..80: mol_type = other DNA
ccttaaaggccgtgacactattacgcagggtgagtggagtgtggggtacactgtgtgtggggaacacaggtaagaagctg

SEQ ID NO: 85921 - DNA, 80 bp, synthetic construct
  source 1..80: mol_type = other DNA
ttgtcaggactccaggctgaaactgctctccttgcagccatctgaaccctggcttggcagcttctaagagctctggcctc

SEQ ID NO: 85922 - DNA, 80 bp, synthetic construct
  source 1..80: mol_type = other DNA
gtatatatatacacacacatacagatctatcctgattggtgctctctggagttacacaagggggtctgtacccccacaac

SEQ ID NO: 85923 - DNA, 80 bp, synthetic construct; identical to SEQ ID NO: 15473
  source 1..80: mol_type = other DNA

SEQ ID NO: 85924 - DNA, 80 bp, synthetic construct
  source 1..80: mol_type = other DNA
tccccttcttccagaaaatggtaatgtgatgattaaaatgcaaagccatgccattctgtgaaagggcctgttgatggaga

SEQ ID NO: 85925 - DNA, 80 bp, synthetic construct
  source 1..80: mol_type = other DNA
ggtttcctgggagtcaggcacaccattaaggaaaaagtgtaagggaggagagtgaagtcaaggcagcatttacaatttca

SEQ ID NO: 85926 - DNA, 80 bp, synthetic construct
  source 1..80: mol_type = other DNA
gagcttgtcaggggctgtgggcttcagatgaggtcactcagtttcctcagcctgttagctccaaggcctgcctctttcca

SEQ ID NO: 85927 - DNA, 80 bp, synthetic construct; identical to SEQ ID NO: 15474
  source 1..80: mol_type = other DNA

SEQ ID NO: 85928 - DNA, 80 bp, synthetic construct
  source 1..80: mol_type = other DNA
gcagaagatgtatggtgtgacggttttcaccagctctgctgctttgggcaagttcctaagcttctgtgaacctcagtttc

SEQ ID NO: 85929 - DNA, 80 bp, synthetic construct
  source 1..80: mol_type = other DNA
ctgcctacactgtgttctattggtttccattatgttctattggttttcacagagctgttgtttgatgtcatgtctgtggg

SEQ ID NO: 85930 - DNA, 80 bp, synthetic construct
  source 1..80: mol_type = other DNA
ccaagccagaaacctccagggtctttctggactcctcctccctcttgctctccccgggtcccagtgtccagcaggtccgg

SEQ ID NO: 85931 - DNA, 80 bp, synthetic construct; identical to SEQ ID NO: 15475
  source 1..80: mol_type = other DNA

SEQ ID NO: 85932 - DNA, 80 bp, synthetic construct
  source 1..80: mol_type = other DNA
cagagtgtccctgaggcccactgtccaagtagacctcttgcctcttacaaccctctgaccccccacagggagcaccagct

SEQ ID NO: 85933 - DNA, 80 bp, synthetic construct
  source 1..80: mol_type = other DNA
ttctctgccccaagaacaggtgacattcccccatcagtaatagcatttgggcttgggggccagggtcactctccaaagaa

SEQ ID NO: 85934 - DNA, 80 bp, synthetic construct; identical to SEQ ID NO: 15476
  source 1..80: mol_type = other DNA

SEQ ID NO: 85935 - DNA, 80 bp, synthetic construct
  source 1..80: mol_type = other DNA
ctctcctgacctgaatataacatcattgagagcagggacttagctctgttcactgctgtgtcaactgcatctagaacagt

SEQ ID NO: 85936 - DNA, 80 bp, synthetic construct
  source 1..80: mol_type = other DNA
ggcattgagtaagcatttggaaaattctatggcaatctgcagccacttccatgcatgtgggtggactatagaccattctg

SEQ ID NO: 85937 - DNA, 80 bp, synthetic construct
  source 1..80: mol_type = other DNA
aagctctgctatagaatgcgtcatcctgcccagcacacaggaggctctcaggctatgtttgttgaataaatgaacaatgg

SEQ ID NO: 85938 - DNA, 80 bp, synthetic construct; identical to SEQ ID NO: 15477
  source 1..80: mol_type = other DNA

SEQ ID NO: 85939 - DNA, 80 bp, synthetic construct
  source 1..80: mol_type = other DNA
gaccgcacatcccctcaccctcccactgcctctattttcaggctgagtctgctatttccaagggtcagccagtcctgaat

SEQ ID NO: 85940 - DNA, 80 bp, synthetic construct
  source 1..80: mol_type = other DNA
tggcctggtcaggactccaggctcccaggctccccatgtgccccgctggagggttctgggatctacagagctcactgaaa

SEQ ID NO: 85941 - DNA, 80 bp, synthetic construct
  source 1..80: mol_type = other DNA
taaatctcactgggacagggaggcaatggactcatattcgttgttaactctttaaggcacgtgtgctgcatggaggcaag

SEQ ID NO: 85942 - DNA, 80 bp, synthetic construct; identical to SEQ ID NO: 15478
  source 1..80: mol_type = other DNA

SEQ ID NO: 85943 - DNA, 80 bp, synthetic construct
  source 1..80: mol_type = other DNA
ccctgggacccccaagaaagcaggacccagcctcgattcctgccttaagaagggtgcagaggacctataaccctgtcacc

SEQ ID NO: 85944 - DNA, 80 bp, synthetic construct
  source 1..80: mol_type = other DNA
cacctcagttgtggacggaggtttgctccggctgtgctgtttttcctgtttcacagaggttggaagtgagacttagaggg

SEQ ID NO: 85945 - DNA, 80 bp, synthetic construct
  source 1..80: mol_type = other DNA
aagatgacctgctgaggagtgagggaagtggctatgtttagcccaacgaacgctcacccaaatagacgtaactggaatgg

SEQ ID NO: 85946 - DNA, 80 bp, synthetic construct
  source 1..80: mol_type = other DNA
ctgagggtcccagtagggctctgcatgctcagggtgaagggggctgggagagaaagggagaccagtgctgtcttgggtaa

SEQ ID NO: 85947 - DNA, 80 bp, synthetic construct; identical to SEQ ID NO: 15479
  source 1..80: mol_type = other DNA

SEQ ID NO: 85948 - DNA, 80 bp, synthetic construct
  source 1..80: mol_type = other DNA
tctagtgagaaatgggctataataagttcttaaaaattcttatcttctctgccatgaatgaacatggctgaaggtggaga

SEQ ID NO: 85949 - DNA, 80 bp, synthetic construct
  source 1..80: mol_type = other DNA
acttccagggccttctgagatgtatctttcataaaatcaataatcagggaagaggaaaaaagagctaggatggaacaaaa

SEQ ID NO: 85950 - DNA, 80 bp, synthetic construct; identical to SEQ ID NO: 15480
  source 1..80: mol_type = other DNA

SEQ ID NO: 85951 - DNA, 80 bp, synthetic construct
  source 1..80: mol_type = other DNA
ggcccttgccatgacagctacattggtcctcaattcaagtgtcttcagaaagtgaagatgtaagctactctttgcaacat

SEQ ID NO: 85952 - DNA, 80 bp, synthetic construct
  source 1..80: mol_type = other DNA
ttcaaggatgtgtgtgaagaagacggtagtcccctggcctgggagtaaactctagataagaacagtctttcaccacaccc

SEQ ID NO: 85953 - DNA, 80 bp, synthetic construct
  source 1..80: mol_type = other DNA
gggcagggaaaggcctcggatcccagtgtcacagcagaggccagacactcttccttggttcaaggtgaataggtcacagg

SEQ ID NO: 85954 - DNA, 80 bp, synthetic construct
  source 1..80: mol_type = other DNA
aaaggaaggcccgacatatttccatcagcaagcaacaggaccaccaactcctccgtgttgcccagctcccactgagagtg

SEQ ID NO: 85955 - DNA, 80 bp, synthetic construct; identical to SEQ ID NO: 15481
  source 1..80: mol_type = other DNA

SEQ ID NO: 85956 - DNA, 80 bp, synthetic construct
  source 1..80: mol_type = other DNA
atgaacatttattgagcaactcttgtgtgccaggtcagacacgaggttgttgcactcatggatataacagtcctgaaaag

SEQ ID NO: 85957 - DNA, 80 bp, synthetic construct
  source 1..80: mol_type = other DNA
ggtgaagtcgtgccactgcactccagtctgggtgacagaggagacttggtctcaaaaaaaaaaaaaaaagaaagaaagat

SEQ ID NO: 85958 - DNA, 80 bp, synthetic construct
  source 1..80: mol_type = other DNA
ccagggagctagcaaagcttgggcaaaggctttcctccaaggctttcctccaaggcttctgttgttcagctattacagtg

SEQ ID NO: 85959 - DNA, 80 bp, synthetic construct; identical to SEQ ID NO: 15482
  source 1..80: mol_type = other DNA

SEQ ID NO: 85960 - DNA, 80 bp, synthetic construct
  source 1..80: mol_type = other DNA
cagaggcttaggctccagcctcgtggaggacgctgcagcaacttgaaccccaggaatgcgacaggggcctggtggagcct

SEQ ID NO: 85961 - DNA, 80 bp, synthetic construct
  source 1..80: mol_type = other DNA
taaagcaaagaaaggatgccatatctttgtaatatcatgttggagcattttataacaggcctggccaaggattatctaat

SEQ ID NO: 85962 - DNA, 80 bp, synthetic construct
  source 1..80: mol_type = other DNA
ttccagttgttgccaaatgtcctctggggcagaactacttcccctccccaatcccttgaaaaccactgacctaggaggga

SEQ ID NO: 85963 - DNA, 80 bp, synthetic construct; identical to SEQ ID NO: 15483
  source 1..80: mol_type = other DNA

SEQ ID NO: 85964 - DNA, 80 bp, synthetic construct
  source 1..80: mol_type = other DNA
agggtgaaatgagataatgtagcaaaagcaatcagtttatcatgtctgcccaacaattaggaagtctgataattgttttt

SEQ ID NO: 85965 - DNA, 80 bp, synthetic construct
  source 1..80: mol_type = other DNA
cctgcctcatgggcattcagtgtgataacacatataaggcattagaacagtgactgacaatatgcaagtaatcgataaat

SEQ ID NO: 85966 - DNA, 80 bp, synthetic construct; identical to SEQ ID NO: 15484
  source 1..80: mol_type = other DNA

SEQ ID NO: 85967 - DNA, 80 bp, synthetic construct
  source 1..80: mol_type = other DNA
aggtgagtgggcctgggctcaaaagcagattctagctccagaacccatttttataaccaccatgccataatgggctgatt

SEQ ID NO: 85968 - DNA, 80 bp, synthetic construct
  source 1..80: mol_type = other DNA
tcccacagacacagagcaggcagagtcagaggtgtacctctagccccaggaaacccgggccccaagtctattaccctcag

SEQ ID NO: 85969 - DNA, 80 bp, synthetic construct
  source 1..80: mol_type = other DNA
tgccaaagtgaggaaacctctgtcataaaatgcttggacctgcaaatccaattacccatcagtggacacaggcacctgta

SEQ ID NO: 85970 - DNA, 80 bp, synthetic construct; identical to SEQ ID NO: 15485
  source 1..80: mol_type = other DNA

SEQ ID NO: 85971 - DNA, 80 bp, synthetic construct
  source 1..80: mol_type = other DNA
cctctctgtctcttgcctccagccctttgcccacgtggcttcctctgcccagaatcccctctcccgcttggccttctaca

SEQ ID NO: 85972 - DNA, 80 bp, synthetic construct
  source 1..80: mol_type = other DNA
ctttctttcagcccctttctcagcctactgtggtgtcttttgattgctgttcagtgttgtgcagggcaagtgcagattgc

SEQ ID NO: 85973 - DNA, 80 bp, synthetic construct
  source 1..80: mol_type = other DNA
aatctctgcttcctgggaaacagtaagtacccagaatcggggagggccttggaggctcaacctcataggtcatttactga

SEQ ID NO: 85974 - DNA, 80 bp, synthetic construct
  source 1..80: mol_type = other DNA
tggcagaagtcaggaccttttgtgagccaaggttccaagcttgaggtgcatgtgccattgtcccaatggacttcacttac

SEQ ID NO: 85975 - DNA, 80 bp, synthetic construct; identical to SEQ ID NO: 15486
  source 1..80: mol_type = other DNA

SEQ ID NO: 85976 - DNA, 80 bp, synthetic construct
  source 1..80: mol_type = other DNA
tgatatccccagtatgtgccagggatgtgatagacactaaagatgcattcgttaaatgaatgagaaaggtcatgaataat

SEQ ID NO: 85977 - DNA, 80 bp, synthetic construct
  source 1..80: mol_type = other DNA
ttttctactctgactcctctcatctccctcttgctgggttttgtggacatgaacagtgaggacccctgagctcgaaggtg

SEQ ID NO: 85978 - DNA, 80 bp, synthetic construct; identical to SEQ ID NO: 15487
  source 1..80: mol_type = other DNA

SEQ ID NO: 85979 - DNA, 80 bp, synthetic construct
  source 1..80: mol_type = other DNA
acctcccaggctcaagcaatcctcccacttcagcctcccgagtagatggaacaagaggcatgcaccaccaggccccgcta

SEQ ID NO: 85980 - DNA, 80 bp, synthetic construct
  source 1..80: mol_type = other DNA
ggcagagtttttttacaaaagtagtcaatgtcacagggaactgaggcccaaaaatatgaaatcctgaagggtggggtaga

SEQ ID NO: 85981 - DNA, 80 bp, synthetic construct
  source 1..80: mol_type = other DNA
tcatagcaagcacacatttagaatcccagcttcccatcagctcaagatagattcccatggaaaccagcataaaggaaagg

SEQ ID NO: 85982 - DNA, 80 bp, synthetic construct; identical to SEQ ID NO: 15488
  source 1..80: mol_type = other DNA

SEQ ID NO: 85983 - DNA, 80 bp, synthetic construct
  source 1..80: mol_type = other DNA
accccatctcaactaaaaatatgaaaattatctgggcatggtggcaggcgcctgtaatcccagctacttgggaggctgag

SEQ ID NO: 85984 - DNA, 80 bp, synthetic construct
  source 1..80: mol_type = other DNA
atgtgggtgaccctgggtaatgtgcctaaactctctgaatatcagtctcctttgtcttttaaatgggtctaataatgtta

SEQ ID NO: 85985 - DNA, 80 bp, synthetic construct
  source 1..80: mol_type = other DNA
tctcatccataaaacagaatgaggtggggaggaggtaggacagcttaatttttgaatattccttccagccctggcatttt

SEQ ID NO: 85986 - DNA, 80 bp, synthetic construct; identical to SEQ ID NO: 15489
  source 1..80: mol_type = other DNA

SEQ ID NO: 85987 - DNA, 80 bp, synthetic construct
  source 1..80: mol_type = other DNA
ggaaacccattgagccactcagccagccctgcaggtggctggggatgcagggcctgcatcgtcagggagttgaaccaccg

SEQ ID NO: 85988 - DNA, 80 bp, synthetic construct
  source 1..80: mol_type = other DNA
tggcaaagatggtgagcaagatgatcgtctcgaagggcctggagccagggttaaggagagccctcgagtgaggcaaggga

SEQ ID NO: 85989 - DNA, 80 bp, synthetic construct
  source 1..80: mol_type = other DNA
ctctcctcaggaacaagtcactttcatgtagactccttggaatggcaaaggtctggtccctggctgagggctcctcagct

SEQ ID NO: 85990 - DNA, 80 bp, synthetic construct
  source 1..80: mol_type = other DNA
gaactcactgagtaggactgggaaggagagatggagagatgaatgctgaatttccagagccatgtgcacatgctggtgtg

SEQ ID NO: 85991 - DNA, 80 bp, synthetic construct; identical to SEQ ID NO: 15490
  source 1..80: mol_type = other DNA

SEQ ID NO: 85992 - DNA, 80 bp, synthetic construct
  source 1..80: mol_type = other DNA
caggggaacagggctgaccctgaccccaaactatctctacttgccccacgtttctcttgtccttccagttatccctcatt

SEQ ID NO: 85993 - DNA, 80 bp, synthetic construct
  source 1..80: mol_type = other DNA
catcattctccccaccagagcaaatgcaaacatagcatgagtttcaaagtccctgtccccagggtggcacgtctgagcta

SEQ ID NO: 85994 - DNA, 80 bp, synthetic construct; identical to SEQ ID NO: 15491
  source 1..80: mol_type = other DNA

SEQ ID NO: 85995 - DNA, 80 bp, synthetic construct
  source 1..80: mol_type = other DNA
ttcctcttcctcctcctcctcttcctcctcctcccccaccctcctcctcttcctcctcctcccccaccctcctcgtcttc

SEQ ID NO: 85996 - DNA, 80 bp, synthetic construct
  source 1..80: mol_type = other DNA
cacacccccccccacggcccgggccctgaaggatacttccattctacaatgctgatgcaggccttcctcagggggttctc

SEQ ID NO: 85997 - DNA, 80 bp, synthetic construct
  source 1..80: mol_type = other DNA
aatctggctttctcctgctcccccaccccagtgctttcccttccctgtgtccccaatgcccccgccttggggactaggct

SEQ ID NO: 85998 - DNA, 80 bp, synthetic construct; identical to SEQ ID NO: 15492
  source 1..80: mol_type = other DNA

SEQ ID NO: 85999 - DNA, 80 bp, synthetic construct
  source 1..80: mol_type = other DNA
actccaattattgttgccctggccaattgtgggagtactgataactggagagttaattgactgctggataaagcaatctt

SEQ ID NO: 86000 - DNA, 80 bp, synthetic construct
  source 1..80: mol_type = other DNA
gaatatgtgagacttgccaactagagggaagtttagagagcaaatcaacctcccatcccagtttcctaatatactagaaa

SEQ ID NO: 86001 - DNA, 80 bp, synthetic construct
  source 1..80: mol_type = other DNA
agaaggatcatcttggctggaggagggatcccaactgatgttcgaggtatggagggagctaaatcattaatcatgtgtct

SEQ ID NO: 86002 - DNA, 80 bp, synthetic construct
  source 1..80: mol_type = other DNA
aacaagatctgttccgtgacagtcaagacagtcaacatgggaataatttttctcctgtccctgctaagtgggattgctgc

SEQ ID NO: 86003 - DNA, 80 bp, synthetic construct; identical to SEQ ID NO: 15493
  source 1..80: mol_type = other DNA

SEQ ID NO: 86004 - DNA, 80 bp, synthetic construct
  source 1..80: mol_type = other DNA
ttggaagatcgtcatcatctggaatctccatccagacactgtcagcctgcagtgagggacaaaatgaatgagtgggtaaa

SEQ ID NO: 86005 - DNA, 80 bp, synthetic construct
  source 1..80: mol_type = other DNA
atgtgtattccattgcccagtggaatatatatgacatttctggtaatatacccatgcaacaaccaccagtggttccctcc

SEQ ID NO: 86006 - DNA, 80 bp, synthetic construct
  source 1..80: mol_type = other DNA
ttccctaggtgattgaacacctatcaacaggggagaaagacattgctaactggcccccattcttttttattttttttttg

SEQ ID NO: 86007 - DNA, 80 bp, synthetic construct
  source 1..80: mol_type = other DNA
ttagtagagatggggtttcaccatgttggccagctggtcttgaactcctgacctcaggtgatccacccatctcagcctcc

SEQ ID NO: 86008 - DNA, 80 bp, synthetic construct; identical to SEQ ID NO: 15494
  source 1..80: mol_type = other DNA

SEQ ID NO: 86009 - DNA, 80 bp, synthetic construct
  source 1..80: mol_type = other DNA
tggtgtgggttcccttttgtaaagagacctttttgtttgctgtttgactttgggggtaaatacaggagagtttacttgaa

SEQ ID NO: 86010 - DNA, 80 bp, synthetic construct
  source 1..80: mol_type = other DNA
aaaggctgggctactatagatgctctcacaatctaagctgtgtagcagaagacagggcaggccaagggtgcctgagcaag

SEQ ID NO: 86011 - DNA, 80 bp, synthetic construct
  source 1..80: mol_type = other DNA
ccgtcccatcacagtaactaggtcaccattggttaaaggtcttcaaaacagctgtgagcacttagcaaattgaagacttg

SEQ ID NO: 86012 - DNA, 80 bp, synthetic construct; identical to SEQ ID NO: 15495
  source 1..80: mol_type = other DNA

SEQ ID NO: 86013 - DNA, 80 bp, synthetic construct
  source 1..80: mol_type = other DNA
atggcctagtggggactagggatattcaggaatctggaaatcagaatagtctgaagatttcttctttgcaaaaaccaagg

SEQ ID NO: 86014 - DNA, 80 bp, synthetic construct
  source 1..80: mol_type = other DNA
acatttctatagtcccaactgctcaggaggctgaggcaggaggattgcttgagcctgggagcttaaggctgcagtaaatt

SEQ ID NO: 86015 - DNA, 80 bp, synthetic construct; identical to SEQ ID NO: 15496
  source 1..80: mol_type = other DNA

SEQ ID NO: 86016 - DNA, 80 bp, synthetic construct
  source 1..80: mol_type = other DNA
cctaatgataactaaacttgtactgattacttcaataagcatttacctaaagcagtcggtagaccaggctttagcatcat

SEQ ID NO: 86017 - DNA, 80 bp, synthetic construct
  source 1..80: mol_type = other DNA
ggcatacagtagaatatatcagctatgcttattatcagtaccagtacttattatcagcaccagaaccagtaccagggttc

SEQ ID NO: 86018 - DNA, 80 bp, synthetic construct
  source 1..80: mol_type = other DNA
atgaacatgacaggcacgctcgctttctctccacaaagttctgaactcgctgaaaaatgttcatctctgatttttattac

SEQ ID NO: 86019 - DNA, 80 bp, synthetic construct; identical to SEQ ID NO: 15497
  source 1..80: mol_type = other DNA

SEQ ID NO: 86020 - DNA, 80 bp, synthetic construct
  source 1..80: mol_type = other DNA
ctgtttcaggatctccaggaattcgtagccatctgaaacaggattcaagagagttgagtaacccctgcacatacacagct

SEQ ID NO: 86021 - DNA, 80 bp, synthetic construct
  source 1..80: mol_type = other DNA
taaaagttcacagagaactggctggtttttcactggaagccaaacttcatttgtgaaaactgcccagccttgggtcagaa

SEQ ID NO: 86022 - DNA, 80 bp, synthetic construct
  source 1..80: mol_type = other DNA
taaaaccttcaaaccaaacgagcttctgatttacagttggtttcacagctctgagatagtaaatggggcttccctccctc

SEQ ID NO: 86023 - DNA, 80 bp, synthetic construct; identical to SEQ ID NO: 15498
  source 1..80: mol_type = other DNA

SEQ ID NO: 86024 - DNA, 80 bp, synthetic construct
  source 1..80: mol_type = other DNA
cagaaacacaagccatgtgtgcatgtgtgtccacgtacagaatctccattgtttcagggaatcccagagtatagaagacc

SEQ ID NO: 86025 - DNA, 80 bp, synthetic construct
  source 1..80: mol_type = other DNA
tgtcattctgaggaacttgaacaggtaacgatgacccataccagatgtgcaccccactcagatatgcctgggaaccagag

SEQ ID NO: 86026 - DNA, 80 bp, synthetic construct
  source 1..80: mol_type = other DNA
tatacgttgaatacaagtaactcaccagctacttgggaattcaattaactgtgctttctttgcacagtttttcttctttt

SEQ ID NO: 86027 - DNA, 80 bp, synthetic construct; identical to SEQ ID NO: 15499
  source 1..80: mol_type = other DNA

SEQ ID NO: 86028 - DNA, 80 bp, synthetic construct
  source 1..80: mol_type = other DNA
caagtagctaaaactacaggtgtgtgccactatgcccagctagtcttttaaattttattgttttattttgtgcagacagg

SEQ ID NO: 86029 - DNA, 80 bp, synthetic construct
  source 1..80: mol_type = other DNA
cggtgatcttttaatccgtgctcataaccatattgcaaatgagattatgacaaacaccggagactgacagggccctaagc

SEQ ID NO: 86030 - DNA, 80 bp, synthetic construct
  source 1..80: mol_type = other DNA
caggagagggaaatatggtgccaccttggttatctgtagagatagaaatcatagtacaaagaccacaaggaggaattcct

SEQ ID NO: 86031 - DNA, 80 bp, synthetic construct; identical to SEQ ID NO: 15500
  source 1..80: mol_type = other DNA

SEQ ID NO: 86032 - DNA, 80 bp, synthetic construct
  source 1..80: mol_type = other DNA
caggttaagagatgaaaagaaaaactgaactgtgcaagaaaaatcaaatgggttgtagtttttttgtaaacgagtgaagt

SEQ ID NO: 86033 - DNA, 80 bp, synthetic construct
  source 1..80: mol_type = other DNA
aagggcaggtttctgatgttcagggtgatgaattctgtaatggacaatgtctctgaccccaaatactttcaatgacagaa

SEQ ID NO: 86034 - DNA, 80 bp, synthetic construct
  source 1..80: mol_type = other DNA
atgatagcatctacttcgtcgggtagttgtgagttaaatgaatcagtatctctgaagcacttggacagtgcctggcatat

SEQ ID NO: 86035 - DNA, 80 bp, synthetic construct
  source 1..80: mol_type = other DNA
ttggatccacgtggtacatgctgacagaaaactatatcacaaaagtgtacagcgtggggcagctccttccagctcctgtt

SEQ ID NO: 86036 - DNA, 80 bp, synthetic construct; identical to SEQ ID NO: 15501
  source 1..80: mol_type = other DNA

SEQ ID NO: 86037 - DNA, 80 bp, synthetic construct
  source 1..80: mol_type = other DNA
aagccgcatttcactttagtaattcaatgttaagcaaggactagtccactgttaaaattacatggatgaatgactgagtt

SEQ ID NO: 86038 - DNA, 80 bp, synthetic construct
  source 1..80: mol_type = other DNA
ctagacaaagcaagtagaggactattctctgcagttatcagaaaagcatcagttctcaaaatcagaagagacccccgcaa

SEQ ID NO: 86039 - DNA, 80 bp, synthetic construct; identical to SEQ ID NO: 15502
  source 1..80: mol_type = other DNA

SEQ ID NO: 86040 - DNA, 80 bp, synthetic construct
  source 1..80: mol_type = other DNA
atttgtaaagatgaagtctctctgtgttgtccaggctcatcttgaactcctgggctcaagcgatcctcccacctcagcct

SEQ ID NO: 86041 - DNA, 80 bp, synthetic construct
  source 1..80: mol_type = other DNA
ttacaactagtcttgatggaggttaggaagattttatcatctccattttaaagaggatggaattaagacccaaggagagc

SEQ ID NO: 86042 - DNA, 80 bp, synthetic construct
  source 1..80: mol_type = other DNA
ctaccaatgttgctgccatcttccttcctcgagtgcttgagatttttaagcccagtgtgaaagcttcaacatcagggaag

SEQ ID NO: 86043 - DNA, 80 bp, synthetic construct
  source 1..80: mol_type = other DNA
atggctctgagtgggactggcgtctcagagatggatgtaaataaagagacctggagctgtgagaactgcaactcctctcc

SEQ ID NO: 86044 - DNA, 80 bp, synthetic construct; identical to SEQ ID NO: 15503
  source 1..80: mol_type = other DNA

SEQ ID NO: 86045 - DNA, 80 bp, synthetic construct
  source 1..80: mol_type = other DNA
tctgtcctcatggccccactcctgggggagctggctgtgctcactccacaaaggcacggaaagggacccttcctgactcc

SEQ ID NO: 86046 - DNA, 80 bp, synthetic construct
  source 1..80: mol_type = other DNA
aaagagggcactgggtctggagtttaaagaccttgcacaggttgcttaaccgctcccctttcatctcctcctctgaaagt

SEQ ID NO: 86047 - DNA, 80 bp, synthetic construct
  source 1..80: mol_type = other DNA
actcattttaagatttttttttttttcactactttgatccttcgttgatgggaagggtttttgtttgtttgttttgcttt

SEQ ID NO: 86048 - DNA, 80 bp, synthetic construct
  source 1..80: mol_type = other DNA
atttttgtatttttagtagagacggggtttcactatgttggccagactggtctcgaactcctgaccttgtgattcacccg

SEQ ID NO: 86049 - DNA, 80 bp, synthetic construct; identical to SEQ ID NO: 15504
  source 1..80: mol_type = other DNA

SEQ ID NO: 86050 - DNA, 80 bp, synthetic construct
  source 1..80: mol_type = other DNA
actccttaccacaccctctttctctgcctgtcttctcctggcgctaagatcccagaattggtgaaaaagtcaaatgatat

SEQ ID NO: 86051 - DNA, 80 bp, synthetic construct
  source 1..80: mol_type = other DNA
agatgataaaaacagcacctaacacgtcgggttgttgcaaaggttaaatatgttgatacttgttaagtgcttggaataac

SEQ ID NO: 86052 - DNA, 80 bp, synthetic construct
  source 1..80: mol_type = other DNA
agctactcgggaggctgaggcaggagaatcgcttgaacccgggaggtggaggttgcagtgagcagagatggtgccactgc

SEQ ID NO: 86053 - DNA, 80 bp, synthetic construct; identical to SEQ ID NO: 15505
  source 1..80: mol_type = other DNA

SEQ ID NO: 86054 - DNA, 80 bp, synthetic construct
  source 1..80: mol_type = other DNA
atcacatgttataaagaagatgtcagcctgacacagacacatctaggggtggtgaggaagacagtcattcattttcaaac

SEQ ID NO: 86055 - DNA, 80 bp, synthetic construct
  source 1..80: mol_type = other DNA
ttaggctcgagggccaggagagcagactctgcctcctggcaggtggaggtgggagtacagggttgctgccttccctcagc

SEQ ID NO: 86056 - DNA, 80 bp, synthetic construct
  source 1..80: mol_type = other DNA
ttttcttccctaactaggctctcaagcttccaggtggttttgtgctcttctcacctccgcctgctctgcctgctcgtgtc

SEQ ID NO: 86057 - DNA, 80 bp, synthetic construct; identical to SEQ ID NO: 15506
  source 1..80: mol_type = other DNA

SEQ ID NO: 86058 - DNA, 80 bp, synthetic construct
  source 1..80: mol_type = other DNA
ttcctcagttgtaataaaaataatgccttcctcatggggttcttgtgtacatataagtacacagtaagtgacaatcatca

SEQ ID NO: 86059 - DNA, 80 bp, synthetic construct
  source 1..80: mol_type = other DNA
gagtggctttaggtgctaaataaggtcatctacataaagctcctagcacagttcctcaatactgttagttctttaagaag

SEQ ID NO: 86060 - DNA, 80 bp, synthetic construct; identical to SEQ ID NO: 15507
  source 1..80: mol_type = other DNA

SEQ ID NO: 86061 - DNA, 80 bp, synthetic construct
  source 1..80: mol_type = other DNA
cagggatatttgtgcagggaggaggtggaagtagtttctggagcttgattcattacagcagcaatctcggtcaaacaggt

SEQ ID NO: 86062 - DNA, 80 bp, synthetic construct
  source 1..80: mol_type = other DNA
gctgctgcctatggcaactgcatctctgttcacataacaccagggatccgattctgtttgattatagcttgtaaacctta

SEQ ID NO: 86063 - DNA, 80 bp, synthetic construct
  source 1..80: mol_type = other DNA
tagctttttcttgagaggtggagacaagggctagatcatgttgaaaagtgaaaaagacaagagagtgctcagataattca

SEQ ID NO: 86064 - DNA, 80 bp, synthetic construct
  source 1..80: mol_type = other DNA
aataggcaaattttagagatagtaggtaattcctgcttgcagaggtgggtgagagagaaatgggagtgactgctaatggc

SEQ ID NO: 86065 - DNA, 80 bp, synthetic construct; identical to SEQ ID NO: 15508
  source 1..80: mol_type = other DNA

SEQ ID NO: 86066 - DNA, 80 bp, synthetic construct
  source 1..80: mol_type = other DNA
gcagtttgtttaacttctccaaaccgctgtttcctgatctgtctagtggaaccatctctagatctctccctatgagtata

SEQ ID NO: 86067 - DNA, 80 bp, synthetic construct
  source 1..80: mol_type = other DNA
attgctacctgcaaaatcaattttcctgcacttcactctccactggtgttgaaaagagtgaaaccagagaaaagttgtcc

SEQ ID NO: 86068 - DNA, 80 bp, synthetic construct
  source 1..80: mol_type = other DNA
tcttgcactttcaaaataagctgctcattttccccaggtctcattatttaggggaatgtttcctacttcatttcctaagc

SEQ ID NO: 86069 - DNA, 80 bp, synthetic construct; identical to SEQ ID NO: 15509
  source 1..80: mol_type = other DNA

SEQ ID NO: 86070 - DNA, 80 bp, synthetic construct
  source 1..80: mol_type = other DNA
gtgtactaccccaggataatgtagcccttgtcacaagacttgttgtcccttctctgttctatagacaaaatttaagacat

SEQ ID NO: 86071 - DNA, 80 bp, synthetic construct
  source 1..80: mol_type = other DNA
cacaagatctggttatataaaagtgtgtggcacctccccaccaccttggtcctgctcctgccatgtgagatgtctgctcc

SEQ ID NO: 86072 - DNA, 80 bp, synthetic construct
  source 1..80: mol_type = other DNA
ctaatacaataagatttccatttgagtttctcttttaggttctgcataccaataaaactactgacatcagctggtctaaa

SEQ ID NO: 86073 - DNA, 80 bp, synthetic construct; identical to SEQ ID NO: 15510
  source 1..80: mol_type = other DNA

SEQ ID NO: 86074 - DNA, 80 bp, synthetic construct
  source 1..80: mol_type = other DNA
ggtagtctataacattctgatttgttcacaccttttcttctcttagccgtgtgcacaattgaaaacgaactcatacttaa

SEQ ID NO: 86075 - DNA, 80 bp, synthetic construct
  source 1..80: mol_type = other DNA
aggccacaatgtggatcccattcaaatcatcttcctgtatgagaaaagtaacaaaagttacacttccagctggagggatg

SEQ ID NO: 86076 - DNA, 80 bp, synthetic construct
  source 1..80: mol_type = other DNA
tttggatcagggactcagataaatgagtttgcaagacaggaaaataccaaccacacgcaagacattagcactaaatgagc

SEQ ID NO: 86077 - DNA, 80 bp, synthetic construct; identical to SEQ ID NO: 15511
  source 1..80: mol_type = other DNA

SEQ ID NO: 86078 - DNA, 80 bp, synthetic construct
  source 1..80: mol_type = other DNA
ccttgcccagtcagtataggcctccagtgcatttctgaggctgcaggaattgtctggaatttgagcgtaaggaaggttga

SEQ ID NO: 86079 - DNA, 80 bp, synthetic construct
  source 1..80: mol_type = other DNA
tattcctggagaaagaggagctagagcttggaaggggctctgctatcacaaatgtgattctcaggagacttggggaggaa

SEQ ID NO: 86080 - DNA, 80 bp, synthetic construct
  source 1..80: mol_type = other DNA
caggcgtctcaaccttcccatgatctctgtttccatttcaattgattttaatgctggcgcaatcctatctaaatgctaat

SEQ ID NO: 86081 - DNA, 80 bp, synthetic construct; identical to SEQ ID NO: 15512
  source 1..80: mol_type = other DNA

SEQ ID NO: 86082 - DNA, 80 bp, synthetic construct
  source 1..80: mol_type = other DNA
gaagcaggcttcatttctgtgtgccctgctagaacgcatttggaattggctttagaattaagaatccatatttgttttct

SEQ ID NO: 86083 - DNA, 80 bp, synthetic construct
  source 1..80: mol_type = other DNA
tgtattccacatccacaaggaagcaggccagcgctaggtgccaggcattttcaagtaataaactcacagagccagaaccc

SEQ ID NO: 86084 - DNA, 80 bp, synthetic construct; identical to SEQ ID NO: 15513
  source 1..80: mol_type = other DNA

SEQ ID NO: 86085 - DNA, 80 bp, synthetic construct
  source 1..80: mol_type = other DNA
caaagtgtcttacctaaggccacagaactagtagtgacagaagggggattcaagccagttctgtctggccccaaagccca

SEQ ID NO: 86086 - DNA, 80 bp, synthetic construct
  source 1..80: mol_type = other DNA
cctgctgtgtcctcacggtggaagggaccagctagctctctggggcatcttttagggcattaatcccaacatgagagttc

SEQ ID NO: 86087 - DNA, 80 bp, synthetic construct
  source 1..80: mol_type = other DNA
aatttattcccctgcagggtttgcagaaaatgttgtaaacttggatcaatggctcttaagttgaaagaggctggaaagag

SEQ ID NO: 86088 - DNA, 80 bp, synthetic construct; identical to SEQ ID NO: 15514
  source 1..80: mol_type = other DNA

SEQ ID NO: 86089 - DNA, 80 bp, synthetic construct
  source 1..80: mol_type = other DNA
tgttgaatgtttgttctcatgttgaatgaagagatgcaaagaaaaatgcggttaaaataagcaggcttcctatttaaggt

SEQ ID NO: 86090 - DNA, 80 bp, synthetic construct
  source 1..80: mol_type = other DNA
cccatcttgaaagtattttgttgttgcaatatagggaggcttcttttagaagaaattgctgactctccttccctgtgggc

SEQ ID NO: 86091 - DNA, 80 bp, synthetic construct
  source 1..80: mol_type = other DNA
ttaccaggcaccagtttctttagtaatcatatgtgatgtgttttctatggcctgcatcttaaaaacctgcacaattagag

SEQ ID NO: 86092 - DNA, 80 bp, synthetic construct
  source 1..80: mol_type = other DNA
gagtgcagtggcacatctcagctcactgcagcctctgcctcccaggctcaaaggatgctcctgcctcagcctctcaagca

SEQ ID NO: 86093 - DNA, 80 bp, synthetic construct; identical to SEQ ID NO: 15515
  source 1..80: mol_type = other DNA

SEQ ID NO: 86094 - DNA, 80 bp, synthetic construct
  source 1..80: mol_type = other DNA
gtctggttagggttcctgggtaagacatgaggctgttccagaacggggagggaaggaataaaccatttcagttgcccttt

SEQ ID NO: 86095 - DNA, 80 bp, synthetic construct
  source 1..80: mol_type = other DNA
ttccaatgaaaccagacactgaacttcctttctgaacatctgcctctaatgtgtcaacagggagtatttctgtagcagtg

SEQ ID NO: 86096 - DNA, 80 bp, synthetic construct; identical to SEQ ID NO: 15516
  source 1..80: mol_type = other DNA

SEQ ID NO: 86097 - DNA, 80 bp, synthetic construct
  source 1..80: mol_type = other DNA
aacatggtgaaaccctgtctctactaaaaacacaaaaactagccaggtgtggtggtatgcacctgtaatcccagctactt

SEQ ID NO: 86098 - DNA, 80 bp, synthetic construct
  source 1..80: mol_type = other DNA
gtgtggaatcctggattggattctgggccaggaaaaagagacgtttttcttttgcagtaaaggacattgatgggacaact

SEQ ID NO: 86099 - DNA, 80 bp, synthetic construct
  source 1..80: mol_type = other DNA
tatctatgtatctatgtagctagaagggatggtaaaatgttaacatttgggagatctaggtgaagagatattgaagttct

SEQ ID NO: 86100 - DNA, 80 bp, synthetic construct; identical to SEQ ID NO: 15517
  source 1..80: mol_type = other DNA

SEQ ID NO: 86101 - DNA, 80 bp, synthetic construct
  source 1..80: mol_type = other DNA
gagtcactatgcctagcgataagacccttttaatatctttgaaaggtttaaatgttaggaaagtttgtttctattgtgct

SEQ ID NO: 86102 - DNA, 80 bp, synthetic construct
  source 1..80: mol_type = other DNA
ttgctccctggttctgttcatccatcacttcaaagaattaaacagataaatacttccgtgttaattcctttctcctcctt

SEQ ID NO: 86103 - DNA, 80 bp, synthetic construct
  source 1..80: mol_type = other DNA
ttagttatgtgtcttttagtgattaatctgtatgagcgtcagtttctgactatgtcaaacggggctaaaatagtatttgg

SEQ ID NO: 86104 - DNA, 80 bp, synthetic construct
  source 1..80: mol_type = other DNA
cccgactaattaataatacttgttctacatcactttctagagctattggaagatccaaataaaaagatgcatgaaatgct

SEQ ID NO: 86105 - DNA, 80 bp, synthetic construct; identical to SEQ ID NO: 15518
  source 1..80: mol_type = other DNA

SEQ ID NO: 86106 - DNA, 80 bp, synthetic construct
  source 1..80: mol_type = other DNA
ccactgtgttactgtgtggctctgatgatcaatgaacagaagctatagtcactgcaggaaattaactaagagcaattttg

SEQ ID NO: 86107 - DNA, 80 bp, synthetic construct
  source 1..80: mol_type = other DNA
attgcagacttgacctcccaggctcaagtaatcctcctgcctcagcctcccaagtagctggaactccaggcacatgcgac

SEQ ID NO: 86108 - DNA, 80 bp, synthetic construct; identical to SEQ ID NO: 15519
  source 1..80: mol_type = other DNA

SEQ ID NO: 86109 - DNA, 80 bp, synthetic construct
  source 1..80: mol_type = other DNA
gaaagagcttccttgagtagggatcactgtggcagacacagcagccacagcattatgaaatgtaaaatgagatgatgctt

SEQ ID NO: 86110 - DNA, 80 bp, synthetic construct
  source 1..80: mol_type = other DNA
tgatccaagaattataaagtcttttacaaacaatgggtcagagggcacagggtcagctcattcccagggcaagatgccat

SEQ ID NO: 86111 - DNA, 80 bp, synthetic construct
  source 1..80: mol_type = other DNA
agcagacaggatctatattttgctcatagtttcatttctttctgaatattggcaaatagtgctggacatattaatatttg

SEQ ID NO: 86112 - DNA, 80 bp, synthetic construct; identical to SEQ ID NO: 15520
  source 1..80: mol_type = other DNA

SEQ ID NO: 86113 - DNA, 80 bp, synthetic construct
  source 1..80: mol_type = other DNA
acactaagtggtatcaagcatttctctcccagaagttctatgcatagagtgttcatccttggctaagttacttaactatt

SEQ ID NO: 86114 - DNA, 80 bp, synthetic construct
  source 1..80: mol_type = other DNA
tcaaactctgcttgcaggtgcagacttagattcagaagtaataacatccctgctagtcattactgatcaacaaagccata

SEQ ID NO: 86115 - DNA, 80 bp, synthetic construct
  source 1..80: mol_type = other DNA
ctcctcttctgtgtaaggtttgttggggatggcaatgggctcatccataaatggctcatagaagtcaacctcattcatct

SEQ ID NO: 86116 - DNA, 80 bp, synthetic construct; identical to SEQ ID NO: 15521
  source 1..80: mol_type = other DNA

SEQ ID NO: 86117 - DNA, 80 bp, synthetic construct
  source 1..80: mol_type = other DNA
atggaaccaatgttgataaaacaggcaattgatggagatccttaaggcatataggtactcagaatcagaacccaacccat

SEQ ID NO: 86118 - DNA, 80 bp, synthetic construct
  source 1..80: mol_type = other DNA
ttctgggtggaagggctccctgggatgcaggactttcagtactgaaacttggacagaccccagtaagccaggatgatttg

SEQ ID NO: 86119 - DNA, 80 bp, synthetic construct
  source 1..80: mol_type = other DNA
atttcagaggcctggaatgtgcaacgctctatagaaaaccaaatgccactcttttctagttcagagctgtggttcaagaa

SEQ ID NO: 86120 - DNA, 80 bp, synthetic construct; identical to SEQ ID NO: 15522
  source 1..80: mol_type = other DNA

SEQ ID NO: 86121 - DNA, 80 bp, synthetic construct
  source 1..80: mol_type = other DNA
agtcaagggagattttattgtcaggttaattttaagagagggagatgtggagttttttctaactgtttttccctcttctc

SEQ ID NO: 86122 - DNA, 80 bp, synthetic construct
  source 1..80: mol_type = other DNA
aataataacaaacatatggagtgcttatcacgtgccaggcactgctgccaggtgttttaggttgattctttgtttaattc

SEQ ID NO: 86123 - DNA, 80 bp, synthetic construct
  source 1..80: mol_type = other DNA
tgccaatgtctgggtccacagtgctgtctaagaatgtaaaaattggattgtcgtgtccttaatttaagtcttggaaatgc

SEQ ID NO: 86124 - DNA, 80 bp, synthetic construct
  source 1..80: mol_type = other DNA
gttcaatggcacagtctcggctcactgcaatctccgcttcccaggttcgagcgattctcctgcctcagcctcccgagtag

SEQ ID NO: 86125 - DNA, 80 bp, synthetic construct; identical to SEQ ID NO: 15523
  source 1..80: mol_type = other DNA

SEQ ID NO: 86126 - DNA, 80 bp, synthetic construct
  source 1..80: mol_type = other DNA
tctgttaactagttggaatagatttcaacaaagataagaaaactacaaagtacaatgccaattttctgacatgtgcatgt

SEQ ID NO: 86127 - DNA, 80 bp, synthetic construct
  source 1..80: mol_type = other DNA
tggtttttgccattactaaatttaggtcttcccaacatctatcttctccactaactttgtttagtcacagcaccctttgg

SEQ ID NO: 86128 - DNA, 80 bp, synthetic construct; identical to SEQ ID NO: 15524
  source 1..80: mol_type = other DNA

SEQ ID NO: 86129 - DNA, 80 bp, synthetic construct
  source 1..80: mol_type = other DNA
aattaaaatttccagggctggggcccagagaccaatggttttaaaagcttgttggaggatactaatatggatagtggttg

SEQ ID NO: 86130 - DNA, 80 bp, synthetic construct
  source 1..80: mol_type = other DNA
tctctttcccacaataaactttaaattctaaagggcaggaatctgctttgctcaatgttgtgtccctggcactaagaaga

SEQ ID NO: 86131 - DNA, 80 bp, synthetic construct
  source 1..80: mol_type = other DNA
gatttcctaatgttttcagtagcttcataatttttgctgtcttaacgccaagacttgctatcttaagttattttgaggcc

SEQ ID NO: 86132 - DNA, 80 bp, synthetic construct
  source 1..80: mol_type = other DNA
cctaggatgtgttgtacaaacaggtcctttcagccacttcacatttattacttttctcctcttctgtcctagcactccct

SEQ ID NO: 86133 - DNA, 80 bp, synthetic construct; identical to SEQ ID NO: 15525
  source 1..80: mol_type = other DNA

SEQ ID NO: 86134 - DNA, 80 bp, synthetic construct
  source 1..80: mol_type = other DNA
accacccctctaaaaactaaggctttgttgctggacaaattaattggcctgcctctctattcctttcagctggattctta

SEQ ID NO: 86135 - DNA, 80 bp, synthetic construct
  source 1..80: mol_type = other DNA
atgaacaatggtgctcatagctggctaactattactgaatgcttcctgtgtgccaaaaaccagctaggcagtttgcatat

SEQ ID NO: 86136 - DNA, 80 bp, synthetic construct; identical to SEQ ID NO: 15526
  source 1..80: mol_type = other DNA

SEQ ID NO: 86137 - DNA, 80 bp, synthetic construct
  source 1..80: mol_type = other DNA
ctcccacctcaagcctcccaagtagttcggactacaagtgtgtgccaccacacccagctaatttttgtattttttgtaga

SEQ ID NO: 86138 - DNA, 80 bp, synthetic construct
  source 1..80: mol_type = other DNA
caagatccctcccaactgtaatacaactaattaggataaacattcttcaagtttagattatgttacttggattatagagc

SEQ ID NO: 86139 - DNA, 80 bp, synthetic construct
  source 1..80: mol_type = other DNA
ctcttgtttttcgcagaacacttgcttgaactaatcacagaggagttcccattctacttcccatcctgacgcagtagaag

SEQ ID NO: 86140 - DNA, 80 bp, synthetic construct; identical to SEQ ID NO: 15527
  source 1..80: mol_type = other DNA

SEQ ID NO: 86141 - DNA, 80 bp, synthetic construct
  source 1..80: mol_type = other DNA
cctacaaaactgttcaaattggggtttcataggtacttacccctttgtcaaaggtggcaaagaatttgatgtaaggctgg

SEQ ID NO: 86142 - DNA, 80 bp, synthetic construct
  source 1..80: mol_type = other DNA
gtttacatagatgttatttaatattatttaagcccatagttccccccaaggagttggaattgactggcattcaaacgccc

SEQ ID NO: 86143 - DNA, 80 bp, synthetic construct
  source 1..80: mol_type = other DNA
tttcattctaactcactgctacttataatcatgccctctagagagagtgcagtttgccagaataaatgagccctaagtaa

SEQ ID NO: 86144 - DNA, 80 bp, synthetic construct; identical to SEQ ID NO: 15528
  source 1..80: mol_type = other DNA

SEQ ID NO: 86145 - DNA, 80 bp, synthetic construct
  source 1..80: mol_type = other DNA
aaatgctataagcctgagagtcaatgagcctgtgatttattcttaacaagattagcttctttccatttcatggaattcca

SEQ ID NO: 86146 - DNA, 80 bp, synthetic construct
  source 1..80: mol_type = other DNA
agacaaagatactgatcttcaaaagctctcagcctagagagagctattgatccttaaagaatcaaaatgcagcatgatag

SEQ ID NO: 86147 - DNA, 80 bp, synthetic construct
  source 1..80: mol_type = other DNA
aattgggtggaggggagaagttggctgagagcatttgaagaatgaatggagtgaaagtaaggaagtagaatggctaaagc

SEQ ID NO: 86148 - DNA, 80 bp, synthetic construct
  source 1..80: mol_type = other DNA
cctctcttggagagctggtctacatcactttaagatgaagaatggagcaaggtgacctccagatgggtgattcaaaatgt

SEQ ID NO: 86149 - DNA, 80 bp, synthetic construct; identical to SEQ ID NO: 15529
  source 1..80: mol_type = other DNA

SEQ ID NO: 86150 - DNA, 80 bp, synthetic construct
  source 1..80: mol_type = other DNA
ggcaccagttagaaaccctgaccagaaatgcttggaataatatcatctgtcttacaaagaagaaccaaaccaatttgttg

SEQ ID NO: 86151 - DNA, 80 bp, synthetic construct
  source 1..80: mol_type = other DNA
aaactctgaagtcagattttgaatgtccaagttcatgtactgatagtacagctacaatgacaagaaagtgtaaaggcttt

SEQ ID NO: 86152 - DNA, 80 bp, synthetic construct; identical to SEQ ID NO: 15530
  source 1..80: mol_type = other DNA

SEQ ID NO: 86153 - DNA, 80 bp, synthetic construct
  source 1..80: mol_type = other DNA
atatataatgtactaacaaagtttatacatttaaaaacaaaaattcaaccttaaaaagaggttaaaatgattcactagca

SEQ ID NO: 86154 - DNA, 80 bp, synthetic construct
  source 1..80: mol_type = other DNA
aacattacatttgtcaatgaaaagaaaagtgatagctgtcagattgaactaagtgcccttgaaggacactttagagatgg

SEQ ID NO: 86155 - DNA, 80 bp, synthetic construct
  source 1..80: mol_type = other DNA
gtgaaactccatccttactaaaaatacaaaaaattagccaggcatggtggcaggcgcctgtaatcccagctactcaggag

SEQ ID NO: 86156 - DNA, 80 bp, synthetic construct; identical to SEQ ID NO: 15531
  source 1..80: mol_type = other DNA

SEQ ID NO: 86157 - DNA, 80 bp, synthetic construct
  source 1..80: mol_type = other DNA
accccgtctctactaaaaacactaaaattagccaggcgtggtggcgggcacctgtaatcccagctactcaggaggctgag

SEQ ID NO: 86158 - DNA, 80 bp, synthetic construct
  source 1..80: mol_type = other DNA
attgcacctttctgttccatcctttcatcatcattaacatgcaggtaataatgataatcacctcacaggcttgttgtgag

SEQ ID NO: 86159 - DNA, 80 bp, synthetic construct; identical to SEQ ID NO: 15532
  source 1..80: mol_type = other DNA

SEQ ID NO: 86160 - DNA, 80 bp, synthetic construct
  source 1..80: mol_type = other DNA
aaatgaaaagagggttaagttggggcatgggagacagaaaatgaatgggttgttgatgaggtgactaaggatgctagtgg

SEQ ID NO: 86161 - DNA, 80 bp, synthetic construct
  source 1..80: mol_type = other DNA
accagaaaaaagcctacctcacgggggccatgctgccaaagcagttttaaatatgtacagtactcaagtgcttactcctc

SEQ ID NO: 86162 - DNA, 80 bp, synthetic construct
  source 1..80: mol_type = other DNA
ccttggtggtcagctgtgggcttggccagcgatttttcacattctgtagccactgctaagcccatccctaccccaatttt

SEQ ID NO: 86163 - DNA, 80 bp, synthetic construct
  source 1..80: mol_type = other DNA
gaacactcagcctgctttaaagctggagaacctggcccctccttaatattcttgcagctttcctgactgttttgtacaat

SEQ ID NO: 86164 - DNA, 80 bp, synthetic construct; identical to SEQ ID NO: 15533
  source 1..80: mol_type = other DNA

SEQ ID NO: 86165 - DNA, 80 bp, synthetic construct
  source 1..80: mol_type = other DNA
ttctccccacaatcccccagtgagcataccagcagtaccttctgaggaatagaacttaacttaaagagttaaatgattgg

SEQ ID NO: 86166 - DNA, 80 bp, synthetic construct
  source 1..80: mol_type = other DNA
aaataattaaatcaagctaattaacctatccatcacctcaaatattcatcattttttgtggtgagaacatttgaaattta

SEQ ID NO: 86167 - DNA, 80 bp, synthetic construct; identical to SEQ ID NO: 15534
  source 1..80: mol_type = other DNA

SEQ ID NO: 86168 - DNA, 80 bp, synthetic construct
  source 1..80: mol_type = other DNA
ccatgcccagctaagtttttttatttttgtatttttagtagagatggggtttcaccgtattagccaggatggtctcgatc

SEQ ID NO: 86169 - DNA, 80 bp, synthetic construct
  source 1..80: mol_type = other DNA
aatgggcaagtaactggcccaataaggacagatttgctgaaggctttgggaaaagttctttactcttaaaagggcaatgg

SEQ ID NO: 86170 - DNA, 80 bp, synthetic construct; identical to SEQ ID NO: 15535
  source 1..80: mol_type = other DNA

SEQ ID NO: 86171 - DNA, 80 bp, synthetic construct
  source 1..80: mol_type = other DNA
gcactttttttggtaaatgtagcttccaactcacttctgaccttccctctggtttttgacactgtagagaaagaatgata

SEQ ID NO: 86172 - DNA, 80 bp, synthetic construct
  source 1..80: mol_type = other DNA
cctatgtttgtctaagcatatggatatgaggctgtgctatgtccatggctgaaaaagtgtgatactggggggctgtttag

SEQ ID NO: 86173 - DNA, 80 bp, synthetic construct
  source 1..80: mol_type = other DNA
ttcaatagacgtctatgtataactggtaacagaattagcatattactactacatggcccccaacagtttctagggtggct

SEQ ID NO: 86174 - DNA, 80 bp, synthetic construct; identical to SEQ ID NO: 15536
  source 1..80: mol_type = other DNA

SEQ ID NO: 86175 - DNA, 80 bp, synthetic construct
  source 1..80: mol_type = other DNA
gaactagcattaaccaaagaagcagttgccttgaaataacacttttgaagagctcctgaagtgaacatttaattggaaat

SEQ ID NO: 86176 - DNA, 80 bp, synthetic construct
  source 1..80: mol_type = other DNA
agtccctccaaaatctgtttccaaatctatccctttcattctcccttaggtagacttgtactcctttgagaactgctctc

SEQ ID NO: 86177 - DNA, 80 bp, synthetic construct
  source 1..80: mol_type = other DNA
tgacctccatcttgcttagcttcttcaggtctcagcttaggattcatttttcttaagaaaggtcacttcaatctcactga

SEQ ID NO: 86178 - DNA, 80 bp, synthetic construct; identical to SEQ ID NO: 15537
  source 1..80: mol_type = other DNA

SEQ ID NO: 86179 - DNA, 80 bp, synthetic construct
  source 1..80: mol_type = other DNA
ccaattgcctggcatccttaattccttagattgttgtaaaagtctgttagctggagaaagttttctccaaatgaactctt

SEQ ID NO: 86180 - DNA, 80 bp, synthetic construct
  source 1..80: mol_type = other DNA
tttttgagacaaggttttcctttgtcacccaggctggagtgcagggccatgatcatggctcctgcctcagcctcctgaat

SEQ ID NO: 86181 - DNA, 80 bp, synthetic construct
  source 1..80: mol_type = other DNA
gtgtcctgctgttggattttgtcttgagcaaaaccgcagtaagaagactactgcaattgttgaggcacaacttgatagag

SEQ ID NO: 86182 - DNA, 80 bp, synthetic construct; identical to SEQ ID NO: 15538
  source 1..80: mol_type = other DNA

SEQ ID NO: 86183 - DNA, 80 bp, synthetic construct
  source 1..80: mol_type = other DNA
ctctgtctcccaggctggagtgcagtggtgcgatctcggctcactgcaagctctgcctcccaggttcacgccattctcct

SEQ ID NO: 86184 - DNA, 80 bp, synthetic construct
  source 1..80: mol_type = other DNA
tacactgtgcccagccattaaactgtttttgactctagggaaagagtttaacatattttgctcccatactcaagggagaa

SEQ ID NO: 86185 - DNA, 80 bp, synthetic construct
  source 1..80: mol_type = other DNA
aatctcactttgttgcccaggctgtagtgcagtggcacaatcatgcaggcagaagtcacggcaatcttgatctccctggc

SEQ ID NO: 86186 - DNA, 80 bp, synthetic construct
  source 1..80: mol_type = other DNA
cccaaagtgcccagacattcttaataactcattatcattgtatagtcctaaatagtttcctataatttaaatcttttttt

SEQ ID NO: 86187 - DNA, 80 bp, synthetic construct; identical to SEQ ID NO: 15539
  source 1..80: mol_type = other DNA

SEQ ID NO: 86188 - DNA, 80 bp, synthetic construct
  source 1..80: mol_type = other DNA
acaaaaaaaaaaaatgaactgagcgtggtggcgtgtgactgtaatctcagctactcaagaggctgaggcacaagaatcgc

SEQ ID NO: 86189 - DNA, 80 bp, synthetic construct
  source 1..80: mol_type = other DNA
gggttgtgaatcctaaagtgcactgcacttaagcatgacatatcgacactagagagtacaacttccatgtgcggtcactt

SEQ ID NO: 86190 - DNA, 80 bp, synthetic construct; identical to SEQ ID NO: 15540
  source 1..80: mol_type = other DNA

SEQ ID NO: 86191 - DNA, 80 bp, synthetic construct
  source 1..80: mol_type = other DNA
atgcaggatcattttatatattttaaaagatagtccgcttatgcaagaataattgcaactgtacttttccttttgcaaga

SEQ ID NO: 86192 - DNA, 80 bp, synthetic construct
  source 1..80: mol_type = other DNA
ctgggccacaagctgaagaaacaaatggaaagatgagtgtgctaagggcagaaagatggtagaaaatattacaggattac

SEQ ID NO: 86193 - DNA, 80 bp, synthetic construct
  source 1..80: mol_type = other DNA
acagaaaatttggaagaatatatccactgtcacataccagtttctgcccttggagtagataaaacctggatcgggagaaa

SEQ ID NO: 86194 - DNA, 80 bp, synthetic construct
  source 1..80: mol_type = other DNA
ggcttgtgaagtaggaatgcccattgggtgaatagacctgagatgtcttctcaaggtttcctgaagcacactgagactag

SEQ ID NO: 86195 - DNA, 80 bp, synthetic construct; identical to SEQ ID NO: 15541
  source 1..80: mol_type = other DNA

SEQ ID NO: 86196 - DNA, 80 bp, synthetic construct
  source 1..80: mol_type = other DNA
cttgtacattttacccagtttccctcaacagtaacatcttgcaaaacggaggtacaatgttacaaattggatattaacat

SEQ ID NO: 86197 - DNA, 80 bp, synthetic construct
  source 1..80: mol_type = other DNA
ttgtccattcctataattttgtcatttcaagaatgttatgtaaatggaattatatagtatgtaaccttttcagactgact

SEQ ID NO: 86198 - DNA, 80 bp, synthetic construct
  source 1..80: mol_type = other DNA
attcactcattaaaggatatgtgggttgttcccagtgattggctagtatgaatacagctgctataaagtttagtgtatag

SEQ ID NO: 86199 - DNA, 80 bp, synthetic construct; identical to SEQ ID NO: 15542
  source 1..80: mol_type = other DNA

SEQ ID NO: 86200 - DNA, 80 bp, synthetic construct
  source 1..80: mol_type = other DNA
tcatttttcaactggattgctttttggctgttgaattttgagagtttttttaaataccagtcctttttcagatatatggt

SEQ ID NO: 86201 - DNA, 80 bp, synthetic construct
  source 1..80: mol_type = other DNA
atttatcacttttttgtgttgagaacattcaatatcctaatcatttcatcttcttaataggatctttcacagaacaaaaa

SEQ ID NO: 86202 - DNA, 80 bp, synthetic construct
  source 1..80: mol_type = other DNA
ctttgataaaatttaagataggttgaggttcctttttctttttttgccaatagatgtccgactgttccgatattttttgg

SEQ ID NO: 86203 - DNA, 80 bp, synthetic construct; identical to SEQ ID NO: 15543
  source 1..80: mol_type = other DNA

SEQ ID NO: 86204 - DNA, 80 bp, synthetic construct
  source 1..80: mol_type = other DNA
atttatttgatcttctttggtttctttcatcagcattgtatagttttcagcctacaagtctggcacacattttgttagat

SEQ ID NO: 86205 - DNA, 80 bp, synthetic construct
  source 1..80: mol_type = other DNA
tccttgggatttttctaggtagacaattttgtcacctgctaataatttcttcctttttctgcatgccattttatttcttt

SEQ ID NO: 86206 - DNA, 80 bp, synthetic construct; identical to SEQ ID NO: 15544
  source 1..80: mol_type = other DNA

SEQ ID NO: 86207 - DNA, 80 bp, synthetic construct
  source 1..80: mol_type = other DNA
agaccttttcatctgttcccagcctctttctttctctctggcttctaactgtttcccttcttcgaagagcaaggattgtg

SEQ ID NO: 86208 - DNA, 80 bp, synthetic construct
  source 1..80: mol_type = other DNA
gatgaaaggcatcatcagtgtttatgtatgactcatgttgagattttctgcagtgcctaaacagaccaacctttctgcaa

SEQ ID NO: 86209 - DNA, 80 bp, synthetic construct
  source 1..80: mol_type = other DNA
tgttcccttgtatatcactcagagtcagtaatgatggtacctaatggctttgcggtatagtaagtttccttactcctagt

SEQ ID NO: 86210 - DNA, 80 bp, synthetic construct
  source 1..80: mol_type = other DNA
ttctaatacagcagatctcaagacagactctgaaaaacactgctataaatggttgtcagcacatccaaagtgatatgaca

SEQ ID NO: 86211 - DNA, 80 bp, synthetic construct; identical to SEQ ID NO: 15545
  source 1..80: mol_type = other DNA

SEQ ID NO: 86212 - DNA, 80 bp, synthetic construct
  source 1..80: mol_type = other DNA
tcccatgcctaactgagactttcccacctcctctttggcacccttaggcaaaatccctccagaattcccatcactcttgc

SEQ ID NO: 86213 - DNA, 80 bp, synthetic construct
  source 1..80: mol_type = other DNA
gtctacctctcacatttggcttggccttgcctccacctttactttggccctaaatctgcagctcacatgttcccttctct

SEQ ID NO: 86214 - DNA, 80 bp, synthetic construct; identical to SEQ ID NO: 15546
  source 1..80: mol_type = other DNA

SEQ ID NO: 86215 - DNA, 80 bp, synthetic construct
  source 1..80: mol_type = other DNA
tgagccaaggagttagaagcacttgtcatcaaatacagtgacaaagagttacatacgtgagaaaaaaaggtagagtcaat

SEQ ID NO: 86216 - DNA, 80 bp, synthetic construct
  source 1..80: mol_type = other DNA
tatatgcagcctctgggcattggtcagtgctcattctttctagaaacattaggatttgctttaaccattgctgattcttt

SEQ ID NO: 86217 - DNA, 80 bp, synthetic construct
  source 1..80: mol_type = other DNA
acctcagtcccctgagtagctgggactacaggcctgcaccaacacacttggctaattgtctaagttttgtcgagataggg

SEQ ID NO: 86218 - DNA, 80 bp, synthetic construct
  source 1..80: mol_type = other DNA
ataatatagctttactcttgttaaaagattgtatcctgtaggtatgtatcgcacctaatgacagggtggatccaagtaga

SEQ ID NO: 86219 - DNA, 80 bp, synthetic construct; identical to SEQ ID NO: 15547
  source 1..80: mol_type = other DNA

SEQ ID NO: 86220 - DNA, 80 bp, synthetic construct
  source 1..80: mol_type = other DNA
taatggaaagagaacaattattaattgagaacctactgtgttaacaaaaatgtgtaagacacgtgtcagctccaagggcc

SEQ ID NO: 86221 - DNA, 80 bp, synthetic construct
  source 1..80: mol_type = other DNA
gatagagatcatcctggctaacacggtgaaacaccatctctgctaaaaaaaatacaaaagaattagccgggcttggtggc

SEQ ID NO: 86222 - DNA, 80 bp, synthetic construct
  source 1..80: mol_type = other DNA
caggagtaggacaaaaaaataagggctgtggagacttagagagtttgtgggctgggaggtcaaatcctgcagagcccagt

SEQ ID NO: 86223 - DNA, 80 bp, synthetic construct; identical to SEQ ID NO: 15548
  source 1..80: mol_type = other DNA

SEQ ID NO: 86224 - DNA, 80 bp, synthetic construct
  source 1..80: mol_type = other DNA
ctcactccaaatagaattccttttccccgactgtttgctggtttctactttccttgaagtctgcatttaaatgtcagttc

SEQ ID NO: 86225 - DNA, 80 bp, synthetic construct
  source 1..80: mol_type = other DNA
tatgtccacgtctgtttttctcccatgctatctccagcacctagcgtaatacctgaacagattagatctcaaaaataaaa

SEQ ID NO: 86226 - DNA, 80 bp, synthetic construct
  source 1..80: mol_type = other DNA
ctgcaagggcatcccaggaggaagaaatggtataagaaaaggtttgcaggtgggaatgtgcaggggtgtgcaggagaaca

SEQ ID NO: 86227 - DNA, 80 bp, synthetic construct; identical to SEQ ID NO: 15549
  source 1..80: mol_type = other DNA

SEQ ID NO: 86228 - DNA, 80 bp, synthetic construct
  source 1..80: mol_type = other DNA
tggagagaaaagggagagagatcaaagaagagggaggaggcaaaatagtttgagggtctcccatgaggaaacaaagtgga

SEQ ID NO: 86229 - DNA, 80 bp, synthetic construct
  source 1..80: mol_type = other DNA
acaggtgacatctttgggagacgagtatgaaagaaagccacagggtcaagggctggctgtctcagaaggaagagaaagaa

SEQ ID NO: 86230 - DNA, 80 bp, synthetic construct
  source 1..80: mol_type = other DNA
gtaagtcacgggtgaccttttagagaagagctgagacagaagccaagcactgggagttaaactgctgggtgggtggcaaa

SEQ ID NO: 86231 - DNA, 80 bp, synthetic construct; identical to SEQ ID NO: 15550
  source 1..80: mol_type = other DNA

SEQ ID NO: 86232 - DNA, 80 bp, synthetic construct
  source 1..80: mol_type = other DNA
aagtgaatgtccctcaggccagtcattaaaaacaccctggctgtaaccctgctcttttcatgtaagccaagagccaaacg

SEQ ID NO: 86233 - DNA, 80 bp, synthetic construct
  source 1..80: mol_type = other DNA
agttggcatgtgatgtgttcacgaaggaggctggctcaatgaagggacggctattttatggggttcaagcgagtatcggg

SEQ ID NO: 86234 - DNA, 80 bp, synthetic construct
  source 1..80: mol_type = other DNA
aggctatataacaacaacaatttttaaaaaagcacttactgggtgtttactatatgccagctattgctccaactgcctta

SEQ ID NO: 86235 - DNA, 80 bp, synthetic construct; identical to SEQ ID NO: 15551
  source 1..80: mol_type = other DNA

SEQ ID NO: 86236 - DNA, 80 bp, synthetic construct
  source 1..80: mol_type = other DNA
gcaaaccccactacactaagtcagtggttttagaacctgggtgcacatcagcattccctggaggggcagccagtaaaaag

SEQ ID NO: 86237 - DNA, 80 bp, synthetic construct
  source 1..80: mol_type = other DNA
cttttattgcgtagcattttgccatgtccaaactgacagaatgagggaagctgtccctgaaggccaggtttgttttgttt

SEQ ID NO: 86238 - DNA, 80 bp, synthetic construct; identical to SEQ ID NO: 15552
  source 1..80: mol_type = other DNA

SEQ ID NO: 86239 - DNA, 80 bp, synthetic construct
  source 1..80: mol_type = other DNA
ccacagtgcaataagcagaaaaggaacctgttcctgcttggctgaactttctgaaatgtctgactagtgtttattttgat

SEQ ID NO: 86240 - DNA, 80 bp, synthetic construct
  source 1..80: mol_type = other DNA
aaaacctctatgaggagcgtactgtggcttagattttataaaggaagcactcagccttgaggagctaagtgacccgcctg

SEQ ID NO: 86241 - DNA, 80 bp, synthetic construct
  source 1..80: mol_type = other DNA
agaggtgtgtggtcgggctaacagttagatatccgaggccagagtaattgtgtgtgttgtataggtagaagcaggtgagc

SEQ ID NO: 86242 - DNA, 80 bp, synthetic construct
  source 1..80: mol_type = other DNA
gcaagatgccttactggcccctttcctgcatggctgtccaaacagaaacagcttatctggataattctggcctaccacat

SEQ ID NO: 86243 - DNA, 80 bp, synthetic construct; identical to SEQ ID NO: 15553
  source 1..80: mol_type = other DNA

SEQ ID NO: 86244 - DNA, 80 bp, synthetic construct
  source 1..80: mol_type = other DNA
ctttgggaggctgaggcaggcggatcacctgaggtcaggagttcaagaccagcccagccaacatgacgaaaccccgtatc

SEQ ID NO: 86245 - DNA, 80 bp, synthetic construct
  source 1..80: mol_type = other DNA
cgagactctgtctctaaataaataaataaaaaaaaacttatacctttgggaggaggtctacctcaggaatgttatgaata

SEQ ID NO: 86246 - DNA, 80 bp, synthetic construct; identical to SEQ ID NO: 15554
  source 1..80: mol_type = other DNA

SEQ ID NO: 86247 - DNA, 80 bp, synthetic construct
  source 1..80: mol_type = other DNA
gccaaaccaaaataagtctgacctcatctaatttttcagagtggagcaggtgtgaatttggagattgccatttttggtca

SEQ ID NO: 86248 - DNA, 80 bp, synthetic construct
  source 1..80: mol_type = other DNA
agtgctaaataggtttagaacaagggtcagccttataaagcttggaggcttctgcccacgtgcatatatattttgggcta

SEQ ID NO: 86249 - DNA, 80 bp, synthetic construct
  source 1..80: mol_type = other DNA
tatattttcagtataagcaatttatttctaattcttgacctttcccttcttcccctctccatccaaccatccagcaaaca

SEQ ID NO: 86250 - DNA, 80 bp, synthetic construct
  source 1..80: mol_type = other DNA
aactaaagacatctgtcccttcataagttggcactgcttacaaacatgaagcaatccctttcagctgctccttggcatac

SEQ ID NO: 86251 - DNA, 80 bp, synthetic construct; identical to SEQ ID NO: 15555
  source 1..80: mol_type = other DNA

SEQ ID NO: 86252 - DNA, 80 bp, synthetic construct
  source 1..80: mol_type = other DNA
agtccctgcctttgtgaatgtcacattctatagcaggtgctgtagtttggacgtttttccctccaaatcttacattaaaa

SEQ ID NO: 86253 - DNA, 80 bp, synthetic construct
  source 1..80: mol_type = other DNA
aaaagagccttgcaccttttctctctctctcgcttcctctggtgctgtgtgatctctgcacacatcagctccttttcacc

SEQ ID NO: 86254 - DNA, 80 bp, synthetic construct
  source 1..80: mol_type = other DNA
aggggtgtcagacaatatgcaatatgtcagccaagtactatgtagaaaaagcatagaggagggtagagaaggtaaaatga

SEQ ID NO: 86255 - DNA, 80 bp, synthetic construct; identical to SEQ ID NO: 15556
  source 1..80: mol_type = other DNA

SEQ ID NO: 86256 - DNA, 80 bp, synthetic construct
  source 1..80: mol_type = other DNA
agttttaatgagaacaaattagtttctgagggaacaggttgtttaaaagggtctgacttccttggcttctctgtctttct

SEQ ID NO: 86257 - DNA, 80 bp, synthetic construct
  source 1..80: mol_type = other DNA
aaagaattaatatttctattcaggtgttcactagacttagttttatattacaaaatactcaccagttttctctgagaagc

SEQ ID NO: 86258 - DNA, 80 bp, synthetic construct; identical to SEQ ID NO: 15557
  source 1..80: mol_type = other DNA

SEQ ID NO: 86259 - DNA, 80 bp, synthetic construct
  source 1..80: mol_type = other DNA
gcgactctccaaattagagctatactgacagttccaacaccattctgaagaatgaatgatccaaaggtcaaacaggtaac

SEQ ID NO: 86260 - DNA, 80 bp, synthetic construct
  source 1..80: mol_type = other DNA
agatatggcctgagattctttgtttttaacagggtccaagtgatgccatttgctactggtctggggtccgcctttttatt

SEQ ID NO: 86261 - DNA, 80 bp, synthetic construct
  source 1..80: mol_type = other DNA
cgtcaggtttcaagtggccttcaaacttggctgcatcttaacagcactcagaaagcttttaaaaactgtagcatctggac

SEQ ID NO: 86262 - DNA, 80 bp, synthetic construct
  source 1..80: mol_type = other DNA
gaaaattcacattgataagcacccactatacttcaagcactcaattagtcattctattaatacatagatgaatttcttca

SEQ ID NO: 86263 - DNA, 80 bp, synthetic construct; identical to SEQ ID NO: 15558
  source 1..80: mol_type = other DNA

SEQ ID NO: 86264 - DNA, 80 bp, synthetic construct
  source 1..80: mol_type = other DNA
gcagaagaattgcttgaacccggaaggaggaggttgcagtgagctgagattgccccactgcactccagcctgggcaacag

SEQ ID NO: 86265 - DNA, 80 bp, synthetic construct
  source 1..80: mol_type = other DNA
tgcacatgagtcttgtcaatgatgatgctgggcacattgcaaagcctgaagaggctacagtcactctccgctaaagttta

SEQ ID NO: 86266 - DNA, 80 bp, synthetic construct; identical to SEQ ID NO: 15559
  source 1..80: mol_type = other DNA

SEQ ID NO: 86267 - DNA, 80 bp, synthetic construct
  source 1..80: mol_type = other DNA
aaatgagaccttcttaagcaggaaaagcagaagaactacaccaagtgtacaccgggcagcagccttagactttgaactct

SEQ ID NO: 86268 - DNA, 80 bp, synthetic construct
  source 1..80: mol_type = other DNA
aaagtattgcttgttccttatccatacattcaatgatacattcatttactcatgcaaagattattgagtgtctgttaata

SEQ ID NO: 86269 - DNA, 80 bp, synthetic construct
  source 1..80: mol_type = other DNA
ttccccactctccaccctgccacccaaaacacatatacatggctaacagcatcaattttaactacaaaacatgtgaatat

SEQ ID NO: 86270 - DNA, 80 bp, synthetic construct
  source 1..80: mol_type = other DNA
ttcaggctggaatgctggactcctagcagtgaagtggtgtagaggaaaagataaaggtcttggagttagggacaggatct

SEQ ID NO: 86271 - DNA, 80 bp, synthetic construct; identical to SEQ ID NO: 15560
  source 1..80: mol_type = other DNA

SEQ ID NO: 86272 - DNA, 80 bp, synthetic construct
  source 1..80: mol_type = other DNA
ggaagcacctctcaaagtaggtgagactgaaccatgactgaaaatggggcaaggcctaatttaataaatggcatggatga

SEQ ID NO: 86273 - DNA, 80 bp, synthetic construct
  source 1..80: mol_type = other DNA
cccagctcccaaggcctgatttcctcagtttatcaactgatggggttagctgtattgtgtttagaatcctgatgaaatag

SEQ ID NO: 86274 - DNA, 80 bp, synthetic construct; identical to SEQ ID NO: 15561
  source 1..80: mol_type = other DNA

SEQ ID NO: 86275 - DNA, 80 bp, synthetic construct
  source 1..80: mol_type = other DNA
actaaatttactatcttggtggaagctgtaagagacagcatgcaaaattgcaactccctttataatttgtgttgacaccc

SEQ ID NO: 86276 - DNA, 80 bp, synthetic construct
  source 1..80: mol_type = other DNA
tgatacagtggaatactatgctggtattaacattactgtttaataatatagaaatacaatatatggatgtgaaaaaaagc

SEQ ID NO: 86277 - DNA, 80 bp, synthetic construct
  source 1..80: mol_type = other DNA
tctaaatcatatatgctgctttgttgatgaagaatacccaaggaatcagaactgccagctgtttaagtcagggttacagc

SEQ ID NO: 86278 - DNA, 80 bp, synthetic construct; identical to SEQ ID NO: 15562
  source 1..80: mol_type = other DNA

SEQ ID NO: 86279 - DNA, 80 bp, synthetic construct
  source 1..80: mol_type = other DNA
gccaaattttaggaaaaagctagcaggtggaaaaatacttgagagccatcagaatatttgctgttttgccagtaaattcc

SEQ ID NO: 86280 - DNA, 80 bp, synthetic construct
  source 1..80: mol_type = other DNA
ccccgtatccacagcatctatcccagggccccaacaaaaattaggtggcagatgcatgactaattgaatggtatttcaag

SEQ ID NO: 86281 - DNA, 80 bp, synthetic construct
  source 1..80: mol_type = other DNA
gagtttctaattcctagaaattcctcaggtgtttcagcctggggatggcaactcctcactggagagggaaatcaacttaa

SEQ ID NO: 86282 - DNA, 80 bp, synthetic construct
  source 1..80: mol_type = other DNA
tcggttatgataaaaagtgtcagaagccgccttaagctgcgagggggaagggagctgcctcccctccagctatttgtccg

SEQ ID NO: 86283 - DNA, 80 bp, synthetic construct; identical to SEQ ID NO: 15563
  source 1..80: mol_type = other DNA

SEQ ID NO: 86284 - DNA, 80 bp, synthetic construct
  source 1..80: mol_type = other DNA
tgtacagctggcatcatcagacccgggtccagaggctgagcaactctgtttaaggaagactcttgaaaccatcttaaaca

SEQ ID NO: 86285 - DNA, 80 bp, synthetic construct
  source 1..80: mol_type = other DNA
acctacttaatagaattattgtaaggattaaacaagctaacacataccaagtgcttagaacagtccctgcacttagtaag

SEQ ID NO: 86286 - DNA, 80 bp, synthetic construct; identical to SEQ ID NO: 15564
  source 1..80: mol_type = other DNA

SEQ ID NO: 86287 - DNA, 80 bp, synthetic construct
  source 1..80: mol_type = other DNA
tggagggatggtaagcccaggggaagtttctgttcatgattttgcatagtctttggggacagatatacttgggggagcta

SEQ ID NO: 86288 - DNA, 80 bp, synthetic construct
  source 1..80: mol_type = other DNA
ctaactggacagcgatgagcatataggggagaatccttatgccttcaattaagttttcataacaatgtctcttgataact

SEQ ID NO: 86289 - DNA, 80 bp, synthetic construct
  source 1..80: mol_type = other DNA
tcttaataactatccctgctttctcttttcttgcaacccacagagagaactgaaattccacattcagcacccaaggttgg

SEQ ID NO: 86290 - DNA, 80 bp, synthetic construct; identical to SEQ ID NO: 15565
  source 1..80: mol_type = other DNA

SEQ ID NO: 86291 - DNA, 80 bp, synthetic construct
  source 1..80: mol_type = other DNA
caggcaggccatgtaatgcggataaaataagaactgacttcagctctgccctaaagtcacaccaagaactttctgagaaa

SEQ ID NO: 86292 - DNA, 80 bp, synthetic construct
  source 1..80: mol_type = other DNA
catggggagatttgagggagcaaagtgggcacactgaatgaaatccacaagtagtccctggatttcatttcagccaacag

SEQ ID NO: 86293 - DNA, 80 bp, synthetic construct
  source 1..80: mol_type = other DNA
acatcccagctgtgtgacaagggcatctgattcacgtgaggccaaaataaagcagagttcagtatatattctctgcatcc

SEQ ID NO: 86294 - DNA, 80 bp, synthetic construct; identical to SEQ ID NO: 15566
  source 1..80: mol_type = other DNA

SEQ ID NO: 86295 - DNA, 80 bp, synthetic construct
  source 1..80: mol_type = other DNA
gccaaggagagagcagacaggctgattttctctcttctttgcccttcctggggctgaaaagtgactcttcacctccttgg

SEQ ID NO: 86296 - DNA, 80 bp, synthetic construct; identical to SEQ ID NO: 15567
  source 1..80: mol_type = other DNA

SEQ ID NO: 86297 - DNA, 80 bp, synthetic construct
  source 1..80: mol_type = other DNA
ttcttctcctcacaaagaggggtgtaaaggggaaaatcagttgcctgattcaagataatttcctctataagctccagatt

SEQ ID NO: 86298 - DNA, 80 bp, synthetic construct; identical to SEQ ID NO: 15568
  source 1..80: mol_type = other DNA

SEQ ID NO: 86299 - DNA, 80 bp, synthetic construct
  source 1..80: mol_type = other DNA
agaatcattgaatatatttctgtaaaatggctacaagatacctataaacattcttcaaagggatcaaactgctaaaatat

SEQ ID NO: 86300 - DNA, 80 bp, synthetic construct
  source 1..80: mol_type = other DNA
gactttgctgcaaacaaggtaaagatactagtactgtttgacttcagaaagctgttttgctatattttctaataattgca

SEQ ID NO: 86301 - DNA, 80 bp, synthetic construct
  source 1..80: mol_type = other DNA
ggagaaattattagacaatttttattgcacataactaaacatggttacatttaaacatatagattttgcaaaggacactg

SEQ ID NO: 86302 - DNA, 80 bp, synthetic construct; identical to SEQ ID NO: 15569
  source 1..80: mol_type = other DNA

SEQ ID NO: 86303 - DNA, 80 bp, synthetic construct
  source 1..80: mol_type = other DNA
tatgcctccatttcttttttttagttctctctctccttgcctcctcaccctttctttcccctgaactctcaatccttctt

SEQ ID NO: 86304 - DNA, 80 bp, synthetic construct
  source 1..80: mol_type = other DNA
tatttgtagttgcctcgtggttgcaagctttttataagcactgtggctatttttcttcccaatccaactttagtgggggg

SEQ ID NO: 86305 - DNA, 80 bp, synthetic construct
  source 1..80: mol_type = other DNA
ttttttgtcatgagtaaaagtaaagttgaagtgacttaagacagtacatcttatgttccctgtgggttttacaaggaaat

SEQ ID NO: 86306 - DNA, 80 bp, synthetic construct; identical to SEQ ID NO: 15570
  source 1..80: mol_type = other DNA

SEQ ID NO: 86307 - DNA, 80 bp, synthetic construct
  source 1..80: mol_type = other DNA
atgcgtcacctagtggctgacaagccaggttaccatttacataacgaatgccaatattaatgttatgtagctggctttgg

SEQ ID NO: 86308 - DNA, 80 bp, synthetic construct
  source 1..80: mol_type = other DNA
aaatgttacggccacttaaaaattctacatatgactattgtttaaatacatttttcatgtctctgatgtagtccttattt

SEQ ID NO: 86309 - DNA, 80 bp, synthetic construct
  source 1..80: mol_type = other DNA
ataaactgtaggcctctagttgttttagaattttaaaactgtaaatggactcagagaatcagtttcttattagacgtcat

SEQ ID NO: 86310 - DNA, 80 bp, synthetic construct; identical to SEQ ID NO: 15571
  source 1..80: mol_type = other DNA

SEQ ID NO: 86311 - DNA, 80 bp, synthetic construct
  source 1..80: mol_type = other DNA
aaaaaaattatatatcgtcctagaaagtacatgaactaataatgcatttctaaaggtgaaaaaagaataggtatttttct

SEQ ID NO: 86312 - DNA, 80 bp, synthetic construct
  source 1..80: mol_type = other DNA
cctgagctttttttctagggaaagaaaaatgctcaggtaataacagagccttgaaaaatttggattttcaaaactaccta

SEQ ID NO: 86313 - DNA, 80 bp, synthetic construct
  source 1..80: mol_type = other DNA
gactgtgattaaatgcctcttaactacttcagattcctggattgatgtcttatctacaggcttctttttaaaaatcaaga

SEQ ID NO: 86314 - DNA, 80 bp, synthetic construct; identical to SEQ ID NO: 15572
  source 1..80: mol_type = other DNA

SEQ ID NO: 86315 - DNA, 80 bp, synthetic construct
  source 1..80: mol_type = other DNA
aaaagatcatatagtgtaaaaaaaaactctccagacttttcaaaggggaaactttgcctgtttcatgtcaagatgacaac

SEQ ID NO: 86316 - DNA, 80 bp, synthetic construct
  source 1..80: mol_type = other DNA
ggtcaagcactgctgtttaaaatgtagtcttaatgaacaaaatgaaacgttgaaagaggacgagtcaaaatgcccaaaag

SEQ ID NO: 86317 - DNA, 80 bp, synthetic construct; identical to SEQ ID NO: 15573
  source 1..80: mol_type = other DNA

SEQ ID NO: 86318 - DNA, 80 bp, synthetic construct
  source 1..80: mol_type = other DNA
aaaatgtatgcagggtttctgagtcacacatttattctgttggtggtctggatgtcatcagggtagctttagagatataa

SEQ ID NO: 86319 - DNA, 80 bp, synthetic construct
  source 1..80: mol_type = other DNA
atatgggacagagctttggagttggcttctttaatcgtactcagttttgaaatagcagaaagaaaatagaatgcagtaat

SEQ ID NO: 86320 - DNA, 80 bp, synthetic construct
  source 1..80: mol_type = other DNA
atgaagcaaaatagatattcaaactactcagagcagtccctacaagataggaggtactatagcactagttttactaacgc

SEQ ID NO: 86321 - DNA, 80 bp, synthetic construct; identical to SEQ ID NO: 15574
  source 1..80: mol_type = other DNA

SEQ ID NO: 86322 - DNA, 80 bp, synthetic construct
  source 1..80: mol_type = other DNA
tagacaattctaaaagattaattgaattctaaaagattaatcaacttaaaggacatttctaaggagattgaaaaagcata

SEQ ID NO: 86323 - DNA, 80 bp, synthetic construct
  source 1..80: mol_type = other DNA
tcctttttgttaagtaatctaacatattttaagatactctgataaatacataagcagcagaaaaaatattttattaaaat

SEQ ID NO: 86324 - DNA, 80 bp, synthetic construct
  source 1..80: mol_type = other DNA
tcagattatacaacatcttttcccagataaggatttagtaagaagagaaaaggaaaaaacattcacttttcattcaagcc

SEQ ID NO: 86325 - DNA, 80 bp, synthetic construct; identical to SEQ ID NO: 15575
  source 1..80: mol_type = other DNA

SEQ ID NO: 86326 - DNA, 80 bp, synthetic construct
  source 1..80: mol_type = other DNA
gacatgggagatggaatttaaaattaattataaattggaacagagagatttagtttaaacaactaaaataatggaaataa

SEQ ID NO: 86327 - DNA, 80 bp, synthetic construct
  source 1..80: mol_type = other DNA
tttctattctatttctaaatgttgcaaatggctaactagagcatttttattcctctagaaacaaaacattcttttccttg

SEQ ID NO: 86328 - DNA, 80 bp, synthetic construct
  source 1..80: mol_type = other DNA
taactaaggtagaaaaacagagaaagggctaattttcagccacaagtttttacaggaactgacttctcaggagagccaaa

SEQ ID NO: 86329 - DNA, 80 bp, synthetic construct
  source 1..80: mol_type = other DNA
agaagagaaaaatattttaagaatatgataatttttaaaattgcactaaaataatctttatattgaggcctccgtgtttt

SEQ ID NO: 86330 - DNA, 80 bp, synthetic construct; identical to SEQ ID NO: 15576
  source 1..80: mol_type = other DNA

SEQ ID NO: 86331 - DNA, 80 bp, synthetic construct
  source 1..80: mol_type = other DNA
aagatatgcctgatccagaggcaatgagctaaaagaatcatctgtacaatctaacaatgcttttgaggatggatctggag

SEQ ID NO: 86332 - DNA, 80 bp, synthetic construct
  source 1..80: mol_type = other DNA
ccaaacccaaattttcggaccttttctgcagactggtgaacttagtacttaaatatgaaacgccagttctgtctagagaa

SEQ ID NO: 86333 - DNA, 80 bp, synthetic construct
  source 1..80: mol_type = other DNA
actaagaattaagaaatgctgttttaaaagcttaggaaatgtatatagaaaatatatcccatgttctcatatatgtgttt

SEQ ID NO: 86334 - DNA, 80 bp, synthetic construct
  source 1..80: mol_type = other DNA
caagtgtcttgtacaatatcattaaatttgtatcagaacacataaatggaaatgaggtggggaagcaattgcagtacttt

SEQ ID NO: 86335 - DNA, 80 bp, synthetic construct; identical to SEQ ID NO: 15577
  source 1..80: mol_type = other DNA

SEQ ID NO: 86336 - DNA, 80 bp, synthetic construct
  source 1..80: mol_type = other DNA
ttactggcaaactatcatactaattgtcaagaactaaagttgtatttaaccacaatacacagctaatgccttaagaattg

SEQ ID NO: 86337 - DNA, 80 bp, synthetic construct
  source 1..80: mol_type = other DNA
ccattttaagccacaaatacagatggttatgattcatattttccctattatttttacttattccttgccaatgtttattt

SEQ ID NO: 86338 - DNA, 80 bp, synthetic construct; identical to SEQ ID NO: 15578
  source 1..80: mol_type = other DNA

SEQ ID NO: 86339 - DNA, 80 bp, synthetic construct
  source 1..80: mol_type = other DNA
tataaatgaaattaaaatatctgctggtcttaaggaaaattgactatggtgtgccaattttatgttaacaagcagatatg

SEQ ID NO: 86340 - DNA, 80 bp, synthetic construct
  source 1..80: mol_type = other DNA
cagagtaacaaaaatcacctttcagcaaaacctaaggaaacttcacgtcatctaacttgtttttcagctgttgaaggagg

SEQ ID NO: 86341 - DNA, 80 bp, synthetic construct
  source 1..80: mol_type = other DNA
tgtgcagtttgcccacagcctccaactgctgtgagtttaaagataaactgtacatcttcaatattcatatttagacacat

SEQ ID NO: 86342 - DNA, 80 bp, synthetic construct
  source 1..80: mol_type = other DNA
ctgggttactaaataatatgcaaattctgtgtcttgtttaacttgtttcttttccatttattagcctactcgccctccta

SEQ ID NO: 86343 - DNA, 80 bp, synthetic construct; identical to SEQ ID NO: 15579
  source 1..80: mol_type = other DNA

SEQ ID NO: 86344 - DNA, 80 bp, synthetic construct
  source 1..80: mol_type = other DNA
tgtgaatcaccaggatttttcactatttaatttatttttatctcttttttagggccctcctggtattcctgggagaaatg

SEQ ID NO: 86345 - DNA, 80 bp, synthetic construct
  source 1..80: mol_type = other DNA
tcctggcccccctggaatctgtgaatcatgccctactggtcctcaggtataacaattacggtacttaaaaaattccctca

SEQ ID NO: 86346 - DNA, 80 bp, synthetic construct
  source 1..80: mol_type = other DNA
tcataatgctaatgtcattgctactatatccttggaaaatttgctaatttctcagcagatatatagcatacacattatgt

SEQ ID NO: 86347 - DNA, 80 bp, synthetic construct; identical to SEQ ID NO: 15580
  source 1..80: mol_type = other DNA

SEQ ID NO: 86348 - DNA, 80 bp, synthetic construct
  source 1..80: mol_type = other DNA
ctagtaaccaaacagaacctaactctagacctggaacttagaatttaaaaaaagcttcaaagaaatctaataagcatatg

SEQ ID NO: 86349 - DNA, 80 bp, synthetic construct
  source 1..80: mol_type = other DNA
tgtattatatgatctcgagactcttttggcctcaaacagcctatgatcctatgtttgtaatgatgtagctactgcttaga

SEQ ID NO: 86350 - DNA, 80 bp, synthetic construct
  source 1..80: mol_type = other DNA
ccacatcttttggcacacaaaaacctatcagtagacagtagatgttgcatgcacttctaaatgctttttaaaagaattat

SEQ ID NO: 86351 - DNA, 80 bp, synthetic construct; identical to SEQ ID NO: 15581
  source 1..80: mol_type = other DNA

SEQ ID NO: 86352 - DNA, 80 bp, synthetic construct
  source 1..80: mol_type = other DNA
cagtatttagaaacagcatgttacaaaactgaagcatactgttttcagcttgctgaaggttttctagtttaatctgtatt

SEQ ID NO: 86353 - DNA, 80 bp, synthetic construct
  source 1..80: mol_type = other DNA
tgtgccaataaatgtttttctgcactgagtttggctgccaagcgagaaattgcttcttcaccagtgcaatataaccctaa

SEQ ID NO: 86354 - DNA, 80 bp, synthetic construct
  source 1..80: mol_type = other DNA
agatctcatgaatagttatcaaaaagttatcaaaagatgagatatagttgttcatagttttaacaatgcgagtgtcattg

SEQ ID NO: 86355 - DNA, 80 bp, synthetic construct; identical to SEQ ID NO: 15582
  source 1..80: mol_type = other DNA

SEQ ID NO: 86356 - DNA, 80 bp, synthetic construct
  source 1..80: mol_type = other DNA
cttttagttcaaaaccattcagttttgatggattgcaatgaatggaatgaaatacattaacttcattctgatctaaaaat

SEQ ID NO: 86357 - DNA, 80 bp, synthetic construct
  source 1..80: mol_type = other DNA
ccctggtgaacctgggcaagctggtccttcagtaagtaacaattaaatttatatttagtaagtcgataattccatatgga

SEQ ID NO: 86358 - DNA, 80 bp, synthetic construct
  source 1..80: mol_type = other DNA
ctatcttagagacactagttaataaaggaattccctcatcattagccatcaaaatagtccacttcccagagctgataaaa

SEQ ID NO: 86359 - DNA, 80 bp, synthetic construct; identical to SEQ ID NO: 15583
  source 1..80: mol_type = other DNA

SEQ ID NO: 86360 - DNA, 80 bp, synthetic construct
  source 1..80: mol_type = other DNA
attttttatttccttattttcagggccctccaggacctcctggtgctataggtccatctggtcctgctggaaaagatgta

SEQ ID NO: 86361 - DNA, 80 bp, synthetic construct
  source 1..80: mol_type = other DNA
tatttgcgtttctatatatatcatttgttgaattccaaaataaaatccttaaagtgctttttgactgcggagaagactca

SEQ ID NO: 86362 - DNA, 80 bp, synthetic construct
  source 1..80: mol_type = other DNA
gcattccttctttccctcttaatctccaatggcaaattcttttcactggcttatgttatttcagtgattagaagcacctg

SEQ ID NO: 86363 - DNA, 80 bp, synthetic construct; identical to SEQ ID NO: 15584
  source 1..80: mol_type = other DNA

SEQ ID NO: 86364 - DNA, 80 bp, synthetic construct
  source 1..80: mol_type = other DNA
ttcattatttttagggtatcaaaggtccagctgggatacctggattccctggtatgaaaggacacagagtaagtagagtt

SEQ ID NO: 86365 - DNA, 80 bp, synthetic construct
  source 1..80: mol_type = other DNA
actaagtttgtttgttgaccaaactagtcattttttgcaaaataaaggagttgatttctagtgtataaagtactcttgaa

SEQ ID NO: 86366 - DNA, 80 bp, synthetic construct
  source 1..80: mol_type = other DNA
ttataataaaatctatgaaactcatgtttgctactctatagttaaggcaactttcttatcagactaaattgcactttcta

SEQ ID NO: 86367 - DNA, 80 bp, synthetic construct
  source 1..80: mol_type = other DNA
aataattttgctggttttatacatttcctagggcttcgatggacgaaatggagaaaagggtgaaacaggtgctcctggat

SEQ ID NO: 86368 - DNA, 80 bp, synthetic construct; identical to SEQ ID NO: 15585
  source 1..80: mol_type = other DNA

SEQ ID NO: 86369 - DNA, 80 bp, synthetic construct
  source 1..80: mol_type = other DNA
ttgtaaaatagtaacatattttatatgtatctagggtgaaaatggtcttccaggcgaaaatggagctcctggacccatgg

SEQ ID NO: 86370 - DNA, 80 bp, synthetic construct
  source 1..80: mol_type = other DNA
cgaggacggccaggacttcctggggctgcagtgagtatagctgctaacatcacacaattacaacccaaagtgacagattt

SEQ ID NO: 86371 - DNA, 80 bp, synthetic construct
  source 1..80: mol_type = other DNA
cttttcatatgtcatttgagccattatatctgcattcagtcctgaaaacacagactccaatccttctacatttgattgtt

SEQ ID NO: 86372 - DNA, 80 bp, synthetic construct; identical to SEQ ID NO: 15586
  source 1..80: mol_type = other DNA

SEQ ID NO: 86373 - DNA, 80 bp, synthetic construct
  source 1..80: mol_type = other DNA
cccaatacttaatattgtatatacactcctgtgattaaaactgacactgagcccataaacaaaatctaggttctgacact

SEQ ID NO: 86374 - DNA, 80 bp, synthetic construct
  source 1..80: mol_type = other DNA
cactaagtcacagaattcatggcaaagtagggagaaaccaagaatttctaactttagatttcactcttttcttattttac

SEQ ID NO: 86375 - DNA, 80 bp, synthetic construct; identical to SEQ ID NO: 15587
  source 1..80: mol_type = other DNA

SEQ ID NO: 86376 - DNA, 80 bp, synthetic construct
  source 1..80: mol_type = other DNA
ttacgattaatgattccttgctttacctgcagtatagagtcccactactccaacttttgggagatgtgtttaaacaggac

SEQ ID NO: 86377 - DNA, 80 bp, synthetic construct
  source 1..80: mol_type = other DNA
tcctcctgtaagtatcatagttgagagggagtaagcatagtttcatgcttactccatgaaagcatagtttcatgcttact

SEQ ID NO: 86378 - DNA, 80 bp, synthetic construct
  source 1..80: mol_type = other DNA
tatgtttatataaaagaatagaggatagactagttttctgatgctttcaagaatgtgccccaagctaatcaccaatcata

SEQ ID NO: 86379 - DNA, 80 bp, synthetic construct
  source 1..80: mol_type = other DNA
atatgttgtgttatagttggaggattcacttaatctctacaaagcataacactcatcgatacatttattttcacacaaac

SEQ ID NO: 86380 - DNA, 80 bp, synthetic construct; identical to SEQ ID NO: 15588
  source 1..80: mol_type = other DNA

SEQ ID NO: 86381 - DNA, 80 bp, synthetic construct
  source 1..80: mol_type = other DNA
gtaagttgccttgttttttctctgttgactgaaaggtatagtttaattccatcaacaaaaaattaatagcaaaattttgc

SEQ ID NO: 86382 - DNA, 80 bp, synthetic construct
  source 1..80: mol_type = other DNA
gcccggaccacgtggtgaacgcgtaagttttactgcaacagatctggttatttcttgaaaaaatgcaacataattagaaa

SEQ ID NO: 86383 - DNA, 80 bp, synthetic construct; identical to SEQ ID NO: 15589
  source 1..80: mol_type = other DNA

SEQ ID NO: 86384 - DNA, 80 bp, synthetic construct
  source 1..80: mol_type = other DNA
ctgggttccgaggacctgctggaccaaatggcatcccaggagaaaaggtagataactttagtttctatgttcctaaatgc

SEQ ID NO: 86385 - DNA, 80 bp, synthetic construct
  source 1..80: mol_type = other DNA
tgagaatcctttacttatctgttaattggaaagcatttatctgagcatcgttgcaagagtacagtaaactaaaatgcctg

SEQ ID NO: 86386 - DNA, 80 bp, synthetic construct
  source 1..80: mol_type = other DNA
tccaagctaagataactgattttatgtataaatgtttcagcaacacacgaaccctttttaaaagttcaaatgacgtcctc

SEQ ID NO: 86387 - DNA, 80 bp, synthetic construct; identical to SEQ ID NO: 15590
  source 1..80: mol_type = other DNA

SEQ ID NO: 86388 - DNA, 80 bp, synthetic construct
  source 1..80: mol_type = other DNA
acttaagccgagatagttcaaggagaagagaagatagaacacttgccttagatactttatagacaggaaaaaagatgtgc

SEQ ID NO: 86389 - DNA, 80 bp, synthetic construct
  source 1..80: mol_type = other DNA
cctcccgtatgtacatttttaaaatctcattttaaaaggccagttaaaatggaatgtatatgttggcctatccttgagtg

SEQ ID NO: 86390 - DNA, 80 bp, synthetic construct
  source 1..80: mol_type = other DNA
tattaatgtaattttttcttattagggaagtcaaggagaaagtggtcgaccaggtcctcctgggccatctggtccccgag

SEQ ID NO: 86391 - DNA, 80 bp, synthetic construct; identical to SEQ ID NO: 15591
  source 1..80: mol_type = other DNA

SEQ ID NO: 86392 - DNA, 80 bp, synthetic construct
  source 1..80: mol_type = other DNA
gtggcatgtgcctgtaatcctagctacccaggaggctgaggcaagagaatcactagaacccggggggcagaggctacagt

SEQ ID NO: 86393 - DNA, 80 bp, synthetic construct
  source 1..80: mol_type = other DNA
tatatatgagacaataatatgattagttattgccctttgaggattagtaaataccgaccacttcttctttagggtgctcc

SEQ ID NO: 86394 - DNA, 80 bp, synthetic construct
  source 1..80: mol_type = other DNA
taatctgtattatttctacttccctaactgttcttgtttttagggtcctcctggaaagaatggtgaaactggacctcagg

SEQ ID NO: 86395 - DNA, 80 bp, synthetic construct; identical to SEQ ID NO: 15592
  source 1..80: mol_type = other DNA

SEQ ID NO: 86396 - DNA, 80 bp, synthetic construct
  source 1..80: mol_type = other DNA
cctggtccacaaggattacaagtaagaacttgttatttaaatgtcacggcatatctgactgtcaaatttttttgtgtccc

SEQ ID NO: 86397 - DNA, 80 bp, synthetic construct
  source 1..80: mol_type = other DNA
tggttacacttatttttattataacataaatccatatagccaagtctatcctgccatgctggtcaatacatttttacgtg

SEQ ID NO: 86398 - DNA, 80 bp, synthetic construct
  source 1..80: mol_type = other DNA
ttctataagccatgtttgaggtaattacctaatacaaatatgattctttctagggcttgcctggtacaggtggtcctcca

SEQ ID NO: 86399 - DNA, 80 bp, synthetic construct
  source 1..80: mol_type = other DNA
acaaagacaaattatttaaaagataactattatatagagtttgaattttaccataaaatagagagttcatagtttcaaga

SEQ ID NO: 86400 - DNA, 80 bp, synthetic construct; identical to SEQ ID NO: 15593
  source 1..80: mol_type = other DNA

SEQ ID NO: 86401 - DNA, 80 bp, synthetic construct
  source 1..80: mol_type = other DNA
agaatcaaatacgggcttaaaatttcaaacggaaaaatattgccaatatgttgattctatgtaggaaaactgttttggta

SEQ ID NO: 86402 - DNA, 80 bp, synthetic construct
  source 1..80: mol_type = other DNA
gattgttcacaatataataacctagtggcctgattcaaaatgatgcaagttaaggtgctttgtttttagctttgggttgt

SEQ ID NO: 86403 - DNA, 80 bp, synthetic construct
  source 1..80: mol_type = other DNA
tttaaaaaatgcatttgatttccttctgatcatttattatttctcacttattttcagggtgctgctggtcctcctgggcc

SEQ ID NO: 86404 - DNA, 80 bp, synthetic construct; identical to SEQ ID NO: 15594
  source 1..80: mol_type = other DNA

SEQ ID NO: 86405 - DNA, 80 bp, synthetic construct
  source 1..80: mol_type = other DNA
tactcctcttcttggctgattttcactgaagatactttgaatctgatgacattggcttttatttgacagggtgaaccagg

SEQ ID NO: 86406 - DNA, 80 bp, synthetic construct
  source 1..80: mol_type = other DNA
ctatatctatggctacttgatagatctacagtgactaaagaatgaaaaagcctcaagagtacgataaaggtcacaaacta

SEQ ID NO: 86407 - DNA, 80 bp, synthetic construct
  source 1..80: mol_type = other DNA
tgaacaattgatgctgtacacacagcaaattatacaaacctcaaggacaacatactcagtgaagaaaattcagtcaccaa

SEQ ID NO: 86408 - DNA, 80 bp, synthetic construct; identical to SEQ ID NO: 15595
  source 1..80: mol_type = other DNA

SEQ ID NO: 86409 - DNA, 80 bp, synthetic construct
  source 1..80: mol_type = other DNA
gggagaaaagtgcacagaatttccctgtatattcctttgcagcatcctatgaatctataattcaaactaaaagtcaaaaa

SEQ ID NO: 86410 - DNA, 80 bp, synthetic construct
  source 1..80: mol_type = other DNA
ataaatgcttcgcttttgacagactaagtagataagccgtcattcaggtaaaaagagtgctcaatacttcagttttgtaa

SEQ ID NO: 86411 - DNA, 80 bp, synthetic construct
  source 1..80: mol_type = other DNA
ctacaatggagataaagataaatgaatcaataaactattgctgaatcctattttctcccagagttatccccaaagaggct

SEQ ID NO: 86412 - DNA, 80 bp, synthetic construct
  source 1..80: mol_type = other DNA
aaaaaatatttttatttcctctagggtcctactggtcctattggtcctcctggcccagctggccagcctggagataaggt

SEQ ID NO: 86413 - DNA, 80 bp, synthetic construct; identical to SEQ ID NO: 15596
  source 1..80: mol_type = other DNA

SEQ ID NO: 86414 - DNA, 80 bp, synthetic construct
  source 1..80: mol_type = other DNA
tttgtaattaggtatttcttaagcctatagaatctttgcctgagactccttctagatttaaaagtcttgaccttcaggat

SEQ ID NO: 86415 - DNA, 80 bp, synthetic construct
  source 1..80: mol_type = other DNA
cagtaggaggcagaaggaatcaatggttctggtattttccactcctaattttattgagaagtggcaaagtcttcagaagt

SEQ ID NO: 86416 - DNA, 80 bp, synthetic construct; identical to SEQ ID NO: 15597
  source 1..80: mol_type = other DNA

SEQ ID NO: 86417 - DNA, 80 bp, synthetic construct
  source 1..80: mol_type = other DNA
agctgctcattccctataggattattgtacccctattttgttttactttacccctattgtcgctctttgaaagatggaaa

SEQ ID NO: 86418 - DNA, 80 bp, synthetic construct
  source 1..80: mol_type = other DNA
cttaaatccggtctttctcaaaaaaatttactggtgctgattttcaaatgtttaatccttagagacacttcctccctccc

SEQ ID NO: 86419 - DNA, 80 bp, synthetic construct
  source 1..80: mol_type = other DNA
taataagccaattgtatcataaagagtgtcagctgagagattgctgttgttgttgcatgtagggacagaatggtgaacct

SEQ ID NO: 86420 - DNA, 80 bp, synthetic construct; identical to SEQ ID NO: 15598
  source 1..80: mol_type = other DNA

SEQ ID NO: 86421 - DNA, 80 bp, synthetic construct
  source 1..80: mol_type = other DNA
cctggtggacctgtaagtattgatcctcttaactattattgaaaagcattaattgatatcaacctgtataaaagctgcat

SEQ ID NO: 86422 - DNA, 80 bp, synthetic construct
  source 1..80: mol_type = other DNA
gttctacttttgaaattcaaaaatatattaccatttcacagggtgctgctggcttccctggtgctcgtggtcttcctggt

SEQ ID NO: 86423 - DNA, 80 bp, synthetic construct
  source 1..80: mol_type = other DNA
aaatgcactttttattataaatattcaaatttcaaacaattatttgtagggtaacccaggacccccaggtcccagcggtt

SEQ ID NO: 86424 - DNA, 80 bp, synthetic construct
  source 1..80: mol_type = other DNA
ctactattttgatttttatcacaaatcgattagagaaaaacactgtcacataaagatgagctaagtcttcattatctgta

SEQ ID NO: 86425 - DNA, 80 bp, synthetic construct; identical to SEQ ID NO: 15599
  source 1..80: mol_type = other DNA

SEQ ID NO: 86426 - DNA, 80 bp, synthetic construct
  source 1..80: mol_type = other DNA
tctcaaacacctcttttaggaaacttgtgaatattcttcaatttgttgactgtcagttttgaagggggaaatagtgttag

SEQ ID NO: 86427 - DNA, 80 bp, synthetic construct
  source 1..80: mol_type = other DNA
tattagggctcgtattatggcactttaagtacttctttcaacaaaatgttatgtaatattgtcataaaattaatatttca

SEQ ID NO: 86428 - DNA, 80 bp, synthetic construct; identical to SEQ ID NO: 15600
  source 1..80: mol_type = other DNA

SEQ ID NO: 86429 - DNA, 80 bp, synthetic construct
  source 1..80: mol_type = other DNA
ccattttaattgatttcttaagttgaaacaaaatgtttttcattcctttgtatacagggtgaaagtgggaaaccaggagc

SEQ ID NO: 86430 - DNA, 80 bp, synthetic construct
  source 1..80: mol_type = other DNA
gagatgtgagtagcagtttttattcaaccagccaggtagaatttgataatttatttcagcaaaggtgaaattgagcttta

SEQ ID NO: 86431 - DNA, 80 bp, synthetic construct
  source 1..80: mol_type = other DNA
ggaaaaaagttagtggggagaaccacaattgacatgttttctgagtgaaaatattctacggttatctatggttagtcttt

SEQ ID NO: 86432 - DNA, 80 bp, synthetic construct
  source 1..80: mol_type = other DNA
tctttttggatatcatttttctaatcacctctcctccatgaatacactaactatctgtctggacattgtgaccctttgaa

SEQ ID NO: 86433 - DNA, 80 bp, synthetic construct; identical to SEQ ID NO: 15601
  source 1..80: mol_type = other DNA

SEQ ID NO: 86434 - DNA, 80 bp, synthetic construct
  source 1..80: mol_type = other DNA
gtgagttcccaaaagcagcatctgtcttgtttgtctatttccttcaataaagacatttgtaggtagaaggtagaatgtca

SEQ ID NO: 86435 - DNA, 80 bp, synthetic construct
  source 1..80: mol_type = other DNA
tgcccaacttttctgtctagatcccctgagaaagctataaacagggctttagcactttgaaggcaaaaacaatattaact

SEQ ID NO: 86436 - DNA, 80 bp, synthetic construct; identical to SEQ ID NO: 15602
  source 1..80: mol_type = other DNA

SEQ ID NO: 86437 - DNA, 80 bp, synthetic construct
  source 1..80: mol_type = other DNA
caaatataaactttcctttaatgacaatgatatggaaagcagttcaggatctaaaagttctttggagccaaggatagaaa

SEQ ID NO: 86438 - DNA, 80 bp, synthetic construct
  source 1..80: mol_type = other DNA
aatatgtatgtgtgtatatgacttcaattcaaaatatgtttctaaagggtcctcaaggcccacgtggtgacaaaggtgaa

SEQ ID NO: 86439 - DNA, 80 bp, synthetic construct
  source 1..80: mol_type = other DNA
tatgtactagaagagatgagaaatggatttgaaggctaatttgaaacaacaatcagcatgacacaatgggaagattaaag

SEQ ID NO: 86440 - DNA, 80 bp, synthetic construct; identical to SEQ ID NO: 15603
  source 1..80: mol_type = other DNA

SEQ ID NO: 86441 - DNA, 80 bp, synthetic construct
  source 1..80: mol_type = other DNA
aggatctgaggtaagacatcacttatacgtatgtgtatttaatttgctacaatcttccaattttcagaaacacagcgcat

SEQ ID NO: 86442 - DNA, 80 bp, synthetic construct
  source 1..80: mol_type = other DNA
ataatgacatctgcccaattaaccaaataaaccctgtccacattgctatcccactagagatctcagaattacaacattca

SEQ ID NO: 86443 - DNA, 80 bp, synthetic construct
  source 1..80: mol_type = other DNA
caatattggaattgtagctcacaggtgtttgcttacatcagtcatccagaaggaagaatgatagagaaaacttgtgctct

SEQ ID NO: 86444 - DNA, 80 bp, synthetic construct; identical to SEQ ID NO: 15604
  source 1..80: mol_type = other DNA

SEQ ID NO: 86445 - DNA, 80 bp, synthetic construct
  source 1..80: mol_type = other DNA
atgagattatgacttcactcaagtctgttaatggacaaatagaaagcctcattagtcctgatggttctcgtaaaaacccc

SEQ ID NO: 86446 - DNA, 80 bp, synthetic construct
  source 1..80: mol_type = other DNA
ataggattacagagaaagctgcttagattagaatgggaacgaaaaaacatctactttcaatggaaagctgaaatagtact

SEQ ID NO: 86447 - DNA, 80 bp, synthetic construct
  source 1..80: mol_type = other DNA
atatctttttttctcaggattaaatatacataatttgatgcagacaattataatctgattattgtaatatttacttattg

SEQ ID NO: 86448 - DNA, 80 bp, synthetic construct; identical to SEQ ID NO: 15605
  source 1..80: mol_type = other DNA

SEQ ID NO: 86449 - DNA, 80 bp, synthetic construct
  source 1..80: mol_type = other DNA
ggtcttagcttagtgtatcatccttattagaaaccaagatgttgcattttatttcagtgctttctgtagtcatagctaac

SEQ ID NO: 86450 - DNA, 80 bp, synthetic construct
  source 1..80: mol_type = other DNA
actggattttataaccaattcccattcttttttgtgactattcaggagaatactgggttgaccctaaccaaggatgcaaa

SEQ ID NO: 86451 - DNA, 80 bp, synthetic construct
  source 1..80: mol_type = other DNA
tggtttggagagtccatggatggtggttttcaggtaggaaaggatatacctttttttaaataagtcacctctatatcctt

SEQ ID NO: 86452 - DNA, 80 bp, synthetic construct
  source 1..80: mol_type = other DNA
acacatactacatgaatccctcgcgtgcagttacaactgaaatgtttgatctgttttatttgttccctattacagtttag

SEQ ID NO: 86453 - DNA, 80 bp, synthetic construct; identical to SEQ ID NO: 15606
  source 1..80: mol_type = other DNA

SEQ ID NO: 86454 - DNA, 80 bp, synthetic construct
  source 1..80: mol_type = other DNA
attacatacattgcatctactgattcattgcagggaatgttaaatgcaacaaaatggatcttagcctccagatgaaaacc

SEQ ID NO: 86455 - DNA, 80 bp, synthetic construct
  source 1..80: mol_type = other DNA
attgttatttgtgaacaaagggaaaactcacttctaatattagcgaatttcattgtgagagacctatcctctttttaata

SEQ ID NO: 86456 - DNA, 80 bp, synthetic construct
  source 1..80: mol_type = other DNA
gtttatcaactaagaagattacagctttgaagtagagcaggtctcatatacatgaataataacatggcacgatgaatgct

SEQ ID NO: 86457 - DNA, 80 bp, synthetic construct; identical to SEQ ID NO: 15607
  source 1..80: mol_type = other DNA

SEQ ID NO: 86458 - DNA, 80 bp, synthetic construct
  source 1..80: mol_type = other DNA
gtttggaaacagtataatttgacaaagaaaaatgatacttctctttttttgctgttccaccaaatacaattcaaatgctt

SEQ ID NO: 86459 - DNA, 80 bp, synthetic construct
  source 1..80: mol_type = other DNA
ctttctgaaatagtcaaatacgaaattagaaaagccctccctattttaactacctcaactggtcagaaacacagattgta

SEQ ID NO: 86460 - DNA, 80 bp, synthetic construct; identical to SEQ ID NO: 15608
  source 1..80: mol_type = other DNA

SEQ ID NO: 86461 - DNA, 80 bp, synthetic construct
  source 1..80: mol_type = other DNA
aaaccaaattatggggctgcttttgtcacactagcatagagaatgtgttgaaatttaactttgtaagcttgtatgtggtt

SEQ ID NO: 86462 - DNA, 80 bp, synthetic construct; identical to SEQ ID NO: 15609
  source 1..80: mol_type = other DNA

SEQ ID NO: 86463 - DNA, 80 bp, synthetic construct
  source 1..80: mol_type = other DNA
gtgacgtcccgcgtgtaccaggtgtcgcgcacgtcgggcggggccgggggcctggggtcgctgcgggccagccggctggg

SEQ ID NO: 86464 - DNA, 80 bp, synthetic construct
  source 1..80: mol_type = other DNA
ctggagcagcagaacgcggcgctcgccgccgaagtgaaccggctcaagggccgcgagccgacgcgagtggccgagctcta

SEQ ID NO: 86465 - DNA, 80 bp, synthetic construct
  source 1..80: mol_type = other DNA
ggaggctaggcctggggtctggggtcccgctgtcagcacctgccttctcccggggcccgggaccctctcctgccccatgt

SEQ ID NO: 86466 - DNA, 80 bp, synthetic construct; identical to SEQ ID NO: 15610
  source 1..80: mol_type = other DNA

SEQ ID NO: 86467 - DNA, 80 bp, synthetic construct
  source 1..80: mol_type = other DNA
gactgtgtctttttacaaggtgaatggacaggctggagaaaaagggagtaggtgggggtcacagctctcagagagcttgg

SEQ ID NO: 86468 - DNA, 80 bp, synthetic construct
  source 1..80: mol_type = other DNA
gaaacacagaggtggataaaatagacacagtttctaaccccagggaggtcacacagtctggtggggacatagacttcaag

SEQ ID NO: 86469 - DNA, 80 bp, synthetic construct
  source 1..80: mol_type = other DNA
ccagctttatcacccgcaactgtctgtctttctgtctgtcccacccaggctgcaggaggagattcagttgaaggaagaag

SEQ ID NO: 86470 - DNA, 80 bp, synthetic construct; identical to SEQ ID NO: 15611
  source 1..80: mol_type = other DNA

SEQ ID NO: 86471 - DNA, 80 bp, synthetic construct
  source 1..80: mol_type = other DNA
agcttcaggaacagcaggtccaggtggagatggacatgtctaagccagacctcactgccgccctcagggacatccgggct

SEQ ID NO: 86472 - DNA, 80 bp, synthetic construct
  source 1..80: mol_type = other DNA
catgctcccttgctcatccctacccgtgccctgcatccttctcatttttgggcccctttctctgcccttaggtgtcagac

SEQ ID NO: 86473 - DNA, 80 bp, synthetic construct; identical to SEQ ID NO: 15612
  source 1..80: mol_type = other DNA

SEQ ID NO: 86474 - DNA, 80 bp, synthetic construct
  source 1..80: mol_type = other DNA
cctgggcatctacctatgtggggactgtgaggctgaatgcaatgttcctttgtatctattttattctgagtgttcacata

SEQ ID NO: 86475 - DNA, 80 bp, synthetic construct
  source 1..80: mol_type = other DNA
gaattggaggaccgatttgccagtgaggccagtggctaccaggacaacattgcgcgcctggaggaggaaatccggcacct

SEQ ID NO: 86476 - DNA, 80 bp, synthetic construct; identical to SEQ ID NO: 15613
  source 1..80: mol_type = other DNA

SEQ ID NO: 86477 - DNA, 80 bp, synthetic construct
  source 1..80: mol_type = other DNA
agtagagacggggtttcactatgttgggcagctggtctcgaactcctgacctcaggtgatctgcctacctcagcctccca

SEQ ID NO: 86478 - DNA, 80 bp, synthetic construct
  source 1..80: mol_type = other DNA
tatccaccttcagaattaagaaccagcagcaaaaaaaaccatattcagcaaccaataataaaatattactgccagtcaag

SEQ ID NO: 86479 - DNA, 80 bp, synthetic construct
  source 1..80: mol_type = other DNA
aggtaaagagatgcatacagaaggcatgagtttgcacacacatgcacacatgtcagcatatgcacatgttcggaggaaaa

SEQ ID NO: 86480 - DNA, 80 bp, synthetic construct
  source 1..80: mol_type = other DNA
tgcagtggtgtgatctcagctcactgcaacctctgcctcccaggctcaagcggttctcctgtctcagcctccctagtagc

SEQ ID NO: 86481 - DNA, 80 bp, synthetic construct; identical to SEQ ID NO: 15614
  source 1..80: mol_type = other DNA

SEQ ID NO: 86482 - DNA, 80 bp, synthetic construct
  source 1..80: mol_type = other DNA
gattttgtaaaatcacgtctacatatgatggcctttgaaggtagctaaaggcatgttgcattttcccagcattaggccta

SEQ ID NO: 86483 - DNA, 80 bp, synthetic construct
  source 1..80: mol_type = other DNA
gttcacagttgaaataatgatccttccagaagagactattcctgggacagctctagctggccttcgaccccattccttga

SEQ ID NO: 86484 - DNA, 80 bp, synthetic construct; identical to SEQ ID NO: 15615
  source 1..80: mol_type = other DNA

SEQ ID NO: 86485 - DNA, 80 bp, synthetic construct
  source 1..80: mol_type = other DNA
ggttcttaactcttaggaggttttgtctcttcccttttaggatcaatctccccatccagacctactctgccctcaacttc

SEQ ID NO: 86486 - DNA, 80 bp, synthetic construct
  source 1..80: mol_type = other DNA
tagaggtggatgaggcaacttatgacagagagagctttttatgtgattatattgtattgtatttaccatgtcccctgcac

SEQ ID NO: 86487 - DNA, 80 bp, synthetic construct
  source 1..80: mol_type = other DNA
cttggctgcttgtcgaacacctccagtttgctggagcaagatgttggatgcacgtttggaaaaaaatgccaaatcttagc

SEQ ID NO: 86488 - DNA, 80 bp, synthetic construct
  source 1..80: mol_type = other DNA
agatcaaaccttttctatcttcgatgtacatttccatcaggaaaaaaaacacgctgcgctccagcgagtcacaacattca

SEQ ID NO: 86489 - DNA, 80 bp, synthetic construct; identical to SEQ ID NO: 15616
  source 1..80: mol_type = other DNA

SEQ ID NO: 86490 - DNA, 80 bp, synthetic construct
  source 1..80: mol_type = other DNA
ggtgcaatctcggctcaccgcaacctccgcctcccaggttcaagcaattctcctgcctcagcctcctgagtagctgggat

SEQ ID NO: 86491 - DNA, 80 bp, synthetic construct
  source 1..80: mol_type = other DNA
ctgaaatcttaaagggagataggtactgtaaggtcctctaaagagtgtcttgagactgggctttggggttctatcttgaa

SEQ ID NO: 86492 - DNA, 80 bp, synthetic construct; identical to SEQ ID NO: 15617
  source 1..80: mol_type = other DNA

SEQ ID NO: 86493 - DNA, 80 bp, synthetic construct
  source 1..80: mol_type = other DNA
caaaggggttctgaggtccataccaagaagacggtgatgatcaagaccatcgagacacgggatggggaggtaagtggtct

SEQ ID NO: 86494 - DNA, 80 bp, synthetic construct
  source 1..80: mol_type = other DNA
catggttggactgggcttctcttcctccccaggtcgtcagtgaggccacacagcagcagcatgaagtgctctaaagacag

SEQ ID NO: 86495 - DNA, 80 bp, synthetic construct
  source 1..80: mol_type = other DNA
cccatccctgcctggtcacagggcatgccccggccacctctgcggaccccagctgtgagccttggctgttggcagtgagt

SEQ ID NO: 86496 - DNA, 80 bp, synthetic construct; identical to SEQ ID NO: 15618
  source 1..80: mol_type = other DNA

SEQ ID NO: 86497 - DNA, 80 bp, synthetic construct
  source 1..80: mol_type = other DNA
cggtctcaggctggtgggaggggcgcccacctccccacgccctcccctcccctgctgcaggggctctggagagaaacaat

SEQ ID NO: 86498 - DNA, 80 bp, synthetic construct; identical to SEQ ID NO: 15619
  source 1..80: mol_type = other DNA

SEQ ID NO: 86499 - DNA, 80 bp, synthetic construct
  source 1..80: mol_type = other DNA
gaccgctctgttaggttgcatggagaatgcgatgcattgtgcaaagattaactgtgattgtgtctactacaggagaaata

SEQ ID NO: 86500 - DNA, 80 bp, synthetic construct
  source 1..80: mol_type = other DNA
agtgcgttaaagtaaaattttaagaccaaaagcacatgaatgcactcagttatgataatgtgagatgatacagtattttc

SEQ ID NO: 86501 - DNA, 80 bp, synthetic construct
  source 1..80: mol_type = other DNA
ttttccctcaatgttataaattataaatgcttgtggtaaaatgaaaacatggaaacacacaatgaataaatatttcattt

SEQ ID NO: 86502 - DNA, 80 bp, synthetic construct; identical to SEQ ID NO: 15620
  source 1..80: mol_type = other DNA

SEQ ID NO: 86503 - DNA, 80 bp, synthetic construct
  source 1..80: mol_type = other DNA
gtcctcaattatggtacattgtatcacagtaatggatcatacatcatttaattacttccctgtcatggaacatttagttt

SEQ ID NO: 86504 - DNA, 80 bp, synthetic construct
  source 1..80: mol_type = other DNA
tttcacctctggctttctgagcctctcattccctattggttaactcatgtccttggtgcctgggagttttccaattggcc

SEQ ID NO: 86505 - DNA, 80 bp, synthetic construct
  source 1..80: mol_type = other DNA
ccaaacagttgctgccttctggacagtcacttgttccacctgctgttgacctttctagttctatttatctctggagattt

SEQ ID NO: 86506 - DNA, 80 bp, synthetic construct; identical to SEQ ID NO: 15621
  source 1..80: mol_type = other DNA

SEQ ID NO: 86507 - DNA, 80 bp, synthetic construct
  source 1..80: mol_type = other DNA
agaaaatgtattgaaaagtgaaggcttctatacttttcccctactagcctgttactcctgtgactgattcatgagggatc

SEQ ID NO: 86508 - DNA, 80 bp, synthetic construct
  source 1..80: mol_type = other DNA
aagtaaacagaaaagatgtggctagcagaaactccacaattctaacctctcagctatgcccagattttctgtagggatac

SEQ ID NO: 86509 - DNA, 80 bp, synthetic construct
  source 1..80: mol_type = other DNA
atgctccaaatccatgacacagtaaaattcctctataaaacaagatttagggtgtgttcttttaaattaaagtgctctgt

SEQ ID NO: 86510 - DNA, 80 bp, synthetic construct; identical to SEQ ID NO: 15622
  source 1..80: mol_type = other DNA

SEQ ID NO: 86511 - DNA, 80 bp, synthetic construct
  source 1..80: mol_type = other DNA
agagcagggctgggaactacctcttacgtgttatcttccaagtgacattatcagttcacagcacaatataggcattgcct

SEQ ID NO: 86512 - DNA, 80 bp, synthetic construct
  source 1..80: mol_type = other DNA
atggaaaaagctcgtagatgtatgccactttctttgctttgtggtttctcaagatattttttgaagcaaggcctgactta

SEQ ID NO: 86513 - DNA, 80 bp, synthetic construct
  source 1..80: mol_type = other DNA
ttaaaaaaaaaaaattcactgcagtgtttgaacctggcaatgatgaagtgacagtcgcaaacataattttcacattggct

SEQ ID NO: 86514 - DNA, 80 bp, synthetic construct; identical to SEQ ID NO: 15623
  source 1..80: mol_type = other DNA

SEQ ID NO: 86515 - DNA, 80 bp, synthetic construct
  source 1..80: mol_type = other DNA
gtcttctgaggaaaaacaattcagtgcagaatctaacatacaccatgtctatcatgtaaaatttatgccacagaaaatta

SEQ ID NO: 86516 - DNA, 80 bp, synthetic construct
  source 1..80: mol_type = other DNA
caggagttcaagaccagcctggccaacatggtgaaaccctttctctgctaaaaatacaaaaattaaccaggcgtggtggt

SEQ ID NO: 86517 - DNA, 80 bp, synthetic construct
  source 1..80: mol_type = other DNA
gagttgtataggcatgcaattgtgaacacctttcttggtccttagtgtcctacatgaaagaaaagaaacacacacacaaa

SEQ ID NO: 86518 - DNA, 80 bp, synthetic construct; identical to SEQ ID NO: 15624
  source 1..80: mol_type = other DNA

SEQ ID NO: 86519 - DNA, 80 bp, synthetic construct
  source 1..80: mol_type = other DNA
tttagaatttatcctctaaaaccctatagaaagctcttaggcagaatggcatgatcatatctgctctttgatggcccttg

SEQ ID NO: 86520 - DNA, 80 bp, synthetic construct
  source 1..80: mol_type = other DNA
ggattgggagtagcagaagcagaagttcactcactagtgtcctgaagttctttcacatcatctgaagctttttaaaaaca

SEQ ID NO: 86521 - DNA, 80 bp, synthetic construct
  source 1..80: mol_type = other DNA
ttcatcttgcactttctcatagaagcacagtccttctagtctctgttttaaaaggctacatatgactgcactgggaaggc

SEQ ID NO: 86522 - DNA, 80 bp, synthetic construct; identical to SEQ ID NO: 15625
  source 1..80: mol_type = other DNA

SEQ ID NO: 86523 - DNA, 80 bp, synthetic construct
  source 1..80: mol_type = other DNA
agaagggaaagcattttattttggagatgatactaaaggggctgatcagagcaaagtcagttgtcaagacttcaatctgg

SEQ ID NO: 86524 - DNA, 80 bp, synthetic construct
  source 1..80: mol_type = other DNA
tcttgctgcttttcatttgctgaagaagcaccagccatttcttcgggaaactctttatgattttgcctcctcgagaattt

SEQ ID NO: 86525 - DNA, 80 bp, synthetic construct
  source 1..80: mol_type = other DNA
tgggaaaggtgaataagagcatcatggcaagatgtcagcagtaaagcagagtggagactgaagctaaattgttcccaact

SEQ ID NO: 86526 - DNA, 80 bp, synthetic construct; identical to SEQ ID NO: 15626
  source 1..80: mol_type = other DNA

SEQ ID NO: 86527 - DNA, 80 bp, synthetic construct
  source 1..80: mol_type = other DNA
gcccattttaagaagcagatgttctgcttttcatccaatttgaaccttacagtttcacagtgtttcaaaccaggcaatcc

SEQ ID NO: 86528 - DNA, 80 bp, synthetic construct
  source 1..80: mol_type = other DNA
caggagtgccttttaggtggaccgctctgtatgactctcatgcttcaaaactattttttattcaagtgacttacaatggc

SEQ ID NO: 86529 - DNA, 80 bp, synthetic construct
  source 1..80: mol_type = other DNA
aaactctacattttaaaaaatgtataacaggaatctaaggaaggggtcttacttctctgattcagggagtgcgaaatccc

SEQ ID NO: 86530 - DNA, 80 bp, synthetic construct; identical to SEQ ID NO: 15627
  source 1..80: mol_type = other DNA

SEQ ID NO: 86531 - DNA, 80 bp, synthetic construct
  source 1..80: mol_type = other DNA
tagtttggctcatttctacatttgttaaaattgtaatcttaaaatattaaaaaaataactttacaaacacacagatatga

SEQ ID NO: 86532 - DNA, 80 bp, synthetic construct
  source 1..80: mol_type = other DNA
cccaattctaattacaccattcttgttgttaacacagagcactgcttctaataaaagcatggcatagttctacagtttca

SEQ ID NO: 86533 - DNA, 80 bp, synthetic construct
  source 1..80: mol_type = other DNA
aagagagacagatttttaaaatatttggattctttagcccatatggaaattaaaaaaaaaaaaaaaactggagagagaaa

SEQ ID NO: 86534 - DNA, 80 bp, synthetic construct; identical to SEQ ID NO: 15628
  source 1..80: mol_type = other DNA

SEQ ID NO: 86535 - DNA, 80 bp, synthetic construct
  source 1..80: mol_type = other DNA
agcaaggtctctacaattttccattaggttgtgcttcaaatagtctataataaggacttgaattaattacattttattgc

SEQ ID NO: 86536 - DNA, 80 bp, synthetic construct
  source 1..80: mol_type = other DNA
gaccaaagagattccatccaaataatgagagaaaaacccccacaaatagcatcttctgctttaaaaaattcttggtttgt

SEQ ID NO: 86537 - DNA, 80 bp, synthetic construct
  source 1..80: mol_type = other DNA
cccagccaccgatcctcttccttcatagttatatgtcaggacatagtcttgggcatgcttgtgattttcatcttgattac

SEQ ID NO: 86538 - DNA, 80 bp, synthetic construct; identical to SEQ ID NO: 15629
  source 1..80: mol_type = other DNA

SEQ ID NO: 86539 - DNA, 80 bp, synthetic construct
  source 1..80: mol_type = other DNA
gtttctaaggtacaagttgtcagatgggaaatattagcacaaagccatgagacagtaatttaaatctcatcacacattat

SEQ ID NO: 86540 - DNA, 80 bp, synthetic construct
  source 1..80: mol_type = other DNA
tataaagtttaaagaaaattaaaatagatttgtaggccacttaggaaaactcacttcaccaagacggggctgagtaaaac

SEQ ID NO: 86541 - DNA, 80 bp, synthetic construct
  source 1..80: mol_type = other DNA
acagtttgggttgtgaagccattcgcagaatactgaaatgaaaacaatttgcattagggataatacagagaggaacacaa

SEQ ID NO: 86542 - DNA, 80 bp, synthetic construct; identical to SEQ ID NO: 15630
  source 1..80: mol_type = other DNA

SEQ ID NO: 86543 - DNA, 80 bp, synthetic construct
  source 1..80: mol_type = other DNA
gcctcgccaacatggtggaactccgtctctactaaaaatacaaaaatcagctgggcatggtagtaggcacctgtaatccc

SEQ ID NO: 86544 - DNA, 80 bp, synthetic construct
  source 1..80: mol_type = other DNA
tcttcaatccttcctacatctcacacctcaaaataaacactgttgtctcacatatacttactctgcttagtttaaattaa

SEQ ID NO: 86545 - DNA, 80 bp, synthetic construct
  source 1..80: mol_type = other DNA
ataaactaggcagggaaaataacaagaacaccaaagctttggccactagttatttatgttgcatttttggaaactctaat

SEQ ID NO: 86546 - DNA, 80 bp, synthetic construct; identical to SEQ ID NO: 15631
  source 1..80: mol_type = other DNA

SEQ ID NO: 86547 - DNA, 80 bp, synthetic construct
  source 1..80: mol_type = other DNA
tgaagtaaaaataacaatgacatactcaagcatttttactattaagtaacacactacggccaaatttaaataccatatat

SEQ ID NO: 86548 - DNA, 80 bp, synthetic construct
  source 1..80: mol_type = other DNA
acttaccactttgtcatctccaggagcttctgtgtttgatacaattaggttctgctgggctaaatcatcaggaattactt

SEQ ID NO: 86549 - DNA, 80 bp, synthetic construct
  source 1..80: mol_type = other DNA
gaagacagctttcctggattgcttgtgtcaaagcagtatacaatagaaaagtttaaatagatatgctatttaaaagttta

SEQ ID NO: 86550 - DNA, 80 bp, synthetic construct; identical to SEQ ID NO: 15632
  source 1..80: mol_type = other DNA

SEQ ID NO: 86551 - DNA, 80 bp, synthetic construct
  source 1..80: mol_type = other DNA
gggaggctgaggcataagaatcactggaatccagaggcagagtctgcagtgagcggagatcacactactgcactccagcc

SEQ ID NO: 86552 - DNA, 80 bp, synthetic construct
  source 1..80: mol_type = other DNA
ttggatctacacgatgtgtgcagtcattttcggtaatgcagtcacacagtgtaacatccaatgaagtgacactagacatg

SEQ ID NO: 86553 - DNA, 80 bp, synthetic construct
  source 1..80: mol_type = other DNA
tagttatattttcctagaaacagatattcctgatgggatggcatagctgctagaagattctaaatgtgaatggctagagt

SEQ ID NO: 86554 - DNA, 80 bp, synthetic construct
  source 1..80: mol_type = other DNA
catatcttgaaaatatttaattaaaccagtgagtgtacattttcttttacacatgcttcatcgaagtaatagtctgaaat

SEQ ID NO: 86555 - DNA, 80 bp, synthetic construct; identical to SEQ ID NO: 15633
  source 1..80: mol_type = other DNA

SEQ ID NO: 86556 - DNA, 80 bp, synthetic construct
  source 1..80: mol_type = other DNA
ctaaaaaaaatttagaagccaatacaatcttggttttggagactagatatactactactctaaatgcagataccaggtcc

SEQ ID NO: 86557 - DNA, 80 bp, synthetic construct
  source 1..80: mol_type = other DNA
atttgaatgcttgggtaaaaacacattgaattaagtccatcttaagagaagccatggttaacctgttaagtctattttgt

SEQ ID NO: 86558 - DNA, 80 bp, synthetic construct; identical to SEQ ID NO: 15634
  source 1..80: mol_type = other DNA

SEQ ID NO: 86559 - DNA, 80 bp, synthetic construct
  source 1..80: mol_type = other DNA
acaccaaataagtagaaaagaaaaaaatctaagaataaagttaattcttcctccccaccccaaaataaactgataacccc

SEQ ID NO: 86560 - DNA, 80 bp, synthetic construct
  source 1..80: mol_type = other DNA
cctgttctccctttacgttccctcataacctttcttttctaatttgtcataacaggaaattgagggatattcactgaaag

SEQ ID NO: 86561 - DNA, 80 bp, synthetic construct
  source 1..80: mol_type = other DNA
agtggtgataatgtagacaggttgccttcatttttgccatacttatcactgtagatccttctgggctaaagacaaaagta

SEQ ID NO: 86562 - DNA, 80 bp, synthetic construct; identical to SEQ ID NO: 15635
  source 1..80: mol_type = other DNA

SEQ ID NO: 86563 - DNA, 80 bp, synthetic construct
  source 1..80: mol_type = other DNA
tggagagccaaccagtaacaaatgaggactcccttatgacccaggaaactataaagaaatctatgccagtgagaggtaca

SEQ ID NO: 86564 - DNA, 80 bp, synthetic construct
  source 1..80: mol_type = other DNA
attagagacacactagagagacctactcccaacacacaaaaactgagaaactttcattggtgtttcccacatggtgaatt

SEQ ID NO: 86565 - DNA, 80 bp, synthetic construct
  source 1..80: mol_type = other DNA
tggataggctcatcaggatcaaccgcaacaatctccgcagatgacatggtgggtttgcagatgatcactgtctttttagg

SEQ ID NO: 86566 - DNA, 80 bp, synthetic construct
  source 1..80: mol_type = other DNA
cctataatgtagaagttacaatgacaagcagtcacaagctatgtcctcagggaatgttacaagaaaaatagtattacttt

SEQ ID NO: 86567 - DNA, 80 bp, synthetic construct; identical to SEQ ID NO: 15636
  source 1..80: mol_type = other DNA

SEQ ID NO: 86568 - DNA, 80 bp, synthetic construct
  source 1..80: mol_type = other DNA
agtacatgggaatattcaaagggcagaagactccaggagtagaaaattacttgaaaactgaaataatcactgtgggttgt

SEQ ID NO: 86569 - DNA, 80 bp, synthetic construct
  source 1..80: mol_type = other DNA
atctctactaaaaatacaaaattagccaggcatggtggcacatgcctataatatcagctactcgggaggttgaggcaaga

SEQ ID NO: 86570 - DNA, 80 bp, synthetic construct; identical to SEQ ID NO: 15637
  source 1..80: mol_type = other DNA

SEQ ID NO: 86571 - DNA, 80 bp, synthetic construct
  source 1..80: mol_type = other DNA
ctgcctggggctgtgtcttatatgaagctgccaagctcgggaagatctccgagcacatccctgaagtcacaacctcagcc

SEQ ID NO: 86572 - DNA, 80 bp, synthetic construct
  source 1..80: mol_type = other DNA
ggagagagggaaaaaacaaaaacagaaagcaaagcaaacacctctcatttaatataagcctgcaaactaaaattcccaaa

SEQ ID NO: 86573 - DNA, 80 bp, synthetic construct
  source 1..80: mol_type = other DNA
gtagaaaataaacagcaacatttacctaccagggattctaaaaaagagaatagacagaatggcagagaagcaatagttaa

SEQ ID NO: 86574 - DNA, 80 bp, synthetic construct
  source 1..80: mol_type = other DNA
taaatatattaactacaaaaggacaatcgttaatcgacagaacaagaagcatcagcaagaagagataccagaagataatg

SEQ ID NO: 86575 - DNA, 80 bp, synthetic construct; identical to SEQ ID NO: 15638
  source 1..80: mol_type = other DNA

SEQ ID NO: 86576 - DNA, 80 bp, synthetic construct
  source 1..80: mol_type = other DNA
tctctgaaaattgggactgctggttgtcttgaacatttgtttccctttgagtccacacacacaattgagagcacatgcct

SEQ ID NO: 86577 - DNA, 80 bp, synthetic construct
  source 1..80: mol_type = other DNA
gtcatagaagaacatttaagacctcagatatctaatccactgtgtttcatagctgtttttcatatgctgatgagttatac

SEQ ID NO: 86578 - DNA, 80 bp, synthetic construct
  source 1..80: mol_type = other DNA
tcatgctttatgtgcatgatgctcttcagtcaaatgttttaaaatagttgcaagtaaccccattctaacagctggaataa

SEQ ID NO: 86579 - DNA, 80 bp, synthetic construct; identical to SEQ ID NO: 15639
  source 1..80: mol_type = other DNA

SEQ ID NO: 86580 - DNA, 80 bp, synthetic construct
  source 1..80: mol_type = other DNA
catttcattcaattcacaaagtaaacacatgtggaattactgattcacagttctctcacacagagtaacacaatgactcc

SEQ ID NO: 86581 - DNA, 80 bp, synthetic construct
  source 1..80: mol_type = other DNA
ggcaaaatttctaatttcagacagcaatttttatctcaactgtcaataaactatttccaagtgccgttgagtttcatgtt

SEQ ID NO: 86582 - DNA, 80 bp, synthetic construct; identical to SEQ ID NO: 15640
  source 1..80: mol_type = other DNA

SEQ ID NO: 86583 - DNA, 80 bp, synthetic construct
  source 1..80: mol_type = other DNA
gtctcataaataatcatcatactcatatttctctcaattttatagaatgcacagaacataattttacattttatatgatt

SEQ ID NO: 86584 - DNA, 80 bp, synthetic construct
  source 1..80: mol_type = other DNA
ggactgcactgtgtaagtatgttttccaggactgcactatgtaagtatgttctcactttcctacaaagtgaacactttaa

SEQ ID NO: 86585 - DNA, 80 bp, synthetic construct
  source 1..80: mol_type = other DNA
tctcctgcctcagcctcccgagtagctcggattacaggtgcatgccactacacccagctaatttttaatatttttggtag

SEQ ID NO: 86586 - DNA, 80 bp, synthetic construct
  source 1..80: mol_type = other DNA
aactttaataaattatggtctcaagtgtttctaagagtaaattattttataattacatctaaaactgagaaggctattag

SEQ ID NO: 86587 - DNA, 80 bp, synthetic construct; identical to SEQ ID NO: 15641
  source 1..80: mol_type = other DNA

SEQ ID NO: 86588 - DNA, 80 bp, synthetic construct
  source 1..80: mol_type = other DNA
atagaatggtaagtaccttatgccactgctacttcttgtttctgggtcatatgctttatatccattgcttgttgttccca

SEQ ID NO: 86589 - DNA, 80 bp, synthetic construct
  source 1..80: mol_type = other DNA
cttctgcattttctttcatgcgaacagtctgtattggagggttacactcagggccctcatcctgatcttctacattaaca

SEQ ID NO: 86590 - DNA, 80 bp, synthetic construct
  source 1..80: mol_type = other DNA
tggcaatgctaacgagtatatataatgttaaatttggaaatatgttaagtgtcatgttgggaataaccacgagaatatga

SEQ ID NO: 86591 - DNA, 80 bp, synthetic construct
  source 1..80: mol_type = other DNA
ggttgttcaaaagtgtgtagcacatccccctttgctctgtctctcctgttgccatgtgaagatgggcttgcttccccttt

SEQ ID NO: 86592 - DNA, 80 bp, synthetic construct; identical to SEQ ID NO: 15642
  source 1..80: mol_type = other DNA

SEQ ID NO: 86593 - DNA, 80 bp, synthetic construct
  source 1..80: mol_type = other DNA
cttgtcttaccctcctaagatgaataaaattatttgtacctggtatgaggaagagaaaaaaatgggtaaatttttttaaa

SEQ ID NO: 86594 - DNA, 80 bp, synthetic construct
  source 1..80: mol_type = other DNA
tagtgaaaccatgccctagaagacagaaattttttcaggtcttggacttcacacaaatttccttctgagaataccaagga

SEQ ID NO: 86595 - DNA, 80 bp, synthetic construct
  source 1..80: mol_type = other DNA
aaagaaaacggcatagacccactgtaaaaccatgttctggttaaagatgcagcagaaataagtctataaatttgtccaag

SEQ ID NO: 86596 - DNA, 80 bp, synthetic construct; identical to SEQ ID NO: 15643
  source 1..80: mol_type = other DNA

SEQ ID NO: 86597 - DNA, 80 bp, synthetic construct
  source 1..80: mol_type = other DNA
aatatattctttccattgtatatgaagaacagagcatttgcatttacttatatacctattttattctacatttatcagaa

SEQ ID NO: 86598 - DNA, 80 bp, synthetic construct
  source 1..80: mol_type = other DNA
gtataattagctctccagttagcagtattcactaagtccttatcctcaacagtaactcgtaagatttccacatcaactgt

SEQ ID NO: 86599 - DNA, 80 bp, synthetic construct; identical to SEQ ID NO: 15644
  source 1..80: mol_type = other DNA

SEQ ID NO: 86600 - DNA, 80 bp, synthetic construct
  source 1..80: mol_type = other DNA
gagccactgcgccaggccagagatgtgcatattaaacaattaaaactggtctatacatttttctttaattaatatcatac

SEQ ID NO: 86601 - DNA, 80 bp, synthetic construct
  source 1..80: mol_type = other DNA
ttaattattgggggaaagcaccaacattataattgaaatcttactttacactccataatttttttgcactaagaatttaa

SEQ ID NO: 86602 - DNA, 80 bp, synthetic construct
  source 1..80: mol_type = other DNA
gcctcccgggttcaagcgaggcaggagaatcacactaggaatttttaatcaatttatgaaaattgaatagtttctcaaat

SEQ ID NO: 86603 - DNA, 80 bp, synthetic construct
  source 1..80: mol_type = other DNA
tttgtctttattcaacagaaaaagaagagctatttgccacaagtgcatttaaaattgcctggtaattaatcaaaaccttt

SEQ ID NO: 86604 - DNA, 80 bp, synthetic construct; identical to SEQ ID NO: 15645
  source 1..80: mol_type = other DNA

SEQ ID NO: 86605 - DNA, 80 bp, synthetic construct
  source 1..80: mol_type = other DNA
aggagacttgggttctatttccaactccaaaaataagagacacaatcttgggcaattggaaaattcactttgtctaggtt

SEQ ID NO: 86606 - DNA, 80 bp, synthetic construct
  source 1..80: mol_type = other DNA
tgatcttcctgcttttaacacacataattttccagatttactcctccctcataaccaatcacatgtgtagacttgaaaaa

SEQ ID NO: 86607 - DNA, 80 bp, synthetic construct; identical to SEQ ID NO: 15646
  source 1..80: mol_type = other DNA

SEQ ID NO: 86608 - DNA, 80 bp, synthetic construct
  source 1..80: mol_type = other DNA
ggtcaaaaagttactagagagcaccactggataaacaccttcactggacaagtgttttcaactgattatttcagaagaat

SEQ ID NO: 86609 - DNA, 80 bp, synthetic construct
  source 1..80: mol_type = other DNA
aatctgtcacttcagggaaaacaactatttgttgccaatgataaattggagatttcaaacaaaaatgagaagcttggaaa

SEQ ID NO: 86610 - DNA, 80 bp, synthetic construct
  source 1..80: mol_type = other DNA
cactcaaagtgtaagatagagcaatggattttaacgtaataaagtacaaaaggtcattgttgaggattcagagtccacat

SEQ ID NO: 86611 - DNA, 80 bp, synthetic construct
  source 1..80: mol_type = other DNA
catgtcagattgcctttatatatgcttcagctaaaactacatattgtaacagactaaatgcagaaggagatatgagaatc

SEQ ID NO: 86612 - DNA, 80 bp, synthetic construct
  source 1..80: mol_type = other DNA
gtgtaacaatttttactgttattttataagaattttaactgttaacatgtaattaatttattatttttaatatttaaatt

SEQ ID NO: 86613 - DNA, 80 bp, synthetic construct; identical to SEQ ID NO: 15647
  source 1..80: mol_type = other DNA

SEQ ID NO: 86614 - DNA, 80 bp, synthetic construct
  source 1..80: mol_type = other DNA
tactaagctagggtattgcagtagaaagagacagaatatagatttaaaacaatcttggaggtaaaaacatgctttaggaa

SEQ ID NO: 86615 - DNA, 80 bp, synthetic construct
  source 1..80: mol_type = other DNA
aaattttagatttattacatcataagtacctgtcagacatccaaatcaagatttctagcagttgattaaaaatgggaaac

SEQ ID NO: 86616 - DNA, 80 bp, synthetic construct
  source 1..80: mol_type = other DNA
ctgattgtatgaaacaaacaattcagaaaagaatgaattagcagttcaaaaccagcatactccaaggttatttagtgatc

SEQ ID NO: 86617 - DNA, 80 bp, synthetic construct; identical to SEQ ID NO: 15648
  source 1..80: mol_type = other DNA

SEQ ID NO: 86618 - DNA, 80 bp, synthetic construct
  source 1..80: mol_type = other DNA
tatttcattccttttcacccacctcaaaaaagttctggaccacattattacatggcaaagtcatggcttttataaatttg

SEQ ID NO: 86619 - DNA, 80 bp, synthetic construct
  source 1..80: mol_type = other DNA
tataacttttctctgtttgtaagcttgtgcttagattgatcataggagtcagttttctctaaaactgcatggttcactta

SEQ ID NO: 86620 - DNA, 80 bp, synthetic construct
  source 1..80: mol_type = other DNA
tctttaagactacatctccaattagtgaaagacttattctttttgggctatgttctcttacatccatccatccataggat

SEQ ID NO: 86621 - DNA, 80 bp, synthetic construct; identical to SEQ ID NO: 15649
  source 1..80: mol_type = other DNA

SEQ ID NO: 86622 - DNA, 80 bp, synthetic construct
  source 1..80: mol_type = other DNA
ttgggtagttatcattttcatcctctattttgattattaggggcagtggaagttctggagtatacccatctggagttgtt

SEQ ID NO: 86623 - DNA, 80 bp, synthetic construct
  source 1..80: mol_type = other DNA
tgagtctcaccatttgttattgttctgggatatggatataattttaatgccaaagaggtgcctaatttcatgattcaata

SEQ ID NO: 86624 - DNA, 80 bp, synthetic construct
  source 1..80: mol_type = other DNA
tgcatggattttaaatacaactttctggatctttctgaacttgggatcctgtaggattacccaggtacagttaactggga

SEQ ID NO: 86625 - DNA, 80 bp, synthetic construct; identical to SEQ ID NO: 15650
  source 1..80: mol_type = other DNA

SEQ ID NO: 86626 - DNA, 80 bp, synthetic construct
  source 1..80: mol_type = other DNA
aagcaaaatgaccaagtcctgttgggaaatcaaaccagcattaggttaaattctttcatattaactcactttccagcata

SEQ ID NO: 86627 - DNA, 80 bp, synthetic construct
  source 1..80: mol_type = other DNA
tgaacttcatttacctcctatgatatctccatactataaagaggttcacagatctttttgtgccaactaagtaactgttc

SEQ ID NO: 86628 - DNA, 80 bp, synthetic construct
  source 1..80: mol_type = other DNA
ctgtgatcccagctactcaggaggctaaggtgggaggatcacttgaaccccggagccagagattgcagtgagccgagatt

SEQ ID NO: 86629 - DNA, 80 bp, synthetic construct
  source 1..80: mol_type = other DNA
aaaatattttttgtttcaagtcaattatgtgctattagggagtagccagagcattggtgacaaactcagaaagcagaaaa

SEQ ID NO: 86630 - DNA, 80 bp, synthetic construct; identical to SEQ ID NO: 15651
  source 1..80: mol_type = other DNA

SEQ ID NO: 86631 - DNA, 80 bp, synthetic construct
  source 1..80: mol_type = other DNA
aatttcaagagcaaggcatgagtaaaataatgtagtgcatcttagttctccagaataactaaaggaatatttgacaggct

SEQ ID NO: 86632 - DNA, 80 bp, synthetic construct
  source 1..80: mol_type = other DNA
tgcagggcaaaaatgtggacaataatttccttaatgagttttttgttctttgccaacatcttccttataggaactgagta

SEQ ID NO: 86633 - DNA, 80 bp, synthetic construct
  source 1..80: mol_type = other DNA
ttggaatgtgtaatattctgatccttgattcgaaaagcaaatttcctccaagctgtgttcatcctctcagtaacatccta

SEQ ID NO: 86634 - DNA, 80 bp, synthetic construct; identical to SEQ ID NO: 15652
  source 1..80: mol_type = other DNA

SEQ ID NO: 86635 - DNA, 80 bp, synthetic construct
  source 1..80: mol_type = other DNA
gaaagaaatgtggatccagtgtgatttcagatgtagattcaagaacaagaaatagaaagatagaagggcctatgtgtctt

SEQ ID NO: 86636 - DNA, 80 bp, synthetic construct
  source 1..80: mol_type = other DNA
aaccatgtgtctgagtgccacagttttatgcttggcctttgcaagctgaacaaaagtgtatgcaagtataaagagatata

SEQ ID NO: 86637 - DNA, 80 bp, synthetic construct
  source 1..80: mol_type = other DNA
cccacagcagaaagaaagaaaacggtacctgttgaaggaaaagtggaaaaggacccaaggagttttctagcatcgaacaa

SEQ ID NO: 86638 - DNA, 80 bp, synthetic construct; identical to SEQ ID NO: 15653
  source 1..80: mol_type = other DNA

SEQ ID NO: 86639 - DNA, 80 bp, synthetic construct
  source 1..80: mol_type = other DNA
cattgccatgcaaaaacatgggagagagatatgcaaagaaaataagtgtgtatgtgcccttctaaatttagcacaagcaa

SEQ ID NO: 86640 - DNA, 80 bp, synthetic construct
  source 1..80: mol_type = other DNA
atacaagttattttgatcttgggtgtcacaacacaatagcatgcatgtggtccaaacctcctcctaaaatagttatctat

SEQ ID NO: 86641 - DNA, 80 bp, synthetic construct; identical to SEQ ID NO: 15654
  source 1..80: mol_type = other DNA

SEQ ID NO: 86642 - DNA, 80 bp, synthetic construct
  source 1..80: mol_type = other DNA
aagacaaatattttcttcttttcttggttctcagtgttggaaagtaatatggtaaaacttctcttctccgaggacaatag

SEQ ID NO: 86643 - DNA, 80 bp, synthetic construct
  source 1..80: mol_type = other DNA
gtaatgtatgcacgtggggagagccaaaaacttaaaattcattatactgacacttgtaaatttttgaaaggacacataaa

SEQ ID NO: 86644 - DNA, 80 bp, synthetic construct
  source 1..80: mol_type = other DNA
gaaataagctatagagtaacacctaaatacacctgaagttatacagaatctagcagatgaaaattggcatttgctaaatg

SEQ ID NO: 86645 - DNA, 80 bp, synthetic construct; identical to SEQ ID NO: 15655
  source 1..80: mol_type = other DNA

SEQ ID NO: 86646 - DNA, 80 bp, synthetic construct
  source 1..80: mol_type = other DNA
cattctaaaaattacactaattttaaaataccacagcaaatcaggatttattttgtatgtgtgtttttattttaagtttc

SEQ ID NO: 86647 - DNA, 80 bp, synthetic construct
  source 1..80: mol_type = other DNA
gtgttgttccccactctgtgcctacatgttcacattgctcagctcccacttataagtgagaacatgcagtgtttgatttt

SEQ ID NO: 86648 - DNA, 80 bp, synthetic construct
  source 1..80: mol_type = other DNA
tctaccaacaagtttctcggcatctagtttggagggaacatgtaatgtcacatttttgcaggcatcactggcaaatatta

SEQ ID NO: 86649 - DNA, 80 bp, synthetic construct
  source 1..80: mol_type = other DNA
aatattaattttaaaatatttaattaaatataaatacatgaatttatatttataattatatgtgatttatgttattataa

SEQ ID NO: 86650 - DNA, 80 bp, synthetic construct; identical to SEQ ID NO: 15656
  source 1..80: mol_type = other DNA

SEQ ID NO: 86651 - DNA, 80 bp, synthetic construct
  source 1..80: mol_type = other DNA
taaagacaaacattaacttattgccatgaagtgatttggagaatatttatgtgttactccacacaataggcacataactt

SEQ ID NO: 86652 - DNA, 80 bp, synthetic construct
  source 1..80: mol_type = other DNA
gtctgaaactttacaatggatgtttctcaaagattcacattctttttttctagttttacaaacatctttgaccaaaagca

SEQ ID NO: 86653 - DNA, 80 bp, synthetic construct
  source 1..80: mol_type = other DNA
ttttgaactggaaattaaatgatatgaagaattttcactggctgcatagccaagagagaataggagtagaatcagatgat

SEQ ID NO: 86654 - DNA, 80 bp, synthetic construct; identical to SEQ ID NO: 15657
  source 1..80: mol_type = other DNA

SEQ ID NO: 86655 - DNA, 80 bp, synthetic construct
  source 1..80: mol_type = other DNA
gcgagggaagagtgacaggagaagaaaacaaaaggacagtcaatggcaaatgatgtagggtctaaaaggtcatggtaagg

SEQ ID NO: 86656 - DNA, 80 bp, synthetic construct
  source 1..80: mol_type = other DNA
agcaggaatctaagagtggggtaatggttacttgggctaaggtaataatgttggagaagatgaaaaatggttggattaag

SEQ ID NO: 86657 - DNA, 80 bp, synthetic construct
  source 1..80: mol_type = other DNA
aagacaaatgtaatgatagggaagtacagggagctatgggagagcagaggtaatagtgatatctaaaagccaggtgaggt

SEQ ID NO: 86658 - DNA, 80 bp, synthetic construct; identical to SEQ ID NO: 15658
  source 1..80: mol_type = other DNA

SEQ ID NO: 86659 - DNA, 80 bp, synthetic construct
  source 1..80: mol_type = other DNA
ggataacatttttcaaacatcctaaagcatcaaagagctaacaaaatagcaagcaattgctaggccaaaactgaagataa

SEQ ID NO: 86660 - DNA, 80 bp, synthetic construct
  source 1..80: mol_type = other DNA
tgctaaatcttcattacaaatttgagccacaagtaaactggccctggcgtggatctgtgatccacactcacatcttttgc

SEQ ID NO: 86661 - DNA, 80 bp, synthetic construct
  source 1..80: mol_type = other DNA
attataacacaacacaaatgggaaaacactagaagcaatccaattaaactcagaaacaagacaggctctccaaggtcact

SEQ ID NO: 86662 - DNA, 80 bp, synthetic construct; identical to SEQ ID NO: 15659
  source 1..80: mol_type = other DNA

SEQ ID NO: 86663 - DNA, 80 bp, synthetic construct
  source 1..80: mol_type = other DNA
aaaatacaaaaaaaaaaaattagccaggcgtggtggcgggcaccggtagtcccggctactcgggaggctgagggaggaga

SEQ ID NO: 86664 - DNA, 80 bp, synthetic construct
  source 1..80: mol_type = other DNA
aacatgtaaagcctatttgaaggaaacctgaaaacatttctgcagggcagaaaagtacacttgcaaaaaaagaaagacaa

SEQ ID NO: 86665 - DNA, 80 bp, synthetic construct
  source 1..80: mol_type = other DNA
agcaatgaaaggctatcaaccctagcagatattacaaatcatataaaatctcaacaattaaatcaatatggtactggcat

SEQ ID NO: 86666 - DNA, 80 bp, synthetic construct; identical to SEQ ID NO: 15660
  source 1..80: mol_type = other DNA

SEQ ID NO: 86667 - DNA, 80 bp, synthetic construct
  source 1..80: mol_type = other DNA
atgacctatgaatattttttccagtttatcaatcaccttttgactttgcttgttgtgtttttggttggttagaggtgttt

SEQ ID NO: 86668 - DNA, 80 bp, synthetic construct
  source 1..80: mol_type = other DNA
ttttacatttaaatctttcatctctggaattttctgtggtgttctgaatgaagcatagattcaatttatctttacaccaa

SEQ ID NO: 86669 - DNA, 80 bp, synthetic construct
  source 1..80: mol_type = other DNA
tctcggttcactgaaacctccacctcccgggttcaagtgatcctcccacctcagcctcccaagtagatgggattataggt

SEQ ID NO: 86670 - DNA, 80 bp, synthetic construct
  source 1..80: mol_type = other DNA
ttacacttttatttgtcaatcccattattggtaatctgtcctactgatacacctgcccacatatgaaatgacatacattc

SEQ ID NO: 86671 - DNA, 80 bp, synthetic construct; identical to SEQ ID NO: 15661
  source 1..80: mol_type = other DNA

SEQ ID NO: 86672 - DNA, 80 bp, synthetic construct
  source 1..80: mol_type = other DNA
aagtggataaaatgccctagggaaagagtgtagattccaaaggacaagacctagaacagaaaaccaagagacaccagcat

SEQ ID NO: 86673 - DNA, 80 bp, synthetic construct
  source 1..80: mol_type = other DNA
aaaatagaatggtggttgccaggtgacggaggttaggggaaacagggatttgctgtttaatggatataaaagtttggtta

SEQ ID NO: 86674 - DNA, 80 bp, synthetic construct
  source 1..80: mol_type = other DNA
aaaagacaacagaaaaagaagaaaaagacaagacgctaggtagggagtcagaccctgagtggtcagaaagattaaaaaaa

SEQ ID NO: 86675 - DNA, 80 bp, synthetic construct; identical to SEQ ID NO: 15662
  source 1..80: mol_type = other DNA

SEQ ID NO: 86676 - DNA, 80 bp, synthetic construct
  source 1..80: mol_type = other DNA
gacttggaccacaggcgcgcaccccatgcccagctacaatcattcttacttaataatttcttacacttagtatttacgca

SEQ ID NO: 86677 - DNA, 80 bp, synthetic construct
  source 1..80: mol_type = other DNA
caaggaatggaaattcaatttcagtgtattcagtgataccccacctcctcctaaacagaatctgagataacacacagaaa

SEQ ID NO: 86678 - DNA, 80 bp, synthetic construct
  source 1..80: mol_type = other DNA
ctgctgtgtacttggccctttctatgttattaatatgccctgagaattcagttaagggtttgaagtccattgagctcctc

SEQ ID NO: 86679 - DNA, 80 bp, synthetic construct; identical to SEQ ID NO: 15663
  source 1..80: mol_type = other DNA

SEQ ID NO: 86680 - DNA, 80 bp, synthetic construct
  source 1..80: mol_type = other DNA
taggctcccagctctgggaaggggtagggtcattgctgtagtgctctttaaagaaagaaagaacctggggcaaggggcgg

SEQ ID NO: 86681 - DNA, 80 bp, synthetic construct
  source 1..80: mol_type = other DNA
agtcctcaggagcaaagggtcaagatcccctcccccacccgccacttccccccgcccttctctcagagtaaacaattccc

SEQ ID NO: 86682 - DNA, 80 bp, synthetic construct
  source 1..80: mol_type = other DNA
acgttcccggggaaggtgccagaggccagctggacggccccggcgcactcccgccccggcgcactcccgccccggcgcac

SEQ ID NO: 86683 - DNA, 80 bp, synthetic construct; identical to SEQ ID NO: 15664
  source 1..80: mol_type = other DNA

SEQ ID NO: 86684 - DNA, 80 bp, synthetic construct
  source 1..80: mol_type = other DNA
ggctgcctccatggagagggctcggggcaggtcgcgggccgagcgtcgggccggggtaggagggctccgcggggcgaggg

SEQ ID NO: 86685 - DNA, 80 bp, synthetic construct
  source 1..80: mol_type = other DNA
agacaccgatcggcccctccttgttgtctatttaagacttaagacttcatttctctaagaaagccacgggtgggaactcc

SEQ ID NO: 86686 - DNA, 80 bp, synthetic construct
  source 1..80: mol_type = other DNA
gagtgcgcggtcggccccggctccgccctgcccgctgccctcggcgacggccgtggtccctgccctggggtcaattacag

SEQ ID NO: 86687 - DNA, 80 bp, synthetic construct; identical to SEQ ID NO: 15665
  source 1..80: mol_type = other DNA

SEQ ID NO: 86688 - DNA, 80 bp, synthetic construct
  source 1..80: mol_type = other DNA
cgagatccgacctggggcttcggaaaatcctcttggctggagccaggagagtaagttgcgacctatcgaagttgtgtttt

SEQ ID NO: 86689 - DNA, 80 bp, synthetic construct
  source 1..80: mol_type = other DNA
gccgacacaagccagtgaactggggaaaccaggaacatacttgtattcttagagtgcaaaaagttggctaaaaatttttt

SEQ ID NO: 86690 - DNA, 80 bp, synthetic construct
  source 1..80: mol_type = other DNA
atagtttgaagccttattcatttaaaaggttacagaaaatggaagtgtagcgccccctcccccacgccccacccctcact

SEQ ID NO: 86691 - DNA, 80 bp, synthetic construct; identical to SEQ ID NO: 15666
  source 1..80: mol_type = other DNA

SEQ ID NO: 86692 - DNA, 80 bp, synthetic construct
  source 1..80: mol_type = other DNA
tgtgtgtgtgtctcaaaacggaaaaaggcgtgactgaatccagtctagagatttccatgaactctcaggtggaagagcat

SEQ ID NO: 86693 - DNA, 80 bp, synthetic construct
  source 1..80: mol_type = other DNA
ggcaaaacaactaatcctgtcaccttgatgtttccttgtttaaggagaatcccaagctaatgtaacacctagcttacttt

SEQ ID NO: 86694 - DNA, 80 bp, synthetic construct
  source 1..80: mol_type = other DNA
attttagcaatttgatacttttaccttattgggcagtaataaacatctcctttagaaagcgactatagccaatggaacag

SEQ ID NO: 86695 - DNA, 80 bp, synthetic construct
  source 1..80: mol_type = other DNA
aaatggaaagcaactcatctgacagaagtagttgccaaggaaacaggtcctttattggaaggaatataaattgtagtctg

SEQ ID NO: 86696 - DNA, 80 bp, synthetic construct; identical to SEQ ID NO: 15667
  source 1..80: mol_type = other DNA

SEQ ID NO: 86697 - DNA, 80 bp, synthetic construct
  source 1..80: mol_type = other DNA
cttgcctcttggtgttcacaaatctagtagctggacactagagccataataagatgactacaaagaacccagctccatac

SEQ ID NO: 86698 - DNA, 80 bp, synthetic construct
  source 1..80: mol_type = other DNA
ccagaaggtagctgtgtcacccacatagctatcaaacatttaggccagctgtatcaaaatgggaaaaagaaataattttc

SEQ ID NO: 86699 - DNA, 80 bp, synthetic construct
  source 1..80: mol_type = other DNA
ttatgagtgtggggaagacactgcacagtagtgtgagcagtagctgtgactatcacaatagaattcataaatacctttac

SEQ ID NO: 86700 - DNA, 80 bp, synthetic construct; identical to SEQ ID NO: 15668
  source 1..80: mol_type = other DNA

SEQ ID NO: 86701 - DNA, 80 bp, synthetic construct
  source 1..80: mol_type = other DNA
tacattttaaggattcaatgatagcagatcacactgtgagcagatatatttagtagggtattagtttgctaggactgctg

SEQ ID NO: 86702 - DNA, 80 bp, synthetic construct
  source 1..80: mol_type = other DNA
atctttgtcattccttctcttgtaggtgcattcattactccaatcctccatctgcgcatggcattctctcttttgtctct

SEQ ID NO: 86703 - DNA, 80 bp, synthetic construct
  source 1..80: mol_type = other DNA
tggttagcacttcaatatattatcttttaggggtcataatttgatccataacaagtggattcaagtatctataaattatc

SEQ ID NO: 86704 - DNA, 80 bp, synthetic construct; identical to SEQ ID NO: 15669
  source 1..80: mol_type = other DNA

SEQ ID NO: 86705 - DNA, 80 bp, synthetic construct
  source 1..80: mol_type = other DNA
ggcgggctcactacaatataaatatgtatttatagaaacttcccaattgatctaattgtcagacaagtgtaagcgtgaga

SEQ ID NO: 86706 - DNA, 80 bp, synthetic construct
  source 1..80: mol_type = other DNA
cccagcactttgggaggccaaggtgggcggatcacctgaggtcaggagtttgagaccagcctggccagcatggtgaaacc

SEQ ID NO: 86707 - DNA, 80 bp, synthetic construct
  source 1..80: mol_type = other DNA
ggagactctgtcaaaaaaaagaaggaaggaaggagggaagaaaggaagggagggagggaggaaggaagaaaggaaggaag

SEQ ID NO: 86708 - DNA, 80 bp, synthetic construct; identical to SEQ ID NO: 15670
  source 1..80: mol_type = other DNA

SEQ ID NO: 86709 - DNA, 80 bp, synthetic construct
  source 1..80: mol_type = other DNA
catgttctgccctcatggtgcttacagtctaatgaatggtataacaagtaaatggctaacttccaaatgggtaacgataa

SEQ ID NO: 86710 - DNA, 80 bp, synthetic construct
  source 1..80: mol_type = other DNA
gaaaatgatagttcatggttctgcagaggaacctaaacattcattgttgcttgaacttagaaagtgaggcagaagaatgt

SEQ ID NO: 86711 - DNA, 80 bp, synthetic construct; identical to SEQ ID NO: 15671
  source 1..80: mol_type = other DNA

SEQ ID NO: 86712 - DNA, 80 bp, synthetic construct
  source 1..80: mol_type = other DNA
ttctgcagaaccttcaagaattgggcacgtgtgaagaatttttctatccaaaatgcttatagcacccacattgagaaaca

SEQ ID NO: 86713 - DNA, 80 bp, synthetic construct
  source 1..80: mol_type = other DNA
acctcgaaatcacacctgactgtggattattttcatcagtcaaggagtttccatctggctgactggggaatgttttggat

SEQ ID NO: 86714 - DNA, 80 bp, synthetic construct
  source 1..80: mol_type = other DNA
cctcaatttaatgatccagtctccttagaccccaaaagtgctaattgagaaactgggcaagggtcctagctcagtcatca

SEQ ID NO: 86715 - DNA, 80 bp, synthetic construct
  source 1..80: mol_type = other DNA
acagtacatatattactaggagacatcaagtaggggtgggagacaatggcagtggccaagagggtgctgcccttaggaca

SEQ ID NO: 86716 - DNA, 80 bp, synthetic construct; identical to SEQ ID NO: 15672
  source 1..80: mol_type = other DNA

SEQ ID NO: 86717 - DNA, 80 bp, synthetic construct
  source 1..80: mol_type = other DNA
ccttttatcttgcacagtactgccaaaaaatcttcagaatcactagcgacatagtctccctaatcagaagctggcaacga

SEQ ID NO: 86718 - DNA, 80 bp, synthetic construct
  source 1..80: mol_type = other DNA
gttttccttcctcctgtatgcacagaaacagattatcttccatttccaaggccaagcccattgctatctccttgctaaac

SEQ ID NO: 86719 - DNA, 80 bp, synthetic construct
  source 1..80: mol_type = other DNA
aaactgtaagcttcttcagagcaagatctttgtatcttttatctataaactagctaaatgccttgggcacggacgtattc

SEQ ID NO: 86720 - DNA, 80 bp, synthetic construct; identical to SEQ ID NO: 15673
  source 1..80: mol_type = other DNA

SEQ ID NO: 86721 - DNA, 80 bp, synthetic construct
  source 1..80: mol_type = other DNA
gccaccgcacctggccgagtagtaaatttttgtttaaattttatgcatttagcagtcacaaattgggcgtctactatatg

SEQ ID NO: 86722 - DNA, 80 bp, synthetic construct
  source 1..80: mol_type = other DNA
gatttaatgaaagttaataatgggtgaaactgaatcaaacccaggttcacctggcaccaaatgcctgtctgtcaacccag

SEQ ID NO: 86723 - DNA, 80 bp, synthetic construct
  source 1..80: mol_type = other DNA
ataatcctgcaaaactgtacatataactttctaaagcccttgattttcactcttttcaattttgctgatccacttatttg

SEQ ID NO: 86724 - DNA, 80 bp, synthetic construct
  source 1..80: mol_type = other DNA
ttactgacaggccagtgccatctaatggtaaaaaaggacagtctgaagctcttggttttcttaaactgcccagtgaaaag

SEQ ID NO: 86725 - DNA, 80 bp, synthetic construct
  source 1..80: mol_type = other DNA
acctaccaataaaagagtaaaatattttttacatgtctagtcatttaataaatgctattttgaattgaaattgtatttta

SEQ ID NO: 86726 - DNA, 80 bp, synthetic construct; identical to SEQ ID NO: 15674
  source 1..80: mol_type = other DNA

SEQ ID NO: 86727 - DNA, 80 bp, synthetic construct
  source 1..80: mol_type = other DNA
tcatccttttttatggctgcatagtattccatggtgtatatgtaccacattttctttatccagtctatcattgatgggca

SEQ ID NO: 86728 - DNA, 80 bp, synthetic construct
  source 1..80: mol_type = other DNA
cgccacactgtcttccacaatggttgaactaatttacagtcccaccaacagtgtaaaagcattcctatttctccatatcc

SEQ ID NO: 86729 - DNA, 80 bp, synthetic construct
  source 1..80: mol_type = other DNA
tctgttcatatccttcacccaccttttgatagggctgagtgtttttttcttgtaaatttgtttaagttccttgtagattc

SEQ ID NO: 86730 - DNA, 80 bp, synthetic construct
  source 1..80: mol_type = other DNA
tgttttagtcatgaagtctttgccaatgcctatatcctgaatggtattgcctaggttttcttctaggatttttatggttt

SEQ ID NO: 86731 - DNA, 80 bp, synthetic construct; identical to SEQ ID NO: 15675
  source 1..80: mol_type = other DNA

SEQ ID NO: 86732 - DNA, 80 bp, synthetic construct
  source 1..80: mol_type = other DNA
catctcggctcactgcaacctccgcctcctgggttcaagtgattcttgtgcctcagcctccctagtagctgggattacag

SEQ ID NO: 86733 - DNA, 80 bp, synthetic construct
  source 1..80: mol_type = other DNA
tgagcccggcctgaattgcctgatttagaacacatcttttcacacatctgtctgtaactaggggctcattatccagttta

SEQ ID NO: 86734 - DNA, 80 bp, synthetic construct
  source 1..80: mol_type = other DNA
gtcagacactctaaggcgggactcagtaatctgtgttttatcaaggtgattctaatgccactcaagcttgaaaaccactg

SEQ ID NO: 86735 - DNA, 80 bp, synthetic construct; identical to SEQ ID NO: 15676
  source 1..80: mol_type = other DNA

SEQ ID NO: 86736 - DNA, 80 bp, synthetic construct
  source 1..80: mol_type = other DNA
ctgctataggagtatataaatgtctagatcatctgtaagttggacttttaagttggaattttctaaataagttatgctgg

SEQ ID NO: 86737 - DNA, 80 bp, synthetic construct
  source 1..80: mol_type = other DNA
actgggtcacttgaactcttctgaacatgtacatttctatgactgtagactacagagccttctttgtggctatggacgct

SEQ ID NO: 86738 - DNA, 80 bp, synthetic construct
  source 1..80: mol_type = other DNA
atttcagccaaagttgaaagctctttaagaatggattggggataaaccagggatcctctgggcagtttttgatttgacct

SEQ ID NO: 86739 - DNA, 80 bp, synthetic construct; identical to SEQ ID NO: 15677
  source 1..80: mol_type = other DNA

SEQ ID NO: 86740 - DNA, 80 bp, synthetic construct
  source 1..80: mol_type = other DNA
cacttcaagattctctactttaaaggaaagacttctgacagagaacctgtcagccaggaggagctgtcatccagtgactc

SEQ ID NO: 86741 - DNA, 80 bp, synthetic construct
  source 1..80: mol_type = other DNA
catgcctctgcaggaaaaaaaaaaaaatcttttgccagataccaggaagtccagtttttataagatgtgcaggatccaat

SEQ ID NO: 86742 - DNA, 80 bp, synthetic construct
  source 1..80: mol_type = other DNA
ctttggatacaggaactagcagcttacttttcctcgtcagtcttaaagtcatgttgcaggtgacatttttctgtcaccaa

SEQ ID NO: 86743 - DNA, 80 bp, synthetic construct; identical to SEQ ID NO: 15678
  source 1..80: mol_type = other DNA

SEQ ID NO: 86744 - DNA, 80 bp, synthetic construct
  source 1..80: mol_type = other DNA
ggatgtttgacagcatctctggtttctacccactagatgccactggcatttatctcccctacctcgagccccaccctggt

SEQ ID NO: 86745 - DNA, 80 bp, synthetic construct
  source 1..80: mol_type = other DNA
gcagtggctgagatcttaactgctcagtcaaataaacagacagttccacaattgacaaaatgttagtgcagttctttttt

SEQ ID NO: 86746 - DNA, 80 bp, synthetic construct
  source 1..80: mol_type = other DNA
ttagtgtaacatacatccagaaaagtgcacatatcacgagtgcactgaatcttcacaaactgaaaacaccatgtcaccag

SEQ ID NO: 86747 - DNA, 80 bp, synthetic construct
  source 1..80: mol_type = other DNA
cgctggctccctagatgctcagcaatttaataccagccttttgagagaagaaaagaaacattacattaaagatgtacaaa

SEQ ID NO: 86748 - DNA, 80 bp, synthetic construct; identical to SEQ ID NO: 15679
  source 1..80: mol_type = other DNA

SEQ ID NO: 86749 - DNA, 80 bp, synthetic construct
  source 1..80: mol_type = other DNA
ggtcatctatatttgccctcattcattccattcacaggtctctgttgcctctgccttcaaaataaacactggagatatct

SEQ ID NO: 86750 - DNA, 80 bp, synthetic construct
  source 1..80: mol_type = other DNA
acataaactggttgtatcatttccaaacataaaagcttccagtggcttcctctcacactcaggataaaacccaaagtcct

SEQ ID NO: 86751 - DNA, 80 bp, synthetic construct; identical to SEQ ID NO: 15680
  source 1..80: mol_type = other DNA

SEQ ID NO: 86752 - DNA, 80 bp, synthetic construct
  source 1..80: mol_type = other DNA
tgaatgccagtcactgcaatagttacatttcatatatttctttaatttgcacatcagccctgcaaaatggatgtatccta

SEQ ID NO: 86753 - DNA, 80 bp, synthetic construct
  source 1..80: mol_type = other DNA
ctgtaacttaaagcctttatggtttcagtttggcttctctagcatttcattagctttcccctcatggtcacagcatggct

SEQ ID NO: 86754 - DNA, 80 bp, synthetic construct
  source 1..80: mol_type = other DNA
ctaatcagtgaggagaatcttttgtagggtctcctgatacctcattgaccaaaattctcttacacatttatgcctaaacc

SEQ ID NO: 86755 - DNA, 80 bp, synthetic construct; identical to SEQ ID NO: 15681
  source 1..80: mol_type = other DNA

SEQ ID NO: 86756 - DNA, 80 bp, synthetic construct
  source 1..80: mol_type = other DNA
gggcacttcagctctgtgatgttctttccaaaaatgcataatactgatctaatcgtgagaaaaacaacagataaacccaa

SEQ ID NO: 86757 - DNA, 80 bp, synthetic construct
  source 1..80: mol_type = other DNA
aacattagtgggggaaatggtaaaatcagaataaagtatggaatttagttaacagtgcattaactaaatgcaccaatgtt

SEQ ID NO: 86758 - DNA, 80 bp, synthetic construct
  source 1..80: mol_type = other DNA
gttgaaactggatgttagctatatgggtgtgcatgttactattcactctgcttttatacatgtttgcaatttaaagtgat

SEQ ID NO: 86759 - DNA, 80 bp, synthetic construct; identical to SEQ ID NO: 15682
  source 1..80: mol_type = other DNA

SEQ ID NO: 86760 - DNA, 80 bp, synthetic construct
  source 1..80: mol_type = other DNA
gtgattttctgcatttctgagcaaatcacatctagaaagtaaattccaataaaaatcagtgaagatgctcatatgatgaa

SEQ ID NO: 86761 - DNA, 80 bp, synthetic construct
  source 1..80: mol_type = other DNA
tattcagtgcagccaactacttaatatggcctgtatcaaagagaagagtctgatggttagaaggatgggcaagaaatata

SEQ ID NO: 86762 - DNA, 80 bp, synthetic construct
  source 1..80: mol_type = other DNA
cacgggcagctaatatttttttgtatttttagtagagacagggttttaccgtgttagccaggatggtctcgatcatcaga

SEQ ID NO: 86763 - DNA, 80 bp, synthetic construct; identical to SEQ ID NO: 15683
  source 1..80: mol_type = other DNA

SEQ ID NO: 86764 - DNA, 80 bp, synthetic construct
  source 1..80: mol_type = other DNA
ctgaacatctgctctccttgagtttctctttggaatggagagccaagaacatgaactgacaatggaaaggaaagaaagag

SEQ ID NO: 86765 - DNA, 80 bp, synthetic construct
  source 1..80: mol_type = other DNA
caactgagaaaagctacaccaaagacagagtccagtgaattaatgcataaatggaaggtggagtagtgggagcaatacat

SEQ ID NO: 86766 - DNA, 80 bp, synthetic construct
  source 1..80: mol_type = other DNA
ttcttgaagataaatgtgggagaacaaatagagttgcaaataaagcacacaaacgatggtttgccttggaaaggagtcag

SEQ ID NO: 86767 - DNA, 80 bp, synthetic construct; identical to SEQ ID NO: 15684
  source 1..80: mol_type = other DNA

SEQ ID NO: 86768 - DNA, 80 bp, synthetic construct
  source 1..80: mol_type = other DNA
catggtcagaactaaagagaataataggtttctagagttgagaggaaaagtgaggcaggaatagcagtcatgaaaatgaa

SEQ ID NO: 86769 - DNA, 80 bp, synthetic construct
  source 1..80: mol_type = other DNA
tcaaataattgcggttaaaatccaaatagccacaagtagctaccatattagaaagtgctggttcagattgagccaagaga

SEQ ID NO: 86770 - DNA, 80 bp, synthetic construct
  source 1..80: mol_type = other DNA
tgatctcatgggcatcgagaatagaatgatagaatccagaaactgggaaaggtagtggggaggtgggggaagaaaagaat

SEQ ID NO: 86771 - DNA, 80 bp, synthetic construct
  source 1..80: mol_type = other DNA
caaagcagctagaagagaattatttaaatgtttctagcataatgaaaagacaagtatttaaggtaattgacatcccaagt

SEQ ID NO: 86772 - DNA, 80 bp, synthetic construct; identical to SEQ ID NO: 15685
  source 1..80: mol_type = other DNA

SEQ ID NO: 86773 - DNA, 80 bp, synthetic construct
  source 1..80: mol_type = other DNA
aagtaagcaggtcctggagaacacaagataaaaaccataggatgcggagtaaaggatgagagaatgtctaagatttcaca

SEQ ID NO: 86774 - DNA, 80 bp, synthetic construct
  source 1..80: mol_type = other DNA
tcgggcacttcccattagggaaggcaatgggaaaaattagtttcctcttgacaaagaatagtagtagtggttaaactttt

SEQ ID NO: 86775 - DNA, 80 bp, synthetic construct; identical to SEQ ID NO: 15686
  source 1..80: mol_type = other DNA

SEQ ID NO: 86776 - DNA, 80 bp, synthetic construct
  source 1..80: mol_type = other DNA
atgaaagaatgtccatgacgaggtgctgaatgaaaatcggggcaaaataagatatatagtgtaagtccatttttatagca

SEQ ID NO: 86777 - DNA, 80 bp, synthetic construct
  source 1..80: mol_type = other DNA
tcaatgacctagtgataaccagagtacatattttgaagtaaaatacctattacatagagcaacaaaatgagtaaaatgat

SEQ ID NO: 86778 - DNA, 80 bp, synthetic construct
  source 1..80: mol_type = other DNA
ttttctgcctaaggttctgaaaatgaaatgggaaatttaattctttacccaatcctgaaaacaataaattcattaactgg

SEQ ID NO: 86779 - DNA, 80 bp, synthetic construct; identical to SEQ ID NO: 15687
  source 1..80: mol_type = other DNA

SEQ ID NO: 86780 - DNA, 80 bp, synthetic construct
  source 1..80: mol_type = other DNA
aacatggtgaaaccccatagctactaaaaatacaaaaattagccagatgtggtggtgcatgcctgtaatcccagcttctt

SEQ ID NO: 86781 - DNA, 80 bp, synthetic construct
  source 1..80: mol_type = other DNA
tctcttgaggccctatgcagtttgctagaatatatatattcccttttagacaatgaagcctcataggaaatacgaagcat

SEQ ID NO: 86782 - DNA, 80 bp, synthetic construct
  source 1..80: mol_type = other DNA
gggagggagaggatctgtccaagaagaatccaattgccaaggtacctcctaaagaggaacatgaaatacatgcatatgac

SEQ ID NO: 86783 - DNA, 80 bp, synthetic construct
  source 1..80: mol_type = other DNA
aagatgcagcatcattggcaaaaatatagataactttgagttttgatttaactaagagtaaagggatttggcactggtaa

SEQ ID NO: 86784 - DNA, 80 bp, synthetic construct; identical to SEQ ID NO: 15688
  source 1..80: mol_type = other DNA

SEQ ID NO: 86785 - DNA, 80 bp, synthetic construct
  source 1..80: mol_type = other DNA
tgccattcccctagtccaagtcatgtcatctctggcctgtattaccaaagaacttcagaaggaaattgtccataaaaata

SEQ ID NO: 86786 - DNA, 80 bp, synthetic construct
  source 1..80: mol_type = other DNA
ggaaaagggattacagagccaccttttggtatatttgtctttaacaaagatactggagaactgaatgttaccagcattct

SEQ ID NO: 86787 - DNA, 80 bp, synthetic construct; identical to SEQ ID NO: 15689
  source 1..80: mol_type = other DNA

SEQ ID NO: 86788 - DNA, 80 bp, synthetic construct
  source 1..80: mol_type = other DNA
gttgagtattacctacagaacaaatgataagaaagcagttcagaactgctttccttataggtttaaaggactttacatgc

SEQ ID NO: 86789 - DNA, 80 bp, synthetic construct
  source 1..80: mol_type = other DNA
ggctggttagctttggccctacagctttggctatagtttgctgacctgtaagttgtattatttttactgtaatatttatt

SEQ ID NO: 86790 - DNA, 80 bp, synthetic construct
  source 1..80: mol_type = other DNA
aatactattataaacaaatctgtgcccttatacagcaatttttcaggactctaccctcagccttgccttcatcttgtttt

SEQ ID NO: 86791 - DNA, 80 bp, synthetic construct; identical to SEQ ID NO: 15690
  source 1..80: mol_type = other DNA

SEQ ID NO: 86792 - DNA, 80 bp, synthetic construct
  source 1..80: mol_type = other DNA
ttatcctccagtgttctacctaaataaagatacaggagagatttatacaaccagtgttaccttggacagagaggtaagtt

SEQ ID NO: 86793 - DNA, 80 bp, synthetic construct
  source 1..80: mol_type = other DNA
tattgagcacttaaaatgtgactggcccaaattgtaatgtgctgtatgcacgttgaatgtgtaatatatgcaccagattt

SEQ ID NO: 86794 - DNA, 80 bp, synthetic construct
  source 1..80: mol_type = other DNA
attacataaaaacagcaccattctagggcctctcctatcagggttctgtttactagaggttcctaaaacatttctcagtt

SEQ ID NO: 86795 - DNA, 80 bp, synthetic construct
  source 1..80: mol_type = other DNA
tactctaaatcccaaattgaaggaaagtttgagtaggtttactaggaaggcatttctctcgaacatttcactttattatt

SEQ ID NO: 86796 - DNA, 80 bp, synthetic construct; identical to SEQ ID NO: 15691
  source 1..80: mol_type = other DNA

SEQ ID NO: 86797 - DNA, 80 bp, synthetic construct
  source 1..80: mol_type = other DNA
aggctgaggcaggagaatggtgtgaacccaggggacagagcttgcagtgagctgagatcgcgccactgcactccagcctg

SEQ ID NO: 86798 - DNA, 80 bp, synthetic construct
  source 1..80: mol_type = other DNA
tagaatggaaaagtgttactttgcattagtagtgtgattttaaacaagctgctatttctaaaggacggaaagtttagcca

SEQ ID NO: 86799 - DNA, 80 bp, synthetic construct
  source 1..80: mol_type = other DNA
ctcatcttacacataaagaacccgaaggtcaaagcgaataagtgcatgtccaacacagtcagtaagtgacgatgccagaa

SEQ ID NO: 86800 - DNA, 80 bp, synthetic construct; identical to SEQ ID NO: 15692
  source 1..80: mol_type = other DNA

SEQ ID NO: 86801 - DNA, 80 bp, synthetic construct
  source 1..80: mol_type = other DNA
caccaatgacttattgaagaatttgactatctacaactcccgaggcttttctgttcttctgcaaaagctctgactgcaag

SEQ ID NO: 86802 - DNA, 80 bp, synthetic construct
  source 1..80: mol_type = other DNA
agctacactttgacagtagaagcaagagatggcaatggagaagttacagacaaacctgtaaaacaagctcaagttcagat

SEQ ID NO: 86803 - DNA, 80 bp, synthetic construct; identical to SEQ ID NO: 15693
  source 1..80: mol_type = other DNA

SEQ ID NO: 86804 - DNA, 80 bp, synthetic construct
  source 1..80: mol_type = other DNA
aggaatctaatatattttgagccctgaacacttaaaagtgctttacatattcaattaactagcactacagttgtttgaga

SEQ ID NO: 86805 - DNA, 80 bp, synthetic construct
  source 1..80: mol_type = other DNA
cacattctcacatcacaatctcttgcctctactgagtatcccctcaattactacctctgattttatctacttaagagtaa

SEQ ID NO: 86806 - DNA, 80 bp, synthetic construct
  source 1..80: mol_type = other DNA
gcttaggtgagaggatagcttgaacccaagaggcggaggctgcagtgagccgtggtcacactgctgcactccagcctggg

SEQ ID NO: 86807 - DNA, 80 bp, synthetic construct; identical to SEQ ID NO: 15694
  source 1..80: mol_type = other DNA

SEQ ID NO: 86808 - DNA, 80 bp, synthetic construct
  source 1..80: mol_type = other DNA
ctttgggaggccgaggagggcggatcacgaggtcaggagttcgagaccagcctggccaacatggtgaaaccccatctcta

SEQ ID NO: 86809 - DNA, 80 bp, synthetic construct
  source 1..80: mol_type = other DNA
ccgtctcaagaaatataggtaaggaataatatcagtgtattttaagtagcttatattagaattgccttaccagattttaa

SEQ ID NO: 86810 - DNA, 80 bp, synthetic construct
  source 1..80: mol_type = other DNA
aacagaatagggaagaattaacttgaggtttcatgataattgagcaccacttattgacagctactatatgcatttaagct

SEQ ID NO: 86811 - DNA, 80 bp, synthetic construct; identical to SEQ ID NO: 15695
  source 1..80: mol_type = other DNA

SEQ ID NO: 86812 - DNA, 80 bp, synthetic construct
  source 1..80: mol_type = other DNA
tttttgtgtagctgcacagtgtgtttgtgtcttaagctaaggctcattacaaaagagtcaaaaagttaagaaaatattta

SEQ ID NO: 86813 - DNA, 80 bp, synthetic construct
  source 1..80: mol_type = other DNA
tcagagtaactttcagtcttgcaagcaccacttatggtgagtgctctatacagctgtaccatttttcaaatctttactat

SEQ ID NO: 86814 - DNA, 80 bp, synthetic construct
  source 1..80: mol_type = other DNA
accatctaggtatgtgtgagttcactctgtgatgtttgcacctcaacaaaattgcctaactgcatttctcatttctcaaa

SEQ ID NO: 86815 - DNA, 80 bp, synthetic construct; identical to SEQ ID NO: 15696
  source 1..80: mol_type = other DNA

SEQ ID NO: 86816 - DNA, 80 bp, synthetic construct
  source 1..80: mol_type = other DNA
cccaagatcaaagcagatgcagtgtctgggcaggtcccgctttctggcttatacacagtgccttcttgttgtatcatcac

SEQ ID NO: 86817 - DNA, 80 bp, synthetic construct
  source 1..80: mol_type = other DNA
gattgacaacaccaattattggcaaaaatatagagaaactggattgctagtggaattgtaacatgatgcaggcagtttga

SEQ ID NO: 86818 - DNA, 80 bp, synthetic construct
  source 1..80: mol_type = other DNA
aatgtccatcagctggtgagtagataaacagaatgtggtgtattcatatgatggaatactaatgagcaataaaaaggaat

SEQ ID NO: 86819 - DNA, 80 bp, synthetic construct; identical to SEQ ID NO: 15697
  source 1..80: mol_type = other DNA

SEQ ID NO: 86820 - DNA, 80 bp, synthetic construct
  source 1..80: mol_type = other DNA
ttacatgattccatttacttgaaatttctagaaaaggtgaaacaatggggatagaaagcagactgggattgcttggagtg

SEQ ID NO: 86821 - DNA, 80 bp, synthetic construct
  source 1..80: mol_type = other DNA
gaagctgtccaaaaaggataaaggagatgaacggatatttttaaatatggaaatagagatagtaaatagtcacatgagaa

SEQ ID NO: 86822 - DNA, 80 bp, synthetic construct
  source 1..80: mol_type = other DNA
ccctcacacagcgctcttgatactgaaaattttccatttgctttggagcattatggctatttatgactaacactatgaaa

SEQ ID NO: 86823 - DNA, 80 bp, synthetic construct
  source 1..80: mol_type = other DNA
ttttttcatggtcttggcctttggatactaatgacatctggctggaagattttatttctcatccggcatatatcatgcca

SEQ ID NO: 86824 - DNA, 80 bp, synthetic construct; identical to SEQ ID NO: 15698
  source 1..80: mol_type = other DNA

SEQ ID NO: 86825 - DNA, 80 bp, synthetic construct
  source 1..80: mol_type = other DNA
tcagagatactggaaataaaaagcaacaggacctaagtaaactttaggtagttcttttagtaataggatataggtcaaca

SEQ ID NO: 86826 - DNA, 80 bp, synthetic construct
  source 1..80: mol_type = other DNA
atatgtatacagtaatgaactgattatttcaaatggaaattgtgctattacaaagaactatttgaagaaaggttaatctt

SEQ ID NO: 86827 - DNA, 80 bp, synthetic construct; identical to SEQ ID NO: 15699
  source 1..80: mol_type = other DNA

SEQ ID NO: 86828 - DNA, 80 bp, synthetic construct
  source 1..80: mol_type = other DNA
agcctcaaccctctgggctcaagcaatcctcccacctcagcctcctgagtagctaggaccacaggcacgagctatcatgc

SEQ ID NO: 86829 - DNA, 80 bp, synthetic construct
  source 1..80: mol_type = other DNA
tacagtaatttcaacatttaggaaaataaattggtaatacttcctaaacatccttaacatttatgactatccagattgac

SEQ ID NO: 86830 - DNA, 80 bp, synthetic construct
  source 1..80: mol_type = other DNA
tccctttcaggaagtagattatgaagaaatgaagaatcttgacttcagtgttattgtcgctaataaagcagcttttcaca

SEQ ID NO: 86831 - DNA, 80 bp, synthetic construct
  source 1..80: mol_type = other DNA
ttttgatgaggacactggactaccagcccatgcaaggtaagagagagtgacacgtgtatttctttattttaaattatttt

SEQ ID NO: 86832 - DNA, 80 bp, synthetic construct; identical to SEQ ID NO: 15700
  source 1..80: mol_type = other DNA

SEQ ID NO: 86833 - DNA, 80 bp, synthetic construct
  source 1..80: mol_type = other DNA
tgaatcttcatttaaacctatttgtttcagagattaatgagcctcctacactgtttatgtttgtcttgatcatggtgacc

SEQ ID NO: 86834 - DNA, 80 bp, synthetic construct
  source 1..80: mol_type = other DNA
tctctacagagctgttatttatggagctctagttactgttactgcagttgaatttaaagaatccccacctgctgtcccag

SEQ ID NO: 86835 - DNA, 80 bp, synthetic construct
  source 1..80: mol_type = other DNA
ggctgggaagtccatcaaggcaccagccaacagatttggtatctggtgagtcttgctgtctgcttccaagatggcaccat

SEQ ID NO: 86836 - DNA, 80 bp, synthetic construct; identical to SEQ ID NO: 15701
  source 1..80: mol_type = other DNA

SEQ ID NO: 86837 - DNA, 80 bp, synthetic construct
  source 1..80: mol_type = other DNA
ttctttggcccactatggtcctcttgagttatgtggtctagttggtctagttttaattttctcagctctataacctcaca

SEQ ID NO: 86838 - DNA, 80 bp, synthetic construct
  source 1..80: mol_type = other DNA
ttaggggccatgaatacatcaaaagattgtgtgttctgcctggaagaataatgaaccctgccttttttatttcttagtgt

SEQ ID NO: 86839 - DNA, 80 bp, synthetic construct; identical to SEQ ID NO: 15702
  source 1..80: mol_type = other DNA

SEQ ID NO: 86840 - DNA, 80 bp, synthetic construct
  source 1..80: mol_type = other DNA
tagacagggggattgcttaagcctaggagttcaaggttccagcgagttgccatcacaccactgcattccagactgtttgt

SEQ ID NO: 86841 - DNA, 80 bp, synthetic construct
  source 1..80: mol_type = other DNA
ccctatttctaagactctgcctttattatcagtatgaatgttggtaaaccatagacagcaacttatgtctaagctttaaa

SEQ ID NO: 86842 - DNA, 80 bp, synthetic construct
  source 1..80: mol_type = other DNA
cgaagccacttaatagaaaataaattaacaatttgattgagcaaaccaagatactcatatgtttggttggtactggtatt

SEQ ID NO: 86843 - DNA, 80 bp, synthetic construct
  source 1..80: mol_type = other DNA
tctgcttcagcctcccaaatagctggaattacaggtgcccaccaccacacccagataatttttgtatttttagtagagat

SEQ ID NO: 86844 - DNA, 80 bp, synthetic construct; identical to SEQ ID NO: 15703
  source 1..80: mol_type = other DNA

SEQ ID NO: 86845 - DNA, 80 bp, synthetic construct
  source 1..80: mol_type = other DNA
ctcggctcactgcaacctccacctcctgggttcaagcagttctcctgccacagcctcctgaggagctgggattacaggca

SEQ ID NO: 86846 - DNA, 80 bp, synthetic construct
  source 1..80: mol_type = other DNA
tcattgatttttaaagttgatgtttgtaaatgttgctaacgcccccaataaacaacagaacataagactgctcttctcca

SEQ ID NO: 86847 - DNA, 80 bp, synthetic construct; identical to SEQ ID NO: 15704
  source 1..80: mol_type = other DNA

SEQ ID NO: 86848 - DNA, 80 bp, synthetic construct
  source 1..80: mol_type = other DNA
gcaaaacttcctgattttgaatctagatatgttcaaaatggcacatacactgtaaagattgtggccatatcagaaggtaa

SEQ ID NO: 86849 - DNA, 80 bp, synthetic construct
  source 1..80: mol_type = other DNA
cgaggtcaagagatcgagaccattctggccaacatggtgaaaccccgtctctactaaaaatacaaaaattagctgggcat

SEQ ID NO: 86850 - DNA, 80 bp, synthetic construct
  source 1..80: mol_type = other DNA
cttgtgtctgtagtcccagctactcaggcaactgagatggttggaacacttgagcccaggagtttgagaccagcctggac

SEQ ID NO: 86851 - DNA, 80 bp, synthetic construct; identical to SEQ ID NO: 15705
  source 1..80: mol_type = other DNA

SEQ ID NO: 86852 - DNA, 80 bp, synthetic construct
  source 1..80: mol_type = other DNA
cattgacaaaccacctggcatggcagaaaaatggaaaatagcacgccaagaaagtaagcaaaatcactggactacataga

SEQ ID NO: 86853 - DNA, 80 bp, synthetic construct
  source 1..80: mol_type = other DNA
ctaaaatgtcttgaaggtagctgggtattccctaaatagcccttgaagtagttttgtctggtaaggtgaggagtaccaag

SEQ ID NO: 86854 - DNA, 80 bp, synthetic construct; identical to SEQ ID NO: 15706
  source 1..80: mol_type = other DNA

SEQ ID NO: 86855 - DNA, 80 bp, synthetic construct
  source 1..80: mol_type = other DNA
gggtggttctgaatgcagaaaagtctatccagaaaactattttgttttaaacaactagggttcatttcagtaaaatttca

SEQ ID NO: 86856 - DNA, 80 bp, synthetic construct
  source 1..80: mol_type = other DNA
ttccttatatatttcagtgatctgaattaacaaaacctcccagccaggtgcggtggctcacgcctgtaatcccagcactt

SEQ ID NO: 86857 - DNA, 80 bp, synthetic construct
  source 1..80: mol_type = other DNA
tgaacccagaaggcagagcttgcagtgagccgagattgtgccactgcactccagcctgggtgacagagcaagactctgtc

SEQ ID NO: 86858 - DNA, 80 bp, synthetic construct
  source 1..80: mol_type = other DNA
tggatcacttgaggtcaggagtttgagaccagcctggccaacatggtgaaactccatctctactataaatacaaaaatta

SEQ ID NO: 86859 - DNA, 80 bp, synthetic construct; identical to SEQ ID NO: 15707
  source 1..80: mol_type = other DNA

SEQ ID NO: 86860 - DNA, 80 bp, synthetic construct
  source 1..80: mol_type = other DNA
gtgttgagaacaaaaaaagaagggactagagaaaacaagatcagcccatcattgaaaatgattaacgctgaggatgggta

SEQ ID NO: 86861 - DNA, 80 bp, synthetic construct
  source 1..80: mol_type = other DNA
cctagacccacacacattggttacagctaatcatcatgaaagtaggtgtccaggtctgaacctttgctatttaaactgca

SEQ ID NO: 86862 - DNA, 80 bp, synthetic construct
  source 1..80: mol_type = other DNA
tcccaaccttgtaggtaccagtgtgctgctgcaacaaagtgagaaaaagcttgggagaagtgaaattcagttcctgattt

SEQ ID NO: 86863 - DNA, 80 bp, synthetic construct; identical to SEQ ID NO: 15708
  source 1..80: mol_type = other DNA

SEQ ID NO: 86864 - DNA, 80 bp, synthetic construct
  source 1..80: mol_type = other DNA
aatgtatatccttttctggtttcagtaacttaggaactattggcataaacttcactggtattcccattttgatgagctct

SEQ ID NO: 86865 - DNA, 80 bp, synthetic construct
  source 1..80: mol_type = other DNA
gttttttacaaacccagtttattccaatcaatcctgctttgtacattcaacttatcagagctccgcctccctgatattcc

SEQ ID NO: 86866 - DNA, 80 bp, synthetic construct; identical to SEQ ID NO: 15709
  source 1..80: mol_type = other DNA

SEQ ID NO: 86867 - DNA, 80 bp, synthetic construct
  source 1..80: mol_type = other DNA
gaagcttcatctgtatttacagccactccccatcactcgtgttaccacctgagctctacctcctgttagaccagtgctgg

SEQ ID NO: 86868 - DNA, 80 bp, synthetic construct
  source 1..80: mol_type = other DNA
agatgggaccatctagttgcagaaaaataagttcagggctcccactgattctacattatggtgagttgtataattatttc

SEQ ID NO: 86869 - DNA, 80 bp, synthetic construct
  source 1..80: mol_type = other DNA
ttagagccattggtagatgtgcaattgaaagcacagcactcaacagtctgcagtgtacttttataccatcatctccatgc

SEQ ID NO: 86870 - DNA, 80 bp, synthetic construct
  source 1..80: mol_type = other DNA
tctcagattccctggagcctaatgtggtacttggcacataatagacacttgatgaatgtttgttaaaattgttgaattgc

SEQ ID NO: 86871 - DNA, 80 bp, synthetic construct; identical to SEQ ID NO: 15710
  source 1..80: mol_type = other DNA

SEQ ID NO: 86872 - DNA, 80 bp, synthetic construct
  source 1..80: mol_type = other DNA
gatttggatactatctgaacctagtcttggtattccactcagcagccacagacagcctctttttgatgaacaaggccttg

SEQ ID NO: 86873 - DNA, 80 bp, synthetic construct
  source 1..80: mol_type = other DNA
aatttagaaatatatcaaggttaaccttatctgtgttcaattttgtgtctgtacagtggtaccacttttactgctgatgt

SEQ ID NO: 86874 - DNA, 80 bp, synthetic construct; identical to SEQ ID NO: 15711
  source 1..80: mol_type = other DNA

SEQ ID NO: 86875 - DNA, 80 bp, synthetic construct
  source 1..80: mol_type = other DNA
agaatgtagagcaaggttcaggaagagcaagagtgtgtaggaatctaagtcttttgtcctaacattaaatgggcagtttt

SEQ ID NO: 86876 - DNA, 80 bp, synthetic construct
  source 1..80: mol_type = other DNA
ctctcaccaccatctgttatgagcaccatttctaataggataggatttagcatcaggtggcagagaactcagaataacag

SEQ ID NO: 86877 - DNA, 80 bp, synthetic construct
  source 1..80: mol_type = other DNA
aaccagcacatgggagaaaagtgaagaaccctctttaagcacacttcccggaacttgtgtacaccatttctgcttcattc

SEQ ID NO: 86878 - DNA, 80 bp, synthetic construct; identical to SEQ ID NO: 15712
  source 1..80: mol_type = other DNA

SEQ ID NO: 86879 - DNA, 80 bp, synthetic construct
  source 1..80: mol_type = other DNA
tcaactcaaaatactttttctaactggcctcagtggaaatagcttataccttcctatgcccacttgactcagatccttct

SEQ ID NO: 86880 - DNA, 80 bp, synthetic construct
  source 1..80: mol_type = other DNA
gctctgcttccattgtcaaagggcaacatgagatgtccgagatggatggaaggtgggaagaacacagaagcctgctttct

SEQ ID NO: 86881 - DNA, 80 bp, synthetic construct
  source 1..80: mol_type = other DNA
ggatgagttttatgtattggtggtggggggtggggggaacatttgtatgtgaatgtgatattattagggtaatcattgcc

SEQ ID NO: 86882 - DNA, 80 bp, synthetic construct; identical to SEQ ID NO: 15713
  source 1..80: mol_type = other DNA

SEQ ID NO: 86883 - DNA, 80 bp, synthetic construct
  source 1..80: mol_type = other DNA
ctctgcaggagcaggcttggtagggatgagctccgtaggagaggcagaggatatataacctaaaaaacacaatctattaa

SEQ ID NO: 86884 - DNA, 80 bp, synthetic construct
  source 1..80: mol_type = other DNA
ttgctattatgagggtccaccaaaaaatgatgagaaaagttccaggaagatgatcagatgcaataaggaagctcatgcta

SEQ ID NO: 86885 - DNA, 80 bp, synthetic construct
  source 1..80: mol_type = other DNA
ctctccaaaaatacaaaaaattagctgggcatgctggcacacacctgtagtcccagctactcagaaggctgaggtagggg

SEQ ID NO: 86886 - DNA, 80 bp, synthetic construct; identical to SEQ ID NO: 15714
  source 1..80: mol_type = other DNA

SEQ ID NO: 86887 - DNA, 80 bp, synthetic construct
  source 1..80: mol_type = other DNA
tgatactgacagaacactctatgcaacagaagcagaatacacatgctttttcatatagactgtattctagaacattaaat

SEQ ID NO: 86888 - DNA, 80 bp, synthetic construct
  source 1..80: mol_type = other DNA
gtactactaaagtgatgcttgaagggaaattgtagcaaaaatggctatattagaagatggttctcaaatcagtgacctaa

SEQ ID NO: 86889 - DNA, 80 bp, synthetic construct
  source 1..80: mol_type = other DNA
gataaacattttaccagactaattaggatattaagagattaagcacaaactatggatgttagaaataaaataaagaactt

SEQ ID NO: 86890 - DNA, 80 bp, synthetic construct
  source 1..80: mol_type = other DNA
aggaaagcaagttacttctgtccccctcttctaaatttgcaaattattagcgtgctttcccactttctgctcctttttaa

SEQ ID NO: 86891 - DNA, 80 bp, synthetic construct; identical to SEQ ID NO: 15715
  source 1..80: mol_type = other DNA

SEQ ID NO: 86892 - DNA, 80 bp, synthetic construct
  source 1..80: mol_type = other DNA
ctctctctcactgacacacattcacacacattctcttacattactatagtacagttaacaaatgtagaactttaatattg

SEQ ID NO: 86893 - DNA, 80 bp, synthetic construct
  source 1..80: mol_type = other DNA
tttttaagaatacagtccagttgtgtcgtaggatctctctcaatttgtgtttccctgatggttccttgtaattaaattca

SEQ ID NO: 86894 - DNA, 80 bp, synthetic construct
  source 1..80: mol_type = other DNA
ggtttattctcaggaagaaactgaatcgctgaatgcttctattggttgttgcagttttattgaaggagagctagatgacc

SEQ ID NO: 86895 - DNA, 80 bp, synthetic construct; identical to SEQ ID NO: 15716
  source 1..80: mol_type = other DNA

SEQ ID NO: 86896 - DNA, 80 bp, synthetic construct
  source 1..80: mol_type = other DNA
gccacagagccttattgtgacagagagggtgtatgctccagcttctaccttggtagatcagccttatgctaatgaaggta

SEQ ID NO: 86897 - DNA, 80 bp, synthetic construct
  source 1..80: mol_type = other DNA
tatagcagtaggacagaatgtgacagtgacagaaagagttctagcacctgcttccactctgcaatccagttaccagattc

SEQ ID NO: 86898 - DNA, 80 bp, synthetic construct; identical to SEQ ID NO: 15717
  source 1..80: mol_type = other DNA

SEQ ID NO: 86899 - DNA, 80 bp, synthetic construct
  source 1..80: mol_type = other DNA
gccttttagcaagctatgcaaacaatcctgataaaacaagatacatagagagtcaatctggcttctgagaatttaccaag

SEQ ID NO: 86900 - DNA, 80 bp, synthetic construct
  source 1..80: mol_type = other DNA
acagtctgagcaccagctatggtgctcataacttctttaagacttgaaccctttcaatctgtgtgattcattaaattgga

SEQ ID NO: 86901 - DNA, 80 bp, synthetic construct
  source 1..80: mol_type = other DNA
aactgtggtcaggagtttgagatcagccaggccaacctggtgaaaccccgtctctactaaaaatacaaaaattagctggg

SEQ ID NO: 86902 - DNA, 80 bp, synthetic construct
  source 1..80: mol_type = other DNA
aaaaaaatagcattatacctcttccttgtctcaaccgccatgaaaattctgaacactccaaattcagttgaataatccaa

SEQ ID NO: 86903 - DNA, 80 bp, synthetic construct; identical to SEQ ID NO: 15718
  source 1..80: mol_type = other DNA

SEQ ID NO: 86904 - DNA, 80 bp, synthetic construct
  source 1..80: mol_type = other DNA
cttcccttttctacaagttaatttttttacaaatcatttgggttatctcctaaataggttatattttattgcttctagaa

SEQ ID NO: 86905 - DNA, 80 bp, synthetic construct
  source 1..80: mol_type = other DNA
gtgtcatgcaaaggatttatatagtgtgctcccactaactgtacagatcaggacacatatttttagacatctaagtctgt

SEQ ID NO: 86906 - DNA, 80 bp, synthetic construct; identical to SEQ ID NO: 15719
  source 1..80: mol_type = other DNA

SEQ ID NO: 86907 - DNA, 80 bp, synthetic construct
  source 1..80: mol_type = other DNA
atataactcagtttgttagggagagtgccttaaaggcaggtgtttcttggactttgttatttaattagatctgcttgcaa

SEQ ID NO: 86908 - DNA, 80 bp, synthetic construct; identical to SEQ ID NO: 15720
  source 1..80: mol_type = other DNA

SEQ ID NO: 86909 - DNA, 80 bp, synthetic construct
  source 1..80: mol_type = other DNA
gcgccggcccgcctcgcttatgcctcggcgctgagccgctctcccgattgcccgccgacatgagctgcaacggaggctcc

SEQ ID NO: 86910 - DNA, 80 bp, synthetic construct
  source 1..80: mol_type = other DNA
cccggagagcgcgggctgcggggctcgcgggacagggagggaccgtcctcctctggacgactgggagactcgggtcccga

SEQ ID NO: 86911 - DNA, 80 bp, synthetic construct
  source 1..80: mol_type = other DNA
cagagggggcgtcgggcccgcgcggggctgtcccctgcctgctggacacggctgcagccgcctttgtcccagcccgcgaa

SEQ ID NO: 86912 - DNA, 80 bp, synthetic construct
  source 1..80: mol_type = other DNA
ccgagaccacgactgcaacgactcctggactcctcggccacccaaggacgtttgtatcaaggctgcgcgtcccggcggcg

SEQ ID NO: 86913 - DNA, 80 bp, synthetic construct; identical to SEQ ID NO: 15721
  source 1..80: mol_type = other DNA

SEQ ID NO: 86914 - DNA, 80 bp, synthetic construct
  source 1..80: mol_type = other DNA
tttgggtgggtggggaagagatcctgtccctgctttgaccgggtctcgggagctggactctagatgcccacgtgagccgt

SEQ ID NO: 86915 - DNA, 80 bp, synthetic construct
  source 1..80: mol_type = other DNA
caagcagttttgaaggcagggactactcgagttgcaacctgttttctgcttagattcatttatttatttatggggcatcc

SEQ ID NO: 86916 - DNA, 80 bp, synthetic construct
  source 1..80: mol_type = other DNA
tttgttttaaaattttgccagccatttaaatctgaaatttaaattttctcccgcagtcctccaggatttgagatgcacat

SEQ ID NO: 86917 - DNA, 80 bp, synthetic construct
  source 1..80: mol_type = other DNA
gacaataatcagtactattaatcgaatatttcactcccttggcttcttataccttttgtaggggagtaaaactttaataa

SEQ ID NO: 86918 - DNA, 80 bp, synthetic construct; identical to SEQ ID NO: 15722
  source 1..80: mol_type = other DNA

SEQ ID NO: 86919 - DNA, 80 bp, synthetic construct
  source 1..80: mol_type = other DNA
actacaaaatagcccacaaatgctgacttctgcgttttcaaataatagcgaccgcctgaaggcagggcatgtcgcagttt

SEQ ID NO: 86920 - DNA, 80 bp, synthetic construct
  source 1..80: mol_type = other DNA
cccaagggagccactgctctctgctaagtgaatgatgattaagaatttcataagtatttttctgacccgaaggttttcta

SEQ ID NO: 86921 - DNA, 80 bp, synthetic construct
  source 1..80: mol_type = other DNA
tgtatctagcccttccctgaataaagaaatttgaatgtgtggagggcccaactcttagttttcctttgaaaatgacttta

SEQ ID NO: 86922 - DNA, 80 bp, synthetic construct; identical to SEQ ID NO: 15723
  source 1..80: mol_type = other DNA

SEQ ID NO: 86923 - DNA, 80 bp, synthetic construct
  source 1..80: mol_type = other DNA
aattataaatagtgaaatttgttaccaaagtaacaaagtctcacagttagatctttctttcacccatcaaagggtgaatt

SEQ ID NO: 86924 - DNA, 80 bp, synthetic construct
  source 1..80: mol_type = other DNA
agaagcttatttcttactatgagacaaacaggtcaatttgcctgaattttagagcggggggacccctaaggatcacttag

SEQ ID NO: 86925 - DNA, 80 bp, synthetic construct
  source 1..80: mol_type = other DNA
gtaattacaccatgcaagtatctcaaattccattaattccttaattcagcaagtatttaccgagcattgactgcattctg

SEQ ID NO: 86926 - DNA, 80 bp, synthetic construct; identical to SEQ ID NO: 15724
  source 1..80: mol_type = other DNA

SEQ ID NO: 86927 - DNA, 80 bp, synthetic construct
  source 1..80: mol_type = other DNA
gttttcactgaagccattgaaagtctcctccattggaggagcagggaagtgagacgatcataactgagcttctggactgt

SEQ ID NO: 86928 - DNA, 80 bp, synthetic construct
  source 1..80: mol_type = other DNA
acaggcccagagctcgagtgactcatagcgtagatagtctaaacacttttctgggaaattattgcaaagcaagatttagt

SEQ ID NO: 86929 - DNA, 80 bp, synthetic construct; identical to SEQ ID NO: 15725
  source 1..80: mol_type = other DNA

SEQ ID NO: 86930 - DNA, 80 bp, synthetic construct
  source 1..80: mol_type = other DNA
tgttgaattcctcagtctgcgttcctgtgaaatatttcataatcattgtattctttcattaatactcttgtagagtttct

SEQ ID NO: 86931 - DNA, 80 bp, synthetic construct
  source 1..80: mol_type = other DNA
taatttcattgttcaggtaatggaagtgtcttggaaagggaaaaactgctgatgcccctgatgcctcagtgctgacttct

SEQ ID NO: 86932 - DNA, 80 bp, synthetic construct
  source 1..80: mol_type = other DNA
catctccctcccgctgggctggtcccagtggccctgccgcttgaaaacgttcagatgtggttctgattttgaagtcacgg

SEQ ID NO: 86933 - DNA, 80 bp, synthetic construct
  source 1..80: mol_type = other DNA
atgtgaaatctacatttcatgaaaatgaagacagtttagtgagaagctgcagcaaacagatcaaaggttctgcttggaat

SEQ ID NO: 86934 - DNA, 80 bp, synthetic construct; identical to SEQ ID NO: 15726
  source 1..80: mol_type = other DNA

SEQ ID NO: 86935 - DNA, 80 bp, synthetic construct
  source 1..80: mol_type = other DNA
cacttaatacccaatccatttcttccttttcctctttctcttttttttcttatcaccccgcctccattttgctgcaggac

SEQ ID NO: 86936 - DNA, 80 bp, synthetic construct
  source 1..80: mol_type = other DNA
tctctactaaaaatacaaaaattagctgggcgtggtggcgggctcctgtagtcgcaactgctcaggaggctgaggcagaa

SEQ ID NO: 86937 - DNA, 80 bp, synthetic construct; identical to SEQ ID NO: 15727
  source 1..80: mol_type = other DNA

SEQ ID NO: 86938 - DNA, 80 bp, synthetic construct
  source 1..80: mol_type = other DNA
aacacaatctgccaaacacacagtgtgaaaatcgagaaaaccgcctggaaaagaagcagaacttttattagagtactgtt

SEQ ID NO: 86939 - DNA, 80 bp, synthetic construct
  source 1..80: mol_type = other DNA
atgagccataataccctcagatgggtcttttgtttgcctttgtttttcttccactttactaagccaaacaaacattcatt

SEQ ID NO: 86940 - DNA, 80 bp, synthetic construct
  source 1..80: mol_type = other DNA
actccttgcagaaggctgtaacttttgaagttctgaacttttgaaggatggctaacacagcatttcagctgatgtatata

SEQ ID NO: 86941 - DNA, 80 bp, synthetic construct
  source 1..80: mol_type = other DNA
gcgccaccacgccaggctaattttgtatttttagtagagacggggtttctccatgttggtcaggctggtctggaactccc

SEQ ID NO: 86942 - DNA, 80 bp, synthetic construct; identical to SEQ ID NO: 15728
  source 1..80: mol_type = other DNA

SEQ ID NO: 86943 - DNA, 80 bp, synthetic construct
  source 1..80: mol_type = other DNA
tggaaagaggaaggaaggaaaggagtccagttagagagaaaatatataaacaaaaagaaaggcaaagttagggggcatgg

SEQ ID NO: 86944 - DNA, 80 bp, synthetic construct; identical to SEQ ID NO: 15729
  source 1..80: mol_type = other DNA

SEQ ID NO: 86945 - DNA, 80 bp, synthetic construct
  source 1..80: mol_type = other DNA
gttgcccaggctgatcttaaactcctgggttcaagcaatccggcggcctctgcctcccaaagtgctgggattacaggcat

SEQ ID NO: 86946 - DNA, 80 bp, synthetic construct
  source 1..80: mol_type = other DNA
gttcacatattcatgtggtccgtctttggattagaatccagaacttgttttctttttaaccaccgatgaagggctctcta

SEQ ID NO: 86947 - DNA, 80 bp, synthetic construct
  source 1..80: mol_type = other DNA
tggtttggaagtcaatattcttttgataaatttgacccaaatgagttgttttctttttctttttttttttttaaaaaagc

SEQ ID NO: 86948 - DNA, 80 bp, synthetic construct; identical to SEQ ID NO: 15730
  source 1..80: mol_type = other DNA

SEQ ID NO: 86949 - DNA, 80 bp, synthetic construct
  source 1..80: mol_type = other DNA
ccaacagatggagatagaaatttctgagattaaaaaaaaatctaaaattgtgtagtcaataacatatatatatataatct

SEQ ID NO: 86950 - DNA, 80 bp, synthetic construct
  source 1..80: mol_type = other DNA
tgtctctactaaaaatacaaaaattagctttgcgtggtggcagtgtgcctgtaatcccagctacttgggaggctgaggca

SEQ ID NO: 86951 - DNA, 80 bp, synthetic construct
  source 1..80: mol_type = other DNA
tacacatacagctggtgtatgtctgacatcagactgacccgatgggtcgaaatcatttccgctgaacttcctccctgatt

SEQ ID NO: 86952 - DNA, 80 bp, synthetic construct; identical to SEQ ID NO: 15731
  source 1..80: mol_type = other DNA

SEQ ID NO: 86953 - DNA, 80 bp, synthetic construct
  source 1..80: mol_type = other DNA
tttctgtgcattccccattcctatacagttgttaatttatttactaagatgctgtgcaaaacatgtaagttttttagtgg

SEQ ID NO: 86954 - DNA, 80 bp, synthetic construct
  source 1..80: mol_type = other DNA
gctgggcgtggtggtgcatgcctgtagtcccagctactccagaggctgaggcaggagaatcacttgaacccaggaagtgg

SEQ ID NO: 86955 - DNA, 80 bp, synthetic construct
  source 1..80: mol_type = other DNA
ctgttgtttttttttttttttaagttcaaatatgggtaggcaagggaaggcaggcaaggtgtcttctctttataggatgt

SEQ ID NO: 86956 - DNA, 80 bp, synthetic construct
  source 1..80: mol_type = other DNA
tgtaattcgtttctaactgtggtataactaatcagtctagttcttgggtaaaaagaagttggcaagttttatattttgtg

SEQ ID NO: 86957 - DNA, 80 bp, synthetic construct; identical to SEQ ID NO: 15732
  source 1..80: mol_type = other DNA

SEQ ID NO: 86958 - DNA, 80 bp, synthetic construct
  source 1..80: mol_type = other DNA
attgtgctaagagacaactctttcatttatctgcttgggactggcattctttgtgggaatcaccttcggagccaaattgc

SEQ ID NO: 86959 - DNA, 80 bp, synthetic construct
  source 1..80: mol_type = other DNA
tctttcctctgtttgataacaggtacgttttggaaggtgttctaagtcagttggaattctgcacaagttaggacaacaaa

SEQ ID NO: 86960 - DNA, 80 bp, synthetic construct
  source 1..80: mol_type = other DNA
tggatggctctggcaccacctcccctgggcctgcctggaggagcctgtgtcttcttctgggagtagttcccagggaggtc

SEQ ID NO: 86961 - DNA, 80 bp, synthetic construct; identical to SEQ ID NO: 15733
  source 1..80: mol_type = other DNA

SEQ ID NO: 86962 - DNA, 80 bp, synthetic construct
  source 1..80: mol_type = other DNA
aggacttttcacagacattaaataatcacttggtctgctttaaatctctctgaaaccaaactacagtaggctgtgctgtg

SEQ ID NO: 86963 - DNA, 80 bp, synthetic construct
  source 1..80: mol_type = other DNA
aaagtgcctcatttgaaatgtacattgaatgagcttcattgtagagaaaaataggtattctaggaacatcttgaaaggag

SEQ ID NO: 86964 - DNA, 80 bp, synthetic construct
  source 1..80: mol_type = other DNA
tgcagtgctgtgatcatagctcactgtagcctccaactcgtgggctcaagtgatcctcccacctcagctgcctgagtagc

SEQ ID NO: 86965 - DNA, 80 bp, synthetic construct; identical to SEQ ID NO: 15734
  source 1..80: mol_type = other DNA

SEQ ID NO: 86966 - DNA, 80 bp, synthetic construct
  source 1..80: mol_type = other DNA
agagatatatttctggattggatcctggacctgggaggggaaaacttgctgtgaatgacattattgggctaattggtgaa

SEQ ID NO: 86967 - DNA, 80 bp, synthetic construct
  source 1..80: mol_type = other DNA
gaaaaaaataatatgtatacatagataaatatatgctgaaatatttgggggtagaagggcatggttattctcaagtggtt

SEQ ID NO: 86968 - DNA, 80 bp, synthetic construct; identical to SEQ ID NO: 15735
  source 1..80: mol_type = other DNA

SEQ ID NO: 86969 - DNA, 80 bp, synthetic construct
  source 1..80: mol_type = other DNA
ccggggcctattcactgacctctttcacgtagtgtttagagacacgctttttcagaacagactacagagagatgtgtgtc

SEQ ID NO: 86970 - DNA, 80 bp, synthetic construct
  source 1..80: mol_type = other DNA
tgcaacctggcatgtttctgttcctgggttgggatggatcttcatgtgcaccatcaatttagtatgattttttttttcag

SEQ ID NO: 86971 - DNA, 80 bp, synthetic construct
  source 1..80: mol_type = other DNA
ataactgagacatcctaggatctcatcgaatccagattagaaatcatggagttcgtggtatttgctgtgtgaagtcttca

SEQ ID NO: 86972 - DNA, 80 bp, synthetic construct
  source 1..80: mol_type = other DNA
tgcctcttcacaaagtaccccttctaaatagcctacatttgaaacagattttaaccagatgaatttacgggctctgttta

SEQ ID NO: 86973 - DNA, 80 bp, synthetic construct; identical to SEQ ID NO: 15736
  source 1..80: mol_type = other DNA

SEQ ID NO: 86974 - DNA, 80 bp, synthetic construct
  source 1..80: mol_type = other DNA
atatttgctaacatttctgtttagagaaaagaggttcatttgactaaagccaagtaaaagcagcaaatataaaattccag

SEQ ID NO: 86975 - DNA, 80 bp, synthetic construct
  source 1..80: mol_type = other DNA
gtgacatcttatatgattatagcgcatcatcaaaaccaggacattgattggcccaatacagttaaccaggcagaagcctt

SEQ ID NO: 86976 - DNA, 80 bp, synthetic construct
  source 1..80: mol_type = other DNA
tggcgtggtggcacatgcctgtagtctcagctactcaggagcctgaggcaggagaatcacttgaatccaggaggcagagg

SEQ ID NO: 86977 - DNA, 80 bp, synthetic construct; identical to SEQ ID NO: 15737
  source 1..80: mol_type = other DNA

SEQ ID NO: 86978 - DNA, 80 bp, synthetic construct
  source 1..80: mol_type = other DNA
ttgtcatgtttacagtggaagctcttgcttccattaatgcccatgaaggttttcttcctggtagtatgtgttttccttca

SEQ ID NO: 86979 - DNA, 80 bp, synthetic construct
  source 1..80: mol_type = other DNA
cagaaaaggtattgtccacagagcatggatcgggcagtccccatgaaaaagaacaccacataaccagttacactcaattc

SEQ ID NO: 86980 - DNA, 80 bp, synthetic construct; identical to SEQ ID NO: 15738
  source 1..80: mol_type = other DNA

SEQ ID NO: 86981 - DNA, 80 bp, synthetic construct
  source 1..80: mol_type = other DNA
caatcctcccacttcagcctatcaagtagttgggctatcggcatgtgccatacctagcaaattaaaaaaaaattttttgt

SEQ ID NO: 86982 - DNA, 80 bp, synthetic construct
  source 1..80: mol_type = other DNA
ttagagttggaaacaaagactataaggcagaaaaatgtagtctgaatttgttctactactacctggggcccagggtacta

SEQ ID NO: 86983 - DNA, 80 bp, synthetic construct
  source 1..80: mol_type = other DNA
tcttcaaataccataaaacatttgtagcttctctattgacacaaaagactcagaaaaggggaaatttgcccagaacgggt

SEQ ID NO: 86984 - DNA, 80 bp, synthetic construct
  source 1..80: mol_type = other DNA
tggctgggatgagttcaccaaacatgtcaccagtgaatgtttggggtggatgaggcagcaaagggtaagcagcttcttga

SEQ ID NO: 86985 - DNA, 80 bp, synthetic construct; identical to SEQ ID NO: 15739
  source 1..80: mol_type = other DNA

SEQ ID NO: 86986 - DNA, 80 bp, synthetic construct
  source 1..80: mol_type = other DNA
cagttcatttaaaatggtcatagattggaggagctggaaacagtgaaactagccattctggtttaggctcattggttgct

SEQ ID NO: 86987 - DNA, 80 bp, synthetic construct
  source 1..80: mol_type = other DNA
gcaaagtatttttcaagactaatgattgttgtgttgtttcatgtagtcattatgtcctataatgaacaggtggtggtaga

SEQ ID NO: 86988 - DNA, 80 bp, synthetic construct
  source 1..80: mol_type = other DNA
ttcagcagtggttctaaaatttctcaactcctttaaaatttttgtgtattctttcctaagtagtgaggacttcagtgact

SEQ ID NO: 86989 - DNA, 80 bp, synthetic construct; identical to SEQ ID NO: 15740
  source 1..80: mol_type = other DNA

SEQ ID NO: 86990 - DNA, 80 bp, synthetic construct
  source 1..80: mol_type = other DNA
aggatccacaatgatgggcaaaacagccttccaatcaaattagtttgaaatgtcatatctcctaaagttttcttagtatg

SEQ ID NO: 86991 - DNA, 80 bp, synthetic construct
  source 1..80: mol_type = other DNA
tctcgtctcactgcaacctctatctcccgggttcaagcaattctcctgcttcagcctgccgagtatctgggactacaggc

SEQ ID NO: 86992 - DNA, 80 bp, synthetic construct; identical to SEQ ID NO: 15741
  source 1..80: mol_type = other DNA

SEQ ID NO: 86993 - DNA, 80 bp, synthetic construct
  source 1..80: mol_type = other DNA
caggcactcctgagccaggtttttgttttgttttcccgatttgtgtttgccgatggacaggtcagatacgatacacctgg

SEQ ID NO: 86994 - DNA, 80 bp, synthetic construct
  source 1..80: mol_type = other DNA
aagccttgccaagtgtattagaacatggatgtggcttagaacaatgtgttttatgttcttgctgcaatcccagattggaa

SEQ ID NO: 86995 - DNA, 80 bp, synthetic construct
  source 1..80: mol_type = other DNA
tgtttgcccttggcatgtccaagagatgacacaggtgatttggaaatttacatgtactcatgcaaaagaagggtgagata

SEQ ID NO: 86996 - DNA, 80 bp, synthetic construct; identical to SEQ ID NO: 15742
  source 1..80: mol_type = other DNA

SEQ ID NO: 86997 - DNA, 80 bp, synthetic construct
  source 1..80: mol_type = other DNA
ttataacatatcatacatatatatgcacacatatgttctgtgcacatgcttgcttgcctgtgcacaggtagatttggttt

SEQ ID NO: 86998 - DNA, 80 bp, synthetic construct
  source 1..80: mol_type = other DNA
actccatatttacatctttggttctatctgaagtaaagccgtgatggtgtgcgtaagtgaaacaggtgcaaaggggcaac

SEQ ID NO: 86999 - DNA, 80 bp, synthetic construct
  source 1..80: mol_type = other DNA
cctggtacttgtctgtgtttcattttagagtcttcaaaatatctaccgaaggatcgtgtaattactcaatcccagggagt

SEQ ID NO: 87000 - DNA, 80 bp, synthetic construct; identical to SEQ ID NO: 15743
  source 1..80: mol_type = other DNA

SEQ ID NO: 87001 - DNA, 80 bp, synthetic construct
  source 1..80: mol_type = other DNA
tcagacttgaaactgggttgagaattacagcataaaatcataactgatcttaagtgcttagtttcccgcaggtctctaca

SEQ ID NO: 87002 - DNA, 80 bp, synthetic construct
  source 1..80: mol_type = other DNA
ctttaaactttaagacaattttctaacacgtgagtctttaagtgaccctgatctgggctttcctttgtggagacggtgct

SEQ ID NO: 87003 - DNA, 80 bp, synthetic construct
  source 1..80: mol_type = other DNA
aaggaggcttagaagggccactcttttctatacaatccacaaggggatttatatctacctgctttttgttgtcttctagc

SEQ ID NO: 87004 - DNA, 80 bp, synthetic construct
  source 1..80: mol_type = other DNA
aagcacatcctggcggggaggcacctgttcatcgatgctaatgttgttgctgctgctgagtttcctttagaagtgaattt

SEQ ID NO: 87005 - DNA, 80 bp, synthetic construct; identical to SEQ ID NO: 15744
  source 1..80: mol_type = other DNA

SEQ ID NO: 87006 - DNA, 80 bp, synthetic construct
  source 1..80: mol_type = other DNA
ttctcaagatagaggtctaccagatcgtcatcacaattttatgacactcagtcatatcagttacttgattcataagagga

SEQ ID NO: 87007 - DNA, 80 bp, synthetic construct
  source 1..80: mol_type = other DNA
ctggggtgtgacttatggcactttgaatttttggggagaaggtaggaaaagcttgatttctctaacagtccattttcccc

SEQ ID NO: 87008 - DNA, 80 bp, synthetic construct; identical to SEQ ID NO: 15745
  source 1..80: mol_type = other DNA

SEQ ID NO: 87009 - DNA, 80 bp, synthetic construct
  source 1..80: mol_type = other DNA
gagttcgagaccagcctggccaactggtgaaaccccgtctctactaaaaatacaaaaattagcaggacgtggtggtgcat

SEQ ID NO: 87010 - DNA, 80 bp, synthetic construct
  source 1..80: mol_type = other DNA
acagtccgtctcaaaaaaaaaaaagttgctgccttcttgttcattgcagatttggatgggtcttttcccataccaggtgg

SEQ ID NO: 87011 - DNA, 80 bp, synthetic construct
  source 1..80: mol_type = other DNA
tgcagagaacaccagtcactgcatattgttattttaatgctgcctttgaacctcctgtgcagaaagcgtcctttgagagg

SEQ ID NO: 87012 - DNA, 80 bp, synthetic construct; identical to SEQ ID NO: 15746
  source 1..80: mol_type = other DNA

SEQ ID NO: 87013 - DNA, 80 bp, synthetic construct
  source 1..80: mol_type = other DNA
tacatggatacatcgagggcaacaacacacactggggcctttcggagggcagagggtggaggtggaaggagggagaggat

SEQ ID NO: 87014 - DNA, 80 bp, synthetic construct
  source 1..80: mol_type = other DNA
aatatcccagaagaccgtagtttgtttagagaggataagaactggtacgttcagataacccaggatgtgtgtggcactgc

SEQ ID NO: 87015 - DNA, 80 bp, synthetic construct
  source 1..80: mol_type = other DNA
gccttaaaaatgctgtgattcttgaggaaaacagcgtgattctttggcattgttcatttccaaaatgcagttttgtattt

SEQ ID NO: 87016 - DNA, 80 bp, synthetic construct; identical to SEQ ID NO: 15747
  source 1..80: mol_type = other DNA

SEQ ID NO: 87017 - DNA, 80 bp, synthetic construct
  source 1..80: mol_type = other DNA
tcagtattttagactttcaggccatttggtctctgttacaattacttaaccctgctattatagtgcagaaggaggcatag

SEQ ID NO: 87018 - DNA, 80 bp, synthetic construct
  source 1..80: mol_type = other DNA
tggccatactgcttgttaaaaaacacagaaagttccatatcagttggtaagaatcactgtcttgagccccctaagccctt

SEQ ID NO: 87019 - DNA, 80 bp, synthetic construct
  source 1..80: mol_type = other DNA
gtgctagccccagtgacagttctgattggtcagtatctctgctatttgggtgatacatattttgactaagactcctcatg

SEQ ID NO: 87020 - DNA, 80 bp, synthetic construct; identical to SEQ ID NO: 15748
  source 1..80: mol_type = other DNA

SEQ ID NO: 87021 - DNA, 80 bp, synthetic construct
  source 1..80: mol_type = other DNA
ttcaaaatgttgcataaatcctcttcattgattttgagtgcagagtagcatagatttgcaaccttgccatcagtcctaca

SEQ ID NO: 87022 - DNA, 80 bp, synthetic construct
  source 1..80: mol_type = other DNA
acagttttttgaagaggcgcagtctactgaagcatacctgaaggggctccaggactccatcaggaagaagtacccctgcg

SEQ ID NO: 87023 - DNA, 80 bp, synthetic construct
  source 1..80: mol_type = other DNA
gccaagcaagcattttcttcagcttccagtggcttttctcaaaattaacttctttacatgcccaactactcttgacagtt

SEQ ID NO: 87024 - DNA, 80 bp, synthetic construct
  source 1..80: mol_type = other DNA
ctggagagtgttgtcatgaaaggttctcatgtttcctgccgacgaatttgtgattttttacaattgatgcaactgcagtg

SEQ ID NO: 87025 - DNA, 80 bp, synthetic construct; identical to SEQ ID NO: 15749
  source 1..80: mol_type = other DNA

SEQ ID NO: 87026 - DNA, 80 bp, synthetic construct
  source 1..80: mol_type = other DNA
aatgtctttgatctatgaaatcagcagctatggaacaaaagcagcagctctgttctgaatcatatggtagttgtcaataa

SEQ ID NO: 87027 - DNA, 80 bp, synthetic construct
  source 1..80: mol_type = other DNA
ctatgggtgacacagtgagaccaaataaataaataaaatgtagctcacttcatgtataccttttaggctcacatgtatta

SEQ ID NO: 87028 - DNA, 80 bp, synthetic construct; identical to SEQ ID NO: 15750
  source 1..80: mol_type = other DNA

SEQ ID NO: 87029 - DNA, 80 bp, synthetic construct
  source 1..80: mol_type = other DNA
catgaatgtgagggcagaggaagagggcaggtgtttatacctgaagcttagacacacgatgccttgccataataaacacc

SEQ ID NO: 87030 - DNA, 80 bp, synthetic construct
  source 1..80: mol_type = other DNA
ctgaggttaggagtttgagaccagcctgaccaacatggagaaactctgtctctactaaaaatataaaattagccaggtgt

SEQ ID NO: 87031 - DNA, 80 bp, synthetic construct
  source 1..80: mol_type = other DNA
actgtagtggggccagagtgaataatacttgtcatgcacttcaaaggcatcattttaaggttctccttttcttagaaaat

SEQ ID NO: 87032 - DNA, 80 bp, synthetic construct; identical to SEQ ID NO: 15751
  source 1..80: mol_type = other DNA

SEQ ID NO: 87033 - DNA, 80 bp, synthetic construct
  source 1..80: mol_type = other DNA
tacttttggggagtaaatgaatccaaatccatgaactgttttcaaagttatacctctacctgttactttatcagtgactg

SEQ ID NO: 87034 - DNA, 80 bp, synthetic construct
  source 1..80: mol_type = other DNA
ccatcttggctctgtggaaccagctctacatcaacatgaagagcctggtgtcctggcactactgcatgattgacatagag

SEQ ID NO: 87035 - DNA, 80 bp, synthetic construct
  source 1..80: mol_type = other DNA
tccttagaggttctggtctgtccaatagagaacaggagggattagcatatggctgattatgagagaaagaagcaatacta

SEQ ID NO: 87036 - DNA, 80 bp, synthetic construct
  source 1..80: mol_type = other DNA
gtatcacaaaagtaaaaggtgggatagaattcttggaagagcacccaaagcattacttactctaaatcagttgttttcag

SEQ ID NO: 87037 - DNA, 80 bp, synthetic construct; identical to SEQ ID NO: 15752
  source 1..80: mol_type = other DNA

SEQ ID NO: 87038 - DNA, 80 bp, synthetic construct
  source 1..80: mol_type = other DNA
tggggcagtcataaatcccaaatcacttctgcctgtctcctttcagctgaaaacaatgcggcaggaagattacatgaaga

SEQ ID NO: 87039 - DNA, 80 bp, synthetic construct
  source 1..80: mol_type = other DNA
ccagacaggtcggcttgggacatctttctctttgtatcaaccatccataccattttaaaaagaagggagtttgcataaaa

SEQ ID NO: 87040 - DNA, 80 bp, synthetic construct
  source 1..80: mol_type = other DNA
ttgtggccctaacttctttttacagtgaccacaactgaaatcactcatcatggaacctgccaagatgtcaaccataataa

SEQ ID NO: 87041 - DNA, 80 bp, synthetic construct; identical to SEQ ID NO: 15753
  source 1..80: mol_type = other DNA

SEQ ID NO: 87042 - DNA, 80 bp, synthetic construct
  source 1..80: mol_type = other DNA
ctgttcgtttgtgtgttgttgaatcaggctaccgtccatctcaaaagttttcacaaccattaatttggcttcttgcagag

SEQ ID NO: 87043 - DNA, 80 bp, synthetic construct
  source 1..80: mol_type = other DNA
caaccaagcctgggcacactgcactggaaggcctaaatagagatattctaagaggatcacatttacagtgctaatgaggc

SEQ ID NO: 87044 - DNA, 80 bp, synthetic construct; identical to SEQ ID NO: 15754
  source 1..80: mol_type = other DNA

SEQ ID NO: 87045 - DNA, 80 bp, synthetic construct
  source 1..80: mol_type = other DNA
aacgtcgaaaagatacaataaaaatacagtattataatcttacgggggctggatgcaggggcacatgcctgtaatcccag

SEQ ID NO: 87046 - DNA, 80 bp, synthetic construct
  source 1..80: mol_type = other DNA
caaaacatcattagtagacacatgactatacacacacacagtggggtactatttacctttaaaaaagaaagagatcctgg

SEQ ID NO: 87047 - DNA, 80 bp, synthetic construct
  source 1..80: mol_type = other DNA
aatctcagctactcaggaggctgaggcaggagaatcgcttgaacccaggagatggaggttgcagtgagctgagatcacgc

SEQ ID NO: 87048 - DNA, 80 bp, synthetic construct; identical to SEQ ID NO: 15755
  source 1..80: mol_type = other DNA

SEQ ID NO: 87049 - DNA, 80 bp, synthetic construct
  source 1..80: mol_type = other DNA
ttttaggtgctcttaccacacatacaaaaaaagataaccatggaagttgactgatgtgttaatttacttacctgatgtaa

SEQ ID NO: 87050 - DNA, 80 bp, synthetic construct
  source 1..80: mol_type = other DNA
tgattcacaagcaattgctgaggttctcaaccagcttaaagatatgcttgccaacttcagaggttctgaaaagtactgct

SEQ ID NO: 87051 - DNA, 80 bp, synthetic construct
  source 1..80: mol_type = other DNA
acagtttctctgttactagagatttacttacatccttctgtggtttggagagcatgttaattccgctagcctcgcatgtt

SEQ ID NO: 87052 - DNA, 80 bp, synthetic construct
  source 1..80: mol_type = other DNA
cattactagctgtgagaggcaaatcttcacagactaattatgtcactggcaattttatgtgcttcttttgctctttccag

SEQ ID NO: 87053 - DNA, 80 bp, synthetic construct; identical to SEQ ID NO: 15756
  source 1..80: mol_type = other DNA

SEQ ID NO: 87054 - DNA, 80 bp, synthetic construct
  source 1..80: mol_type = other DNA
aaactttaatatgttcatattattattataacaggatagcacaaagaacaagattattggaacaaatactgggaaatgca

SEQ ID NO: 87055 - DNA, 80 bp, synthetic construct
  source 1..80: mol_type = other DNA
aataaaaaatgacttgaacttgaagaagtcgttgttggccactatgaagacagaactacagaaagcccagcagatccact

SEQ ID NO: 87056 - DNA, 80 bp, synthetic construct; identical to SEQ ID NO: 15757
  source 1..80: mol_type = other DNA

SEQ ID NO: 87057 - DNA, 80 bp, synthetic construct
  source 1..80: mol_type = other DNA
ctcttggaaggagtagctgccttgagttagcattctccaaaagtttatgaaaattaaatcttagaccaaaaaaaatgcct

SEQ ID NO: 87058 - DNA, 80 bp, synthetic construct
  source 1..80: mol_type = other DNA
atcattttctatttttttcatgtgtttttatgattgaataatattccattgtttggcagtgccacattttgttgatcttt

SEQ ID NO: 87059 - DNA, 80 bp, synthetic construct
  source 1..80: mol_type = other DNA
ataagataatgattttattgtatctatttccccccaggttatgggacctggagaaacaaatcaagcaattgaggaattat

SEQ ID NO: 87060 - DNA, 80 bp, synthetic construct
  source 1..80: mol_type = other DNA
attgggtgtaattcatgttttcctctggtttttgtatcagtgcctaggtttgaaatgatgaatatttaatattactaacc

SEQ ID NO: 87061 - DNA, 80 bp, synthetic construct; identical to SEQ ID NO: 15758
  source 1..80: mol_type = other DNA

SEQ ID NO: 87062 - DNA, 80 bp, synthetic construct
  source 1..80: mol_type = other DNA
tctggcaaacgagacaaatcagaggaagtacaaaaaattgctgaactttgcgccaattcaattaaggtatgttggtttca

SEQ ID NO: 87063 - DNA, 80 bp, synthetic construct
  source 1..80: mol_type = other DNA
cattggcagtatccatttgaatggctggtttctattctttgactggtggtaggtgctgcattctccatttagcatacaaa

SEQ ID NO: 87064 - DNA, 80 bp, synthetic construct
  source 1..80: mol_type = other DNA
tagctgggattacaggcatgcaccaccatgcccggctaattttatatttttagtagagacagggtttctccgtgttggtc

SEQ ID NO: 87065 - DNA, 80 bp, synthetic construct; identical to SEQ ID NO: 15759
  source 1..80: mol_type = other DNA

SEQ ID NO: 87066 - DNA, 80 bp, synthetic construct
  source 1..80: mol_type = other DNA
tcctgcctgtcttccttaccattgctgatttcatcccattacagggtaccactttaagaggtttaatagcaggttatgtg

SEQ ID NO: 87067 - DNA, 80 bp, synthetic construct
  source 1..80: mol_type = other DNA
aaagatgtcagagactatcgtacctgtcagatggtttaggggaaacagcctggagagatgagaatgggatacatttttgg

SEQ ID NO: 87068 - DNA, 80 bp, synthetic construct; identical to SEQ ID NO: 15760
  source 1..80: mol_type = other DNA

SEQ ID NO: 87069 - DNA, 80 bp, synthetic construct
  source 1..80: mol_type = other DNA
tgcttgtttgtaagtctggggttacttccatgctccaatacgctgctttaaatgaacttaagtaatagtcataatattgc

SEQ ID NO: 87070 - DNA, 80 bp, synthetic construct
  source 1..80: mol_type = other DNA
aattacctcattttacagatgaggtagctcagactcaaagataatatatcatttgctaagagcatatgagcagctggtgc

SEQ ID NO: 87071 - DNA, 80 bp, synthetic construct
  source 1..80: mol_type = other DNA
tctttcttggaatgtgaggtgtttttcttttgacataatctctgatttcattccacagctgaaaaataccaagatcgaag

SEQ ID NO: 87072 - DNA, 80 bp, synthetic construct; identical to SEQ ID NO: 15761
  source 1..80: mol_type = other DNA

SEQ ID NO: 87073 - DNA, 80 bp, synthetic construct
  source 1..80: mol_type = other DNA
agaaattagagtctgagaaagccatcaaggagaaggagtacgagattgaaaggttgagggttctactgcaggaagaaggc

SEQ ID NO: 87074 - DNA, 80 bp, synthetic construct
  source 1..80: mol_type = other DNA
gaaaccagcttgatagactttcaagggaaaatcgagatctgaaggatgaaattgtcaggctcaatgacagcatcttgcag

SEQ ID NO: 87075 - DNA, 80 bp, synthetic construct
  source 1..80: mol_type = other DNA
ctgccaagaccattcaggacaaaaataaggagatcgagagactcaaagctgagtttcaggaggaggccaagcgccgctgg

SEQ ID NO: 87076 - DNA, 80 bp, synthetic construct; identical to SEQ ID NO: 15762
  source 1..80: mol_type = other DNA

SEQ ID NO: 87077 - DNA, 80 bp, synthetic construct
  source 1..80: mol_type = other DNA
tccaggataaaaacaaggagatagaaaggttaaaacaactgatcgacaaagaaacaaatgaccggaaatgcctggaagat

SEQ ID NO: 87078 - DNA, 80 bp, synthetic construct
  source 1..80: mol_type = other DNA
gaaagggtttcccaggagaggactgtgaaggaccaggatatcacgcggttccagaactctctgaaagagctgcagctgca

SEQ ID NO: 87079 - DNA, 80 bp, synthetic construct
  source 1..80: mol_type = other DNA
catcaaaatcaccaacctgacccagcagctggagcaggcatccattgttaagaagaggagtgaggatgacctccggcagc

SEQ ID NO: 87080 - DNA, 80 bp, synthetic construct; identical to SEQ ID NO: 15763
  source 1..80: mol_type = other DNA

SEQ ID NO: 87081 - DNA, 80 bp, synthetic construct
  source 1..80: mol_type = other DNA
gattaatgatttacagagagagagggaaaatttgagacaggaaattgagaaattccaaaagcaggctttagaggtattca

SEQ ID NO: 87082 - DNA, 80 bp, synthetic construct
  source 1..80: mol_type = other DNA
tcaaatgctgatctctgggtagcctgtgtttggccctgcttttaagaacactaatacatgtataacttcctccgaatgtt

SEQ ID NO: 87083 - DNA, 80 bp, synthetic construct
  source 1..80: mol_type = other DNA
tagtgttcgcttttgatcatggccctagtgtgtttccttttgtttgactttccttctcctaacccttaatttaaaaataa

SEQ ID NO: 87084 - DNA, 80 bp, synthetic construct; identical to SEQ ID NO: 15764
  source 1..80: mol_type = other DNA

SEQ ID NO: 87085 - DNA, 80 bp, synthetic construct
  source 1..80: mol_type = other DNA
cagaatttttcccacaaatttgtaaaataacaagctcacagtgtatccagggacaatatagaaagaaaaaataagcaagg

SEQ ID NO: 87086 - DNA, 80 bp, synthetic construct
  source 1..80: mol_type = other DNA
caggaatcaaagaatcagtgtactcaggtggtacaggaaagagagagccttctggtgaaaatcaaagtcctggagcaaga

SEQ ID NO: 87087 - DNA, 80 bp, synthetic construct
  source 1..80: mol_type = other DNA
aggaagatagaatcggaaagagaaaagagtgagagagagaagaacagtcttaggagtgagatcgaaagactccaagcaga

SEQ ID NO: 87088 - DNA, 80 bp, synthetic construct
  source 1..80: mol_type = other DNA
tggaccgttgacacctccaagctggtgtttgatgggctgaggaagaaggtgacagcaatgcagctctatgagtgtcagct

SEQ ID NO: 87089 - DNA, 80 bp, synthetic construct; identical to SEQ ID NO: 15765
  source 1..80: mol_type = other DNA

SEQ ID NO: 87090 - DNA, 80 bp, synthetic construct
  source 1..80: mol_type = other DNA
gacttcgatgaccgtcagcagatatatgcagcagaaaaagctatcactggttttgatgatccattttcaggcaagacagt

SEQ ID NO: 87091 - DNA, 80 bp, synthetic construct
  source 1..80: mol_type = other DNA
tatcgatccctgaatgatccccgagatagtcagaaaaactttgtggatccagtcaccaaaaagaaggtcagttacgtgca

SEQ ID NO: 87092 - DNA, 80 bp, synthetic construct; identical to SEQ ID NO: 15766
  source 1..80: mol_type = other DNA

SEQ ID NO: 87093 - DNA, 80 bp, synthetic construct
  source 1..80: mol_type = other DNA
tagcaacttgaggttaccagtggaggaagcctacaagagaggtctggtgggcattgagttcaaagagaagctcctgtctg

SEQ ID NO: 87094 - DNA, 80 bp, synthetic construct
  source 1..80: mol_type = other DNA
tttaccagttgacatagcatataagaggggctatttcaatgaggaactcagtgagattctctcagatccaagtgatgata

SEQ ID NO: 87095 - DNA, 80 bp, synthetic construct
  source 1..80: mol_type = other DNA
agtggtcatagttgacccagaaaccaataaagaaatgtctgttcaggaggcctacaagaagggcctaattgattatgaaa

SEQ ID NO: 87096 - DNA, 80 bp, synthetic construct
  source 1..80: mol_type = other DNA
atgctattgacaagggccttgttgacaggaagttctttgatcagtaccgatccggcagcctcagcctcactcaatttgct

SEQ ID NO: 87097 - DNA, 80 bp, synthetic construct; identical to SEQ ID NO: 15767
  source 1..80: mol_type = other DNA

SEQ ID NO: 87098 - DNA, 80 bp, synthetic construct
  source 1..80: mol_type = other DNA
agaaagccttcataggcttcgagggtgtgaagggaaagaagaagatgtcagcagcagaggcagtgaaagaaaaatggctc

SEQ ID NO: 87099 - DNA, 80 bp, synthetic construct
  source 1..80: mol_type = other DNA
aaatcctgacctgccccaaaaccaaattaaaaatatcctataaggatgccataaatcgctccatggtagaagatatcact

SEQ ID NO: 87100 - DNA, 80 bp, synthetic construct; identical to SEQ ID NO: 15768
  source 1..80: mol_type = other DNA

SEQ ID NO: 87101 - DNA, 80 bp, synthetic construct
  source 1..80: mol_type = other DNA
tagctcatcttaaataagcagtacacttggatgcagtgcgtctgaagtgctaatcagttgtaacaatagcacaaatcgaa

SEQ ID NO: 87102 - DNA, 80 bp, synthetic construct
  source 1..80: mol_type = other DNA
tcattctgcttctcatctaaatatttccatattctgtattaggagaaaattaccctcccagcaccagcccccctctcaaa

SEQ ID NO: 87103 - DNA, 80 bp, synthetic construct
  source 1..80: mol_type = other DNA
ttgcttgtcatattcgatgtactttaaggtgtctttatgaagtttgctattctggcaataaacttttagacttttgaagt

SEQ ID NO: 87104 - DNA, 80 bp, synthetic construct; identical to SEQ ID NO: 15769
  source 1..80: mol_type = other DNA

SEQ ID NO: 87105 - DNA, 80 bp, synthetic construct
  source 1..80: mol_type = other DNA
tgtttcaagttctcccttcctgcccagctcagttcaccagtgctggatccaggttcaaatgacagggacttgggttttta

SEQ ID NO: 87106 - DNA, 80 bp, synthetic construct
  source 1..80: mol_type = other DNA
gctccattctgggtcgagtggaggactggctcccagggtgagttcacaccagtgctcccagctggcggctgctcagtctc

SEQ ID NO: 87107 - DNA, 80 bp, synthetic construct
  source 1..80: mol_type = other DNA
gcgggagcgggggcaggggcggaggtcagggtcctggccagggcccctcaatccctcagaggcttcactgggctcccccg

SEQ ID NO: 87108 - DNA, 80 bp, synthetic construct; identical to SEQ ID NO: 15770
  source 1..80: mol_type = other DNA

SEQ ID NO: 87109 - DNA, 80 bp, synthetic construct
  source 1..80: mol_type = other DNA
cccctcaaggctgatggagatggcgttttcagggaggatggatggggtaacgtgaggaaactgaggctcgggagtacaga

SEQ ID NO: 87110 - DNA, 80 bp, synthetic construct
  source 1..80: mol_type = other DNA
gggccaagcagtctttccttgagcctctgacatccgattctgtgtcatggggttatcagccctgccttcttggtcctggg

SEQ ID NO: 87111 - DNA, 80 bp, synthetic construct
  source 1..80: mol_type = other DNA
ggagaggcctcaaggaaggcaaggccagcacccaccctcaaagggcctctgtctcacccaggagactccatcctcccagc

SEQ ID NO: 87112 - DNA, 80 bp, synthetic construct
  source 1..80: mol_type = other DNA
gccccttctgggccgctttctctggggtcccccttgccatgtgctatgtgcccaggccgtttctcagggctgcccgctgt

SEQ ID NO: 87113 - DNA, 80 bp, synthetic construct; identical to SEQ ID NO: 15771
  source 1..80: mol_type = other DNA

SEQ ID NO: 87114 - DNA, 80 bp, synthetic construct
  source 1..80: mol_type = other DNA
agctatgagccaggtcagcccagagtcccaggctcactctggctggagggagaggcccacttaggggagttgaaggcttc

SEQ ID NO: 87115 - DNA, 80 bp, synthetic construct
  source 1..80: mol_type = other DNA
tcctttgtccgcctctcttccctcaggtctcctgttctttgagattacactggtgaccatactacatggatgtgcgggtg

SEQ ID NO: 87116 - DNA, 80 bp, synthetic construct; identical to SEQ ID NO: 15772
  source 1..80: mol_type = other DNA

SEQ ID NO: 87117 - DNA, 80 bp, synthetic construct
  source 1..80: mol_type = other DNA
gctgaagcgcgggtcaccctcggggcttggggacagcaggctcacacagttgcccttggccgcccggccctggatgagtt

SEQ ID NO: 87118 - DNA, 80 bp, synthetic construct
  source 1..80: mol_type = other DNA
gctagaattaagagttcccacccctgagtcctcacagtggaaagaaagacatggacctgtctggggcagaggaggaggac

SEQ ID NO: 87119 - DNA, 80 bp, synthetic construct; identical to SEQ ID NO: 15773
  source 1..80: mol_type = other DNA

SEQ ID NO: 87120 - DNA, 80 bp, synthetic construct
  source 1..80: mol_type = other DNA
tgactctctttttttttttttttgagacggagtctcgctctgtcgcccaggctggagtgcagtggtgcgatctcagctca

SEQ ID NO: 87121 - DNA, 80 bp, synthetic construct
  source 1..80: mol_type = other DNA
gtgatctgcccgcctcggcctcccaaagtgctgcgattacaggcgtgagccactgcgcccggccctttttttttttttta

SEQ ID NO: 87122 - DNA, 80 bp, synthetic construct; identical to SEQ ID NO: 15774
  source 1..80: mol_type = other DNA

SEQ ID NO: 87123 - DNA, 80 bp, synthetic construct
  source 1..80: mol_type = other DNA
accaccgcctgcggggataaagccagggagctggtcagagccagaaaggaccccagagggtatcccacccaatacgccca

SEQ ID NO: 87124 - DNA, 80 bp, synthetic construct
  source 1..80: mol_type = other DNA
ctcttacctcattgctgatcatacttgctgacacctgcatgccacagctggagtaagcactgcgcaagacaaacttgtca

SEQ ID NO: 87125 - DNA, 80 bp, synthetic construct; identical to SEQ ID NO: 15775
  source 1..80: mol_type = other DNA

SEQ ID NO: 87126 - DNA, 80 bp, synthetic construct
  source 1..80: mol_type = other DNA
ttagtagagatagggtttcaccatgttggccaggctggtctcaaactcctgacctcaggtgatccacctgcctcggcctc

SEQ ID NO: 87127 - DNA, 80 bp, synthetic construct
  source 1..80: mol_type = other DNA
ggtcaggagatcgagaccatcctggctaacatgatgaaaccccgtctctactaaaaatacaaaaaaattagccgggcgtg

SEQ ID NO: 87128 - DNA, 80 bp, synthetic construct; identical to SEQ ID NO: 15776
  source 1..80: mol_type = other DNA

SEQ ID NO: 87129 - DNA, 80 bp, synthetic construct
  source 1..80: mol_type = other DNA
aaatactgtcatgcaccatgggacaatgttgtggtcggtgatggactgtgtatatgatggtggtccctggtcccataaaa

SEQ ID NO: 87130 - DNA, 80 bp, synthetic construct
  source 1..80: mol_type = other DNA
caggaggccagaagttcgagacctgcctagccaacatagtgaaacccgactctactaaaattataaaaattagccaggtg

SEQ ID NO: 87131 - DNA, 80 bp, synthetic construct
  source 1..80: mol_type = other DNA
gttgcagtggctcacgcctgtaatccccgcactttgggaggctgaggtaggcagatgacctgaggtcggaagttcgagac

SEQ ID NO: 87132 - DNA, 80 bp, synthetic construct; identical to SEQ ID NO: 15777
  source 1..80: mol_type = other DNA

SEQ ID NO: 87133 - DNA, 80 bp, synthetic construct
  source 1..80: mol_type = other DNA
ccaactactcaggaggctgaggcaggagaatcacttgaacccgggaggtggaggttgcagtgagccgagattgtaccact

SEQ ID NO: 87134 - DNA, 80 bp, synthetic construct
  source 1..80: mol_type = other DNA
caagaaaaataccaagcctcaatgataaggagactgaggttctcatcactcacgtggaaccatgcccacactcactacta

SEQ ID NO: 87135 - DNA, 80 bp, synthetic construct
  source 1..80: mol_type = other DNA
aatcagtggtgaaaattcaaatcatctttgggaaagtgggttggcaacatgtattgaaacttcattcattttgacccagt

SEQ ID NO: 87136 - DNA, 80 bp, synthetic construct; identical to SEQ ID NO: 15778
  source 1..80: mol_type = other DNA

SEQ ID NO: 87137 - DNA, 80 bp, synthetic construct
  source 1..80: mol_type = other DNA
gttggcagccattgtctttgtgtcagaaggttaagattttctaattttcacatattttttaaagcatgttttttgtttgt

SEQ ID NO: 87138 - DNA, 80 bp, synthetic construct
  source 1..80: mol_type = other DNA
tctattttagtagagacagggtttcaccgtgttgcccaggctggtctcaaactcttgagctccggcaatctgcctgcctc

SEQ ID NO: 87139 - DNA, 80 bp, synthetic construct
  source 1..80: mol_type = other DNA
ctcctgcctcagcctcccaagtagctgggactacaggcgcctaccaccatgcctggctaatattttgtattcaccatgtg

SEQ ID NO: 87140 - DNA, 80 bp, synthetic construct
  source 1..80: mol_type = other DNA
attctcctgcctcagcctcccgattagctgggactacaggcgcctgccaccacacccggttaattttttgtatttttagt

SEQ ID NO: 87141 - DNA, 80 bp, synthetic construct; identical to SEQ ID NO: 15779
  source 1..80: mol_type = other DNA

SEQ ID NO: 87142 - DNA, 80 bp, synthetic construct
  source 1..80: mol_type = other DNA
gcctggcctgtgtaggtattctgctaagtgaccagccagctcagggagcatttaggattaataatgacaactacctagtg

SEQ ID NO: 87143 - DNA, 80 bp, synthetic construct
  source 1..80: mol_type = other DNA
cctgcctgggctaggaccccaagagtcttgggctaggggaggaaccagatgtccatgtcatcctgagccagaggggcagg

SEQ ID NO: 87144 - DNA, 80 bp, synthetic construct; identical to SEQ ID NO: 15780
  source 1..80: mol_type = other DNA

SEQ ID NO: 87145 - DNA, 80 bp, synthetic construct
  source 1..80: mol_type = other DNA
gaggctgatgtaccttgcccaagctcacacagaggtgcttcaccaacagtgtggccactgatccaagggaggggaaggga

SEQ ID NO: 87146 - DNA, 80 bp, synthetic construct
  source 1..80: mol_type = other DNA
ggaggccttgaggtgtgtctgggagcttgaagccacgaatgtttttctctggaaagatcttgaaggagtattctccagtg

SEQ ID NO: 87147 - DNA, 80 bp, synthetic construct
  source 1..80: mol_type = other DNA
ccttcagctcagctcgggggttcacctttccaggaaacttccctgatccagaggttgggagtttgggttttgtgtcccgg

SEQ ID NO: 87148 - DNA, 80 bp, synthetic construct; identical to SEQ ID NO: 15781
  source 1..80: mol_type = other DNA

SEQ ID NO: 87149 - DNA, 80 bp, synthetic construct
  source 1..80: mol_type = other DNA
ggaccggagagggggcggggggggtcaggggggtggtctctcggggtggggactagtgtcaggggcggggcgagagccat

SEQ ID NO: 87150 - DNA, 80 bp, synthetic construct
  source 1..80: mol_type = other DNA
cccctgggctgcagagacacgcgcacctcagtcccttccctcagcagccctgcacctaacagagccccgccctcacccac

SEQ ID NO: 87151 - DNA, 80 bp, synthetic construct
  source 1..80: mol_type = other DNA
tgttaggctgcagccccgaaaccacccagcaagacccgaaattatagatttatctgtgtacatgtacatgtttattgtca

SEQ ID NO: 87152 - DNA, 80 bp, synthetic construct; identical to SEQ ID NO: 15782
  source 1..80: mol_type = other DNA

SEQ ID NO: 87153 - DNA, 80 bp, synthetic construct
  source 1..80: mol_type = other DNA
ctctgggggtcattcagctcagcagcagaggtgatggggcccctctcagctgcccactcaaggatctgggtcttggggaa

SEQ ID NO: 87154 - DNA, 80 bp, synthetic construct
  source 1..80: mol_type = other DNA
ctgagagaaagaggccggagctgagaatgctggctggtggatctgcagtcagcccggagccccctagcagtcagatcagc

SEQ ID NO: 87155 - DNA, 80 bp, synthetic construct
  source 1..80: mol_type = other DNA
cactgtgagggtctacagggggcaacgtctaccttgcccatccttgcacagtgcttgacacgtagtacgcactgagagag

SEQ ID NO: 87156 - DNA, 80 bp, synthetic construct; identical to SEQ ID NO: 15783
  source 1..80: mol_type = other DNA

SEQ ID NO: 87157 - DNA, 80 bp, synthetic construct
  source 1..80: mol_type = other DNA
agacagaattttatttaataagaaacaaaggagccagacagatctcctggttggacagggatggggagtctgggtggctt

SEQ ID NO: 87158 - DNA, 80 bp, synthetic construct
  source 1..80: mol_type = other DNA
tccaaagccaagggcattgagctgaatgaaacagcagcagcagaagggcaaaagggcttcgggttggatttaaaaatatt

SEQ ID NO: 87159 - DNA, 80 bp, synthetic construct
  source 1..80: mol_type = other DNA
cgagaccagcctagccaacacggtatgaaacactgtctctactaaaaatacaaaaaatgaggtgggggtggtggcaggtg

SEQ ID NO: 87160 - DNA, 80 bp, synthetic construct; identical to SEQ ID NO: 15784
  source 1..80: mol_type = other DNA

SEQ ID NO: 87161 - DNA, 80 bp, synthetic construct
  source 1..80: mol_type = other DNA
gttgggaaagggatctgatccttgagtcagcccctgtaaaatggggatacagcagggcacgacgtctgttggtcgcctgg

SEQ ID NO: 87162 - DNA, 80 bp, synthetic construct
  source 1..80: mol_type = other DNA
catgttcctgcctcaccctgggctgcacggactcagatcgggaagggggaggatccatggtaaaggccacgccccctctg

SEQ ID NO: 87163 - DNA, 80 bp, synthetic construct
  source 1..80: mol_type = other DNA
gcttctcccctgtcccccacgcccaacttcgctcaagcctgcctccctcccgcagtgggcatgtttctttctatgcctct

SEQ ID NO: 87164 - DNA, 80 bp, synthetic construct
  source 1..80: mol_type = other DNA
tctggcagtgggtcccagctccctgacctcctctctctggtggatatagctaacacttttaaaagttgaggcttttggtt

SEQ ID NO: 87165 - DNA, 80 bp, synthetic construct; identical to SEQ ID NO: 15785
  source 1..80: mol_type = other DNA

SEQ ID NO: 87166 - DNA, 80 bp, synthetic construct
  source 1..80: mol_type = other DNA
agtcctggtgccctctgggttctctctggtagagaccattggcttcaccaggcaggaccctggtgaataatgtcaagatg

SEQ ID NO: 87167 - DNA, 80 bp, synthetic construct
  source 1..80: mol_type = other DNA
acactgctgtttacactgaggaccagaagcacctctcggggccaggtgccattttgcttggatgcctggagagtcagctc

SEQ ID NO: 87168 - DNA, 80 bp, synthetic construct; identical to SEQ ID NO: 15786
  source 1..80: mol_type = other DNA

SEQ ID NO: 87169 - DNA, 80 bp, synthetic construct
  source 1..80: mol_type = other DNA
gtgcctataatctcagccactggggaggctgagacacaagaattgcttgaaccctgggggcagaggtggcattgagctga

SEQ ID NO: 87170 - DNA, 80 bp, synthetic construct
  source 1..80: mol_type = other DNA
tccaacatggtgaaaccccgtctttactaaaaatacaaaaaattagccaggtggggtggtggtggatgcctgtaattcca

SEQ ID NO: 87171 - DNA, 80 bp, synthetic construct
  source 1..80: mol_type = other DNA
cttcatccatcaaggatcaaatgagaacctgttgtgtactgggccttagggagtgtcctgtgcatggaggcagcgatccc

SEQ ID NO: 87172 - DNA, 80 bp, synthetic construct; identical to SEQ ID NO: 15787
  source 1..80: mol_type = other DNA

SEQ ID NO: 87173 - DNA, 80 bp, synthetic construct
  source 1..80: mol_type = other DNA
atacctacctaccacgtaaatagggcctattaaatcccagcagtgttctaagtgctttacacattaactcatttaatcct

SEQ ID NO: 87174 - DNA, 80 bp, synthetic construct
  source 1..80: mol_type = other DNA
tggaactgcaggtgcccaccacgacgcatggctaattttttgtatttttactagagatggagtttcaccatgttggccag

SEQ ID NO: 87175 - DNA, 80 bp, synthetic construct
  source 1..80: mol_type = other DNA
ttctcctgcctcagcctcccgagtagctgggactataggcgcccactaccatgcctggctaagttttgtatttttagtag

SEQ ID NO: 87176 - DNA, 80 bp, synthetic construct
  source 1..80: mol_type = other DNA
ttttttttctttcttttgagacagggtcttgctctgtcacccaggctggaacccagtggcacaatctcagctcactacaa

SEQ ID NO: 87177 - DNA, 80 bp, synthetic construct; identical to SEQ ID NO: 15788
  source 1..80: mol_type = other DNA

SEQ ID NO: 87178 - DNA, 80 bp, synthetic construct
  source 1..80: mol_type = other DNA
tggcacaacctcggctcactgcaacctctgcctcctgggtcaagcaattctcctgcctcagcatcctgagtagctgggac

SEQ ID NO: 87179 - DNA, 80 bp, synthetic construct
  source 1..80: mol_type = other DNA
ccactattcttattttcacttacagatgagggaaccaagaccctgagaggtgaagtcatttgcctttgatgacacaggaa

SEQ ID NO: 87180 - DNA, 80 bp, synthetic construct; identical to SEQ ID NO: 15789
  source 1..80: mol_type = other DNA

SEQ ID NO: 87181 - DNA, 80 bp, synthetic construct
  source 1..80: mol_type = other DNA
ttcaagtgattctcctgccttagcctcccaagtagctgggactacaggtgcatgccaccatgcccagctaatttttgtat

SEQ ID NO: 87182 - DNA, 80 bp, synthetic construct
  source 1..80: mol_type = other DNA
tccttccctagcacatttttctaaccttattcccaagaagaaaaagaacacagcaatctacaagccagtgtctattgaaa

SEQ ID NO: 87183 - DNA, 80 bp, synthetic construct
  source 1..80: mol_type = other DNA
gagccgatcacctgaggttgggagttcaagaccaacctgaccaacgtggagaaaccccgtctctactaaaaatactaaat

SEQ ID NO: 87184 - DNA, 80 bp, synthetic construct
  source 1..80: mol_type = other DNA
aaaaaaaaaaaaaagacaggtaaatgcctcagaagccctgccaccaactcaggaggacaaagacaaatgtaatttgctga

SEQ ID NO: 87185 - DNA, 80 bp, synthetic construct; identical to SEQ ID NO: 15790
  source 1..80: mol_type = other DNA

SEQ ID NO: 87186 - DNA, 80 bp, synthetic construct
  source 1..80: mol_type = other DNA
tgatcaattagttgtaaacacaattttttttttcattttagtgtgccatttagtttttttctatttattattgttttttg

SEQ ID NO: 87187 - DNA, 80 bp, synthetic construct
  source 1..80: mol_type = other DNA
atatttttgagatggagtcttgctctgtcgcctaggctagagtgcagcgatctctgctcaccgcaacctccacctcccgg

SEQ ID NO: 87188 - DNA, 80 bp, synthetic construct
  source 1..80: mol_type = other DNA
ttttgtatttttagtagagatggggtttcaccatcttggccaggctggtctcgaactcctgacctcatgatccctacgcc

SEQ ID NO: 87189 - DNA, 80 bp, synthetic construct; identical to SEQ ID NO: 15791
  source 1..80: mol_type = other DNA

SEQ ID NO: 87190 - DNA, 80 bp, synthetic construct
  source 1..80: mol_type = other DNA
gtacagtggcgtgattgctcactgcaacttccgcccctcaggctcaagtgatcctcccgccttagcctcccaagtagctg

SEQ ID NO: 87191 - DNA, 80 bp, synthetic construct
  source 1..80: mol_type = other DNA
ctggcagtttttaaaaatattacgctttctaggctgggcgtggtgccagagcggggcctgcattccctggaccatgtcct

SEQ ID NO: 87192 - DNA, 80 bp, synthetic construct
  source 1..80: mol_type = other DNA
gtgcatgaggacatccatccgccatcccatggtgacacccacaggccaagcatgctgcagaagccagagtgcagtctggt

SEQ ID NO: 87193 - DNA, 80 bp, synthetic construct; identical to SEQ ID NO: 15792
  source 1..80: mol_type = other DNA

SEQ ID NO: 87194 - DNA, 80 bp, synthetic construct
  source 1..80: mol_type = other DNA
tgagctgcagggccaagctgaaaaacagctggttaccagaaaaacccagtcagggtttctacagcaaacatttccctccc

SEQ ID NO: 87195 - DNA, 80 bp, synthetic construct
  source 1..80: mol_type = other DNA
cagcccctcacccccagcccggccagcctgcgcctacccagccccctccctgagtgggtgggcgggagaccgcgtttcta

SEQ ID NO: 87196 - DNA, 80 bp, synthetic construct
  source 1..80: mol_type = other DNA
ccctcccagggcctgactggaggcggtcagattggagccagccgtccctctgtccaccccagaaaactcagatggtccta

SEQ ID NO: 87197 - DNA, 80 bp, synthetic construct; identical to SEQ ID NO: 15793
  source 1..80: mol_type = other DNA

SEQ ID NO: 87198 - DNA, 80 bp, synthetic construct
  source 1..80: mol_type = other DNA
acccaccaccatgctcagctaatttttgtatttttagtagagacggggtttcgcccatgtcggccaggctggtctcgaac

SEQ ID NO: 87199 - DNA, 80 bp, synthetic construct
  source 1..80: mol_type = other DNA
gggtccagttagaggtgggctgcagctggtgagaactacaaatctctcagccatgcctcgctgtggcatcctatctctga

SEQ ID NO: 87200 - DNA, 80 bp, synthetic construct
  source 1..80: mol_type = other DNA
ctggagagatatgcttcttcctcagctgagggggcccctggtacctccagcctttctggtggtcagcccacgtgtcctca

SEQ ID NO: 87201 - DNA, 80 bp, synthetic construct; identical to SEQ ID NO: 15794
  source 1..80: mol_type = other DNA

SEQ ID NO: 87202 - DNA, 80 bp, synthetic construct
  source 1..80: mol_type = other DNA
tcagcaagcctgcctctaatatttgcaaggcctgagacaagaatacaaatggcagcctctggccccagtgctttctcctt

SEQ ID NO: 87203 - DNA, 80 bp, synthetic construct
  source 1..80: mol_type = other DNA
ggaggatggaacaggaaagatccctgcagccctgagaggaggctcagagccatttgggattttggggtcctgggtaccca

SEQ ID NO: 87204 - DNA, 80 bp, synthetic construct; identical to SEQ ID NO: 15795
  source 1..80: mol_type = other DNA

SEQ ID NO: 87205 - DNA, 80 bp, synthetic construct
  source 1..80: mol_type = other DNA
catttgttaggaggatagcagatcggcccagtcagcctgacgggaattgctgagacaccaggctggtttcctgtctccga

SEQ ID NO: 87206 - DNA, 80 bp, synthetic construct
  source 1..80: mol_type = other DNA
atctaccacccacccacaggaaatctgaggattctgagggatggacgggaaagccacttctctgtgccagagatcgaaga

SEQ ID NO: 87207 - DNA, 80 bp, synthetic construct
  source 1..80: mol_type = other DNA
cgcccctccctcctctaccttcagtgctcatcaccccatcacctgcggccccctgaagccccatttgctgatcccaccac

SEQ ID NO: 87208 - DNA, 80 bp, synthetic construct; identical to SEQ ID NO: 15796
  source 1..80: mol_type = other DNA

SEQ ID NO: 87209 - DNA, 80 bp, synthetic construct
  source 1..80: mol_type = other DNA
tggtgcgaactcggctcactgcaatctccacctcccgggttcaaacgattctcttgcctcagcctctctaatagctggga

SEQ ID NO: 87210 - DNA, 80 bp, synthetic construct
  source 1..80: mol_type = other DNA
acctgccccattgatcttgtagcaataaccattgaggttcaaattattcaactgatacgaagacattctgtaaacggtaa

SEQ ID NO: 87211 - DNA, 80 bp, synthetic construct
  source 1..80: mol_type = other DNA
tgtgaggtaggtgctgctaatgggtccaggtttcccgtgggaaaatcaaagctcggaggtggcccaaggcgatgtggctc

SEQ ID NO: 87212 - DNA, 80 bp, synthetic construct
  source 1..80: mol_type = other DNA
tgcctgtaatcccagcactttgggaggccgaggtgggcggattatttgaggtcaggagttcaaaactagcctctccaaca

SEQ ID NO: 87213 - DNA, 80 bp, synthetic construct; identical to SEQ ID NO: 15797
  source 1..80: mol_type = other DNA

SEQ ID NO: 87214 - DNA, 80 bp, synthetic construct
  source 1..80: mol_type = other DNA
tccctggagcgagttctctagaagaggcagaggctaacagggagattttgttgtcatgaactcaaggatccttggaatat

SEQ ID NO: 87215 - DNA, 80 bp, synthetic construct
  source 1..80: mol_type = other DNA
cctccaagaactgttattgcccacgggataaagatcaaacttcttaatatggcgacaggcctttgccatctcccctgtcc

SEQ ID NO: 87216 - DNA, 80 bp, synthetic construct
  source 1..80: mol_type = other DNA
ccaagatcagatgaggtcggatgtgttcaggatggtgtggccgtaacaagccatgcctaatcccgtagcagctggagtgc

SEQ ID NO: 87217 - DNA, 80 bp, synthetic construct; identical to SEQ ID NO: 15798
  source 1..80: mol_type = other DNA

SEQ ID NO: 87218 - DNA, 80 bp, synthetic construct
  source 1..80: mol_type = other DNA
ccgatattggtggtctgagcactttcttatcactgcacaaacgcaaggcaacttaacagttttgggggcagattggccat

SEQ ID NO: 87219 - DNA, 80 bp, synthetic construct
  source 1..80: mol_type = other DNA
tgaactctggccctgggcacgtcactccatcgctctcagccagcctcagtttccttctccaagaagtggggataataaca

SEQ ID NO: 87220 - DNA, 80 bp, synthetic construct; identical to SEQ ID NO: 15799
  source 1..80: mol_type = other DNA

SEQ ID NO: 87221 - DNA, 80 bp, synthetic construct
  source 1..80: mol_type = other DNA
gtctcactctgtcacccaggctggagtgcagtggtgcaatgttggctcactgcaacctccacctcctgggttcaagcgat

SEQ ID NO: 87222 - DNA, 80 bp, synthetic construct
  source 1..80: mol_type = other DNA
aagctcactgcaacctccaactcactggttcaagcaattctcctgcctcagcctcccaagtagctgggattacaggcgct

SEQ ID NO: 87223 - DNA, 80 bp, synthetic construct
  source 1..80: mol_type = other DNA
ttttcaaagtccaagctccctagagaggagctgcattcttctgagattctgtgaggtctccatcattggaggtgcataag

SEQ ID NO: 87224 - DNA, 80 bp, synthetic construct
  source 1..80: mol_type = other DNA
cagggggcctaacgaggactcagccactgccccagggacagccacaaggaaggcacccctcaccccatctgccttggagc

SEQ ID NO: 87225 - DNA, 80 bp, synthetic construct; identical to SEQ ID NO: 15800
  source 1..80: mol_type = other DNA

SEQ ID NO: 87226 - DNA, 80 bp, synthetic construct
  source 1..80: mol_type = other DNA
tgaggtggatatcattatattcgttccatggattaaaaaaaaccaaggctaggagaggaaacgtctcctgcccaaggtca

SEQ ID NO: 87227 - DNA, 80 bp, synthetic construct
  source 1..80: mol_type = other DNA
actgggccccatgtatatatgtgtgtgtgtatatatacatacacacacatatacatagatctacatatatacatacatat

SEQ ID NO: 87228 - DNA, 80 bp, synthetic construct
  source 1..80: mol_type = other DNA
cctccgcctcctgggttcaaatgattctcctgcctcagcctcccaagtagctgggattataggcatgcaccaccacaccc

SEQ ID NO: 87229 - DNA, 80 bp, synthetic construct; identical to SEQ ID NO: 15801
  source 1..80: mol_type = other DNA

SEQ ID NO: 87230 - DNA, 80 bp, synthetic construct
  source 1..80: mol_type = other DNA
gtcaggctcgtcttgaactcccaacctcaggtgatccgcctgccttggcctcccaaagtgctaggattacaggcatgagc

SEQ ID NO: 87231 - DNA, 80 bp, synthetic construct
  source 1..80: mol_type = other DNA
gcatgcaccaccacatccagctaatttttgcatttttatagagatgaggtttcaccatgttgctcaagctggtattgaac

SEQ ID NO: 87232 - DNA, 80 bp, synthetic construct
  source 1..80: mol_type = other DNA
gctgagctcaggagacaaagcttcccctctcttgcctcaaggtggtgggaggaatggtctgaaggggttgagagttccct

SEQ ID NO: 87233 - DNA, 80 bp, synthetic construct; identical to SEQ ID NO: 15802
  source 1..80: mol_type = other DNA

SEQ ID NO: 87234 - DNA, 80 bp, synthetic construct
  source 1..80: mol_type = other DNA
gagatggtcaccccttgccatggcaacgccattcccagctctgtcttgggaaggagaagatctggatgaggacttctggc

SEQ ID NO: 87235 - DNA, 80 bp, synthetic construct
  source 1..80: mol_type = other DNA
gtggctctggtgaatgatttcacctcttggggcttcaatacctggtctataaaatgacaacagagcccacatgatccaca

SEQ ID NO: 87236 - DNA, 80 bp, synthetic construct
  source 1..80: mol_type = other DNA
cctcctgcctcagcctcccaagtagttgggactacagttgtgcgccaccacgcctggctaattttttaaattttcagtag

SEQ ID NO: 87237 - DNA, 80 bp, synthetic construct; identical to SEQ ID NO: 15803
  source 1..80: mol_type = other DNA

SEQ ID NO: 87238 - DNA, 80 bp, synthetic construct
  source 1..80: mol_type = other DNA
ctcatcggtgagcgcaggttccttggctgttacctagcttaagcccctcctactcagatggggagactgaggtctggagg

SEQ ID NO: 87239 - DNA, 80 bp, synthetic construct
  source 1..80: mol_type = other DNA
agttcctcccggattgctggggccgcctggggccgcctcctccatgccgtcagccagcgggagaggccacaagcctggcc

SEQ ID NO: 87240 - DNA, 80 bp, synthetic construct
  source 1..80: mol_type = other DNA
gcccagaccaagttgaaaacaatcccctggcaccaagggaaacgccagggcctcccgggactgggtcagaggaggagccg

SEQ ID NO: 87241 - DNA, 80 bp, synthetic construct; identical to SEQ ID NO: 15804
  source 1..80: mol_type = other DNA

SEQ ID NO: 87242 - DNA, 80 bp, synthetic construct
  source 1..80: mol_type = other DNA
gaagaccagggcggttaaagaaactgaagaccagctgcccgaggtgacccagctactaagtgtcacggcctggatttaaa

SEQ ID NO: 87243 - DNA, 80 bp, synthetic construct
  source 1..80: mol_type = other DNA
tgccacccccccttttcttttctgagatagagtctcactctgtcacccaggccagagtacagtgtctcgatctcggctca

SEQ ID NO: 87244 - DNA, 80 bp, synthetic construct
  source 1..80: mol_type = other DNA
acccatctcagcctcccaaggaagatacgtttcaacaagggtccttcttgctgcaatgcctgccccgtcttgttcagtac

SEQ ID NO: 87245 - DNA, 80 bp, synthetic construct; identical to SEQ ID NO: 15805
  source 1..80: mol_type = other DNA

SEQ ID NO: 87246 - DNA, 80 bp, synthetic construct
  source 1..80: mol_type = other DNA
attatttatgcccagtcagtggggatatgtgggctcttcccctaaacacacctcgctcctgcctctgccatgccctttcc

SEQ ID NO: 87247 - DNA, 80 bp, synthetic construct
  source 1..80: mol_type = other DNA
cgagcagctacaggtatgagtcattatgcccaactaaattttaaaaatatttgtggagaaagagtcttgctatgttgccc

SEQ ID NO: 87248 - DNA, 80 bp, synthetic construct; identical to SEQ ID NO: 15806
  source 1..80: mol_type = other DNA

SEQ ID NO: 87249 - DNA, 80 bp, synthetic construct
  source 1..80: mol_type = other DNA
ttctttgtcctccattttaaagtttaacttcctcatggtttcagtaaacaaccttttccaccagttttaatcagtagttc

SEQ ID NO: 87250 - DNA, 80 bp, synthetic construct
  source 1..80: mol_type = other DNA
cccctgctctctctaaaatagctaactggaattagcttagactgtgcggtccaacactagcccgtaggggaacgacgtag

SEQ ID NO: 87251 - DNA, 80 bp, synthetic construct
  source 1..80: mol_type = other DNA
ctgaggaacaagcattttgtttctaacaccacaaacatccatttgtggaactggctggtcagggctgcctctgacctgct

SEQ ID NO: 87252 - DNA, 80 bp, synthetic construct; identical to SEQ ID NO: 15807
  source 1..80: mol_type = other DNA

SEQ ID NO: 87253 - DNA, 80 bp, synthetic construct
  source 1..80: mol_type = other DNA
tgcttaggcccagggcttgagccccagtggctcatttcagggcagtgttacttgggtaaatttcttcacctgactgagtt

SEQ ID NO: 87254 - DNA, 80 bp, synthetic construct
  source 1..80: mol_type = other DNA
tctgacagtacacataccacgcttagagcagcgtctagcatactgtaagtgctgaataaatgtcagttgttatattatct

SEQ ID NO: 87255 - DNA, 80 bp, synthetic construct
  source 1..80: mol_type = other DNA
agagccaagggtaaacagttctttaggtctccagcattcaggtcacaaaagttgtggggaaaagaagctgaatttggaag

SEQ ID NO: 87256 - DNA, 80 bp, synthetic construct
  source 1..80: mol_type = other DNA
gccctggggcaaaagaatgggtctgtcgcccgagggcccagcaccaacacatccgtgaccacaagcaagtccctctgtcc

SEQ ID NO: 87257 - DNA, 80 bp, synthetic construct; identical to SEQ ID NO: 15808
  source 1..80: mol_type = other DNA

SEQ ID NO: 87258 - DNA, 80 bp, synthetic construct
  source 1..80: mol_type = other DNA
acaggaaaaggtgcacgtaccaaaactgtgcattgtggtagtatttataactagaacaaaggggaaaccacctaaatatt

SEQ ID NO: 87259 - DNA, 80 bp, synthetic construct
  source 1..80: mol_type = other DNA
gttagaaaaaaaaactagtaagccatctaccaccatactaacggtacctgtatcaataaaggagttccgaggtgattttt

SEQ ID NO: 87260 - DNA, 80 bp, synthetic construct
  source 1..80: mol_type = other DNA
tctgtcacctaggctggagtgcggtggcttgatctcggctcatcacaacctccacctcccagggtcaagcgattctcctg

SEQ ID NO: 87261 - DNA, 80 bp, synthetic construct; identical to SEQ ID NO: 15809
  source 1..80: mol_type = other DNA

SEQ ID NO: 87262 - DNA, 80 bp, synthetic construct
  source 1..80: mol_type = other DNA
acatggtgaaaccccgtctctactaaaaatacaaaaattaggcgggtgtggggccggcgcctgtagtcccagctactcga

SEQ ID NO: 87263 - DNA, 80 bp, synthetic construct
  source 1..80: mol_type = other DNA
gaaagtgaaagtcccacagagaaaaccccagaccagagaacagtaatagtgggttaaatagaaaactctattccagaatt

SEQ ID NO: 87264 - DNA, 80 bp, synthetic construct; identical to SEQ ID NO: 15810
  source 1..80: mol_type = other DNA

SEQ ID NO: 87265 - DNA, 80 bp, synthetic construct
  source 1..80: mol_type = other DNA
gtacagttttaggagattcttacaagtggtgcccccaaattctagacccatttctaggaggtcagggtcactccgacccc

SEQ ID NO: 87266 - DNA, 80 bp, synthetic construct
  source 1..80: mol_type = other DNA
gacggatacgtttccaggagtttttccaactggctgttacatagctattactatatatttttaaaaggtcatgaatgtcc

SEQ ID NO: 87267 - DNA, 80 bp, synthetic construct
  source 1..80: mol_type = other DNA
gggagtacttacgctgtgaaaatccacaaacgctacaaattgagctccccaccccgttgttaattattcagcagcatatc

SEQ ID NO: 87268 - DNA, 80 bp, synthetic construct
  source 1..80: mol_type = other DNA
tgcagcgacaaatacgagagagggagatcttggagctcaggtaggggctccgtcttagccatgtgaacttggcaggttag

SEQ ID NO: 87269 - DNA, 80 bp, synthetic construct; identical to SEQ ID NO: 15811
  source 1..80: mol_type = other DNA

SEQ ID NO: 87270 - DNA, 80 bp, synthetic construct
  source 1..80: mol_type = other DNA
ttgaggtggccgagggatagggagtgggacatggggctgggggtcccttgctcctcaccgcccctcctctggtcagtttc

SEQ ID NO: 87271 - DNA, 80 bp, synthetic construct
  source 1..80: mol_type = other DNA
tttgaggagctgcccaaaggccctggggaaggtgagctggaggaacttaaagctaaaaataaaacaacacagaagtggcc

SEQ ID NO: 87272 - DNA, 80 bp, synthetic construct
  source 1..80: mol_type = other DNA
caccacaaggaagtgcctatgtgagatttgaacccagagacggtgctcagagcccaggctgtgggccctccttcccatcc

SEQ ID NO: 87273 - DNA, 80 bp, synthetic construct; identical to SEQ ID NO: 15812
  source 1..80: mol_type = other DNA

SEQ ID NO: 87274 - DNA, 80 bp, synthetic construct
  source 1..80: mol_type = other DNA
agagggagcgtgccgcggtccatgctgtccacgtgggggcctgtgcgctgggccttatcctgtgtccagtggcagggctg

SEQ ID NO: 87275 - DNA, 80 bp, synthetic construct
  source 1..80: mol_type = other DNA
atgggcggggagggggtgctgggctccaatggatggcagtgacagcagcagtcctggccccagggcgcagatgaaggctg

SEQ ID NO: 87276 - DNA, 80 bp, synthetic construct; identical to SEQ ID NO: 15813
  source 1..80: mol_type = other DNA

SEQ ID NO: 87277 - DNA, 80 bp, synthetic construct
  source 1..80: mol_type = other DNA
tattggcaaatgaaatgggctgagggggtagagacaagatattttcaagcttctgagagatttacaaagccaagttcttc

SEQ ID NO: 87278 - DNA, 80 bp, synthetic construct
  source 1..80: mol_type = other DNA
ttggctcaggaataaataaaatccagacttggactattaaaaatatcaaagtgatccactgtgtgccaactccattttcc

SEQ ID NO: 87279 - DNA, 80 bp, synthetic construct
  source 1..80: mol_type = other DNA
gttagaaggaaattttgagttatattttaatctcttacccaaggtacaaaccccctttgtaacagccattcagctcattc

SEQ ID NO: 87280 - DNA, 80 bp, synthetic construct; identical to SEQ ID NO: 15814
  source 1..80: mol_type = other DNA

SEQ ID NO: 87281 - DNA, 80 bp, synthetic construct
  source 1..80: mol_type = other DNA
gtcctacctagtttctccgcccaccaccttcatgccatcttatttcctcttattttcactaccacgaaatgctttcctgc

SEQ ID NO: 87282 - DNA, 80 bp, synthetic construct
  source 1..80: mol_type = other DNA
atgagcattgactaacgaaagatgtttaggggaaaaaaaaatggaacagaacacctaaggcttgccaaaactgtgtatat

SEQ ID NO: 87283 - DNA, 80 bp, synthetic construct
  source 1..80: mol_type = other DNA
gactctacaatctaaatttctcacaagcaagtcaggttaatgacaccagactctgctactttcaatggataaaacaaggg

SEQ ID NO: 87284 - DNA, 80 bp, synthetic construct
  source 1..80: mol_type = other DNA
ctccaaccccaaatccatgcaagaacacaaagccaaggggtaaactaaaaaaaagaagagattgttttattgtgacattt

SEQ ID NO: 87285 - DNA, 80 bp, synthetic construct; identical to SEQ ID NO: 15815
  source 1..80: mol_type = other DNA

SEQ ID NO: 87286 - DNA, 80 bp, synthetic construct
  source 1..80: mol_type = other DNA
ttctaagttgtgtacatattacagtgcatttataaatctagtttgaaaatttactagcaccaaataggtaccataaatgg

SEQ ID NO: 87287 - DNA, 80 bp, synthetic construct
  source 1..80: mol_type = other DNA
tcaacacatatgacaaggtagcttagctacacacatgagaagcctgagaaagtggttgttttgaactagggtagtcacct

SEQ ID NO: 87288 - DNA, 80 bp, synthetic construct
  source 1..80: mol_type = other DNA
atgaagcaaaacctggattttcatcttcagattatcacccagttcaccactgaggtagtctttgtcatatttgtcttcta

SEQ ID NO: 87289 - DNA, 80 bp, synthetic construct
  source 1..80: mol_type = other DNA
gtgaagtggaggtagctgatcccttccttttggttgattttaaagaagccatcttcatttccagattcgatcaagtatct

SEQ ID NO: 87290 - DNA, 80 bp, synthetic construct; identical to SEQ ID NO: 15816
  source 1..80: mol_type = other DNA

SEQ ID NO: 87291 - DNA, 80 bp, synthetic construct
  source 1..80: mol_type = other DNA
aggttgaaatcatttgtatctggaggtctcaaaatgtagtccctgaacaagctgcatcagcatcacctgggaatctgtta

SEQ ID NO: 87292 - DNA, 80 bp, synthetic construct
  source 1..80: mol_type = other DNA
catttcttaaatgacagcagatgggttgcagcaccaatacgaagaaccagactatttcaatttgattcattgacgtaaaa

SEQ ID NO: 87293 - DNA, 80 bp, synthetic construct
  source 1..80: mol_type = other DNA
tctgagttgactgaaaggctgcagcagccgtaggcaaaggaaaccaggctgcttcagctccacgttatttttgtctacaa

SEQ ID NO: 87294 - DNA, 80 bp, synthetic construct; identical to SEQ ID NO: 15817
  source 1..80: mol_type = other DNA

SEQ ID NO: 87295 - DNA, 80 bp, synthetic construct
  source 1..80: mol_type = other DNA
atctggaagggctttccaccacaggagacatcaggagaaactaacttctgacccacctcgatattggaggcatcagtttc

SEQ ID NO: 87296 - DNA, 80 bp, synthetic construct
  source 1..80: mol_type = other DNA
aaggggagcatagatgtttttcattagaatgggaagacaaggtaggtggtacaagagttctggtgaagcctgttccttgc

SEQ ID NO: 87297 - DNA, 80 bp, synthetic construct; identical to SEQ ID NO: 15818
  source 1..80: mol_type = other DNA

SEQ ID NO: 87298 - DNA, 80 bp, synthetic construct
  source 1..80: mol_type = other DNA
ccatcattacttttcctcactcaagctttggagcaattgctcctattccttgacgtttcacttttgcttatgctactgag

SEQ ID NO: 87299 - DNA, 80 bp, synthetic construct
  source 1..80: mol_type = other DNA
tggataaacaaacccatgcccaagagagaactcgttcagctgtttttctttgcctttcagttatcaaagccaagttacgg

SEQ ID NO: 87300 - DNA, 80 bp, synthetic construct
  source 1..80: mol_type = other DNA
tccttaaaagaatctttatttgggggcagagtccattctagtgattcggagaggccaaaactgttttaaatgggtagatt

SEQ ID NO: 87301 - DNA, 80 bp, synthetic construct
  source 1..80: mol_type = other DNA
acagaatatctgttgtatttcaaagcagtttataggttcctactgtttcccccaatcttgccagagtccaatacatttcc

SEQ ID NO: 87302 - DNA, 80 bp, synthetic construct; identical to SEQ ID NO: 15819
  source 1..80: mol_type = other DNA

SEQ ID NO: 87303 - DNA, 80 bp, synthetic construct
  source 1..80: mol_type = other DNA
tgtgcttcccacgaaacattcttctacctacccagatccaaaatgaatcacttgatgtttgtatgtcaagaaatcaaaga

SEQ ID NO: 87304 - DNA, 80 bp, synthetic construct
  source 1..80: mol_type = other DNA
gacacccgagtccagattaattcagcaggaaaaaagatccaaactttgaaaacttaacactaaacttttaaatcactggg

SEQ ID NO: 87305 - DNA, 80 bp, synthetic construct
  source 1..80: mol_type = other DNA
gggcgtggtggcgggcacctgtagtcccagctactccagaggctgaggcaggagaatcgcgtgaacccgggaggcagagc

SEQ ID NO: 87306 - DNA, 80 bp, synthetic construct; identical to SEQ ID NO: 15820
  source 1..80: mol_type = other DNA

SEQ ID NO: 87307 - DNA, 80 bp, synthetic construct
  source 1..80: mol_type = other DNA
tgtatttacagagagatgaatcacttcccaacaagatgtgaagatcaagagaataagatagagaagtcatatagcgagat

SEQ ID NO: 87308 - DNA, 80 bp, synthetic construct
  source 1..80: mol_type = other DNA
gtatacttaattatattacgaatgaaagaatctccaaccatgaccaggaagagcactgcttacccttggcctatgcggaa

SEQ ID NO: 87309 - DNA, 80 bp, synthetic construct
  source 1..80: mol_type = other DNA
gtgttgtgacaggaggctcctccgcagatgtgagcgctgaggcattcgttttcatctgcaggcaaaataagaagcggcat

SEQ ID NO: 87310 - DNA, 80 bp, synthetic construct; identical to SEQ ID NO: 15821
  source 1..80: mol_type = other DNA

SEQ ID NO: 87311 - DNA, 80 bp, synthetic construct
  source 1..80: mol_type = other DNA
aaggggggaggaaaggaatcttgcagttctctgcgtacttgcttcacaagtgcccagcgaggagacaaatctctcaaaag

SEQ ID NO: 87312 - DNA, 80 bp, synthetic construct
  source 1..80: mol_type = other DNA
cttccttttcaaaattctgcaaaagcccccaggtacctgttctgggagatgaataatgccttctggtatgtctgctccca

SEQ ID NO: 87313 - DNA, 80 bp, synthetic construct
  source 1..80: mol_type = other DNA
acagggacctgccaagtctgatgctaagaagcaggaaaaagaaatcttactttaaaaaaatcagctagaagggggaaaac

SEQ ID NO: 87314 - DNA, 80 bp, synthetic construct; identical to SEQ ID NO: 15822
  source 1..80: mol_type = other DNA

SEQ ID NO: 87315 - DNA, 80 bp, synthetic construct
  source 1..80: mol_type = other DNA
caggtctgttggactgcaaaggccatccatgcgctttcctttataccacagtgcctctcaagagacgctccacatttaag

SEQ ID NO: 87316 - DNA, 80 bp, synthetic construct
  source 1..80: mol_type = other DNA
tggataaaagtggtggggaaggatgctcacttgtatatacttagtatatattcacatttcctacctgcctgcctgcctgc

SEQ ID NO: 87317 - DNA, 80 bp, synthetic construct; identical to SEQ ID NO: 15823
  source 1..80: mol_type = other DNA

SEQ ID NO: 87318 - DNA, 80 bp, synthetic construct
  source 1..80: mol_type = other DNA
cactggcaccaagctccatgtcaaacaaagaatgaagaacgaagcatatttacttcattggagagaacacccctgggctg

SEQ ID NO: 87319 - DNA, 80 bp, synthetic construct
  source 1..80: mol_type = other DNA
gcaaggcgtgggtatatgagggggaagacttgtcattctatagcttagatttattctgtgttttttcctccaaagagcag

SEQ ID NO: 87320 - DNA, 80 bp, synthetic construct
  source 1..80: mol_type = other DNA
ggcacccttcaaggtggtatttaagccaaactgggataagcaaggaagttagagaaggatttatatattaggaaagagag

SEQ ID NO: 87321 - DNA, 80 bp, synthetic construct
  source 1..80: mol_type = other DNA
ccctgagaatttaataaagtttaaattaaacttgcttatctaggttggagaggtaggatggagtagagcacagattaaaa

SEQ ID NO: 87322 - DNA, 80 bp, synthetic construct; identical to SEQ ID NO: 15824
  source 1..80: mol_type = other DNA

SEQ ID NO: 87323 - DNA, 80 bp, synthetic construct
  source 1..80: mol_type = other DNA
ttcatgttagctgtggccttaagggagtaccgataggaaacttcacaaatgcaggatgggctttcttttactcattttct

SEQ ID NO: 87324 - DNA, 80 bp, synthetic construct
  source 1..80: mol_type = other DNA
tttcttgtggttctggggaagctattttagcccacggcaatgctcattctagataactctaattctcaagattgatgaga

SEQ ID NO: 87325 - DNA, 80 bp, synthetic construct
  source 1..80: mol_type = other DNA
tgatggtaggaggaggaggataaggtacaggagcgacatacctttcctctcttatgtttttttcacttagctccagtgtt

SEQ ID NO: 87326 - DNA, 80 bp, synthetic construct; identical to SEQ ID NO: 15825
  source 1..80: mol_type = other DNA

SEQ ID NO: 87327 - DNA, 80 bp, synthetic construct
  source 1..80: mol_type = other DNA
cagtaattctttgagtttttgctaaggagggctctgtacagaataatgtggcaactagaacaggttaccaaagcaccaag

SEQ ID NO: 87328 - DNA, 80 bp, synthetic construct
  source 1..80: mol_type = other DNA
ttctaggtccttatctgtaaaacaaagtgcctgagctaagtggcttctggtatccctccaaactcacaatgttttgattc

SEQ ID NO: 87329 - DNA, 80 bp, synthetic construct; identical to SEQ ID NO: 15826
  source 1..80: mol_type = other DNA

SEQ ID NO: 87330 - DNA, 80 bp, synthetic construct
  source 1..80: mol_type = other DNA
cagatgctctcaaagcaccctcaattataattttttttcttagtttgctgttttgcaaagactgttacttacctcgggtt

SEQ ID NO: 87331 - DNA, 80 bp, synthetic construct
  source 1..80: mol_type = other DNA
tggaggtagccctgggggcagctgcacctgtagcccccaatgatgttctggcagccatgctggcagcggtggttaccctc

SEQ ID NO: 87332 - DNA, 80 bp, synthetic construct
  source 1..80: mol_type = other DNA
taagtccaaggagaaaatcattcagagagccctggcaaagtctacaaataaaaattgtcaggaaattagtgcaaagccca

SEQ ID NO: 87333 - DNA, 80 bp, synthetic construct; identical to SEQ ID NO: 15827
  source 1..80: mol_type = other DNA

SEQ ID NO: 87334 - DNA, 80 bp, synthetic construct
  source 1..80: mol_type = other DNA
agctgagtgcccccctgggctcagatctgctatctcatagaggctgatgatgaaggtgccaatagccacacaggccacct

SEQ ID NO: 87335 - DNA, 80 bp, synthetic construct
  source 1..80: mol_type = other DNA
gcattcattgttatctatgagaagcagtgggggcaaagaggggttaaaattccccaaagctctctttgtatcatttaaaa

SEQ ID NO: 87336 - DNA, 80 bp, synthetic construct
  source 1..80: mol_type = other DNA
ccaacagcagaggaaatagaaaataatcccttaaaagaatcgctacaatccatgtaggattttttcctctcctactcacc

SEQ ID NO: 87337 - DNA, 80 bp, synthetic construct; identical to SEQ ID NO: 15828
  source 1..80: mol_type = other DNA

SEQ ID NO: 87338 - DNA, 80 bp, synthetic construct
  source 1..80: mol_type = other DNA
aaaaaaatataaagagatctttaggggatccaagaaaacacaattctaattggagaaatgcaggaattcctcaacaaagg

SEQ ID NO: 87339 - DNA, 80 bp, synthetic construct
  source 1..80: mol_type = other DNA
ttgctgtttttaatctactcaaatgaagtcatcaaaaacaaaatctgatttctttagtcgtgattcttcttaggataaac

SEQ ID NO: 87340 - DNA, 80 bp, synthetic construct
  source 1..80: mol_type = other DNA
agtttgagaccagcctgggcaacatggcaaaacctgtctctagtgaatatacaaaaattagctgggtgtggtggtgtgtg

SEQ ID NO: 87341 - DNA, 80 bp, synthetic construct
  source 1..80: mol_type = other DNA
tgcctgcagtgtttatccaacattgtttcccacatctcaataaaaccctctgctttgaccaggcctcttttctcaacgcc

SEQ ID NO: 87342 - DNA, 80 bp, synthetic construct; identical to SEQ ID NO: 15829
  source 1..80: mol_type = other DNA

SEQ ID NO: 87343 - DNA, 80 bp, synthetic construct
  source 1..80: mol_type = other DNA
cttataatgctgcctgtcctgtgctctttccactgctgagatcttgactgatatgcactctctgttcagctttctcagag

SEQ ID NO: 87344 - DNA, 80 bp, synthetic construct
  source 1..80: mol_type = other DNA
tttcatgagtacaacacatgaagaacagcagcacttgctgctcttgcctccaagatgcccttcctcctcttctcccctct

SEQ ID NO: 87345 - DNA, 80 bp, synthetic construct; identical to SEQ ID NO: 15830
  source 1..80: mol_type = other DNA

SEQ ID NO: 87346 - DNA, 80 bp, synthetic construct
  source 1..80: mol_type = other DNA
atgaataaatttatggctctgagttatagcttcacattgcctagaactcacagtgaccccagatgtaaaataagttccac

SEQ ID NO: 87347 - DNA, 80 bp, synthetic construct
  source 1..80: mol_type = other DNA
cctcaggcacttgcccatgatgtcatccactattacatgtctcttaactctccctttcagcagacacaggaaagaggtca

SEQ ID NO: 87348 - DNA, 80 bp, synthetic construct
  source 1..80: mol_type = other DNA
caagtaagtggaagaacttaagctttatgagaaaaaataggaaaaagactccactctatcctttaccttccttacttctg

SEQ ID NO: 87349 - DNA, 80 bp, synthetic construct; identical to SEQ ID NO: 15831
  source 1..80: mol_type = other DNA

SEQ ID NO: 87350 - DNA, 80 bp, synthetic construct
  source 1..80: mol_type = other DNA
accttcctggaaacctgaactatatagctataaagaataaatacaaaaaacagaaagcagagaggaggtcaccaattaag

SEQ ID NO: 87351 - DNA, 80 bp, synthetic construct
  source 1..80: mol_type = other DNA
tggaggcattaaccccagggaagcacctcctgcctgtagagcaggtctttcggcttgcctgtggagttcttacaggcaaa

SEQ ID NO: 87352 - DNA, 80 bp, synthetic construct
  source 1..80: mol_type = other DNA
tggttgcactcgttcagatctatgatcaaagaaatacagcgtgactgtgcatctaaaaatgatgtgtacacgctcaattt

SEQ ID NO: 87353 - DNA, 80 bp, synthetic construct; identical to SEQ ID NO: 15832
  source 1..80: mol_type = other DNA

SEQ ID NO: 87354 - DNA, 80 bp, synthetic construct
  source 1..80: mol_type = other DNA
cattaatatgtagggggtcacttcagtgtaaatactaataaattgtgttactatattttgggcctaagaaattaaaccag

SEQ ID NO: 87355 - DNA, 80 bp, synthetic construct
  source 1..80: mol_type = other DNA
cttctaaatgtatatttttctcttctggatccatagaacagccaccccatctagacatatttggctttttgtgtcatctc

SEQ ID NO: 87356 - DNA, 80 bp, synthetic construct
  source 1..80: mol_type = other DNA
aatcctgaaaaagttcaaattacataatattggggaaatgagatgaacttctgtcctctggtgaggggggaaactaacca

SEQ ID NO: 87357 - DNA, 80 bp, synthetic construct; identical to SEQ ID NO: 15833
  source 1..80: mol_type = other DNA

SEQ ID NO: 87358 - DNA, 80 bp, synthetic construct
  source 1..80: mol_type = other DNA
ctttttttttaaatcacatccagttccattattctgccttcagccacatctttccaatacaaacacaaatccttcttaac

SEQ ID NO: 87359 - DNA, 80 bp, synthetic construct
  source 1..80: mol_type = other DNA
acagtctgacacttcctcatcctgctctagttaaggagcttgtgcttttccagatgcaattgtgtctaattgccaggata

SEQ ID NO: 87360 - DNA, 80 bp, synthetic construct
  source 1..80: mol_type = other DNA
aaaaattatattctgagtagccaattgacttatagtaaacggtttaaaaagttgaagactcgctggaatgcagagggagg

SEQ ID NO: 87361 - DNA, 80 bp, synthetic construct
  source 1..80: mol_type = other DNA
aaaaaacaaataaatagattccctgcaagtatttttggactataaatgaagtacctgctccattggtcatgaatcctcgg

SEQ ID NO: 87362 - DNA, 80 bp, synthetic construct; identical to SEQ ID NO: 15834
  source 1..80: mol_type = other DNA

SEQ ID NO: 87363 - DNA, 80 bp, synthetic construct
  source 1..80: mol_type = other DNA
ctagacaagcttataactctctctgctcccagaaatacaggggaatagccatgcttacagacagaggggcagagaaacat

SEQ ID NO: 87364 - DNA, 80 bp, synthetic construct
  source 1..80: mol_type = other DNA
tttatccttcctcagattttgacattttcttgtattttaaataagaagtctgggtttccagcatcccagtgtggaggctg

SEQ ID NO: 87365 - DNA, 80 bp, synthetic construct; identical to SEQ ID NO: 15835
  source 1..80: mol_type = other DNA

SEQ ID NO: 87366 - DNA, 80 bp, synthetic construct
  source 1..80: mol_type = other DNA
gagacttcaattcattcttaactgtttggtttcattgaaagactgaaaacagaaagagccatctgaatcttttatagaag

SEQ ID NO: 87367 - DNA, 80 bp, synthetic construct
  source 1..80: mol_type = other DNA
gatttctaatgtatccttccagagctggattatgcatataaaagcaaatacatacataatatgtgtatgtgtgtgtgcac

SEQ ID NO: 87368 - DNA, 80 bp, synthetic construct
  source 1..80: mol_type = other DNA
aaatgtgaatatcagcatatgaaagaaatattttaatacatgttagaataatatctgtaatggtcaatattgatctgggg

SEQ ID NO: 87369 - DNA, 80 bp, synthetic construct; identical to SEQ ID NO: 15836
  source 1..80: mol_type = other DNA

SEQ ID NO: 87370 - DNA, 80 bp, synthetic construct
  source 1..80: mol_type = other DNA
gaggttgagaattactgatccaggaggatccagtgtgtgacaattaatctacatattttctgattctgtgcttttagaat

SEQ ID NO: 87371 - DNA, 80 bp, synthetic construct
  source 1..80: mol_type = other DNA
agagaatgcgtgtgagaaggttttaataattttctcctgtaattattatctaagcagaggtcaggaaactttttgttagg

SEQ ID NO: 87372 - DNA, 80 bp, synthetic construct
  source 1..80: mol_type = other DNA
caggctggaattagcctgtaggcagtttgccaactcctggtctaaggctgaagtcctcaatgttggatccctattagaat

SEQ ID NO: 87373 - DNA, 80 bp, synthetic construct; identical to SEQ ID NO: 15837
  source 1..80: mol_type = other DNA

SEQ ID NO: 87374 - DNA, 80 bp, synthetic construct
  source 1..80: mol_type = other DNA
ttaagagaacaaaatgggtctcgccaagaacagtatcccaagaactcagagcccaggttccttctgtccactgtcacttc

SEQ ID NO: 87375 - DNA, 80 bp, synthetic construct
  source 1..80: mol_type = other DNA
cacagatgcacatatatgtgccaatgaggttcttgcattccatttgtttttcagtacagtcatgttttccctcttcacac

SEQ ID NO: 87376 - DNA, 80 bp, synthetic construct
  source 1..80: mol_type = other DNA
ttcactactggctgtatttccttctgctctgttgagtatgatctctaaagaatggaaaggaatcttctaaccacctttga

SEQ ID NO: 87377 - DNA, 80 bp, synthetic construct
  source 1..80: mol_type = other DNA
agtggcccgatctcagctcacttcaacctctgcctcccgggttcaagtgattctcatacctcagtctcccaagtatctgg

SEQ ID NO: 87378 - DNA, 80 bp, synthetic construct; identical to SEQ ID NO: 15838
  source 1..80: mol_type = other DNA

SEQ ID NO: 87379 - DNA, 80 bp, synthetic construct
  source 1..80: mol_type = other DNA
gagtaacaaaccaaagcttacattatgcaataattataataataacacaatatattataatatgatattattattttttt

SEQ ID NO: 87380 - DNA, 80 bp, synthetic construct
  source 1..80: mol_type = other DNA
ttagtagagacagggtttcactatgttggtcaggctggtctcaaactcctgacctctggttatccacccacctcggcctc

SEQ ID NO: 87381 - DNA, 80 bp, synthetic construct
  source 1..80: mol_type = other DNA
ttttctggacttggttgggccttcctcagtctttactttctgtcctattgtacttctttatttttctatctttcccgttt

SEQ ID NO: 87382 - DNA, 80 bp, synthetic construct; identical to SEQ ID NO: 15839
  source 1..80: mol_type = other DNA

SEQ ID NO: 87383 - DNA, 80 bp, synthetic construct
  source 1..80: mol_type = other DNA
catattgggttttttgaacgtggggaaatgtctttttctttctattcccatatcttgtagaaatactggcgtgttgtgag

SEQ ID NO: 87384 - DNA, 80 bp, synthetic construct
  source 1..80: mol_type = other DNA
ggactatttatattccaattcccagccttctcctactaagggaagctttgagggacatctcccctcacagataaagcttc

SEQ ID NO: 87385 - DNA, 80 bp, synthetic construct
  source 1..80: mol_type = other DNA
agcagaggagagtaagtaaataagggatcatggacagcaacaaaagggaacctaccaattgaactaaaactctaaaactt

SEQ ID NO: 87386 - DNA, 80 bp, synthetic construct; identical to SEQ ID NO: 15840
  source 1..80: mol_type = other DNA

SEQ ID NO: 87387 - DNA, 80 bp, synthetic construct
  source 1..80: mol_type = other DNA
aaacaattgtggtcagaacagaaaccaactcctccaatattgttaaccacctctctttcccccaaacaaagaggctcctg

SEQ ID NO: 87388 - DNA, 80 bp, synthetic construct
  source 1..80: mol_type = other DNA
ttggaaccatcagaatgtgttttggaaaagcaggattaaaatagaccatctcaactatcatgttgctccccaaggccagt

SEQ ID NO: 87389 - DNA, 80 bp, synthetic construct
  source 1..80: mol_type = other DNA
ccaactttattctctgccttcacctctccttcattctttccttaggccagtgaatccctacttgagagtgtatcagatca

SEQ ID NO: 87390 - DNA, 80 bp, synthetic construct; identical to SEQ ID NO: 15841
  source 1..80: mol_type = other DNA

SEQ ID NO: 87391 - DNA, 80 bp, synthetic construct
  source 1..80: mol_type = other DNA
acacggaagcatctaaatataagtggtagggaaacaccaatgagaactctctgtgatatacagtgtagatgtgccatgaa

SEQ ID NO: 87392 - DNA, 80 bp, synthetic construct
  source 1..80: mol_type = other DNA
agagaagaggccacaaaagaagaatgatcaaatggcccatcaggcctagatgatctttattatatacaccctgagttgta

SEQ ID NO: 87393 - DNA, 80 bp, synthetic construct; identical to SEQ ID NO: 15842
  source 1..80: mol_type = other DNA

SEQ ID NO: 87394 - DNA, 80 bp, synthetic construct
  source 1..80: mol_type = other DNA
cagcctcctgagtagctggaattatgggtgcacatcaccacgctcaggtaatttttgtatttttagtagagacagggttt

SEQ ID NO: 87395 - DNA, 80 bp, synthetic construct
  source 1..80: mol_type = other DNA
attctcattctgttcttgcaaaaagggagtgtgcatgtcttattatctcaggtttatagccgtgaaattcgacttgctca

SEQ ID NO: 87396 - DNA, 80 bp, synthetic construct
  source 1..80: mol_type = other DNA
aaaagtttctgcttgtttaaagcagaaatacatccacagtttggccttacattacatcactccccaagaagccttaaaca

SEQ ID NO: 87397 - DNA, 80 bp, synthetic construct
  source 1..80: mol_type = other DNA
aaaaaaatatgtttaggttatgaccgctctaaaacacaggcggagagaacaaatctttgaccagagacctaaaatgtgtg

SEQ ID NO: 87398 - DNA, 80 bp, synthetic construct; identical to SEQ ID NO: 15843
  source 1..80: mol_type = other DNA

SEQ ID NO: 87399 - DNA, 80 bp, synthetic construct
  source 1..80: mol_type = other DNA
ctaggcgaagaggctcatttcatatgcacatattagcactaactgaagattctgaggagaaaacattgaaatatttgctt

SEQ ID NO: 87400 - DNA, 80 bp, synthetic construct
  source 1..80: mol_type = other DNA
gcttaaactcccacagccatagctggagctgaaatcttcataacctgatttcttgtatggaaaaagtactttctaattca

SEQ ID NO: 87401 - DNA, 80 bp, synthetic construct
  source 1..80: mol_type = other DNA
caaaggccagccagaggagccattatttgacattttaaaaacagggttacaaaaaaaagattgtgtactggttatatagc

SEQ ID NO: 87402 - DNA, 80 bp, synthetic construct; identical to SEQ ID NO: 15844
  source 1..80: mol_type = other DNA

SEQ ID NO: 87403 - DNA, 80 bp, synthetic construct
  source 1..80: mol_type = other DNA
tgggacctgatggtgactcactagtattctaaatgaatgatgtatgagtggatggataaaacttatttcagtgccatctt

SEQ ID NO: 87404 - DNA, 80 bp, synthetic construct
  source 1..80: mol_type = other DNA
actgtccatgtttacagacatcgggttctttgcattcgtccatatcttaagcaagagaaaaaaaatagtgaataacaagg

SEQ ID NO: 87405 - DNA, 80 bp, synthetic construct
  source 1..80: mol_type = other DNA
caagatagatggagaaaaataagaataactagagaagaagcagattgagaatactgagaaatgctgagaatccagcacag

SEQ ID NO: 87406 - DNA, 80 bp, synthetic construct; identical to SEQ ID NO: 15845
  source 1..80: mol_type = other DNA

SEQ ID NO: 87407 - DNA, 80 bp, synthetic construct
  source 1..80: mol_type = other DNA
attgtgttactgtctttaaggcctacagtcttacttacatcatggccagtctgcaccctgcatggcccagagagaaatgc

SEQ ID NO: 87408 - DNA, 80 bp, synthetic construct
  source 1..80: mol_type = other DNA
caaatctgcagcataaatttatgacacccttcagttgctttcctactgagtccgtattgcaccatagcaaataaagaaca

SEQ ID NO: 87409 - DNA, 80 bp, synthetic construct
  source 1..80: mol_type = other DNA
gtcactatttcaaagtaacccgatgtgaatccaataaaatccaaaactgacagttttcaaaactgacatctgtcagtgac

SEQ ID NO: 87410 - DNA, 80 bp, synthetic construct
  source 1..80: mol_type = other DNA
aaactctggaactaaaataaaatcccagatcacaggcacagaacaaatacagaagtggcaactttgtagatgggcaaaaa

SEQ ID NO: 87411 - DNA, 80 bp, synthetic construct; identical to SEQ ID NO: 15846
  source 1..80: mol_type = other DNA

SEQ ID NO: 87412 - DNA, 80 bp, synthetic construct
  source 1..80: mol_type = other DNA
tgacttcttaaagccttccaaaactcctctcattacacagaggccacaatctgcaggtttaaaagaaatgctttcatacc

SEQ ID NO: 87413 - DNA, 80 bp, synthetic construct
  source 1..80: mol_type = other DNA
acagtctcaccagcttttatttcatgacaaagaagacaatgtaggaataacagagttgccagagataacaaaggaaaggt

SEQ ID NO: 87414 - DNA, 80 bp, synthetic construct; identical to SEQ ID NO: 15847
  source 1..80: mol_type = other DNA

SEQ ID NO: 87415 - DNA, 80 bp, synthetic construct
  source 1..80: mol_type = other DNA
tttatcagtcttgtttttgttatttatgcctccaactacctttagatataattcagtgactactcacaaaaatgtctcaa

SEQ ID NO: 87416 - DNA, 80 bp, synthetic construct
  source 1..80: mol_type = other DNA
cgaaaaaaaaaaatcttggcattagacagagactcaaatgcacgaagtcttgagtcagtctaagtggcaaattctcttcg

SEQ ID NO: 87417 - DNA, 80 bp, synthetic construct
  source 1..80: mol_type = other DNA
tctcatttcatgagcaatagaagtctgactcctaatttgtcatcttacaagaaaaacccagctctcaatttcctggctcc

SEQ ID NO: 87418 - DNA, 80 bp, synthetic construct
  source 1..80: mol_type = other DNA
cccttaatgacctcgaaatttcatcagaactacaaaagtcactttccctgcttgcattcctcagttctggctctgcctcc

SEQ ID NO: 87419 - DNA, 80 bp, synthetic construct; identical to SEQ ID NO: 15848
  source 1..80: mol_type = other DNA

SEQ ID NO: 87420 - DNA, 80 bp, synthetic construct
  source 1..80: mol_type = other DNA
agagtctacaaaggactcagaaactaacaaagctttgtcacagtaaggctggttgggcagatattattgttgtttaaaat

SEQ ID NO: 87421 - DNA, 80 bp, synthetic construct
  source 1..80: mol_type = other DNA
aacccaactcaacatcaaaacaacagtaacaaccaaacaacaaaagctacaagtggaaaaaaaagaaatacatgtgtttg

SEQ ID NO: 87422 - DNA, 80 bp, synthetic construct
  source 1..80: mol_type = other DNA
aagtcattggcaaacccttgaaaatctttactcaaatagttgacaagtattattcctaaaaatgaacaatggcccagcaa

SEQ ID NO: 87423 - DNA, 80 bp, synthetic construct; identical to SEQ ID NO: 15849
  source 1..80: mol_type = other DNA

SEQ ID NO: 87424 - DNA, 80 bp, synthetic construct
  source 1..80: mol_type = other DNA
aaagtgaaaatgaaccttctgacatatggttatcattagacctctgggtgaatgaaaactctccatcttcctgttcacaa

SEQ ID NO: 87425 - DNA, 80 bp, synthetic construct
  source 1..80: mol_type = other DNA
tactgcatgtgcccagggcacaaatttctggctcttcgacacactcatcaatatctaaaagaatcacatgagtcaaacaa

SEQ ID NO: 87426 - DNA, 80 bp, synthetic construct; identical to SEQ ID NO: 15850
  source 1..80: mol_type = other DNA

SEQ ID NO: 87427 - DNA, 80 bp, synthetic construct
  source 1..80: mol_type = other DNA
ttgatccaaatttactcccctccaaccacccacagaacttttcccaataccctatgctatagccctaaaactgtgaattt

SEQ ID NO: 87428 - DNA, 80 bp, synthetic construct
  source 1..80: mol_type = other DNA
aactgtacacttagaattgtggcatgttttctttagtatattatacatcttagctcctgtacagtggtagttaagagtag

SEQ ID NO: 87429 - DNA, 80 bp, synthetic construct
  source 1..80: mol_type = other DNA
gcttgggttggtcaataaaacatacgattacctatggaaaaatatgcccactctattccaacaaactcacttatctttcc

SEQ ID NO: 87430 - DNA, 80 bp, synthetic construct
  source 1..80: mol_type = other DNA
caccaaaatgtacttgcattatacaactttattctcaagaggcccaactaaggaaaagttgagaaattaaccttattatc

SEQ ID NO: 87431 - DNA, 80 bp, synthetic construct; identical to SEQ ID NO: 15851
  source 1..80: mol_type = other DNA

SEQ ID NO: 87432 - DNA, 80 bp, synthetic construct
  source 1..80: mol_type = other DNA
aatgggcacattcattgactgtgcagttatttttctttctatatatattctgttcaatttagcgaacttatgtattgata

SEQ ID NO: 87433 - DNA, 80 bp, synthetic construct
  source 1..80: mol_type = other DNA
tctcattgtggattagatgcagacctgtttaaagtcaggggtgtgaactaggtgacttcttgaaaatcctttcaacccta

SEQ ID NO: 87434 - DNA, 80 bp, synthetic construct
  source 1..80: mol_type = other DNA
aattaaaaaatcagccaggcatggtggcacatgcctgtagtcccagctactccagaggctgagacaggatgatcacttga

SEQ ID NO: 87435 - DNA, 80 bp, synthetic construct; identical to SEQ ID NO: 15852
  source 1..80: mol_type = other DNA

SEQ ID NO: 87436 - DNA, 80 bp, synthetic construct
  source 1..80: mol_type = other DNA
ttagagattagcatgataattagtgcttcttgtcttgccagaaggatgagaccatgtcatacctatgcccttgcatttgt

SEQ ID NO: 87437 - DNA, 80 bp, synthetic construct
  source 1..80: mol_type = other DNA
ggacccatccaagttttgacaggtacctggtgcacattttctgggttctagaagacattcattgatatctgcaaagaaaa

SEQ ID NO: 87438 - DNA, 80 bp, synthetic construct
  source 1..80: mol_type = other DNA
ggagaaaaataagcaataataaaaataagctttatcagctttcaaaaatgtatagcataacaaccatattttattttacc

SEQ ID NO: 87439 - DNA, 80 bp, synthetic construct; identical to SEQ ID NO: 15853
  source 1..80: mol_type = other DNA

SEQ ID NO: 87440 - DNA, 80 bp, synthetic construct
  source 1..80: mol_type = other DNA
agcctttatagggaggattaatataattctactctgacttttcctccaggtttccagaaagaagcattagaacagagact

SEQ ID NO: 87441 - DNA, 80 bp, synthetic construct
  source 1..80: mol_type = other DNA
aagaccccactgtattaatgcattggccatttctgcaaagattcccatttccacttgcacattcatcaacatctgcagaa

SEQ ID NO: 87442 - DNA, 80 bp, synthetic construct
  source 1..80: mol_type = other DNA
gctttaagcacctatacacatttaacaataagattacattattatattagagactgacaatttacattcaaatttcctat

SEQ ID NO: 87443 - DNA, 80 bp, synthetic construct
  source 1..80: mol_type = other DNA
gaatttggcttattactcttgcctagtatgttttagaaggagattctgtagattcaatgatttatttaagagaggctaca

SEQ ID NO: 87444 - DNA, 80 bp, synthetic construct; identical to SEQ ID NO: 15854
  source 1..80: mol_type = other DNA

SEQ ID NO: 87445 - DNA, 80 bp, synthetic construct
  source 1..80: mol_type = other DNA
accatgcctaatttataaattaaactttaggtatgtatgtgtaggaaaaaacatggtatatagagggttcagtactatct

SEQ ID NO: 87446 - DNA, 80 bp, synthetic construct
  source 1..80: mol_type = other DNA
agagatgatgctaattacaaagaacacatataaaactgacttcctttgctgatgcacaattttgcacacgcacctataca

SEQ ID NO: 87447 - DNA, 80 bp, synthetic construct
  source 1..80: mol_type = other DNA
gttacacggttacagtggctaaagagcattttagggttcaccaggcctcatccataggctgagaacttcttgatgttggt

SEQ ID NO: 87448 - DNA, 80 bp, synthetic construct; identical to SEQ ID NO: 15855
  source 1..80: mol_type = other DNA

SEQ ID NO: 87449 - DNA, 80 bp, synthetic construct
  source 1..80: mol_type = other DNA
gaacaacttccaccaatgatgacttctctcacttttctaaactaccccaaagagatggcacttaatttgttcttttcata

SEQ ID NO: 87450 - DNA, 80 bp, synthetic construct
  source 1..80: mol_type = other DNA
aaatttaatgaaagaaagttgttactgctggtttgaaagaatgaggcaccatgaagagggacaaggatgaaatgagagag

SEQ ID NO: 87451 - DNA, 80 bp, synthetic construct
  source 1..80: mol_type = other DNA
attgctaacccaaagggactctaatgtgtgtctgtggttgaagactacacccagatgagtcattgctagtaatcaagaat

SEQ ID NO: 87452 - DNA, 80 bp, synthetic construct; identical to SEQ ID NO: 15856
  source 1..80: mol_type = other DNA

SEQ ID NO: 87453 - DNA, 80 bp, synthetic construct
  source 1..80: mol_type = other DNA
aaatcagcatcctgataatagagaaatcaggaaagagatttaaaatcctgagctctttttcctctagaaaaatgattaac

SEQ ID NO: 87454 - DNA, 80 bp, synthetic construct
  source 1..80: mol_type = other DNA
ttaatatctttttcaatttaccccttagtcaattttttctaaactgacagccaaatgaataacaaaggaagaggtttatc

SEQ ID NO: 87455 - DNA, 80 bp, synthetic construct; identical to SEQ ID NO: 15857
  source 1..80: mol_type = other DNA

SEQ ID NO: 87456 - DNA, 80 bp, synthetic construct
  source 1..80: mol_type = other DNA
acttctagctatcattctcaggagtaatcctagctctaaactaagttagtgaaacagatatatttatttttgcatcaaaa

SEQ ID NO: 87457 - DNA, 80 bp, synthetic construct
  source 1..80: mol_type = other DNA
tatcggcctacgcagcaccacagactgtggaattaattgaagtattttgtctagttaagatttggtgccttaagtcatgg

SEQ ID NO: 87458 - DNA, 80 bp, synthetic construct
  source 1..80: mol_type = other DNA
cgtctacacagggctccttttagcatgtgacaacctgaacactgtctctttctttttactctcatccattcaaaaggaag

SEQ ID NO: 87459 - DNA, 80 bp, synthetic construct
  source 1..80: mol_type = other DNA
aaagctctatgtttagagtaaatgtactttgaagagcactgtgccattctgattttcctactgtcacagaagaaagcaaa

SEQ ID NO: 87460 - DNA, 80 bp, synthetic construct; identical to SEQ ID NO: 15858
  source 1..80: mol_type = other DNA

SEQ ID NO: 87461 - DNA, 80 bp, synthetic construct
  source 1..80: mol_type = other DNA
gagaaaatgaatttaaagtgagccaactgcttcccagtataggcagaggagactgatttccgatcttgaggaagggtgtc

SEQ ID NO: 87462 - DNA, 80 bp, synthetic construct
  source 1..80: mol_type = other DNA
gtctcatatctgagttccacaaggaaatggagagccttaaggatcttattagaaagggatccccaattaggaatttcctt

SEQ ID NO: 87463 - DNA, 80 bp, synthetic construct; identical to SEQ ID NO: 15859
  source 1..80: mol_type = other DNA

SEQ ID NO: 87464 - DNA, 80 bp, synthetic construct
  source 1..80: mol_type = other DNA
tctcagcaataatgtgggtgctatggccaggtgtgatttgggatttgaaataatgtgcttatgaattcaaataaggatct

SEQ ID NO: 87465 - DNA, 80 bp, synthetic construct
  source 1..80: mol_type = other DNA
taagacataaataaagacatttctagaatgaggtcttcaacccaacaggctgaatggttgcaaaactcaagttaattccc

SEQ ID NO: 87466 - DNA, 80 bp, synthetic construct
  source 1..80: mol_type = other DNA
aatgacttaagctccagcaggctatggctgaatgtcttatcttgatctataaatagctctgtcccacttcttacctgagt

SEQ ID NO: 87467 - DNA, 80 bp, synthetic construct
  source 1..80: mol_type = other DNA
tgccaagtttctctagggtattgtggttcatatcagagacgtccctgcttttcctgtcctgtatttttaatacatggata

SEQ ID NO: 87468 - DNA, 80 bp, synthetic construct; identical to SEQ ID NO: 15860
  source 1..80: mol_type = other DNA

SEQ ID NO: 87469 - DNA, 80 bp, synthetic construct
  source 1..80: mol_type = other DNA
tgagatattattttgtttctgggctgaaacagcagtcttttaaattttcacaccactggctacaagataccatcagatac

SEQ ID NO: 87470 - DNA, 80 bp, synthetic construct
  source 1..80: mol_type = other DNA
accctttccctgtaagatgactgggaagaaaagcgatggctttgtttgttctgtttctgcagattaatctgacccagctc

SEQ ID NO: 87471 - DNA, 80 bp, synthetic construct
  source 1..80: mol_type = other DNA
tgagtgtttgcaggcagggcagcagacaggcaaatacgaaatctatgtatgcgaatgatttacttcttgttttgaaaata

SEQ ID NO: 87472 - DNA, 80 bp, synthetic construct; identical to SEQ ID NO: 15861
  source 1..80: mol_type = other DNA

SEQ ID NO: 87473 - DNA, 80 bp, synthetic construct
  source 1..80: mol_type = other DNA
ggagaacagaatctggtgtccagtcaacaaagcctctcacatgaaaacaaatttatattttattttgatctgttctattg

SEQ ID NO: 87474 - DNA, 80 bp, synthetic construct
  source 1..80: mol_type = other DNA
gacatggaagaaaattaaatatggccaggtgcggttgctcacacctgtaatcctagcactttgggaagctaaggcgggcg

SEQ ID NO: 87475 - DNA, 80 bp, synthetic construct
  source 1..80: mol_type = other DNA
tagcagcgagccaagatcatgccattgcattccagcctgggcaacaagtgcaaaactccaagtccaaaacaaacaaacaa

SEQ ID NO: 87476 - DNA, 80 bp, synthetic construct; identical to SEQ ID NO: 15862
  source 1..80: mol_type = other DNA

SEQ ID NO: 87477 - DNA, 80 bp, synthetic construct
  source 1..80: mol_type = other DNA
tcaacggagattcaattgtaacaaatgcaccactctgatggaggatgctgatgatgggggaggctgtgcatgtgtagggg

SEQ ID NO: 87478 - DNA, 80 bp, synthetic construct
  source 1..80: mol_type = other DNA
ggcttgatttatgaccacatatggactctaatgatgctcacatctaaaaaaaagtcatgaaacttggctgctagggccag

SEQ ID NO: 87479 - DNA, 80 bp, synthetic construct; identical to SEQ ID NO: 15863
  source 1..80: mol_type = other DNA

SEQ ID NO: 87480 - DNA, 80 bp, synthetic construct
  source 1..80: mol_type = other DNA
aacctaacatgggagttatcataaaactactgaaaacaaaccaactctcattaaaacagaaaagattttggataatggat

SEQ ID NO: 87481 - DNA, 80 bp, synthetic construct
  source 1..80: mol_type = other DNA
acatgtttccctcttccctgctccagtggaacaatctaatttacagactaagtccaataaaggggatggcctataacaca

SEQ ID NO: 87482 - DNA, 80 bp, synthetic construct
  source 1..80: mol_type = other DNA
cctgtctaaggcaggtggattgtgcctctctgggcaacagacacaggagcaggagtgtgtctgccttgggttacaaggga

SEQ ID NO: 87483 - DNA, 80 bp, synthetic construct; identical to SEQ ID NO: 15864
  source 1..80: mol_type = other DNA

SEQ ID NO: 87484 - DNA, 80 bp, synthetic construct
  source 1..80: mol_type = other DNA
tacagttgcatgtgtttaatctcatggatctagcaaggtctaagttgacttggtggtcatgggtggtcttgtctatgggt

SEQ ID NO: 87485 - DNA, 80 bp, synthetic construct
  source 1..80: mol_type = other DNA
gagggaggcagccaactctagcactgtaagatcatctgccgtgggttccctctcccacatccatgcttcctctccaggta

SEQ ID NO: 87486 - DNA, 80 bp, synthetic construct
  source 1..80: mol_type = other DNA
ctggtgacaggaacttaacaagtatgtggttaggactataactttacttgtggtatataagttgtcttcagtatagacaa

SEQ ID NO: 87487 - DNA, 80 bp, synthetic construct
  source 1..80: mol_type = other DNA
taataaccagtaatgtcccttttactaaaatgtaagagaactatctttcccagatgcaggaaaaaatatgaagtgctata

SEQ ID NO: 87488 - DNA, 80 bp, synthetic construct; identical to SEQ ID NO: 15865
  source 1..80: mol_type = other DNA

SEQ ID NO: 87489 - DNA, 80 bp, synthetic construct
  source 1..80: mol_type = other DNA
ctaatattaacacactgtgtgttgggggaaaggggctgggaatgtgcctcctggtttttccactgaagttagtgaatttt

SEQ ID NO: 87490 - DNA, 80 bp, synthetic construct
  source 1..80: mol_type = other DNA
ttaccttcacaaaccaacaacttgtcattatagaagaatcccactggacattcacatcggaagctgccaaccatgttgat

SEQ ID NO: 87491 - DNA, 80 bp, synthetic construct
  source 1..80: mol_type = other DNA
cgtgcatgtgttggggtggtggtgatggcaatagggacatcaacgaatagcaaattgagataactaaaccactttccaga

SEQ ID NO: 87492 - DNA, 80 bp, synthetic construct; identical to SEQ ID NO: 15866
  source 1..80: mol_type = other DNA

SEQ ID NO: 87493 - DNA, 80 bp, synthetic construct
  source 1..80: mol_type = other DNA
tgggcttggctctccaacactgtgttatggttccttagcactctacatgacaggtagtaagtgctcaattcaaatttgtt

SEQ ID NO: 87494 - DNA, 80 bp, synthetic construct
  source 1..80: mol_type = other DNA
cccatctctgtcttacccactctgaactcctgaccactgaagtgccctctaggataagagtagtaatagtagtaataatg

SEQ ID NO: 87495 - DNA, 80 bp, synthetic construct; identical to SEQ ID NO: 15867
  source 1..80: mol_type = other DNA

SEQ ID NO: 87496 - DNA, 80 bp, synthetic construct
  source 1..80: mol_type = other DNA
catcctgcctcccttatcatataagggaagatcgtattatggtgatttcctgcatcaccctaatacaatcttcacagaac

SEQ ID NO: 87497 - DNA, 80 bp, synthetic construct
  source 1..80: mol_type = other DNA
tattatagtcaggagcctttgcaaggtacatactttgcttgcatacttgtgagaagatgatcacggactgaagtggagcc

SEQ ID NO: 87498 - DNA, 80 bp, synthetic construct
  source 1..80: mol_type = other DNA
atctcaaagggttcattgctattttgaatacacgcaattatgtctttagatctttcacacctttgtcattcatgtcatga

SEQ ID NO: 87499 - DNA, 80 bp, synthetic construct
  source 1..80: mol_type = other DNA
agtctaatttccagccattgttaggtataaaatagcaaaaggatatattaaaaattatattttcttttcctgtcaggatt

SEQ ID NO: 87500 - DNA, 80 bp, synthetic construct; identical to SEQ ID NO: 15868
  source 1..80: mol_type = other DNA

SEQ ID NO: 87501 - DNA, 80 bp, synthetic construct
  source 1..80: mol_type = other DNA
atttggactagatgaagtctgaagcctttccagctctcctagtggacaacgctaatgttctttctagtctttgcttactg

SEQ ID NO: 87502 - DNA, 80 bp, synthetic construct
  source 1..80: mol_type = other DNA
gccaatgtcatttagcagtttttctttccaaaccatgaagtttctttggacgtggacgagactgtggagccatatggatt

SEQ ID NO: 87503 - DNA, 80 bp, synthetic construct; identical to SEQ ID NO: 15869
  source 1..80: mol_type = other DNA

SEQ ID NO: 87504 - DNA, 80 bp, synthetic construct
  source 1..80: mol_type = other DNA
cagatgacctgaggagattccatgtaagataaaattgatccacgaaaggactttatgtaaacaatctacacgtaaggatt

SEQ ID NO: 87505 - DNA, 80 bp, synthetic construct
  source 1..80: mol_type = other DNA
cccttaatcatgaacaacaaatgttgttgccaattaggtggagctgcacagggtgtttgcacagtttgtttcaaactaag

SEQ ID NO: 87506 - DNA, 80 bp, synthetic construct
  source 1..80: mol_type = other DNA
tgacaaagcctggcctttgacttccacagagtgtagcaaactcatctgcaatgattaaacaaaggtgggatgggaggata

SEQ ID NO: 87507 - DNA, 80 bp, synthetic construct; identical to SEQ ID NO: 15870
  source 1..80: mol_type = other DNA

SEQ ID NO: 87508 - DNA, 80 bp, synthetic construct
  source 1..80: mol_type = other DNA
ggtagattataggagaccatagcaaatctagccacattcttgacatcagatctattaatgactaatttgggtcaatcaac

SEQ ID NO: 87509 - DNA, 80 bp, synthetic construct
  source 1..80: mol_type = other DNA
agcagtcccttctaactgtgagattttgtgattccagatcatgactgtaactggtaaggtatggtatcaatctaagcttc

SEQ ID NO: 87510 - DNA, 80 bp, synthetic construct
  source 1..80: mol_type = other DNA
tcacttccaacactgtaacgccagctgacattggtcacctaaagaaattacagggactcttaaaatatgtgcagatttca

SEQ ID NO: 87511 - DNA, 80 bp, synthetic construct
  source 1..80: mol_type = other DNA
tagtctacattaagggtttccaaagtggtctccagaggaatatgcaataatccattaggataaaaaagaaaatgcgagga

SEQ ID NO: 87512 - DNA, 80 bp, synthetic construct; identical to SEQ ID NO: 15871
  source 1..80: mol_type = other DNA

SEQ ID NO: 87513 - DNA, 80 bp, synthetic construct
  source 1..80: mol_type = other DNA
atacgattctcctgattttttccaaccatttaaaatgtagaaatccttcttagcttgcaggccattcaaaagtagatggt

SEQ ID NO: 87514 - DNA, 80 bp, synthetic construct
  source 1..80: mol_type = other DNA
catgcaatgtcaggtagtaccaaacaacagatttaatattttatatatcactgtggaaaatggtgtaggattccctttat

SEQ ID NO: 87515 - DNA, 80 bp, synthetic construct
  source 1..80: mol_type = other DNA
cactaatgtctttatttattcaaaggatgcaatttagccttttttttttaagacaaataacattatttagtttctttctc

SEQ ID NO: 87516 - DNA, 80 bp, synthetic construct; identical to SEQ ID NO: 15872
  source 1..80: mol_type = other DNA

SEQ ID NO: 87517 - DNA, 80 bp, synthetic construct
  source 1..80: mol_type = other DNA
catgaagaattcagtaacaatgagaacattgtttatagtttatatttttgtgatatgctgagtctacaagtctggttacg

SEQ ID NO: 87518 - DNA, 80 bp, synthetic construct
  source 1..80: mol_type = other DNA
gggtaatttttcaacctatatttttgataatggagaaactaaaactcacctgtacttgggatgggacactgttcacaggg

SEQ ID NO: 87519 - DNA, 80 bp, synthetic construct
  source 1..80: mol_type = other DNA
tctcatatctagaagggaggtaaaaaaaaggattggagggttggtgatgccatgtgggaaatcacaacaaatttctaagt

SEQ ID NO: 87520 - DNA, 80 bp, synthetic construct
  source 1..80: mol_type = other DNA
tcattatatagctgtagcattaataaactttaaatgactctctgcccagtctcctagtaacaattccctactgccatttg

SEQ ID NO: 87521 - DNA, 80 bp, synthetic construct; identical to SEQ ID NO: 15873
  source 1..80: mol_type = other DNA

SEQ ID NO: 87522 - DNA, 80 bp, synthetic construct
  source 1..80: mol_type = other DNA
tgtagttgccaacggtgttgtaacatgtccctggaccacagattccaggagtctcacattcattcacatctataatccaa

SEQ ID NO: 87523 - DNA, 80 bp, synthetic construct
  source 1..80: mol_type = other DNA
atttcattcatccgtgtcctctctctgtgtaaatgtgtgccttttgaggaaagagggttttagaaaaggaactcttggct

SEQ ID NO: 87524 - DNA, 80 bp, synthetic construct
  source 1..80: mol_type = other DNA
cccagctactctactcgggaggctgaggcaggagaattgcttgaactctacatgcagaggttgcagtgagccaagatcat

SEQ ID NO: 87525 - DNA, 80 bp, synthetic construct; identical to SEQ ID NO: 15874
  source 1..80: mol_type = other DNA

SEQ ID NO: 87526 - DNA, 80 bp, synthetic construct
  source 1..80: mol_type = other DNA
catatacactgtgatgttcaactaatactcaataaggttgccattgtctgggtgacctaataagccattaaagagccagg

SEQ ID NO: 87527 - DNA, 80 bp, synthetic construct
  source 1..80: mol_type = other DNA
cactcatagcataaagccaaagggccgccttctaggagaagcttatttgaatacatgagcaccaatggtaagtggtgaag

SEQ ID NO: 87528 - DNA, 80 bp, synthetic construct
  source 1..80: mol_type = other DNA
aatgaggctatggtccagcagaataagattctgtttttctcaggaaaagagggagatttaggacttaccagaaatgacat

SEQ ID NO: 87529 - DNA, 80 bp, synthetic construct; identical to SEQ ID NO: 15875
  source 1..80: mol_type = other DNA

SEQ ID NO: 87530 - DNA, 80 bp, synthetic construct
  source 1..80: mol_type = other DNA
agttgtgtgtgctttaagacaaaggaaacacaattaccttccaatataacggtgataggatttggtcggaaaccttcccc

SEQ ID NO: 87531 - DNA, 80 bp, synthetic construct
  source 1..80: mol_type = other DNA
gaagtaagttaacacctttgtgtacacttcccattttccagtggtttttattatgtgtccccagtgcaaggccactgtcc

SEQ ID NO: 87532 - DNA, 80 bp, synthetic construct; identical to SEQ ID NO: 15876
  source 1..80: mol_type = other DNA

SEQ ID NO: 87533 - DNA, 80 bp, synthetic construct
  source 1..80: mol_type = other DNA
acaggacatgtgaataagaatgtctgtaacctgctgcatcatcccagtgaggagctataagatcagttctttcataatgt

SEQ ID NO: 87534 - DNA, 80 bp, synthetic construct
  source 1..80: mol_type = other DNA
aaattaagtgtcttagtttgcccccttcgacaccaatgaaatgaaaagtcctcctcttttacttgttctcctctttctgc

SEQ ID NO: 87535 - DNA, 80 bp, synthetic construct
  source 1..80: mol_type = other DNA
ggtgctctgcatgagtgatttcatttaatcctatgaggtattttatgaatgctaaggaacttgcccaaggttacatgggt

SEQ ID NO: 87536 - DNA, 80 bp, synthetic construct; identical to SEQ ID NO: 15877
  source 1..80: mol_type = other DNA

SEQ ID NO: 87537 - DNA, 80 bp, synthetic construct
  source 1..80: mol_type = other DNA
gaaaacccttttatatttttaggagacatagtttgtatgtccttacaatcatatgctaaagccttctttcaagccacccc

SEQ ID NO: 87538 - DNA, 80 bp, synthetic construct
  source 1..80: mol_type = other DNA
taccctagtctggaaaatctttaaagtaatgctatctgcttttcacttacacagaagtgagatgttacctgccctacctg

SEQ ID NO: 87539 - DNA, 80 bp, synthetic construct
  source 1..80: mol_type = other DNA
ttctgatctagaaaggagaactggctggagttgaaataataataaataggaggatgtccacttacatgtgttcacagcag

SEQ ID NO: 87540 - DNA, 80 bp, synthetic construct
  source 1..80: mol_type = other DNA
tatacaaacacaaaagcatcaggcagaatctttctactggggttgaaaattcaaacccacttcaggaactgttcaaaaac

SEQ ID NO: 87541 - DNA, 80 bp, synthetic construct; identical to SEQ ID NO: 15878
  source 1..80: mol_type = other DNA

SEQ ID NO: 87542 - DNA, 80 bp, synthetic construct
  source 1..80: mol_type = other DNA
cataaaagaacagggcccaatctagagctccaaacaagaattttaaagctactagttataactacatctagaaatgcagt

SEQ ID NO: 87543 - DNA, 80 bp, synthetic construct
  source 1..80: mol_type = other DNA
atatagtctttggtggtctttccccagaacacatttaccattcaaatttgtcatcaggataaaatataactttgggccgg

SEQ ID NO: 87544 - DNA, 80 bp, synthetic construct
  source 1..80: mol_type = other DNA
agctactcgggaggctgaggcaggagaatggcatgaacctgggaggcggagcttgcagtgagccaagatggtaccactgt

SEQ ID NO: 87545 - DNA, 80 bp, synthetic construct; identical to SEQ ID NO: 15879
  source 1..80: mol_type = other DNA

SEQ ID NO: 87546 - DNA, 80 bp, synthetic construct
  source 1..80: mol_type = other DNA
agtttctattccaaaaatatgtacagaattccagatatttaggacatgggttttggcaaattccactctgtacaattcct

SEQ ID NO: 87547 - DNA, 80 bp, synthetic construct
  source 1..80: mol_type = other DNA
atgtgaatttggacggacagggccagagtaacagaaacgagattagacagaatgatgttgatagtgatctggggcacgca

SEQ ID NO: 87548 - DNA, 80 bp, synthetic construct
  source 1..80: mol_type = other DNA
gagagcccctgagtcatggtttgtttaggtggttgaaaagaccagattttttccggaaatttgaactcatacagaacata

SEQ ID NO: 87549 - DNA, 80 bp, synthetic construct; identical to SEQ ID NO: 15880
  source 1..80: mol_type = other DNA

SEQ ID NO: 87550 - DNA, 80 bp, synthetic construct
  source 1..80: mol_type = other DNA
aaactctccaaaaatgtacccaagtagaaaaggaaatggctgggaagctacaccactagagcacccctagaacattcctt

SEQ ID NO: 87551 - DNA, 80 bp, synthetic construct
  source 1..80: mol_type = other DNA
caatcagttccaggtctgagaaaaggtatctgtgattcttaatacttcccccttgcttttcttgtcttctgtgacggccc

SEQ ID NO: 87552 - DNA, 80 bp, synthetic construct; identical to SEQ ID NO: 15881
  source 1..80: mol_type = other DNA

SEQ ID NO: 87553 - DNA, 80 bp, synthetic construct
  source 1..80: mol_type = other DNA
cagtctctattacatgccaagcagcgggctgagcattttatagatacatatctcatttgtagtgttccacgtaggtccac

SEQ ID NO: 87554 - DNA, 80 bp, synthetic construct
  source 1..80: mol_type = other DNA
tttcagggaactgtcataattagttgcataatctccagtgtccctagtcctatggcatgtgtttgcctttgttgacggag

SEQ ID NO: 87555 - DNA, 80 bp, synthetic construct
  source 1..80: mol_type = other DNA
aacaaaaccttctcttatagcaataagagaagcaaaactttcactgtgactatttgtgtcaccagaggtggcacagtacc

SEQ ID NO: 87556 - DNA, 80 bp, synthetic construct
  source 1..80: mol_type = other DNA
actgtataaagaacacccaacggttccataacaaagaaaagtattcacataaaaatacatgagggaattagtatacatgt

SEQ ID NO: 87557 - DNA, 80 bp, synthetic construct; identical to SEQ ID NO: 15882
  source 1..80: mol_type = other DNA

SEQ ID NO: 87558 - DNA, 80 bp, synthetic construct
  source 1..80: mol_type = other DNA
ttagatatttagagcaaatgtgagacataccattctacgtatggacaagactatttgctctgcttttatttctacaaacc

SEQ ID NO: 87559 - DNA, 80 bp, synthetic construct
  source 1..80: mol_type = other DNA
ccccctccgtagggataaatgggttgcactgatttaaccacacttggttaccctcattgaccaatggatacacccttgca

SEQ ID NO: 87560 - DNA, 80 bp, synthetic construct; identical to SEQ ID NO: 15883
  source 1..80: mol_type = other DNA

SEQ ID NO: 87561 - DNA, 80 bp, synthetic construct
  source 1..80: mol_type = other DNA
gttaggggctttctaattcctcaggtctatcaactttccagtgcagcaatgttttggcataacttcaatttgacacattt

SEQ ID NO: 87562 - DNA, 80 bp, synthetic construct
  source 1..80: mol_type = other DNA
gtctatttctcaagtttcaggcttagcttagatgggcaccaaaagtgcaaaagaatggcaaccatagggagaagaaaaat

SEQ ID NO: 87563 - DNA, 80 bp, synthetic construct
  source 1..80: mol_type = other DNA
catctgagataaaactttcagggaataaaaaaaaattccaggtaaatcacttaatgagccttagcctctattgtgcttaa

SEQ ID NO: 87564 - DNA, 80 bp, synthetic construct
  source 1..80: mol_type = other DNA
aagtgctgtctgtaaatatatgcacatgtaagtatatgtataatttatgtaatgacaagtctaatcatgtatgtttacat

SEQ ID NO: 87565 - DNA, 80 bp, synthetic construct; identical to SEQ ID NO: 15884
  source 1..80: mol_type = other DNA

SEQ ID NO: 87566 - DNA, 80 bp, synthetic construct
  source 1..80: mol_type = other DNA
ttgtaactattataaggcctagctgacttgaggtggagaatggtatgacttttttggtatcattttatgttagagcacag

SEQ ID NO: 87567 - DNA, 80 bp, synthetic construct
  source 1..80: mol_type = other DNA
ttcccacagagctctagtgccaaatgatgaatcttttctattaactgacccagtcttcaaaaaagaattgctagcctgag

SEQ ID NO: 87568 - DNA, 80 bp, synthetic construct; identical to SEQ ID NO: 15885
  source 1..80: mol_type = other DNA

SEQ ID NO: 87569 - DNA, 80 bp, synthetic construct
  source 1..80: mol_type = other DNA
atatgtgtaatctatgcagtccttgataagcaacctctgttactttcctactcaccagtgcacttaatgccatctccaat

SEQ ID NO: 87570 - DNA, 80 bp, synthetic construct
  source 1..80: mol_type = other DNA
aagtaatattcaaaagttgacttgccttcaaacttcccatggtatagtatagactggttttgcatccatatataaactct

SEQ ID NO: 87571 - DNA, 80 bp, synthetic construct
  source 1..80: mol_type = other DNA
ttttctatggttttaatactccttgtcacatattttcttttgctagtatttttagtaagtcaactatggagtaatgatgc

SEQ ID NO: 87572 - DNA, 80 bp, synthetic construct; identical to SEQ ID NO: 15886
  source 1..80: mol_type = other DNA

SEQ ID NO: 87573 - DNA, 80 bp, synthetic construct
  source 1..80: mol_type = other DNA
ccagattagggtcacattactaaaagactccaaattttccaaaatgctctattctccaaaattctattgtcaactttagc

SEQ ID NO: 87574 - DNA, 80 bp, synthetic construct
  source 1..80: mol_type = other DNA
caacatctaacaccaatcttaggtcaagaagaacaattttgccatacaaaacactgcaagaatttccagtgaacacttga

SEQ ID NO: 87575 - DNA, 80 bp, synthetic construct
  source 1..80: mol_type = other DNA
gaagctctgaaatggtcctgggatctttggcttcttcataacttctagagcaaacacaaaatgaaataagaacagattgc

SEQ ID NO: 87576 - DNA, 80 bp, synthetic construct; identical to SEQ ID NO: 15887
  source 1..80: mol_type = other DNA

SEQ ID NO: 87577 - DNA, 80 bp, synthetic construct
  source 1..80: mol_type = other DNA
cttctttctgcctcaggtaattgctcccctcagaggtaatgcaacaaatcaccatttttgtggagttttgcctaaatttc

SEQ ID NO: 87578 - DNA, 80 bp, synthetic construct
  source 1..80: mol_type = other DNA
ctcgtaattccattctcccaatctcagtttctcagaagaagacaaagaagttgggccctacaagtcagtgaggggcagag

SEQ ID NO: 87579 - DNA, 80 bp, synthetic construct
  source 1..80: mol_type = other DNA
cgatctcggttcacagcaacctccgccacctgggttcaagcaattctcctgcctcagcctccctagtagctgggattaca

SEQ ID NO: 87580 - DNA, 80 bp, synthetic construct; identical to SEQ ID NO: 15888
  source 1..80: mol_type = other DNA

SEQ ID NO: 87581 - DNA, 80 bp, synthetic construct
  source 1..80: mol_type = other DNA
taatgaccagaggtactcttattttatgagtattatcattttcatatggcttttaccttccatgtttaatcttgcaatta

SEQ ID NO: 87582 - DNA, 80 bp, synthetic construct
  source 1..80: mol_type = other DNA
agaaactatatttacaacaggctgtgtatcatgggcttttgggtaataggagagagtaactcaggagccaatattcaatt

SEQ ID NO: 87583 - DNA, 80 bp, synthetic construct
  source 1..80: mol_type = other DNA
cattaattgtttctgtggcagacttggactgtaattcatcataaaagcaaacagaaggggaaagtgagccataaggaaaa

SEQ ID NO: 87584 - DNA, 80 bp, synthetic construct; identical to SEQ ID NO: 15889
  source 1..80: mol_type = other DNA

SEQ ID NO: 87585 - DNA, 80 bp, synthetic construct
  source 1..80: mol_type = other DNA
tgtggcctcctcttacagtcacgcagggagaggctgtatcacccacacaaacacctgccttctctgccatctgggcatct

SEQ ID NO: 87586 - DNA, 80 bp, synthetic construct
  source 1..80: mol_type = other DNA
catggagttttcacaggccgacagccagtgaaggaaaattagcagtgataagaaactggaaggaaatgaacacaaattct

SEQ ID NO: 87587 - DNA, 80 bp, synthetic construct
  source 1..80: mol_type = other DNA
gtatgcttgctttattcattaactaagtaagcacatgatgggaggtagggtcttaaaattagcttgtgaaagccaggacc

SEQ ID NO: 87588 - DNA, 80 bp, synthetic construct; identical to SEQ ID NO: 15890
  source 1..80: mol_type = other DNA

SEQ ID NO: 87589 - DNA, 80 bp, synthetic construct
  source 1..80: mol_type = other DNA
tactcagtaatgacagggagctgaaatatttagacaaaactgtaatggagcccagaggtctttttcttagttctcatgaa

SEQ ID NO: 87590 - DNA, 80 bp, synthetic construct
  source 1..80: mol_type = other DNA
cctggaacattattagcaaagccatcaccaaggtaacctgacggtgttctaagttgtgaatgacacgaattttaaactaa

SEQ ID NO: 87591 - DNA, 80 bp, synthetic construct
  source 1..80: mol_type = other DNA
gaacatttgagtaactgcagagcaccctggtgatttgttcaagatcatgaatgagtggatttactaagaacacaattcag

SEQ ID NO: 87592 - DNA, 80 bp, synthetic construct
  source 1..80: mol_type = other DNA
ctctggtatcaaaggggcataaaactcaagtcttcctacagtgctagctggattttagcaaattggaaaatcattttagg

SEQ ID NO: 87593 - DNA, 80 bp, synthetic construct; identical to SEQ ID NO: 15891
  source 1..80: mol_type = other DNA

SEQ ID NO: 87594 - DNA, 80 bp, synthetic construct
  source 1..80: mol_type = other DNA
actgtgtctatgtttcatttgacaatagcttttatttattgaccagcactgcgccaacagcattgtatacattatatgtc

SEQ ID NO: 87595 - DNA, 80 bp, synthetic construct
  source 1..80: mol_type = other DNA
aacttctttcataagcatcactgcctctgggttgaatttcaatgtgctcagcttaacaaaacagtagtattatcctctat

SEQ ID NO: 87596 - DNA, 80 bp, synthetic construct; identical to SEQ ID NO: 15892
  source 1..80: mol_type = other DNA

SEQ ID NO: 87597 - DNA, 80 bp, synthetic construct
  source 1..80: mol_type = other DNA
tatgttgatataattaagaggaggatctgcacatttgccccactgccaatctgcaaatattttaatatttgttttaagtc

SEQ ID NO: 87598 - DNA, 80 bp, synthetic construct
  source 1..80: mol_type = other DNA
gaaaataccaactaaacacttataaactaaacacaatgtcattagcacagagtaacttcttccatttggcatttaatagg

SEQ ID NO: 87599 - DNA, 80 bp, synthetic construct
  source 1..80: mol_type = other DNA
aaggcactggaagactagtgagaattgatgaaatatatgaattgtaggatgttttcctttaaagagcaattccagttata

SEQ ID NO: 87600 - DNA, 80 bp, synthetic construct; identical to SEQ ID NO: 15893
  source 1..80: mol_type = other DNA

SEQ ID NO: 87601 - DNA, 80 bp, synthetic construct
  source 1..80: mol_type = other DNA
cttttttgccggagtagcccatatcacagtggcagataaatgagcctttcgtgttttcacaggtcccacttaggcagata

SEQ ID NO: 87602 - DNA, 80 bp, synthetic construct
  source 1..80: mol_type = other DNA
tttagaggccaatttacatttgctcttcattctttacattgcaagctcattattcagactggctttcatctggcccataa

SEQ ID NO: 87603 - DNA, 80 bp, synthetic construct
  source 1..80: mol_type = other DNA
aaagaaaggatagatgaactggttgtcttagtgtaagtagtttaagacttcacttcttttccaaattaaaaattattcat

SEQ ID NO: 87604 - DNA, 80 bp, synthetic construct
  source 1..80: mol_type = other DNA
caaaaaaaatagacaatagataccttaaaaagtggttttctagacattggacattaggcaacaaaagacagtgatccctg

SEQ ID NO: 87605 - DNA, 80 bp, synthetic construct; identical to SEQ ID NO: 15894
  source 1..80: mol_type = other DNA

SEQ ID NO: 87606 - DNA, 80 bp, synthetic construct
  source 1..80: mol_type = other DNA
cacagggaattgggtagaatatccagaagggtcttacctcactaacagagcaaaattacccctagactaagtgtagctta

SEQ ID NO: 87607 - DNA, 80 bp, synthetic construct
  source 1..80: mol_type = other DNA
aatgaagcaggaaaatatgacctaaaataaggaagaaagtcaatttattcaaatgacctagaaccaatgcagatgacaga

SEQ ID NO: 87608 - DNA, 80 bp, synthetic construct
  source 1..80: mol_type = other DNA
tgtatgtgaggaaaggcagattagagatcgtagaagaaaagtttatcaaatttgaaggcataacaatagaaactatacaa

SEQ ID NO: 87609 - DNA, 80 bp, synthetic construct; identical to SEQ ID NO: 15895
  source 1..80: mol_type = other DNA

SEQ ID NO: 87610 - DNA, 80 bp, synthetic construct
  source 1..80: mol_type = other DNA
gaaaaattctgtcttctttgcttacctacacaagtcttcatgtcttcagatgccatgaatccatcataacacaagcacct

SEQ ID NO: 87611 - DNA, 80 bp, synthetic construct
  source 1..80: mol_type = other DNA
ttagcctactagcataagactattaactctcaaatccaaatgaagctttgcataaactagcccattgggttatccttggt

SEQ ID NO: 87612 - DNA, 80 bp, synthetic construct; identical to SEQ ID NO: 15896
  source 1..80: mol_type = other DNA

SEQ ID NO: 87613 - DNA, 80 bp, synthetic construct
  source 1..80: mol_type = other DNA
aggcatgtgccaccacacccaactaattttgtatttttagtagaaatggggtttcaccatgttggtcaggctggtcttga

SEQ ID NO: 87614 - DNA, 80 bp, synthetic construct
  source 1..80: mol_type = other DNA
tcctaaatccaaattctcttcttaagccaagccaaaatcaaagcctatgttattacccactttgtttctcacctctacct

SEQ ID NO: 87615 - DNA, 80 bp, synthetic construct
  source 1..80: mol_type = other DNA
tgttgccaatggttcaaggaataaacctggagttgcactgaattaggccaaaacatcaaactcttcaaaagtctggtcaa

SEQ ID NO: 87616 - DNA, 80 bp, synthetic construct; identical to SEQ ID NO: 15897
  source 1..80: mol_type = other DNA

SEQ ID NO: 87617 - DNA, 80 bp, synthetic construct
  source 1..80: mol_type = other DNA
ctgccttcagagtttgtgcagaaggtttcacaaccaccattcattatgctgcattcatcaatgtctaaaagaaatgaaaa

SEQ ID NO: 87618 - DNA, 80 bp, synthetic construct
  source 1..80: mol_type = other DNA
ttaagaggcagggcctttaaaagaggtaatcatcctatgagggctctaccctcatggtgggatcggtgctgttataaaag

SEQ ID NO: 87619 - DNA, 80 bp, synthetic construct
  source 1..80: mol_type = other DNA
tcaggtattctattacagtatcacaaaaatgggctaacacacctccctctgtgtttatgagcatggcacatttttaacat

SEQ ID NO: 87620 - DNA, 80 bp, synthetic construct; identical to SEQ ID NO: 15898
  source 1..80: mol_type = other DNA

SEQ ID NO: 87621 - DNA, 80 bp, synthetic construct
  source 1..80: mol_type = other DNA
tgaagttctgagttgtcctgggccatgtttcagaaaactttgggctgatttatggttttgggtggaaaccatgtgagact

SEQ ID NO: 87622 - DNA, 80 bp, synthetic construct
  source 1..80: mol_type = other DNA
tcccacaaaaacccatctttaaggagagccaggcatagcctcaattgcagtgtaagatatgaacattccatggtcttctt

SEQ ID NO: 87623 - DNA, 80 bp, synthetic construct
  source 1..80: mol_type = other DNA
agttaccatttgttaatgtgcattggtatgcatgtgtgtagacaaagcacatgctgctactgttccctatccaaacggca

SEQ ID NO: 87624 - DNA, 80 bp, synthetic construct
  source 1..80: mol_type = other DNA
ggaaacaagaaagataagtaaaagtagcgatgaaaacaaaactcagagtacatagagtgttttagggagagatgaaataa

SEQ ID NO: 87625 - DNA, 80 bp, synthetic construct; identical to SEQ ID NO: 15899
  source 1..80: mol_type = other DNA

SEQ ID NO: 87626 - DNA, 80 bp, synthetic construct
  source 1..80: mol_type = other DNA
caccacctcggcataggagaggatctctctgacactcatcaatatctgcaaaatggaaatgaccatgttaaaggtggggg

SEQ ID NO: 87627 - DNA, 80 bp, synthetic construct
  source 1..80: mol_type = other DNA
tattttcttctcctgcactaccctgctctccttacttcctgacaagtaccttctgagagaatttgctcacagtaagaaat

SEQ ID NO: 87628 - DNA, 80 bp, synthetic construct; identical to SEQ ID NO: 15900
  source 1..80: mol_type = other DNA

SEQ ID NO: 87629 - DNA, 80 bp, synthetic construct
  source 1..80: mol_type = other DNA
tccttctctttctgtgttgatcaaatgatcccaaacttacccatgcagttcttcatcatcatgaatccactttcatagcc

SEQ ID NO: 87630 - DNA, 80 bp, synthetic construct
  source 1..80: mol_type = other DNA
gtctcaggacagccttaattcttgcgacaatatgttaaagataaagagttttaaaggacgtcccctctcctggcccttaa

SEQ ID NO: 87631 - DNA, 80 bp, synthetic construct
  source 1..80: mol_type = other DNA
tggggcaaaataagtttatgagcaagcagtcaggaggtctcaatgcccaccattttaaatcatgaaggttggaagttctt

SEQ ID NO: 87632 - DNA, 80 bp, synthetic construct; identical to SEQ ID NO: 15901
  source 1..80: mol_type = other DNA

SEQ ID NO: 87633 - DNA, 80 bp, synthetic construct
  source 1..80: mol_type = other DNA
ctgtttggtgcttttttggatatgccaaaaatataaaaatttcaaagatataatttataatttaaattatttgcaaataa

SEQ ID NO: 87634 - DNA, 80 bp, synthetic construct
  source 1..80: mol_type = other DNA
gccatctgagtagctgggattacaggtgtgcaccaccatgcctagatatttttttttttttttttttttttttttttgta

SEQ ID NO: 87635 - DNA, 80 bp, synthetic construct
  source 1..80: mol_type = other DNA
aaactgcatacatgtaacatgtgacctgagtttcccactacagggcctttttccaaaacaagaccaaacactcaagaaat

SEQ ID NO: 87636 - DNA, 80 bp, synthetic construct; identical to SEQ ID NO: 15902
  source 1..80: mol_type = other DNA

SEQ ID NO: 87637 - DNA, 80 bp, synthetic construct
  source 1..80: mol_type = other DNA
gaaaacgtaacattgtacctttgaagaaaggctttccatttgtaatttcttttgtggcaaatccgggtcctctcggacac

SEQ ID NO: 87638 - DNA, 80 bp, synthetic construct
  source 1..80: mol_type = other DNA
ggatatctgtcagagggaatcaagggaggttaaatagagccacacggcttccactgccccaaactgccaacactctgtta

SEQ ID NO: 87639 - DNA, 80 bp, synthetic construct
  source 1..80: mol_type = other DNA
cagcccatgtttgcacctcctacttctgaaaagttccctttcaacatctgataattctacataaggaatggtattctgag

SEQ ID NO: 87640 - DNA, 80 bp, synthetic construct
  source 1..80: mol_type = other DNA
tccgacccacttcatttttggaaaggtggaatgatgaactctggaaagaggactgctttacttgagattaaagagaaaaa

SEQ ID NO: 87641 - DNA, 80 bp, synthetic construct; identical to SEQ ID NO: 15903
  source 1..80: mol_type = other DNA

SEQ ID NO: 87642 - DNA, 80 bp, synthetic construct
  source 1..80: mol_type = other DNA
ttgaaatgtaagatgtatcttccttctctttctccttcacaatggggtcattaacaatatatctaactccctgggtttcc

SEQ ID NO: 87643 - DNA, 80 bp, synthetic construct
  source 1..80: mol_type = other DNA
aacaaataaactaagactcagaatagcattaactgacatccttaattacaaaaatacttttggctttgaattcccggttc

SEQ ID NO: 87644 - DNA, 80 bp, synthetic construct
  source 1..80: mol_type = other DNA
taggccggactgcagtggcactatctcggctcactgcaagctccaactcccgggttcatgccattctcctgcctcagcct

SEQ ID NO: 87645 - DNA, 80 bp, synthetic construct; identical to SEQ ID NO: 15904
  source 1..80: mol_type = other DNA

SEQ ID NO: 87646 - DNA, 80 bp, synthetic construct
  source 1..80: mol_type = other DNA
ttagatgcatgagatgtgcgatctcaaacttgccactatcacgagcccatagggacttaggacttagagttctaaggact

SEQ ID NO: 87647 - DNA, 80 bp, synthetic construct
  source 1..80: mol_type = other DNA
gtttttgcaaggacctgtccttctggccaatgtcagggtatgcttagaagacatgggctacagtttccaaatatgtgcaa

SEQ ID NO: 87648 - DNA, 80 bp, synthetic construct; identical to SEQ ID NO: 15905
  source 1..80: mol_type = other DNA

SEQ ID NO: 87649 - DNA, 80 bp, synthetic construct
  source 1..80: mol_type = other DNA
cttgaatgaccccctagtgttaacacacaggccatttttacacactcctgggaacacttcacattcatctatatctaaaa

SEQ ID NO: 87650 - DNA, 80 bp, synthetic construct
  source 1..80: mol_type = other DNA
cagaacgagcccacctattactaaatatgtaagagtttctccattggtttcagggaataacttttgagttgtagagacag

SEQ ID NO: 87651 - DNA, 80 bp, synthetic construct
  source 1..80: mol_type = other DNA
cagcatagaaaaatatcccaccaaggaatatgtgggccagtgaagggtctcttttaagaagttctgataaatcaccagaa

SEQ ID NO: 87652 - DNA, 80 bp, synthetic construct
  source 1..80: mol_type = other DNA
agagcaatatgttctctgcacttaatttggaaaagtattcaccaccaagttaatcaaaagaaaggcacttacttgccaat

SEQ ID NO: 87653 - DNA, 80 bp, synthetic construct; identical to SEQ ID NO: 15906
  source 1..80: mol_type = other DNA

SEQ ID NO: 87654 - DNA, 80 bp, synthetic construct
  source 1..80: mol_type = other DNA
gctgtttttaaaatttttcagctgctgtgtcatgtcaggttgtgttagtcaccatgacctatgtctatctgaaactccag

SEQ ID NO: 87655 - DNA, 80 bp, synthetic construct
  source 1..80: mol_type = other DNA
ctgtttttctcttcctgatagcattttgaaagtgcagtctctctaaactgcgatcaacctaaaacattttcagccaccca

SEQ ID NO: 87656 - DNA, 80 bp, synthetic construct
  source 1..80: mol_type = other DNA
tgaagttatatgacagctttatccagtccgagttaacacaaacattcattatgcacacaaaaatgtatggtttataagta

SEQ ID NO: 87657 - DNA, 80 bp, synthetic construct; identical to SEQ ID NO: 15907
  source 1..80: mol_type = other DNA

SEQ ID NO: 87658 - DNA, 80 bp, synthetic construct
  source 1..80: mol_type = other DNA
ctttaacctgaatatagaaaactcaagtctataatttggagatctcatggcctccagcattcacataaatttacacattt

SEQ ID NO: 87659 - DNA, 80 bp, synthetic construct
  source 1..80: mol_type = other DNA
acatcaattagctttttgaaagataatctgtacctataaaaagctcagaacccctaaccacaaggttcccaagagagctg

SEQ ID NO: 87660 - DNA, 80 bp, synthetic construct; identical to SEQ ID NO: 15908
  source 1..80: mol_type = other DNA

SEQ ID NO: 87661 - DNA, 80 bp, synthetic construct
  source 1..80: mol_type = other DNA
gtctgccagcaagtgcccttgatggtttctgcagaggagggaataatatttaatagaatctatataaaaattcaaacata

SEQ ID NO: 87662 - DNA, 80 bp, synthetic construct
  source 1..80: mol_type = other DNA
gcagatggtttttgttggatccaaagtactttcagaagaacattcacaaataaaagagcctgggctgttcttgcagactc

SEQ ID NO: 87663 - DNA, 80 bp, synthetic construct
  source 1..80: mol_type = other DNA
acatatccttaatcccacacagtaaagctgggctaaatagtttttcctacactagatggaatgccaaaataataactcta

SEQ ID NO: 87664 - DNA, 80 bp, synthetic construct
  source 1..80: mol_type = other DNA
gccaattacaagtaaataccataagtggcttacaaagtacatactagtgccatgtagaaccacagaatttcaactaaact

SEQ ID NO: 87665 - DNA, 80 bp, synthetic construct; identical to SEQ ID NO: 15909
  source 1..80: mol_type = other DNA

SEQ ID NO: 87666 - DNA, 80 bp, synthetic construct
  source 1..80: mol_type = other DNA
acagaggcttgacctggttttaaactaagtatctaaactaaatatctacaaagcctaaagtcactaggctatttaattca

SEQ ID NO: 87667 - DNA, 80 bp, synthetic construct
  source 1..80: mol_type = other DNA
gtccaactttgaaatgtgttagttccagaatgggtgtttcttccttataataattcaaattgtctccaggtatgattata

SEQ ID NO: 87668 - DNA, 80 bp, synthetic construct
  source 1..80: mol_type = other DNA
ttttctgattaagtctaataaatggttgggagaagagctgcttctctctcagtaaaatcaaggttgactttgtagtcaca

SEQ ID NO: 87669 - DNA, 80 bp, synthetic construct; identical to SEQ ID NO: 15910
  source 1..80: mol_type = other DNA

SEQ ID NO: 87670 - DNA, 80 bp, synthetic construct
  source 1..80: mol_type = other DNA
atacatttataggtcccacgaaggttttcacagattccatttgggcaaatatcaggatctagtgcacattcatttatatc

SEQ ID NO: 87671 - DNA, 80 bp, synthetic construct
  source 1..80: mol_type = other DNA
tttcactggaaagagaacactctgtctctttttctcactgtaagatattctgagtccaatctttctcccacaagttcctg

SEQ ID NO: 87672 - DNA, 80 bp, synthetic construct
  source 1..80: mol_type = other DNA
tttcttccatctaccctgcactactctacactgcaaccattcttaccatcctaaaaacaaggtattatatcgttctcatg

SEQ ID NO: 87673 - DNA, 80 bp, synthetic construct; identical to SEQ ID NO: 15911
  source 1..80: mol_type = other DNA

SEQ ID NO: 87674 - DNA, 80 bp, synthetic construct
  source 1..80: mol_type = other DNA
tgacaaccagtgaatggatagtctcaaatcctggtgcctgactcttctataaattagggttgactttttttttttcttcc

SEQ ID NO: 87675 - DNA, 80 bp, synthetic construct
  source 1..80: mol_type = other DNA
actaatcatactgaatgaactgacaatcaattcagccagtccatgttctttcagatctccctgaatcaaactatgtagct

SEQ ID NO: 87676 - DNA, 80 bp, synthetic construct; identical to SEQ ID NO: 15912
  source 1..80: mol_type = other DNA

SEQ ID NO: 87677 - DNA, 80 bp, synthetic construct
  source 1..80: mol_type = other DNA
aatcctagagcccacagtgccccggctgctctgccactgaaggcttctgagcatcccagatacatggcacagtgatggcc

SEQ ID NO: 87678 - DNA, 80 bp, synthetic construct
  source 1..80: mol_type = other DNA
attccgctgcaataaattaacagatagtaaatgattcccttgtttgcagaacaggtagatcctgcccttggttttgcaca

SEQ ID NO: 87679 - DNA, 80 bp, synthetic construct
  source 1..80: mol_type = other DNA
tgcaaagccctttcggaaaaggtgtttttcctataacttgattttgttcaccagggaacactttacacttacggtgaaat

SEQ ID NO: 87680 - DNA, 80 bp, synthetic construct
  source 1..80: mol_type = other DNA
acaacagaatacctactcttgcatttaagtgtatttttaaagttaatatgtatcaggatactggattcattctctatggt

SEQ ID NO: 87681 - DNA, 80 bp, synthetic construct; identical to SEQ ID NO: 15913
  source 1..80: mol_type = other DNA

SEQ ID NO: 87682 - DNA, 80 bp, synthetic construct
  source 1..80: mol_type = other DNA
aatagttcctatcccctgcatgccagagaattgcatcctgatgacattggaggtaaatgagttatacaaccaaagattat

SEQ ID NO: 87683 - DNA, 80 bp, synthetic construct
  source 1..80: mol_type = other DNA
acagatgggaaggtgtgtttgaaagccaggtgtgggaacaaaaagaaattcatcttttttattctgctgtatcagcaaaa

SEQ ID NO: 87684 - DNA, 80 bp, synthetic construct; identical to SEQ ID NO: 15914
  source 1..80: mol_type = other DNA

SEQ ID NO: 87685 - DNA, 80 bp, synthetic construct
  source 1..80: mol_type = other DNA
tattataaacacatagtgaggggtaggtgttgatgagctaactccgcgtagtgccatggagacagtgacatgagggatcc

SEQ ID NO: 87686 - DNA, 80 bp, synthetic construct
  source 1..80: mol_type = other DNA
acagcttcatatgtagcttgcctgacttgcagaccacaaagatgaacttcagattttgtatatttggagtctctccctca

SEQ ID NO: 87687 - DNA, 80 bp, synthetic construct
  source 1..80: mol_type = other DNA
aattcattcaaatataagacaaaagttagtggaaccgggccttacatttaactctctttaagctttactgttgctttggt

SEQ ID NO: 87688 - DNA, 80 bp, synthetic construct; identical to SEQ ID NO: 15915
  source 1..80: mol_type = other DNA

SEQ ID NO: 87689 - DNA, 80 bp, synthetic construct
  source 1..80: mol_type = other DNA
tttctgttactgcaacaaaaactggactaagacaactgcttaaagaaatctggtcttttggtcacctttttataaaccca

SEQ ID NO: 87690 - DNA, 80 bp, synthetic construct
  source 1..80: mol_type = other DNA
attcaacatgtgaacaagtcacctgtactcttgtgtgccagctttcatgatacttgtctgtattgcaaattcaaagtagg

SEQ ID NO: 87691 - DNA, 80 bp, synthetic construct
  source 1..80: mol_type = other DNA
gataatttctatattattcaccgggtgaagtcattagccagagcagtttttttctttaaataggcatccctcatttcctt

SEQ ID NO: 87692 - DNA, 80 bp, synthetic construct; identical to SEQ ID NO: 15916
  source 1..80: mol_type = other DNA

SEQ ID NO: 87693 - DNA, 80 bp, synthetic construct
  source 1..80: mol_type = other DNA
atttttaaaataacaaatcttttaaaattatgatttactctttaatttgtttcctttagggcagaaataaactgactaaa

SEQ ID NO: 87694 - DNA, 80 bp, synthetic construct
  source 1..80: mol_type = other DNA
tagaaataatttacaactggacaggaccttttggattatctaaggcaactcattttgtagatgaagtgtctaaggatagc

SEQ ID NO: 87695 - DNA, 80 bp, synthetic construct
  source 1..80: mol_type = other DNA
attaagtaatttggctgcctgttgatggaggaagagaattctgactcgctatccagttctcttttcattaggccatgtca

SEQ ID NO: 87696 - DNA, 80 bp, synthetic construct
  source 1..80: mol_type = other DNA
tatggtgaaacctcgtctctactaaaaatacaaaaattagccgggcgtggtggcgcacacgtgtaatcccagctactcag

SEQ ID NO: 87697 - DNA, 80 bp, synthetic construct; identical to SEQ ID NO: 15917
  source 1..80: mol_type = other DNA

SEQ ID NO: 87698 - DNA, 80 bp, synthetic construct
  source 1..80: mol_type = other DNA
acaaggcaaggtgcatgtattgcaaacagcttgagtattattgaggtaggagagtttatacgagaggcacaaatgcaatg

SEQ ID NO: 87699 - DNA, 80 bp, synthetic construct
  source 1..80: mol_type = other DNA
aattccacaaatgcaaagacctcaatggtggcagaaggctggcagtacgagggcatctccatgataccacatacctgaat

SEQ ID NO: 87700 - DNA, 80 bp, synthetic construct
  source 1..80: mol_type = other DNA
agcatctgtcatcacactgtcacttcaaacagatgagaaccccccaagtcaaagttgaagagggctttatttatccatca

SEQ ID NO: 87701 - DNA, 80 bp, synthetic construct; identical to SEQ ID NO: 15918
  source 1..80: mol_type = other DNA

SEQ ID NO: 87702 - DNA, 80 bp, synthetic construct
  source 1..80: mol_type = other DNA
aatatgtagatgttggtcaactaagctgtgttatctttaccaccaggaagacagtctcctgctatgccctatccttttcc

SEQ ID NO: 87703 - DNA, 80 bp, synthetic construct
  source 1..80: mol_type = other DNA
ggattatccatattctcctttgcattctatactgcccatggacatcaattctctattaaaatgttcatcatgagataata

SEQ ID NO: 87704 - DNA, 80 bp, synthetic construct
  source 1..80: mol_type = other DNA
acacaaaaagagaactgaccctgttggtttgttgctctgcaaatattctttatatcttatctgctacagtagagagcgtt

SEQ ID NO: 87705 - DNA, 80 bp, synthetic construct; identical to SEQ ID NO: 15919
  source 1..80: mol_type = other DNA

SEQ ID NO: 87706 - DNA, 80 bp, synthetic construct
  source 1..80: mol_type = other DNA
gtatccaaaataatcacaaaggcaaaaacagaatcagaggaaggagaacaatggctgctaaaagacaaagggttttgtga

SEQ ID NO: 87707 - DNA, 80 bp, synthetic construct
  source 1..80: mol_type = other DNA
gtcttggctctctgggaaaattcgcctaaaattaaaggatatacaactaaagccttgatggaacaccacagaaaaagaac

SEQ ID NO: 87708 - DNA, 80 bp, synthetic construct; identical to SEQ ID NO: 15920
  source 1..80: mol_type = other DNA

SEQ ID NO: 87709 - DNA, 80 bp, synthetic construct
  source 1..80: mol_type = other DNA
atcagctgggcatgatggcatgcggctataatcccagcaacttgggaggctgaggcgcaagaattacttgaacccaggaa

SEQ ID NO: 87710 - DNA, 80 bp, synthetic construct
  source 1..80: mol_type = other DNA
ctcctgaccttaaaaaggcaaattgagagtaaaacaccttcgtgttttacttagcttgtgttgtttggcacaaaatatat

SEQ ID NO: 87711 - DNA, 80 bp, synthetic construct
  source 1..80: mol_type = other DNA
tttaataagaacggagatgtaaggtagatccaaagggaggtaaccttggtcaaagttagtggcttcaactttcagagagt

SEQ ID NO: 87712 - DNA, 80 bp, synthetic construct
  source 1..80: mol_type = other DNA
aggaagaaatccagtatacatgggattaatttcttttttcatcctttagtcttattacagtgtgtgtactctatgctcta

SEQ ID NO: 87713 - DNA, 80 bp, synthetic construct; identical to SEQ ID NO: 15921
  source 1..80: mol_type = other DNA

SEQ ID NO: 87714 - DNA, 80 bp, synthetic construct
  source 1..80: mol_type = other DNA
aagagtgaatcttagtgtgctctgtgtatcatcaagaagattatgtattctcctaggtctgctcacaaaggggctttcat

SEQ ID NO: 87715 - DNA, 80 bp, synthetic construct
  source 1..80: mol_type = other DNA
cttctcatataagttcctcctagcacagggctcaaaagtacagaaaccaccttcctccttcaaatttgaaacacccaact

SEQ ID NO: 87716 - DNA, 80 bp, synthetic construct; identical to SEQ ID NO: 15922
  source 1..80: mol_type = other DNA

SEQ ID NO: 87717 - DNA, 80 bp, synthetic construct
  source 1..80: mol_type = other DNA
agacaggagacactaagcacaaatttgtctccagtaacttttcttaggaccccaattctcaacagcaaaaataaaaatcc

SEQ ID NO: 87718 - DNA, 80 bp, synthetic construct
  source 1..80: mol_type = other DNA
ctgtgtcttaagatgcctagaggaaattatgaggaagagatcattgcaaataacagtctacactattctgtccaggtaaa

SEQ ID NO: 87719 - DNA, 80 bp, synthetic construct
  source 1..80: mol_type = other DNA
cctttgagaagacctcaaataccctttctgaaataacaatagtcttctgggcataaactgtagctctttggatggctgga

SEQ ID NO: 87720 - DNA, 80 bp, synthetic construct; identical to SEQ ID NO: 15923
  source 1..80: mol_type = other DNA

SEQ ID NO: 87721 - DNA, 80 bp, synthetic construct
  source 1..80: mol_type = other DNA
tcatccaaataagatcatctaaggaaggagaagatgggacatatgaaatacatatctcaagttcttgagttttggcatgt

SEQ ID NO: 87722 - DNA, 80 bp, synthetic construct
  source 1..80: mol_type = other DNA
tgctctgaatatgaacataagtcaaaactaagattagtggaatttgaaatgtatttaggctacatcctaattcttttaaa

SEQ ID NO: 87723 - DNA, 80 bp, synthetic construct
  source 1..80: mol_type = other DNA
tgttattttatttgatattaaagctgtcttgggaggcacttgctcttttagacacagtgttttcacttacaggctttaga

SEQ ID NO: 87724 - DNA, 80 bp, synthetic construct
  source 1..80: mol_type = other DNA
atacatatatacataatatatatacacatattacatatatagaaaatatacataacatgtatttttacattatatctatt

SEQ ID NO: 87725 - DNA, 80 bp, synthetic construct; identical to SEQ ID NO: 15924
  source 1..80: mol_type = other DNA

SEQ ID NO: 87726 - DNA, 80 bp, synthetic construct
  source 1..80: mol_type = other DNA
tattgaaactgcaatggaaggagaggactaacattagtatactattattaccttcacagttcttcccatctcgtgtaaca

SEQ ID NO: 87727 - DNA, 80 bp, synthetic construct
  source 1..80: mol_type = other DNA
gaaatagctttatttaggggagttaaaattattttatttccccctccctccatttgcaaactcatgatcttggcttttgg

SEQ ID NO: 87728 - DNA, 80 bp, synthetic construct
  source 1..80: mol_type = other DNA
aatttctaataagactccttaaatccgaagtctgtaaacaaaatagattcttcttcaccattttccaagcacatctattt

SEQ ID NO: 87729 - DNA, 80 bp, synthetic construct; identical to SEQ ID NO: 15925
  source 1..80: mol_type = other DNA

SEQ ID NO: 87730 - DNA, 80 bp, synthetic construct
  source 1..80: mol_type = other DNA
gccaaggtacacaacagagcttgacacggaagtgttaaaataacaataactgaaacaacctgtatctgatttctccctta

SEQ ID NO: 87731 - DNA, 80 bp, synthetic construct
  source 1..80: mol_type = other DNA
acagggaccaagaaactatgtggagttggatgcgagcattcctatctatgcagagttgaggtcacatttgtctgagtata

SEQ ID NO: 87732 - DNA, 80 bp, synthetic construct
  source 1..80: mol_type = other DNA
agctgaggcagtctgggcttttcttctgtctgatctttgtgccaacaacctacgatctttttctctctcgtttatttctt

SEQ ID NO: 87733 - DNA, 80 bp, synthetic construct; identical to SEQ ID NO: 15926
  source 1..80: mol_type = other DNA

SEQ ID NO: 87734 - DNA, 80 bp, synthetic construct
  source 1..80: mol_type = other DNA
aggcagtgctttaagtattcaggtcatcctcagtctccaatactaagtctcagattgataacaaccacatacatgagttt

SEQ ID NO: 87735 - DNA, 80 bp, synthetic construct
  source 1..80: mol_type = other DNA
aatattaagaaggttctcaactcagttacgtgttcaacctatccatatttataactaattaatagaaatgttagtgagtt

SEQ ID NO: 87736 - DNA, 80 bp, synthetic construct
  source 1..80: mol_type = other DNA
gaagagcttttgctaaaagaggcaaataagattaactcttgtcaatggctaccaattttctaaagtgatataaacctcgc

SEQ ID NO: 87737 - DNA, 80 bp, synthetic construct
  source 1..80: mol_type = other DNA
cctccaaccctccaccctccaataggccccggtgtgtgttggtcccttctatgtgtccatgtgtcaccatttagctccca

SEQ ID NO: 87738 - DNA, 80 bp, synthetic construct; identical to SEQ ID NO: 15927
  source 1..80: mol_type = other DNA

SEQ ID NO: 87739 - DNA, 80 bp, synthetic construct
  source 1..80: mol_type = other DNA
taataaacctgatgggaaattttttatgaggggacatttatagcagtgcttctcaaacttcaatgtacatacagattgct

SEQ ID NO: 87740 - DNA, 80 bp, synthetic construct
  source 1..80: mol_type = other DNA
aattaattgcacataatttcaactgaaattttcctcagttgctgtgtcataaaggacaattccactctctacttctcaga

SEQ ID NO: 87741 - DNA, 80 bp, synthetic construct; identical to SEQ ID NO: 15928
  source 1..80: mol_type = other DNA

SEQ ID NO: 87742 - DNA, 80 bp, synthetic construct
  source 1..80: mol_type = other DNA
caccagcacaggggtttttctcacattcatcaacatctgcaaagcacaatgtattttagtgcaaaattacatagcaatac

SEQ ID NO: 87743 - DNA, 80 bp, synthetic construct
  source 1..80: mol_type = other DNA
caatctgatctaataaacattttttcttccttgagtctgatctaagaggaccaaacagactaacatttcagaagtggctt

SEQ ID NO: 87744 - DNA, 80 bp, synthetic construct
  source 1..80: mol_type = other DNA
ccccatccccagatgtgttcaatacacaggctcacactagttttacagtcacttagaattatcagtacatttagagataa

SEQ ID NO: 87745 - DNA, 80 bp, synthetic construct; identical to SEQ ID NO: 15929
  source 1..80: mol_type = other DNA

SEQ ID NO: 87746 - DNA, 80 bp, synthetic construct
  source 1..80: mol_type = other DNA
cccttcaccagcttaaatgcctcatcagcaatttaaactttctttcttccatttaaaataactagtctaagagagttggt

SEQ ID NO: 87747 - DNA, 80 bp, synthetic construct
  source 1..80: mol_type = other DNA
taggcagaataatgacctcccaaatatgctcatgtcttaattcccagaacctatggatatgtttagctagcaaaggagaa

SEQ ID NO: 87748 - DNA, 80 bp, synthetic construct
  source 1..80: mol_type = other DNA
cactgctggctttgaaaatggaggaaggggtcatgagctaaggacacaggcagctgctagtagctgaaaaaggcaaagag

SEQ ID NO: 87749 - DNA, 80 bp, synthetic construct; identical to SEQ ID NO: 15930
  source 1..80: mol_type = other DNA

SEQ ID NO: 87750 - DNA, 80 bp, synthetic construct
  source 1..80: mol_type = other DNA
ttactggcagcacccctagaagaacattaagccccattaaaattattttaactatggtatctttcatcagtacttaatct

SEQ ID NO: 87751 - DNA, 80 bp, synthetic construct
  source 1..80: mol_type = other DNA
gccctcttcaccacctcactctcaaacctctagtttgcagaaataacaaaggcagagagatattggtattgaactactta

SEQ ID NO: 87752 - DNA, 80 bp, synthetic construct
  source 1..80: mol_type = other DNA
ctatcgcccataactctcccatagttgcctgaaaacaccaataacaaaaggacattaatctctggagaataggaagcctc

SEQ ID NO: 87753 - DNA, 80 bp, synthetic construct; identical to SEQ ID NO: 15931
  source 1..80: mol_type = other DNA

SEQ ID NO: 87754 - DNA, 80 bp, synthetic construct
  source 1..80: mol_type = other DNA
agctgagctgtagcttatgatcataggcccacagaagtcatccttatttttttaaagatatttttgaataaaattgatcc

SEQ ID NO: 87755 - DNA, 80 bp, synthetic construct
  source 1..80: mol_type = other DNA
tggaaaacataaaagtactactttctccatccagtcccacctgtggattccacagggctctacagaatacattaaaaaat

SEQ ID NO: 87756 - DNA, 80 bp, synthetic construct
  source 1..80: mol_type = other DNA
gatgatgtccggatgggggagtcagtgattgaatcggacagaagtggacaaatctgaagcacattttagagataaatgtg

SEQ ID NO: 87757 - DNA, 80 bp, synthetic construct
  source 1..80: mol_type = other DNA
gatagcagatttggtgggtagaaaccaagttccattttgaacataggagttttgagatatcagacatccaagtggagcta

SEQ ID NO: 87758 - DNA, 80 bp, synthetic construct; identical to SEQ ID NO: 15932
  source 1..80: mol_type = other DNA

SEQ ID NO: 87759 - DNA, 80 bp, synthetic construct
  source 1..80: mol_type = other DNA
tctgggcttccaaaaaggtgtttttaagcagtatccaggtttccaaggatgtatttattttatttattttcatgttgcct

SEQ ID NO: 87760 - DNA, 80 bp, synthetic construct; identical to SEQ ID NO: 15933
  source 1..80: mol_type = other DNA

SEQ ID NO: 87761 - DNA, 80 bp, synthetic construct
  source 1..80: mol_type = other DNA
tgttcatgcttccctgactcaagatgtctcaatcctgtttgtcaaccaacagtgattcttcctatagatttatcatctgt

SEQ ID NO: 87762 - DNA, 80 bp, synthetic construct
  source 1..80: mol_type = other DNA
gttaattttattaaatgacagttacattaaggaactcactttgcttccaagcatttgtaggtaccaattcggcctttctt

SEQ ID NO: 87763 - DNA, 80 bp, synthetic construct
  source 1..80: mol_type = other DNA
tttagtaatcttctcattgcccctttacattcaggatcagcaacgtggggctaattttgttaagctgatgtccatctttc

SEQ ID NO: 87764 - DNA, 80 bp, synthetic construct; identical to SEQ ID NO: 15934
  source 1..80: mol_type = other DNA

SEQ ID NO: 87765 - DNA, 80 bp, synthetic construct
  source 1..80: mol_type = other DNA
acatcaaagctgctgattcctaagttaacatatgcattttaaaagccattctcctggtacctaagccatgtcttagtagg

SEQ ID NO: 87766 - DNA, 80 bp, synthetic construct
  source 1..80: mol_type = other DNA
tcaattggtgggaaagatgttgcctaataagttgctctctgtatttgaatgcctcctataagcaagattttgctaaatac

SEQ ID NO: 87767 - DNA, 80 bp, synthetic construct
  source 1..80: mol_type = other DNA
ggagcacttccagctgcaggtacctcgggatattcatggattaggtcatgtttgagcagatccttaacaagaaaagagga

SEQ ID NO: 87768 - DNA, 80 bp, synthetic construct; identical to SEQ ID NO: 15935
  source 1..80: mol_type = other DNA

SEQ ID NO: 87769 - DNA, 80 bp, synthetic construct
  source 1..80: mol_type = other DNA
ctcaattagtcaaaaggtgtctcctttttctcccctagacacaattttttaaactgaacttcactgactcatactttggg

SEQ ID NO: 87770 - DNA, 80 bp, synthetic construct
  source 1..80: mol_type = other DNA
agtccaatgttaggaaaaaggaaatgtgtctcctgaacaacttacctgaaaaattctgaaagctgagttttactctactg

SEQ ID NO: 87771 - DNA, 80 bp, synthetic construct
  source 1..80: mol_type = other DNA
gggaaatttccctggacgtcatctcttatatttcctggagactactcatttacccaagtttccattacatctgcatcatg

SEQ ID NO: 87772 - DNA, 80 bp, synthetic construct; identical to SEQ ID NO: 15936
  source 1..80: mol_type = other DNA

SEQ ID NO: 87773 - DNA, 80 bp, synthetic construct
  source 1..80: mol_type = other DNA
gaagctgcgagcgctgcacaggaacagtgctcagtcagaaatccctggtctcacaccttttgcccctgtgtgctagtgca

SEQ ID NO: 87774 - DNA, 80 bp, synthetic construct
  source 1..80: mol_type = other DNA
atgtctctatgctgaagagagactgggttgtccctggtttcaaactgcttaattcgagccattttaggaaaatatgtaaa

SEQ ID NO: 87775 - DNA, 80 bp, synthetic construct
  source 1..80: mol_type = other DNA
cttttgtcttagggccctaacagattttataaggtactagttatttataacttcaaaatggcccttgattccaagttctt

SEQ ID NO: 87776 - DNA, 80 bp, synthetic construct; identical to SEQ ID NO: 15937
  source 1..80: mol_type = other DNA

SEQ ID NO: 87777 - DNA, 80 bp, synthetic construct
  source 1..80: mol_type = other DNA
caggggccccaatccccagttctggtctgtggcgtgttaggaactgggctgtacagcagggggtgagcggcaggtgaatg

SEQ ID NO: 87778 - DNA, 80 bp, synthetic construct
  source 1..80: mol_type = other DNA
atctaatgcctgatgatctgccaatgtctcccatcaccctcagatgggaccatctaattgcaggaaaacaagctcagggc

SEQ ID NO: 87779 - DNA, 80 bp, synthetic construct
  source 1..80: mol_type = other DNA
tgtgtataataaagtgcacaataaatgtaatgtacttgaatcatcctgaaaccatcctcttctcccagtccatggaaaaa

SEQ ID NO: 87780 - DNA, 80 bp, synthetic construct
  source 1..80: mol_type = other DNA
aaagagggtcatacctgtaattgttatcatctacatcattcttaagaacacaaagccctcatgtcttgaggtttcaataa

SEQ ID NO: 87781 - DNA, 80 bp, synthetic construct; identical to SEQ ID NO: 15938
  source 1..80: mol_type = other DNA

SEQ ID NO: 87782 - DNA, 80 bp, synthetic construct
  source 1..80: mol_type = other DNA
ggcatggaaaccaaagactgttcagaatgggaagagatattcaaaactggcttatatcccagcttcaaatgaattcggtg

SEQ ID NO: 87783 - DNA, 80 bp, synthetic construct
  source 1..80: mol_type = other DNA
tattgcccatctggctgacttatatgttaaatcaatggatcacaaactcttgatcaaaatggtgaatgttgggggtaaaa

SEQ ID NO: 87784 - DNA, 80 bp, synthetic construct; identical to SEQ ID NO: 15939
  source 1..80: mol_type = other DNA

SEQ ID NO: 87785 - DNA, 80 bp, synthetic construct
  source 1..80: mol_type = other DNA
ccacaaacaccttccattttaaatctgccctggccaagacatctggcgaagaggaggaggaaatctcactcttttctccc

SEQ ID NO: 87786 - DNA, 80 bp, synthetic construct
  source 1..80: mol_type = other DNA
tgtgaggctcaaactagggaaaggacatctttatgactcctaggagtcgaagagagagaacacaacaatataaaaagaca

SEQ ID NO: 87787 - DNA, 80 bp, synthetic construct
  source 1..80: mol_type = other DNA
aaatgtgcacggaagatactgcataccactatctacataggaggttttctattggtgagacctactcattccaaacaact

SEQ ID NO: 87788 - DNA, 80 bp, synthetic construct; identical to SEQ ID NO: 15940
  source 1..80: mol_type = other DNA

SEQ ID NO: 87789 - DNA, 80 bp, synthetic construct
  source 1..80: mol_type = other DNA
tacccacttaaactattgggccattatttatctaacctctctcaatctcagctgcttcccatctacaatactgctgtgaa

SEQ ID NO: 87790 - DNA, 80 bp, synthetic construct
  source 1..80: mol_type = other DNA
ttaatcctcatgtagtttgaagctctcttaaaatccttaaatatcagactgtgcactttggaacttgaattttaatctag

SEQ ID NO: 87791 - DNA, 80 bp, synthetic construct
  source 1..80: mol_type = other DNA
tctcctgcttcagcctcctgagtagctgggattacaggcacccgccacgacgcctggcaaatttttgtatttttagtaga

SEQ ID NO: 87792 - DNA, 80 bp, synthetic construct
  source 1..80: mol_type = other DNA
atctattttttaaacaatagaacccctgatttaattgatacctgacatggaagtctaacactcacagcagataaagtgaa

SEQ ID NO: 87793 - DNA, 80 bp, synthetic construct; identical to SEQ ID NO: 15941
  source 1..80: mol_type = other DNA

SEQ ID NO: 87794 - DNA, 80 bp, synthetic construct
  source 1..80: mol_type = other DNA
acattaattaatagactgaagatacctgtaaggtctcctggatcatccctcttttatgggaggcaaaacgtctccaaaat

SEQ ID NO: 87795 - DNA, 80 bp, synthetic construct
  source 1..80: mol_type = other DNA
tttgtcattaaacctacctatgcatctggtaccatctggagaggtgtaaaaaccagggggacatttgcaaaagtaactgc

SEQ ID NO: 87796 - DNA, 80 bp, synthetic construct; identical to SEQ ID NO: 15942
  source 1..80: mol_type = other DNA

SEQ ID NO: 87797 - DNA, 80 bp, synthetic construct
  source 1..80: mol_type = other DNA
atattctgtatcacttcttgcgctgcttttcaatctattttccacaacgcggatactggaatcctacagaagagatcttg

SEQ ID NO: 87798 - DNA, 80 bp, synthetic construct
  source 1..80: mol_type = other DNA
gaatactgtcaacacacggtctttggctctcagccccttctaagattgcctgagtcgcagagagccacctcgcccgaggt

SEQ ID NO: 87799 - DNA, 80 bp, synthetic construct
  source 1..80: mol_type = other DNA
cttctctgcacgctcttgcctcttcctcttctcttctgcaggtgttgatcccaaggacatcctctaataaacatcctgaa

SEQ ID NO: 87800 - DNA, 80 bp, synthetic construct; identical to SEQ ID NO: 15943
  source 1..80: mol_type = other DNA

SEQ ID NO: 87801 - DNA, 80 bp, synthetic construct
  source 1..80: mol_type = other DNA
cttcatttataagacaaaatagagttctaagtgaaccagattcaagtatcttctgactcaagttcaccttgttagtaaaa

SEQ ID NO: 87802 - DNA, 80 bp, synthetic construct
  source 1..80: mol_type = other DNA
taaaggtgcatattctattctgacagatagaaatttcattagagtctgtgaaagggtcaggtagagaaactgccaagggc

SEQ ID NO: 87803 - DNA, 80 bp, synthetic construct
  source 1..80: mol_type = other DNA
gtgtccctaaaagttagtatctgagtcctacaacacctgccaaagatcgcatgaggagacaatgtggtattaaatatttt

SEQ ID NO: 87804 - DNA, 80 bp, synthetic construct; identical to SEQ ID NO: 15944
  source 1..80: mol_type = other DNA

SEQ ID NO: 87805 - DNA, 80 bp, synthetic construct
  source 1..80: mol_type = other DNA
tcagaaaactgacatgaatcaaacctgaaataagagcaaagaggcccatcatttataaagtgaggctaaacccaagtctc

SEQ ID NO: 87806 - DNA, 80 bp, synthetic construct
  source 1..80: mol_type = other DNA
atgtcatagtgcacacctccctgagttcacatagattaagataaaatgggactaggccaaattgttacatttgaaagagc

SEQ ID NO: 87807 - DNA, 80 bp, synthetic construct
  source 1..80: mol_type = other DNA
taacaaataaaagcaagagttctatctattaccaggctgtggtggaaagttcccgacagcaaaggccagaataaggtgtt

SEQ ID NO: 87808 - DNA, 80 bp, synthetic construct; identical to SEQ ID NO: 15945
  source 1..80: mol_type = other DNA

SEQ ID NO: 87809 - DNA, 80 bp, synthetic construct
  source 1..80: mol_type = other DNA
gagtcacaaatggcagatctcttccttccttattcgccacctgtcctttgtttctgctccttcccatccttcagtctcat

SEQ ID NO: 87810 - DNA, 80 bp, synthetic construct
  source 1..80: mol_type = other DNA
aagattgtggacttgacaagagaaacctgatcctgacagttaacctgatcctgactgcctagatactaatacaatgagag

SEQ ID NO: 87811 - DNA, 80 bp, synthetic construct
  source 1..80: mol_type = other DNA
aaacgtcagccatactattttatagtcacatcacgtacgccagcttttatccatgctgcatccgccgcccgatcacaact

SEQ ID NO: 87812 - DNA, 80 bp, synthetic construct; identical to SEQ ID NO: 15946
  source 1..80: mol_type = other DNA

SEQ ID NO: 87813 - DNA, 80 bp, synthetic construct
  source 1..80: mol_type = other DNA
acttgaaaatggagtctgaattctggaactggaaagaacccccacatagcatcttgttcaaccccctcatttgaaagctg

SEQ ID NO: 87814 - DNA, 80 bp, synthetic construct
  source 1..80: mol_type = other DNA
cgcagagatttttttttttttcaactaattgtatagagagagccagttaccttgaacagtgaaagtctagggcctgcaaa

SEQ ID NO: 87815 - DNA, 80 bp, synthetic construct
  source 1..80: mol_type = other DNA
attatggagtgcatggatttaaaagctacacttttaaaaaggtcctgtgcatcatgcagtgctattataattgctaaagg

SEQ ID NO: 87816 - DNA, 80 bp, synthetic construct; identical to SEQ ID NO: 15947
  source 1..80: mol_type = other DNA

SEQ ID NO: 87817 - DNA, 80 bp, synthetic construct
  source 1..80: mol_type = other DNA
tttagtttttggaaagagggacattttaggaaggaagtgagaattctgcaagaggaagatctcatggaaagcaactcgaa

SEQ ID NO: 87818 - DNA, 80 bp, synthetic construct
  source 1..80: mol_type = other DNA
caatggcaaaggtaccaggacattttcacaagggcacagaaccccatggttatactcatcatctttctagggaacatatt

SEQ ID NO: 87819 - DNA, 80 bp, synthetic construct
  source 1..80: mol_type = other DNA
cctgattactttcttaccagagtaagacaggtcaaccctgttcacaccagtctccaggccagagaatgtatagcactaac

SEQ ID NO: 87820 - DNA, 80 bp, synthetic construct
  source 1..80: mol_type = other DNA
aatttttgtgtgtggaaaaggattaagtaatagactgagtttttggtccactggatacaccaccataataggtttcttag

SEQ ID NO: 87821 - DNA, 80 bp, synthetic construct; identical to SEQ ID NO: 15948
  source 1..80: mol_type = other DNA

SEQ ID NO: 87822 - DNA, 80 bp, synthetic construct
  source 1..80: mol_type = other DNA
tgtgtgtgtgtatatggcccgaaaatctattccagaataataactttcatctaggaaagaggacaatgtaatatggctca

SEQ ID NO: 87823 - DNA, 80 bp, synthetic construct
  source 1..80: mol_type = other DNA
tagctgagttctttgcccctttcagtgccaacattctctgcttcaaatttagatctacagtacaacttctaaaatacatt

SEQ ID NO: 87824 - DNA, 80 bp, synthetic construct
  source 1..80: mol_type = other DNA
aaacaattccaactcataaagatagttctatcagagttagattattcagtttcagggcaagtagatattaaatgtcttac

SEQ ID NO: 87825 - DNA, 80 bp, synthetic construct; identical to SEQ ID NO: 15949
  source 1..80: mol_type = other DNA

SEQ ID NO: 87826 - DNA, 80 bp, synthetic construct
  source 1..80: mol_type = other DNA
ctcacgaagaaattatgactgtaattggaagtcaggcctcatttcggcaaagagcagtagcagtagtggtgactataaac

SEQ ID NO: 87827 - DNA, 80 bp, synthetic construct
  source 1..80: mol_type = other DNA
accatcccccagaaaagaaaatcatgagcatgtactaggagcataaatataagggttaatagatcaatctgcctccccac

SEQ ID NO: 87828 - DNA, 80 bp, synthetic construct
  source 1..80: mol_type = other DNA
tttaatatttaatttgattcagatggacctcttgttttgggtctataaaagtggaaaaagctacagggtttttctggtcc

SEQ ID NO: 87829 - DNA, 80 bp, synthetic construct; identical to SEQ ID NO: 15950
  source 1..80: mol_type = other DNA

SEQ ID NO: 87830 - DNA, 80 bp, synthetic construct
  source 1..80: mol_type = other DNA
tgataatttgtccacaattatgttaccatatttatatcggtgagttatttgtccatcacaatatttggaatatgattaga

SEQ ID NO: 87831 - DNA, 80 bp, synthetic construct
  source 1..80: mol_type = other DNA
cattaacttttgcgggttttagcacatatgcagcaaagtataaagatacgtttaaaaggccattattcacggcctcattt

SEQ ID NO: 87832 - DNA, 80 bp, synthetic construct; identical to SEQ ID NO: 15951
  source 1..80: mol_type = other DNA

SEQ ID NO: 87833 - DNA, 80 bp, synthetic construct
  source 1..80: mol_type = other DNA
ggggagttcgacatgacttctctgatcttttacccattttccaccctcctatctctcccaccacactggattcctcaaat

SEQ ID NO: 87834 - DNA, 80 bp, synthetic construct
  source 1..80: mol_type = other DNA
acctggctgctggctctaatcatccttccttccctgtttatttttttccacaggactaaccacccactgacctaatacat

SEQ ID NO: 87835 - DNA, 80 bp, synthetic construct
  source 1..80: mol_type = other DNA
tgggttcttatgtgtaagcccaaatattaaccttccaggagcaaaattaatcatttcaggctcactacttttgttataaa

SEQ ID NO: 87836 - DNA, 80 bp, synthetic construct
  source 1..80: mol_type = other DNA
gattgctgtttataagatctcaacctgtgttcttgagaaaagtcagcatgcagtaaaagggatattaaagaaacaacaat

SEQ ID NO: 87837 - DNA, 80 bp, synthetic construct; identical to SEQ ID NO: 15952
  source 1..80: mol_type = other DNA

SEQ ID NO: 87838 - DNA, 80 bp, synthetic construct
  source 1..80: mol_type = other DNA
aagaatttcactctcaaaatagcaatataactgccattgtgattcaatgggttttcaaaacttttcttataaaaaacatt

SEQ ID NO: 87839 - DNA, 80 bp, synthetic construct
  source 1..80: mol_type = other DNA
gatgggcagctgaggcagttaaaagtctagctctctggtcactgtcaacaagttcatgggtattagctaactttgtaatc

SEQ ID NO: 87840 - DNA, 80 bp, synthetic construct; identical to SEQ ID NO: 15953
  source 1..80: mol_type = other DNA

SEQ ID NO: 87841 - DNA, 80 bp, synthetic construct
  source 1..80: mol_type = other DNA
cctcagaaaagcatatcctgaagtttctgaaaatattgcaacttgctataaaaagtcctgaggctgtctaaaggaaacag

SEQ ID NO: 87842 - DNA, 80 bp, synthetic construct
  source 1..80: mol_type = other DNA
gagaagcagctagcaggcgacatctggggatatttaaaactgtgaaacaaatcctaatttattttggacttgtaaaaaaa

SEQ ID NO: 87843 - DNA, 80 bp, synthetic construct
  source 1..80: mol_type = other DNA
ctaccttgttcacaaaccttgctttgtgtttctacacagcactgccataatgcactgcatcgctgtaaacagaatcacac

SEQ ID NO: 87844 - DNA, 80 bp, synthetic construct
  source 1..80: mol_type = other DNA
gctgacactacttttccattctcttcaacttcattggagaatggctctccagagcaaataagattaatccattaataatt

SEQ ID NO: 87845 - DNA, 80 bp, synthetic construct; identical to SEQ ID NO: 15954
  source 1..80: mol_type = other DNA

SEQ ID NO: 87846 - DNA, 80 bp, synthetic construct
  source 1..80: mol_type = other DNA
acctacaaaatagggatgaaaacatcagttgttacccactttgaaaacggcattgtgaggatcaggcgagctaatggaaa

SEQ ID NO: 87847 - DNA, 80 bp, synthetic construct
  source 1..80: mol_type = other DNA
ttccagtctattgttatttagggctgagaaagcaaagaattttgaagcttgcagtgaggcaagtcatggcaccttcttcc

SEQ ID NO: 87848 - DNA, 80 bp, synthetic construct
  source 1..80: mol_type = other DNA
atcattgtaacccctaggcaaaaggaccatcttaaagcaaaacagggataagctaagtccacaagagaatttccaatcag

SEQ ID NO: 87849 - DNA, 80 bp, synthetic construct; identical to SEQ ID NO: 15955
  source 1..80: mol_type = other DNA

SEQ ID NO: 87850 - DNA, 80 bp, synthetic construct
  source 1..80: mol_type = other DNA
tccctgtgagtctaaaaatggactcaatgaccccagtaagttcctttcacctgtgaacgcaacagttttatgaaaatcac

SEQ ID NO: 87851 - DNA, 80 bp, synthetic construct
  source 1..80: mol_type = other DNA
ccagcaagagtcaacattctggatcgtaacaatgttttggcaatagctgaatcttatctgctggcatccctctatcctgt

SEQ ID NO: 87852 - DNA, 80 bp, synthetic construct; identical to SEQ ID NO: 15956
  source 1..80: mol_type = other DNA

SEQ ID NO: 87853 - DNA, 80 bp, synthetic construct
  source 1..80: mol_type = other DNA
attatgaaacagcataaatatatcagactcatgatttcacagttatgtctgctatgaggatgatgaattgaaaaaccttt

SEQ ID NO: 87854 - DNA, 80 bp, synthetic construct
  source 1..80: mol_type = other DNA
tttccagccctgtctcctgacactttctctgtttatcatttgtctttttttttttactttgtttatgcatttcttactct

SEQ ID NO: 87855 - DNA, 80 bp, synthetic construct
  source 1..80: mol_type = other DNA
cctcatttcgttctttcgatgaagaaaaagtcactcagcactgcagtaatttggaacaaaatctctttaaaatgcaggaa

SEQ ID NO: 87856 - DNA, 80 bp, synthetic construct; identical to SEQ ID NO: 15957
  source 1..80: mol_type = other DNA

SEQ ID NO: 87857 - DNA, 80 bp, synthetic construct
  source 1..80: mol_type = other DNA
atgattttaattgctgcataattttccatcaagttataacagaatgtgttcagtaattttcttactgtctatcatttaaa

SEQ ID NO: 87858 - DNA, 80 bp, synthetic construct
  source 1..80: mol_type = other DNA
aaactctccatgttaggtaacaagaaagagaatttaggcttgtttctttctgttaatttactgagacaagtgcaaatgct

SEQ ID NO: 87859 - DNA, 80 bp, synthetic construct
  source 1..80: mol_type = other DNA
attgccaaggttcaggatagatacaaatatggtgttttgtgagtgacaccagcaaaatccagacactctacaaaatgcta

SEQ ID NO: 87860 - DNA, 80 bp, synthetic construct; identical to SEQ ID NO: 15958
  source 1..80: mol_type = other DNA

SEQ ID NO: 87861 - DNA, 80 bp, synthetic construct
  source 1..80: mol_type = other DNA
acaaaaattgctgattgtagagggagaggcataatctggatgaaataaaattggatctaaaaatgtcttggaaggtaaat

SEQ ID NO: 87862 - DNA, 80 bp, synthetic construct
  source 1..80: mol_type = other DNA
aaatctgcccacactcccaattccttactaataatccaattatttacaattattcccatagcacttacatgatattaagc

SEQ ID NO: 87863 - DNA, 80 bp, synthetic construct
  source 1..80: mol_type = other DNA
tttgcaaattgctctacaatcacttccttataagaccttcatgaactagggcaacaggccaagtctttccaaaattaaag

SEQ ID NO: 87864 - DNA, 80 bp, synthetic construct; identical to SEQ ID NO: 15959
  source 1..80: mol_type = other DNA

SEQ ID NO: 87865 - DNA, 80 bp, synthetic construct
  source 1..80: mol_type = other DNA
ttcataaaaatgacaaacaaaagaatgagatatcaatttatccatgacatagagggtcacagcacacttatttctcccag

SEQ ID NO: 87866 - DNA, 80 bp, synthetic construct
  source 1..80: mol_type = other DNA
tcattcttaaccttaggacataatagaatcacttgggggagcttttgtaaaatgctgatgcctgggtcccaccctgtcct

SEQ ID NO: 87867 - DNA, 80 bp, synthetic construct
  source 1..80: mol_type = other DNA
cgtgtgccatgattaattggagatctctgcaagataacaactacttatctgaaagtctaactttaggaacataagccagc

SEQ ID NO: 87868 - DNA, 80 bp, synthetic construct; identical to SEQ ID NO: 15960
  source 1..80: mol_type = other DNA

SEQ ID NO: 87869 - DNA, 80 bp, synthetic construct
  source 1..80: mol_type = other DNA
tacaaggcctatttagcatcagtaacaccaaaagtcaactcttgattcattccagaattgcactatcacggagatcgtct

SEQ ID NO: 87870 - DNA, 80 bp, synthetic construct
  source 1..80: mol_type = other DNA
cacaaggaaacaaccagaaaactcagaacatgtgatattttctaaggcaattgtctagaacttttccaaaagcaaattac

SEQ ID NO: 87871 - DNA, 80 bp, synthetic construct
  source 1..80: mol_type = other DNA
cggtattgtggttacatacaagaatgtccttagtgcttagaggtgacgtctcatgatgtatgcaacttaactttcaaata

SEQ ID NO: 87872 - DNA, 80 bp, synthetic construct; identical to SEQ ID NO: 15961
  source 1..80: mol_type = other DNA

SEQ ID NO: 87873 - DNA, 80 bp, synthetic construct
  source 1..80: mol_type = other DNA
aatacaaccttttggcaaaatttaccaaactgtattatgcaaaatgtttacctttaacaaactgcttctgaggtatggct

SEQ ID NO: 87874 - DNA, 80 bp, synthetic construct
  source 1..80: mol_type = other DNA
gcagaaacaaggtgatttgttgtacaccttttaatctaacatgcagactaagcaattcaccaaaatccaggccatagttc

SEQ ID NO: 87875 - DNA, 80 bp, synthetic construct
  source 1..80: mol_type = other DNA
ataaatcctacaagtcattactgactttcatcttcctgtaaagttatctctacttttactagaaaaaaaaagactgggag

SEQ ID NO: 87876 - DNA, 80 bp, synthetic construct; identical to SEQ ID NO: 15962
  source 1..80: mol_type = other DNA

SEQ ID NO: 87877 - DNA, 80 bp, synthetic construct
  source 1..80: mol_type = other DNA
atattctctccaatccaaaaacaagattagtagcccaagaggaaagggtcttatgattaaatataaaaattgtcaggggc

SEQ ID NO: 87878 - DNA, 80 bp, synthetic construct
  source 1..80: mol_type = other DNA
caattttaacactgaatattgtgtacgtggagggtgaaggcatatgttggtaaagaggcaataaaaataaattgatataa

SEQ ID NO: 87879 - DNA, 80 bp, synthetic construct
  source 1..80: mol_type = other DNA
tgcacaacaatgtgaatgtacttaatgccaccaaactgtacacaaagaagtggttaaaatggtaaattttatcttatgta

SEQ ID NO: 87880 - DNA, 80 bp, synthetic construct
  source 1..80: mol_type = other DNA
aatgtagctgggtgtgatggtaggcgcctgtactcccagctactcaagaggctgaggtgtgaggatcgcttgccgtagtg

SEQ ID NO: 87881 - DNA, 80 bp, synthetic construct; identical to SEQ ID NO: 15963
  source 1..80: mol_type = other DNA

SEQ ID NO: 87882 - DNA, 80 bp, synthetic construct
  source 1..80: mol_type = other DNA
ctgtcatagagaataattgggtacacctgccttggtaaaagttatcagaaaagacttctttgaggaggtgacatttaaac

SEQ ID NO: 87883 - DNA, 80 bp, synthetic construct
  source 1..80: mol_type = other DNA
taagcgctttctaagtatgggagacagcaagaacagtggctctgggctggcagatagcctggcttctctaggattaaaag

SEQ ID NO: 87884 - DNA, 80 bp, synthetic construct; identical to SEQ ID NO: 15964
  source 1..80: mol_type = other DNA

SEQ ID NO: 87885 - DNA, 80 bp, synthetic construct
  source 1..80: mol_type = other DNA
tggtcatttgctgaaacggggaaactagggaagattaggctgtaaatactaataatccgttaacaagttcttcccattct

SEQ ID NO: 87886 - DNA, 80 bp, synthetic construct
  source 1..80: mol_type = other DNA
aaatttcttttccttcccttcctttttgtgagcaagcatttactcctatcatattcagacatttatgtataaacattagg

SEQ ID NO: 87887 - DNA, 80 bp, synthetic construct
  source 1..80: mol_type = other DNA
ggaatccaagaccactagctttagctgccagccctgagttcattctacaggaaatggagacacaccacattcacattcca

SEQ ID NO: 87888 - DNA, 80 bp, synthetic construct
  source 1..80: mol_type = other DNA
agataaacggcagggagatggttttgatacattggttggcaaatgttatttctagaattggctttttatcaaatatccat

SEQ ID NO: 87889 - DNA, 80 bp, synthetic construct; identical to SEQ ID NO: 15965
  source 1..80: mol_type = other DNA

SEQ ID NO: 87890 - DNA, 80 bp, synthetic construct
  source 1..80: mol_type = other DNA
acgtgctcagatatcaaatacaacagatgatccatattcttagacaccaacaactaaggcagcagaccctagaactgagt

SEQ ID NO: 87891 - DNA, 80 bp, synthetic construct
  source 1..80: mol_type = other DNA
cagactagcaattatgcaaatattcatcctgctctttggaattaatagttatttcccagacaccccaggtacacatgatg

SEQ ID NO: 87892 - DNA, 80 bp, synthetic construct
  source 1..80: mol_type = other DNA
cctacaactactaaatcatgtactgtctgaacactgacagggcactgtgttactctgttccctcttaccacttactagag

SEQ ID NO: 87893 - DNA, 80 bp, synthetic construct; identical to SEQ ID NO: 15966
  source 1..80: mol_type = other DNA

SEQ ID NO: 87894 - DNA, 80 bp, synthetic construct
  source 1..80: mol_type = other DNA
gatttcactactaatatttaaaattcacaactcctgcacaaagcaagtgttcttaggaactatgctcatgcaaatgcttt

SEQ ID NO: 87895 - DNA, 80 bp, synthetic construct
  source 1..80: mol_type = other DNA
acatctgcaagttcgatgaatctgaacacaattaagtgagcaatcacatattctcttccagaaatctggaattgggattg

SEQ ID NO: 87896 - DNA, 80 bp, synthetic construct; identical to SEQ ID NO: 15967
  source 1..80: mol_type = other DNA

SEQ ID NO: 87897 - DNA, 80 bp, synthetic construct
  source 1..80: mol_type = other DNA
gaaaagaaaaaaaaaaactctcctagttagtgacacaagcacagacaaaaaaacgactccagttctccccttcctttact

SEQ ID NO: 87898 - DNA, 80 bp, synthetic construct
  source 1..80: mol_type = other DNA
cagcaggcatttgtggataatgttaccttgcccatttaggcagaacacagtgcagggctagaacctaaagacaataagcc

SEQ ID NO: 87899 - DNA, 80 bp, synthetic construct
  source 1..80: mol_type = other DNA
gctaggttaggaagagaaggttgtttccatagtgcaggaagggcagagcgtgtagaaagatgtctgatagaagcttgttt

SEQ ID NO: 87900 - DNA, 80 bp, synthetic construct; identical to SEQ ID NO: 15968
  source 1..80: mol_type = other DNA

SEQ ID NO: 87901 - DNA, 80 bp, synthetic construct
  source 1..80: mol_type = other DNA
actcacggtgctgtttctcttccacacgtctttgcaaatgccatctcctctacctggaatgcctttcctctccctatttt

SEQ ID NO: 87902 - DNA, 80 bp, synthetic construct
  source 1..80: mol_type = other DNA
gccttaaggatacatattttgtctctttaaactttgcatctccatggcctagaatatccccatgggcccataataagcac

SEQ ID NO: 87903 - DNA, 80 bp, synthetic construct
  source 1..80: mol_type = other DNA
ttgaattctggaatgctgattatcaatgtggcagtgaataaagttaccctttgagtcagttttctctgcttcctggggtt

SEQ ID NO: 87904 - DNA, 80 bp, synthetic construct; identical to SEQ ID NO: 15969
  source 1..80: mol_type = other DNA

SEQ ID NO: 87905 - DNA, 80 bp, synthetic construct
  source 1..80: mol_type = other DNA
ttcccattagttgttttccctaatcctctcccttctcccaccctccgccctccaaaaggcccagtgtgtgctattctcct

SEQ ID NO: 87906 - DNA, 80 bp, synthetic construct
  source 1..80: mol_type = other DNA
tatatgtaccacattttctttttccggtctcattgatggacagttaggtggatttcatttctttgctattgtgaatagtg

SEQ ID NO: 87907 - DNA, 80 bp, synthetic construct
  source 1..80: mol_type = other DNA
ttccaacaacagtgtataagtgttcctttttctccacaacctctgcagcatctgttattttttgactttttaatagcagc

SEQ ID NO: 87908 - DNA, 80 bp, synthetic construct
  source 1..80: mol_type = other DNA
tcctcaacctcctgggctcaagcaatcctcccacctcagcctcccaaatagctgagactacaggcacatgtcaccatgcc

SEQ ID NO: 87909 - DNA, 80 bp, synthetic construct; identical to SEQ ID NO: 15970
  source 1..80: mol_type = other DNA

SEQ ID NO: 87910 - DNA, 80 bp, synthetic construct
  source 1..80: mol_type = other DNA
gagattgagcaaagtaggtcaagtgcataaccaaattttacccaaatgcaaatgagaattccagatattccttcctaagc

SEQ ID NO: 87911 - DNA, 80 bp, synthetic construct
  source 1..80: mol_type = other DNA
catcataagattactgccagttctcacttgtaagatacgttctattttttaaataagctcactaatatctctgttagatg

SEQ ID NO: 87912 - DNA, 80 bp, synthetic construct
  source 1..80: mol_type = other DNA
cagagtggacacatggaaataatggaattttggagttattcccaaacagtggccaatttcaaacaatacgtcaataagaa

SEQ ID NO: 87913 - DNA, 80 bp, synthetic construct; identical to SEQ ID NO: 15971
  source 1..80: mol_type = other DNA

SEQ ID NO: 87914 - DNA, 80 bp, synthetic construct
  source 1..80: mol_type = other DNA
ttatgagctggttgtgcttcagtcgtttatgtataagatgagcactggaatctcctattttagaattggaaggaaactta

SEQ ID NO: 87915 - DNA, 80 bp, synthetic construct
  source 1..80: mol_type = other DNA
caaggttctacaaacagtaagtggcagaatgagaattcagcttttggtgtttctgattctaaaagctgtgctttccccac

SEQ ID NO: 87916 - DNA, 80 bp, synthetic construct
  source 1..80: mol_type = other DNA
gcctcccctttggcctcatttttgccctcttgctccccaggattaaatcacagcagtcgagattgaagcaacgttcaaat

SEQ ID NO: 87917 - DNA, 80 bp, synthetic construct; identical to SEQ ID NO: 15972
  source 1..80: mol_type = other DNA

SEQ ID NO: 87918 - DNA, 80 bp, synthetic construct
  source 1..80: mol_type = other DNA
acacattatatctgcaaactgaaatggaagtgtcttatatacctatgtgaccatgggcaaattatttactttctgatcca

SEQ ID NO: 87919 - DNA, 80 bp, synthetic construct
  source 1..80: mol_type = other DNA
ttaattggtttcttcaacgtgagacagaataagccattatttgtacactatagaaatgtaagggcatgttaagatgttat

SEQ ID NO: 87920 - DNA, 80 bp, synthetic construct
  source 1..80: mol_type = other DNA
tcatgttaatcccagctgctcattatcgaggactgtgcacaaccccctttcgcccagcatgagcttctaacgctctgatt

SEQ ID NO: 87921 - DNA, 80 bp, synthetic construct; identical to SEQ ID NO: 15973
  source 1..80: mol_type = other DNA

SEQ ID NO: 87922 - DNA, 80 bp, synthetic construct
  source 1..80: mol_type = other DNA
atctttcttaaaccaaactgttaactaggtataaaaattgctcttgcttcccctgggccacacaactacacacattcctt

SEQ ID NO: 87923 - DNA, 80 bp, synthetic construct
  source 1..80: mol_type = other DNA
ctctataactctaatgtctcccaaatagaagactctatgctaaaaggcctttccaaagtagtaatatacctaacctccac

SEQ ID NO: 87924 - DNA, 80 bp, synthetic construct; identical to SEQ ID NO: 15974
  source 1..80: mol_type = other DNA

SEQ ID NO: 87925 - DNA, 80 bp, synthetic construct
  source 1..80: mol_type = other DNA
atgagttaagtacaagtgaatcagaaccacatgggttaaattccccttgaaatacccacggatttagaattaagtggaaa

SEQ ID NO: 87926 - DNA, 80 bp, synthetic construct
  source 1..80: mol_type = other DNA
gaattcaggctgtggacacagaaagttctgacctaaattccaaccctgcccattcttagccctgtgtcattgtttaatct

SEQ ID NO: 87927 - DNA, 80 bp, synthetic construct
  source 1..80: mol_type = other DNA
tgatttaattcaagaaaaagcttcttaaagtaacgcgaaacatcctgaatcacctggcccacttacagacttttcgaatg

SEQ ID NO: 87928 - DNA, 80 bp, synthetic construct; identical to SEQ ID NO: 15975
  source 1..80: mol_type = other DNA

SEQ ID NO: 87929 - DNA, 80 bp, synthetic construct
  source 1..80: mol_type = other DNA
atacatcctggtgccaagtggcaactggtttcccctgcagaggagcaacagaaggggcagcagagtcctttttcaccttg

SEQ ID NO: 87930 - DNA, 80 bp, synthetic construct
  source 1..80: mol_type = other DNA
ttcattgagaaggctgggcaagataggtccaggttggggaagggaagagaaaacgatgagatgaaggttaaaggaaagga

SEQ ID NO: 87931 - DNA, 80 bp, synthetic construct
  source 1..80: mol_type = other DNA
tgcctgaaatataattaagccatcaccaggagatgaatttgccaggactaaggcttgaggtctgaataagtaggcttctc

SEQ ID NO: 87932 - DNA, 80 bp, synthetic construct
  source 1..80: mol_type = other DNA
cctatttgaggtctccttgttccatataaactgttaaatctttgatcctacaacacatttcatgtatttctctgcacaca

SEQ ID NO: 87933 - DNA, 80 bp, synthetic construct; identical to SEQ ID NO: 15976
  source 1..80: mol_type = other DNA

SEQ ID NO: 87934 - DNA, 80 bp, synthetic construct
  source 1..80: mol_type = other DNA
ttctatacctaagaagttaggcagaattatgaaaaagcaaagaaaaagcacacaaattagcaaaatatctggctacagca

SEQ ID NO: 87935 - DNA, 80 bp, synthetic construct
  source 1..80: mol_type = other DNA
aatttttgaagtatcgtgggagtacctataggtgctgtatagctctgacttgctggttaaagcttagtcagtgagctatg

SEQ ID NO: 87936 - DNA, 80 bp, synthetic construct
  source 1..80: mol_type = other DNA
aggtattccctcactcaacacatgccccaagagttttggtcaatgcaaagagcagaagccagaagtcttcttagaaatca

SEQ ID NO: 87937 - DNA, 80 bp, synthetic construct; identical to SEQ ID NO: 15977
  source 1..80: mol_type = other DNA

SEQ ID NO: 87938 - DNA, 80 bp, synthetic construct
  source 1..80: mol_type = other DNA
ccggagcaaagcacagtttttacaatcctcaagaacctctgccaacccagccaggctacttacctcgcctgtgtctatgt

SEQ ID NO: 87939 - DNA, 80 bp, synthetic construct
  source 1..80: mol_type = other DNA
catcggaaaagaggttgaaagagatgatggcatatcagaagattaggacgatagaggaaagttttcatatctaagcagca

SEQ ID NO: 87940 - DNA, 80 bp, synthetic construct; identical to SEQ ID NO: 15978
  source 1..80: mol_type = other DNA

SEQ ID NO: 87941 - DNA, 80 bp, synthetic construct
  source 1..80: mol_type = other DNA
gcatgagacaaagcgcacacaccttaaatcaataaaggatcctaactttcctgtaggagatagcaataaaaataacaata

SEQ ID NO: 87942 - DNA, 80 bp, synthetic construct
  source 1..80: mol_type = other DNA
tgccttactgggtgctcaaagagcagttgctagtatcatttaggagaggatgagagagtcaaatgttattctctgaggtt

SEQ ID NO: 87943 - DNA, 80 bp, synthetic construct
  source 1..80: mol_type = other DNA
gcttctaaaattgcaaacccatggcttcaatttcctttggatttttccaaaagacttcaacaaatgttgacggagcccca

SEQ ID NO: 87944 - DNA, 80 bp, synthetic construct; identical to SEQ ID NO: 15979
  source 1..80: mol_type = other DNA

SEQ ID NO: 87945 - DNA, 80 bp, synthetic construct
  source 1..80: mol_type = other DNA
aaacaaaatgacttgtcttttcaagccaattagtgatttccttaaaactagctgaatgtgcagtctttcccttcctggct

SEQ ID NO: 87946 - DNA, 80 bp, synthetic construct
  source 1..80: mol_type = other DNA
gcaatatattcaaagggttcaaaaatcaagaagcatagaaaatattcactgaaaagtcttcccataacttccctctgccc

SEQ ID NO: 87947 - DNA, 80 bp, synthetic construct
  source 1..80: mol_type = other DNA
ctttatcaacaatttttgattcatccactgaataaacaaccttcagatgaaaattttcctactctcagactatggaaaaa

SEQ ID NO: 87948 - DNA, 80 bp, synthetic construct
  source 1..80: mol_type = other DNA
cattctcttgggcaagcattctggaagaactatttagcacatagctttccctggaaatggggtcttaaggcttattggta

SEQ ID NO: 87949 - DNA, 80 bp, synthetic construct; identical to SEQ ID NO: 15980
  source 1..80: mol_type = other DNA

SEQ ID NO: 87950 - DNA, 80 bp, synthetic construct
  source 1..80: mol_type = other DNA
ggcagaccgtaggccacaaagaggccatggattactgtgatatatctacttcagggaaactttacaattctgaaagagca

SEQ ID NO: 87951 - DNA, 80 bp, synthetic construct
  source 1..80: mol_type = other DNA
atcagcaaagggaaatgtgagtgcctttaaattaactcaagtcttggattcattaaaaacagaaacatatttttaaaacc

SEQ ID NO: 87952 - DNA, 80 bp, synthetic construct
  source 1..80: mol_type = other DNA
agctggggtcttccagtctaaaccaggcaaggagaacagcccacacaagctttctgatttaatttaaactggaagggaaa

SEQ ID NO: 87953 - DNA, 80 bp, synthetic construct; identical to SEQ ID NO: 15981
  source 1..80: mol_type = other DNA

SEQ ID NO: 87954 - DNA, 80 bp, synthetic construct
  source 1..80: mol_type = other DNA
gaagatatgggtgaaaacaggcggccagctctccttttctgaagctaacttgagagagagaaagagacttttaggtaaat

SEQ ID NO: 87955 - DNA, 80 bp, synthetic construct
  source 1..80: mol_type = other DNA
tcttgtaaatcagctgtcctgcagggagcaggcagggaggagggaaaaaaaccctatctattaaatctgttttgaacaaa

SEQ ID NO: 87956 - DNA, 80 bp, synthetic construct; identical to SEQ ID NO: 15982
  source 1..80: mol_type = other DNA

SEQ ID NO: 87957 - DNA, 80 bp, synthetic construct
  source 1..80: mol_type = other DNA
ctggggaatactgaagaaaggtgcagagccgtagaggcacagtcacccctgaatccagaacaattttaaaaatgcagatt

SEQ ID NO: 87958 - DNA, 80 bp, synthetic construct
  source 1..80: mol_type = other DNA
tttctctttccaagcatctggatccttttatatactatattgttccagtgggtggtctggaagttttaggggaaggctgt

SEQ ID NO: 87959 - DNA, 80 bp, synthetic construct
  source 1..80: mol_type = other DNA
acagacaccaacaccaccctgactattcaacagtcacttgagaaggctttttattgtataggattatttgttggacagca

SEQ ID NO: 87960 - DNA, 80 bp, synthetic construct; identical to SEQ ID NO: 15983
  source 1..80: mol_type = other DNA

SEQ ID NO: 87961 - DNA, 80 bp, synthetic construct
  source 1..80: mol_type = other DNA
tatccttcatgataaaactagaactgcattctcagagaaaggtcccaacagaaacttggcttggaaggaattaagttaat

SEQ ID NO: 87962 - DNA, 80 bp, synthetic construct
  source 1..80: mol_type = other DNA
tcatcaccatgaatgtgcaaagcacagtaatcatgattactttcctatgtaccaagtattagaccaagtgccttacatat

SEQ ID NO: 87963 - DNA, 80 bp, synthetic construct
  source 1..80: mol_type = other DNA
tctcacctcccctattcctccccagacccagcaaagtgcatggtgtatagtaagtgcatcatacatattaaatagataca

SEQ ID NO: 87964 - DNA, 80 bp, synthetic construct; identical to SEQ ID NO: 15984
  source 1..80: mol_type = other DNA

SEQ ID NO: 87965 - DNA, 80 bp, synthetic construct
  source 1..80: mol_type = other DNA
aaaaaagaaaaagaaaatgctaactttccactaatctcagcaaataaaaactcctatatattttgtagacttcaaatgtc

SEQ ID NO: 87966 - DNA, 80 bp, synthetic construct
  source 1..80: mol_type = other DNA
taaattcctggggcaagagtctgttcttaaattgaattgaataatggcatctaatgcatgatttgcatttgagcctgagg

SEQ ID NO: 87967 - DNA, 80 bp, synthetic construct
  source 1..80: mol_type = other DNA
tcatgtactctgtacattaggtcaaatattagtcactttctttggaggctgaccaaatgcctccacccttcattgcagag

SEQ ID NO: 87968 - DNA, 80 bp, synthetic construct
  source 1..80: mol_type = other DNA
ttgacaacacatttccaccacagatttaccacccttttcatttgcttttaagcaacaggggaaaaagtttcaagtatctc

SEQ ID NO: 87969 - DNA, 80 bp, synthetic construct; identical to SEQ ID NO: 15985
  source 1..80: mol_type = other DNA

SEQ ID NO: 87970 - DNA, 80 bp, synthetic construct
  source 1..80: mol_type = other DNA
ttaaaatcatagactgtgagatctggaaaggacttcagagatcttctagttcaaccccttggatttatagaggaacagct

SEQ ID NO: 87971 - DNA, 80 bp, synthetic construct
  source 1..80: mol_type = other DNA
ggttatttaaaaatcacatttacgttgctgtctgcattgtttttcatagccttggcactcaaagtgtgacctgtggccca

SEQ ID NO: 87972 - DNA, 80 bp, synthetic construct
  source 1..80: mol_type = other DNA
accagactaaaagctggttcacagatttgtgagaactgttttgtgtccagtctgtgatgaggtaaacacagaaattaaga

SEQ ID NO: 87973 - DNA, 80 bp, synthetic construct; identical to SEQ ID NO: 15986
  source 1..80: mol_type = other DNA

SEQ ID NO: 87974 - DNA, 80 bp, synthetic construct
  source 1..80: mol_type = other DNA
ctaggaatgcaaggtcagtttaacatctgaaaatcaattaatgtaatacaccatattaatagaataacagacaaaaacca

SEQ ID NO: 87975 - DNA, 80 bp, synthetic construct
  source 1..80: mol_type = other DNA
caaatgctttctttctaatatcaggagcaagataaggatatcagttcttgttacttctattgaacattgttcttggggtt

SEQ ID NO: 87976 - DNA, 80 bp, synthetic construct; identical to SEQ ID NO: 15987
  source 1..80: mol_type = other DNA

SEQ ID NO: 87977 - DNA, 80 bp, synthetic construct
  source 1..80: mol_type = other DNA
caaattgacctgtagattaaaggtaatctttatcaaaatctcaatgcaatgttttgtggaaactgacaagttgaaggtaa

SEQ ID NO: 87978 - DNA, 80 bp, synthetic construct
  source 1..80: mol_type = other DNA
gccagaaataaacccttctggttacggctaactgattttcagcaaaagtgtcaaggaaattcaatgagaaaagatggtct

SEQ ID NO: 87979 - DNA, 80 bp, synthetic construct
  source 1..80: mol_type = other DNA
ttaagatcttgggtaggcaaagagttcttagataaaatatcagaagcacaattcataaaagaaaaagactgataatttag

SEQ ID NO: 87980 - DNA, 80 bp, synthetic construct; identical to SEQ ID NO: 15988
  source 1..80: mol_type = other DNA

SEQ ID NO: 87981 - DNA, 80 bp, synthetic construct
  source 1..80: mol_type = other DNA
aaacttggcatataatccagcaattctacacctaaatatccacccaagagaagaaatacatatggtcagacaaagacttg

SEQ ID NO: 87982 - DNA, 80 bp, synthetic construct
  source 1..80: mol_type = other DNA
agagagcaaggattttttgccaacaggtgtaagaaatcttttgggggatgaccgaaatgttctgaaactagattgtggta

SEQ ID NO: 87983 - DNA, 80 bp, synthetic construct
  source 1..80: mol_type = other DNA
tgcacacgttgtcaactaatacaacctacaagtctgtggtcagatattctacttctatctcaactgtatggacttaatac

SEQ ID NO: 87984 - DNA, 80 bp, synthetic construct; identical to SEQ ID NO: 15989
  source 1..80: mol_type = other DNA

SEQ ID NO: 87985 - DNA, 80 bp, synthetic construct
  source 1..80: mol_type = other DNA
aaaaaaaaaagggaggtgtgaaatgagatactcacgtaacttcagaaccttagggtgagaagattatggagacagtcatc

SEQ ID NO: 87986 - DNA, 80 bp, synthetic construct
  source 1..80: mol_type = other DNA
acaaaagagcaatgttattgctcttatttattctgcagtcatggagctaaaaaagaaagcctttcagtcagctaaggaga

SEQ ID NO: 87987 - DNA, 80 bp, synthetic construct; identical to SEQ ID NO: 15990
  source 1..80: mol_type = other DNA

SEQ ID NO: 87988 - DNA, 80 bp, synthetic construct
  source 1..80: mol_type = other DNA
caaagagtcaggtacaaaatgtgaaatgaatcttggaattcatccatccaccactgatagcatttatcactggtttaaac

SEQ ID NO: 87989 - DNA, 80 bp, synthetic construct
  source 1..80: mol_type = other DNA
taaaaatatttattgaatctttgaaagcacaaagactttctaatcttaaaagccatagataaatcacgaggaaaaggacc

SEQ ID NO: 87990 - DNA, 80 bp, synthetic construct
  source 1..80: mol_type = other DNA
attatttaaaaaatccctatgatggcaagaatgaggtgaaaccaaaacttagacatgcaggtgcacacgtgaccacattc

SEQ ID NO: 87991 - DNA, 80 bp, synthetic construct
  source 1..80: mol_type = other DNA
attaaagctaagggtagagcccaaatgcttaaaaaatgaaaacacagggttatatagtattttaaaatgtgtatgtgtgg

SEQ ID NO: 87992 - DNA, 80 bp, synthetic construct; identical to SEQ ID NO: 15991
  source 1..80: mol_type = other DNA

SEQ ID NO: 87993 - DNA, 80 bp, synthetic construct
  source 1..80: mol_type = other DNA
tgctttctgtaaaaagaaatcatgtattattaaatctctacctttgtaggggcaagaggaggtcagaaaaagaaaaggcc

SEQ ID NO: 87994 - DNA, 80 bp, synthetic construct
  source 1..80: mol_type = other DNA
attagtttgttaaaaaaaaaaacaaagacccctcaaagaataggaagcaaagagcccccaaggatcagtactggggattg

SEQ ID NO: 87995 - DNA, 80 bp, synthetic construct; identical to SEQ ID NO: 15992
  source 1..80: mol_type = other DNA

SEQ ID NO: 87996 - DNA, 80 bp, synthetic construct
  source 1..80: mol_type = other DNA
aaaacaagaggcgaagggctccaaacagagacaagtagactagttgcgaacatctgttaagtgtgaaaagggggaacaat

SEQ ID NO: 87997 - DNA, 80 bp, synthetic construct
  source 1..80: mol_type = other DNA
atccgaaaacaggaggctaagaaagcgtttcaactaagaaagaaatctttctttgagatctatcttttgggattgtctca

SEQ ID NO: 87998 - DNA, 80 bp, synthetic construct
  source 1..80: mol_type = other DNA
taaagtgatagctatcacattgttgtactaaccatcactatgatctcatatcacaacagaatataataaattgtaaatta

SEQ ID NO: 87999 - DNA, 80 bp, synthetic construct; identical to SEQ ID NO: 15993
  source 1..80: mol_type = other DNA

SEQ ID NO: 88000 - DNA, 80 bp, synthetic construct
  source 1..80: mol_type = other DNA
gatgagggtaggctgtgcagacaggccaggacgccatggatttttagaagccagtgatggtcactcctctactgactgtg

SEQ ID NO: 88001 - DNA, 80 bp, synthetic construct
  source 1..80: mol_type = other DNA
gcctaattaccttgttaattaattcagagcacattcctgagtccttgcaatggtcagtggtacaatattagaccctaaag

SEQ ID NO: 88002 - DNA, 80 bp, synthetic construct
  source 1..80: mol_type = other DNA
ctcatctgacaaatcagtaagaatgtcaaatggaaggagcagcatggatgaagcatggcactgcaaacatatactgtaga

SEQ ID NO: 88003 - DNA, 80 bp, synthetic construct
  source 1..80: mol_type = other DNA
tacttgcccattcaaaaaaaaaaaaacatattaagcacctactttgtacaggcaccacgtacagataacatctatatcct

SEQ ID NO: 88004 - DNA, 80 bp, synthetic construct; identical to SEQ ID NO: 15994
  source 1..80: mol_type = other DNA

SEQ ID NO: 88005 - DNA, 80 bp, synthetic construct
  source 1..80: mol_type = other DNA
actcaacagttaggcattcctataggttaaacataaaaacgggttccagaagggaacatttgcagattagagacgggaaa

SEQ ID NO: 88006 - DNA, 80 bp, synthetic construct
  source 1..80: mol_type = other DNA
ctctagcatggactttagagtcttgcaactcgtattaaatgttaaagtctccacactccaaataatgctctggcaaggaa

SEQ ID NO: 88007 - DNA, 80 bp, synthetic construct; identical to SEQ ID NO: 15995
  source 1..80: mol_type = other DNA

SEQ ID NO: 88008 - DNA, 80 bp, synthetic construct
  source 1..80: mol_type = other DNA
ggacatttctcaaagaactaatccaacaatatctacccaaaggaagagaaatcattatattaaaaagacgcctgtactca

SEQ ID NO: 88009 - DNA, 80 bp, synthetic construct
  source 1..80: mol_type = other DNA
aaagcattatcctaagtaaaagaatagaaacagaaagtccacttacttcttagcctgacatatcaagctgggaaggggca

SEQ ID NO: 88010 - DNA, 80 bp, synthetic construct
  source 1..80: mol_type = other DNA
accttggaaaaccaatgattttgaaatgactctccatttaacttacctccaaactccatctgctcccatcatctccctcc

SEQ ID NO: 88011 - DNA, 80 bp, synthetic construct; identical to SEQ ID NO: 15996
  source 1..80: mol_type = other DNA

SEQ ID NO: 88012 - DNA, 80 bp, synthetic construct
  source 1..80: mol_type = other DNA
agggaagagagggactaaaatgaatttctggcttaaaaatgacaccattgatgcactcgttcattcattcattcattcaa

SEQ ID NO: 88013 - DNA, 80 bp, synthetic construct
  source 1..80: mol_type = other DNA
atgtcatggaagaactaggtcagacagaaaatatactatatgttagatggaggatgtgttgtggagaactgtacagcaga

SEQ ID NO: 88014 - DNA, 80 bp, synthetic construct
  source 1..80: mol_type = other DNA
ctttcctgcattagcatcccttccaatagcaattcttttagaactcataattctcaggtcattttttttaacctcagcct

SEQ ID NO: 88015 - DNA, 80 bp, synthetic construct; identical to SEQ ID NO: 15997
  source 1..80: mol_type = other DNA

SEQ ID NO: 88016 - DNA, 80 bp, synthetic construct
  source 1..80: mol_type = other DNA
aattccaagggggggcattcaaacatctaccaccactctttcctggcctacttaaatcgccctttttttcctctcatttt

SEQ ID NO: 88017 - DNA, 80 bp, synthetic construct
  source 1..80: mol_type = other DNA
ttgccccgccttccctgaagtttctttagtcaatggcttgtgattactcagcagtgccatttctactttttgtttcatgt

SEQ ID NO: 88018 - DNA, 80 bp, synthetic construct
  source 1..80: mol_type = other DNA
cttcagctggcaccacatgattgatttgtgcagcctaacaattcaaaaagaaattaagctgttactatgtgcttgttact

SEQ ID NO: 88019 - DNA, 80 bp, synthetic construct
  source 1..80: mol_type = other DNA
tagttcattcattaaaagggagaaagtggaaagaaaaatcaaatctgcatgggaagaagcacaaagcagctacatccaca

SEQ ID NO: 88020 - DNA, 80 bp, synthetic construct; identical to SEQ ID NO: 15998
  source 1..80: mol_type = other DNA

SEQ ID NO: 88021 - DNA, 80 bp, synthetic construct
  source 1..80: mol_type = other DNA
gccataaaaaatgatgcattcatgtcctttgtagggacatggatgaaattggaaaccatcattctcagtaaactatcgca

SEQ ID NO: 88022 - DNA, 80 bp, synthetic construct
  source 1..80: mol_type = other DNA
gagttagtgggtgcagcacaccagcatggcacatgtatacgtatgtaactaacctgcacaatgtgcacatgtaccctaaa

SEQ ID NO: 88023 - DNA, 80 bp, synthetic construct; identical to SEQ ID NO: 15999
  source 1..80: mol_type = other DNA

SEQ ID NO: 88024 - DNA, 80 bp, synthetic construct
  source 1..80: mol_type = other DNA
tggccattatttttcttcttatattacaatttcatctacatacagttgaatatatagctctactaccatctcaaaaaagc

SEQ ID NO: 88025 - DNA, 80 bp, synthetic construct
  source 1..80: mol_type = other DNA
atttctggaaatcttttgactgagacgtggacttctttcactaatctataaatcttatctcagtccacatcactctggaa

SEQ ID NO: 88026 - DNA, 80 bp, synthetic construct
  source 1..80: mol_type = other DNA
gtggtagggtccacagctttttagcaacccaatacgactaaaagaattgccactagtattaacttcctgaagttaacaaa

SEQ ID NO: 88027 - DNA, 80 bp, synthetic construct
  source 1..80: mol_type = other DNA
ggtatttctcaatccagcctcttagtttcattttcttttccttccttgtccagtttttccaattgcttctaagccaacag

SEQ ID NO: 88028 - DNA, 80 bp, synthetic construct; identical to SEQ ID NO: 16000
  source 1..80: mol_type = other DNA

SEQ ID NO: 88029 - DNA, 80 bp, synthetic construct
  source 1..80: mol_type = other DNA
aaaagaaacatctactttaggccattccagtgatgctagactatgccaaaagccacacacccaaatctgaatttcttctg

SEQ ID NO: 88030 - DNA, 80 bp, synthetic construct
  source 1..80: mol_type = other DNA
taaagagataaacgaaagccaattataatttcataatcaagtatagcgagccagaggggtaggaaactacccaccaaaac

SEQ ID NO: 88031 - DNA, 80 bp, synthetic construct; identical to SEQ ID NO: 16001
  source 1..80: mol_type = other DNA

SEQ ID NO: 88032 - DNA, 80 bp, synthetic construct
  source 1..80: mol_type = other DNA
gcaaatctcctgatacgtgcagcaagaaaacaaagaggtcataaaagaaaaccaattctcaactcttcctggaatacaca

SEQ ID NO: 88033 - DNA, 80 bp, synthetic construct
  source 1..80: mol_type = other DNA
gcacagctcaatttcagctaagccaagtgttttcaccacataatatccacttacaattaaagacaagctctccttgacaa

SEQ ID NO: 88034 - DNA, 80 bp, synthetic construct
  source 1..80: mol_type = other DNA
attaaaagatagttaataataacaaaaggtaatgctagcgaccacagtgagctctaaaagcaagcaaatacatgttggag

SEQ ID NO: 88035 - DNA, 80 bp, synthetic construct; identical to SEQ ID NO: 16002
  source 1..80: mol_type = other DNA

SEQ ID NO: 88036 - DNA, 80 bp, synthetic construct
  source 1..80: mol_type = other DNA
aaatacttgctgggctactgcgtgtcaggcattagacctaaaatgttgaacagaacagaaatagtctctcccgtgtggag

SEQ ID NO: 88037 - DNA, 80 bp, synthetic construct
  source 1..80: mol_type = other DNA
ccacatgtggtattagaaaaaaatgacatgaccaaacagtgtgttgctaggtggttgttgttattgttcacgtaaaccat

SEQ ID NO: 88038 - DNA, 80 bp, synthetic construct
  source 1..80: mol_type = other DNA
acaaaccatttttgtggtgtacttgcatttttttggacacttgagttccagttcattaacgtttctgggggaaagctagg

SEQ ID NO: 88039 - DNA, 80 bp, synthetic construct
  source 1..80: mol_type = other DNA
aagggcattggaaacctataagaagagctctctcatcttaacaaagttggtattccagaggctcctctgggaagagtctc

SEQ ID NO: 88040 - DNA, 80 bp, synthetic construct; identical to SEQ ID NO: 16003
  source 1..80: mol_type = other DNA

SEQ ID NO: 88041 - DNA, 80 bp, synthetic construct
  source 1..80: mol_type = other DNA
ctaactttagtcctctgggactaacacttttagtcctttgcaacaaaagaagaatggcacatggttccatgagtaaaagc

SEQ ID NO: 88042 - DNA, 80 bp, synthetic construct
  source 1..80: mol_type = other DNA
gctaagtacctcttatatttcgttattggccttttctgaatagacaagttcattttcccttctgtacctgtatgtcagta

SEQ ID NO: 88043 - DNA, 80 bp, synthetic construct; identical to SEQ ID NO: 16004
  source 1..80: mol_type = other DNA

SEQ ID NO: 88044 - DNA, 80 bp, synthetic construct
  source 1..80: mol_type = other DNA
aatgatacttgtcaaccaagattaccctcattttcatgtgaatttaaaatagttaacatttcttatacatgtattatgtg

SEQ ID NO: 88045 - DNA, 80 bp, synthetic construct
  source 1..80: mol_type = other DNA
tttatcctcagagcgtgagttcgtgatcagttttctaggaatggctaggcaattagaaaaacacaactcctcctaattag

SEQ ID NO: 88046 - DNA, 80 bp, synthetic construct
  source 1..80: mol_type = other DNA
gggatgccttctaggcactgccttttgtttagttttgtgatagcttattctgcttggcaatgtggagaacactgtagaaa

SEQ ID NO: 88047 - DNA, 80 bp, synthetic construct; identical to SEQ ID NO: 16005
  source 1..80: mol_type = other DNA

SEQ ID NO: 88048 - DNA, 80 bp, synthetic construct
  source 1..80: mol_type = other DNA
aatggttcatgaagagctaatgtatgtttataaaaacattttcaatttggataaaagttgcctccatcctgtaaggcttc

SEQ ID NO: 88049 - DNA, 80 bp, synthetic construct
  source 1..80: mol_type = other DNA
tcccaatctattgtttacttataaagctcttctcaaacagttcagagacaaaagattatcaccgagggaatatggcagga

SEQ ID NO: 88050 - DNA, 80 bp, synthetic construct
  source 1..80: mol_type = other DNA
ttttcttagaatgttggattaaacagatgtatttaacatttaaacactccctctcatcgacttcaagagcccacagttaa

SEQ ID NO: 88051 - DNA, 80 bp, synthetic construct; identical to SEQ ID NO: 16006
  source 1..80: mol_type = other DNA

SEQ ID NO: 88052 - DNA, 80 bp, synthetic construct
  source 1..80: mol_type = other DNA
gaagccatgaaacagaattctagatggttttatgctgatagaagtatttcaacacaaaaatcaataaatgcacatggaaa

SEQ ID NO: 88053 - DNA, 80 bp, synthetic construct
  source 1..80: mol_type = other DNA
ctaaaatgtctgatgtaatccttaaagtgaatggcaaaaaccaaaaatttaatagattcactgagcaactgaaatgtggg

SEQ ID NO: 88054 - DNA, 80 bp, synthetic construct
  source 1..80: mol_type = other DNA
tatagaaaagggagctctagctctaagaatatctcatactcctagttctagaagtagtacccccagtggctgataagaac

SEQ ID NO: 88055 - DNA, 80 bp, synthetic construct; identical to SEQ ID NO: 16007
  source 1..80: mol_type = other DNA

SEQ ID NO: 88056 - DNA, 80 bp, synthetic construct
  source 1..80: mol_type = other DNA
aacaaattggaaagaagaaattctaaaattcatgggcttggagatgtgagttaaactaagtaaaaacagtttccttcctg

SEQ ID NO: 88057 - DNA, 80 bp, synthetic construct
  source 1..80: mol_type = other DNA
ccccatgtatttgtccaacatatgttcataaaccaaaaacagcatagactctctagagaccataactactgggaacataa

SEQ ID NO: 88058 - DNA, 80 bp, synthetic construct
  source 1..80: mol_type = other DNA
agacagaaattgtacagaagcacagttcaatagaatggaagggcatcgtggagaagcttgcaataggccctcccttcttt

SEQ ID NO: 88059 - DNA, 80 bp, synthetic construct; identical to SEQ ID NO: 16008
  source 1..80: mol_type = other DNA

SEQ ID NO: 88060 - DNA, 80 bp, synthetic construct
  source 1..80: mol_type = other DNA
acttctactaagacagagaacctgagaaattaggctcagctctgaggccccagttcttttttttaatggtttacttttca

SEQ ID NO: 88061 - DNA, 80 bp, synthetic construct
  source 1..80: mol_type = other DNA
gatgatagccacatgtggatattagctggtccaaactgagatgtggtataatatatgcattggatttcaacgacttagaa

SEQ ID NO: 88062 - DNA, 80 bp, synthetic construct
  source 1..80: mol_type = other DNA
atatatgtggctcacattatatttctattgttcagtactgttctactgtttgaacatctaagatcgaaaagtggttcaaa

SEQ ID NO: 88063 - DNA, 80 bp, synthetic construct
  source 1..80: mol_type = other DNA
gaatgttagaatcaaaatttcaattgaaccaccaagggaacagatgccacattctaagtcaagtgtgatattttgatgca

SEQ ID NO: 88064 - DNA, 80 bp, synthetic construct; identical to SEQ ID NO: 16009
  source 1..80: mol_type = other DNA

SEQ ID NO: 88065 - DNA, 80 bp, synthetic construct
  source 1..80: mol_type = other DNA
tggacaatggttccaatgagcatttgctaacgtgtcaatagtttgcactccagcaatttatcgtggcagaaaaaatgcat

SEQ ID NO: 88066 - DNA, 80 bp, synthetic construct
  source 1..80: mol_type = other DNA
gtcagaacacagatgcctctgcccccattaaaggaactataggggagaaagtccaaaacagaccagatgatttcatctac

SEQ ID NO: 88067 - DNA, 80 bp, synthetic construct; identical to SEQ ID NO: 16010
  source 1..80: mol_type = other DNA

SEQ ID NO: 88068 - DNA, 80 bp, synthetic construct
  source 1..80: mol_type = other DNA
gcgtgatctcggctcactgcaagctccacctcctgggttcacgccattctcccgcttcagcctcccgagtaactgggact

SEQ ID NO: 88069 - DNA, 80 bp, synthetic construct
  source 1..80: mol_type = other DNA
gccacattgttactttccattgaaactaaataccaaaagagaggttcatagaggccttcagtgtagtttagtaatgacag

SEQ ID NO: 88070 - DNA, 80 bp, synthetic construct
  source 1..80: mol_type = other DNA
gagttagcctgtggcattaccttgggaactttagtgatagccacctacaatttaaaattatgtaaaattcgtgtcagaaa

SEQ ID NO: 88071 - DNA, 80 bp, synthetic construct
  source 1..80: mol_type = other DNA
atgaagctctctaaacaggtcttgagataaggtaaagtttttactttctttttcgaagcaggtgtttccaaaatggacta

SEQ ID NO: 88072 - DNA, 80 bp, synthetic construct; identical to SEQ ID NO: 16011
  source 1..80: mol_type = other DNA

SEQ ID NO: 88073 - DNA, 80 bp, synthetic construct
  source 1..80: mol_type = other DNA
aactaaggattatttcaatcctctcatttttattctactccactttggccccaattgttccttttccttaaggctatcag

SEQ ID NO: 88074 - DNA, 80 bp, synthetic construct
  source 1..80: mol_type = other DNA
acacagaacaaatgcaccaggatttagaagagtccacgtgcatgctaatattctgaggatacatgatgagcagcttcaga

SEQ ID NO: 88075 - DNA, 80 bp, synthetic construct; identical to SEQ ID NO: 16012
  source 1..80: mol_type = other DNA

SEQ ID NO: 88076 - DNA, 80 bp, synthetic construct
  source 1..80: mol_type = other DNA
actaaatgacaatattcattccatatgtctacttccaggcatgttagttcagtcctttggagcacatttatatgtcctgt

SEQ ID NO: 88077 - DNA, 80 bp, synthetic construct
  source 1..80: mol_type = other DNA
tgccttttcatcttgacttccattctaagattcatagttctaggtttcttcttaccgttcctcagaaaagtctttagagt

SEQ ID NO: 88078 - DNA, 80 bp, synthetic construct
  source 1..80: mol_type = other DNA
ggcttaggagccagaatgtctaggttcaggcctctattttaccacttataagctgtcccttcttggacaaggcacttgat

SEQ ID NO: 88079 - DNA, 80 bp, synthetic construct; identical to SEQ ID NO: 16013
  source 1..80: mol_type = other DNA

SEQ ID NO: 88080 - DNA, 80 bp, synthetic construct
  source 1..80: mol_type = other DNA
tccaagttcaggtctatctccatcattcttttctcttttgacatgaccctgaaaagtctcatccactcatatgattcact

SEQ ID NO: 88081 - DNA, 80 bp, synthetic construct
  source 1..80: mol_type = other DNA
taatctgataacaaatgctaacatactgtaccactgagctaagaagtgattaagttctactagttgctcaaggcccaagc

SEQ ID NO: 88082 - DNA, 80 bp, synthetic construct
  source 1..80: mol_type = other DNA
atctttgacagagaaagcagcaggaggtggcaaacttgaatgctcacaagggctaatacctaagctaaatgaatgaactt

SEQ ID NO: 88083 - DNA, 80 bp, synthetic construct
  source 1..80: mol_type = other DNA
aatggtaaaatatatcattgctacctgcccactggggatgaggctggccagccaagaatgtttttaaacaaacttatctt

SEQ ID NO: 88084 - DNA, 80 bp, synthetic construct; identical to SEQ ID NO: 16014
  source 1..80: mol_type = other DNA

SEQ ID NO: 88085 - DNA, 80 bp, synthetic construct
  source 1..80: mol_type = other DNA
tgcatccctgttaactgaaaaatgacagtcttgtggacctgaaagatcattcttctgaaagatgggaccaaattcaatta

SEQ ID NO: 88086 - DNA, 80 bp, synthetic construct
  source 1..80: mol_type = other DNA
atgggtcgtgtactgtgcatcacacagtaaggctagaattaagaagatgaagaaactatagttgctcctgaaaacttatg

SEQ ID NO: 88087 - DNA, 80 bp, synthetic construct
  source 1..80: mol_type = other DNA
cagttaaaacagaatacaaccaacctaggtacttatccagtaataagcaccacaataagtataccaacccaccatcggaa

SEQ ID NO: 88088 - DNA, 80 bp, synthetic construct; identical to SEQ ID NO: 16015
  source 1..80: mol_type = other DNA

SEQ ID NO: 88089 - DNA, 80 bp, synthetic construct
  source 1..80: mol_type = other DNA
tccactaccacaaatgcctgaaaatctgccacttggggatgaatttgattttgaaaatcaccactgggaaaattctatgg

SEQ ID NO: 88090 - DNA, 80 bp, synthetic construct
  source 1..80: mol_type = other DNA
tggacaaagatcaaatctttgaagaaatcactgtggaatggttcaatatcatgccctttattttagactgtgttatcatc

SEQ ID NO: 88091 - DNA, 80 bp, synthetic construct; identical to SEQ ID NO: 16016
  source 1..80: mol_type = other DNA

SEQ ID NO: 88092 - DNA, 80 bp, synthetic construct
  source 1..80: mol_type = other DNA
tgtaaagagaagcagtttaaggagggactcctaaaggatatcaacatgcaatgtaaaggtctattatgcattacacatca

SEQ ID NO: 88093 - DNA, 80 bp, synthetic construct
  source 1..80: mol_type = other DNA
accactctctgctctttgttttcctctattacatgttttaaatgacatattcaacatctgctactgaatctttactttcc

SEQ ID NO: 88094 - DNA, 80 bp, synthetic construct
  source 1..80: mol_type = other DNA
gattattagtaagaccaaagttcagggaaaaaaacttaagaatattgcatatccacacatatctcaatatcatacttgta

SEQ ID NO: 88095 - DNA, 80 bp, synthetic construct; identical to SEQ ID NO: 16017
  source 1..80: mol_type = other DNA

SEQ ID NO: 88096 - DNA, 80 bp, synthetic construct
  source 1..80: mol_type = other DNA
agagcttaatccttacccttacagaagaaagttctcccctttttatcctgatgccaactggtaattatgtatacactcat

SEQ ID NO: 88097 - DNA, 80 bp, synthetic construct
  source 1..80: mol_type = other DNA
aagtagccatgcagacccaatgtctgtgcaaattagtaacagctttaggtaccagcatgtctttacgtaaatgattttaa

SEQ ID NO: 88098 - DNA, 80 bp, synthetic construct
  source 1..80: mol_type = other DNA
gagagctgagacgctttacctgaaaataaatgctaatgaagtaacacttgtggtcctctggaaggacaacaataaaatgt

SEQ ID NO: 88099 - DNA, 80 bp, synthetic construct; identical to SEQ ID NO: 16018
  source 1..80: mol_type = other DNA

SEQ ID NO: 88100 - DNA, 80 bp, synthetic construct
  source 1..80: mol_type = other DNA
tgagagttataacagaacttacggaaactattggtgcagtaaatctagagatgcttcagggcaggatattttgcttgtta

SEQ ID NO: 88101 - DNA, 80 bp, synthetic construct
  source 1..80: mol_type = other DNA
cccagctgaaatcttactgctccatgaggctcccccaaaacctccattcaaattccttgctccttatatattttctatac

SEQ ID NO: 88102 - DNA, 80 bp, synthetic construct
  source 1..80: mol_type = other DNA
aaacacagcattaggatactaaagcctggctatttccacccatcatggaactctttgatgggcactttttgccctgggtt

SEQ ID NO: 88103 - DNA, 80 bp, synthetic construct
  source 1..80: mol_type = other DNA
acgggtcttttccccaataaattctcttttatgtctaattctgtcttgatattttcttggcataagaggacctgaactga

SEQ ID NO: 88104 - DNA, 80 bp, synthetic construct; identical to SEQ ID NO: 16019
  source 1..80: mol_type = other DNA

SEQ ID NO: 88105 - DNA, 80 bp, synthetic construct
  source 1..80: mol_type = other DNA
tcctcctccagttgcgcttccacactgtgatctttctcactgtaaaccttcgtaagtgaagggtaataaggttggtattt

SEQ ID NO: 88106 - DNA, 80 bp, synthetic construct
  source 1..80: mol_type = other DNA
tctgccagagggtaacatttatgtcctctaatacaaagagttgttgtcatattaaatgagttaacacacatagagttcta

SEQ ID NO: 88107 - DNA, 80 bp, synthetic construct
  source 1..80: mol_type = other DNA
ctatctgaccttacttcctttcccctcactctcctctgcatttaagctctagcaacaccaaagcacttgctatgtcccac

SEQ ID NO: 88108 - DNA, 80 bp, synthetic construct; identical to SEQ ID NO: 16020
  source 1..80: mol_type = other DNA

SEQ ID NO: 88109 - DNA, 80 bp, synthetic construct
  source 1..80: mol_type = other DNA
tccatgtaagacgtgacttgttgctccctgccttccaccatgattatgaagcctccccagccatgtggaactgtaagtcc

SEQ ID NO: 88110 - DNA, 80 bp, synthetic construct
  source 1..80: mol_type = other DNA
tagaaacgccctgaataacgcccaccattgaggattcattaaataaacagtcaaacatccaggtaatagagtactaggca

SEQ ID NO: 88111 - DNA, 80 bp, synthetic construct
  source 1..80: mol_type = other DNA
tatacagtaagaactcatgtaccaaatatgcattacaagtctagaagatactatctggaatgatgaaatcacgaataatt

SEQ ID NO: 88112 - DNA, 80 bp, synthetic construct; identical to SEQ ID NO: 16021
  source 1..80: mol_type = other DNA

SEQ ID NO: 88113 - DNA, 80 bp, synthetic construct
  source 1..80: mol_type = other DNA
gaaatcaaggagatcaggcaagcaaggtggtgaaggtaaatgagaggaaaatgaatcaaacaacctgtaaccaatcaagg

SEQ ID NO: 88114 - DNA, 80 bp, synthetic construct
  source 1..80: mol_type = other DNA
aatacttataactacagtgtacttacgttgtccacagtgagtccctatgtatcctttctggcatagacagtgatcgtcac

SEQ ID NO: 88115 - DNA, 80 bp, synthetic construct; identical to SEQ ID NO: 16022
  source 1..80: mol_type = other DNA

SEQ ID NO: 88116 - DNA, 80 bp, synthetic construct
  source 1..80: mol_type = other DNA
actccggaggctgaggcaagagaatcgcttgaacctgggggggcagaggttgtagtgagcggagatcgcaccactgtact

SEQ ID NO: 88117 - DNA, 80 bp, synthetic construct
  source 1..80: mol_type = other DNA
gtattgccttgagtaaccatatgagacaagattatgatggcaataattttcccgtgaaaagatttagaatcccaggtaga

SEQ ID NO: 88118 - DNA, 80 bp, synthetic construct
  source 1..80: mol_type = other DNA
cgacagggacagctggatttgcctgagaaagagctgcttgtttaaactgtaacctcaaactaaataagatcctcattttc

SEQ ID NO: 88119 - DNA, 80 bp, synthetic construct
  source 1..80: mol_type = other DNA
gtgttcaggctatctctaggtcagtaatttaggaatgctaatagcactttcaaaatcctaggctatttcctagtccaaag

SEQ ID NO: 88120 - DNA, 80 bp, synthetic construct; identical to SEQ ID NO: 16023
  source 1..80: mol_type = other DNA

SEQ ID NO: 88121 - DNA, 80 bp, synthetic construct
  source 1..80: mol_type = other DNA
aacccactatcttctatacccttccttttacagcacaaagaagttaggttgagttgaaagttaaatgccttttcaacaac

SEQ ID NO: 88122 - DNA, 80 bp, synthetic construct
  source 1..80: mol_type = other DNA
tcagtcattcattcactcaatgaacatttctgagtgcctactatgtgccatgcaaaacacccggcactttccttgtccta

SEQ ID NO: 88123 - DNA, 80 bp, synthetic construct
  source 1..80: mol_type = other DNA
tatctcccaaaccaaatgtgagccctctctcctttccaattacttcatatttctcttttgaagcatatattatataatcc

SEQ ID NO: 88124 - DNA, 80 bp, synthetic construct; identical to SEQ ID NO: 16024
  source 1..80: mol_type = other DNA

SEQ ID NO: 88125 - DNA, 80 bp, synthetic construct
  source 1..80: mol_type = other DNA
ggaaactgattgcagttattttaggctcttatgattccgttaaaacatctcagccaagatgcttttttaactaaaaatct

SEQ ID NO: 88126 - DNA, 80 bp, synthetic construct
  source 1..80: mol_type = other DNA
tgtcatctgtcaagcagcataggaactcagccttcaaactgatttcaattaaagcagttcatgccaagagctaatttcca

SEQ ID NO: 88127 - DNA, 80 bp, synthetic construct
  source 1..80: mol_type = other DNA
ccctgatatatattttttaccctgtctttcaggcaaaccttttccagcataaaatattctttctttaaaaaataaaagca

SEQ ID NO: 88128 - DNA, 80 bp, synthetic construct; identical to SEQ ID NO: 16025
  source 1..80: mol_type = other DNA

SEQ ID NO: 88129 - DNA, 80 bp, synthetic construct
  source 1..80: mol_type = other DNA
tcttaaaaaagccaactgaaacctaggggttcctcctacacccataatgatgctgtattctttactggatgcactaagta

SEQ ID NO: 88130 - DNA, 80 bp, synthetic construct
  source 1..80: mol_type = other DNA
cgtaaagggtttcatgtaaggctcaataacccagagctaacagaaaatgttgccatctccccatatccataaaagatccc

SEQ ID NO: 88131 - DNA, 80 bp, synthetic construct; identical to SEQ ID NO: 16026
  source 1..80: mol_type = other DNA

SEQ ID NO: 88132 - DNA, 80 bp, synthetic construct
  source 1..80: mol_type = other DNA
gattttaatttaggtactaggaaaagcacagacagacaaattaaacagctagactaacttctggactctacacctgagac

SEQ ID NO: 88133 - DNA, 80 bp, synthetic construct
  source 1..80: mol_type = other DNA
taaacaaacaaaatctagccaagctggaaaagctgtagagaaggacaagttaaatgacagtagtgataaaggtgcttcca

SEQ ID NO: 88134 - DNA, 80 bp, synthetic construct
  source 1..80: mol_type = other DNA
ttcctctgaatgtccccacactttcaggatggttgcaccatactccctcaaacttgctaacacactggtctagaattgtt

SEQ ID NO: 88135 - DNA, 80 bp, synthetic construct; identical to SEQ ID NO: 16027
  source 1..80: mol_type = other DNA

SEQ ID NO: 88136 - DNA, 80 bp, synthetic construct
  source 1..80: mol_type = other DNA
gaaaatcttcagaatctaggagtagacaaagcattcctagacttgacaatgaaagcatgatccagtaaagggaaaactga

SEQ ID NO: 88137 - DNA, 80 bp, synthetic construct
  source 1..80: mol_type = other DNA
gaaataacaaacaattcaattagcatctgggcaaaagaggccaggcacagtggctcatgcctgtaatcccaacactttgg

SEQ ID NO: 88138 - DNA, 80 bp, synthetic construct
  source 1..80: mol_type = other DNA
tgagcctgggagacggaggttgcagtgagctgagatcgcaccactgtactccaacctgggtgacagagtaagaccccgtc

SEQ ID NO: 88139 - DNA, 80 bp, synthetic construct; identical to SEQ ID NO: 16028
  source 1..80: mol_type = other DNA

SEQ ID NO: 88140 - DNA, 80 bp, synthetic construct
  source 1..80: mol_type = other DNA
acacaaatgttcatagcagcttagttcaaataataaagaaaaaaaaactgatgacaactcagatgcccttcaataggtga

SEQ ID NO: 88141 - DNA, 80 bp, synthetic construct
  source 1..80: mol_type = other DNA
acagattagtggttgtcagaattaaagagagaattatgtcgggaagaaaatgacaataaaagggtaacatcagcgctctt

SEQ ID NO: 88142 - DNA, 80 bp, synthetic construct
  source 1..80: mol_type = other DNA
agatgtcacaatggggaaaactaaataaagaatacccaggatatttctgatttcttacaactgccatggttggaatgttc

SEQ ID NO: 88143 - DNA, 80 bp, synthetic construct; identical to SEQ ID NO: 16029
  source 1..80: mol_type = other DNA

SEQ ID NO: 88144 - DNA, 80 bp, synthetic construct
  source 1..80: mol_type = other DNA
gtgtaaagagtaaaacagaatgagaagatttcaaaattacaaaatataaactgtaggaattacaaaatagaaaatacaaa

SEQ ID NO: 88145 - DNA, 80 bp, synthetic construct
  source 1..80: mol_type = other DNA
gggaggtgattaagttatgcaggcagagccctcatgaaaggattagtatccttataaaaaaaaaaggcctgggagacctg

SEQ ID NO: 88146 - DNA, 80 bp, synthetic construct
  source 1..80: mol_type = other DNA
tattttgttatagaagcccaaactgacaaatatatatgtaaagttatagagtttattaatcccagtgttacaagctaata

SEQ ID NO: 88147 - DNA, 80 bp, synthetic construct
  source 1..80: mol_type = other DNA
acatagcaaagaacagtcctaaagagggctggaattaaagtctagaaaaactactgttttgacgctgtctagccaatcat

SEQ ID NO: 88148 - DNA, 80 bp, synthetic construct; identical to SEQ ID NO: 16030
  source 1..80: mol_type = other DNA

SEQ ID NO: 88149 - DNA, 80 bp, synthetic construct
  source 1..80: mol_type = other DNA
cacatgtagtgaatgcaaacatttcactgagtagaattgtccttctattagcaggaaagttagcaaagtgatcaggatgt

SEQ ID NO: 88150 - DNA, 80 bp, synthetic construct
  source 1..80: mol_type = other DNA
taaagatttcaagtaaccccaaagatcctgatgaaaccagaacctcctccttacactactctcatccacaagctacttgg

SEQ ID NO: 88151 - DNA, 80 bp, synthetic construct; identical to SEQ ID NO: 16031
  source 1..80: mol_type = other DNA

SEQ ID NO: 88152 - DNA, 80 bp, synthetic construct
  source 1..80: mol_type = other DNA
ttcccaactttataactgcacttcttttccaaccctgagatgcttatgcttcagcggcagcctggaagtcacccttatag

SEQ ID NO: 88153 - DNA, 80 bp, synthetic construct
  source 1..80: mol_type = other DNA
acattcagtgcaataagcaagagtcccagcccatagggcaatttctatcccaattgtaactggctgtatttagtaaaagg

SEQ ID NO: 88154 - DNA, 80 bp, synthetic construct
  source 1..80: mol_type = other DNA
aagagaaggaagctaataaagtacattatcaaatctattatcactgtgaacagcgagggctcggtcccactggggaactt

SEQ ID NO: 88155 - DNA, 80 bp, synthetic construct
  source 1..80: mol_type = other DNA
gctctctggccagaaaagtatacaaagctctcaggaagagtcccccgtgttcatccatgaagccaagggaggcaagaggg

SEQ ID NO: 88156 - DNA, 80 bp, synthetic construct; identical to SEQ ID NO: 16032
  source 1..80: mol_type = other DNA

SEQ ID NO: 88157 - DNA, 80 bp, synthetic construct
  source 1..80: mol_type = other DNA
aacaagcaagaaaaggttctgaagaatgaactgtggatattcatctggcatcacagaaagtggcaacattctgaaaggaa

SEQ ID NO: 88158 - DNA, 80 bp, synthetic construct
  source 1..80: mol_type = other DNA
cagtaccacaaggaagcatgcctagatttcttgagccaaaaatgtccattaaacaaccatttcattgagcaccttttatg

SEQ ID NO: 88159 - DNA, 80 bp, synthetic construct
  source 1..80: mol_type = other DNA
tgggcagaacagagaaggcagatgttctagtgaaaaaatgtattgcaggaaagaggaaagccaaaatcaaatttaggaga

SEQ ID NO: 88160 - DNA, 80 bp, synthetic construct; identical to SEQ ID NO: 16033
  source 1..80: mol_type = other DNA

SEQ ID NO: 88161 - DNA, 80 bp, synthetic construct
  source 1..80: mol_type = other DNA
tccacagcactcaatccatcagaagcccaggacaggctatgaagagaaaaccaaacaaacaaattaaatcctgcatctaa

SEQ ID NO: 88162 - DNA, 80 bp, synthetic construct
  source 1..80: mol_type = other DNA
tgcagtggcgcaatctctgctcactgcaagctccgtctcccaggttcatgccattctcctgcctcagcctcccgagtagc

SEQ ID NO: 88163 - DNA, 80 bp, synthetic construct
  source 1..80: mol_type = other DNA
tccagcctattgtaaatgtttaatgtttaatttttatcctgttctgaattccatcaacagtctgagagaagaatgctgga

SEQ ID NO: 88164 - DNA, 80 bp, synthetic construct; identical to SEQ ID NO: 16034
  source 1..80: mol_type = other DNA

SEQ ID NO: 88165 - DNA, 80 bp, synthetic construct
  source 1..80: mol_type = other DNA
gaaacgactaagaaacaaactgtcaaagatccagtaaacatttatttaaatatctggagacatcatttctcagagaactc

SEQ ID NO: 88166 - DNA, 80 bp, synthetic construct
  source 1..80: mol_type = other DNA
tttttcaggtcatgaagcaaatattggccaatatagtctattgaatactccattgaccactgtcagccaagtgagaaggt

SEQ ID NO: 88167 - DNA, 80 bp, synthetic construct; identical to SEQ ID NO: 16035
  source 1..80: mol_type = other DNA

SEQ ID NO: 88168 - DNA, 80 bp, synthetic construct
  source 1..80: mol_type = other DNA
caatcacccaaattcaatgtacagggtttggtaaggcccgtgagtggccaacaaagttagaaattacaataagaaaagca

SEQ ID NO: 88169 - DNA, 80 bp, synthetic construct
  source 1..80: mol_type = other DNA
ggtttgaccaagttgatgtatttcccaaactggaaaggtagaaaagtcttaaagctggaaggctgtactatcaacagatt

SEQ ID NO: 88170 - DNA, 80 bp, synthetic construct
  source 1..80: mol_type = other DNA
ggtaaggttttccatccagggcaacagtaagcattataacgtgatccacagacattgggtctaaaacaaaaacagaagaa

SEQ ID NO: 88171 - DNA, 80 bp, synthetic construct
  source 1..80: mol_type = other DNA
aacagggacatcccttaatatcacctatgcatatggcccatcagggaaataaaaaccagagatacaaaatgtagcacatt

SEQ ID NO: 88172 - DNA, 80 bp, synthetic construct; identical to SEQ ID NO: 16036
  source 1..80: mol_type = other DNA

SEQ ID NO: 88173 - DNA, 80 bp, synthetic construct
  source 1..80: mol_type = other DNA
ccccatctctaccaaaaatacaaaaattagcttggcatggtggcacgcacctgtagtcccagctacttggggggctgagg

SEQ ID NO: 88174 - DNA, 80 bp, synthetic construct
  source 1..80: mol_type = other DNA
tctgggtttcttgtttacagacagttcatcacatgtcttggagtagaaactccattcagaatccagatgatccacattta

SEQ ID NO: 88175 - DNA, 80 bp, synthetic construct
  source 1..80: mol_type = other DNA
gcctaagcattgatgctagctgctagcgatcaggggctaataaggaaggtcaaatgttttgcaatcaatttcacaaacta

SEQ ID NO: 88176 - DNA, 80 bp, synthetic construct; identical to SEQ ID NO: 16037
  source 1..80: mol_type = other DNA

SEQ ID NO: 88177 - DNA, 80 bp, synthetic construct
  source 1..80: mol_type = other DNA
tgattggatagaggtgaaatatgtgcatgatgttagagcctgtgtgagctcagtatatttctgtgtacaatggcacaatg

SEQ ID NO: 88178 - DNA, 80 bp, synthetic construct
  source 1..80: mol_type = other DNA
tactcagccagtggaaacacaaggaataaaggaagaaagatgttatggagaattttaagtcaaaggctctcaaccctttg

SEQ ID NO: 88179 - DNA, 80 bp, synthetic construct; identical to SEQ ID NO: 16038
  source 1..80: mol_type = other DNA

SEQ ID NO: 88180 - DNA, 80 bp, synthetic construct
  source 1..80: mol_type = other DNA
ctgacataatatgtcacagtcatagtgtctgacaaaaatatgtatgtcataacacatacacaagatgaagaagctcagaa

SEQ ID NO: 88181 - DNA, 80 bp, synthetic construct
  source 1..80: mol_type = other DNA
aaaagaaaatgtaaatgttgtaaaccttcacaagagtaaaagtaatgggacagatgacataactcgggaaacaatttggg

SEQ ID NO: 88182 - DNA, 80 bp, synthetic construct
  source 1..80: mol_type = other DNA
ctaagtccccatctttcaaagcaagaaaccagtgggtactgtttaaatctagatacagaggtacaaacatggtagatggt

SEQ ID NO: 88183 - DNA, 80 bp, synthetic construct; identical to SEQ ID NO: 16039
  source 1..80: mol_type = other DNA

SEQ ID NO: 88184 - DNA, 80 bp, synthetic construct
  source 1..80: mol_type = other DNA
tcttaaggttctttataattttgggttggacttattttatttgcatcctctgactttctatgagttttaaaactttatca

SEQ ID NO: 88185 - DNA, 80 bp, synthetic construct
  source 1..80: mol_type = other DNA
tgcttttggtcttgagaaactgcaaactattagaactcgttcaaacaagctgcatgacatttgttttacttatacacaga

SEQ ID NO: 88186 - DNA, 80 bp, synthetic construct
  source 1..80: mol_type = other DNA
ttaataaagttactctttcgggtcaatgaaagtatagcatccatacctctttctcttttcacttcatgagccatccccat

SEQ ID NO: 88187 - DNA, 80 bp, synthetic construct
  source 1..80: mol_type = other DNA
ctttgaggtaatttttattgttataatgtttaacactaaaaaaaaaactatggcttaagaaggtcaaacaacctggccaa

SEQ ID NO: 88188 - DNA, 80 bp, synthetic construct; identical to SEQ ID NO: 16040
  source 1..80: mol_type = other DNA

SEQ ID NO: 88189 - DNA, 80 bp, synthetic construct
  source 1..80: mol_type = other DNA
tacaggcacacaccactacacccagctaatttttgtatttttagtagagacggggtttcaccatattggccaggctggtc

SEQ ID NO: 88190 - DNA, 80 bp, synthetic construct
  source 1..80: mol_type = other DNA
acttctcttaccagttactttcaatattgtgctctgtaagaacccaactccaaacaccctgggggatgagtgagtctcag

SEQ ID NO: 88191 - DNA, 80 bp, synthetic construct; identical to SEQ ID NO: 16041
  source 1..80: mol_type = other DNA

SEQ ID NO: 88192 - DNA, 80 bp, synthetic construct
  source 1..80: mol_type = other DNA
tttaacctttaaggaaaaaaactatgatttagccccttaagtataaatctggaggggatcaaaaggtacatgccctcaca

SEQ ID NO: 88193 - DNA, 80 bp, synthetic construct
  source 1..80: mol_type = other DNA
gattttatttgctctttgacaattttcttatcaagataaaaaaagaaaaaacatcatgagtactgtctgatgaaggggcc

SEQ ID NO: 88194 - DNA, 80 bp, synthetic construct
  source 1..80: mol_type = other DNA
ctgttacagtccatctgccagtcacaatgcaacctgggtaacaaaacttcaaaccctggtaatgagaacagcttccatga

SEQ ID NO: 88195 - DNA, 80 bp, synthetic construct; identical to SEQ ID NO: 16042
  source 1..80: mol_type = other DNA

SEQ ID NO: 88196 - DNA, 80 bp, synthetic construct
  source 1..80: mol_type = other DNA
tctcataatatattacaatgtaataataatagaaataaagtgcacaataaatgtaatgagcttgaatcatcctgaaacca

SEQ ID NO: 88197 - DNA, 80 bp, synthetic construct
  source 1..80: mol_type = other DNA
cctttgaggatgcaagccagccaaccactctaacttactttgtgcagtttgggatttttttttattttttagatgaaagt

SEQ ID NO: 88198 - DNA, 80 bp, synthetic construct
  source 1..80: mol_type = other DNA
cctcatctcccctttcctatctgcctttcttccactctgtctcttttcttctctcttcagttcctgttttcagggcattt

SEQ ID NO: 88199 - DNA, 80 bp, synthetic construct; identical to SEQ ID NO: 16043
  source 1..80: mol_type = other DNA

SEQ ID NO: 88200 - DNA, 80 bp, synthetic construct
  source 1..80: mol_type = other DNA
gttaaaaaaaaaaaaacaggagaagaactaacatttattgaagtctggatactctacatgcttcgacctatatgaatgcc

SEQ ID NO: 88201 - DNA, 80 bp, synthetic construct
  source 1..80: mol_type = other DNA
gagcatgtatgtacaaagggtagtgatgaaccccagacaacataaaaacattgctgagcaatcatttcaaataggaagca

SEQ ID NO: 88202 - DNA, 80 bp, synthetic construct
  source 1..80: mol_type = other DNA
catcattgagggtttgggaaacaaagacaaaacaccatagttccatcagcctcacaataatcactatattaatcatatct

SEQ ID NO: 88203 - DNA, 80 bp, synthetic construct
  source 1..80: mol_type = other DNA
gggagccaaaattcaaatctagctccccatgttagcattttttgcacgagtctctgcttgttttgcatgagtgttattac

SEQ ID NO: 88204 - DNA, 80 bp, synthetic construct; identical to SEQ ID NO: 16044
  source 1..80: mol_type = other DNA

SEQ ID NO: 88205 - DNA, 80 bp, synthetic construct
  source 1..80: mol_type = other DNA
tgaaggaagtgtaaatggccaaagctagaacccttttggagcaacaaaataacaaaagcagcattggattacaataccaa

SEQ ID NO: 88206 - DNA, 80 bp, synthetic construct
  source 1..80: mol_type = other DNA
gctacacatactgactgtcttccaaagagtacagtataaagggagggggaggaagtggaaaatcctgacaaatcctatct

SEQ ID NO: 88207 - DNA, 80 bp, synthetic construct; identical to SEQ ID NO: 16045
  source 1..80: mol_type = other DNA

SEQ ID NO: 88208 - DNA, 80 bp, synthetic construct
  source 1..80: mol_type = other DNA
cctgcctaacacagtgaaaccccgtctctactaaaaatacaaaaaaaaaaaaaaaattagccgggcgtggtggcgggcgc

SEQ ID NO: 88209 - DNA, 80 bp, synthetic construct
  source 1..80: mol_type = other DNA
tacaaaaaatataccacgctagtatgagatgctaacaacagagtaaagtgtccagagtatatggcaactctctcaatttt

SEQ ID NO: 88210 - DNA, 80 bp, synthetic construct
  source 1..80: mol_type = other DNA
tctttgctcttgaggatcttacagtctaggaacacaggcacatacacaaagattatctacacaacagacaaagcactaac

SEQ ID NO: 88211 - DNA, 80 bp, synthetic construct
  source 1..80: mol_type = other DNA
gagtcactagttttatttcatcccactgatgaaattccccttaaattctccaactccattagcaaatcccttgtccaaat

SEQ ID NO: 88212 - DNA, 80 bp, synthetic construct; identical to SEQ ID NO: 16046
  source 1..80: mol_type = other DNA

SEQ ID NO: 88213 - DNA, 80 bp, synthetic construct
  source 1..80: mol_type = other DNA
ccatctttccatttcaatatgtagttccatctcccttagtgttccctgatgaatccatccatctttcacactacaaacac

SEQ ID NO: 88214 - DNA, 80 bp, synthetic construct
  source 1..80: mol_type = other DNA
ctagactatcctggagtctatttagaagcacacaagataatattgactaaaggcaatagtgagtacgaagtacaattagc

SEQ ID NO: 88215 - DNA, 80 bp, synthetic construct
  source 1..80: mol_type = other DNA
acacgtctttgaaaggctacataggcagttaaacagaaatgtatggtggttttgtgccttgattatttcactgacatgcc

SEQ ID NO: 88216 - DNA, 80 bp, synthetic construct; identical to SEQ ID NO: 16047
  source 1..80: mol_type = other DNA

SEQ ID NO: 88217 - DNA, 80 bp, synthetic construct
  source 1..80: mol_type = other DNA
acagtttcattcactgtgtaccctcaacttttcatggagattttgtgttgatcaaaagcaatagcccaagaacttatggt

SEQ ID NO: 88218 - DNA, 80 bp, synthetic construct
  source 1..80: mol_type = other DNA
aaggcagttcctcggatctgggacatcatttttagactgacagccaatttaaatcctattggaatcttttataggtggag

SEQ ID NO: 88219 - DNA, 80 bp, synthetic construct; identical to SEQ ID NO: 16048
  source 1..80: mol_type = other DNA

SEQ ID NO: 88220 - DNA, 80 bp, synthetic construct
  source 1..80: mol_type = other DNA
catacatgggaagaggtgaatttcttcatgaagtttcaactatttgaccatctaaggatgaggaagcattgcttccaaac

SEQ ID NO: 88221 - DNA, 80 bp, synthetic construct
  source 1..80: mol_type = other DNA
acttcaccagtgagctcagggtctatcaagagcttttctttgactgggatattcattccatttattcaagttgaagccac

SEQ ID NO: 88222 - DNA, 80 bp, synthetic construct
  source 1..80: mol_type = other DNA
ctaaaaccatgattcttgccacttcccagaaattctcaaaccaagagctctgtccagggagataatatcttctgaatgta

SEQ ID NO: 88223 - DNA, 80 bp, synthetic construct
  source 1..80: mol_type = other DNA
tgtcagcccccaattgacaaacaggtagagctccaaaatttcatttctatattagtatttagaacttggaatggcctgtc

SEQ ID NO: 88224 - DNA, 80 bp, synthetic construct; identical to SEQ ID NO: 16049
  source 1..80: mol_type = other DNA

SEQ ID NO: 88225 - DNA, 80 bp, synthetic construct
  source 1..80: mol_type = other DNA
tccacaggtccatgaatcagagacttaaaacctggagagttctcatcctcgatgcacctgatttattttaaaggccagaa

SEQ ID NO: 88226 - DNA, 80 bp, synthetic construct
  source 1..80: mol_type = other DNA
gcacgagtggcttacacgtgaagcaaggaagcaagtccgttttgaatcctatttggtgactttagtctcataccaaaatt

SEQ ID NO: 88227 - DNA, 80 bp, synthetic construct; identical to SEQ ID NO: 16050
  source 1..80: mol_type = other DNA

SEQ ID NO: 88228 - DNA, 80 bp, synthetic construct
  source 1..80: mol_type = other DNA
gctagagtgagccgcaatcacgccactgcactccagcctgggtgacagagcaagaccctgtctcaaaaaaaaaaaaaaaa

SEQ ID NO: 88229 - DNA, 80 bp, synthetic construct
  source 1..80: mol_type = other DNA
tagaaacatttatagctacaaaagcttcagagatcttgtagctcaaaccatatttcatagcagtcaacaggccatggatc

SEQ ID NO: 88230 - DNA, 80 bp, synthetic construct
  source 1..80: mol_type = other DNA
ttaacacttcacaatattagcagtcaaaaacttaagttttttttttaattttgaaattgaaacaaagttgtaagcattta

SEQ ID NO: 88231 - DNA, 80 bp, synthetic construct; identical to SEQ ID NO: 16051
  source 1..80: mol_type = other DNA

SEQ ID NO: 88232 - DNA, 80 bp, synthetic construct
  source 1..80: mol_type = other DNA
tataaactaatttgtacatcattttttgtgctctgatttttttactaggtttgcaaaataaataaataagacagtgtttt

SEQ ID NO: 88233 - DNA, 80 bp, synthetic construct
  source 1..80: mol_type = other DNA
aacatgctcaacgtttgagggagtggatgtgtagagagcacaagaaagattcaacatgtggataattcaaaacctactca

SEQ ID NO: 88234 - DNA, 80 bp, synthetic construct
  source 1..80: mol_type = other DNA
ttctaaaaaaaaccctccaatttcacgtctctgtgacttaattcagaggctgctgggatattgtccattacacagagaaa

SEQ ID NO: 88235 - DNA, 80 bp, synthetic construct
  source 1..80: mol_type = other DNA
gaagatgtcacagtatttgtgtttcaagctataattaagcagagcaggtgctaaatgccagcacaaagtttcaacatgac

SEQ ID NO: 88236 - DNA, 80 bp, synthetic construct; identical to SEQ ID NO: 16052
  source 1..80: mol_type = other DNA

SEQ ID NO: 88237 - DNA, 80 bp, synthetic construct
  source 1..80: mol_type = other DNA
aggttgtacttgttccaatttcttgaagaaaaaaaaaaaaaagagcattcctgagagagcaatgccgaaatgaaggtaca

SEQ ID NO: 88238 - DNA, 80 bp, synthetic construct
  source 1..80: mol_type = other DNA
acattgagtgcttccaccttgacactcacaaaagatcatgggataaatggacctttgcagaattattttcttccctttca

SEQ ID NO: 88239 - DNA, 80 bp, synthetic construct; identical to SEQ ID NO: 16053
  source 1..80: mol_type = other DNA

SEQ ID NO: 88240 - DNA, 80 bp, synthetic construct
  source 1..80: mol_type = other DNA
taacacaaaaagagagactagtagtaatgatgtccctcctaatggaaggacacataccacttataaagtcttcttgaaaa

SEQ ID NO: 88241 - DNA, 80 bp, synthetic construct
  source 1..80: mol_type = other DNA
gccagtgctgttctacaaactagacgttactagtctatattgagataaggagtttaagctagaatctaaaccatctcact

SEQ ID NO: 88242 - DNA, 80 bp, synthetic construct
  source 1..80: mol_type = other DNA
agtttgtggactggcatcttaagaagcactggtgtagaggacaggaaccaatttcttcaatacataaattacaaggaaaa

SEQ ID NO: 88243 - DNA, 80 bp, synthetic construct
  source 1..80: mol_type = other DNA
atattagaaaattagtgttaatggtaaacagaataatgttattgtgtttatgtttcttaaagggcccttatcttttagga

SEQ ID NO: 88244 - DNA, 80 bp, synthetic construct; identical to SEQ ID NO: 16054
  source 1..80: mol_type = other DNA

SEQ ID NO: 88245 - DNA, 80 bp, synthetic construct
  source 1..80: mol_type = other DNA
acagtccaatcccaacatgtgtaccatgttaaatcagtggcaagaactaaccaaagtgttcctactaagtatccagctac

SEQ ID NO: 88246 - DNA, 80 bp, synthetic construct
  source 1..80: mol_type = other DNA
atgacaaacataaacccatcagttaacaaaagatgtgttttgggggaaggggtttttgtgtatcaggtccataaaaaggt

SEQ ID NO: 88247 - DNA, 80 bp, synthetic construct; identical to SEQ ID NO: 16055
  source 1..80: mol_type = other DNA

SEQ ID NO: 88248 - DNA, 80 bp, synthetic construct
  source 1..80: mol_type = other DNA
taaaaggaaaagtttattttatttgaggtttatttttttcccaggaagtcggtagagcacagaaaatacccggtatttgc

SEQ ID NO: 88249 - DNA, 80 bp, synthetic construct
  source 1..80: mol_type = other DNA
ggtgtgatttaccccacggggatgagagacattaagtaatttgaacattttcaatggcaaatagaaaagtaactattatc

SEQ ID NO: 88250 - DNA, 80 bp, synthetic construct
  source 1..80: mol_type = other DNA
gggtgcagcgtataggaactctacgaaagctatgcctaaattaagataatgtatgttttgttccactctcacggatgttc

SEQ ID NO: 88251 - DNA, 80 bp, synthetic construct; identical to SEQ ID NO: 16056
  source 1..80: mol_type = other DNA

SEQ ID NO: 88252 - DNA, 80 bp, synthetic construct
  source 1..80: mol_type = other DNA
gatgtgttgtgtttgcccatccagtatcccttccccttctctgctaaccaaactcttcgtttcctaagcccattccacat

SEQ ID NO: 88253 - DNA, 80 bp, synthetic construct
  source 1..80: mol_type = other DNA
tatgtgttgaaaggcagtgtggctaagaattgtaggtggtcatctgggctacccaattataaccaaatccttactccaac

SEQ ID NO: 88254 - DNA, 80 bp, synthetic construct
  source 1..80: mol_type = other DNA
aatgtgctaatcaggaaagaggcaaggcctatttgacagatctgccagttaaaaaatgcaaacttttttggaagagttga

SEQ ID NO: 88255 - DNA, 80 bp, synthetic construct
  source 1..80: mol_type = other DNA
cttttgaacattttaaaattcaggtttgcctcctgtttcttaatataatcatttctatgatgagaaagtggagactgtgg

SEQ ID NO: 88256 - DNA, 80 bp, synthetic construct; identical to SEQ ID NO: 16057
  source 1..80: mol_type = other DNA

SEQ ID NO: 88257 - DNA, 80 bp, synthetic construct
  source 1..80: mol_type = other DNA
ttccaaacctccctgaaagtgtggccaaaggttattagtgatcattgaaaatgactccttggtcctttaaaatatggtcc

SEQ ID NO: 88258 - DNA, 80 bp, synthetic construct
  source 1..80: mol_type = other DNA
cagattccagctaaaacaccgactatgtgaccctggggagcacagagctcacagggtggtaatgggatataaaatttgca

SEQ ID NO: 88259 - DNA, 80 bp, synthetic construct
  source 1..80: mol_type = other DNA
agatattccaaatggcagttctgcctagaatcattggaaaaaaagataataatatcaacaagcccaagacagggtgttca

SEQ ID NO: 88260 - DNA, 80 bp, synthetic construct; identical to SEQ ID NO: 16058
  source 1..80: mol_type = other DNA

SEQ ID NO: 88261 - DNA, 80 bp, synthetic construct
  source 1..80: mol_type = other DNA
tctttttccaaccacctgactgataccctcattgacaactacctccctcaaaaagtcccatcccacccaatcctttctaa

SEQ ID NO: 88262 - DNA, 80 bp, synthetic construct
  source 1..80: mol_type = other DNA
gaaagaaaacacccatgcccacaggattgataaggtttggttatttcaagtatagcagagaacttgcagataccagtcca

SEQ ID NO: 88263 - DNA, 80 bp, synthetic construct; identical to SEQ ID NO: 16059
  source 1..80: mol_type = other DNA

SEQ ID NO: 88264 - DNA, 80 bp, synthetic construct
  source 1..80: mol_type = other DNA
catcaaaggcccaaacctattagggtctgattacacaatcttacaaattagcactgaatgaacaggggaaatgatacaca

SEQ ID NO: 88265 - DNA, 80 bp, synthetic construct
  source 1..80: mol_type = other DNA
cgaatcttttctggcatccaagtgtctttcttttatgtcctgactctcctccataagctctctgtcccctaaaagaggct

SEQ ID NO: 88266 - DNA, 80 bp, synthetic construct
  source 1..80: mol_type = other DNA
caggctttctccttccttcccctaacaaaaaccttaaccctgttttgctttttgaacaccccaatgttcccaggtaaaaa

SEQ ID NO: 88267 - DNA, 80 bp, synthetic construct
  source 1..80: mol_type = other DNA
aacaatgatgatgaagaaaaagaagaaaaggaaaagatggcaacaaagaaggagaaacagaaccggaaaaggaagaagaa

SEQ ID NO: 88268 - DNA, 80 bp, synthetic construct; identical to SEQ ID NO: 16060
  source 1..80: mol_type = other DNA

SEQ ID NO: 88269 - DNA, 80 bp, synthetic construct
  source 1..80: mol_type = other DNA
gggatttttgctttctctcttccgctctgagggagctgaataaatagagtcagtgataacttcaaccaaaaaaaagtcac

SEQ ID NO: 88270 - DNA, 80 bp, synthetic construct
  source 1..80: mol_type = other DNA
caacaccaattctattagcaactgcaacctatttttacttattagtataacccctaatttaaaaaattgaggtggattac

SEQ ID NO: 88271 - DNA, 80 bp, synthetic construct; identical to SEQ ID NO: 16061
  source 1..80: mol_type = other DNA

SEQ ID NO: 88272 - DNA, 80 bp, synthetic construct
  source 1..80: mol_type = other DNA
tgattagccttctcaaagatctattgcctcacagtggtagctggtctccaaagatggctccactttctcccctcccagca

SEQ ID NO: 88273 - DNA, 80 bp, synthetic construct
  source 1..80: mol_type = other DNA
aactgccatggaaaaagtctggctatgctgctctaaagaccatgtagagaggccacgtatagaaaggggacaacctgaga

SEQ ID NO: 88274 - DNA, 80 bp, synthetic construct
  source 1..80: mol_type = other DNA
caacagacactcactctgagcaaggcctagtcgctgcatctggggctcagtctccccatttgaaaaaaaacacattcaat

SEQ ID NO: 88275 - DNA, 80 bp, synthetic construct; identical to SEQ ID NO: 16062
  source 1..80: mol_type = other DNA

SEQ ID NO: 88276 - DNA, 80 bp, synthetic construct
  source 1..80: mol_type = other DNA
tttgaatatatatggaggtgggagcattctaggtcctcctcgcctttgtctttcacaaccaactagtcaagtactgtctg

SEQ ID NO: 88277 - DNA, 80 bp, synthetic construct
  source 1..80: mol_type = other DNA
tctacccagtggcaaagatctgatcatgttcctatcttagaatcctttactagctccccgtccttgcctttcacaacatc

SEQ ID NO: 88278 - DNA, 80 bp, synthetic construct
  source 1..80: mol_type = other DNA
ccaaccctgcccaactgcagtcaatgtcctaagacctcagacacttcatatccctttcccttgatgtatttttcactcat

SEQ ID NO: 88279 - DNA, 80 bp, synthetic construct; identical to SEQ ID NO: 16063
  source 1..80: mol_type = other DNA

SEQ ID NO: 88280 - DNA, 80 bp, synthetic construct
  source 1..80: mol_type = other DNA
caaaaaaagtgagcttggtcttcagtttgttgaccactgataaactttttttttttttttaagacaggatcttgttctgt

SEQ ID NO: 88281 - DNA, 80 bp, synthetic construct
  source 1..80: mol_type = other DNA
caatcccattcccacaatgatgcttcccttggcttgtaacagcatctgccatcaataaatgttgagtctttccacatagc

SEQ ID NO: 88282 - DNA, 80 bp, synthetic construct
  source 1..80: mol_type = other DNA
tgtccctggagtaattactgaaactctgcatcccttgtttcttcatttgttaaatgaataaataagcttaattttcctca

SEQ ID NO: 88283 - DNA, 80 bp, synthetic construct
  source 1..80: mol_type = other DNA
attaaataactcatatgactggtcgtgatttaagacacataccaatttccactggaaagagaaatacttcttgcaaccct

SEQ ID NO: 88284 - DNA, 80 bp, synthetic construct; identical to SEQ ID NO: 16064
  source 1..80: mol_type = other DNA

SEQ ID NO: 88285 - DNA, 80 bp, synthetic construct
  source 1..80: mol_type = other DNA
aagttaacgttaagttttgtctttagaacttaacctctgcatacctcggctctcacatctgtgaagggaagcttatgaaa

SEQ ID NO: 88286 - DNA, 80 bp, synthetic construct
  source 1..80: mol_type = other DNA
ccatggctgcaattgttattatgtatttgtttagacttaataccagaccccctttccagggacgctgtccttctgtgcac

SEQ ID NO: 88287 - DNA, 80 bp, synthetic construct
  source 1..80: mol_type = other DNA
ttgtcttcaatgatttaactatctaatgagaaaatcgacttgaacaatcatgaaacgctaaactatcatgtgcctgagtt

SEQ ID NO: 88288 - DNA, 80 bp, synthetic construct; identical to SEQ ID NO: 16065
  source 1..80: mol_type = other DNA

SEQ ID NO: 88289 - DNA, 80 bp, synthetic construct
  source 1..80: mol_type = other DNA
actccatttccatcagctctcatctcatttcaccataggctgatgtatgttttaattaatttgtattaccaacttacaca

SEQ ID NO: 88290 - DNA, 80 bp, synthetic construct
  source 1..80: mol_type = other DNA
taatcttttcaataaatgtaaaccatacccctgcaggagtctttccccatatttaattattagcccatctgacttcaggt

SEQ ID NO: 88291 - DNA, 80 bp, synthetic construct; identical to SEQ ID NO: 16066
  source 1..80: mol_type = other DNA

SEQ ID NO: 88292 - DNA, 80 bp, synthetic construct
  source 1..80: mol_type = other DNA
cccctttgacaggaaacagtaatatttccttacttgggagctaaagcaataaggcaatcataaataaatggtgcataact

SEQ ID NO: 88293 - DNA, 80 bp, synthetic construct
  source 1..80: mol_type = other DNA
caagcaatgcccaaggaaaagaaaactactatacatttattatttcacgtggttttgaaacttgaacaaatctcatttga

SEQ ID NO: 88294 - DNA, 80 bp, synthetic construct
  source 1..80: mol_type = other DNA
caacttttgctgcccagtggggagagaataaaaaaaaaaaagaacacctgcaacagggggggaggagaggaagacaagct

SEQ ID NO: 88295 - DNA, 80 bp, synthetic construct; identical to SEQ ID NO: 16067
  source 1..80: mol_type = other DNA

SEQ ID NO: 88296 - DNA, 80 bp, synthetic construct
  source 1..80: mol_type = other DNA
aagcaataactggaaaaatgtagtacataactgctttttctgatgatttatacagcagggcaccgttaaaggatttattc

SEQ ID NO: 88297 - DNA, 80 bp, synthetic construct
  source 1..80: mol_type = other DNA
caggtatgcagaagaaagttggtaatagcaaaagactcaatgtaatctaaagagccatcactagggaactgttccagtga

SEQ ID NO: 88298 - DNA, 80 bp, synthetic construct
  source 1..80: mol_type = other DNA
gccgggcttggtggcacccacctgtaatcccagctactctggaggctgaggcaggagaatcgcttgagccgggaaggtgg

SEQ ID NO: 88299 - DNA, 80 bp, synthetic construct; identical to SEQ ID NO: 16068
  source 1..80: mol_type = other DNA

SEQ ID NO: 88300 - DNA, 80 bp, synthetic construct
  source 1..80: mol_type = other DNA
ttataaaatcttataattaacatgagaattaggaacacacataattacaattctattaataccctgtttttaggaaggct

SEQ ID NO: 88301 - DNA, 80 bp, synthetic construct
  source 1..80: mol_type = other DNA
cttagtttcttttttcacattcccaagggaacacactagttggtgacagcccagagaaatgagacaaatgtctgaccagg

SEQ ID NO: 88302 - DNA, 80 bp, synthetic construct
  source 1..80: mol_type = other DNA
atgaaaatcagagcctcagtctacttattgaacttgccatgtgccttgcacacagggcaataaacatctgctgtctgatc

SEQ ID NO: 88303 - DNA, 80 bp, synthetic construct
  source 1..80: mol_type = other DNA
actccagactaggagtcaaaaactggtctggtgagtttactttttcttctcatatctgggccatacaaacacaaatttta

SEQ ID NO: 88304 - DNA, 80 bp, synthetic construct; identical to SEQ ID NO: 16069
  source 1..80: mol_type = other DNA

SEQ ID NO: 88305 - DNA, 80 bp, synthetic construct
  source 1..80: mol_type = other DNA
aatttttccggctgaaacatctgtaacagcggcatgggaagccagtgaaatggtcagttgcatgtacacaacacaaacac

SEQ ID NO: 88306 - DNA, 80 bp, synthetic construct
  source 1..80: mol_type = other DNA
ccgtaattttaataagcataatttacggaagagtcaactactgtgtgatttctcctctgactgtcatgggaatcccttcc

SEQ ID NO: 88307 - DNA, 80 bp, synthetic construct; identical to SEQ ID NO: 16070
  source 1..80: mol_type = other DNA

SEQ ID NO: 88308 - DNA, 80 bp, synthetic construct; identical to SEQ ID NO: 16071
  source 1..80: mol_type = other DNA

SEQ ID NO: 88309 - DNA, 80 bp, synthetic construct
  source 1..80: mol_type = other DNA
caacagcggctactcagacgccggcctcggcctgggcgatgagacagacgagatgccgtccacggagaaggacctggcgg

SEQ ID NO: 88310 - DNA, 80 bp, synthetic construct
  source 1..80: mol_type = other DNA
ccgcaagttccatccgcgccccaacttccgccaaatgaagctggagaacgtgtccgtggccctcgagttcctcgagcgcg

SEQ ID NO: 88311 - DNA, 80 bp, synthetic construct; identical to SEQ ID NO: 16072
  source 1..80: mol_type = other DNA

SEQ ID NO: 88312 - DNA, 80 bp, synthetic construct
  source 1..80: mol_type = other DNA
gggggcatctccccgcccccaacaaaacaagtggcttcccagcttcacagcccctccgcgggctgggagagggctgaaga

SEQ ID NO: 88313 - DNA, 80 bp, synthetic construct
  source 1..80: mol_type = other DNA
gggagacttaacccctgtctgtcctcctcctgcttcagcctgcggtggagggggcttccgcaagtccaggccctgcccca

SEQ ID NO: 88314 - DNA, 80 bp, synthetic construct
  source 1..80: mol_type = other DNA
cgccaagggtgggcttggagtggcaggaggctgtcctgccctcagagtcctgcagtcatccctgaggctgggggcctggg

SEQ ID NO: 88315 - DNA, 80 bp, synthetic construct; identical to SEQ ID NO: 16073
  source 1..80: mol_type = other DNA

SEQ ID NO: 88316 - DNA, 80 bp, synthetic construct
  source 1..80: mol_type = other DNA
ggagggagcctggagtgtgtagtgagactgagggctacgtgatggaggctgaggggtcagagaggagtcagtcctgggcc

SEQ ID NO: 88317 - DNA, 80 bp, synthetic construct
  source 1..80: mol_type = other DNA
tcctgagcacacctctcccctcccccgtggcggtgcctggctccagcccccttggctcagcagaggaggggctggctcag

SEQ ID NO: 88318 - DNA, 80 bp, synthetic construct
  source 1..80: mol_type = other DNA
gaggggaggggacaccggcagcgaccagctggggcgccccaccatgaggaggttcaaaggggctgcccacgaggcagggg

SEQ ID NO: 88319 - DNA, 80 bp, synthetic construct; identical to SEQ ID NO: 16074
  source 1..80: mol_type = other DNA

SEQ ID NO: 88320 - DNA, 80 bp, synthetic construct
  source 1..80: mol_type = other DNA
tccctaggcccagccctctcctccccctccatttgaggcctggggtggcctcgggaactagctgtctggctcctcccact

SEQ ID NO: 88321 - DNA, 80 bp, synthetic construct
  source 1..80: mol_type = other DNA
ctggaccacttgctgtctggcccagggccagttgctggggagaaacttccctctccagcaaatatgaatgaccaccctcc

SEQ ID NO: 88322 - DNA, 80 bp, synthetic construct; identical to SEQ ID NO: 16075
  source 1..80: mol_type = other DNA

SEQ ID NO: 88323 - DNA, 80 bp, synthetic construct
  source 1..80: mol_type = other DNA
gatgccctggatttcccaggctctcggtctcctaacactttccccaagacctggggaagggtggaggggagaagatgtgt

SEQ ID NO: 88324 - DNA, 80 bp, synthetic construct
  source 1..80: mol_type = other DNA
cttcattgccctttacaagtaagctgaattccaaagatctatctacatgctaggccaccccaggcttctggatatttctt

SEQ ID NO: 88325 - DNA, 80 bp, synthetic construct
  source 1..80: mol_type = other DNA
tctgattgttaagggggatctaggcgccccccccccccaaatcttgaggaaccagttctggctcaaaggattcctcaaag

SEQ ID NO: 88326 - DNA, 80 bp, synthetic construct
  source 1..80: mol_type = other DNA
cattcggggtagagtgtgagtggaaacttgtcctaccccactccaatttcagttcttaaaatattcattcaaccaatatt

SEQ ID NO: 88327 - DNA, 80 bp, synthetic construct
  source 1..80: mol_type = other DNA
actctaggaaatacaaagtaatctatcgtgacagagagcagatcagttgttgcttgggatggagggacaaggacggcagg

SEQ ID NO: 88328 - DNA, 80 bp, synthetic construct; identical to SEQ ID NO: 16076
  source 1..80: mol_type = other DNA

SEQ ID NO: 88329 - DNA, 80 bp, synthetic construct
  source 1..80: mol_type = other DNA
atctgagtggggcctcgcaggagggagagggtcaggtaggcagagactagaggcctgaccccagagctctggcccgagga

SEQ ID NO: 88330 - DNA, 80 bp, synthetic construct
  source 1..80: mol_type = other DNA
atgcccatgtgggaggatgaagatgatgaggatgcccgcaaacagacgcccaagcagcggctgcttggctggatccagaa

SEQ ID NO: 88331 - DNA, 80 bp, synthetic construct
  source 1..80: mol_type = other DNA
aggcgtgtggttgtcagaatgcacaccctggggcctgggggccaggatcccctgcagggtttgtcctcctccagctgtgg

SEQ ID NO: 88332 - DNA, 80 bp, synthetic construct; identical to SEQ ID NO: 16077
  source 1..80: mol_type = other DNA

SEQ ID NO: 88333 - DNA, 80 bp, synthetic construct
  source 1..80: mol_type = other DNA
gccccttctccgtgtaggtcctggcctggtcaagtggggacagctcaggggccatgaaaaaagctgaggcatcactggct

SEQ ID NO: 88334 - DNA, 80 bp, synthetic construct
  source 1..80: mol_type = other DNA
cagctgctgagccatggcccataactggtgtggctgccagcagtgagctcagctgttccagccagtcatggattccagcc

SEQ ID NO: 88335 - DNA, 80 bp, synthetic construct; identical to SEQ ID NO: 16078
  source 1..80: mol_type = other DNA

SEQ ID NO: 88336 - DNA, 80 bp, synthetic construct
  source 1..80: mol_type = other DNA
ctgagaaagctgaatgaggcaagagatagcgagagggggtaccctcccagggtttggggttcaaggtctgagctggggcc

SEQ ID NO: 88337 - DNA, 80 bp, synthetic construct
  source 1..80: mol_type = other DNA
ctgatggggtcagcaggaacctggctggtcaaggcctagagctggtgggaaggggtgtaaagccacagcctctgagggtg

SEQ ID NO: 88338 - DNA, 80 bp, synthetic construct
  source 1..80: mol_type = other DNA
ggggtgccccaggtacatgcgcagatggggcaggggggaaagggggcaggggcagaggttgggtctgtaagtttacctgg

SEQ ID NO: 88339 - DNA, 80 bp, synthetic construct; identical to SEQ ID NO: 16079
  source 1..80: mol_type = other DNA

SEQ ID NO: 88340 - DNA, 80 bp, synthetic construct
  source 1..80: mol_type = other DNA
atcgaggaccctgaaggccacaccgaggaggtatgcagaggccgctggggacagagggattcacttgggattggaaccag

SEQ ID NO: 88341 - DNA, 80 bp, synthetic construct
  source 1..80: mol_type = other DNA
aatctttttccttcctaataggctaaggtggttcccaacaatgacaaggatcgcacctatgctgtctcctatgtgcccaa

SEQ ID NO: 88342 - DNA, 80 bp, synthetic construct
  source 1..80: mol_type = other DNA
cctctgccccctctcaggactgctctcccctagaagctaacctttgacctctgacccctaggtgaccgtgctctttgctg

SEQ ID NO: 88343 - DNA, 80 bp, synthetic construct
  source 1..80: mol_type = other DNA
ggggtgcaggtggaaagcccctgaccatgtggggctgtgtgggggtggggggaggctgggacagggatgccagccagagg

SEQ ID NO: 88344 - DNA, 80 bp, synthetic construct; identical to SEQ ID NO: 16080
  source 1..80: mol_type = other DNA

SEQ ID NO: 88345 - DNA, 80 bp, synthetic construct
  source 1..80: mol_type = other DNA
ccaaggtggctggagttcctaagagcacagctgggaggccacagtgaagggtcccagaacatgtgccaccctgggagggc

SEQ ID NO: 88346 - DNA, 80 bp, synthetic construct
  source 1..80: mol_type = other DNA
aggcggggccaggcatggccgcagctgactggcctcacctgtgctgtgtggcatggcccgggccgtgtggaatcgccccc

SEQ ID NO: 88347 - DNA, 80 bp, synthetic construct
  source 1..80: mol_type = other DNA
ctatggtcatggtagtcctggaatatgtgtcgtgtcctgtttcgtagcacctgtgggtcccatgccatttttctggattc

SEQ ID NO: 88348 - DNA, 80 bp, synthetic construct; identical to SEQ ID NO: 16081
  source 1..80: mol_type = other DNA

SEQ ID NO: 88349 - DNA, 80 bp, synthetic construct
  source 1..80: mol_type = other DNA
tgtagccagctccagcccggcagccccggttgtgctggggacacaaagggctccagagcagggccgtgggccactgcctg

SEQ ID NO: 88350 - DNA, 80 bp, synthetic construct
  source 1..80: mol_type = other DNA
aagaggtggctgacttcaaggtgtttaccaagggtgccggcagcggggagctcaaggtcacggtcaaggggccaagtgag

SEQ ID NO: 88351 - DNA, 80 bp, synthetic construct; identical to SEQ ID NO: 16082
  source 1..80: mol_type = other DNA

SEQ ID NO: 88352 - DNA, 80 bp, synthetic construct
  source 1..80: mol_type = other DNA
tgaaggtgcgggaggctggggatggtgtgttcgagtgcgagtactacccggtggtgcctgggaagtatgtggtgaccatc

SEQ ID NO: 88353 - DNA, 80 bp, synthetic construct
  source 1..80: mol_type = other DNA
catggacaccagctccctctctgcccagcccctttgaggtacaggtgagcccagaggcaggagtgcaaaaggtccgggcc

SEQ ID NO: 88354 - DNA, 80 bp, synthetic construct
  source 1..80: mol_type = other DNA
tgcgcatgctggggagcgctggggtgagcagggagataggacatgagggcagctagaggggagctgggggacggaagggt

SEQ ID NO: 88355 - DNA, 80 bp, synthetic construct
  source 1..80: mol_type = other DNA
tgtgacgatgaggacatccgagactcacccttcattgcccacatcctgcccgccccacctgactgcttcccagataaggt

SEQ ID NO: 88356 - DNA, 80 bp, synthetic construct; identical to SEQ ID NO: 16083
  source 1..80: mol_type = other DNA

SEQ ID NO: 88357 - DNA, 80 bp, synthetic construct
  source 1..80: mol_type = other DNA
caggactgatactcatgggcccatcagtaccatggaaaattttaaattttgtgttttcttaacgatgataacctaaaaac

SEQ ID NO: 88358 - DNA, 80 bp, synthetic construct
  source 1..80: mol_type = other DNA
gaaaggctcatgattcagttttaggaacataaatttagcccacactcttcctgtccaacacatttcagagttgaggaaac

SEQ ID NO: 88359 - DNA, 80 bp, synthetic construct
  source 1..80: mol_type = other DNA
tgcggccagcagagggcgctctgcagaggccacagctatgaactttgcttgggtgatgcccacaggacgccgacggctgt

SEQ ID NO: 88360 - DNA, 80 bp, synthetic construct
  source 1..80: mol_type = other DNA
accaggggtccctgagggagggcggaaccctcgctggagtccctgttgtccctgggctcaggctgggactgaggcttggg

SEQ ID NO: 88361 - DNA, 80 bp, synthetic construct; identical to SEQ ID NO: 16084
  source 1..80: mol_type = other DNA

SEQ ID NO: 88362 - DNA, 80 bp, synthetic construct
  source 1..80: mol_type = other DNA
ggctgacattgacttcgacatcatcaagaatgacaacgacaccttcaccgtcaagtacacgccaccaggggcgggccgct

SEQ ID NO: 88363 - DNA, 80 bp, synthetic construct
  source 1..80: mol_type = other DNA
ttccgcagacatggtggagccctacctgtgtgaggcagggtgcctcagaggaagcaaagggggcccttttggaggctgcc

SEQ ID NO: 88364 - DNA, 80 bp, synthetic construct
  source 1..80: mol_type = other DNA
cttccacatcaaggtggacccatcccacgatgccagcaaagtcaaggccgagggccctgggctgaatcgcacaggtgagt

SEQ ID NO: 88365 - DNA, 80 bp, synthetic construct; identical to SEQ ID NO: 16085
  source 1..80: mol_type = other DNA

SEQ ID NO: 88366 - DNA, 80 bp, synthetic construct
  source 1..80: mol_type = other DNA
catattcaccaccaggatgttgtaggaccttgccttatatccagttctgacctaccattgtacccaacagggcaacatgg

SEQ ID NO: 88367 - DNA, 80 bp, synthetic construct
  source 1..80: mol_type = other DNA
ccggagtctcctcatggtgtcacttgccctccacgcagaggtggctgtgggacaggaacaagcattctctgtgaacacac

SEQ ID NO: 88368 - DNA, 80 bp, synthetic construct; identical to SEQ ID NO: 16086
  source 1..80: mol_type = other DNA

SEQ ID NO: 88369 - DNA, 80 bp, synthetic construct
  source 1..80: mol_type = other DNA
taactggggcaaattgcttcatctcgctgcctcaatgtcatcacctgggattgttataagcactcagtccacagtagcag

SEQ ID NO: 88370 - DNA, 80 bp, synthetic construct
  source 1..80: mol_type = other DNA
caagggggctggcacaggtggcctggggctgaccgtagagggcccctgcgaggccaagatcgagtgccaggacaatggtg

SEQ ID NO: 88371 - DNA, 80 bp, synthetic construct
  source 1..80: mol_type = other DNA
cggcaaggtcggtgaggcagccaccttcactgtggactgctcagaggcaggcgaggcggagctgaccattgagatcctgt

SEQ ID NO: 88372 - DNA, 80 bp, synthetic construct
  source 1..80: mol_type = other DNA
ggtcgataccagtggcgtcaaggtctcagggcctggtgttgagccacacggtgagtggacaggaggagccaagaaaggtc

SEQ ID NO: 88373 - DNA, 80 bp, synthetic construct; identical to SEQ ID NO: 16087
  source 1..80: mol_type = other DNA

SEQ ID NO: 88374 - DNA, 80 bp, synthetic construct
  source 1..80: mol_type = other DNA
aagacccaggcccacagcctggtgggtgactcaagtgaacagagaatgtcactacatggagaagggagtgaaggcagagg

SEQ ID NO: 88375 - DNA, 80 bp, synthetic construct
  source 1..80: mol_type = other DNA
ggaagaggagagggagaggagagggaaaggagggggagaggagagggagcatctgtgtgaaggctgcccccacccctgct

SEQ ID NO: 88376 - DNA, 80 bp, synthetic construct; identical to SEQ ID NO: 16088
  source 1..80: mol_type = other DNA

SEQ ID NO: 88377 - DNA, 80 bp, synthetic construct
  source 1..80: mol_type = other DNA
tgatgaggtcgctgtgcccaagagccccttccgagtgggcgtgaccgagggctgtgatcccacccgcgtccgagccttcg

SEQ ID NO: 88378 - DNA, 80 bp, synthetic construct
  source 1..80: mol_type = other DNA
tctcaggggtgaggcaggagcagaccccctccaggaccccagattggcccctgtagctcgtttctcctcagctgggtccc

SEQ ID NO: 88379 - DNA, 80 bp, synthetic construct
  source 1..80: mol_type = other DNA
tgcaaggacaacaaggatggtagctgcaccgtggagtacatccccttcactcctggagactatgacgtcaacatcacctt

SEQ ID NO: 88380 - DNA, 80 bp, synthetic construct
  source 1..80: mol_type = other DNA
ggccagagggaggacgtggaggaggcaggcaatgagggttgatgtgacagcccccctagtcaatcacaggaacacactct

SEQ ID NO: 88381 - DNA, 80 bp, synthetic construct; identical to SEQ ID NO: 16089
  source 1..80: mol_type = other DNA

SEQ ID NO: 88382 - DNA, 80 bp, synthetic construct
  source 1..80: mol_type = other DNA
catttattcttgtgtgtgttttcttagcaagttcctagccattttcccatgttggtctggcttccctgtgggcatttcaa

SEQ ID NO: 88383 - DNA, 80 bp, synthetic construct
  source 1..80: mol_type = other DNA
gtggtggaccctgggaaggtgaagtgctcagggccagggctgggggctggtgtcagggcccgggttcctcagaccttcac

SEQ ID NO: 88384 - DNA, 80 bp, synthetic construct; identical to SEQ ID NO: 16090
  source 1..80: mol_type = other DNA

SEQ ID NO: 88385 - DNA, 80 bp, synthetic construct
  source 1..80: mol_type = other DNA
cccgctcttccccggggctctctgctgtgaggctttcctgccccaggagcttttacggcaaacctagcgccttaggaaga

SEQ ID NO: 88386 - DNA, 80 bp, synthetic construct
  source 1..80: mol_type = other DNA
cacagtcctccctcctgcccatgtctatggggaggactctggctcaagatgagatcaccccccaccgccccgtccatgcc

SEQ ID NO: 88387 - DNA, 80 bp, synthetic construct
  source 1..80: mol_type = other DNA
cgggcgaggggttgctcactgtccagatcttggtgagtctctgtgcatcccaccccgcaggtcatgctccaggcacaggc

SEQ ID NO: 88388 - DNA, 80 bp, synthetic construct
  source 1..80: mol_type = other DNA
cgcccttccgcatccatgctctgcccactggggatgccagcaagtgcctcgtcacaggtgggtgcccacccgctgcccgt

SEQ ID NO: 88389 - DNA, 80 bp, synthetic construct; identical to SEQ ID NO: 16091
  source 1..80: mol_type = other DNA

SEQ ID NO: 88390 - DNA, 80 bp, synthetic construct
  source 1..80: mol_type = other DNA
ggaaggtgacatgcacggtgtccacgccggatggggcagagctcgatgtggatgtggttgagaaccatgacggtaccttt

SEQ ID NO: 88391 - DNA, 80 bp, synthetic construct
  source 1..80: mol_type = other DNA
gggatcccagataactgtccccaaggaatcccacttctctgagggctcctggggccagagtgctccaggatggagcctta

SEQ ID NO: 88392 - DNA, 80 bp, synthetic construct; identical to SEQ ID NO: 16092
  source 1..80: mol_type = other DNA

SEQ ID NO: 88393 - DNA, 80 bp, synthetic construct
  source 1..80: mol_type = other DNA
cccaccaggcgatgtcctcctcctcctccccttccttcatttcttctctctactcctctgcagccagggcggggacatgg

SEQ ID NO: 88394 - DNA, 80 bp, synthetic construct
  source 1..80: mol_type = other DNA
ctaccttgttctttcctcactctccagcttcagtcatagcatgggtcaaactcctgggccttccccagtcactgactgtt

SEQ ID NO: 88395 - DNA, 80 bp, synthetic construct
  source 1..80: mol_type = other DNA
accctcttccaggcccagtcctgtgtcttaatgatgaaaacaaaggcccagagagaggaagtgagctctacccagggtca

SEQ ID NO: 88396 - DNA, 80 bp, synthetic construct
  source 1..80: mol_type = other DNA
aaaccagggtctccacgtaactgtgtctgccctgcaggagaggtgcggatgccctcggggaagacggcacggcccaacat

SEQ ID NO: 88397 - DNA, 80 bp, synthetic construct; identical to SEQ ID NO: 16093
  source 1..80: mol_type = other DNA

SEQ ID NO: 88398 - DNA, 80 bp, synthetic construct
  source 1..80: mol_type = other DNA
ttctatgtggatgccatcaacagccgccatgtcagtgcctatgggccaggcctgagccatggcatggtcaacaagccagc

SEQ ID NO: 88399 - DNA, 80 bp, synthetic construct
  source 1..80: mol_type = other DNA
caaggcagagatcacctgtaaggacaacaaggatggcacctgcaccgtgtcctatctgccgactgcgcctggagactaca

SEQ ID NO: 88400 - DNA, 80 bp, synthetic construct; identical to SEQ ID NO: 16094
  source 1..80: mol_type = other DNA

SEQ ID NO: 88401 - DNA, 80 bp, synthetic construct
  source 1..80: mol_type = other DNA
agcagtcagccactccttgtgcctgaaaacacattgcctcatttagtctttgaagtcatttgttttgtttttgtttttga

SEQ ID NO: 88402 - DNA, 80 bp, synthetic construct
  source 1..80: mol_type = other DNA
agtagagacagggtttcaccgtgttagccaggatggtctcgatctcctgaccttgtgatccacctgcctcggcctcccaa

SEQ ID NO: 88403 - DNA, 80 bp, synthetic construct
  source 1..80: mol_type = other DNA
gtctagtgttttgttatcacaacatcatgtgactcagggttaaaatgcaggaggtttcctttagggatttagcccacaag

SEQ ID NO: 88404 - DNA, 80 bp, synthetic construct; identical to SEQ ID NO: 16095
  source 1..80: mol_type = other DNA

SEQ ID NO: 88405 - DNA, 80 bp, synthetic construct
  source 1..80: mol_type = other DNA
ctcacggggacctcaggggtgggggcccacaggatgctctgcctaacacccactttccacagggatctccttcaccccca

SEQ ID NO: 88406 - DNA, 80 bp, synthetic construct
  source 1..80: mol_type = other DNA
gcaaggggctttccgagggacacacattccaggtggcagagttcatcgtggacactcgcaatgcaggtacctcctgcccc

SEQ ID NO: 88407 - DNA, 80 bp, synthetic construct
  source 1..80: mol_type = other DNA
gttctctcccttttaagagaaagctcagctgtcctgagtttctgtccctcccttgctcactggaatccaagaggcttacc

SEQ ID NO: 88408 - DNA, 80 bp, synthetic construct; identical to SEQ ID NO: 16096
  source 1..80: mol_type = other DNA

SEQ ID NO: 88409 - DNA, 80 bp, synthetic construct
  source 1..80: mol_type = other DNA
tcctgacccaccctttgtccccacttcaggaagccccttcactgtgaaggtgaccggcgagggccgcatgaaggagagca

SEQ ID NO: 88410 - DNA, 80 bp, synthetic construct
  source 1..80: mol_type = other DNA
cctcacccctcgcttccctccctcaccctggctcccttgaccacacaggaaactggttccagatggtgtctgcccaggag

SEQ ID NO: 88411 - DNA, 80 bp, synthetic construct
  source 1..80: mol_type = other DNA
tgggccgggagcgcctgggatccttcggcagcatcacccggcagcaggagggtgagcaccgcacactgggccggccgggt

SEQ ID NO: 88412 - DNA, 80 bp, synthetic construct; identical to SEQ ID NO: 16097
  source 1..80: mol_type = other DNA

SEQ ID NO: 88413 - DNA, 80 bp, synthetic construct
  source 1..80: mol_type = other DNA
ggcacagggctggagcgaggtgtggccggcgtgccaggtaaggggcaggtggccaggagtggggatgaagtcagggcagc

SEQ ID NO: 88414 - DNA, 80 bp, synthetic construct
  source 1..80: mol_type = other DNA
gcgtctcctatgtcgtccaggaaccaggtgggcgtccacactggcagtggggctgggcctgcctgaccttccagactggg

SEQ ID NO: 88415 - DNA, 80 bp, synthetic construct
  source 1..80: mol_type = other DNA
aggccagggtggggaggctcccgccctgccaacctccatcccggaacctgtgctgactggtctctctccccaggtgacta

SEQ ID NO: 88416 - DNA, 80 bp, synthetic construct
  source 1..80: mol_type = other DNA
ggagttgaggacagcaggtccatggggccagggatttagcagtgaccttggaagggccagttaggagtcccttctcataa

SEQ ID NO: 88417 - DNA, 80 bp, synthetic construct; identical to SEQ ID NO: 16098
  source 1..80: mol_type = other DNA

SEQ ID NO: 88418 - DNA, 80 bp, synthetic construct
  source 1..80: mol_type = other DNA
tgctttctcttgctgctgacttctagagatgtggtgtgttcctttcattctgtcacagcggacatgtgcaaggaaggctt

SEQ ID NO: 88419 - DNA, 80 bp, synthetic construct
  source 1..80: mol_type = other DNA
gagtccttgtgcatctcctcctcccactcctgaactgggctccccgatgcaggctccaatccctcccccagagcccttct

SEQ ID NO: 88420 - DNA, 80 bp, synthetic construct; identical to SEQ ID NO: 16099
  source 1..80: mol_type = other DNA

SEQ ID NO: 88421 - DNA, 80 bp, synthetic construct
  source 1..80: mol_type = other DNA
aggagtctgagcatcctccgtggcctttgcaggagacggggctcaaggtgaaccagccagcgtcctttgccgtgcagctg

SEQ ID NO: 88422 - DNA, 80 bp, synthetic construct
  source 1..80: mol_type = other DNA
accaaccctttatccacagacaagcacaccatccgcttcatcccccacgagaatggcgtccactccatcgatgtcaagtt

SEQ ID NO: 88423 - DNA, 80 bp, synthetic construct
  source 1..80: mol_type = other DNA
tggccactagtctggtgctgctttgctccagaggtaggggccctgcttcctaagccaggagtccccacagaggctgtcca

SEQ ID NO: 88424 - DNA, 80 bp, synthetic construct
  source 1..80: mol_type = other DNA
ggactgtcgggagtgtcctgagggccatgtggtcacttatactcccatggcccctggcaactacctcattgccatcaagt

SEQ ID NO: 88425 - DNA, 80 bp, synthetic construct; identical to SEQ ID NO: 16100
  source 1..80: mol_type = other DNA

SEQ ID NO: 88426 - DNA, 80 bp, synthetic construct
  source 1..80: mol_type = other DNA
gatgagttgggtgggtgttcctttgtaaagtggctcttaccctgtgagttagcctgagttcccagacaaagcctgcaagg

SEQ ID NO: 88427 - DNA, 80 bp, synthetic construct
  source 1..80: mol_type = other DNA
gcccttctgactaggtttgtgccccctccacccacccctcaggtccgaggctgtccggaggccacagccttcacgaaaca

SEQ ID NO: 88428 - DNA, 80 bp, synthetic construct; identical to SEQ ID NO: 16101
  source 1..80: mol_type = other DNA

SEQ ID NO: 88429 - DNA, 80 bp, synthetic construct
  source 1..80: mol_type = other DNA
aaaggggactacatcctcattgtcaagtggggtgacgaaagtgtccctggaagccccttcaaagtcaaggtcccttgaat

SEQ ID NO: 88430 - DNA, 80 bp, synthetic construct
  source 1..80: mol_type = other DNA
ccgcgccccaggggttggaggaccttgtctgtgtcaggacagtgtccctccctgggaatgtgacatgagggccgactggg

SEQ ID NO: 88431 - DNA, 80 bp, synthetic construct
  source 1..80: mol_type = other DNA
cctgaccccgaggacttggtctggtctctctggtggctacaaccccagagttttaaggacttggaaaggaaagcacaatc

SEQ ID NO: 88432 - DNA, 80 bp, synthetic construct; identical to SEQ ID NO: 16102
  source 1..80: mol_type = other DNA

SEQ ID NO: 88433 - DNA, 80 bp, synthetic construct; identical to SEQ ID NO: 16103
  source 1..80: mol_type = other DNA

SEQ ID NO: 88434 - DNA, 80 bp, synthetic construct
  source 1..80: mol_type = other DNA
cccggccacctctaggttctcctcgtccgcccgttgttcagcgagggaggctctgcgcgtgccgcagctgacggggaaac

SEQ ID NO: 88435 - DNA, 80 bp, synthetic construct
  source 1..80: mol_type = other DNA
tctgagttcagcttagagatgaacggggagccgccctcctgtgctgggcttggggctggaggctgcatcttcccgtttct

SEQ ID NO: 88436 - DNA, 80 bp, synthetic construct; identical to SEQ ID NO: 16104
  source 1..80: mol_type = other DNA

SEQ ID NO: 88437 - DNA, 80 bp, synthetic construct
  source 1..80: mol_type = other DNA
ctggagattgagtgaatcaccagtggcttagtcaaccatgcctgcacaatggaaccccgtaagaaaccacagggatcaga

SEQ ID NO: 88438 - DNA, 80 bp, synthetic construct
  source 1..80: mol_type = other DNA
cactttcctgagttctgtgaccctgaagagggagtcctgggaacctctgaatttataactagttgatcgaaagtacaagt

SEQ ID NO: 88439 - DNA, 80 bp, synthetic construct
  source 1..80: mol_type = other DNA
gaaaaaccctacacatttaatgtcagaagtgtgggtaaaatgtttcaccctccagcccagagagccctaatttaccagtg

SEQ ID NO: 88440 - DNA, 80 bp, synthetic construct; identical to SEQ ID NO: 16105
  source 1..80: mol_type = other DNA

SEQ ID NO: 88441 - DNA, 80 bp, synthetic construct
  source 1..80: mol_type = other DNA
gagccaggctaatagaatgtttgccataaaatattaatgtacagagaagcgaaacaaaggtcgttggtacttgttaacct

SEQ ID NO: 88442 - DNA, 80 bp, synthetic construct
  source 1..80: mol_type = other DNA
agaggttaagtcctttctctcttgtggctttgccacccctggagtgtcaccctcagctgcggtgcccaggattccccact

SEQ ID NO: 88443 - DNA, 80 bp, synthetic construct
  source 1..80: mol_type = other DNA
gaaatcccagcacttcggaaggccaaggggggtggatcacttgagctcaggagttcgagaccagcctgggtaacatggca

SEQ ID NO: 88444 - DNA, 80 bp, synthetic construct; identical to SEQ ID NO: 16106
  source 1..80: mol_type = other DNA

SEQ ID NO: 88445 - DNA, 80 bp, synthetic construct
  source 1..80: mol_type = other DNA
atgtctcagagctgctttgagagccccgtgagtgccgcccctcccgcctccctgctgagcccgctttcttctcccgcagg

SEQ ID NO: 88446 - DNA, 80 bp, synthetic construct
  source 1..80: mol_type = other DNA
ggctcctccccagtcctggaggagactcacccagctcaccagcagggagccagcagaccagggccccgggatgcccaggc

SEQ ID NO: 88447 - DNA, 80 bp, synthetic construct
  source 1..80: mol_type = other DNA
cagccctggtgcttcttcccacccagctaccccagctacaagctggagaacctgagctcctctgaaatgggctacacggc

SEQ ID NO: 88448 - DNA, 80 bp, synthetic construct
  source 1..80: mol_type = other DNA
cgcacctcacaagggtggggtgcatgttgcaccactgtgtgctgggcccttgctgggagcggaggtgtgagcagacaatg

SEQ ID NO: 88449 - DNA, 80 bp, synthetic construct; identical to SEQ ID NO: 16107
  source 1..80: mol_type = other DNA

SEQ ID NO: 88450 - DNA, 80 bp, synthetic construct
  source 1..80: mol_type = other DNA
cgggttgttctctggagagtaaggtggctgtggggaacatcaataaacccccatctcttctagatcaaagatccagctaa

SEQ ID NO: 88451 - DNA, 80 bp, synthetic construct
  source 1..80: mol_type = other DNA
tgagttctgggctctgtgccagcatgatggggagggcgacgcgcatttctcacacggcagggagggccacacgcgtttgt

SEQ ID NO: 88452 - DNA, 80 bp, synthetic construct; identical to SEQ ID NO: 16108
  source 1..80: mol_type = other DNA

SEQ ID NO: 88453 - DNA, 80 bp, synthetic construct
  source 1..80: mol_type = other DNA
gcagagagcacgctagaagccagctgtgcagacacggggcagggaggtcccctctagaagccagctgtgcagacgcaggg

SEQ ID NO: 88454 - DNA, 80 bp, synthetic construct
  source 1..80: mol_type = other DNA
tgacctctgagtagagagacccaagagaagtttctcaaagcatcttatcaagctaggtatggtggttcatgtctgcaatt

SEQ ID NO: 88455 - DNA, 80 bp, synthetic construct
  source 1..80: mol_type = other DNA
gcaagaggatcccttgagcccaggggttcgaggttgcagtgaaccatgattttgccactgcacttcagccttgctgaaga

SEQ ID NO: 88456 - DNA, 80 bp, synthetic construct; identical to SEQ ID NO: 16109
  source 1..80: mol_type = other DNA

SEQ ID NO: 88457 - DNA, 80 bp, synthetic construct
  source 1..80: mol_type = other DNA
tcaggggtggtgtgggcccagccaggcggtgcgcctcttctgatatgccctgagagttgatcacgctggtgccagggtgc

SEQ ID NO: 88458 - DNA, 80 bp, synthetic construct
  source 1..80: mol_type = other DNA
tggctggcctctgtcccgcaggctgaacacgacggtggcgcccctgttctttgcggaccagttccttcagctgtccacct

SEQ ID NO: 88459 - DNA, 80 bp, synthetic construct
  source 1..80: mol_type = other DNA
caggtgctgaagcgccgtctcctgcatgtcccagcccggtgcgaacctctacgggtctcaccctttctacctggcgctgg

SEQ ID NO: 88460 - DNA, 80 bp, synthetic construct; identical to SEQ ID NO: 16110
  source 1..80: mol_type = other DNA

SEQ ID NO: 88461 - DNA, 80 bp, synthetic construct
  source 1..80: mol_type = other DNA
gtggggtgcagagccctccaagtgaagaatctgtcccccaaccccagagctgcttcccttccagatgtggtcctgcagcc

SEQ ID NO: 88462 - DNA, 80 bp, synthetic construct
  source 1..80: mol_type = other DNA
tccctccctcatgaagtcggcgttggcctgcaggatacccgttcatgccgccatactggggcctgggcttccacctgtgc

SEQ ID NO: 88463 - DNA, 80 bp, synthetic construct
  source 1..80: mol_type = other DNA
ggacgtccagtggaacgacctggactacatggactcccggagggacttcacgttcaacaaggatggcttccgggacttcc

SEQ ID NO: 88464 - DNA, 80 bp, synthetic construct; identical to SEQ ID NO: 16111
  source 1..80: mol_type = other DNA

SEQ ID NO: 88465 - DNA, 80 bp, synthetic construct
  source 1..80: mol_type = other DNA
ggaggctccgtgtgccttctggccgtgcctctccttctggccggctctgaatccctggaaaggacggcgtgagtgagggc

SEQ ID NO: 88466 - DNA, 80 bp, synthetic construct
  source 1..80: mol_type = other DNA
ccgagtctggtgtccggcacgatggccagaggaggaggtgggaggcagggcgagctgaaaagatccaacagttcctgccc

SEQ ID NO: 88467 - DNA, 80 bp, synthetic construct
  source 1..80: mol_type = other DNA
aagaaaagtgattactgtagaacacttgggaaactctagaggtttaaagaaaaggtaaaggtaaagcttccattccggcg

SEQ ID NO: 88468 - DNA, 80 bp, synthetic construct
  source 1..80: mol_type = other DNA
ccgtggctggcgccagggctctgggccaccctcaccttgacaggtttccctcttcccaggatcctgccatcagcagctcg

SEQ ID NO: 88469 - DNA, 80 bp, synthetic construct; identical to SEQ ID NO: 16112
  source 1..80: mol_type = other DNA

SEQ ID NO: 88470 - DNA, 80 bp, synthetic construct
  source 1..80: mol_type = other DNA
cccgctgagggagcagctagggagggtctggtgcggatgtgaggctgcctggcagggcttgcacggggccgtctccgctg

SEQ ID NO: 88471 - DNA, 80 bp, synthetic construct
  source 1..80: mol_type = other DNA
ctctcagatttgcaaatgtgggcgtccactaagagtgaggctgcccctctgctcaggctgaggctcagtggggcttccat

SEQ ID NO: 88472 - DNA, 80 bp, synthetic construct
  source 1..80: mol_type = other DNA
gacggcatgtggattgtaagtgtggccccctcctgagcatccccaaggcctctggggactaccccaccctcctcactctg

SEQ ID NO: 88473 - DNA, 80 bp, synthetic construct; identical to SEQ ID NO: 16113
  source 1..80: mol_type = other DNA

SEQ ID NO: 88474 - DNA, 80 bp, synthetic construct
  source 1..80: mol_type = other DNA
cgataggcgcagggaccatgcagcggagacctacccacccgtggggagaggtcaggcccaactcgaatgcagcacgggca

SEQ ID NO: 88475 - DNA, 80 bp, synthetic construct
  source 1..80: mol_type = other DNA
cttctcgccaaactgtcttagcaggaatggcagaaactgggttttacaaggaagtacaaggatgggcctgggagaaggtt

SEQ ID NO: 88476 - DNA, 80 bp, synthetic construct
  source 1..80: mol_type = other DNA
cgcccagccctgtcttagaagcagtggagatgattacccaggttcccgggtaacgccagccccacagaggcgtggggagc

SEQ ID NO: 88477 - DNA, 80 bp, synthetic construct; identical to SEQ ID NO: 16114
  source 1..80: mol_type = other DNA

SEQ ID NO: 88478 - DNA, 80 bp, synthetic construct
  source 1..80: mol_type = other DNA
ccgagtgctctccccacccgctgcctgcaccccagcctgaagctggagcgctccttcccacttcatgcctggggcttgga

SEQ ID NO: 88479 - DNA, 80 bp, synthetic construct
  source 1..80: mol_type = other DNA
cctcctccccagcctctgcctcatcccagaaagctccttgctcccagctctgccctgctggtgacagggttcccgagtga

SEQ ID NO: 88480 - DNA, 80 bp, synthetic construct
  source 1..80: mol_type = other DNA
ggagcagctcgcctcctccgtgccaggtgagctcctaccaggaggggctgctcagcagagtagagccgggggcctctatg

SEQ ID NO: 88481 - DNA, 80 bp, synthetic construct; identical to SEQ ID NO: 16115
  source 1..80: mol_type = other DNA

SEQ ID NO: 88482 - DNA, 80 bp, synthetic construct
  source 1..80: mol_type = other DNA
gtgcagctctcccgaggcggggactccaggggaccgcggccccagcacccaagtgcttcctttgcccccgcctgccctgc

SEQ ID NO: 88483 - DNA, 80 bp, synthetic construct
  source 1..80: mol_type = other DNA
agtgagtgacctaggcaggggcggtggcccatgtgtgccctgggggaggggcacgtaactcccaggcagccctgtcctgc

SEQ ID NO: 88484 - DNA, 80 bp, synthetic construct; identical to SEQ ID NO: 16116
  source 1..80: mol_type = other DNA

SEQ ID NO: 88485 - DNA, 80 bp, synthetic construct
  source 1..80: mol_type = other DNA
ctggccaacatggtgaaacccatctctactaaaaatacaaaaattagccgtgcatggtggtgggcgcctgtagtccctgc

SEQ ID NO: 88486 - DNA, 80 bp, synthetic construct
  source 1..80: mol_type = other DNA
aaaaccaagctgtgaaagactccacaggaaaagataagtgaatgtgtatctctggggaaaggtttcatttagagaaaaaa

SEQ ID NO: 88487 - DNA, 80 bp, synthetic construct
  source 1..80: mol_type = other DNA
ataggtagagaactcatacgttggtaagaccaagactaagaaccaaattggaggaacactgtttgcaaaacaggagatac

SEQ ID NO: 88488 - DNA, 80 bp, synthetic construct; identical to SEQ ID NO: 16117
  source 1..80: mol_type = other DNA

SEQ ID NO: 88489 - DNA, 80 bp, synthetic construct
  source 1..80: mol_type = other DNA
acccatggttttatttcttcatgtggctttgacttcttgtctaacatctttcatttacagcagaaggactccctttagta

SEQ ID NO: 88490 - DNA, 80 bp, synthetic construct
  source 1..80: mol_type = other DNA
gattctctgtctttggcctttgaagtcccgatggtgtgtctaggtgtagatctctgagtttatcttactgggagtttgtt

SEQ ID NO: 88491 - DNA, 80 bp, synthetic construct
  source 1..80: mol_type = other DNA
tttgcagctctgttgactccttcctcgttgtgttttctttctgttcttcagactgcttagtctgactgccctgtcttcaa

SEQ ID NO: 88492 - DNA, 80 bp, synthetic construct; identical to SEQ ID NO: 16118
  source 1..80: mol_type = other DNA

SEQ ID NO: 88493 - DNA, 80 bp, synthetic construct
  source 1..80: mol_type = other DNA
tcaggtctcgttgctattgctgattgttttgtgactttcttgagctaattccataaggtctgtgttcttcattgtgtgtg

SEQ ID NO: 88494 - DNA, 80 bp, synthetic construct
  source 1..80: mol_type = other DNA
cttacaaagattcagccattttgttaaatacatgctccccagatggctgcaaacccttggttagtttcaagagtcctaaa

SEQ ID NO: 88495 - DNA, 80 bp, synthetic construct
  source 1..80: mol_type = other DNA
cccatgaattagaatacattagagaaaataagactatcccttgctggcaagaacacagtgacacagtagggtggaatata

SEQ ID NO: 88496 - DNA, 80 bp, synthetic construct; identical to SEQ ID NO: 16119
  source 1..80: mol_type = other DNA

SEQ ID NO: 88497 - DNA, 80 bp, synthetic construct
  source 1..80: mol_type = other DNA
caagttgcctttggttgtgggactgggaggatcttttctctttgttgatactttttcgtactttccaaatacttgactga

SEQ ID NO: 88498 - DNA, 80 bp, synthetic construct
  source 1..80: mol_type = other DNA
tctatctgctggaatcatccctgcccgtctgacctgagtcctccaagtcctccggcaccttgagctccagagagcagaat

SEQ ID NO: 88499 - DNA, 80 bp, synthetic construct
  source 1..80: mol_type = other DNA
ctgctcatcaccccagtgctccaggccgggaaggccgaagtgactggctacttccccttgggcacatggtacgacctgca

SEQ ID NO: 88500 - DNA, 80 bp, synthetic construct; identical to SEQ ID NO: 16120
  source 1..80: mol_type = other DNA

SEQ ID NO: 88501 - DNA, 80 bp, synthetic construct
  source 1..80: mol_type = other DNA
ctaggcctccacgtggagccccgggagatggagagcgtggttcctgaggacagcatgggggcctcggcacggcccagaat

SEQ ID NO: 88502 - DNA, 80 bp, synthetic construct
  source 1..80: mol_type = other DNA
gctgggtacatcatccccctgcaggtacctgggccaggcggctatggtgggggtgtggacagcacactgcagagctgggg

SEQ ID NO: 88503 - DNA, 80 bp, synthetic construct
  source 1..80: mol_type = other DNA
tggtctgcatggtggaggttctgccgggcccggcctcgggcagccgtgggatagcacttgaggtggggaaggtcttgggt

SEQ ID NO: 88504 - DNA, 80 bp, synthetic construct
  source 1..80: mol_type = other DNA
tttccagggccctggcctcacaaccacagagtcccgccagcagcccatggccctggctgtggccctgaccaagggtgggg

SEQ ID NO: 88505 - DNA, 80 bp, synthetic construct; identical to SEQ ID NO: 16121
  source 1..80: mol_type = other DNA

SEQ ID NO: 88506 - DNA, 80 bp, synthetic construct
  source 1..80: mol_type = other DNA
ggcccagaacacgatcgtgaatgagctggtacgtgtgaccagtgagggagctggcctgcagctgcagaaggtgactgtcc

SEQ ID NO: 88507 - DNA, 80 bp, synthetic construct
  source 1..80: mol_type = other DNA
gtcctggtgaccgatgccaggaacagaggatgctgggacctcccaagggggtctttggggaggagtgggaagggtcaggc

SEQ ID NO: 88508 - DNA, 80 bp, synthetic construct
  source 1..80: mol_type = other DNA
ggaggaaccgggtgcgaagcatcccagggccagacggagctgccccctgagcgccgggcctcgctgctgctgggatctcg

SEQ ID NO: 88509 - DNA, 80 bp, synthetic construct; identical to SEQ ID NO: 16122
  source 1..80: mol_type = other DNA

SEQ ID NO: 88510 - DNA, 80 bp, synthetic construct
  source 1..80: mol_type = other DNA
gtgttaataagattgtaaggtttgccctcctcacctgttgccggcatgcgggtagtattagccacccccctccatctgtt

SEQ ID NO: 88511 - DNA, 80 bp, synthetic construct
  source 1..80: mol_type = other DNA
ctgggaactcaggaaaattcacaggacttgggagattctaaatcttaagtgcaattatttttaataaaaggggcatttgg

SEQ ID NO: 88512 - DNA, 80 bp, synthetic construct; identical to SEQ ID NO: 16123
  source 1..80: mol_type = other DNA

SEQ ID NO: 88513 - DNA, 80 bp, synthetic construct
  source 1..80: mol_type = other DNA
ccctatctaatgagaaaaataacaaatcccaagaggggcattttacaaaatacttgaccagtagtgcggaaattgtcaag

SEQ ID NO: 88514 - DNA, 80 bp, synthetic construct; identical to SEQ ID NO: 16124
  source 1..80: mol_type = other DNA

SEQ ID NO: 88515 - DNA, 80 bp, synthetic construct
  source 1..80: mol_type = other DNA
aacatgatgaaacccccatctctagtaaaaataagaaaaaattagctgggcgtggtggtgggcgcctgttatcccagcta

SEQ ID NO: 88516 - DNA, 80 bp, synthetic construct
  source 1..80: mol_type = other DNA
agttgaatggacataaattctagacataattgtaggtagtcttagaatttattgatcttttatagagatggggttctcac

SEQ ID NO: 88517 - DNA, 80 bp, synthetic construct; identical to SEQ ID NO: 16125
  source 1..80: mol_type = other DNA

SEQ ID NO: 88518 - DNA, 80 bp, synthetic construct
  source 1..80: mol_type = other DNA
ggattatagacacgtgccaccatgcccggctgatttttttgtatttttagtagagatggggtttcaccatgttggtcagg

SEQ ID NO: 88519 - DNA, 80 bp, synthetic construct
  source 1..80: mol_type = other DNA
cctatggcttaagagtatactgagtactatttaaagcaaagcattgcaaaagaatagttgccccactattcatttgcaat

SEQ ID NO: 88520 - DNA, 80 bp, synthetic construct
  source 1..80: mol_type = other DNA
aaaagatgcaagcattttgaactgggaggagataagaagagaaaggtatataattatgggtggaaggtgcaatctttttc

SEQ ID NO: 88521 - DNA, 80 bp, synthetic construct; identical to SEQ ID NO: 16126
  source 1..80: mol_type = other DNA

SEQ ID NO: 88522 - DNA, 80 bp, synthetic construct
  source 1..80: mol_type = other DNA
ttgttttgcattgaagctgactggttgagttcacatcatatgttgcaattttctaatttggcacttcaatcactaggggc

SEQ ID NO: 88523 - DNA, 80 bp, synthetic construct
  source 1..80: mol_type = other DNA
aagaattttggcattgttcttcagacacagtacactgtaacatatataacattgtctgtggacttggtcttacactcttg

SEQ ID NO: 88524 - DNA, 80 bp, synthetic construct
  source 1..80: mol_type = other DNA
tggatcatagcttgctacagctttgagcttgcaggctcaagtggtccacctgcctcagcctcctgagtagctgggactat

SEQ ID NO: 88525 - DNA, 80 bp, synthetic construct; identical to SEQ ID NO: 16127
  source 1..80: mol_type = other DNA

SEQ ID NO: 88526 - DNA, 80 bp, synthetic construct
  source 1..80: mol_type = other DNA
gtagctgggattacaggtgcctgccacctgcctggctaatttttgtatttttagtagagagggggtttcaccatgttggc

SEQ ID NO: 88527 - DNA, 80 bp, synthetic construct
  source 1..80: mol_type = other DNA
gctacacattttgataattgggagagaatctcaacaaggggggtgggtatctggatgagtaaatatgggtttaatagttt

SEQ ID NO: 88528 - DNA, 80 bp, synthetic construct
  source 1..80: mol_type = other DNA
cctgcctcagtctcctgagtagctggggctacagaagctcgccaccatacctggctaatttttgtatttttagtagagac

SEQ ID NO: 88529 - DNA, 80 bp, synthetic construct
  source 1..80: mol_type = other DNA
ctggagtgaggtggcatgatctcagctcaatgcaacctccacctcccgggttcaagcgattctcatgcctcagcccccag

SEQ ID NO: 88530 - DNA, 80 bp, synthetic construct; identical to SEQ ID NO: 16128
  source 1..80: mol_type = other DNA

SEQ ID NO: 88531 - DNA, 80 bp, synthetic construct
  source 1..80: mol_type = other DNA
ggatttatgtgacttcttaaccttgaagtccattcatagaaccctagcttccttttcacagggaggagctgtgtgatgaa

SEQ ID NO: 88532 - DNA, 80 bp, synthetic construct
  source 1..80: mol_type = other DNA
aaaaaccaagaaagtgtggttgcttagcaactagtgataagtggccctgttagtttggcattcattcttaatgtcagaac

SEQ ID NO: 88533 - DNA, 80 bp, synthetic construct; identical to SEQ ID NO: 16129
  source 1..80: mol_type = other DNA

SEQ ID NO: 88534 - DNA, 80 bp, synthetic construct
  source 1..80: mol_type = other DNA
tgattccagctgaggccaaagttgccaatcactaactgagaaaaagaatgaaataattcaaacaagagaggaggaaacat

SEQ ID NO: 88535 - DNA, 80 bp, synthetic construct
  source 1..80: mol_type = other DNA
tcaagtttttaccatatctgggtcattccaaccccctggtccagcaacatcaacaattctctcctggttaaaagatgtcc

SEQ ID NO: 88536 - DNA, 80 bp, synthetic construct
  source 1..80: mol_type = other DNA
aaaacagtttaaaggaggcacttgtagccttctcttgagtttacagattgaacgtctccataaggaggtctaaaccctta

SEQ ID NO: 88537 - DNA, 80 bp, synthetic construct; identical to SEQ ID NO: 16130
  source 1..80: mol_type = other DNA

SEQ ID NO: 88538 - DNA, 80 bp, synthetic construct
  source 1..80: mol_type = other DNA
cgcacgcctataatcccagctactgggaggctgaggcaagagaatcgcttaaacccgggaggcggaggttgcagtgagcc

SEQ ID NO: 88539 - DNA, 80 bp, synthetic construct
  source 1..80: mol_type = other DNA
cataaataactattcaacacttaaccatatgcgagagatacagtcaaagtcagacaaggtccctgccctcatgaaactta

SEQ ID NO: 88540 - DNA, 80 bp, synthetic construct
  source 1..80: mol_type = other DNA
tgcgacttcaatgttaaggagcccggccctttaaaaatctttggggaagaactgttctaggcagaaaaaaagcaagtgta

SEQ ID NO: 88541 - DNA, 80 bp, synthetic construct
  source 1..80: mol_type = other DNA
caattggaagcgagttaagggttttaagcagggaactgatgatgacatttatattttttataactctgttaagtctcagg

SEQ ID NO: 88542 - DNA, 80 bp, synthetic construct; identical to SEQ ID NO: 16131
  source 1..80: mol_type = other DNA

SEQ ID NO: 88543 - DNA, 80 bp, synthetic construct
  source 1..80: mol_type = other DNA
gaccttggtttcctttgttgtcaagttctatctatcagtacagttctattggattctgggctcactatctcaccttttga

SEQ ID NO: 88544 - DNA, 80 bp, synthetic construct
  source 1..80: mol_type = other DNA
agttattttattttattttattttaattttttgagatggggttcagtctgtcatccagggtggagtgcagtggtgcgatc

SEQ ID NO: 88545 - DNA, 80 bp, synthetic construct
  source 1..80: mol_type = other DNA
ctcgaactcctgacctcaagtaatccacccgcctcagcctcccaaagtgctaggattacaggcatgagccatcatgccca

SEQ ID NO: 88546 - DNA, 80 bp, synthetic construct; identical to SEQ ID NO: 16132
  source 1..80: mol_type = other DNA

SEQ ID NO: 88547 - DNA, 80 bp, synthetic construct
  source 1..80: mol_type = other DNA
ccagtattgtgacagggtatttaaaattctgaagattggttctttggctcagctaccatggcctcaaagttctttccttt

SEQ ID NO: 88548 - DNA, 80 bp, synthetic construct
  source 1..80: mol_type = other DNA
gcaggttttatttccaacatctgcataaatccctagcttcagtcctttgctgtgaacctgaaatgagagggaggaaaaga

SEQ ID NO: 88549 - DNA, 80 bp, synthetic construct
  source 1..80: mol_type = other DNA
agacaaagaataaatcccccagttctgctgagctagttcaaactaggcatgtgagctatagcccagaactgaggagaaag

SEQ ID NO: 88550 - DNA, 80 bp, synthetic construct; identical to SEQ ID NO: 16133
  source 1..80: mol_type = other DNA

SEQ ID NO: 88551 - DNA, 80 bp, synthetic construct
  source 1..80: mol_type = other DNA
ttgttgtatttggaattgaacttggctctttcctctactgtggtagtactgaataaaatctgtcttcatcggccgggcgt

SEQ ID NO: 88552 - DNA, 80 bp, synthetic construct
  source 1..80: mol_type = other DNA
gtcccagctacttgggaggctgaggcaggagaatcacttgaacccaagaggtggagggttgcagtgagctgagattgtgc

SEQ ID NO: 88553 - DNA, 80 bp, synthetic construct; identical to SEQ ID NO: 16134
  source 1..80: mol_type = other DNA

SEQ ID NO: 88554 - DNA, 80 bp, synthetic construct
  source 1..80: mol_type = other DNA
atcgagaccatcttggctaacatggtgaaaccccgtctctactaaaaatacaaaaaattaactgggcatggtggcgggtg

SEQ ID NO: 88555 - DNA, 80 bp, synthetic construct
  source 1..80: mol_type = other DNA
tctgctgatggaatgcaaagtccacctgataagccttacaattcaatgttcagataacagccagctattctactttctaa

SEQ ID NO: 88556 - DNA, 80 bp, synthetic construct
  source 1..80: mol_type = other DNA
aagtagctggggttacaggcgttcaccaccatgcccagctaattttttgtacttttaatagagttggggtttcaccatgt

SEQ ID NO: 88557 - DNA, 80 bp, synthetic construct; identical to SEQ ID NO: 16135
  source 1..80: mol_type = other DNA

SEQ ID NO: 88558 - DNA, 80 bp, synthetic construct
  source 1..80: mol_type = other DNA
aatgaacacttaggtacctcccatttattaggcaccttgggatttcacaattttttccaacccagtaatagtgtggtagt

SEQ ID NO: 88559 - DNA, 80 bp, synthetic construct
  source 1..80: mol_type = other DNA
gtttttccagattttcttttgtctctcttatcccgttaatattcccgccctaaaaaccccaaacaaaataggaatgagaa

SEQ ID NO: 88560 - DNA, 80 bp, synthetic construct
  source 1..80: mol_type = other DNA
gcctagagataaatttaagatacgtgcaaggcccatatgttaaaactatgatgctcctaaatgatttgaataaatggaga

SEQ ID NO: 88561 - DNA, 80 bp, synthetic construct
  source 1..80: mol_type = other DNA
tctgtcacccaggctggagtgcagtggcgccatcttggctcactgcaacctctgcctccccggttcaagcgattcttcta

SEQ ID NO: 88562 - DNA, 80 bp, synthetic construct; identical to SEQ ID NO: 16136
  source 1..80: mol_type = other DNA

SEQ ID NO: 88563 - DNA, 80 bp, synthetic construct
  source 1..80: mol_type = other DNA
aggcgtggtggcgcatgcctgtaattccagctactcgcgaggatgaggcaggagaattgcttgaacctgggaggcggagg

SEQ ID NO: 88564 - DNA, 80 bp, synthetic construct
  source 1..80: mol_type = other DNA
tttcgaaagaggtccttccagccatctgataccatgggacttattatttattaaatgtggcatttctgatagaagaacaa

SEQ ID NO: 88565 - DNA, 80 bp, synthetic construct; identical to SEQ ID NO: 16137
  source 1..80: mol_type = other DNA

SEQ ID NO: 88566 - DNA, 80 bp, synthetic construct
  source 1..80: mol_type = other DNA
agctactcaggagactacgacaggagaactgcttaaacccgggaggtggagtttgcactgagcagagatcgcgccactgc

SEQ ID NO: 88567 - DNA, 80 bp, synthetic construct
  source 1..80: mol_type = other DNA
aaaaaaaaaaaaaaaaaaaaagagccaggcgtggtggcaggcgcctgtagtcccagctactcgggaggctgaggcagaag

SEQ ID NO: 88568 - DNA, 80 bp, synthetic construct
  source 1..80: mol_type = other DNA
agcccagactgggtgccagggtcttgccattagccaaacatgacataaacatgatccattttttatggaaaataatgaaa

SEQ ID NO: 88569 - DNA, 80 bp, synthetic construct; identical to SEQ ID NO: 16138
  source 1..80: mol_type = other DNA

SEQ ID NO: 88570 - DNA, 80 bp, synthetic construct
  source 1..80: mol_type = other DNA
aatcacagagccctttgagaatttgaagaaaggtaaatatcctctctccagaaaaatacacatattcattcagatttgta

SEQ ID NO: 88571 - DNA, 80 bp, synthetic construct
  source 1..80: mol_type = other DNA
tcagctccctgaaattaaaaggttgtaatcccaatttacagataaggattgtgagggtcagatatgttcaatacctatct

SEQ ID NO: 88572 - DNA, 80 bp, synthetic construct
  source 1..80: mol_type = other DNA
cacgaccccaaaaggagaaaaaatggcacgaatcttagttccccattcctcctacccaccctagatgttctaacggttag

SEQ ID NO: 88573 - DNA, 80 bp, synthetic construct
  source 1..80: mol_type = other DNA
aagaagagaaagagaaagagaaggagaacgagagagagagagagagagaaagaaacaggggccgctggccggactcccat

SEQ ID NO: 88574 - DNA, 80 bp, synthetic construct; identical to SEQ ID NO: 16139
  source 1..80: mol_type = other DNA

SEQ ID NO: 88575 - DNA, 80 bp, synthetic construct
  source 1..80: mol_type = other DNA
cataaatttccgcgggtaacctgggcttttaagattaacctcaggggcggaccaatcaccgatgacttattaaataatga

SEQ ID NO: 88576 - DNA, 80 bp, synthetic construct
  source 1..80: mol_type = other DNA
ctaaagttctgaaagacctgttgcttttcaccaggaagttttactgggcatctcctgagcctaggcaatagctgtagggt

SEQ ID NO: 88577 - DNA, 80 bp, synthetic construct
  source 1..80: mol_type = other DNA
gaaaaatcgaaactagctttttctttgcgcttgggagtttgctaactttggaggacctgctcaaccctatccgcaagccc

SEQ ID NO: 88578 - DNA, 80 bp, synthetic construct
  source 1..80: mol_type = other DNA
taaataaatctcgtagttcctcacttgagctgagctaagcctggggctccttgaacctggaactcgggtttatttccaat

SEQ ID NO: 88579 - DNA, 80 bp, synthetic construct
  source 1..80: mol_type = other DNA
tctgaattcttcaccattccacccacttttggtgagacctggggtggaggtctctagggtgggaggctcctgagagaggc

SEQ ID NO: 88580 - DNA, 80 bp, synthetic construct; identical to SEQ ID NO: 16140
  source 1..80: mol_type = other DNA

SEQ ID NO: 88581 - DNA, 80 bp, synthetic construct
  source 1..80: mol_type = other DNA
tgttctgtgggtcacacgccggcctcagcacagcactttgagttttggtactacgtgtatccacattttacacatgacaa

SEQ ID NO: 88582 - DNA, 80 bp, synthetic construct
  source 1..80: mol_type = other DNA
aaatattcattgtttacaagtgtaaatgagtcccagccatgtgttgcactgttcaagccccaagggagagagcagggaaa

SEQ ID NO: 88583 - DNA, 80 bp, synthetic construct
  source 1..80: mol_type = other DNA
acatgaaggaaataagaatgatattgactgggagcagtatttcccaggcaaactgagtgggcctggcaagttggattaaa

SEQ ID NO: 88584 - DNA, 80 bp, synthetic construct
  source 1..80: mol_type = other DNA
aaatgtctctaaactttgccacatgtcacctagtagacaaactcctggttaagaagctcgggttgaaaaaaataaacaag

SEQ ID NO: 88585 - DNA, 80 bp, synthetic construct; identical to SEQ ID NO: 16141
  source 1..80: mol_type = other DNA

SEQ ID NO: 88586 - DNA, 80 bp, synthetic construct
  source 1..80: mol_type = other DNA
tatattctgaaggaagttgctgaaggattctatgttgtgtgagagaaagagaagaattggctgggtgtagtagctcatgc

SEQ ID NO: 88587 - DNA, 80 bp, synthetic construct
  source 1..80: mol_type = other DNA
gtggagggtattgcttgagcccaggaagttgaggctgcagtgagccatgactgtgccactgtacttcagcctaggtgaca

SEQ ID NO: 88588 - DNA, 80 bp, synthetic construct; identical to SEQ ID NO: 16142
  source 1..80: mol_type = other DNA

SEQ ID NO: 88589 - DNA, 80 bp, synthetic construct
  source 1..80: mol_type = other DNA
cgcacgcctatagtcccaggttttcaggaggcttaggtaggagaatcccttgaacccaggaggtgcaggttgcagtgagc

SEQ ID NO: 88590 - DNA, 80 bp, synthetic construct
  source 1..80: mol_type = other DNA
tggctagacacaccttaacattttctagaatccaccagctttagtggagtctgtctaatcatgagtattggaataggatc

SEQ ID NO: 88591 - DNA, 80 bp, synthetic construct
  source 1..80: mol_type = other DNA
gcctcaacatcctgctcccctcctactacacatggttaaggcctgttgctctgtctccaggttcacactctctgcactac

SEQ ID NO: 88592 - DNA, 80 bp, synthetic construct; identical to SEQ ID NO: 16143
  source 1..80: mol_type = other DNA

SEQ ID NO: 88593 - DNA, 80 bp, synthetic construct
  source 1..80: mol_type = other DNA
ctgagatcatttggtccttggggatggtggaaatagggacctattcctttggttgcagttaacaaggctggggatttttc

SEQ ID NO: 88594 - DNA, 80 bp, synthetic construct
  source 1..80: mol_type = other DNA
gctggagtgggaaaggcacaagattcgggccaggcagaacagggcctacctggagagggactgccctgcacagctgcagc

SEQ ID NO: 88595 - DNA, 80 bp, synthetic construct
  source 1..80: mol_type = other DNA
ggaagggactttctcaatcctagagtctctaccttataattgagatgtatgagacagccacaagtcatgggtttaatttc

SEQ ID NO: 88596 - DNA, 80 bp, synthetic construct
  source 1..80: mol_type = other DNA
ggtggtcacaaggtcaggagtttgagaccagcctgaccaacatggtgaaacccgtctctaaaaaaatacaaaaattagct

SEQ ID NO: 88597 - DNA, 80 bp, synthetic construct; identical to SEQ ID NO: 16144
  source 1..80: mol_type = other DNA

SEQ ID NO: 88598 - DNA, 80 bp, synthetic construct
  source 1..80: mol_type = other DNA
acaaagaacatgggtaacagatatgtatatttacatgtgaggagaacaagctgatctgactgctctccaagtgacactgt

SEQ ID NO: 88599 - DNA, 80 bp, synthetic construct
  source 1..80: mol_type = other DNA
caagtgcctcctttggtgaaggtgacacatcatgtgacctcttcagtgaccactctacggtgtcgggccttgaactacta

SEQ ID NO: 88600 - DNA, 80 bp, synthetic construct
  source 1..80: mol_type = other DNA
gagcacccaggcctggatcagcccctcattgtgatctggggtatgtgactgatgagagccaggagctgagaaaatctatt

SEQ ID NO: 88601 - DNA, 80 bp, synthetic construct; identical to SEQ ID NO: 16145
  source 1..80: mol_type = other DNA

SEQ ID NO: 88602 - DNA, 80 bp, synthetic construct
  source 1..80: mol_type = other DNA
ccagaatgaaagtctctaattcaacaaacatcttcagagcacctactattttgcaagagctgtttaaggtagtacagggg

SEQ ID NO: 88603 - DNA, 80 bp, synthetic construct
  source 1..80: mol_type = other DNA
tcacattcagctggggatcaagatagccttctggatcttgaaggagaagctggattccattaggtgaggttgaagatgat

SEQ ID NO: 88604 - DNA, 80 bp, synthetic construct; identical to SEQ ID NO: 16146
  source 1..80: mol_type = other DNA

SEQ ID NO: 88605 - DNA, 80 bp, synthetic construct
  source 1..80: mol_type = other DNA
tgaatgaggaaaataaggaagagagaagaggcaagatggtgcctaggtttgtgatgcctctttcctgggtctcttgtctc

SEQ ID NO: 88606 - DNA, 80 bp, synthetic construct
  source 1..80: mol_type = other DNA
cctgacgaactccttgattttagccttctctgttcatttcctcaaaaagatttccccatttaggtttctgagttcctgca

SEQ ID NO: 88607 - DNA, 80 bp, synthetic construct
  source 1..80: mol_type = other DNA
ttacatgattcattttaacatctgagaaaagctttgaaccctgggacgtggctagtcataaccttaccagatttttacac

SEQ ID NO: 88608 - DNA, 80 bp, synthetic construct; identical to SEQ ID NO: 16147
  source 1..80: mol_type = other DNA

SEQ ID NO: 88609 - DNA, 80 bp, synthetic construct
  source 1..80: mol_type = other DNA
gatgataaaagcacttacttcgtgtccgactcttctgagcacctacttacatgcattactgcatgcacttcttacaataa

SEQ ID NO: 88610 - DNA, 80 bp, synthetic construct
  source 1..80: mol_type = other DNA
aaccccatctctaataaaaatacaaaaaattagctgggcgtggtggcagacgcctgtagtcccagctactcggaaggctg

SEQ ID NO: 88611 - DNA, 80 bp, synthetic construct
  source 1..80: mol_type = other DNA
atagtttgtcagtgatagaaacaggtttcaaactcagtcaatctgaccgtttgatacatctcagacaccactacattcag

SEQ ID NO: 88612 - DNA, 80 bp, synthetic construct; identical to SEQ ID NO: 16148
  source 1..80: mol_type = other DNA

SEQ ID NO: 88613 - DNA, 80 bp, synthetic construct
  source 1..80: mol_type = other DNA
ttccatggagccactggggttccggtgcacattaaaaaaaaaatctaaccaggacattcaggaattgctagattctggga

SEQ ID NO: 88614 - DNA, 80 bp, synthetic construct
  source 1..80: mol_type = other DNA
ttacaggcgtgcaccaccatgcccggctaatttttgtatttttagtagagacagggtttcaccatgttggccaggctggt

SEQ ID NO: 88615 - DNA, 80 bp, synthetic construct
  source 1..80: mol_type = other DNA
ctgcataaatgtggtacaagcattctgtcttgaagggcaggtgcttcaggataccatatacagctcagaagtttcttctt

SEQ ID NO: 88616 - DNA, 80 bp, synthetic construct
  source 1..80: mol_type = other DNA
attagccagtgaaaaactattaacaacttgtctattacctgttagtattattgttgcattaaaaatgcatatactttaat

SEQ ID NO: 88617 - DNA, 80 bp, synthetic construct; identical to SEQ ID NO: 16149
  source 1..80: mol_type = other DNA

SEQ ID NO: 88618 - DNA, 80 bp, synthetic construct
  source 1..80: mol_type = other DNA
tcacctgggctgagatttcaagaaacaccccagtcttcacagtaacacatttcactaacacatttactaaacatcagcaa

SEQ ID NO: 88619 - DNA, 80 bp, synthetic construct
  source 1..80: mol_type = other DNA
attttaaattcttattcacctctggcaaaaccattcacaaaccatggtagtaaagagaagggtgacacctggtggccata

SEQ ID NO: 88620 - DNA, 80 bp, synthetic construct; identical to SEQ ID NO: 16150
  source 1..80: mol_type = other DNA

SEQ ID NO: 88621 - DNA, 80 bp, synthetic construct
  source 1..80: mol_type = other DNA
aaaacattcttcacaaactcacacacatttaaaaacaaaacactgtctctaaaatccccaaatttttcataaactcagtt

SEQ ID NO: 88622 - DNA, 80 bp, synthetic construct
  source 1..80: mol_type = other DNA
gattctctctgtaggctttgggtataatgtgttcttttccttttttgcatcagcgattaacttctacactctaacatgta

SEQ ID NO: 88623 - DNA, 80 bp, synthetic construct
  source 1..80: mol_type = other DNA
tggtggatttggagttgatacttatatattttctatttcttggatggatgaatttgtacattaaaagttttccatggcag

SEQ ID NO: 88624 - DNA, 80 bp, synthetic construct; identical to SEQ ID NO: 16151
  source 1..80: mol_type = other DNA

SEQ ID NO: 88625 - DNA, 80 bp, synthetic construct
  source 1..80: mol_type = other DNA
caagggggagtcctgcggcggcggtcgaggggagctggctgagctgcccaatgggctgggggagactcggggctccgagg

SEQ ID NO: 88626 - DNA, 80 bp, synthetic construct
  source 1..80: mol_type = other DNA
cccctcagctcctaacgagccccccttctgagttgagtccccatgaccttcagcctttagcctagttgctgggaaggggg

SEQ ID NO: 88627 - DNA, 80 bp, synthetic construct; identical to SEQ ID NO: 16152
  source 1..80: mol_type = other DNA

SEQ ID NO: 88628 - DNA, 80 bp, synthetic construct
  source 1..80: mol_type = other DNA
acagagcctcgaggtgggagctgctcccctttcctgtatggccacaggcaccccacctcaccagcaggcgccattagagg

SEQ ID NO: 88629 - DNA, 80 bp, synthetic construct
  source 1..80: mol_type = other DNA
gcaaaaggctctgataaggtctgtgatcattaacttgtaggaatggtggcctggaaagatctgggccaacccacctccca

SEQ ID NO: 88630 - DNA, 80 bp, synthetic construct; identical to SEQ ID NO: 16153
  source 1..80: mol_type = other DNA

SEQ ID NO: 88631 - DNA, 80 bp, synthetic construct
  source 1..80: mol_type = other DNA
accgagccccaaagatgctccaaaggggcccatctcttttctgtccaaggtcctgatcccagctggggtgggggagggct

SEQ ID NO: 88632 - DNA, 80 bp, synthetic construct
  source 1..80: mol_type = other DNA
gaaggcaacctgacggggtggggctgggcctgacctgcccagggccccagatgggactgggggctttggggtgagggtgg

SEQ ID NO: 88633 - DNA, 80 bp, synthetic construct
  source 1..80: mol_type = other DNA
gagagtgtagagagaggccattgggggagatggacagagaagctgggagaagcagaacggaggagccaggggggcggggg

SEQ ID NO: 88634 - DNA, 80 bp, synthetic construct; identical to SEQ ID NO: 16154
  source 1..80: mol_type = other DNA

SEQ ID NO: 88635 - DNA, 80 bp, synthetic construct
  source 1..80: mol_type = other DNA
aagtcagtgtctgggaagaagccggggtgggtcctgggtcccaggcctccctggggtgccccatgttggtggccacagca

SEQ ID NO: 88636 - DNA, 80 bp, synthetic construct
  source 1..80: mol_type = other DNA
tggatctcttcccaggtctttctcttcctctcggcctttgctgcagtcattttggctttgctgttcctcagtaccccaag

SEQ ID NO: 88637 - DNA, 80 bp, synthetic construct
  source 1..80: mol_type = other DNA
ctctggttccctgtcaagacttgtgatcatctgatttgtttgttttctatctcctgccatgaaaatagaagctcttcaag

SEQ ID NO: 88638 - DNA, 80 bp, synthetic construct; identical to SEQ ID NO: 16155
  source 1..80: mol_type = other DNA

SEQ ID NO: 88639 - DNA, 80 bp, synthetic construct
  source 1..80: mol_type = other DNA
cctcagcctcccgagtagctgggattacaggcatgcaccaccacgcctggctgattttttgtattttagtagagatgggg

SEQ ID NO: 88640 - DNA, 80 bp, synthetic construct
  source 1..80: mol_type = other DNA
aatcttgaagtattctgatcctgcccatcaggcagcatcagggcactgagactcaggaaaacagtagccacggcaggagg

SEQ ID NO: 88641 - DNA, 80 bp, synthetic construct
  source 1..80: mol_type = other DNA
atggcatggcacttgtagagtaaacatgtagtaactgcaatatacagcagttattattagtgatcccattttacagatga

SEQ ID NO: 88642 - DNA, 80 bp, synthetic construct; identical to SEQ ID NO: 16156
  source 1..80: mol_type = other DNA

SEQ ID NO: 88643 - DNA, 80 bp, synthetic construct
  source 1..80: mol_type = other DNA
cctccagatgtggagatgaataccacaaccttgcatgccctgaaaccccaggggccagagggcaagaggctcaaagcctt

SEQ ID NO: 88644 - DNA, 80 bp, synthetic construct
  source 1..80: mol_type = other DNA
atgatgatgacaatattattccacaaattcagcacttactgtgcaccaggcattgccctaagttcatcctccctatttga

SEQ ID NO: 88645 - DNA, 80 bp, synthetic construct
  source 1..80: mol_type = other DNA
acattggtttgactctcaaacccattagagtcaaagcaggagatgcctggagacttgtcctcttagttctttcctttttc

SEQ ID NO: 88646 - DNA, 80 bp, synthetic construct
  source 1..80: mol_type = other DNA
acccagctaatttttgtatttttagtagagacagggtttcactgtgttggccagggtggtctctaactcctgacctcatg

SEQ ID NO: 88647 - DNA, 80 bp, synthetic construct; identical to SEQ ID NO: 16157
  source 1..80: mol_type = other DNA

SEQ ID NO: 88648 - DNA, 80 bp, synthetic construct
  source 1..80: mol_type = other DNA
aacgttcgtatcagctcactttaacagtttgctttccattttcacattcaaaagcctgtcttcggtttctaagggttgca

SEQ ID NO: 88649 - DNA, 80 bp, synthetic construct
  source 1..80: mol_type = other DNA
tcagatggacaggggcacatagaaaatctttggtttgagcccaggagaggctctcaagaggtgagaggaagactgaccct

SEQ ID NO: 88650 - DNA, 80 bp, synthetic construct
  source 1..80: mol_type = other DNA
tgtactgcccttccttctgagctctgactggcactcagcaaagcagggagatgaaggagagaggatcctaggagccccgg

SEQ ID NO: 88651 - DNA, 80 bp, synthetic construct; identical to SEQ ID NO: 16158
  source 1..80: mol_type = other DNA

SEQ ID NO: 88652 - DNA, 80 bp, synthetic construct
  source 1..80: mol_type = other DNA
acttagctaatttttctattttttgtagaaacagggtcccactatgttgtccaggctggtctcaaactcctgggcccaag

SEQ ID NO: 88653 - DNA, 80 bp, synthetic construct
  source 1..80: mol_type = other DNA
aagagctgggattaccaccatgagccaccatacccagtttacaattcagttttaaatattatatatgccaaggtgggagg

SEQ ID NO: 88654 - DNA, 80 bp, synthetic construct; identical to SEQ ID NO: 16159
  source 1..80: mol_type = other DNA

SEQ ID NO: 88655 - DNA, 80 bp, synthetic construct
  source 1..80: mol_type = other DNA
gagaccagcctggccaacatggtgaaaccctgtctctactaaaaatataaaaattagctgggtgtggtagcgcacacctg

SEQ ID NO: 88656 - DNA, 80 bp, synthetic construct
  source 1..80: mol_type = other DNA
tatatagtatatattatgtaatttacaaagtacacaaggacaacagagaaaactgtccttctcactcccatccccagcac

SEQ ID NO: 88657 - DNA, 80 bp, synthetic construct
  source 1..80: mol_type = other DNA
acacagagcttcctcagcggggttttttcagtggttgcattgaacagatgcacctccatttagttaatcagtatcctttt

SEQ ID NO: 88658 - DNA, 80 bp, synthetic construct; identical to SEQ ID NO: 16160
  source 1..80: mol_type = other DNA

SEQ ID NO: 88659 - DNA, 80 bp, synthetic construct
  source 1..80: mol_type = other DNA
ccgagtagccgggattacaggcacctgccacaatatctgacttattttttatttttattatttttttcgtagagatggtt

SEQ ID NO: 88660 - DNA, 80 bp, synthetic construct
  source 1..80: mol_type = other DNA
tggtaatataagttcaggagagggagagagaaagaggcagggattgagacagagcaggagaggaggagagaaaatttata

SEQ ID NO: 88661 - DNA, 80 bp, synthetic construct
  source 1..80: mol_type = other DNA
taggattccagtgttcacatgcatttttggtactatgaggcctctgaatgtcaaccctgtcacctgagactctgttgaaa

SEQ ID NO: 88662 - DNA, 80 bp, synthetic construct
  source 1..80: mol_type = other DNA
cgagatcgcgccactgcactcgagcctgggtgacagagtgagactccatctcaaaaaaaaaaaaaaaaaagaaaaagaaa

SEQ ID NO: 88663 - DNA, 80 bp, synthetic construct; identical to SEQ ID NO: 16161
  source 1..80: mol_type = other DNA

SEQ ID NO: 88664 - DNA, 80 bp, synthetic construct
  source 1..80: mol_type = other DNA
tggagtaggtgtaaaattggagaatccatatttctttccttgttttcagatttaatgctttcctttttccagcaggtctc

SEQ ID NO: 88665 - DNA, 80 bp, synthetic construct
  source 1..80: mol_type = other DNA
cacccaccaatccatccatccattcatccaaccatccatccatccatcatccatctacccacccacccaccaatccatcc

SEQ ID NO: 88666 - DNA, 80 bp, synthetic construct
  source 1..80: mol_type = other DNA
tccaccaattcatccatccatccacccattcgcccatccatccatccacccacccatccatccatccgtccatccaccca

SEQ ID NO: 88667 - DNA, 80 bp, synthetic construct; identical to SEQ ID NO: 16162
  source 1..80: mol_type = other DNA

SEQ ID NO: 88668 - DNA, 80 bp, synthetic construct
  source 1..80: mol_type = other DNA
caagtcctacctgcagcagcacaacatcccacagcgggaggtggtcgataccactggcctcaaccagtcccacctgtccc

SEQ ID NO: 88669 - DNA, 80 bp, synthetic construct
  source 1..80: mol_type = other DNA
ctggaagcttcaccatccccattacacagacaggtagatggaaaggaagtcagtgggattcaacctgcatttattaccta

SEQ ID NO: 88670 - DNA, 80 bp, synthetic construct
  source 1..80: mol_type = other DNA
ctcctcccaggttcaagcaattctcctgcctcagcctccggaatagctgggatcacaggtgcccaccaccatgcctggct

SEQ ID NO: 88671 - DNA, 80 bp, synthetic construct
  source 1..80: mol_type = other DNA
catggttaagtgggaaagtgggagaaaagctcattatgatccagcgagtcatgtattagaatgggacaacagcagccaca

SEQ ID NO: 88672 - DNA, 80 bp, synthetic construct; identical to SEQ ID NO: 16163
  source 1..80: mol_type = other DNA

SEQ ID NO: 88673 - DNA, 80 bp, synthetic construct
  source 1..80: mol_type = other DNA
ctgtcaccttccaacctccatctatgtgtgacattttttgacatttcttttattaattatccaggttaatttttttttat

SEQ ID NO: 88674 - DNA, 80 bp, synthetic construct
  source 1..80: mol_type = other DNA
agctaattttttgtatttttagtagagtcggggtttcaccatggtctcgatctcctgacctcgtgatccgcccgccttgg

SEQ ID NO: 88675 - DNA, 80 bp, synthetic construct; identical to SEQ ID NO: 16164
  source 1..80: mol_type = other DNA

SEQ ID NO: 88676 - DNA, 80 bp, synthetic construct
  source 1..80: mol_type = other DNA
ataagaaaaattagatgcctttaccctaaagcagccactggaattcccagactcttgtgtatccttccagagagattttc

SEQ ID NO: 88677 - DNA, 80 bp, synthetic construct
  source 1..80: mol_type = other DNA
tcatattggcactgagagattgatggatctcattctttataagggctgctggctgttatttgtttaactggccacctact

SEQ ID NO: 88678 - DNA, 80 bp, synthetic construct
  source 1..80: mol_type = other DNA
actgctggaacacagagtagctgctttaaaatcttgggtacatattggcatagttccttccaaagaagttatatcaatgt

SEQ ID NO: 88679 - DNA, 80 bp, synthetic construct
  source 1..80: mol_type = other DNA
atcttaactaaaaatacaaaaattagctggacatagtggcgcatgcctgtaatcccagctacttgggaggccaaggcaag

SEQ ID NO: 88680 - DNA, 80 bp, synthetic construct; identical to SEQ ID NO: 16165
  source 1..80: mol_type = other DNA

SEQ ID NO: 88681 - DNA, 80 bp, synthetic construct
  source 1..80: mol_type = other DNA
ttaaaaaatttctaacagttagaaatgtcatcaaggacttcagcctagagctgagaatagagatgcaaactgtggcccaa

SEQ ID NO: 88682 - DNA, 80 bp, synthetic construct
  source 1..80: mol_type = other DNA
ttaggactctttcagtaacaggggacagaaccccaactcaaatggatttaaacagaaaagggaatgaattgactgaagca

SEQ ID NO: 88683 - DNA, 80 bp, synthetic construct; identical to SEQ ID NO: 16166
  source 1..80: mol_type = other DNA

SEQ ID NO: 88684 - DNA, 80 bp, synthetic construct
  source 1..80: mol_type = other DNA
ggcacacatcactgtgtctgctataacagaaacttttaaatgaagtctaacataaaaagtgcccaaatccaaagcataca

SEQ ID NO: 88685 - DNA, 80 bp, synthetic construct
  source 1..80: mol_type = other DNA
caacagaaggagaccccatctctccaaaaaatacgaataaatgagccaggtgtggtgcagcaggtgtgtagtcctagcca

SEQ ID NO: 88686 - DNA, 80 bp, synthetic construct
  source 1..80: mol_type = other DNA
accagtttccagtaaagtggtaccagctgatgaaggctggctgggtctcttcctctagctaacatttgcattttaagcct

SEQ ID NO: 88687 - DNA, 80 bp, synthetic construct
  source 1..80: mol_type = other DNA
gattttcaagtctggaaagctgaatataattctgaatacactgaggacatatggctcaaatttttgctctactgcgtgac

SEQ ID NO: 88688 - DNA, 80 bp, synthetic construct; identical to SEQ ID NO: 16167
  source 1..80: mol_type = other DNA

SEQ ID NO: 88689 - DNA, 80 bp, synthetic construct
  source 1..80: mol_type = other DNA
gggctgattgaagagcccacaggtgatgagctaccaaccaagaaggggcggaggaaccgtttcaagtggggcccagcatc

SEQ ID NO: 88690 - DNA, 80 bp, synthetic construct
  source 1..80: mol_type = other DNA
gtcctgtaaaaggctgtccagttgccgagaactcctgatattggcttagcctggcccagaaaattgagaatacttgaacc

SEQ ID NO: 88691 - DNA, 80 bp, synthetic construct
  source 1..80: mol_type = other DNA
cagcagacctggcattggaacccagatctgccagcctcaaaccctccggcagagctcagcttctcagaaccctccccttc

SEQ ID NO: 88692 - DNA, 80 bp, synthetic construct
  source 1..80: mol_type = other DNA
gcgcaaagaagaagccttccggcacaagctggccatggacacgtacagcgggccccccccagggccaggcccgggacctg

SEQ ID NO: 88693 - DNA, 80 bp, synthetic construct; identical to SEQ ID NO: 16168
  source 1..80: mol_type = other DNA

SEQ ID NO: 88694 - DNA, 80 bp, synthetic construct
  source 1..80: mol_type = other DNA
ccactacattcaactccactccatccactctactccatctactaccttcaactctaccccatccatccactccactccat

SEQ ID NO: 88695 - DNA, 80 bp, synthetic construct
  source 1..80: mol_type = other DNA
ccatccattccctccaacttcatcccatccagtacattcaactccactccatccactgtactccatctactacattcaac

SEQ ID NO: 88696 - DNA, 80 bp, synthetic construct
  source 1..80: mol_type = other DNA
ccactccatctactacattcaactctactccatccactccatactctattccatccacttactccatccactccattcag

SEQ ID NO: 88697 - DNA, 80 bp, synthetic construct; identical to SEQ ID NO: 16169
  source 1..80: mol_type = other DNA

SEQ ID NO: 88698 - DNA, 80 bp, synthetic construct
  source 1..80: mol_type = other DNA
ccattccactccactgtgttcacacaactccatccattccactctagccactccattcattccactccacgccacactat

SEQ ID NO: 88699 - DNA, 80 bp, synthetic construct
  source 1..80: mol_type = other DNA
tccactcaattccatctactctactccacaccatccactccacttcatatcattccactcaactcaacctaagttgattt

SEQ ID NO: 88700 - DNA, 80 bp, synthetic construct; identical to SEQ ID NO: 16170
  source 1..80: mol_type = other DNA

SEQ ID NO: 88701 - DNA, 80 bp, synthetic construct
  source 1..80: mol_type = other DNA
tgtgcgctatggacagcctgcgaccagtgagactgcagaagtaccctcaagcagcggcggtcccttagtgacagtgtcta

SEQ ID NO: 88702 - DNA, 80 bp, synthetic construct
  source 1..80: mol_type = other DNA
ccccggccccccggacacagcttggcttcccctcgtaggtctcagcagctgggggccccctcccccctgtcagcaccctg

SEQ ID NO: 88703 - DNA, 80 bp, synthetic construct
  source 1..80: mol_type = other DNA
gtaagctggtggggatgggtgggcacctgggtgggaggctcatggggcaaccgcagaatccaggagctggaagagccact

SEQ ID NO: 88704 - DNA, 80 bp, synthetic construct; identical to SEQ ID NO: 16171
  source 1..80: mol_type = other DNA

SEQ ID NO: 88705 - DNA, 80 bp, synthetic construct
  source 1..80: mol_type = other DNA
aacttttgaacaagtcaccgcctgcctctcccactagcctagacaaagagctaaaggctcagagagggggaatgacttgc

SEQ ID NO: 88706 - DNA, 80 bp, synthetic construct
  source 1..80: mol_type = other DNA
ttccactccaggcctggcctccacgcaggcacagagtgtgccggtcatcaacagcatgggcagcagcctgaccaccctgc

SEQ ID NO: 88707 - DNA, 80 bp, synthetic construct
  source 1..80: mol_type = other DNA
tagaggttggctgtcaatggatgcaggggaaaggggtgcctggcaggcattgcagtctgcatgtgtctctgggacaagtg

SEQ ID NO: 88708 - DNA, 80 bp, synthetic construct; identical to SEQ ID NO: 16172
  source 1..80: mol_type = other DNA

SEQ ID NO: 88709 - DNA, 80 bp, synthetic construct
  source 1..80: mol_type = other DNA
ggaggcacgtgcctgtagtcccagctacttgggaggctgaggcagaatcgcttgaacctgggaggcggaggttgcagtga

SEQ ID NO: 88710 - DNA, 80 bp, synthetic construct
  source 1..80: mol_type = other DNA
ctatttctgcagccaaagataggatttccacaaggcagtttaaacactcataacctcataccaggttcaggctgggtttc

SEQ ID NO: 88711 - DNA, 80 bp, synthetic construct
  source 1..80: mol_type = other DNA
gtgtatgcgtgtgtgtgtgttacatttttatctgagtcactgtgagaatatgtggtttatgtgcgttttcctagtgtctg

SEQ ID NO: 88712 - DNA, 80 bp, synthetic construct; identical to SEQ ID NO: 16173
  source 1..80: mol_type = other DNA

SEQ ID NO: 88713 - DNA, 80 bp, synthetic construct
  source 1..80: mol_type = other DNA
cgcagctgagcagttccctgtaatggggagagggtctgtccctttatctggagcctccagttttgaaaatcagccctgga

SEQ ID NO: 88714 - DNA, 80 bp, synthetic construct
  source 1..80: mol_type = other DNA
acccacacgggcctgctcccgcagactatgctcatcaccgacaccaccaacctgagcgccctggccagcctcacgcccac

SEQ ID NO: 88715 - DNA, 80 bp, synthetic construct
  source 1..80: mol_type = other DNA
gccaccaccctccacgtccccagccaggaccctgccagcatccagcacctgcagccggcccaccggctcagcgccagccc

SEQ ID NO: 88716 - DNA, 80 bp, synthetic construct
  source 1..80: mol_type = other DNA
ggcttccatgaagcccaagaggcacaggcgaccccaggaagatggggcccaccttacaagaacatctcagggactggact

SEQ ID NO: 88717 - DNA, 80 bp, synthetic construct; identical to SEQ ID NO: 16174
  source 1..80: mol_type = other DNA

SEQ ID NO: 88718 - DNA, 80 bp, synthetic construct
  source 1..80: mol_type = other DNA
cggccctggcagctgtcatgacagccactgaggccattctgtgtcctggcattcaccccatgaggcgtgtccatgaccac

SEQ ID NO: 88719 - DNA, 80 bp, synthetic construct
  source 1..80: mol_type = other DNA
accaacagatttatttgaaggacttggcccgtgtctgcggggggctggcaggcctgaaatctgttgctggcagctctggg

SEQ ID NO: 88720 - DNA, 80 bp, synthetic construct; identical to SEQ ID NO: 16175
  source 1..80: mol_type = other DNA

SEQ ID NO: 88721 - DNA, 80 bp, synthetic construct
  source 1..80: mol_type = other DNA
atcctgagtacccctagggacaggcaggtggggtgggtgtgggtgcctggtgggtggctagcagccttgtttgcctctgc

SEQ ID NO: 88722 - DNA, 80 bp, synthetic construct
  source 1..80: mol_type = other DNA
gcctgcttggggggtgatgagggcagcagccagccctgcctggaggacctgagcctgccgagcaaccgtggcccttcctg

SEQ ID NO: 88723 - DNA, 80 bp, synthetic construct
  source 1..80: mol_type = other DNA
tcgtgggatacagtcttcttacttggaactgaagggggcggcctatgacttgggcacccccagcctgggcctatggagag

SEQ ID NO: 88724 - DNA, 80 bp, synthetic construct; identical to SEQ ID NO: 16176
  source 1..80: mol_type = other DNA

SEQ ID NO: 88725 - DNA, 80 bp, synthetic construct
  source 1..80: mol_type = other DNA
gcctcctgcctctactgggaaggctacttcggggctgggaagtcgtccttactcctgtgggagcctcgcaacccgtgcca

SEQ ID NO: 88726 - DNA, 80 bp, synthetic construct
  source 1..80: mol_type = other DNA
gaccccagggcacaggagctacctgtgtggacaggactaacactcagaagcctgggggcctggctggctgagggcagttc

SEQ ID NO: 88727 - DNA, 80 bp, synthetic construct
  source 1..80: mol_type = other DNA
gacccggcaccccctgcagcttgtagccagccggggcgagtggcacgtttatttaacttttagtaaagtcaaggagaaat

SEQ ID NO: 88728 - DNA, 80 bp, synthetic construct; identical to SEQ ID NO: 16177
  source 1..80: mol_type = other DNA

SEQ ID NO: 88729 - DNA, 80 bp, synthetic construct
  source 1..80: mol_type = other DNA
ggggactgcaggagaagatggtcccaagggctgggggaggagctgtgctttcgagttcctctccccttccacggtcaggg

SEQ ID NO: 88730 - DNA, 80 bp, synthetic construct
  source 1..80: mol_type = other DNA
ctgggaggtgagggcccccagctggcccggtagggagaggcgtcgtgtggggccttcttggggaagctctggggcccccg

SEQ ID NO: 88731 - DNA, 80 bp, synthetic construct
  source 1..80: mol_type = other DNA
aggatggacgggaggacaggagggccaagaggagagtcaggtgggcagagaagctggaggggacaagagccaaggcagcg

SEQ ID NO: 88732 - DNA, 80 bp, synthetic construct; identical to SEQ ID NO: 16178
  source 1..80: mol_type = other DNA

SEQ ID NO: 88733 - DNA, 80 bp, synthetic construct
  source 1..80: mol_type = other DNA
tgtctgcaaacaggagcaggcagcatatgggaggggggagcggatgccaagggaagtggggagggagcagatcccaggcc

SEQ ID NO: 88734 - DNA, 80 bp, synthetic construct
  source 1..80: mol_type = other DNA
ccctggaggcttggcctctgcaccctgggaaatgccaagcaccctcaagatgaccctgtgacagccactgccaagggcaa

SEQ ID NO: 88735 - DNA, 80 bp, synthetic construct
  source 1..80: mol_type = other DNA
gctcttcaggcgatgctccggggcctggcggtggaggctgtggacactaggggagtgaagctgcgggccacttagcctac

SEQ ID NO: 88736 - DNA, 80 bp, synthetic construct
  source 1..80: mol_type = other DNA
gcagcaaagcaggtttgggctggaatcggggaacaagcgggtcacggtacatcgaggaagcagggctggagcttacctga

SEQ ID NO: 88737 - DNA, 80 bp, synthetic construct; identical to SEQ ID NO: 16179
  source 1..80: mol_type = other DNA

SEQ ID NO: 88738 - DNA, 80 bp, synthetic construct
  source 1..80: mol_type = other DNA
gaccagactccagggcgtgcccccccaccccacctgcactccctcacctgttgagctggcgctggagggcatccagcctg

SEQ ID NO: 88739 - DNA, 80 bp, synthetic construct
  source 1..80: mol_type = other DNA
ccagagagcagagctgggtgagcggggtagacgcaccaccgctgccacgcccggtcctccctcgcccgcccgtcgcccgg

SEQ ID NO: 88740 - DNA, 80 bp, synthetic construct
  source 1..80: mol_type = other DNA
ctggaggggccactggacgggctctccccccacggcccccccggccggccccggctactcggccctgcccccgcccggcc

SEQ ID NO: 88741 - DNA, 80 bp, synthetic construct; identical to SEQ ID NO: 16180
  source 1..80: mol_type = other DNA

SEQ ID NO: 88742 - DNA, 80 bp, synthetic construct
  source 1..80: mol_type = other DNA
agagggcttcctggaggaggtgacagctgcaggggccctgaaagatgggcagcatctggacagctggggtgtggagtggg

SEQ ID NO: 88743 - DNA, 80 bp, synthetic construct
  source 1..80: mol_type = other DNA
gcgttgccgactgaagccaccctctaactccgtactgccgggggagcccgggatcatgttggtctggaaccaaaatcagt

SEQ ID NO: 88744 - DNA, 80 bp, synthetic construct
  source 1..80: mol_type = other DNA
tgattttgccccaggcaaagactgagtttgggacttttgtaggctgctctatgataccatttgacagacagggaaactga

SEQ ID NO: 88745 - DNA, 80 bp, synthetic construct; identical to SEQ ID NO: 16181
  source 1..80: mol_type = other DNA

SEQ ID NO: 88746 - DNA, 80 bp, synthetic construct
  source 1..80: mol_type = other DNA
gcatccccaccccgggcagagcatgtcccctcagctgggtcgcctgccagccggcccccaacccacacaaccggggaagc

SEQ ID NO: 88747 - DNA, 80 bp, synthetic construct
  source 1..80: mol_type = other DNA
caaacaccctcttagccaatcactgcacccttataagcaatgttcttcaaaccaaagatcagaacacagtagtgaatcaa

SEQ ID NO: 88748 - DNA, 80 bp, synthetic construct
  source 1..80: mol_type = other DNA
gtgtttgtacagagctgagaaacaaagtctaaaatgtcctaccatcaactatggtcgaaagagcttgctatatctgccct

SEQ ID NO: 88749 - DNA, 80 bp, synthetic construct; identical to SEQ ID NO: 16182
  source 1..80: mol_type = other DNA

SEQ ID NO: 88750 - DNA, 80 bp, synthetic construct
  source 1..80: mol_type = other DNA
gaggatctagatttgatcctactttaaggaagcaaaaagtgtctgtttgtggcggatcctgaagggaaggagaatgtggg

SEQ ID NO: 88751 - DNA, 80 bp, synthetic construct
  source 1..80: mol_type = other DNA
cccatacccaggatggccacgacgacgtcgccccgcaggatctcgatggagccccgggagatgaagtacagggcggtgag

SEQ ID NO: 88752 - DNA, 80 bp, synthetic construct
  source 1..80: mol_type = other DNA
tcagggaagcccttcagcacctgggggcagggtgggggcagctcagcacaccctcccttgggaccccccaacccacactc

SEQ ID NO: 88753 - DNA, 80 bp, synthetic construct; identical to SEQ ID NO: 16183
  source 1..80: mol_type = other DNA

SEQ ID NO: 88754 - DNA, 80 bp, synthetic construct
  source 1..80: mol_type = other DNA
cccagcctgccacccactggccacgctctggtggcctcaccgcgttcatgtcgatgccgttggtgtaggaccaggcgtgc

SEQ ID NO: 88755 - DNA, 80 bp, synthetic construct
  source 1..80: mol_type = other DNA
ctgggggcgtgggcacgtggggccgtcagcctctgcagggaccccacccacccacagggaccctgctcaggccccgcacc

SEQ ID NO: 88756 - DNA, 80 bp, synthetic construct
  source 1..80: mol_type = other DNA
tctggcccggctagcagcctcagtttcctccaacttgggttcctccaccgtgggctctccccgccgcccgcccctgggca

SEQ ID NO: 88757 - DNA, 80 bp, synthetic construct; identical to SEQ ID NO: 16184
  source 1..80: mol_type = other DNA

SEQ ID NO: 88758 - DNA, 80 bp, synthetic construct
  source 1..80: mol_type = other DNA
ggacagggaaggggcacattccgttgatggggcaaggggggcaagggaggaggggaggtgctgcggccctcagagcgagc

SEQ ID NO: 88759 - DNA, 80 bp, synthetic construct
  source 1..80: mol_type = other DNA
gatcaccctagggtgcctgcccactcccaccagcttctagggcactttggtgacgctacaaaataatggccccttgggat

SEQ ID NO: 88760 - DNA, 80 bp, synthetic construct
  source 1..80: mol_type = other DNA
tctctttttctctgtcctcctcgccaccccctccaccccactacctcccaccacattcctggcctctcctctccctacac

SEQ ID NO: 88761 - DNA, 80 bp, synthetic construct
  source 1..80: mol_type = other DNA
gtggtgcggaagttgatgaggatgtccacaatgaacatgatgtccacgatgaggtccaccacagccagcggctggcaggc

SEQ ID NO: 88762 - DNA, 80 bp, synthetic construct; identical to SEQ ID NO: 16185
  source 1..80: mol_type = other DNA

SEQ ID NO: 88763 - DNA, 80 bp, synthetic construct
  source 1..80: mol_type = other DNA
caaaatgccacacagcacaggactggctccaaacagttccaacatttcccggcagacgtggattcaggccactcggcagg

SEQ ID NO: 88764 - DNA, 80 bp, synthetic construct
  source 1..80: mol_type = other DNA
atagccccaatccactgactggtagtcactgcagttcttaccagcccctcttcatgccacaggcccgaggacaccaggca

SEQ ID NO: 88765 - DNA, 80 bp, synthetic construct; identical to SEQ ID NO: 16186
  source 1..80: mol_type = other DNA

SEQ ID NO: 88766 - DNA, 80 bp, synthetic construct
  source 1..80: mol_type = other DNA
gcatgcagctcaacccaaaagccccctccccaagctctccctgccatccctgggcagccagctgaacccaaggccttgcc

SEQ ID NO: 88767 - DNA, 80 bp, synthetic construct
  source 1..80: mol_type = other DNA
ggcgctgctgggagaacatctccttagaggaaataactagaagtcaagacgggtcatagtcaaagatttgaccaccctgg

SEQ ID NO: 88768 - DNA, 80 bp, synthetic construct
  source 1..80: mol_type = other DNA
gtggcccttcagtgatcaagtggggactgaaaaaaaaaaaagaaaacactggccaggcccctgctgataagggggcagaa

SEQ ID NO: 88769 - DNA, 80 bp, synthetic construct
  source 1..80: mol_type = other DNA
cacacctgacaggggccagtcccagctctgcagccaccagctcacctatggccttgggccaggtctgtccccccagcctg

SEQ ID NO: 88770 - DNA, 80 bp, synthetic construct; identical to SEQ ID NO: 16187
  source 1..80: mol_type = other DNA

SEQ ID NO: 88771 - DNA, 80 bp, synthetic construct
  source 1..80: mol_type = other DNA
cctttgcccacagggtccaaccccagcacacagagcaaaggagccccggcgcctccatgccaggcccagctgtcgcctgc

SEQ ID NO: 88772 - DNA, 80 bp, synthetic construct
  source 1..80: mol_type = other DNA
aaactctgtaagcccagcctgggagggaatgagaacaggagccaggcgcgggtgagcagggccaggccccacggctccca

SEQ ID NO: 88773 - DNA, 80 bp, synthetic construct; identical to SEQ ID NO: 16188
  source 1..80: mol_type = other DNA

SEQ ID NO: 88774 - DNA, 80 bp, synthetic construct
  source 1..80: mol_type = other DNA
tcaccctggcagtaagcgtgggcagcagcctgcctggctcgagctgcccatggccccgtggcgtgggccctgctgccagg

SEQ ID NO: 88775 - DNA, 80 bp, synthetic construct
  source 1..80: mol_type = other DNA
gcccaggctcctgcagcggcgctcccgcagcctgagcccctccccctccgccagcagccgggcctgtcaccgcagattaa

SEQ ID NO: 88776 - DNA, 80 bp, synthetic construct
  source 1..80: mol_type = other DNA
catgcagcgggcacaggagcagggcagatgccaggggctcaggtgggaaccaagagagaagcaagggaggaggaagagag

SEQ ID NO: 88777 - DNA, 80 bp, synthetic construct
  source 1..80: mol_type = other DNA
cagctgctgtggaaggggcaggagggaacagcttgggacaggagtcctccacattatcccaggcttctcactcactgcag

SEQ ID NO: 88778 - DNA, 80 bp, synthetic construct; identical to SEQ ID NO: 16189
  source 1..80: mol_type = other DNA

SEQ ID NO: 88779 - DNA, 80 bp, synthetic construct
  source 1..80: mol_type = other DNA
cccagttggcttggcccctagtacttccttcacacaccctgcagccagacctttcatgtccctcaggccgccttcccccc

SEQ ID NO: 88780 - DNA, 80 bp, synthetic construct
  source 1..80: mol_type = other DNA
cccccatcgcagctctggaatagattgccaaccccaaccctcaggtctgcctccctccaagaggccctcactggctagcc

SEQ ID NO: 88781 - DNA, 80 bp, synthetic construct
  source 1..80: mol_type = other DNA
gtgggcgaagccaagaaggggtcgcccttgaggtccacaaagttgagggtgatttggggaatcttgctaatggtgcggta

SEQ ID NO: 88782 - DNA, 80 bp, synthetic construct; identical to SEQ ID NO: 16190
  source 1..80: mol_type = other DNA

SEQ ID NO: 88783 - DNA, 80 bp, synthetic construct
  source 1..80: mol_type = other DNA
caccagggctctgggagtggaagaatgtaatgggatgaatggacatttaatagcgcaacaagccacttaatggaattaaa

SEQ ID NO: 88784 - DNA, 80 bp, synthetic construct
  source 1..80: mol_type = other DNA
ggacatttaatagcgcaacaagccacttaatggaattaaataagtgcttaatgggatttccatctcccaggcacccagga

SEQ ID NO: 88785 - DNA, 80 bp, synthetic construct
  source 1..80: mol_type = other DNA
gccgacgaggcgcggcgcacgctggcgcagctttctcgggagcgcgtccgggccaggctgcagctggagcccgaggcgtc

SEQ ID NO: 88786 - DNA, 80 bp, synthetic construct
  source 1..80: mol_type = other DNA
ccggggcgcccgcgccgcccgcgccgcccgaccgcaccgacgactcccgggccgtcagcgccagcagcgcgggcagcttc

SEQ ID NO: 88787 - DNA, 80 bp, synthetic construct; identical to SEQ ID NO: 16191
  source 1..80: mol_type = other DNA

SEQ ID NO: 88788 - DNA, 80 bp, synthetic construct
  source 1..80: mol_type = other DNA
cagttttactgacactgtcattttagagtgtaagaaaccaagaggtgagcacttttgtcatgatgctgagggaaagatta

SEQ ID NO: 88789 - DNA, 80 bp, synthetic construct
  source 1..80: mol_type = other DNA
aggaaacttggccagtccatgaacaaggagcagatgaaagaaactacacacagctgagtccataggacacagcttcctac

SEQ ID NO: 88790 - DNA, 80 bp, synthetic construct
  source 1..80: mol_type = other DNA
cctgtcattccacccctatgtgtccatcctgggccaggggaaccaagccacatcctcagggtacagggttcacttcccac

SEQ ID NO: 88791 - DNA, 80 bp, synthetic construct; identical to SEQ ID NO: 16192
  source 1..80: mol_type = other DNA

SEQ ID NO: 88792 - DNA, 80 bp, synthetic construct
  source 1..80: mol_type = other DNA
ccttggcacccactcagtgggcagagcagaaagccacgcaggatggaccctggaacccaagtgggcccgtccacttctgc

SEQ ID NO: 88793 - DNA, 80 bp, synthetic construct
  source 1..80: mol_type = other DNA
ctacccctctctctgcctatatgatttatctagctctttcccggctgcactttttctcacgctggctatgatcctttctt

SEQ ID NO: 88794 - DNA, 80 bp, synthetic construct
  source 1..80: mol_type = other DNA
gatctctgggttcatagcccggatctgctgcttaatcacttatgcttttttcctaaattatttaacatccttgtgcctca

SEQ ID NO: 88795 - DNA, 80 bp, synthetic construct; identical to SEQ ID NO: 16193
  source 1..80: mol_type = other DNA

SEQ ID NO: 88796 - DNA, 80 bp, synthetic construct
  source 1..80: mol_type = other DNA
actttacagcaatttggcatcaccacaaaatccacgcatgtgctcttgtatttcacagatgtaccagcctataacatatt

SEQ ID NO: 88797 - DNA, 80 bp, synthetic construct
  source 1..80: mol_type = other DNA
tgtccaccaaaggccctgtaccagatgaggtcagtcccctaagccaagcacccctggtctccctcagctccctgttgagc

SEQ ID NO: 88798 - DNA, 80 bp, synthetic construct
  source 1..80: mol_type = other DNA
gctccagctcctctatggccccccagggacccaccaggcaggctcctcatctcccactctccctagggagcctcttcctt

SEQ ID NO: 88799 - DNA, 80 bp, synthetic construct; identical to SEQ ID NO: 16194
  source 1..80: mol_type = other DNA

SEQ ID NO: 88800 - DNA, 80 bp, synthetic construct
  source 1..80: mol_type = other DNA
tagagacagggttttcactgtgttggccaggctggtctcaaactcctggcctcaagtgatctgcctgcctcggcctccca

SEQ ID NO: 88801 - DNA, 80 bp, synthetic construct
  source 1..80: mol_type = other DNA
gcaacctggaggcgacgccacccctgggacttggagctggtgcttgaagcctgacagtgaggtcaaggggctgcgtgctg

SEQ ID NO: 88802 - DNA, 80 bp, synthetic construct
  source 1..80: mol_type = other DNA
ccgccccaccccacagctcttccactcaccacatcccagaccctcacagccccgcccgagggccctgagctctggggctc

SEQ ID NO: 88803 - DNA, 80 bp, synthetic construct; identical to SEQ ID NO: 16195
  source 1..80: mol_type = other DNA

SEQ ID NO: 88804 - DNA, 80 bp, synthetic construct
  source 1..80: mol_type = other DNA
gacctcagcagcccgtcccctcttcagctcaagctgctcagcaagacagcccagaatggcattctgaagcccacccagtc

SEQ ID NO: 88805 - DNA, 80 bp, synthetic construct
  source 1..80: mol_type = other DNA
cgagattcaagaaatttttcctttcaaaataaccctgtcaaaggcctggttattcaaaaaatgtgaactggagccctgcc

SEQ ID NO: 88806 - DNA, 80 bp, synthetic construct; identical to SEQ ID NO: 16196
  source 1..80: mol_type = other DNA

SEQ ID NO: 88807 - DNA, 80 bp, synthetic construct
  source 1..80: mol_type = other DNA
acagcccacactcccgaggcagccagcactgggcgcactcagggggcagccaggacagacaaggagggcggagggggtgc

SEQ ID NO: 88808 - DNA, 80 bp, synthetic construct
  source 1..80: mol_type = other DNA
ggccgtaggggtgaaatggcctaagatatgtgaagctcagagcctggcttgaggtcaccataagcttgagacagaagaga

SEQ ID NO: 88809 - DNA, 80 bp, synthetic construct
  source 1..80: mol_type = other DNA
ccttactttgggtgagaaggttctccctgcctggcccagttctgcttcctgggccctctgaaaggggaggcacccatgga

SEQ ID NO: 88810 - DNA, 80 bp, synthetic construct; identical to SEQ ID NO: 16197
  source 1..80: mol_type = other DNA

SEQ ID NO: 88811 - DNA, 80 bp, synthetic construct
  source 1..80: mol_type = other DNA
aggccttatctcccatgtcagcaccaggtggggaggaagaggctgcagatggccctgagtgaccttaggcaccttctggg

SEQ ID NO: 88812 - DNA, 80 bp, synthetic construct
  source 1..80: mol_type = other DNA
gtgaccaacaagacacgcctggcacctgcccccagtgaaccacccatccaacaggaccccagtttgatgcatgggcaaga

SEQ ID NO: 88813 - DNA, 80 bp, synthetic construct
  source 1..80: mol_type = other DNA
agtgattcctgcactgggtgccagatgagatgacagatggctttgtggaagcatccagaattctaacaaggcggggtgct

SEQ ID NO: 88814 - DNA, 80 bp, synthetic construct
  source 1..80: mol_type = other DNA
gaggctgtctccggagcagcagcccagggctgtgcagtgtcaggttatatttagcctggtggcggcgacaggaagatgca

SEQ ID NO: 88815 - DNA, 80 bp, synthetic construct; identical to SEQ ID NO: 16198
  source 1..80: mol_type = other DNA

SEQ ID NO: 88816 - DNA, 80 bp, synthetic construct
  source 1..80: mol_type = other DNA
ccatgggatcatttatagggtcttgggggccgctgtagtcatctagacccacccaaatccactgcatgtggcatgcctga

SEQ ID NO: 88817 - DNA, 80 bp, synthetic construct
  source 1..80: mol_type = other DNA
gctgatgccaggaagcagctctccacagctccctgcacaggcgcgtgagtcccgggcagttgcgccccagcttcagccct

SEQ ID NO: 88818 - DNA, 80 bp, synthetic construct
  source 1..80: mol_type = other DNA
tgtacactggccgggcttccccgtccatccgagtcagagccctgaggccagggcaggactggcagttgcagaagaactga

SEQ ID NO: 88819 - DNA, 80 bp, synthetic construct; identical to SEQ ID NO: 16199
  source 1..80: mol_type = other DNA

SEQ ID NO: 88820 - DNA, 80 bp, synthetic construct
  source 1..80: mol_type = other DNA
ggggacactctggggtctcctctagtgagtggcctgtaggcttctaggtctgtgctctgtcttggctcctagcatacccc

SEQ ID NO: 88821 - DNA, 80 bp, synthetic construct
  source 1..80: mol_type = other DNA
agtgctaatgaaaagcccccagaaagtcaggtggaacattcgagcatcaaaacatgtgacggtgatccaaacataaacag

SEQ ID NO: 88822 - DNA, 80 bp, synthetic construct
  source 1..80: mol_type = other DNA
ttaggaaacatagtcaaaaacaatacgtcttttacaatagcaacaaaaactcttaagtgtccaggaattgaccaagaagg

SEQ ID NO: 88823 - DNA, 80 bp, synthetic construct; identical to SEQ ID NO: 16200
  source 1..80: mol_type = other DNA

SEQ ID NO: 88824 - DNA, 80 bp, synthetic construct
  source 1..80: mol_type = other DNA
cccagctactcgggaggctgagacaggagaatcgcttgaacccaagaggcagaggctgcagtgagccgagatcatgccac

SEQ ID NO: 88825 - DNA, 80 bp, synthetic construct
  source 1..80: mol_type = other DNA
cggaaggctataggtttttgttaagctatatcaatgcaagagccagtaaataaatatttggaacagaacagagagcacag

SEQ ID NO: 88826 - DNA, 80 bp, synthetic construct
  source 1..80: mol_type = other DNA
aggatagattatagacctaactgagaacagcaaaacaattaagagaacagaagaaaatggagaccctctgcagcctgaga

SEQ ID NO: 88827 - DNA, 80 bp, synthetic construct; identical to SEQ ID NO: 16201
  source 1..80: mol_type = other DNA

SEQ ID NO: 88828 - DNA, 80 bp, synthetic construct
  source 1..80: mol_type = other DNA
aatcactgtcacctattagattggcaaaatttagaaaggtagataatgtcgagagtggccaagatatgcgggtatgggaa

SEQ ID NO: 88829 - DNA, 80 bp, synthetic construct
  source 1..80: mol_type = other DNA
tctcgagctctgagaaggagggtgatgacaggcatggcagtacttagttaagtgtccacatgtcccgcgatccagcaatt

SEQ ID NO: 88830 - DNA, 80 bp, synthetic construct
  source 1..80: mol_type = other DNA
cactgaatacgcacctacagactagatgtcgaacagcaacccagctggacttaaagcacattcccaagtaagaaaagcga

SEQ ID NO: 88831 - DNA, 80 bp, synthetic construct; identical to SEQ ID NO: 16202
  source 1..80: mol_type = other DNA

SEQ ID NO: 88832 - DNA, 80 bp, synthetic construct
  source 1..80: mol_type = other DNA
catttcccacgattgcaacagcacgggctaggagctgcagccacttaggtgacgccctgcttcatggcgaggagaatgag

SEQ ID NO: 88833 - DNA, 80 bp, synthetic construct
  source 1..80: mol_type = other DNA
gcccatcatgccccagaagggctctctgggggcaagagagctggtgcagtggcattccacgctgggcagggaggggacag

SEQ ID NO: 88834 - DNA, 80 bp, synthetic construct
  source 1..80: mol_type = other DNA
tttgcaaactacaaagtgcagtcacaacaatagaagtgccttgtgctgctggtcaggtggcatcacccccacctcagctg

SEQ ID NO: 88835 - DNA, 80 bp, synthetic construct
  source 1..80: mol_type = other DNA
ggaaactcctgccaagtcacctgactcccagggaaggctcctgcaacgcagcacactgcccaccccattcattcattcat

SEQ ID NO: 88836 - DNA, 80 bp, synthetic construct; identical to SEQ ID NO: 16203
  source 1..80: mol_type = other DNA

SEQ ID NO: 88837 - DNA, 80 bp, synthetic construct
  source 1..80: mol_type = other DNA
acactaaagggctaaatactttctgtctctatactgggagggggcaatgagagagaacgtgtttttaaggaaaaaggagc

SEQ ID NO: 88838 - DNA, 80 bp, synthetic construct
  source 1..80: mol_type = other DNA
ggggcaatgagagagaacgtgtttttaaggaaaaaggagcactctaaacgcagaagttctctaagggaggagtttcagga

SEQ ID NO: 88839 - DNA, 80 bp, synthetic construct
  source 1..80: mol_type = other DNA
aaggccaccatcaaactctgctcccatctcagacagctcttcgcaaatatttacatagctcctctccgggggctgcagaa

SEQ ID NO: 88840 - DNA, 80 bp, synthetic construct; identical to SEQ ID NO: 16204
  source 1..80: mol_type = other DNA

SEQ ID NO: 88841 - DNA, 80 bp, synthetic construct
  source 1..80: mol_type = other DNA
atagcttcagtgccacaggaaaagttctcctgtgtctaagccccatcctctgggatcgctctggtctgcctcctatctca

SEQ ID NO: 88842 - DNA, 80 bp, synthetic construct
  source 1..80: mol_type = other DNA
ggagaaggtgaggcgtggtggtgacaagagcagggcgtctgatttaaaggaatgggcacaggaagaaatgaagaaggcaa

SEQ ID NO: 88843 - DNA, 80 bp, synthetic construct
  source 1..80: mol_type = other DNA
gcactggggaggctgggttccaaggccggggacagaccgaagcccactgggcgtggggccacctctgaggccctgggcac

SEQ ID NO: 88844 - DNA, 80 bp, synthetic construct
  source 1..80: mol_type = other DNA
gtggagaagctaatagactcctctccagagacaccaccgtccccacccacgcacaagctcccggggacacagggacatgg

SEQ ID NO: 88845 - DNA, 80 bp, synthetic construct; identical to SEQ ID NO: 16205
  source 1..80: mol_type = other DNA

SEQ ID NO: 88846 - DNA, 80 bp, synthetic construct
  source 1..80: mol_type = other DNA
tgtggacccagccagcacctgctgcccggggtgcctccccagggccttgcggggatgttaccgccagccagcctcacacc

SEQ ID NO: 88847 - DNA, 80 bp, synthetic construct
  source 1..80: mol_type = other DNA
ctggctccaggccctgacactgcgcagagcaaggctagaggcaccaacacagcacagctgtccacggcggcgcctgccag

SEQ ID NO: 88848 - DNA, 80 bp, synthetic construct
  source 1..80: mol_type = other DNA
cagcccaagccaggtcccggggatcacaggagggactgagtgtttcaaggcagaagaagcggaggctgaggaaatctgtc

SEQ ID NO: 88849 - DNA, 80 bp, synthetic construct; identical to SEQ ID NO: 16206
  source 1..80: mol_type = other DNA

SEQ ID NO: 88850 - DNA, 80 bp, synthetic construct
  source 1..80: mol_type = other DNA
gctccacctaagagcactccacacataccacagccaaaggaaagagccctcagccgctgctgccaagaggccaaatcccc

SEQ ID NO: 88851 - DNA, 80 bp, synthetic construct
  source 1..80: mol_type = other DNA
gtgtataatttccagcattgtcttagacacaaacccaggacttatgggttcatattcttttcagtacacctgtggttggc

SEQ ID NO: 88852 - DNA, 80 bp, synthetic construct; identical to SEQ ID NO: 16207
  source 1..80: mol_type = other DNA

SEQ ID NO: 88853 - DNA, 80 bp, synthetic construct
  source 1..80: mol_type = other DNA
cccctctagtgccgtccagtgatgccacagactgtgcacgcctgcaaaagcacagcctggaggatgcaaagctttgcagg

SEQ ID NO: 88854 - DNA, 80 bp, synthetic construct
  source 1..80: mol_type = other DNA
ggctcacaagggttgagtcaatgcttatgggacacacgctaggaagcagcaaggtttgcacgcgttccagagccgcctct

SEQ ID NO: 88855 - DNA, 80 bp, synthetic construct
  source 1..80: mol_type = other DNA
gagtaaagacacctggcgcaggagagggtggcagggcggggcgctcgacagctgagacaaagggaactgaggttgcgggg

SEQ ID NO: 88856 - DNA, 80 bp, synthetic construct; identical to SEQ ID NO: 16208
  source 1..80: mol_type = other DNA

SEQ ID NO: 88857 - DNA, 80 bp, synthetic construct
  source 1..80: mol_type = other DNA
cgcgtcacacccccacagaaccctgcccgggctcggggcgttctccagccgcccccacacccccacacccccacgcaccc

SEQ ID NO: 88858 - DNA, 80 bp, synthetic construct
  source 1..80: mol_type = other DNA
cacctcggcccgcgagtagccgcacagctcgcagaagccgtcgttgcagtagatgacggcgcagttctccacccgagcgt

SEQ ID NO: 88859 - DNA, 80 bp, synthetic construct
  source 1..80: mol_type = other DNA
agggggcgaacgcagctgtgcgtgtgccccgatacaggtgcctggccggccgggccgcgcggcgcgccccctcctccgcc

SEQ ID NO: 88860 - DNA, 80 bp, synthetic construct; identical to SEQ ID NO: 16209
  source 1..80: mol_type = other DNA

SEQ ID NO: 88861 - DNA, 80 bp, synthetic construct
  source 1..80: mol_type = other DNA
ggaagttacacgttgaacacctaaggacgctgcatctcattaggtcctctgacaaccccataaggtaggtgttattatcc

SEQ ID NO: 88862 - DNA, 80 bp, synthetic construct
  source 1..80: mol_type = other DNA
agagagggacctgcagctccaaaccctggacacacctggagcctgggcggggcctgagactttggccccacttgtaggaa

SEQ ID NO: 88863 - DNA, 80 bp, synthetic construct
  source 1..80: mol_type = other DNA
agctttttataaacagaagtttccggccactttggcctgtaatgctggggctttcagtagcagttggaattctccccctc

SEQ ID NO: 88864 - DNA, 80 bp, synthetic construct; identical to SEQ ID NO: 16210
  source 1..80: mol_type = other DNA

SEQ ID NO: 88865 - DNA, 80 bp, synthetic construct
  source 1..80: mol_type = other DNA
tcgaaggcatgccccaccccaccacacacccttcactgagatcctggaatacagggatgggacagaaagcctgcccctcc

SEQ ID NO: 88866 - DNA, 80 bp, synthetic construct
  source 1..80: mol_type = other DNA
ctcagggaggccctcaaccagtgtcattgtctccaccccctcaggatcatcttgttcctccgcttcacacaatactgacc

SEQ ID NO: 88867 - DNA, 80 bp, synthetic construct
  source 1..80: mol_type = other DNA
ctgcccacccccaggacatttgcctaatctgggacccttctagaagcctccctaccaggcaggcattaggggtgctgtac

SEQ ID NO: 88868 - DNA, 80 bp, synthetic construct; identical to SEQ ID NO: 16211
  source 1..80: mol_type = other DNA

SEQ ID NO: 88869 - DNA, 80 bp, synthetic construct
  source 1..80: mol_type = other DNA
agagttggggacacctgcacactccatcccacatcccttccctgcacactcagcgtgtcacacacactccgatcccaaaa

SEQ ID NO: 88870 - DNA, 80 bp, synthetic construct
  source 1..80: mol_type = other DNA
cgcccccccatccacactcggaagagctcggcccgcccccagagccccctccccgctcagccccctcccccactcactct

SEQ ID NO: 88871 - DNA, 80 bp, synthetic construct
  source 1..80: mol_type = other DNA
gtggtccccgcaccccgcggccaagccgagcacgggcgcggccaagactggactgcgggcgccgggtcctcgctcggctc

SEQ ID NO: 88872 - DNA, 80 bp, synthetic construct; identical to SEQ ID NO: 16212
  source 1..80: mol_type = other DNA

SEQ ID NO: 88873 - DNA, 80 bp, synthetic construct; identical to SEQ ID NO: 16213
  source 1..80: mol_type = other DNA

SEQ ID NO: 88874 - DNA, 80 bp, synthetic construct
  source 1..80: mol_type = other DNA
cggccctcggccactgccccctccggccccgccccgagcgcccgggctgggccggcagcggccccccgcggcggggctgg

SEQ ID NO: 88875 - DNA, 80 bp, synthetic construct
  source 1..80: mol_type = other DNA
cgcccggcggggcagcgcgggcctggccaagaagtgccccttctcgctggagctggcggagggcggcccggcgggcggcg

SEQ ID NO: 88876 - DNA, 80 bp, synthetic construct
  source 1..80: mol_type = other DNA
gcgcacccacgtccagggccgcgtctacaacttcctcgagcgtcccaccggctggaaatgcttcgtttaccacttcgccg

SEQ ID NO: 88877 - DNA, 80 bp, synthetic construct; identical to SEQ ID NO: 16214
  source 1..80: mol_type = other DNA

SEQ ID NO: 88878 - DNA, 80 bp, synthetic construct
  source 1..80: mol_type = other DNA
gtgctggggagcgcacccttgggtgcagtaagataactcctcaaggtcggctgagactcgaggctcaggagcccccaaga

SEQ ID NO: 88879 - DNA, 80 bp, synthetic construct
  source 1..80: mol_type = other DNA
aaccaagctcatgaaaacctggcttgatgcagagagcggagaggcacgtttgcagctctcactaagaggcagctgtgctc

SEQ ID NO: 88880 - DNA, 80 bp, synthetic construct
  source 1..80: mol_type = other DNA
aagtcacctccgggaaggtccaggctgctctcctccatgcctgcctggggccttcccccgctgccccagtggccctactt

SEQ ID NO: 88881 - DNA, 80 bp, synthetic construct; identical to SEQ ID NO: 16215
  source 1..80: mol_type = other DNA

SEQ ID NO: 88882 - DNA, 80 bp, synthetic construct
  source 1..80: mol_type = other DNA
aagtcttacccacctccctcctcaaagatgtggttggggggtgatcttggagacttttccccaccccagctcccaagccc

SEQ ID NO: 88883 - DNA, 80 bp, synthetic construct
  source 1..80: mol_type = other DNA
aaatgtctagcagatgccaggttcacaggtgctgtgtgctggtggccacctgcctcccggaccccagactctctgagatg

SEQ ID NO: 88884 - DNA, 80 bp, synthetic construct; identical to SEQ ID NO: 16216
  source 1..80: mol_type = other DNA

SEQ ID NO: 88885 - DNA, 80 bp, synthetic construct
  source 1..80: mol_type = other DNA
ggtcctttccagttctgggtcctgtccttgtaagacgtgtgcctggccctgggaagttgtcatgaacagcctccaaccca

SEQ ID NO: 88886 - DNA, 80 bp, synthetic construct
  source 1..80: mol_type = other DNA
tagctggaggccacctgcagcctcacgaaatcaggtccagccttgcgccagtccagccttgtgttgctgtaagaagtctt

SEQ ID NO: 88887 - DNA, 80 bp, synthetic construct
  source 1..80: mol_type = other DNA
agggctagggcgaactctcctgtgtgcgcctggggaagccagccaggatatcctgtcccctcctcggggaaccccccctc

SEQ ID NO: 88888 - DNA, 80 bp, synthetic construct
  source 1..80: mol_type = other DNA
tagctgaggggatgggggtccatacagccctgctgcacccagcggtcctagctcccttgctgtgagccttagccaggggt

SEQ ID NO: 88889 - DNA, 80 bp, synthetic construct; identical to SEQ ID NO: 16217
  source 1..80: mol_type = other DNA

SEQ ID NO: 88890 - DNA, 80 bp, synthetic construct
  source 1..80: mol_type = other DNA
ggcagttgttctgcagctgggcagggaggccagaggccaaggcaggtggtggggctgggcacagaggaggacggggctct

SEQ ID NO: 88891 - DNA, 80 bp, synthetic construct
  source 1..80: mol_type = other DNA
tcccctcacctacatcgcagacccggcccagtgtttctagatccgctcttgccaacatgtcgagtgcctaactgtggctt

SEQ ID NO: 88892 - DNA, 80 bp, synthetic construct
  source 1..80: mol_type = other DNA
tggcctgggcagtgcctggtgggcatggatcaggtggcagggctttgtgtctgggcatggccctgtggctgggctgcctt

SEQ ID NO: 88893 - DNA, 80 bp, synthetic construct; identical to SEQ ID NO: 16218
  source 1..80: mol_type = other DNA

SEQ ID NO: 88894 - DNA, 80 bp, synthetic construct
  source 1..80: mol_type = other DNA
agctgctgctatgagttctgccacgtgccatcctggcatgtggcacgtcttgcagaggacaggaagggtgaacagctcca

SEQ ID NO: 88895 - DNA, 80 bp, synthetic construct
  source 1..80: mol_type = other DNA
aaggcgttgggtgccgagaattcccctcctgctgctaggctggtttcaagtctgctccttctgcacttgacgtccttgcc

SEQ ID NO: 88896 - DNA, 80 bp, synthetic construct
  source 1..80: mol_type = other DNA
tagccaaggtgcagatgcacacgtcctggtcctgagcccctgctcggccctaggcagggcccccagttccctgcattcca

SEQ ID NO: 88897 - DNA, 80 bp, synthetic construct; identical to SEQ ID NO: 16219
  source 1..80: mol_type = other DNA

SEQ ID NO: 88898 - DNA, 80 bp, synthetic construct
  source 1..80: mol_type = other DNA
agggcggcagcgtctggcttcactctcgggaggtgccttggggctggccagtatgggattgctgtcactgtgggtcactc

SEQ ID NO: 88899 - DNA, 80 bp, synthetic construct
  source 1..80: mol_type = other DNA
aaattatcgtggttgacaaagggaggcggctggtgtctctggtactggctgggtgaccacagggatgccgcgtgacccta

SEQ ID NO: 88900 - DNA, 80 bp, synthetic construct; identical to SEQ ID NO: 16220
  source 1..80: mol_type = other DNA

SEQ ID NO: 88901 - DNA, 80 bp, synthetic construct
  source 1..80: mol_type = other DNA
ggcagtggtgatcttgggatgaaactgttccatctcagatcatcaggtattagattctcataagaagcgtgcaacctaga

SEQ ID NO: 88902 - DNA, 80 bp, synthetic construct
  source 1..80: mol_type = other DNA
ggagaaccctgtcttagaggattgaggctcggggccatgggatcggcactgtcattgcccttggagggttctgagcactg

SEQ ID NO: 88903 - DNA, 80 bp, synthetic construct
  source 1..80: mol_type = other DNA
agagccgggctggggagctgactccaggacaggcccctgcccgctctgggacctggggcctgggctctgctccccatttc

SEQ ID NO: 88904 - DNA, 80 bp, synthetic construct
  source 1..80: mol_type = other DNA
gcactattcctggcctcaggcccagtttgtatccatgggcacccccactcccacctagcacttgccaccaggaagcaccc

SEQ ID NO: 88905 - DNA, 80 bp, synthetic construct; identical to SEQ ID NO: 16221
  source 1..80: mol_type = other DNA

SEQ ID NO: 88906 - DNA, 80 bp, synthetic construct
  source 1..80: mol_type = other DNA
ctgtgtcctcgacttccacgcagagcagcccgggcagcttagaggagggagcagaaggagctctgactgagaggggtaga

SEQ ID NO: 88907 - DNA, 80 bp, synthetic construct
  source 1..80: mol_type = other DNA
agctgttctcttgtgaagagtcacgtctgtgctcttggctaggatggctcaaatattataaaacatacagctttgctaat

SEQ ID NO: 88908 - DNA, 80 bp, synthetic construct; identical to SEQ ID NO: 16222
  source 1..80: mol_type = other DNA

SEQ ID NO: 88909 - DNA, 80 bp, synthetic construct
  source 1..80: mol_type = other DNA
ctgagagcgaagaaacttttctatgacttgaatgctagatgcgtggaggagatttatgtgtttgaccacataagaaagaa

SEQ ID NO: 88910 - DNA, 80 bp, synthetic construct
  source 1..80: mol_type = other DNA
tctctactaaaaatacagaattagccgggcgtggtggtgcatgcctgtaatcccagctacttgggaggctgaggcaggag

SEQ ID NO: 88911 - DNA, 80 bp, synthetic construct
  source 1..80: mol_type = other DNA
gggttaatctgtttactacagaaagagtttctgaaaacagaagaaaacccacagccagcaggagatgtgaataccactca

SEQ ID NO: 88912 - DNA, 80 bp, synthetic construct; identical to SEQ ID NO: 16223
  source 1..80: mol_type = other DNA

SEQ ID NO: 88913 - DNA, 80 bp, synthetic construct
  source 1..80: mol_type = other DNA
ctgtaaaaaaggaatgcatagatctctcttattatgaagtgattatcaggatttatttaattatttttttcaggcagggt

SEQ ID NO: 88914 - DNA, 80 bp, synthetic construct
  source 1..80: mol_type = other DNA
tcttcatctgataaaggggaggatgcaagtctggatgtatattaaaaacgaaagcaatggaagcctccaaatcttaaaag

SEQ ID NO: 88915 - DNA, 80 bp, synthetic construct
  source 1..80: mol_type = other DNA
aatcttaaccagaaaaagtagtccctcaaaattgaaatgaaacaaatgagcctaaaaatgtgtgctgaattagtggctta

SEQ ID NO: 88916 - DNA, 80 bp, synthetic construct
  source 1..80: mol_type = other DNA
gtgctgcatgggaattgcaggttaaggtaagtaattgtgttggtatcaccaagaatggaggttttacaaaatatgattca

SEQ ID NO: 88917 - DNA, 80 bp, synthetic construct; identical to SEQ ID NO: 16224
  source 1..80: mol_type = other DNA

SEQ ID NO: 88918 - DNA, 80 bp, synthetic construct
  source 1..80: mol_type = other DNA
attctatacctagaaaaccctaaagagtctgccaaaagccttctggaactgtaagtgaagtctcaggatacaaaatccat

SEQ ID NO: 88919 - DNA, 80 bp, synthetic construct
  source 1..80: mol_type = other DNA
tctgccaccacgcccggctaattttttgtattttttagtagagacggggtttcaccgtgttagccaggatggtcttgatc

SEQ ID NO: 88920 - DNA, 80 bp, synthetic construct
  source 1..80: mol_type = other DNA
taaaatacccaggaatacatctaaccaaggaggtgaaagatctctacacaagagttacaaaacactgctgaaagaaatca

SEQ ID NO: 88921 - DNA, 80 bp, synthetic construct
  source 1..80: mol_type = other DNA
atgtagaaccaaaaaagagccgaaatagcaaaaaaggaactaagccagaggcatcacattacctgacttcaaactatact

SEQ ID NO: 88922 - DNA, 80 bp, synthetic construct; identical to SEQ ID NO: 16225
  source 1..80: mol_type = other DNA

SEQ ID NO: 88923 - DNA, 80 bp, synthetic construct
  source 1..80: mol_type = other DNA
ggtacgcacctgtggtcccagctacccgggaagctgaggcaggagattgcaccactgcgctccagcctgggtgacaagag

SEQ ID NO: 88924 - DNA, 80 bp, synthetic construct
  source 1..80: mol_type = other DNA
taaaaattcacaagtgggacctaattaaagagctgctgcacagcaagagagactgccaagggaataaacagataacctac

SEQ ID NO: 88925 - DNA, 80 bp, synthetic construct
  source 1..80: mol_type = other DNA
ggccaaggtgggcagatcaccaggtcaggagatcgagaccatcctggctaacatggtgaaaccctgtctctactaaaaat

SEQ ID NO: 88926 - DNA, 80 bp, synthetic construct
  source 1..80: mol_type = other DNA
agccgagatcacgccactgcactccagcctgggtgacagagcaagactcggtctcaaaaaaaaaaaaaaaaaaaaaaaaa

SEQ ID NO: 88927 - DNA, 80 bp, synthetic construct; identical to SEQ ID NO: 16226
  source 1..80: mol_type = other DNA

SEQ ID NO: 88928 - DNA, 80 bp, synthetic construct
  source 1..80: mol_type = other DNA
ttctaccaaaaagacatatgcacctaaacattcatggcagaaagacatgagtcaactcaggtgcctgtcaatggtagatc

SEQ ID NO: 88929 - DNA, 80 bp, synthetic construct
  source 1..80: mol_type = other DNA
tgaaaaccaaatactgcgtggtctcatggattataagtgagggctaaacatcaaatccatgtggacataatgatgagaac

SEQ ID NO: 88930 - DNA, 80 bp, synthetic construct
  source 1..80: mol_type = other DNA
tggcatgggagaaaaaaaaaaaaaacagatgtaagttagaagaggttacgcaaaaatcctccatccctgcatttgaatga

SEQ ID NO: 88931 - DNA, 80 bp, synthetic construct; identical to SEQ ID NO: 16227
  source 1..80: mol_type = other DNA

SEQ ID NO: 88932 - DNA, 80 bp, synthetic construct
  source 1..80: mol_type = other DNA
ctcactgaaaataacagaggaagtggatgagctgcattgatggggttcagatcccaagttcatcctgatactgaggggca

SEQ ID NO: 88933 - DNA, 80 bp, synthetic construct
  source 1..80: mol_type = other DNA
tggggttgcgtccttctttgggactcccgcagatgcctgaggcggcagtgctgctgaagtcctgccaggctccagctcct

SEQ ID NO: 88934 - DNA, 80 bp, synthetic construct; identical to SEQ ID NO: 16228
  source 1..80: mol_type = other DNA

SEQ ID NO: 88935 - DNA, 80 bp, synthetic construct
  source 1..80: mol_type = other DNA
aataaatgatgacaaatattggattaaattacttctggtttgctgcatgttccatttttgcccatgccgcacctgccatg

SEQ ID NO: 88936 - DNA, 80 bp, synthetic construct
  source 1..80: mol_type = other DNA
gcaaaacgagagacggacttccttgggacgcggtggtggggacactgtggtctgtctcctctgggcgccccgtggcgccc

SEQ ID NO: 88937 - DNA, 80 bp, synthetic construct; identical to SEQ ID NO: 16229
  source 1..80: mol_type = other DNA

SEQ ID NO: 88938 - DNA, 80 bp, synthetic construct
  source 1..80: mol_type = other DNA
acaagtcagcttgttgttccgtccacagtagagggcggccctgggggtgaacggctgaccgtgagggcgtggtccctccc

SEQ ID NO: 88939 - DNA, 80 bp, synthetic construct
  source 1..80: mol_type = other DNA
gccaaaacctgcggctgggtcagaggactggtttagtaagaatttttttttttttaaatgtggttatctgctagccagaa

SEQ ID NO: 88940 - DNA, 80 bp, synthetic construct
  source 1..80: mol_type = other DNA
cagggggcccctcactcgagtccttgcttgcagtgcccatgggcagcagaggtgtccggagatgcaacagggcccagacc

SEQ ID NO: 88941 - DNA, 80 bp, synthetic construct
  source 1..80: mol_type = other DNA
ccctggtctttcaaagggctctgtggctggtggagggcagcaatgccccaagggaggagcaggtgcccaagcccccaggt

SEQ ID NO: 88942 - DNA, 80 bp, synthetic construct; identical to SEQ ID NO: 16230
  source 1..80: mol_type = other DNA

SEQ ID NO: 88943 - DNA, 80 bp, synthetic construct
  source 1..80: mol_type = other DNA
tctctggccccaaagactgcttcaagcctctggaggagcactttgccccaggctggggcgtgactgcttctggttgaggg

SEQ ID NO: 88944 - DNA, 80 bp, synthetic construct
  source 1..80: mol_type = other DNA
ccaggagtggcgatctgtgagccaatggccgtggctgggggcagcctggggtgttgagaggccctgggcagccaccttgc

SEQ ID NO: 88945 - DNA, 80 bp, synthetic construct; identical to SEQ ID NO: 16231
  source 1..80: mol_type = other DNA

SEQ ID NO: 88946 - DNA, 80 bp, synthetic construct
  source 1..80: mol_type = other DNA
ctggagtgtaggatggcactggtgccgggcctggatttactcagcccagatcacggctgcttttgtttacgtggcccctg

SEQ ID NO: 88947 - DNA, 80 bp, synthetic construct
  source 1..80: mol_type = other DNA
ggatggggggctgaattgtggtcagttatgggtggcgggtagatgggtggacagctggatagatgaagtactgggtgggt

SEQ ID NO: 88948 - DNA, 80 bp, synthetic construct
  source 1..80: mol_type = other DNA
cccaatacagctgggatgcattgctgctccttccgccatcccagcagctgtccagagatgagacccagccccactgtgtc

SEQ ID NO: 88949 - DNA, 80 bp, synthetic construct; identical to SEQ ID NO: 16232
  source 1..80: mol_type = other DNA

SEQ ID NO: 88950 - DNA, 80 bp, synthetic construct
  source 1..80: mol_type = other DNA
ccaccacctcgctgtaatctgggcagcagctgtcatgatcccaccatgtgccccccgtgaggcccccacctgttactgag

SEQ ID NO: 88951 - DNA, 80 bp, synthetic construct
  source 1..80: mol_type = other DNA
gggagggtgggcgctgctggcaagaaccacaggcaaagagggtgccgggggcagggaaggcctggaggtttgaggagcag

SEQ ID NO: 88952 - DNA, 80 bp, synthetic construct
  source 1..80: mol_type = other DNA
tgggtggaagagtcttgggtgaggcccctgaactggtaagcggggcagcggcggcagggggcccagggaagtggggccag

SEQ ID NO: 88953 - DNA, 80 bp, synthetic construct; identical to SEQ ID NO: 16233
  source 1..80: mol_type = other DNA

SEQ ID NO: 88954 - DNA, 80 bp, synthetic construct
  source 1..80: mol_type = other DNA
gtccttggtgcaggtggcgggcggggctggggggctctgtagccttcctggcttcggtcccctggacaggctccacctcc

SEQ ID NO: 88955 - DNA, 80 bp, synthetic construct
  source 1..80: mol_type = other DNA
ggggaggtctgtgggtgcccaggccgagatgtgaaccctgagtttgtgcaactcgagtttcagagtggcggcctctgctc

SEQ ID NO: 88956 - DNA, 80 bp, synthetic construct
  source 1..80: mol_type = other DNA
agcaccgagggctccgtgcccagcaggctcactgtcggcagttgggtctggtttgataaccgtggaccggggtgacaggc

SEQ ID NO: 88957 - DNA, 80 bp, synthetic construct
  source 1..80: mol_type = other DNA
agggatgtggactacggtgcttgccatcagcagatacaagctgtacgcagtgggccgcaggcgctccctgggccggaaca

SEQ ID NO: 88958 - DNA, 80 bp, synthetic construct; identical to SEQ ID NO: 16234
  source 1..80: mol_type = other DNA

SEQ ID NO: 88959 - DNA, 80 bp, synthetic construct
  source 1..80: mol_type = other DNA
tgtccttggggaggcctgggggacaggagttgggggggtgggcagtgcctctgtgtggcagattccagcttctctcaggg

SEQ ID NO: 88960 - DNA, 80 bp, synthetic construct
  source 1..80: mol_type = other DNA
cagggcgcttctcttctcttttcctgtgtgttaaggtagttcaaagtcctcctgcccgaggaagtaagacagcaatctct

SEQ ID NO: 88961 - DNA, 80 bp, synthetic construct; identical to SEQ ID NO: 16235
  source 1..80: mol_type = other DNA

SEQ ID NO: 88962 - DNA, 80 bp, synthetic construct
  source 1..80: mol_type = other DNA
gaggccctggctgcagctggaagctcttgggcagtgcactgtccccacagcggactgcctcctgcagccaggtggcctta

SEQ ID NO: 88963 - DNA, 80 bp, synthetic construct
  source 1..80: mol_type = other DNA
tccctgtccggcccctgccccgtgctggcccctctcacaccttgctcacgctaggtgccttgtaccagtgcctgcttggg

SEQ ID NO: 88964 - DNA, 80 bp, synthetic construct
  source 1..80: mol_type = other DNA
atccacggctccccttgggccttggtgggctccagccatgcctcctggaaggccatttggagcctggctggcaggcagga

SEQ ID NO: 88965 - DNA, 80 bp, synthetic construct; identical to SEQ ID NO: 16236
  source 1..80: mol_type = other DNA

SEQ ID NO: 88966 - DNA, 80 bp, synthetic construct
  source 1..80: mol_type = other DNA
ctgagccccgcctgatgggtgcttgctggggggagaagtcctggctgggacttcccctccccaggctggggtttgtcccc

SEQ ID NO: 88967 - DNA, 80 bp, synthetic construct
  source 1..80: mol_type = other DNA
tgtcgtggagtggggttcaagatgctatcactgacatctgcccaggctcgggggcttctgtgtggtgccagccttgcccg

SEQ ID NO: 88968 - DNA, 80 bp, synthetic construct
  source 1..80: mol_type = other DNA
gctccatgttccttagcctcccttggcctcagtcatcctatctggaaacagggatcataatagttttagtttatagagag

SEQ ID NO: 88969 - DNA, 80 bp, synthetic construct; identical to SEQ ID NO: 16237
  source 1..80: mol_type = other DNA

SEQ ID NO: 88970 - DNA, 80 bp, synthetic construct
  source 1..80: mol_type = other DNA
atggggtgggctgagccatgagcgcccttcgtggcaccttggtgtccggcagggaggcaggggcccaggaggagggcagg

SEQ ID NO: 88971 - DNA, 80 bp, synthetic construct
  source 1..80: mol_type = other DNA
accaggagacagatacagcctcaggaagtggttttgtatctctgctgagaaccacaatccgagtcacatgggaccattga

SEQ ID NO: 88972 - DNA, 80 bp, synthetic construct
  source 1..80: mol_type = other DNA
cacacagccagcaggcgtgcgtcttgcaatgggggctgtggggacccctttgctcccctgatcccttccctgcagaccca

SEQ ID NO: 88973 - DNA, 80 bp, synthetic construct; identical to SEQ ID NO: 16238
  source 1..80: mol_type = other DNA

SEQ ID NO: 88974 - DNA, 80 bp, synthetic construct
  source 1..80: mol_type = other DNA
tggtgtgatcttggttcactgcagcctcgacctccctggctcaagagatcctcccgcctcagcctcctgagtagctggga

SEQ ID NO: 88975 - DNA, 80 bp, synthetic construct
  source 1..80: mol_type = other DNA
aagtagctttacggaggcgtgcttggcatacggtaaactgccccagtttaaagcagacagttccatgagtcctgacattt

SEQ ID NO: 88976 - DNA, 80 bp, synthetic construct
  source 1..80: mol_type = other DNA
cttgtggaattttatttggatggactctggcagccaacgctggtttcgtctggcttcttttattcagcgtcatgattttg

SEQ ID NO: 88977 - DNA, 80 bp, synthetic construct
  source 1..80: mol_type = other DNA
tgcttctcttgtgcaagcaagtggttgaactgctctgcagcccgctgggaagtggaacggctgtgtcatggggtgggtga

SEQ ID NO: 88978 - DNA, 80 bp, synthetic construct; identical to SEQ ID NO: 16239
  source 1..80: mol_type = other DNA

SEQ ID NO: 88979 - DNA, 80 bp, synthetic construct
  source 1..80: mol_type = other DNA
cccgggttcaagtgattctcctgcctcagcctcccaagtagttgggactacagatgcccgccaccatgactggctaatat

SEQ ID NO: 88980 - DNA, 80 bp, synthetic construct
  source 1..80: mol_type = other DNA
tcctctatcagatacctgctctgtgaagccttcccttatcccttgctagtccttcagttcttttaaacaatttttttttt

SEQ ID NO: 88981 - DNA, 80 bp, synthetic construct
  source 1..80: mol_type = other DNA
tttgtatttttatagagacagggtttcaccgtggtctccatctcctgacctcgtgatccgcccgcctcagcctcccaaag

SEQ ID NO: 88982 - DNA, 80 bp, synthetic construct; identical to SEQ ID NO: 16240
  source 1..80: mol_type = other DNA

SEQ ID NO: 88983 - DNA, 80 bp, synthetic construct
  source 1..80: mol_type = other DNA
tttcttgaaaaggggaggggcatcaagtgagacaaatgattatatacttgcgagactttagttagagcccagtaaatcta

SEQ ID NO: 88984 - DNA, 80 bp, synthetic construct
  source 1..80: mol_type = other DNA
tgggaagaaaacccaatgacagttatcaagggagggggtgtgatgatacgtatccaaccgcacatccatcatggccctga

SEQ ID NO: 88985 - DNA, 80 bp, synthetic construct; identical to SEQ ID NO: 16241
  source 1..80: mol_type = other DNA

SEQ ID NO: 88986 - DNA, 80 bp, synthetic construct
  source 1..80: mol_type = other DNA
cacagattttctgttttcttccagaaattttgtagtgtcaggtttcacactgaggtggatattccttttgagttaatgtc

SEQ ID NO: 88987 - DNA, 80 bp, synthetic construct
  source 1..80: mol_type = other DNA
ctgactcggctgcaatcatcctgcagccagactcggggacctaggactctgaacctccaactggtgtggcttcagggtcc

SEQ ID NO: 88988 - DNA, 80 bp, synthetic construct
  source 1..80: mol_type = other DNA
cagcctctgacactccacggcactaaagtgtcaagagacccaggggacctgcgagatccatctcgccccacacaccacca

SEQ ID NO: 88989 - DNA, 80 bp, synthetic construct
  source 1..80: mol_type = other DNA
acacatgtgtatgggtgtgtgcatgggtgtgcacatgtgtatgggtgtgcatgtgtgtataggtgtgtgtatgtgtgcat

SEQ ID NO: 88990 - DNA, 80 bp, synthetic construct; identical to SEQ ID NO: 16242
  source 1..80: mol_type = other DNA

SEQ ID NO: 88991 - DNA, 80 bp, synthetic construct
  source 1..80: mol_type = other DNA
atatatgggtgtgtgtgcacctatgtgtataagtgtatgtgcacatgcgtataggtgtgtgtgttttatgtatgggtgtg

SEQ ID NO: 88992 - DNA, 80 bp, synthetic construct
  source 1..80: mol_type = other DNA
tgtgcacccatgtgtataagtgtatgtgcacatgtgtataggtgtgtgttttatgtgtgggtgtgtgtgcacctttgtgt

SEQ ID NO: 88993 - DNA, 80 bp, synthetic construct; identical to SEQ ID NO: 16243
  source 1..80: mol_type = other DNA

SEQ ID NO: 88994 - DNA, 80 bp, synthetic construct
  source 1..80: mol_type = other DNA
ctgcccattgtcaggctccttccctgtctaggggtacccagtagagctgcccagccctgccactccagcttgtttgagga

SEQ ID NO: 88995 - DNA, 80 bp, synthetic construct
  source 1..80: mol_type = other DNA
tcatggtgatggggtgggcgtggctgggagaagcctgcatatgaaggcctctgtcattggaggagactgtcccatgtccc

SEQ ID NO: 88996 - DNA, 80 bp, synthetic construct
  source 1..80: mol_type = other DNA
gagaaggggtggggctggcagggagggggctccattaattctgatgtcatttattgctgttcctatatttgtataataaa

SEQ ID NO: 88997 - DNA, 80 bp, synthetic construct
  source 1..80: mol_type = other DNA
ctgatgtcatttattgctgttcctatatttgtataataaatggaagaaaatagtggttgggggcttgctggggactcagg

SEQ ID NO: 88998 - DNA, 80 bp, synthetic construct; identical to SEQ ID NO: 16244
  source 1..80: mol_type = other DNA

SEQ ID NO: 88999 - DNA, 80 bp, synthetic construct
  source 1..80: mol_type = other DNA
tggagatggcagcctgcaggttgaagcccccgacagctgggggaggcattgctctgcacaggtagggccatggggcccgc

SEQ ID NO: 89000 - DNA, 80 bp, synthetic construct
  source 1..80: mol_type = other DNA
actgcagggcccttgggagggaggtaagcgggcagccgggccaacctgctgcttggggaagggctgtggctggccccagc

SEQ ID NO: 89001 - DNA, 80 bp, synthetic construct
  source 1..80: mol_type = other DNA
agggtctcagggaccactctgctgtcctcgagtctcctggtggtgaccagtggtgactcttgtggcgcccgggccacagc

SEQ ID NO: 89002 - DNA, 80 bp, synthetic construct; identical to SEQ ID NO: 16245
  source 1..80: mol_type = other DNA

SEQ ID NO: 89003 - DNA, 80 bp, synthetic construct
  source 1..80: mol_type = other DNA
gagagcttgggcccctgctcccagagaggcccagagctggggtggccacacctgctgggaatgctgctggtgggactagg

SEQ ID NO: 89004 - DNA, 80 bp, synthetic construct
  source 1..80: mol_type = other DNA
gaggagcagagccagatgggaaccaggcgtcgacttcagagctgacctttgtgcatttgtgcattgtttgtgttgtgata

SEQ ID NO: 89005 - DNA, 80 bp, synthetic construct
  source 1..80: mol_type = other DNA
tgacaaccacaagcccactttctgcccctggatttagctattctggatgtttcatgtgcctgaaatcatggcaaacgtgg

SEQ ID NO: 89006 - DNA, 80 bp, synthetic construct; identical to SEQ ID NO: 16246
  source 1..80: mol_type = other DNA

SEQ ID NO: 89007 - DNA, 80 bp, synthetic construct
  source 1..80: mol_type = other DNA
gctggagacatagtcagctgtgaagctgtaactttcatgaagacagtgacgtggtttgtcactgcccggatctcatcttg

SEQ ID NO: 89008 - DNA, 80 bp, synthetic construct
  source 1..80: mol_type = other DNA
catgattgtgaggcttccccagccacatggaactgtaagtccaattaaacctctttcttttgtacatttgctcagtcttg

SEQ ID NO: 89009 - DNA, 80 bp, synthetic construct
  source 1..80: mol_type = other DNA
gatatatcaaactttgtaacttaaaagcaaaagatgtaccttttacagtgttcctggaacactcacaaacattgatcata

SEQ ID NO: 89010 - DNA, 80 bp, synthetic construct; identical to SEQ ID NO: 16247
  source 1..80: mol_type = other DNA

SEQ ID NO: 89011 - DNA, 80 bp, synthetic construct
  source 1..80: mol_type = other DNA
tcttataatttcaatcatggaaaaaccccaagtatatatctaaatttagacatgagaaggctctttggcaatcgatttag

SEQ ID NO: 89012 - DNA, 80 bp, synthetic construct
  source 1..80: mol_type = other DNA
ccctggctaactttttgtatttttagtagagacaaaggtttcattatgttggccaggctggtattgaactcctgagcaca

SEQ ID NO: 89013 - DNA, 80 bp, synthetic construct
  source 1..80: mol_type = other DNA
aaaattaggaagaagtggagacaatctcagtatgtgtgagatgaatctgaaccctcatcagaacgtccacagctgacggt

SEQ ID NO: 89014 - DNA, 80 bp, synthetic construct; identical to SEQ ID NO: 16248
  source 1..80: mol_type = other DNA

SEQ ID NO: 89015 - DNA, 80 bp, synthetic construct
  source 1..80: mol_type = other DNA
tacagaccagtgatatgtacacagagagcaatgaaaatcctcattatgatggcagactaaacccatagtgtgttaaaaat

SEQ ID NO: 89016 - DNA, 80 bp, synthetic construct
  source 1..80: mol_type = other DNA
catgcacacacaacagtggtaatggattataattcatgaaaaaagaatctatgcatccacagggacacacccatgtatat

SEQ ID NO: 89017 - DNA, 80 bp, synthetic construct
  source 1..80: mol_type = other DNA
tgtctcccaccaccacttactagttacaaaggaaaaagaatcactttctagaggcaaagctggcgacaccacccgagcca

SEQ ID NO: 89018 - DNA, 80 bp, synthetic construct; identical to SEQ ID NO: 16249
  source 1..80: mol_type = other DNA

SEQ ID NO: 89019 - DNA, 80 bp, synthetic construct
  source 1..80: mol_type = other DNA
cagaagatgaaggaagaacaaaggaacatcttacatgatgacaggcaaagagataatgaaaactgagcacaaagggtttc

SEQ ID NO: 89020 - DNA, 80 bp, synthetic construct
  source 1..80: mol_type = other DNA
gccaaaccatatcattccaccccggcccctccctaatctcatgtcctcacatttcaaaaccaatcatgccttcccaacgg

SEQ ID NO: 89021 - DNA, 80 bp, synthetic construct; identical to SEQ ID NO: 16250
  source 1..80: mol_type = other DNA

SEQ ID NO: 89022 - DNA, 80 bp, synthetic construct
  source 1..80: mol_type = other DNA
cctccctcctggctgctttcacaggctggcattgagtgtctgcagcttttccaggcacatggtgcaagctgttgatggat

SEQ ID NO: 89023 - DNA, 80 bp, synthetic construct
  source 1..80: mol_type = other DNA
gcctggacatccaggcatttccatacatctctgaaatctaggcagagctttccatacctcaattcttgacttctgtgcac

SEQ ID NO: 89024 - DNA, 80 bp, synthetic construct
  source 1..80: mol_type = other DNA
cagtccaggaaaccatttttgcctcctaggcctctgggcctgggatgggaggggctgctcctaaggtctctgacatgccc

SEQ ID NO: 89025 - DNA, 80 bp, synthetic construct
  source 1..80: mol_type = other DNA
tcaaaactgaatgcttttaacaacacccaagtcacctcttgaaagctttgcagcttagaaatttcttccaccaaataccc

SEQ ID NO: 89026 - DNA, 80 bp, synthetic construct; identical to SEQ ID NO: 16251
  source 1..80: mol_type = other DNA

SEQ ID NO: 89027 - DNA, 80 bp, synthetic construct
  source 1..80: mol_type = other DNA
ttataaagggaagaggtttaattgactcacagttccacatggctggggaggtctcacaatcatggcggaagatgaagaaa

SEQ ID NO: 89028 - DNA, 80 bp, synthetic construct
  source 1..80: mol_type = other DNA
gtccctcccacaacacatgggaattatgggagctacagttcaagatgagatttgggtggggacacagccaaaccatatca

SEQ ID NO: 89029 - DNA, 80 bp, synthetic construct
  source 1..80: mol_type = other DNA
aagagaacacccttattcctaagaaatccatgaggaggcgtttagcagaaaacaggcatggtgtctccaagggctcagaa

SEQ ID NO: 89030 - DNA, 80 bp, synthetic construct; identical to SEQ ID NO: 16252
  source 1..80: mol_type = other DNA

SEQ ID NO: 89031 - DNA, 80 bp, synthetic construct
  source 1..80: mol_type = other DNA
ttaatcagagaacgtgcagaaatttttaaagaagaaaagtaaaatgactcatcgtaccaaaagccagagatgccagcttt

SEQ ID NO: 89032 - DNA, 80 bp, synthetic construct
  source 1..80: mol_type = other DNA
ccatcagccaggcgtccccaacccccaggccatgaagcactaccagtccatggcctgttaggaaccaggctgcacagcag

SEQ ID NO: 89033 - DNA, 80 bp, synthetic construct
  source 1..80: mol_type = other DNA
aggttgcctcctctttataagaatctaatgcctgatgatctgtcactgtctcccatcacccccagatgggactgtctagt

SEQ ID NO: 89034 - DNA, 80 bp, synthetic construct; identical to SEQ ID NO: 16253
  source 1..80: mol_type = other DNA

SEQ ID NO: 89035 - DNA, 80 bp, synthetic construct
  source 1..80: mol_type = other DNA
atatgtgtgtgtgtgcatacttgcctatgtgtgtctgtgcaaatacttggtaaaattgagagggtactagacaactcatt

SEQ ID NO: 89036 - DNA, 80 bp, synthetic construct
  source 1..80: mol_type = other DNA
ttgacggctgggttatttcctaattgactgctgtaaatagcattgtgatgcaaatccttgtacactcatttttgcctgga

SEQ ID NO: 89037 - DNA, 80 bp, synthetic construct
  source 1..80: mol_type = other DNA
cgccaacccccaccccacactgcaccacaaagctgggtattatcataaaaacactgccattatgatgaagcaaaaataga

SEQ ID NO: 89038 - DNA, 80 bp, synthetic construct
  source 1..80: mol_type = other DNA
caccctccaggaagtgacctgcaagagaatggagagagtcatggaccggcatggcgtggtaatgcatggtgcgtgtctct

SEQ ID NO: 89039 - DNA, 80 bp, synthetic construct; identical to SEQ ID NO: 16254
  source 1..80: mol_type = other DNA

SEQ ID NO: 89040 - DNA, 80 bp, synthetic construct
  source 1..80: mol_type = other DNA
caattttagacctacagaaaagttccacgacagtactgagagttcctgtggactcctagtattaacatcttaataacggg

SEQ ID NO: 89041 - DNA, 80 bp, synthetic construct
  source 1..80: mol_type = other DNA
tcagtctctctttgtctttcgtgaccttgatgttttagataagtactgggcggctgttttgtagaacgtccctcggtttg

SEQ ID NO: 89042 - DNA, 80 bp, synthetic construct; identical to SEQ ID NO: 16255
  source 1..80: mol_type = other DNA

SEQ ID NO: 89043 - DNA, 80 bp, synthetic construct
  source 1..80: mol_type = other DNA
ggaagagctgtcccctttgttctggttatgtatccagtggcttatgtatatcagcatggtttcatagatacttcttttgt

SEQ ID NO: 89044 - DNA, 80 bp, synthetic construct
  source 1..80: mol_type = other DNA
ctcctgagtagctgggattacaggcacgtaccaccacgcccaactaatattttgtatttttagtggagacggggtttcat

SEQ ID NO: 89045 - DNA, 80 bp, synthetic construct
  source 1..80: mol_type = other DNA
ctcaaattgtgctggcttttgccccagaaacaaccttccattcagcttccatgcccctttggtgggccctgtcttttctt

SEQ ID NO: 89046 - DNA, 80 bp, synthetic construct
  source 1..80: mol_type = other DNA
gcttgtatttccttgcctcagtcttgaaatcacccacttctccaaggagccagggttccttccattggagagtggtcttt

SEQ ID NO: 89047 - DNA, 80 bp, synthetic construct; identical to SEQ ID NO: 16256
  source 1..80: mol_type = other DNA

SEQ ID NO: 89048 - DNA, 80 bp, synthetic construct
  source 1..80: mol_type = other DNA
catcagtgcttttccccacggtgactttgagtatttctttacttctgtactcccttcagtgtgattatgtcattcatctg

SEQ ID NO: 89049 - DNA, 80 bp, synthetic construct
  source 1..80: mol_type = other DNA
tgggtgtcccccgattctgattgtttttagttacttatctgggggtctgtgtgaagggaatgtaaagctgctgtgactcc

SEQ ID NO: 89050 - DNA, 80 bp, synthetic construct; identical to SEQ ID NO: 16257
  source 1..80: mol_type = other DNA

SEQ ID NO: 89051 - DNA, 80 bp, synthetic construct
  source 1..80: mol_type = other DNA
ttacctttcgtccctatggatttgactaatccaggaacttcataaaagtgggatcattgagtactctatttgtcttttgt

SEQ ID NO: 89052 - DNA, 80 bp, synthetic construct
  source 1..80: mol_type = other DNA
tccatgttttagctattgtgaataatgctactatgaatatgggtgtacaaatatcttttcaacgccctgctttcaattct

SEQ ID NO: 89053 - DNA, 80 bp, synthetic construct; identical to SEQ ID NO: 16258
  source 1..80: mol_type = other DNA

SEQ ID NO: 89054 - DNA, 80 bp, synthetic construct
  source 1..80: mol_type = other DNA
tttgttgcctgtgcctttggtctttgtgttagtccatttagcattgctataaaggaatacctgaggctggtaatttataa

SEQ ID NO: 89055 - DNA, 80 bp, synthetic construct
  source 1..80: mol_type = other DNA
ttccagtctccttttaacaaccagatcttgcatgaactcattacctaatcatggggaatctgcccctatgacccaaacag

SEQ ID NO: 89056 - DNA, 80 bp, synthetic construct
  source 1..80: mol_type = other DNA
tttacgttgcacatttagatatttgatccattttgagttaatttttgtatatggtgtgaagtaagggtccagcttccctc

SEQ ID NO: 89057 - DNA, 80 bp, synthetic construct; identical to SEQ ID NO: 16259
  source 1..80: mol_type = other DNA

SEQ ID NO: 89058 - DNA, 80 bp, synthetic construct
  source 1..80: mol_type = other DNA
tgtcttctaatccatgaacatgggatatgtttccatttatttgcatctttttaagtttctttcagtaatgttttgtgggt

SEQ ID NO: 89059 - DNA, 80 bp, synthetic construct
  source 1..80: mol_type = other DNA
gaaatgcaactgattttgcatgtttaccttagattctgtaactttgctgacttcatttattagctctaataagtttttgt

SEQ ID NO: 89060 - DNA, 80 bp, synthetic construct
  source 1..80: mol_type = other DNA
gaaagtggtcaccctggccttattcctgaccttagagggaaaaatttcagtctcatcattatgatgttagctgtggattt

SEQ ID NO: 89061 - DNA, 80 bp, synthetic construct
  source 1..80: mol_type = other DNA
catggatttatttttgtatgttgaaccatccttgcattccaggactaaatctcacatggtcatgatatgtaatactttaa

SEQ ID NO: 89062 - DNA, 80 bp, synthetic construct; identical to SEQ ID NO: 16260
  source 1..80: mol_type = other DNA

SEQ ID NO: 89063 - DNA, 80 bp, synthetic construct
  source 1..80: mol_type = other DNA
gtccatttcatctaggttatccaatttgttgatacacaattgttcacaatactctcttataatcctttttatttctgtag

SEQ ID NO: 89064 - DNA, 80 bp, synthetic construct
  source 1..80: mol_type = other DNA
gttggtctctgctgtggtatttattatcttctttcttctgctagctttgggtttagttcttttgctagttccttaagtgg

SEQ ID NO: 89065 - DNA, 80 bp, synthetic construct
  source 1..80: mol_type = other DNA
atttgagaactatctacacaaaaaagcaccttcataagaaccaaaattcagataagcaatcacagtatctgcttttaact

SEQ ID NO: 89066 - DNA, 80 bp, synthetic construct; identical to SEQ ID NO: 16261
  source 1..80: mol_type = other DNA

SEQ ID NO: 89067 - DNA, 80 bp, synthetic construct
  source 1..80: mol_type = other DNA
tgcaattcctaggcaagtcctattgctgagatgggctcagagccagtggatgtggggggcacacaacctagtgagacacc

SEQ ID NO: 89068 - DNA, 80 bp, synthetic construct
  source 1..80: mol_type = other DNA
cacacatttcaggccctggctcttggacatttccagacacaccctgggccagaagggaatccactgccttggagggaagg

SEQ ID NO: 89069 - DNA, 80 bp, synthetic construct
  source 1..80: mol_type = other DNA
tcttggggtccctgattccaggccttggctcttggacagcatttctggacctgctctaggccagaagggagcccactgac

SEQ ID NO: 89070 - DNA, 80 bp, synthetic construct; identical to SEQ ID NO: 16262
  source 1..80: mol_type = other DNA

SEQ ID NO: 89071 - DNA, 80 bp, synthetic construct
  source 1..80: mol_type = other DNA
ggtagtgcttacagcgggccttgggtgaaacccagtgatgtgttggcttcaggtctgaccagcacagtcccagtggtggt

SEQ ID NO: 89072 - DNA, 80 bp, synthetic construct
  source 1..80: mol_type = other DNA
ttttttttaatatttattttttgaaacagagtttcactcttgttgccaaggctagagcgcaatggtgtgatctcagctca

SEQ ID NO: 89073 - DNA, 80 bp, synthetic construct
  source 1..80: mol_type = other DNA
ttgaactcccgacctcaggtgatctgcccgcctcggcctcccaaagtgctgggattacaggcgtgagccactgcgcctgg

SEQ ID NO: 89074 - DNA, 80 bp, synthetic construct; identical to SEQ ID NO: 16263
  source 1..80: mol_type = other DNA

SEQ ID NO: 89075 - DNA, 80 bp, synthetic construct
  source 1..80: mol_type = other DNA
gaatcaagcagaaattctggagttgaaaaatgcagctgacatattgaagaatgtatcagaatctcttgataacagcattg

SEQ ID NO: 89076 - DNA, 80 bp, synthetic construct
  source 1..80: mol_type = other DNA
atttattgaccttaaagaggaggtagagaaagagataggggtagaaagcttattcaaagggatactaacatagaacttcc

SEQ ID NO: 89077 - DNA, 80 bp, synthetic construct
  source 1..80: mol_type = other DNA
aattgaactccattatatctggcagcagagttttcaatggaaactttatgggccagaagagagtggcaggacatatttaa

SEQ ID NO: 89078 - DNA, 80 bp, synthetic construct
  source 1..80: mol_type = other DNA
ttcttcaatctgaaagaaaagggtgttaataagcaacaagaaatgatgtgaaggtacaaaactcactggtaatacataca

SEQ ID NO: 89079 - DNA, 80 bp, synthetic construct; identical to SEQ ID NO: 16264
  source 1..80: mol_type = other DNA

SEQ ID NO: 89080 - DNA, 80 bp, synthetic construct
  source 1..80: mol_type = other DNA
gtgtattctcattgttcaacttccacttatgagtgagaacatatggtgtttggttttctgttcctgtgttagtttgccga

SEQ ID NO: 89081 - DNA, 80 bp, synthetic construct
  source 1..80: mol_type = other DNA
cagtaaacatatgtgtgcatgtgtctttatagtagaatgatttataatcctttgggtatatacccagtaatgggattgct

SEQ ID NO: 89082 - DNA, 80 bp, synthetic construct
  source 1..80: mol_type = other DNA
ccattctaactggcatgagatggtatctccttgtggttttgatttgcatttctctgatgaccagtaatgattagcttttt

SEQ ID NO: 89083 - DNA, 80 bp, synthetic construct
  source 1..80: mol_type = other DNA
ctcccattctgtaggttgcctattcactctgatgctagcttcttttactgtgcagaagctctttagtttaattagatccc

SEQ ID NO: 89084 - DNA, 80 bp, synthetic construct; identical to SEQ ID NO: 16265
  source 1..80: mol_type = other DNA

SEQ ID NO: 89085 - DNA, 80 bp, synthetic construct
  source 1..80: mol_type = other DNA
tttgaagtcaggtagtgtgatgcctccagctttgttctttttacttaggattgtcttggctatatgggctcttttttggt

SEQ ID NO: 89086 - DNA, 80 bp, synthetic construct
  source 1..80: mol_type = other DNA
ttgtgtcctttcctttccttcagcagtggtttgttgttctccttgaagaggtccttcacatcccttgtaagttgtattcc

SEQ ID NO: 89087 - DNA, 80 bp, synthetic construct
  source 1..80: mol_type = other DNA
tgggctgagacaatggggttttctaaatatacaatcatgtcatctgcaaacagagaaaatttgacttcctcttttcctat

SEQ ID NO: 89088 - DNA, 80 bp, synthetic construct
  source 1..80: mol_type = other DNA
tgtcataaatagctcttgttattttgagatatgttccatcaattcctagtttattgagagtttttggcatgaagggatgt

SEQ ID NO: 89089 - DNA, 80 bp, synthetic construct; identical to SEQ ID NO: 16266
  source 1..80: mol_type = other DNA

SEQ ID NO: 89090 - DNA, 80 bp, synthetic construct
  source 1..80: mol_type = other DNA
ggtcctgggctttttttggttggcaggctattaattactgcctcaatttcagaacttgttgttggtctattcagggattc

SEQ ID NO: 89091 - DNA, 80 bp, synthetic construct
  source 1..80: mol_type = other DNA
ttgcatctatttgattcttctctcttttcttctttgttagtctggctggcagtctattttgttaatcttttcaaaaaacc

SEQ ID NO: 89092 - DNA, 80 bp, synthetic construct
  source 1..80: mol_type = other DNA
gatctctctagctttctgatatgggcatttagtgctataaatttgcctctaaacactgctttagctgtgtcccagaaatt

SEQ ID NO: 89093 - DNA, 80 bp, synthetic construct; identical to SEQ ID NO: 16267
  source 1..80: mol_type = other DNA

SEQ ID NO: 89094 - DNA, 80 bp, synthetic construct
  source 1..80: mol_type = other DNA
attgacagtggagtgttaaagtctcgcactgttattgagtaggaatataagtctctttgtaggtctctaagaacttgttt

SEQ ID NO: 89095 - DNA, 80 bp, synthetic construct
  source 1..80: mol_type = other DNA
cagtggctcatgcctgtaatcccagcactttgggaggctgaggtggttggatcacgagatcaggagatcgagaccatcct

SEQ ID NO: 89096 - DNA, 80 bp, synthetic construct; identical to SEQ ID NO: 16268
  source 1..80: mol_type = other DNA

SEQ ID NO: 89097 - DNA, 80 bp, synthetic construct
  source 1..80: mol_type = other DNA
cagtctgtgtcttttaattggggcatttagcccatttacatttaacgttaacattgttatgtgtgaatttggtcctgtcg

SEQ ID NO: 89098 - DNA, 80 bp, synthetic construct
  source 1..80: mol_type = other DNA
ttgcttgtttggaaaggattttatttatcctttactcatgaagcttagtttggctggatatgaaattctgcttgaaaatt

SEQ ID NO: 89099 - DNA, 80 bp, synthetic construct
  source 1..80: mol_type = other DNA
aatctgacaattatatgtcttggggttgctcttcttgaggagtatcttagtggtgttctctgtatttcctgaatttgaat

SEQ ID NO: 89100 - DNA, 80 bp, synthetic construct; identical to SEQ ID NO: 16269
  source 1..80: mol_type = other DNA

SEQ ID NO: 89101 - DNA, 80 bp, synthetic construct
  source 1..80: mol_type = other DNA
ttagaacatgcttctctagctcagaggaatttgttattacccaccttctgaagcctacttctgtcaattcgtcagtctca

SEQ ID NO: 89102 - DNA, 80 bp, synthetic construct; identical to SEQ ID NO: 16270
  source 1..80: mol_type = other DNA

SEQ ID NO: 89103 - DNA, 80 bp, synthetic construct
  source 1..80: mol_type = other DNA
ctctcctgtttgaggtgtctgttgacccctgttgggaggtcttgcctgctcaggaggcatggggctcagggacccacttg

SEQ ID NO: 89104 - DNA, 80 bp, synthetic construct
  source 1..80: mol_type = other DNA
tgggagttttatctataatcccctgactggggctgctgcctttctttcagagatgccctgcccagtgaggaggaatctag

SEQ ID NO: 89105 - DNA, 80 bp, synthetic construct
  source 1..80: mol_type = other DNA
tcagactgctgtgctggcagtgagaatttgaagccagtggttcttagcttgctgggctccatgggagtgggacccactga

SEQ ID NO: 89106 - DNA, 80 bp, synthetic construct; identical to SEQ ID NO: 16271
  source 1..80: mol_type = other DNA

SEQ ID NO: 89107 - DNA, 80 bp, synthetic construct
  source 1..80: mol_type = other DNA
ggctgcacccactgcctaatcagtcccaatgagatgaacttggtacctcagtcagaaatgcagaaatcacccagtgttga

SEQ ID NO: 89108 - DNA, 80 bp, synthetic construct
  source 1..80: mol_type = other DNA
taacctcagatctaaaacatatggcagacacacaaataaaaagcaagaaattaaagcatgccactagagaaaatcacctt

SEQ ID NO: 89109 - DNA, 80 bp, synthetic construct
  source 1..80: mol_type = other DNA
ctgcccccacaaaaaaagacccaattatctgttgcttacaagaaacacatttcaacctataaaaatacacatagactgaa

SEQ ID NO: 89110 - DNA, 80 bp, synthetic construct
  source 1..80: mol_type = other DNA
tataacaatttcaaagaaacatctaacttaatctgcactgtagaccaaatatacctaatagatatttacaggacatttca

SEQ ID NO: 89111 - DNA, 80 bp, synthetic construct; identical to SEQ ID NO: 16272
  source 1..80: mol_type = other DNA

SEQ ID NO: 89112 - DNA, 80 bp, synthetic construct
  source 1..80: mol_type = other DNA
catttatgcagccaaaaaacatatgaaaatgtgctcatcatcactggtcattagagaaatgcaaatcaaaaccacaatga

SEQ ID NO: 89113 - DNA, 80 bp, synthetic construct
  source 1..80: mol_type = other DNA
agaacccaaataccatttgacccagtgatcccattactgggtatatacccaaaggattataaatcattgtattataaaga

SEQ ID NO: 89114 - DNA, 80 bp, synthetic construct
  source 1..80: mol_type = other DNA
gggacacggatgaagctggaaaccatcattctcagcaaactaacacaagaacagaaaaccaaacaccacatgttctcact

SEQ ID NO: 89115 - DNA, 80 bp, synthetic construct; identical to SEQ ID NO: 16273
  source 1..80: mol_type = other DNA

SEQ ID NO: 89116 - DNA, 80 bp, synthetic construct
  source 1..80: mol_type = other DNA
aagtgaagaaaacaagacaaaagatcaacaaaataaaaagttggttttttttttaaaagataaaattgacaaacctttag

SEQ ID NO: 89117 - DNA, 80 bp, synthetic construct
  source 1..80: mol_type = other DNA
cctagacatgtgcaacctaccaagattgaaccaggaagaaatgcaaacctgaacagaccactaagcagtaatgagattga

SEQ ID NO: 89118 - DNA, 80 bp, synthetic construct; identical to SEQ ID NO: 16274
  source 1..80: mol_type = other DNA

SEQ ID NO: 89119 - DNA, 80 bp, synthetic construct
  source 1..80: mol_type = other DNA
caacagaatgaaggacaaaaccacatgagcatttcaattgatgctgaaaaagcacttgataaaattccacatcccttcaa

SEQ ID NO: 89120 - DNA, 80 bp, synthetic construct
  source 1..80: mol_type = other DNA
ttatttaacacagtagtggaaatcctagctagagcaatcagacaagagaagaaaataaagggcatccaagttggaaagaa

SEQ ID NO: 89121 - DNA, 80 bp, synthetic construct
  source 1..80: mol_type = other DNA
aatctgaaaaacaaatcaagaaagtaatcccatttaaaatagctacaaataaaatacctaggaataaacttaaccaaaga

SEQ ID NO: 89122 - DNA, 80 bp, synthetic construct; identical to SEQ ID NO: 16275
  source 1..80: mol_type = other DNA

SEQ ID NO: 89123 - DNA, 80 bp, synthetic construct
  source 1..80: mol_type = other DNA
gtctacgacaaactcatttttgacaaaggtgccaagaacatgcattgggaaatggacagtctcttcaataaacgatgctg

SEQ ID NO: 89124 - DNA, 80 bp, synthetic construct
  source 1..80: mol_type = other DNA
caaagactgcttgagtaatccctacaagcacaggcaaccgaagcaaaaatggacaaatgggatcacatcaagttaaaaag

SEQ ID NO: 89125 - DNA, 80 bp, synthetic construct; identical to SEQ ID NO: 16276
  source 1..80: mol_type = other DNA

SEQ ID NO: 89126 - DNA, 80 bp, synthetic construct
  source 1..80: mol_type = other DNA
tgggtgcagcacaccaacatggcacatgtatacatatgtaacaaacctgcacattgtgcacatgtaccctaaaacttaaa

SEQ ID NO: 89127 - DNA, 80 bp, synthetic construct
  source 1..80: mol_type = other DNA
aggatgtggagaaaagggaatccttgtacactgttggtgggaatgtaagttactacaaccaccgtggaggacagtttcga

SEQ ID NO: 89128 - DNA, 80 bp, synthetic construct
  source 1..80: mol_type = other DNA
ccatcaacagatgaatggataaagaaaatgctgtgtatacacgcaacggtatactagttagccatgaaaaagaatgagaa

SEQ ID NO: 89129 - DNA, 80 bp, synthetic construct
  source 1..80: mol_type = other DNA
tgggaagggtagtgggggttgtgagggaagtagagatggttaatggaaacaaaaaaaaaatagaaaaatgattaaaacct

SEQ ID NO: 89130 - DNA, 80 bp, synthetic construct; identical to SEQ ID NO: 16277
  source 1..80: mol_type = other DNA

SEQ ID NO: 89131 - DNA, 80 bp, synthetic construct
  source 1..80: mol_type = other DNA
ggtaaatgtttgaggtagtagatacccccatttacctctatgtgattattatgtactgtctgtctatgttagaatatctc

SEQ ID NO: 89132 - DNA, 80 bp, synthetic construct
  source 1..80: mol_type = other DNA
gttagtaacgcttttgttgtgtcccagcaagttttggtacattgtcttctcatctttatttgcatttaagtattttctaa

SEQ ID NO: 89133 - DNA, 80 bp, synthetic construct
  source 1..80: mol_type = other DNA
tgctctctctccctctgcccccctttttctttgattcattggttaagagtatgttgtttcatttccatacatttgttaat

SEQ ID NO: 89134 - DNA, 80 bp, synthetic construct; identical to SEQ ID NO: 16278
  source 1..80: mol_type = other DNA

SEQ ID NO: 89135 - DNA, 80 bp, synthetic construct
  source 1..80: mol_type = other DNA
catcttcttgcagcctcgaacctttaagtgtgcagcgtcctcttttgtctcttgtgacctttctaggtttattataaaac

SEQ ID NO: 89136 - DNA, 80 bp, synthetic construct
  source 1..80: mol_type = other DNA
cgagtctctagtagacagcatgtagctggatcatgtttatctattctgccactgccgatatcaccttttgatatacagac

SEQ ID NO: 89137 - DNA, 80 bp, synthetic construct
  source 1..80: mol_type = other DNA
caatgtcgtattcaagaaatcatcctcaaatccaaagtctttctattttctcctatgtgttcctattgctttaggtctta

SEQ ID NO: 89138 - DNA, 80 bp, synthetic construct; identical to SEQ ID NO: 16279
  source 1..80: mol_type = other DNA

SEQ ID NO: 89139 - DNA, 80 bp, synthetic construct
  source 1..80: mol_type = other DNA
ttcagggtagattcctagaaatgggagtgttgggctgaaagagaagcccgtagttttgttggatgtgaccaaatttccct

SEQ ID NO: 89140 - DNA, 80 bp, synthetic construct
  source 1..80: mol_type = other DNA
gtgtctaaaagtcatgtgtgtgtgtatttgtaaatcgtctgtcttctcatttccaacttcttccattgggtttttggttc

SEQ ID NO: 89141 - DNA, 80 bp, synthetic construct
  source 1..80: mol_type = other DNA
atttcgcatgtttatatcatcaaatttatcatgcttctttctactgactccggattcagggccacagttgagagcttttt

SEQ ID NO: 89142 - DNA, 80 bp, synthetic construct; identical to SEQ ID NO: 16280
  source 1..80: mol_type = other DNA

SEQ ID NO: 89143 - DNA, 80 bp, synthetic construct
  source 1..80: mol_type = other DNA
aagtcaggaccactgctgtagaaaacagggtttgcaggtagataaggtggcgggtgcagcgggaggaagagaaaaggatg

SEQ ID NO: 89144 - DNA, 80 bp, synthetic construct
  source 1..80: mol_type = other DNA
tggggagagagtgcgggctgggctcacaagttaggggaggtgtcagtgtgtaaatgacatgagcgcaggggctagacagg

SEQ ID NO: 89145 - DNA, 80 bp, synthetic construct; identical to SEQ ID NO: 16281
  source 1..80: mol_type = other DNA

SEQ ID NO: 89146 - DNA, 80 bp, synthetic construct
  source 1..80: mol_type = other DNA
gctgctgaaggtgaggtttgcaaacactaggcatgcatgtttgaggtaccacaacctccaccaacccatggtggtcacca

SEQ ID NO: 89147 - DNA, 80 bp, synthetic construct
  source 1..80: mol_type = other DNA
gcagggcaagctttggggagcactgtccagacagtgccctggacactgcacctcaggtcaggacacagctcccgaggcct

SEQ ID NO: 89148 - DNA, 80 bp, synthetic construct
  source 1..80: mol_type = other DNA
gcctccatgtacggggctgggacccaccaggacccagactcccagactagcaggtgggcttctcagagcacagagggtgt

SEQ ID NO: 89149 - DNA, 80 bp, synthetic construct; identical to SEQ ID NO: 16282
  source 1..80: mol_type = other DNA

SEQ ID NO: 89150 - DNA, 80 bp, synthetic construct
  source 1..80: mol_type = other DNA
tctgcatgggatttgactgagcaatctggaaggcttcctggaggaggagctattgctcagggtgaaatagaggtcttgaa

SEQ ID NO: 89151 - DNA, 80 bp, synthetic construct
  source 1..80: mol_type = other DNA
tcatgaaactgaaaatttaagtttttaatatcacatattatttcatgaagagtggcttcggactttggggtagggtctgg

SEQ ID NO: 89152 - DNA, 80 bp, synthetic construct
  source 1..80: mol_type = other DNA
ctgtgctgtgtggggggtgtttggtgtcctaggaggagtctctgtcctgagcagagacagaggaaggcagggcagcctgc

SEQ ID NO: 89153 - DNA, 80 bp, synthetic construct
  source 1..80: mol_type = other DNA
ctcctcagctgtgaactgtctgggactgggccaggagacagtcctgggatagggaaagaaaagaggggcttccgggggtg

SEQ ID NO: 89154 - DNA, 80 bp, synthetic construct; identical to SEQ ID NO: 16283
  source 1..80: mol_type = other DNA

SEQ ID NO: 89155 - DNA, 80 bp, synthetic construct
  source 1..80: mol_type = other DNA
aactactcgggaggctgaggtaggagcatcacttgagcccaggagttcaaggttgcagcaagctatgatcttgccactgc

SEQ ID NO: 89156 - DNA, 80 bp, synthetic construct
  source 1..80: mol_type = other DNA
cctgacctgcctgggcaacatggtgaaaccccgtctctactaaaaatacaaaaattagctgggtgtggtggctcacatct

SEQ ID NO: 89157 - DNA, 80 bp, synthetic construct; identical to SEQ ID NO: 16284
  source 1..80: mol_type = other DNA

SEQ ID NO: 89158 - DNA, 80 bp, synthetic construct
  source 1..80: mol_type = other DNA
ctcctgggcgtggccttcctccgatcacagtgtgagcgaatctccctgcccatcactctgctcccctggcccagaccagg

SEQ ID NO: 89159 - DNA, 80 bp, synthetic construct
  source 1..80: mol_type = other DNA
gagacgtcaccctttctcttttccccattggtggtggttttatgtgttcatttacggtttattttctctctccctgtgtc

SEQ ID NO: 89160 - DNA, 80 bp, synthetic construct
  source 1..80: mol_type = other DNA
cttgggtgtgactgtcacggaaaaggaggagacgtggggtggggaagggggcagcccctactgttcctggcagcagggcc

SEQ ID NO: 89161 - DNA, 80 bp, synthetic construct
  source 1..80: mol_type = other DNA
gtcaggcccagcagcccttcagggtcagtctctgcatgggtggtaatatggcttacctgagtcctggtcagtctgtggcc

SEQ ID NO: 89162 - DNA, 80 bp, synthetic construct; identical to SEQ ID NO: 16285
  source 1..80: mol_type = other DNA

SEQ ID NO: 89163 - DNA, 80 bp, synthetic construct
  source 1..80: mol_type = other DNA
ctcaatctgccctgtggagcccggcctggcctgcagccccctgtgcagggaaaaacccgcggttttccctggtggagggc

SEQ ID NO: 89164 - DNA, 80 bp, synthetic construct
  source 1..80: mol_type = other DNA
tcccagggttaggtgcctcccaaatgccagggcttcccatgggccatacacactcagtcgaacaagatttgcacaaaacc

SEQ ID NO: 89165 - DNA, 80 bp, synthetic construct; identical to SEQ ID NO: 16286
  source 1..80: mol_type = other DNA

SEQ ID NO: 89166 - DNA, 80 bp, synthetic construct
  source 1..80: mol_type = other DNA
gtcccgcagtggcttccggggatgtgcagccctgccctgaggccctctggccgcctcttgctctctgagcagggatgtcc

SEQ ID NO: 89167 - DNA, 80 bp, synthetic construct
  source 1..80: mol_type = other DNA
ccactgaggaggcacccctagccgtgggagttggcgtgtcctgctccccagggcggtctgtccccttggcgagatccttg

SEQ ID NO: 89168 - DNA, 80 bp, synthetic construct
  source 1..80: mol_type = other DNA
cactgggaagagcggtccttggaggagagagctcccgaggagaaagccatgatgctgtgctgcgctctgggccaccaggt

SEQ ID NO: 89169 - DNA, 80 bp, synthetic construct; identical to SEQ ID NO: 16287
  source 1..80: mol_type = other DNA

SEQ ID NO: 89170 - DNA, 80 bp, synthetic construct
  source 1..80: mol_type = other DNA
ggtccctgctgggcccaaggcatccctgccgtgttcagagttccacaggcaccagtccaccatgctggggcctactggga

SEQ ID NO: 89171 - DNA, 80 bp, synthetic construct
  source 1..80: mol_type = other DNA
gttgccattctctctgcctagactgggcctccacctctgagaagccctcccttattgccccttccagtgggctgggagag

SEQ ID NO: 89172 - DNA, 80 bp, synthetic construct
  source 1..80: mol_type = other DNA
ccacagtgacactgggggactctttgtctccatttggggggtgtgcaggtcactcctggtgccctggtcagcttccccaa

SEQ ID NO: 89173 - DNA, 80 bp, synthetic construct
  source 1..80: mol_type = other DNA
ccagctcactcttagcctggtcatagagcccggcagcatcttgccaggtgcctgtggtcccagatcctggggctgcccca

SEQ ID NO: 89174 - DNA, 80 bp, synthetic construct; identical to SEQ ID NO: 16288
  source 1..80: mol_type = other DNA

SEQ ID NO: 89175 - DNA, 80 bp, synthetic construct
  source 1..80: mol_type = other DNA
gctgaggcaggagaatggcatgaacccgggaggcagagcttgcagtgagccgagattgcgccactgcactccagcctggg

SEQ ID NO: 89176 - DNA, 80 bp, synthetic construct
  source 1..80: mol_type = other DNA
cctcgcccccttcccgagtggaggtgctctgggagctctgcctgcttcctcaagtctttcttgtttttttatgttatttt

SEQ ID NO: 89177 - DNA, 80 bp, synthetic construct; identical to SEQ ID NO: 16289
  source 1..80: mol_type = other DNA

SEQ ID NO: 89178 - DNA, 80 bp, synthetic construct
  source 1..80: mol_type = other DNA
ccacccgtccccgaggcccctgctgcccagcaagaccaccaccctctgctccaggacagcgcagccgccatcagtggggg

SEQ ID NO: 89179 - DNA, 80 bp, synthetic construct
  source 1..80: mol_type = other DNA
tccatggggtcacttcagtttgtcctcccggcgccttctaaatatactctctgtgggtgtcttatcacagcccagggagc

SEQ ID NO: 89180 - DNA, 80 bp, synthetic construct
  source 1..80: mol_type = other DNA
tgctgaggccctgaccacctctatgtgtgccatggctgcagtgacagcccagaccccaggggccgggcatcccacagctc

SEQ ID NO: 89181 - DNA, 80 bp, synthetic construct
  source 1..80: mol_type = other DNA
tgtcagggagacccggagtccagttctcgccaaccgctcgatgctgtgtgacttgaggcaggtcccttaacctctctgag

SEQ ID NO: 89182 - DNA, 80 bp, synthetic construct; identical to SEQ ID NO: 16290
  source 1..80: mol_type = other DNA

SEQ ID NO: 89183 - DNA, 80 bp, synthetic construct
  source 1..80: mol_type = other DNA
ctgggttctcagcaggactctttgccgggatcctcatgctacggccaccacctgattttgtcgataaagttttattagga

SEQ ID NO: 89184 - DNA, 80 bp, synthetic construct
  source 1..80: mol_type = other DNA
gaccccccagagtttgcctggtgtcaccgggaagcttcctggctgcccgagggtcccccagcacctgtccctctagggcc

SEQ ID NO: 89185 - DNA, 80 bp, synthetic construct
  source 1..80: mol_type = other DNA
gaatgagcccttggtaggtgccaggcggggccagccctcatccccactgcaaggcctgagcgtccaggagccccgtgcgc

SEQ ID NO: 89186 - DNA, 80 bp, synthetic construct; identical to SEQ ID NO: 16291
  source 1..80: mol_type = other DNA

SEQ ID NO: 89187 - DNA, 80 bp, synthetic construct
  source 1..80: mol_type = other DNA
agggtttccccctggcaggatccccacctcctgcacctgtcctgacttggtcttctggggcagcccctaagacgcttctt

SEQ ID NO: 89188 - DNA, 80 bp, synthetic construct
  source 1..80: mol_type = other DNA
ctgttggcatgcagcctgggggtgaggggtggcggaacgctgcctcagtaccacgtcctgctcaaaggccacttgcgagc

SEQ ID NO: 89189 - DNA, 80 bp, synthetic construct; identical to SEQ ID NO: 16292
  source 1..80: mol_type = other DNA

SEQ ID NO: 89190 - DNA, 80 bp, synthetic construct
  source 1..80: mol_type = other DNA
caggccagggcctccgcagaaggagggtttggggtccaggcttcatgtggggggtcttgtaacatgggagggtagacgct

SEQ ID NO: 89191 - DNA, 80 bp, synthetic construct
  source 1..80: mol_type = other DNA
ttcttggggttcccagtccagatctgtgttggaaaaagtgtcagctgaaaccccaagaggctggggacagccttggtcct

SEQ ID NO: 89192 - DNA, 80 bp, synthetic construct
  source 1..80: mol_type = other DNA
gatcccatggctttcaagaactttttaaagaaatgagactcagctgccgcggaacaagccacaggtaaagagtataagac

SEQ ID NO: 89193 - DNA, 80 bp, synthetic construct; identical to SEQ ID NO: 16293
  source 1..80: mol_type = other DNA

SEQ ID NO: 89194 - DNA, 80 bp, synthetic construct
  source 1..80: mol_type = other DNA
gggagcctcatggacctactcccgacgtggcagctgcctgctgcagatgggccagccatgtcccgcctgtgccgggaatc

SEQ ID NO: 89195 - DNA, 80 bp, synthetic construct
  source 1..80: mol_type = other DNA
aagaattttttcagatgcaattccattaaggatctggaggtgagaggatgaaaaggaaactctgagctttgagtacattt

SEQ ID NO: 89196 - DNA, 80 bp, synthetic construct
  source 1..80: mol_type = other DNA
gagccaggatcataccactgtcctccagcctgggtgacagaacaagactctgtctcaaaaacaaaacaaaacaaaacaaa

SEQ ID NO: 89197 - DNA, 80 bp, synthetic construct; identical to SEQ ID NO: 16294
  source 1..80: mol_type = other DNA

SEQ ID NO: 89198 - DNA, 80 bp, synthetic construct
  source 1..80: mol_type = other DNA
cccccaccccccaggatgacgtatggcctgatgtggcattcctgcctcaggaccatggcaccaagtggtggcgctggggc

SEQ ID NO: 89199 - DNA, 80 bp, synthetic construct
  source 1..80: mol_type = other DNA
catgatgtgacaccttccacatggggttcagagcggggaacctgtgcctagtgtccagcccagcgtggggccctcggtgt

SEQ ID NO: 89200 - DNA, 80 bp, synthetic construct
  source 1..80: mol_type = other DNA
ggtgaggggggtgaccagctggtagctttttctgaggtgcagattcagccctggggaacagccctggcaggctgtgagac

SEQ ID NO: 89201 - DNA, 80 bp, synthetic construct
  source 1..80: mol_type = other DNA
ttggaggcatttggagtctcccaggatgacttttttttttaagcccctagaagtggtttggggtttaagcgtcaatattt

SEQ ID NO: 89202 - DNA, 80 bp, synthetic construct; identical to SEQ ID NO: 16295
  source 1..80: mol_type = other DNA

SEQ ID NO: 89203 - DNA, 80 bp, synthetic construct
  source 1..80: mol_type = other DNA
atccaccccaaaacttctctcccaaactgaaattctgcacccatgaaatcccactccctctccccggccccgccatcctg

SEQ ID NO: 89204 - DNA, 80 bp, synthetic construct
  source 1..80: mol_type = other DNA
tcatgtccttccatgcatgatgctttcagactgacaaaactcttcaagtattaacgtaatttttaatgtttacagattca

SEQ ID NO: 89205 - DNA, 80 bp, synthetic construct; identical to SEQ ID NO: 16296
  source 1..80: mol_type = other DNA

SEQ ID NO: 89206 - DNA, 80 bp, synthetic construct
  source 1..80: mol_type = other DNA
ccatttaggagcaccactcaggggccctagtgtgtgcggcagggcaggtcatggagtctccagccttcagctcgcgttag

SEQ ID NO: 89207 - DNA, 80 bp, synthetic construct
  source 1..80: mol_type = other DNA
gcacccggggctgagatgttgaaatgatgtcggataattcaccgggtgccttcggggctggtactcgccgtcactgctcc

SEQ ID NO: 89208 - DNA, 80 bp, synthetic construct
  source 1..80: mol_type = other DNA
tgtcttctctcccccaccccttcgctagcctgtcctgcttcccactccgagtccaaaacacgcataggattcgtcctctc

SEQ ID NO: 89209 - DNA, 80 bp, synthetic construct; identical to SEQ ID NO: 16297
  source 1..80: mol_type = other DNA

SEQ ID NO: 89210 - DNA, 80 bp, synthetic construct
  source 1..80: mol_type = other DNA
ccctgctggctcccaacccccgggcctggagccctgtcttctgcctcagccgcgattccactgcacgggactttcccagg

SEQ ID NO: 89211 - DNA, 80 bp, synthetic construct
  source 1..80: mol_type = other DNA
gtcaagaatcttcctgctgcagtaactccacatatctgagccagctgtgtctcctgagcacaggacatgggcaggagagg

SEQ ID NO: 89212 - DNA, 80 bp, synthetic construct
  source 1..80: mol_type = other DNA
ttttttttgtggtggagtcttgctctgtcacccaggctggagtgcagtggcgcgatctcggctcactgcaacctccacct

SEQ ID NO: 89213 - DNA, 80 bp, synthetic construct
  source 1..80: mol_type = other DNA
cccgcctcggcctcccaaagtgctgggattgcaggtgtgagccgccgcgcccggccccaccactgctttctatgctgtgg

SEQ ID NO: 89214 - DNA, 80 bp, synthetic construct; identical to SEQ ID NO: 16298
  source 1..80: mol_type = other DNA

SEQ ID NO: 89215 - DNA, 80 bp, synthetic construct
  source 1..80: mol_type = other DNA
gcagtggcgtggattcgggtgcatgactcgcagacatggctgtcgcttggctgaacggtggcccctgaggtgtctgtgtc

SEQ ID NO: 89216 - DNA, 80 bp, synthetic construct
  source 1..80: mol_type = other DNA
ggattcttctaagagaagcaggaggatctgagttggaggaagagacgggaggatggaagccaggctcggcgacgggaaag

SEQ ID NO: 89217 - DNA, 80 bp, synthetic construct; identical to SEQ ID NO: 16299
  source 1..80: mol_type = other DNA

SEQ ID NO: 89218 - DNA, 80 bp, synthetic construct
  source 1..80: mol_type = other DNA
tggatccttcccagggcccctggtgggtggtgggttttgccacatctttgcagtagacagcactggcagcttccggctta

SEQ ID NO: 89219 - DNA, 80 bp, synthetic construct
  source 1..80: mol_type = other DNA
catctccatgtgcagatggtgccctggccctctctgcacgccgtgggcctggggagcaggcaggtggcatcttctgcccc

SEQ ID NO: 89220 - DNA, 80 bp, synthetic construct
  source 1..80: mol_type = other DNA
gcaaggggcagagacccagcccagccctgggggctgcagggtgtggggacagggcctgcagcttggcacaaagactcttc

SEQ ID NO: 89221 - DNA, 80 bp, synthetic construct; identical to SEQ ID NO: 16300
  source 1..80: mol_type = other DNA

SEQ ID NO: 89222 - DNA, 80 bp, synthetic construct
  source 1..80: mol_type = other DNA
agcgtccctggctggaagcaccgcgtttgcaaatgccaggcagcttatgcagccagcgctttgggcaggcgggagtcagg

SEQ ID NO: 89223 - DNA, 80 bp, synthetic construct
  source 1..80: mol_type = other DNA
cattggggcttagagattaaatgaaggaagtcccacggggctgatcacctactgtgcaccaggctgcgtcccgggcatgg

SEQ ID NO: 89224 - DNA, 80 bp, synthetic construct
  source 1..80: mol_type = other DNA
gctggcaggaccctcaagctgggcttttaggctgggcagcagcaggtgcacgggccctgaggtgggccgggctgggcaca

SEQ ID NO: 89225 - DNA, 80 bp, synthetic construct
  source 1..80: mol_type = other DNA
ggatgggcagggtgcagacaggggctggctgggttcggctctgcaggtagagctgaccggtgtggcagggacagggtgtc

SEQ ID NO: 89226 - DNA, 80 bp, synthetic construct; identical to SEQ ID NO: 16301
  source 1..80: mol_type = other DNA

SEQ ID NO: 89227 - DNA, 80 bp, synthetic construct
  source 1..80: mol_type = other DNA
gcagggggccttctggctgtcctggggtgggttagaagccactcaggatggcaggatctcagggagcggagggagcctgg

SEQ ID NO: 89228 - DNA, 80 bp, synthetic construct
  source 1..80: mol_type = other DNA
ggaatccccctagaggcgggaggaaggccgggcgggccctggagggtacgtttgcagtggcagcagctccctatctttat

SEQ ID NO: 89229 - DNA, 80 bp, synthetic construct
  source 1..80: mol_type = other DNA
ccacagcctgccgcctggaggctcctctgggaagcagacgcttggtgcaggtgtcaggacccccacctggcgggctggct

SEQ ID NO: 89230 - DNA, 80 bp, synthetic construct; identical to SEQ ID NO: 16302
  source 1..80: mol_type = other DNA

SEQ ID NO: 89231 - DNA, 80 bp, synthetic construct
  source 1..80: mol_type = other DNA
tcgtcccttcccgtggcgggacggcatccctcgtgcggacctacctctagtgtgtgcttaccagctaatggatgactggg

SEQ ID NO: 89232 - DNA, 80 bp, synthetic construct
  source 1..80: mol_type = other DNA
gctgtccaccatcgagcagtatgccgccctggccacggggactctcttctggatggtacgtagcatctgagggcatggct

SEQ ID NO: 89233 - DNA, 80 bp, synthetic construct
  source 1..80: mol_type = other DNA
tgccacaggcgagggggaccaaggactgaggggaacctggagctggtggtctgaaagggcttcctggaggaggggcttcc

SEQ ID NO: 89234 - DNA, 80 bp, synthetic construct; identical to SEQ ID NO: 16303
  source 1..80: mol_type = other DNA

SEQ ID NO: 89235 - DNA, 80 bp, synthetic construct
  source 1..80: mol_type = other DNA
agcacctctccgtggccaggcttttgtgttttcctgtcttgtcgtggaatagttctagtatctacaaaggaagagagtgt

SEQ ID NO: 89236 - DNA, 80 bp, synthetic construct
  source 1..80: mol_type = other DNA
ttacctttcctttgttgcttctggaccttgagccatagctggaagaactcacctgtggtttcctccagccctgaccaggt

SEQ ID NO: 89237 - DNA, 80 bp, synthetic construct; identical to SEQ ID NO: 16304
  source 1..80: mol_type = other DNA

SEQ ID NO: 89238 - DNA, 80 bp, synthetic construct
  source 1..80: mol_type = other DNA
agtgaacgttgccatcaccttatccagccccgggaagaaactcgaaggccgcgggtgaataaactgggggagactgacat

SEQ ID NO: 89239 - DNA, 80 bp, synthetic construct
  source 1..80: mol_type = other DNA
ttattgttgccatcacatagggagtttctagtctatcatgttttccaggcactttcctggcgtctgcgaaagctgttaat

SEQ ID NO: 89240 - DNA, 80 bp, synthetic construct
  source 1..80: mol_type = other DNA
gcggggccctcctggcttctgtgggcgggccggctgccaggcggggggtgcgcacctcccgtgctcaggaagggtccttc

SEQ ID NO: 89241 - DNA, 80 bp, synthetic construct; identical to SEQ ID NO: 16305
  source 1..80: mol_type = other DNA

SEQ ID NO: 89242 - DNA, 80 bp, synthetic construct
  source 1..80: mol_type = other DNA
tgtctagcaggaggatgttctgccccggccaactgacagggttggctcaactgcaggagtgggcacggcatgtcctttgc

SEQ ID NO: 89243 - DNA, 80 bp, synthetic construct
  source 1..80: mol_type = other DNA
tgtgtgtacatgtgtgtatgtgagtgcccacatgcacgggaatgtgtacacgcatgtgcgtgtttatgggtgagctgtgt

SEQ ID NO: 89244 - DNA, 80 bp, synthetic construct
  source 1..80: mol_type = other DNA
gtagtgtgcgcctgtgagcatgtattgtatgtttatgcatggctgtgttgtgtgtatttatgtatagctatgtgtcgctg

SEQ ID NO: 89245 - DNA, 80 bp, synthetic construct; identical to SEQ ID NO: 16306
  source 1..80: mol_type = other DNA

SEQ ID NO: 89246 - DNA, 80 bp, synthetic construct
  source 1..80: mol_type = other DNA
agctcgagaattagacgtgccctgggctccacatgcccgtctgcagctcgagaattagacgtgccctgggcttcatgtgc

SEQ ID NO: 89247 - DNA, 80 bp, synthetic construct
  source 1..80: mol_type = other DNA
ccaggcaggagggcagaccctacacagtgctgagctgtgcccccagggaagcctccaagatggtcctcatcccagcagcc

SEQ ID NO: 89248 - DNA, 80 bp, synthetic construct
  source 1..80: mol_type = other DNA
gcatagagccccctttctgctgtagtcccccttgcagtcccctctgccttttccactgcttggaaggcagagagaccctg

SEQ ID NO: 89249 - DNA, 80 bp, synthetic construct; identical to SEQ ID NO: 16307
  source 1..80: mol_type = other DNA

SEQ ID NO: 89250 - DNA, 80 bp, synthetic construct
  source 1..80: mol_type = other DNA
tggggctctgggaggctcacaagcatctgtctgcctcaggccattccacactccctgagggtgggaccccgtggctgcgc

SEQ ID NO: 89251 - DNA, 80 bp, synthetic construct
  source 1..80: mol_type = other DNA
cacttcccagcagtctctcgaagcactggccgcgtggaaacaaatccttcaaggggatttgagggtccagctgtcactca

SEQ ID NO: 89252 - DNA, 80 bp, synthetic construct
  source 1..80: mol_type = other DNA
ggggagacagtgaccacttgcttggaggagggggcgctcaggtgggaggggcacagtgagaaggaggtaagctggtgctg

SEQ ID NO: 89253 - DNA, 80 bp, synthetic construct
  source 1..80: mol_type = other DNA
gagggaggctgtgcagggttgcaggaaggacggttgggggcgcttcggggaggtacgagaagcaaaggtgtttgcagccc

SEQ ID NO: 89254 - DNA, 80 bp, synthetic construct; identical to SEQ ID NO: 16308
  source 1..80: mol_type = other DNA

SEQ ID NO: 89255 - DNA, 80 bp, synthetic construct
  source 1..80: mol_type = other DNA
ctggggtccggccggcaccgtgaacaccacgtgaacaccacgtcggaaatctgctgggcagggagatttcctcaaggcct

SEQ ID NO: 89256 - DNA, 80 bp, synthetic construct
  source 1..80: mol_type = other DNA
acgtgtgcgtgcctgtgggtagctccgtgcgcacatgcgtacacatatgcctggtgtgtgtgtgcacacgtgtgtctgac

SEQ ID NO: 89257 - DNA, 80 bp, synthetic construct; identical to SEQ ID NO: 16309
  source 1..80: mol_type = other DNA

SEQ ID NO: 89258 - DNA, 80 bp, synthetic construct
  source 1..80: mol_type = other DNA
agcctccactgcctgggtttctgctgcgccttcagcacacagcgaggcctcagtttccctcccagctcagagcaaggcct

SEQ ID NO: 89259 - DNA, 80 bp, synthetic construct
  source 1..80: mol_type = other DNA
tgtttttcacctgggacccgcagctgctctgatgaggagcctgctctgcgcacggcctggggcggtttcccgcagcacca

SEQ ID NO: 89260 - DNA, 80 bp, synthetic construct
  source 1..80: mol_type = other DNA
gcctggtgagctcctatgggtctgacgaagccccgtcctgcacacttgcttcgggggcaactccccactagactggttgc

SEQ ID NO: 89261 - DNA, 80 bp, synthetic construct; identical to SEQ ID NO: 16310
  source 1..80: mol_type = other DNA

SEQ ID NO: 89262 - DNA, 80 bp, synthetic construct
  source 1..80: mol_type = other DNA
acttgacagatgtgggccctctgtctgcacagcccccagggcacggggtggcctgcagctctgcccagccagacttcagg

SEQ ID NO: 89263 - DNA, 80 bp, synthetic construct
  source 1..80: mol_type = other DNA
aaagtggaccaggggcaggtggagcagggtaggcccaagtgtctgtctggggcagctggggacacccaggtgggctgaac

SEQ ID NO: 89264 - DNA, 80 bp, synthetic construct
  source 1..80: mol_type = other DNA
ggagcccagtgttgatcactgaggaccaccggatacaagtccctcctgccttcccctttagtgacactgaagctgttgaa

SEQ ID NO: 89265 - DNA, 80 bp, synthetic construct; identical to SEQ ID NO: 16311
  source 1..80: mol_type = other DNA

SEQ ID NO: 89266 - DNA, 80 bp, synthetic construct
  source 1..80: mol_type = other DNA
tctcagagcctgaggcccacggggcatggcatgaagacccggtggttctgttcccccgggacagccttggtccagcctca

SEQ ID NO: 89267 - DNA, 80 bp, synthetic construct
  source 1..80: mol_type = other DNA
ggctccacggtgttaagggattctagaaatttcctgctgtgccaggctgcagcagagactccggccccaccaggcttcct

SEQ ID NO: 89268 - DNA, 80 bp, synthetic construct
  source 1..80: mol_type = other DNA
ggtggctggcagggctcagcagttgcctggcctgtgggggcagaggacctggggagacatgctgagccctcccagcgaga

SEQ ID NO: 89269 - DNA, 80 bp, synthetic construct
  source 1..80: mol_type = other DNA
ccctcccagcctgccagagggaccgctgggcctatctccagccacgtgggtcgcgagagtcgacctgggctgcgtgatgg

SEQ ID NO: 89270 - DNA, 80 bp, synthetic construct; identical to SEQ ID NO: 16312
  source 1..80: mol_type = other DNA

SEQ ID NO: 89271 - DNA, 80 bp, synthetic construct
  source 1..80: mol_type = other DNA
tcatcatatgaatttgagggcaacccaggggtctccaaaccatggcccacagggtggctccctgtgtgtgtaaataaagc

SEQ ID NO: 89272 - DNA, 80 bp, synthetic construct
  source 1..80: mol_type = other DNA
ctgaccttccaggaaaggtttgccacgctatttatttagcaggataattttggaaagagcagttgctaggggcatttaaa

SEQ ID NO: 89273 - DNA, 80 bp, synthetic construct; identical to SEQ ID NO: 16313
  source 1..80: mol_type = other DNA

SEQ ID NO: 89274 - DNA, 80 bp, synthetic construct
  source 1..80: mol_type = other DNA
gttggagagtagtggcatactcacggctcactgcagcctcggcctcctggcctcaagtgttcccacttcagcctcctgag

SEQ ID NO: 89275 - DNA, 80 bp, synthetic construct
  source 1..80: mol_type = other DNA
actgcactcagcctgctttgtttttatcctgagtcatttgagagtaagttggaggcagtatgaccgtttctccgtataaa

SEQ ID NO: 89276 - DNA, 80 bp, synthetic construct
  source 1..80: mol_type = other DNA
gcttctttgacctggagcagccctgcccggccttcccttcttggtctctctcttgggcagggaagggcggtggacatgga

SEQ ID NO: 89277 - DNA, 80 bp, synthetic construct
  source 1..80: mol_type = other DNA
ttgacagggtttggattggctgcgttcctgtctgaaggcagctgcttgggaggaggacagctgacattctttcatgcgaa

SEQ ID NO: 89278 - DNA, 80 bp, synthetic construct; identical to SEQ ID NO: 16314
  source 1..80: mol_type = other DNA

SEQ ID NO: 89279 - DNA, 80 bp, synthetic construct
  source 1..80: mol_type = other DNA
aggaggtagaggaaactgcaagattttttaaaccttctccaaaaacacgtaacccgattctgtccaagcgatttgtgaga

SEQ ID NO: 89280 - DNA, 80 bp, synthetic construct
  source 1..80: mol_type = other DNA
ggcagccgaggcatgagtggatgatgtcccgtcggcagcccgtggtccctctggggggcaaggtgcctgttccccattgc

SEQ ID NO: 89281 - DNA, 80 bp, synthetic construct; identical to SEQ ID NO: 16315
  source 1..80: mol_type = other DNA

SEQ ID NO: 89282 - DNA, 80 bp, synthetic construct
  source 1..80: mol_type = other DNA
ctgggagccaagccgatggctgtgctggccgaagggaacaccgccatggtgctctgctctctgcagccctgggtctggtt

SEQ ID NO: 89283 - DNA, 80 bp, synthetic construct
  source 1..80: mol_type = other DNA
agtgggattagagtgtgcggccatggggacaggtgtttcctttatgttctgcctgagggctggaaagagcctcatcagtg

SEQ ID NO: 89284 - DNA, 80 bp, synthetic construct
  source 1..80: mol_type = other DNA
gcaggcaggcttgggggagctggcactggcactgcacgtggggctcctagggggctgctagggaagtcattgggggataa

SEQ ID NO: 89285 - DNA, 80 bp, synthetic construct; identical to SEQ ID NO: 16316
  source 1..80: mol_type = other DNA

SEQ ID NO: 89286 - DNA, 80 bp, synthetic construct
  source 1..80: mol_type = other DNA
agacagctcttcccacgagattttctttctcccgggtataaaactggccaacgggatgcctggtgggatgactggggtac

SEQ ID NO: 89287 - DNA, 80 bp, synthetic construct
  source 1..80: mol_type = other DNA
cttgactcctggccacttgggaaggtgcgttctggtcctctgggcctcacagctttgtgccctctagggtggcaatggga

SEQ ID NO: 89288 - DNA, 80 bp, synthetic construct
  source 1..80: mol_type = other DNA
aaaacacactcgtgtccagcccagatgccttatggagaagaggatgcacaggcacacacgcacagacatatgtgcacgga

SEQ ID NO: 89289 - DNA, 80 bp, synthetic construct; identical to SEQ ID NO: 16317
  source 1..80: mol_type = other DNA

SEQ ID NO: 89290 - DNA, 80 bp, synthetic construct
  source 1..80: mol_type = other DNA
tctttatttcattttagctttctttagcggggcctgtgtctcttctcactgaccgttttctgaaactggctggggagggt

SEQ ID NO: 89291 - DNA, 80 bp, synthetic construct
  source 1..80: mol_type = other DNA
tcccagaaagcccccttctgctcaagttctcttgcttcatctcaggctcaggtgttttgagtttttttttttttttaaat

SEQ ID NO: 89292 - DNA, 80 bp, synthetic construct
  source 1..80: mol_type = other DNA
tgaggcccaggtcctgtggctggtcctcgcatagacatcagctaagggggtttgggggccagtcggcagcctctggaggc

SEQ ID NO: 89293 - DNA, 80 bp, synthetic construct; identical to SEQ ID NO: 16318
  source 1..80: mol_type = other DNA

SEQ ID NO: 89294 - DNA, 80 bp, synthetic construct
  source 1..80: mol_type = other DNA
tcagtccagagccaatggccaagagggcaaaagggtgttggtggacgatgcctcctcccctggcgggggcggggaaggaa

SEQ ID NO: 89295 - DNA, 80 bp, synthetic construct
  source 1..80: mol_type = other DNA
aggccttgtttaaaatgtaggatttgacaaatctggacatgggtgtacgccacaggaccatcaccacaattgagacagca

SEQ ID NO: 89296 - DNA, 80 bp, synthetic construct
  source 1..80: mol_type = other DNA
tgtctggttccatatttgagagtcatccaggctgtggcatgtaataattcattcctttttcattgctgagccgtatccca

SEQ ID NO: 89297 - DNA, 80 bp, synthetic construct; identical to SEQ ID NO: 16319
  source 1..80: mol_type = other DNA

SEQ ID NO: 89298 - DNA, 80 bp, synthetic construct
  source 1..80: mol_type = other DNA
tcttttcacgtgtttcattggcatccaggaaacatctttggtgacatatctttttaaatgtttcacccattgtaaaattg

SEQ ID NO: 89299 - DNA, 80 bp, synthetic construct
  source 1..80: mol_type = other DNA
agtgcagtggcgtaaacgtagctcactgcaacctcgaattcctgggctccgaggatcctcccacctcagcctcccaagta

SEQ ID NO: 89300 - DNA, 80 bp, synthetic construct
  source 1..80: mol_type = other DNA
gctccaggcccaatagtatcttttaaagaccaaacattttcaattttatgaagtcaaatatagctttttccttttaaata

SEQ ID NO: 89301 - DNA, 80 bp, synthetic construct; identical to SEQ ID NO: 16320
  source 1..80: mol_type = other DNA

SEQ ID NO: 89302 - DNA, 80 bp, synthetic construct
  source 1..80: mol_type = other DNA
agtcacacactgggattgttacagccctataatacggttaaaataagttagggtaatttagccaactttgttttgctatt

SEQ ID NO: 89303 - DNA, 80 bp, synthetic construct
  source 1..80: mol_type = other DNA
catggggagaattgatgtcttaaccaatattgaatcctctgatcaatgagattatctatctcatatatatatatgtgtgt

SEQ ID NO: 89304 - DNA, 80 bp, synthetic construct
  source 1..80: mol_type = other DNA
gtgtgtatatatatatatggttacatacctaatatgtatatggttatatatctcttataagggttatatatctcatatac

SEQ ID NO: 89305 - DNA, 80 bp, synthetic construct
  source 1..80: mol_type = other DNA
ttttgacaaatttatcttgaatcttgcaacctttctaaactcatttgttccagtggcttttgaaaaaatgaattccattg

SEQ ID NO: 89306 - DNA, 80 bp, synthetic construct; identical to SEQ ID NO: 16321
  source 1..80: mol_type = other DNA

SEQ ID NO: 89307 - DNA, 80 bp, synthetic construct
  source 1..80: mol_type = other DNA
ggataaaccacacttggtcatgctctagtattctttttgtatatcactggacttgacttgttaaaattttgctaacaacc

SEQ ID NO: 89308 - DNA, 80 bp, synthetic construct
  source 1..80: mol_type = other DNA
tgtttggtggactccatcaggaaagttgtttaggtaggcctggactttgcttgatgagaagattgttaactagattttaa

SEQ ID NO: 89309 - DNA, 80 bp, synthetic construct
  source 1..80: mol_type = other DNA
ggtgattgataggtgataattatattcaggtgattggtaattatattcaggtgattgataattctatttaggtgattgat

SEQ ID NO: 89310 - DNA, 80 bp, synthetic construct; identical to SEQ ID NO: 16322
  source 1..80: mol_type = other DNA

SEQ ID NO: 89311 - DNA, 80 bp, synthetic construct
  source 1..80: mol_type = other DNA
attgaatagaaatttttttttcctttctaatacaggcacttggtggtataaacatccacaaattttgtgtttttttatcc

SEQ ID NO: 89312 - DNA, 80 bp, synthetic construct
  source 1..80: mol_type = other DNA
aaatatattaagacttgatttagggcccagaatatgatttatcttggtaaatactccattgtgtgcttggaaagagtgtg

SEQ ID NO: 89313 - DNA, 80 bp, synthetic construct
  source 1..80: mol_type = other DNA
ctattaattcattcttgggagaaggatgttagaatctccaactgtatttgtggatttctctctttattcttcagttcttt

SEQ ID NO: 89314 - DNA, 80 bp, synthetic construct
  source 1..80: mol_type = other DNA
tgttttgaagcttcgttcttgggtgcattagcatttaggattgttatgtcctcttgagaagtcaacacatttgtcattat

SEQ ID NO: 89315 - DNA, 80 bp, synthetic construct; identical to SEQ ID NO: 16323
  source 1..80: mol_type = other DNA

SEQ ID NO: 89316 - DNA, 80 bp, synthetic construct
  source 1..80: mol_type = other DNA
caaactatttttctcctgaaaagtacagctaatttgcatttattcataggactgacattcttggtctcaactctgtcatt

SEQ ID NO: 89317 - DNA, 80 bp, synthetic construct
  source 1..80: mol_type = other DNA
cagtggcatgatctcagctcactgaaacccccatctcccagggtttaagtgattttcgtgcctcagcctcccaagtagct

SEQ ID NO: 89318 - DNA, 80 bp, synthetic construct
  source 1..80: mol_type = other DNA
gtgcccagcctgtatttttgtcctaatagttacctttatacatatgcctttcaaagtttccttggtccctggtttctcat

SEQ ID NO: 89319 - DNA, 80 bp, synthetic construct; identical to SEQ ID NO: 16324
  source 1..80: mol_type = other DNA

SEQ ID NO: 89320 - DNA, 80 bp, synthetic construct
  source 1..80: mol_type = other DNA
atggcacgtgccaagacccggatggggcgtgtgcctggcgcgggtggagggagctgtgaggagcctgtagcattcagaga

SEQ ID NO: 89321 - DNA, 80 bp, synthetic construct
  source 1..80: mol_type = other DNA
tagaggccaggcccaggataaggtggcggcaggcaggtctctaagcagtggcagctcagacccgaggtcccagggtcatg

SEQ ID NO: 89322 - DNA, 80 bp, synthetic construct
  source 1..80: mol_type = other DNA
catgggatgggaatatccatgcgtataatcggtcaggttagttgctgtattctgacttatttgaaagatttcatagcgaa

SEQ ID NO: 89323 - DNA, 80 bp, synthetic construct; identical to SEQ ID NO: 16325
  source 1..80: mol_type = other DNA

SEQ ID NO: 89324 - DNA, 80 bp, synthetic construct
  source 1..80: mol_type = other DNA
gtgggtgtctgaggagaagttcgccattgtcgactttggggtaaagtgaggacctgtctggcgggaataaaggggcccta

SEQ ID NO: 89325 - DNA, 80 bp, synthetic construct
  source 1..80: mol_type = other DNA
ccacccaagggagagtggctgggtggagagggggcaggctgagatctgagaagccaggctagggggttgtggagcaaatg

SEQ ID NO: 89326 - DNA, 80 bp, synthetic construct
  source 1..80: mol_type = other DNA
caaacctgggtccaggcacctggggcgaccctccttggccgtccttgccatcctcgccatcctctctccacacatctgac

SEQ ID NO: 89327 - DNA, 80 bp, synthetic construct
  source 1..80: mol_type = other DNA
agcctcgtgacctgctcatagcacagctgggacacttccagtgactgctctgcgaggcccggggtaggggcgtggggggg

SEQ ID NO: 89328 - DNA, 80 bp, synthetic construct; identical to SEQ ID NO: 16326
  source 1..80: mol_type = other DNA

SEQ ID NO: 89329 - DNA, 80 bp, synthetic construct
  source 1..80: mol_type = other DNA
ctggaccccaatgtgcaggtctgggtgtggatgtatctgtatgtctttgcggagctcagatgagagatgctcagagttgt

SEQ ID NO: 89330 - DNA, 80 bp, synthetic construct
  source 1..80: mol_type = other DNA
ccgtggcgcggcgcctggatttccgacacactgcagcatctgcatccttgccgtcacccctcacaccccctgctagggtc

SEQ ID NO: 89331 - DNA, 80 bp, synthetic construct; identical to SEQ ID NO: 16327
  source 1..80: mol_type = other DNA

SEQ ID NO: 89332 - DNA, 80 bp, synthetic construct
  source 1..80: mol_type = other DNA
gcaaatagggctggagtcccgagtacaaggcatggacaggagccaggcttcacctagcacctggctccccgggggcccag

SEQ ID NO: 89333 - DNA, 80 bp, synthetic construct
  source 1..80: mol_type = other DNA
gggtcatagctgcctctccctctaaatagattaactaaaaagtattgttgactgactcatgcatttcttaggttttctta

SEQ ID NO: 89334 - DNA, 80 bp, synthetic construct
  source 1..80: mol_type = other DNA
cagttcgatgagtcctggcaaacatttatggtcctgtaaccacccccaaagtcaagatccaaggtgttcccatcacccga

SEQ ID NO: 89335 - DNA, 80 bp, synthetic construct; identical to SEQ ID NO: 16328
  source 1..80: mol_type = other DNA

SEQ ID NO: 89336 - DNA, 80 bp, synthetic construct
  source 1..80: mol_type = other DNA
agatgcatattttcctttcgaagaaactgccaaagcattttgcaaaatggtaggcccgttttccactcttaccatcaatg

SEQ ID NO: 89337 - DNA, 80 bp, synthetic construct
  source 1..80: mol_type = other DNA
ctttgatggaggatctgtccagtttgttgctggttttaacaattaggttgtcttcttagaataatcatgtgagttgtaag

SEQ ID NO: 89338 - DNA, 80 bp, synthetic construct
  source 1..80: mol_type = other DNA
ttttttctttagggttcatgttctttgtgttctgtctaagaaatattcgcctaatccaagattacaaagttttttctcct

SEQ ID NO: 89339 - DNA, 80 bp, synthetic construct; identical to SEQ ID NO: 16329
  source 1..80: mol_type = other DNA

SEQ ID NO: 89340 - DNA, 80 bp, synthetic construct
  source 1..80: mol_type = other DNA
gaattttgattggcattgcattggatatgtagataaatttggatctcatacacgtcttagtaataccgagttttctgatc

SEQ ID NO: 89341 - DNA, 80 bp, synthetic construct
  source 1..80: mol_type = other DNA
acgtcttagtaataccgagttttctgatccacgaacacggtcttgctccccggtgtcttagatatttttcaacaccactc

SEQ ID NO: 89342 - DNA, 80 bp, synthetic construct
  source 1..80: mol_type = other DNA
cttgcgtcctgtgactttgctcatgttacttattagtttgagaaggtttcttgttcatctgtttttggggttttttttgt

SEQ ID NO: 89343 - DNA, 80 bp, synthetic construct
  source 1..80: mol_type = other DNA
gggctgctatccttatcttactcctaaggtgaagtgaggtaatctttcaccattaggtgtggtgggagctgtagggtttt

SEQ ID NO: 89344 - DNA, 80 bp, synthetic construct; identical to SEQ ID NO: 16330
  source 1..80: mol_type = other DNA

SEQ ID NO: 89345 - DNA, 80 bp, synthetic construct
  source 1..80: mol_type = other DNA
ctcccaggctcaagtgattctcctgcctcagcctcccgagtagctgggattacaggcgcccgccaccacacccagctaat

SEQ ID NO: 89346 - DNA, 80 bp, synthetic construct
  source 1..80: mol_type = other DNA
accatgcccagctgtcatgatgcgttttaaaacacctttttggatgtgactgacttcggttgtgtgtagaacttccacgc

SEQ ID NO: 89347 - DNA, 80 bp, synthetic construct; identical to SEQ ID NO: 16331
  source 1..80: mol_type = other DNA

SEQ ID NO: 89348 - DNA, 80 bp, synthetic construct
  source 1..80: mol_type = other DNA
gacatgtcattcctgagcagcttaggggctgtggggtttgcagacctctgaatgcagccatctgcagggggaccctcctc

SEQ ID NO: 89349 - DNA, 80 bp, synthetic construct
  source 1..80: mol_type = other DNA
tcccttctcagaggaatgaaatttaagaagacaggccctacaatttcacgacaagtctgcttttgactctcccgtttact

SEQ ID NO: 89350 - DNA, 80 bp, synthetic construct
  source 1..80: mol_type = other DNA
gggaaaacaactgtttaaattcaccgcctgttattaaaatctctagatttgcagaatcagagtgaggtactcagcagtca

SEQ ID NO: 89351 - DNA, 80 bp, synthetic construct; identical to SEQ ID NO: 16332
  source 1..80: mol_type = other DNA

SEQ ID NO: 89352 - DNA, 80 bp, synthetic construct
  source 1..80: mol_type = other DNA
ctcgtttaactggcctggagacggaaacagccctgcctggggaagatgggggatttgctttaaatacgtgtaaagctgcc

SEQ ID NO: 89353 - DNA, 80 bp, synthetic construct
  source 1..80: mol_type = other DNA
aggattcagggcctgatttgcgggcagccccacctgcctttttgactgttcagagccctgagtgcctcccatatgcccac

SEQ ID NO: 89354 - DNA, 80 bp, synthetic construct
  source 1..80: mol_type = other DNA
agggaccccgcctggggagagagaagcttcaggccctgaggcctatggcctggacctctctagagaccctagaacagacc

SEQ ID NO: 89355 - DNA, 80 bp, synthetic construct
  source 1..80: mol_type = other DNA
cgacgcatcgcaccagaccctgcctccgcctccatacagcgccccccggccggcaagtccatgtccaggtttcccgtttg

SEQ ID NO: 89356 - DNA, 80 bp, synthetic construct; identical to SEQ ID NO: 16333
  source 1..80: mol_type = other DNA

SEQ ID NO: 89357 - DNA, 80 bp, synthetic construct
  source 1..80: mol_type = other DNA
agagaaaaagcttgtcaagccctgttctaaactatgaagacaatgttggaggttgctttctatacccacagagccgttga

SEQ ID NO: 89358 - DNA, 80 bp, synthetic construct
  source 1..80: mol_type = other DNA
caacttcatgaggatcagaacatggataacatgtggctcaactaaacaaccaaaagcaaaagggagaagtcaacagagtc

SEQ ID NO: 89359 - DNA, 80 bp, synthetic construct; identical to SEQ ID NO: 16334
  source 1..80: mol_type = other DNA

SEQ ID NO: 89360 - DNA, 80 bp, synthetic construct
  source 1..80: mol_type = other DNA
gaaggttaaatatgataacgggaggagattttaatgtacctcttttggaataggacagttctagtgggcacaaaataagt

SEQ ID NO: 89361 - DNA, 80 bp, synthetic construct
  source 1..80: mol_type = other DNA
ctggcagggctcagtgggacggctcatctcccctctgcatagtatcagctggggctggagcctccacagcattgcatcta

SEQ ID NO: 89362 - DNA, 80 bp, synthetic construct
  source 1..80: mol_type = other DNA
ggaggactggcaaagaacttcataggactgtgctttaaaaccagcactatcacttcgaaccctagtaatggagttgtttt

SEQ ID NO: 89363 - DNA, 80 bp, synthetic construct
  source 1..80: mol_type = other DNA
cttacctatttgggaattaaacaacactctcctaaatagccagaaagaagagattgatgtgggaagtgcgggccctgtag

SEQ ID NO: 89364 - DNA, 80 bp, synthetic construct; identical to SEQ ID NO: 16335
  source 1..80: mol_type = other DNA

SEQ ID NO: 89365 - DNA, 80 bp, synthetic construct
  source 1..80: mol_type = other DNA
tttgcttcatcagaatctgctgataagcccagttcggagcagagactagatgggccagcctgtgggcactctgcctagcg

SEQ ID NO: 89366 - DNA, 80 bp, synthetic construct
  source 1..80: mol_type = other DNA
acctcattaaaccgcctgaaacgtgtgtaactctagtcggcccccgtaaggcaccggcagtacatgtgaaattaaaatta

SEQ ID NO: 89367 - DNA, 80 bp, synthetic construct
  source 1..80: mol_type = other DNA
taggcccagggtgtggtccaagttcctttcttagctaacccctccaccctgagaagcctcccccactacacccacacatg

SEQ ID NO: 89368 - DNA, 80 bp, synthetic construct; identical to SEQ ID NO: 16336
  source 1..80: mol_type = other DNA

SEQ ID NO: 89369 - DNA, 80 bp, synthetic construct
  source 1..80: mol_type = other DNA
tcttgttgacaccccgggatgtgcccttgtggctacttagacgtagagcccggggcagggggagggccagcccctgtggt

SEQ ID NO: 89370 - DNA, 80 bp, synthetic construct
  source 1..80: mol_type = other DNA
cagcaagtcccttgcctctctcgctcaccaggaagaagacacgtccgggcagctggcaggtggggctagttctggaggga

SEQ ID NO: 89371 - DNA, 80 bp, synthetic construct; identical to SEQ ID NO: 16337
  source 1..80: mol_type = other DNA

SEQ ID NO: 89372 - DNA, 80 bp, synthetic construct
  source 1..80: mol_type = other DNA
atggggggccgtgacatccggtcaggagggggttagcatctcagacatgggggggagatgtccagcccaggggaatgagg

SEQ ID NO: 89373 - DNA, 80 bp, synthetic construct
  source 1..80: mol_type = other DNA
caggggggtgacgtccatcctgggggaatggggggggtgacatccatcttgggggtactggggggtggcgtccatcctgg

SEQ ID NO: 89374 - DNA, 80 bp, synthetic construct
  source 1..80: mol_type = other DNA
ggggagacagtaacatcccaaacatgggggatgatgtccagagtgggggtcttcaggtctttacgggcccctcagcctcc

SEQ ID NO: 89375 - DNA, 80 bp, synthetic construct; identical to SEQ ID NO: 16338
  source 1..80: mol_type = other DNA

SEQ ID NO: 89376 - DNA, 80 bp, synthetic construct
  source 1..80: mol_type = other DNA
tacaaaaaattagccgggcgaggtggcgggcgcctgtagtcccagctactcgggaggctgaggcagtagaatggtgtgaa

SEQ ID NO: 89377 - DNA, 80 bp, synthetic construct
  source 1..80: mol_type = other DNA
ggccaggtgacgtggagggccccaggcagctgggccagcacgggacggggcgtcaggtcagcggggctcttctgtgctgt

SEQ ID NO: 89378 - DNA, 80 bp, synthetic construct
  source 1..80: mol_type = other DNA
gtcctaggaggtgggcactgctggtgccccattttacaggtgtggatgctgagcacagagaggctgagctgctcgtctgg

SEQ ID NO: 89379 - DNA, 80 bp, synthetic construct
  source 1..80: mol_type = other DNA
gccacccctggctgcctggagctagctgtgcaggggcccagaagccctcccctccgaggaggtgggcctgttccaggcta

SEQ ID NO: 89380 - DNA, 80 bp, synthetic construct; identical to SEQ ID NO: 16339
  source 1..80: mol_type = other DNA

SEQ ID NO: 89381 - DNA, 80 bp, synthetic construct
  source 1..80: mol_type = other DNA
gagggccccagctgtgcccagcacgtcactgggggcccacaagctctcagcacaggctggcggctgggagcagctggcca

SEQ ID NO: 89382 - DNA, 80 bp, synthetic construct
  source 1..80: mol_type = other DNA
gtgtggagttggaacagctggccccaaagcccgccagccgggctctatgctgtggggaccactgcccccacagggaagcg

SEQ ID NO: 89383 - DNA, 80 bp, synthetic construct
  source 1..80: mol_type = other DNA
aaaagtgtgggtacagatctcaggcttttcaagggtgggtggattcctggctccagtggaaggtccccaggcctaagtct

SEQ ID NO: 89384 - DNA, 80 bp, synthetic construct; identical to SEQ ID NO: 16340
  source 1..80: mol_type = other DNA

SEQ ID NO: 89385 - DNA, 80 bp, synthetic construct
  source 1..80: mol_type = other DNA
aacttcaaaacacattgaaccccagaaaatcttcgctatgttggagattcgccggctgataaaagcaaaacaatagataa

SEQ ID NO: 89386 - DNA, 80 bp, synthetic construct
  source 1..80: mol_type = other DNA
accggataccagcatggggtcggcctgcggggccatgtgtctcctcctgtgtgaccttgagctaccttgagcttccattt

SEQ ID NO: 89387 - DNA, 80 bp, synthetic construct; identical to SEQ ID NO: 16341
  source 1..80: mol_type = other DNA

SEQ ID NO: 89388 - DNA, 80 bp, synthetic construct
  source 1..80: mol_type = other DNA
tgctgaactaacaatagtcagtgaagattaagaactaaaggctcaaggacagctacagatgaccacagctggagtgcggc

SEQ ID NO: 89389 - DNA, 80 bp, synthetic construct
  source 1..80: mol_type = other DNA
atttcagccatttcagccatttcacagcgtgcaatttggtggcatttagtatgttcacaaggcggttcagccaacacctg

SEQ ID NO: 89390 - DNA, 80 bp, synthetic construct
  source 1..80: mol_type = other DNA
cgggcggatcacctgaggtcaggagtttgagaccagcctggccaacatggtgaaaccttgtctctactaataatacaaaa

SEQ ID NO: 89391 - DNA, 80 bp, synthetic construct
  source 1..80: mol_type = other DNA
taaaatggaaatatgttttaccatcttaaccctttttaagatcacagttccttgcgaccatcgccaccatccagctccag

SEQ ID NO: 89392 - DNA, 80 bp, synthetic construct; identical to SEQ ID NO: 16342
  source 1..80: mol_type = other DNA

SEQ ID NO: 89393 - DNA, 80 bp, synthetic construct
  source 1..80: mol_type = other DNA
catgggtgtgtatggatctcctttaaagagaccggggacagactccaaagtggaattgctgggtcatacagtaattctgt

SEQ ID NO: 89394 - DNA, 80 bp, synthetic construct
  source 1..80: mol_type = other DNA
agcacacaaggtcccaacttctccggatccttgggagcacttgtcactctgtttggggtggcagccaccctaatggatga

SEQ ID NO: 89395 - DNA, 80 bp, synthetic construct; identical to SEQ ID NO: 16343
  source 1..80: mol_type = other DNA

SEQ ID NO: 89396 - DNA, 80 bp, synthetic construct
  source 1..80: mol_type = other DNA
tgtggagtgcagtggcatcagccaaggctccgaggcgtttcttcccacttcacatgtcttttctgttgtttctgcgaagg

SEQ ID NO: 89397 - DNA, 80 bp, synthetic construct
  source 1..80: mol_type = other DNA
caggccagacccagctctccagcttcccggctgcccactagatgaccaccaaggcagggcggctggtggtgctgacggct

SEQ ID NO: 89398 - DNA, 80 bp, synthetic construct
  source 1..80: mol_type = other DNA
ttgccaagggtcctccagcctttggcctgcacccactcatctggcagtaacagggccacttccagaaccaccaccatgcc

SEQ ID NO: 89399 - DNA, 80 bp, synthetic construct; identical to SEQ ID NO: 16344
  source 1..80: mol_type = other DNA

SEQ ID NO: 89400 - DNA, 80 bp, synthetic construct
  source 1..80: mol_type = other DNA
ctcttcttctcgtatctacggggcagagctcagggccgcactccatcagcatcccgggccattgcatccttgaccccggg

SEQ ID NO: 89401 - DNA, 80 bp, synthetic construct
  source 1..80: mol_type = other DNA
ttgggggtgatgggggtgctgagctggcctgagaagggtggggtaacctagggggtggagtgggggagggagagagcact

SEQ ID NO: 89402 - DNA, 80 bp, synthetic construct
  source 1..80: mol_type = other DNA
cagctgcttgagcaaggtgggcaagggagaagtaccaaatgtgtgcaggttctggggaggagcttgaggcccctttagtt

SEQ ID NO: 89403 - DNA, 80 bp, synthetic construct
  source 1..80: mol_type = other DNA
tcaggggtgggccatggcatggcgtgggggaccagccctcctccctgtccccagctgagtgtgagctccctggggtcttg

SEQ ID NO: 89404 - DNA, 80 bp, synthetic construct; identical to SEQ ID NO: 16345
  source 1..80: mol_type = other DNA

SEQ ID NO: 89405 - DNA, 80 bp, synthetic construct
  source 1..80: mol_type = other DNA
tatctatttcagggtataacataagacacacctatcatttcagacctgcctaggacatgcctggagaaggtatttaagta

SEQ ID NO: 89406 - DNA, 80 bp, synthetic construct
  source 1..80: mol_type = other DNA
ttagccaggcgtggtggcatgcgcctgtagtcccagctactcaggaggctgaggcaggagaattgcttgaacctgggagg

SEQ ID NO: 89407 - DNA, 80 bp, synthetic construct
  source 1..80: mol_type = other DNA
agcagagctgggctgggagccgctatgcctccccatcaaggccaccaatagtcgggtgagccggcctctgtgccgtcatg

SEQ ID NO: 89408 - DNA, 80 bp, synthetic construct; identical to SEQ ID NO: 16346
  source 1..80: mol_type = other DNA

SEQ ID NO: 89409 - DNA, 80 bp, synthetic construct
  source 1..80: mol_type = other DNA
caggtgtccacaccttttgtttttgttttttgatttttgtttttcgttttttgttttttgagatggagtctcactctgtc

SEQ ID NO: 89410 - DNA, 80 bp, synthetic construct
  source 1..80: mol_type = other DNA
ccatgttgatcaggctggtcttgaactcctgaactcgtgatctgcctgcctcggcctcccagagtgctgggattacaggc

SEQ ID NO: 89411 - DNA, 80 bp, synthetic construct; identical to SEQ ID NO: 16347
  source 1..80: mol_type = other DNA

SEQ ID NO: 89412 - DNA, 80 bp, synthetic construct
  source 1..80: mol_type = other DNA
gacgccgtatgcctgtggctttgtggctttgtgtggctagcgcctctcacacgtgggggctggtttcatcttccagcccc

SEQ ID NO: 89413 - DNA, 80 bp, synthetic construct
  source 1..80: mol_type = other DNA
gctgcatccacactatacagctgaggaaactgaggcccagctttccacttctgtgcctagggggtgggatccagctccga

SEQ ID NO: 89414 - DNA, 80 bp, synthetic construct
  source 1..80: mol_type = other DNA
ctttccggggctggatctggtgggaaagtgcttatcacggagggcacccggggttcctggcgtgggaccccctctgaccc

SEQ ID NO: 89415 - DNA, 80 bp, synthetic construct
  source 1..80: mol_type = other DNA
cgtcggacgccctctggcccaagctggggttcctggtgtggggccccctctggccaaggctggggttcctggtgtggggc

SEQ ID NO: 89416 - DNA, 80 bp, synthetic construct; identical to SEQ ID NO: 16348
  source 1..80: mol_type = other DNA

SEQ ID NO: 89417 - DNA, 80 bp, synthetic construct
  source 1..80: mol_type = other DNA
gcctgccctgtggaggtcacgcccaggtttccagaccaggaaggacccccacctcatgacccctaccagatggagtcccc

SEQ ID NO: 89418 - DNA, 80 bp, synthetic construct
  source 1..80: mol_type = other DNA
tagcttcatggtgggccagtcaccctcggcagcctgagaaccatggtccaggcctgaggccctgccctttctggccactt

SEQ ID NO: 89419 - DNA, 80 bp, synthetic construct; identical to SEQ ID NO: 16349
  source 1..80: mol_type = other DNA

SEQ ID NO: 89420 - DNA, 80 bp, synthetic construct
  source 1..80: mol_type = other DNA
catccaccttgctcagatgcaaggtgccttggtgcccactgcccccgggggcactgagccatgtgctgggatgggtggag

SEQ ID NO: 89421 - DNA, 80 bp, synthetic construct
  source 1..80: mol_type = other DNA
caaggagccccccagaaggcagtctggggactgagggaatctggaggtacctggccgacccccagctcagccctgtgtgg

SEQ ID NO: 89422 - DNA, 80 bp, synthetic construct
  source 1..80: mol_type = other DNA
cagctgagcccagcctggctccctcagccccacaccatctccttcgcaggggcatccgcttcctgcagatcctgaggatg

SEQ ID NO: 89423 - DNA, 80 bp, synthetic construct
  source 1..80: mol_type = other DNA
gccccgggggccggtgggtgcctgggcgcaggggtacctgaacggggcccaggatctcagagcaagcccaagcttgagcc

SEQ ID NO: 89424 - DNA, 80 bp, synthetic construct; identical to SEQ ID NO: 16350
  source 1..80: mol_type = other DNA

SEQ ID NO: 89425 - DNA, 80 bp, synthetic construct
  source 1..80: mol_type = other DNA
tgtgaggagtgggctatattgaagccggccctgtgcatgtgaaccgcgctggagcggcgtaggacgcccagtgatcgctg

SEQ ID NO: 89426 - DNA, 80 bp, synthetic construct
  source 1..80: mol_type = other DNA
gcggtgaacgagtcaggccgcgtggagttcggcagctacgcagatgcgctgtggtggggggtggtaagtcggaaacttcc

SEQ ID NO: 89427 - DNA, 80 bp, synthetic construct; identical to SEQ ID NO: 16351
  source 1..80: mol_type = other DNA

SEQ ID NO: 89428 - DNA, 80 bp, synthetic construct
  source 1..80: mol_type = other DNA
ggagccagacatgagacagcaaacaggaaagaccatgatggctcaagagaccccagcagagatcagagagcccccgtgtt

SEQ ID NO: 89429 - DNA, 80 bp, synthetic construct
  source 1..80: mol_type = other DNA
gggaagccggtgtgcagcaggcagatcccgcactggaacaccgagccacccaaagctcagagaggctgtgcgggaggggt

SEQ ID NO: 89430 - DNA, 80 bp, synthetic construct
  source 1..80: mol_type = other DNA
cagcagcagtttctcatggctcagaggacgctggctgaggcatttttagggggcaggcctagcttgccagtgtccctctg

SEQ ID NO: 89431 - DNA, 80 bp, synthetic construct; identical to SEQ ID NO: 16352
  source 1..80: mol_type = other DNA

SEQ ID NO: 89432 - DNA, 80 bp, synthetic construct
  source 1..80: mol_type = other DNA
gaggaggccgtcgaagcccacacagggtgggagccaaggcctgggggccgcacgggggctggaggtgggggcgggcaggg

SEQ ID NO: 89433 - DNA, 80 bp, synthetic construct
  source 1..80: mol_type = other DNA
tgtccctgcgattgctgtgcctcctccctccccctcaaccgccgcttcccccatgaggccagacactcagcagtggctcc

SEQ ID NO: 89434 - DNA, 80 bp, synthetic construct
  source 1..80: mol_type = other DNA
gcaggcctgagcaggtttgggcagcagggcccagcccccctgcgggagcctgcctgcagtgagtgtggatgggtagggcg

SEQ ID NO: 89435 - DNA, 80 bp, synthetic construct
  source 1..80: mol_type = other DNA
agccgcccactggagctgtgggcagcggacgctactccccagccccccagcccgcagcagagcggcactcccactcccac

SEQ ID NO: 89436 - DNA, 80 bp, synthetic construct; identical to SEQ ID NO: 16353
  source 1..80: mol_type = other DNA

SEQ ID NO: 89437 - DNA, 80 bp, synthetic construct
  source 1..80: mol_type = other DNA
tccttcaccccaccggggagtgaagtacgccctcgccggccaggcagccagggctgctccatgtctgtccgtccgtcggg

SEQ ID NO: 89438 - DNA, 80 bp, synthetic construct
  source 1..80: mol_type = other DNA
aactgctgggcccagagcaacagaaactcatgggctctagaggccagagcccgaagcgaggtgtgcacagggcctgcccc

SEQ ID NO: 89439 - DNA, 80 bp, synthetic construct; identical to SEQ ID NO: 16354
  source 1..80: mol_type = other DNA

SEQ ID NO: 89440 - DNA, 80 bp, synthetic construct
  source 1..80: mol_type = other DNA
ctgccaaggcgtttggggagaatttaagacttttctttgcccttggaacaaaatgcgtttgtttgtgttaaagtttgagt

SEQ ID NO: 89441 - DNA, 80 bp, synthetic construct
  source 1..80: mol_type = other DNA
aagtcgagtctgactgcctgctgttcactctctcctcacctggagcctccagaaattcccgcctccctggcaacgctgca

SEQ ID NO: 89442 - DNA, 80 bp, synthetic construct
  source 1..80: mol_type = other DNA
cggcaggacctggccacccaccgagcccctgggtcagcgttcttcctcctcctggagttccgtgcaaaggggaacgagtt

SEQ ID NO: 89443 - DNA, 80 bp, synthetic construct; identical to SEQ ID NO: 16355
  source 1..80: mol_type = other DNA

SEQ ID NO: 89444 - DNA, 80 bp, synthetic construct
  source 1..80: mol_type = other DNA
tgtccctgcaggactgtttcggcccaggagcagggaggcctccttgaggaagtgacagctgagctgagacctcaagacac

SEQ ID NO: 89445 - DNA, 80 bp, synthetic construct
  source 1..80: mol_type = other DNA
gaggcctggccctcgtgaattggtgttcgtttatttactttctcctgctgaaaggaagcaggtttattttggggtgtgtg

SEQ ID NO: 89446 - DNA, 80 bp, synthetic construct
  source 1..80: mol_type = other DNA
ggcctgttagagccccaggaccgctggccccacccttctctgtcccagagacagtcctgccccccacccaggggcctccc

SEQ ID NO: 89447 - DNA, 80 bp, synthetic construct; identical to SEQ ID NO: 16356
  source 1..80: mol_type = other DNA

SEQ ID NO: 89448 - DNA, 80 bp, synthetic construct
  source 1..80: mol_type = other DNA
ccccccacactcagagccacggtgccagcccagccttgccagcagggcagccacaggacttccaggcaaggtgacggtgc

SEQ ID NO: 89449 - DNA, 80 bp, synthetic construct
  source 1..80: mol_type = other DNA
atgggcttccttccaagccctggagaggggagcaggcctgggagggcgcccttggcccagagcctccatgaagagccagg

SEQ ID NO: 89450 - DNA, 80 bp, synthetic construct
  source 1..80: mol_type = other DNA
ggctctcgaggctgggcaaggtcggggcctgcaatggctgaagcagcctcttagcccatctctgccttcggggtggccac

SEQ ID NO: 89451 - DNA, 80 bp, synthetic construct; identical to SEQ ID NO: 16357
  source 1..80: mol_type = other DNA

SEQ ID NO: 89452 - DNA, 80 bp, synthetic construct
  source 1..80: mol_type = other DNA
cagggaggaacatggggggactagaaggctccccatgcctcccgccccttcacatgggagtgaaggcacaggccagcagg

SEQ ID NO: 89453 - DNA, 80 bp, synthetic construct
  source 1..80: mol_type = other DNA
catcagggactaatccccagcatggtgaccataaaacagcccattcctgagctgcctgtgtctgaatgcaggaaaaacaa

SEQ ID NO: 89454 - DNA, 80 bp, synthetic construct
  source 1..80: mol_type = other DNA
ggctggcctttctctccctctcggggcacccctgccttctactgaccacccagccagccagcaggagcccacgtgcaccc

SEQ ID NO: 89455 - DNA, 80 bp, synthetic construct
  source 1..80: mol_type = other DNA
ttccaccttcatcatgcagtttctgtattagatttttaaataatcaaaatatggtattttcatttaaaaagtaatgcttt

SEQ ID NO: 89456 - DNA, 80 bp, synthetic construct; identical to SEQ ID NO: 16358
  source 1..80: mol_type = other DNA

SEQ ID NO: 89457 - DNA, 80 bp, synthetic construct
  source 1..80: mol_type = other DNA
ttttccaaaacaaatattatcgaaagaaaaatatgcatttttgcaaatctccagaaagcctggctccccagaggacgggg

SEQ ID NO: 89458 - DNA, 80 bp, synthetic construct
  source 1..80: mol_type = other DNA
acagacagccctgtcctggacgcagcccttcaaccctgcttctcatacctgacccccaccttgggcgctggtctgccaca

SEQ ID NO: 89459 - DNA, 80 bp, synthetic construct
  source 1..80: mol_type = other DNA
agagcggaggcagagcccggagtggaggggtgagcactgcctcagggcattggcaggggctgcgccagcccaggcacagg

SEQ ID NO: 89460 - DNA, 80 bp, synthetic construct; identical to SEQ ID NO: 16359
  source 1..80: mol_type = other DNA

SEQ ID NO: 89461 - DNA, 80 bp, synthetic construct
  source 1..80: mol_type = other DNA
tgggccctctggggaaggtagcggcagcccagcctgtgcatgtgggtgcaggccctctggggaggacaccctgcagacga

SEQ ID NO: 89462 - DNA, 80 bp, synthetic construct
  source 1..80: mol_type = other DNA
atggggaccagctcccttttcacatgaccttgtcatctgtgtgacgcacgtgcgtgtgccgggtcgtgtgtttccgtgtg

SEQ ID NO: 89463 - DNA, 80 bp, synthetic construct
  source 1..80: mol_type = other DNA
gggcatgtgtgtgtctcttaaggacagtggcgctgcagggagagctccgtgtgcagctgtgggaggtagcctgcaagcag

SEQ ID NO: 89464 - DNA, 80 bp, synthetic construct
  source 1..80: mol_type = other DNA
agcctggtttcccgcaatgtggccgcttctgctacctgagcctccgagcctcctgctgtggcagttctgggcagtcgcgt

SEQ ID NO: 89465 - DNA, 80 bp, synthetic construct; identical to SEQ ID NO: 16360
  source 1..80: mol_type = other DNA

SEQ ID NO: 89466 - DNA, 80 bp, synthetic construct
  source 1..80: mol_type = other DNA
gccatggtctgggccaccatgcctgctgtccagatgagcccaggcaggagcctgtgtgtccacagggtgagctgtgcctg

SEQ ID NO: 89467 - DNA, 80 bp, synthetic construct
  source 1..80: mol_type = other DNA
agcgcgggggaaagggtggggggagccttctattgtcccaccacacgtcctggacggatggctctcccaccaagaagaag

SEQ ID NO: 89468 - DNA, 80 bp, synthetic construct
  source 1..80: mol_type = other DNA
cggtggcccaggggcccagcctcctggggacaggcaggcagatgaggcagccggtgtggggcgagctcccaggcccacgt

SEQ ID NO: 89469 - DNA, 80 bp, synthetic construct; identical to SEQ ID NO: 16361
  source 1..80: mol_type = other DNA

SEQ ID NO: 89470 - DNA, 80 bp, synthetic construct
  source 1..80: mol_type = other DNA
cgttttccctggctccttggacagctggggtcctggggtggctgcacgcccctccctgtgagcagacccacttacgttca

SEQ ID NO: 89471 - DNA, 80 bp, synthetic construct
  source 1..80: mol_type = other DNA
gggcaggcctgctcactcagccctgggtgggtgggcaatgctgctaccacgccccatggaggcagaatcttgtgcctgga

SEQ ID NO: 89472 - DNA, 80 bp, synthetic construct
  source 1..80: mol_type = other DNA
taattttatgttacctgtatactatgggtatgtgtatatgtatcacatgggtgtgtatgtactgtatgtgtgcgtgcata

SEQ ID NO: 89473 - DNA, 80 bp, synthetic construct; identical to SEQ ID NO: 16362
  source 1..80: mol_type = other DNA

SEQ ID NO: 89474 - DNA, 80 bp, synthetic construct
  source 1..80: mol_type = other DNA
tgtgtgttagtatgtgggttagtgtgtgtgtttgtgtgttagtgtgtgtgttagtatgtgtttgtgttagtgtgtatttg

SEQ ID NO: 89475 - DNA, 80 bp, synthetic construct
  source 1..80: mol_type = other DNA
tgtgtcagtgtgtgtgtgttagtgtgcatatctattgtgtgtgtgtgtgcatcacacatgcacgtgcaccacgtgatctc

SEQ ID NO: 89476 - DNA, 80 bp, synthetic construct
  source 1..80: mol_type = other DNA
gatggaccagcccacctggcccccagaatggtccctgggaatgggttagagcggctgcagccctgccccatgggactggg

SEQ ID NO: 89477 - DNA, 80 bp, synthetic construct; identical to SEQ ID NO: 16363
  source 1..80: mol_type = other DNA

SEQ ID NO: 89478 - DNA, 80 bp, synthetic construct
  source 1..80: mol_type = other DNA
tgcatcagcttggctggcctgtggggcatactctgcttgtggaagccttggctgctgtggtgatggggtgagcacggggc

SEQ ID NO: 89479 - DNA, 80 bp, synthetic construct
  source 1..80: mol_type = other DNA
agtctgggagtggggtggccaggtgattgtccccaagggaggtaggacccagctgtgcagttggtgccttctggagggcc

SEQ ID NO: 89480 - DNA, 80 bp, synthetic construct; identical to SEQ ID NO: 16364
  source 1..80: mol_type = other DNA

SEQ ID NO: 89481 - DNA, 80 bp, synthetic construct
  source 1..80: mol_type = other DNA
atagggcctccgcccagtgcagtggctgggagcacagtgtcagttcctctgggcacactgggcctgatgtcccccaggaa

SEQ ID NO: 89482 - DNA, 80 bp, synthetic construct
  source 1..80: mol_type = other DNA
ttttatggcttcacagtttctccttcctgggagaccataaatcaggcccgtaaacccgccttggtcccagcatgagcatg

SEQ ID NO: 89483 - DNA, 80 bp, synthetic construct
  source 1..80: mol_type = other DNA
tcatggggtttgccagggttgggggaccacgtggagtgctcagcctgtgtgtgtaacactcgggccttggaaggctgggc

SEQ ID NO: 89484 - DNA, 80 bp, synthetic construct; identical to SEQ ID NO: 16365
  source 1..80: mol_type = other DNA

SEQ ID NO: 89485 - DNA, 80 bp, synthetic construct
  source 1..80: mol_type = other DNA
ctgcaaggtggtataggcctctgggagagacctcacctcctgccagccctagggatcctgcctctccctgccccctgctc

SEQ ID NO: 89486 - DNA, 80 bp, synthetic construct
  source 1..80: mol_type = other DNA
aggctggctcagggctggtaaagacctctgtggtgtcccagctgtgggtaacaattagcccatgaggcagtgagctgcct

SEQ ID NO: 89487 - DNA, 80 bp, synthetic construct
  source 1..80: mol_type = other DNA
ccgggtggctcagcaggtgacagcctgtccccctgcccgacctcagaccgcatggaggtgctatgctgccgagaaccccg

SEQ ID NO: 89488 - DNA, 80 bp, synthetic construct; identical to SEQ ID NO: 16366
  source 1..80: mol_type = other DNA

SEQ ID NO: 89489 - DNA, 80 bp, synthetic construct
  source 1..80: mol_type = other DNA
acaccgggcgcagtgggtggtgagcagtgggcagggggccgcgcgcagtgggtggtgggaggggagcagcaggggaggga

SEQ ID NO: 89490 - DNA, 80 bp, synthetic construct
  source 1..80: mol_type = other DNA
acctggccttcccagtttccagctgccggtggagcctccgtgcctactgttccctgtgctggaatgttcccccagatttc

SEQ ID NO: 89491 - DNA, 80 bp, synthetic construct
  source 1..80: mol_type = other DNA
atcttgtacgtttatctgcttcctgctgtcctgttagcgaggccgtgagctcacagggcagcacctgggccaagcccccc

SEQ ID NO: 89492 - DNA, 80 bp, synthetic construct; identical to SEQ ID NO: 16367
  source 1..80: mol_type = other DNA

SEQ ID NO: 89493 - DNA, 80 bp, synthetic construct
  source 1..80: mol_type = other DNA
aagccagtgagtttctcccttgggctgtggtctctgacaacgaggtatgaacagacagagggtggagcttctagaaactt

SEQ ID NO: 89494 - DNA, 80 bp, synthetic construct
  source 1..80: mol_type = other DNA
tcccagccgagcccacgggctctggttggaaagtggctagggtgacctctgggcctactggcagggacgccagagggaag

SEQ ID NO: 89495 - DNA, 80 bp, synthetic construct
  source 1..80: mol_type = other DNA
gggatgaagctaccttctgcgggacctgacgattggatggcagacctgtctagggtttagatgtcctccatccctggtga

SEQ ID NO: 89496 - DNA, 80 bp, synthetic construct
  source 1..80: mol_type = other DNA
tcagccacacggcaggaacacagcagtgtctggttgtggcccccccatgcctcccgccaacttctgctgttcccagaagt

SEQ ID NO: 89497 - DNA, 80 bp, synthetic construct; identical to SEQ ID NO: 16368
  source 1..80: mol_type = other DNA

SEQ ID NO: 89498 - DNA, 80 bp, synthetic construct
  source 1..80: mol_type = other DNA
attctctagcagctctcttaaaaccaaatgtgaaggattctggctttttctgtcctctgagcccagcgtggggtatttga

SEQ ID NO: 89499 - DNA, 80 bp, synthetic construct
  source 1..80: mol_type = other DNA
cttcctctgaggcagacatagtagtgactgtgttctgatacaaagatggcacttgcccgatgctgcactgcagcaccaat

SEQ ID NO: 89500 - DNA, 80 bp, synthetic construct; identical to SEQ ID NO: 16369
  source 1..80: mol_type = other DNA

SEQ ID NO: 89501 - DNA, 80 bp, synthetic construct
  source 1..80: mol_type = other DNA
ccttccatgccccatgggagggctccatgtggcccagtcccttggaggctggaccccactgttccggactctgggctgtt

SEQ ID NO: 89502 - DNA, 80 bp, synthetic construct
  source 1..80: mol_type = other DNA
tcagccatccaagtaatatgatccattcccttctcagcagccgtccctttaccctttggtcatttctgcatccatctctc

SEQ ID NO: 89503 - DNA, 80 bp, synthetic construct
  source 1..80: mol_type = other DNA
cagttcattcaggatggctcacctgcatccccacctccttggcaggaggctgggtggtgttccctgccccttggggcttt

SEQ ID NO: 89504 - DNA, 80 bp, synthetic construct
  source 1..80: mol_type = other DNA
cggcacaaagggcgattgtgccaaccaatgcccagtgcccccacagctccggattcagggctgagaccattgtctccatg

SEQ ID NO: 89505 - DNA, 80 bp, synthetic construct; identical to SEQ ID NO: 16370
  source 1..80: mol_type = other DNA

SEQ ID NO: 89506 - DNA, 80 bp, synthetic construct
  source 1..80: mol_type = other DNA
ctgataatccggagtcccctttgcccaggaggctcttggagagccctggcttggggagaaggagatgctgatcccagggc

SEQ ID NO: 89507 - DNA, 80 bp, synthetic construct
  source 1..80: mol_type = other DNA
cctcagggctgctacctgtctgcgccatccacctgcacacaagccccttcagctcgtgctctagctggtgctgtgcggtg

SEQ ID NO: 89508 - DNA, 80 bp, synthetic construct; identical to SEQ ID NO: 16371
  source 1..80: mol_type = other DNA

SEQ ID NO: 89509 - DNA, 80 bp, synthetic construct
  source 1..80: mol_type = other DNA
acagactcctcatgaaggatgcatggggacccaaccgcatgccacttggcttggcagtgtcaaagggactggggacctgc

SEQ ID NO: 89510 - DNA, 80 bp, synthetic construct
  source 1..80: mol_type = other DNA
tccacatctgcaggtcagaagaggcctgggctggagccgcatactggccatgctgcctcgctgtccctgcctcagagcca

SEQ ID NO: 89511 - DNA, 80 bp, synthetic construct
  source 1..80: mol_type = other DNA
ggccctttgtctttcaccactgacccttcccaagctggtaccatgcctaacccatggtgggtacacgataaaaatgcagg

SEQ ID NO: 89512 - DNA, 80 bp, synthetic construct; identical to SEQ ID NO: 16372
  source 1..80: mol_type = other DNA

SEQ ID NO: 89513 - DNA, 80 bp, synthetic construct
  source 1..80: mol_type = other DNA
ttcccgtttgtgaagtggggcagcgtgctggaggagcatgcatcacatacccagaggtccccagtgtggtctggggactc

SEQ ID NO: 89514 - DNA, 80 bp, synthetic construct
  source 1..80: mol_type = other DNA
catgcactcctccattcaaagccgtgtgttctgattgtgcacttttggtggctgccacaggattaaatcctgaatgcttt

SEQ ID NO: 89515 - DNA, 80 bp, synthetic construct
  source 1..80: mol_type = other DNA
gagatatttactcacagacttgcagttttctgtctcaccatttggatttaatttcctttttcctgaagtctgtgtttctt

SEQ ID NO: 89516 - DNA, 80 bp, synthetic construct; identical to SEQ ID NO: 16373
  source 1..80: mol_type = other DNA

SEQ ID NO: 89517 - DNA, 80 bp, synthetic construct
  source 1..80: mol_type = other DNA
tcttttccagaaacttctatttgaccatctcattgtcttcctcagctgtctcatagattttctatctctgtctccctctg

SEQ ID NO: 89518 - DNA, 80 bp, synthetic construct
  source 1..80: mol_type = other DNA
cttcattcacagaattttctatgcagtttctaactcttgagatgtttctgttccactgctttatctacccactgagactt

SEQ ID NO: 89519 - DNA, 80 bp, synthetic construct
  source 1..80: mol_type = other DNA
ctgcagttcttggagagtctaattctgttcactgtagttttttctgactcttgctcatgatggctcatttcattgtgggt

SEQ ID NO: 89520 - DNA, 80 bp, synthetic construct; identical to SEQ ID NO: 16374
  source 1..80: mol_type = other DNA

SEQ ID NO: 89521 - DNA, 80 bp, synthetic construct
  source 1..80: mol_type = other DNA
tatattcttgcagcaaataaccagaaattgagatttttaaaatacaggcgtgtctcattcttattgactgcactttgctg

SEQ ID NO: 89522 - DNA, 80 bp, synthetic construct
  source 1..80: mol_type = other DNA
tgttgacaacatggtttactgaatatgttgagcccattttcgagacctattgctcagacaaaaagatccctctcaaaatg

SEQ ID NO: 89523 - DNA, 80 bp, synthetic construct
  source 1..80: mol_type = other DNA
taaggctatagcggccatagatagcgattgctttgatgaatctgggcaaagtaaattgaaaacattttagaaaataatca

SEQ ID NO: 89524 - DNA, 80 bp, synthetic construct
  source 1..80: mol_type = other DNA
tcagtggaggaagtaactactgatgttgtgaaaactgcaagagaactagaattagaagtggagcctgaagatgtggctga

SEQ ID NO: 89525 - DNA, 80 bp, synthetic construct; identical to SEQ ID NO: 16375
  source 1..80: mol_type = other DNA

SEQ ID NO: 89526 - DNA, 80 bp, synthetic construct
  source 1..80: mol_type = other DNA
attcctaaaatggaatactacttagaaatacaaaggaatgaaccactgatatgcctacaatatggatacattgcaacata

SEQ ID NO: 89527 - DNA, 80 bp, synthetic construct
  source 1..80: mol_type = other DNA
aaaagggcacaaaaaaacttttggggcagtggatatgttcattatcataatcatggcgatggtttcatcatgtgtcaaaa

SEQ ID NO: 89528 - DNA, 80 bp, synthetic construct
  source 1..80: mol_type = other DNA
ctcacctataggcatggggctaatttaattgctatataaaaacgctcttgtaaatcaagatagaagttaaaggatattaa

SEQ ID NO: 89529 - DNA, 80 bp, synthetic construct; identical to SEQ ID NO: 16376
  source 1..80: mol_type = other DNA

SEQ ID NO: 89530 - DNA, 80 bp, synthetic construct
  source 1..80: mol_type = other DNA
gcaaaaaattgcaaaccaccgacatacccatcagtggaggtctgcttcaagtatcatatctccgttaaacagccatcaaa

SEQ ID NO: 89531 - DNA, 80 bp, synthetic construct
  source 1..80: mol_type = other DNA
ttggaactgtttgaagaacattgggattatcttttctgtagaggttaaatagaattgagttgtaaaaccatctgggcctg

SEQ ID NO: 89532 - DNA, 80 bp, synthetic construct; identical to SEQ ID NO: 16377
  source 1..80: mol_type = other DNA

SEQ ID NO: 89533 - DNA, 80 bp, synthetic construct
  source 1..80: mol_type = other DNA
ccttttcttggctaactctatttttgttttcttttacttaagagtcatagttcatttatttgaagttcttctactaaagg

SEQ ID NO: 89534 - DNA, 80 bp, synthetic construct
  source 1..80: mol_type = other DNA
cagtaaatttttatcactgttatttatttctaatttagtaggcttacagtgaaaggatgtagcctatgaagtctccactt

SEQ ID NO: 89535 - DNA, 80 bp, synthetic construct
  source 1..80: mol_type = other DNA
tacatggacagacaaaatgtacattgagatggattgtgtatacatacttattcattgcctcatttaggtctgctctgccc

SEQ ID NO: 89536 - DNA, 80 bp, synthetic construct; identical to SEQ ID NO: 16378
  source 1..80: mol_type = other DNA

SEQ ID NO: 89537 - DNA, 80 bp, synthetic construct
  source 1..80: mol_type = other DNA
ttagaacatgtaagtgctcacccaggacccatatgcagcaaacagtcttgtgtctctgtctgctgccaaattggcctcag

SEQ ID NO: 89538 - DNA, 80 bp, synthetic construct
  source 1..80: mol_type = other DNA
cagtacagaacttttttcttatgtttgcttgggctcccctcctctctgttacctatgttgataatctaggatttgttgtc

SEQ ID NO: 89539 - DNA, 80 bp, synthetic construct
  source 1..80: mol_type = other DNA
aaactcacgggatcatatcatacctgctttctgcatcttgtttttctcaatcagtaaaatagtaaaaatgcctctaaggc

SEQ ID NO: 89540 - DNA, 80 bp, synthetic construct
  source 1..80: mol_type = other DNA
ttcttgaacctgtttctatgtacagaacttttatttctatgtgttaactttccaggatgtattagtttgctaggactgcc

SEQ ID NO: 89541 - DNA, 80 bp, synthetic construct; identical to SEQ ID NO: 16379
  source 1..80: mol_type = other DNA

SEQ ID NO: 89542 - DNA, 80 bp, synthetic construct
  source 1..80: mol_type = other DNA
tgggacacaattcagcccgtgacacaggaataggcttgttaatttcagtgatgtagccaggttgtttttctcgttttgtc

SEQ ID NO: 89543 - DNA, 80 bp, synthetic construct
  source 1..80: mol_type = other DNA
cagccaagtggggcagagtttctccactgtacctctattgaaatctagtgccggataattctttgttgagggaggaagtc

SEQ ID NO: 89544 - DNA, 80 bp, synthetic construct
  source 1..80: mol_type = other DNA
ccctggagggcaaaattgcccccagttgtgacctgctgagctaaagcagtccctcaggattgtttcttaaaacaaaacaa

SEQ ID NO: 89545 - DNA, 80 bp, synthetic construct; identical to SEQ ID NO: 16380
  source 1..80: mol_type = other DNA

SEQ ID NO: 89546 - DNA, 80 bp, synthetic construct
  source 1..80: mol_type = other DNA
cagggtcagtactgcctttagatgtgtctcttcagtcttgtttaatctggaacatttctagtctctttctctgttatgac

SEQ ID NO: 89547 - DNA, 80 bp, synthetic construct
  source 1..80: mol_type = other DNA
tgaggcacacagtgtatctgccccttattaacgatgttattttgatcaccaaattgaggccgttatccacttttctacct

SEQ ID NO: 89548 - DNA, 80 bp, synthetic construct
  source 1..80: mol_type = other DNA
ttttccaactctagcaccccttccacgaaagtacagaaagaaaaaaaaatactgtccagttggaatggttacctcattgt

SEQ ID NO: 89549 - DNA, 80 bp, synthetic construct
  source 1..80: mol_type = other DNA
agaaataatagggatcccatgcaccctttagttagtttccgtcagtggtagcatcttctaaaaccatagcacaatatgat

SEQ ID NO: 89550 - DNA, 80 bp, synthetic construct; identical to SEQ ID NO: 16381
  source 1..80: mol_type = other DNA

SEQ ID NO: 89551 - DNA, 80 bp, synthetic construct
  source 1..80: mol_type = other DNA
agtttgggctattacaaatcagagtaggctgaacaatggcccccaaagtagccaggtcctaacgcctagaacctgtgact

SEQ ID NO: 89552 - DNA, 80 bp, synthetic construct
  source 1..80: mol_type = other DNA
gccacggaagcaggggcaggaaatggcaatgtgatttgaggaaggggtcacaaaccaaagaacgcttccagaagaaaagg

SEQ ID NO: 89553 - DNA, 80 bp, synthetic construct
  source 1..80: mol_type = other DNA
aaatgtattacagcagccatgggaaccttatacattgataaggatgacatgaatattcttgtaaggttcttgtgtgaaca

SEQ ID NO: 89554 - DNA, 80 bp, synthetic construct; identical to SEQ ID NO: 16382
  source 1..80: mol_type = other DNA

SEQ ID NO: 89555 - DNA, 80 bp, synthetic construct
  source 1..80: mol_type = other DNA
attagactttttgttaactgtcgagttttgggagatgtttatatattctagatacttatcttaagtcagaaacagggtgc

SEQ ID NO: 89556 - DNA, 80 bp, synthetic construct
  source 1..80: mol_type = other DNA
ggtctaagaagtctttggccctggaccccaaatatcttctgctatagcttttttctaacagccttgtggagatatagttt

SEQ ID NO: 89557 - DNA, 80 bp, synthetic construct
  source 1..80: mol_type = other DNA
gttatgtttatattgtagtctattaagtgtgcaatagccccatgtctaagaaaacaatgtgcctaccttaattgaaagac

SEQ ID NO: 89558 - DNA, 80 bp, synthetic construct; identical to SEQ ID NO: 16383
  source 1..80: mol_type = other DNA

SEQ ID NO: 89559 - DNA, 80 bp, synthetic construct
  source 1..80: mol_type = other DNA
ctggttactttcacttagcatcatgttttcaaggtttgtgcttcagtgcttctttttttttccccgagacagagtctccc

SEQ ID NO: 89560 - DNA, 80 bp, synthetic construct
  source 1..80: mol_type = other DNA
tttcgccatgttagccaggctggtctcgaactcctgacctcaggtgatccgcccacctcggcctcctaacctgctgggac

SEQ ID NO: 89561 - DNA, 80 bp, synthetic construct; identical to SEQ ID NO: 16384
  source 1..80: mol_type = other DNA

SEQ ID NO: 89562 - DNA, 80 bp, synthetic construct
  source 1..80: mol_type = other DNA
gctactcgggaggctgaggcaagagaattgcttgaacccgggaggaagaggttgcagtgagccgagactgtgccactgca

SEQ ID NO: 89563 - DNA, 80 bp, synthetic construct
  source 1..80: mol_type = other DNA
gcgcgatctgagctcactgcaacctctacctcccaggttcaagcgattcctctgcctcagcctcccaagtagctgggatt

SEQ ID NO: 89564 - DNA, 80 bp, synthetic construct
  source 1..80: mol_type = other DNA
ataactatctttttgaagaactgaccaattatttccaaagtgggtgcctcattttacattctcaccaccagcatatgagc

SEQ ID NO: 89565 - DNA, 80 bp, synthetic construct
  source 1..80: mol_type = other DNA
tcaaccctgaagaaatttctattccgatttttcatccattctttaagttgggatatttgtctttttgtttttgagttgaa

SEQ ID NO: 89566 - DNA, 80 bp, synthetic construct; identical to SEQ ID NO: 16385
  source 1..80: mol_type = other DNA

SEQ ID NO: 89567 - DNA, 80 bp, synthetic construct
  source 1..80: mol_type = other DNA
ggctccgtttttacactctgattctattcccttgatctacatatctatctcatgccagtatcacattttctcgaatactg

SEQ ID NO: 89568 - DNA, 80 bp, synthetic construct
  source 1..80: mol_type = other DNA
tacaaagaaaccagctgagattctggtaaggattgtgttgagtttgtagatcagcacgattccgggagtgttgccatctt

SEQ ID NO: 89569 - DNA, 80 bp, synthetic construct
  source 1..80: mol_type = other DNA
tacataaaatctactattttactcattttaagtatatagttatgtggcattaggtaaattcgcactgttgtgctttattc

SEQ ID NO: 89570 - DNA, 80 bp, synthetic construct; identical to SEQ ID NO: 16386
  source 1..80: mol_type = other DNA

SEQ ID NO: 89571 - DNA, 80 bp, synthetic construct
  source 1..80: mol_type = other DNA
tactctggtagtttatgctaagagctggttgtttaaagaatctgctacctccctccaccttgctcctgctcttgccatgt

SEQ ID NO: 89572 - DNA, 80 bp, synthetic construct
  source 1..80: mol_type = other DNA
cacaaaactggaccagcacaaatttatgtcatctccaaatagttctacttctttctttcagtctggattctttttcttcc

SEQ ID NO: 89573 - DNA, 80 bp, synthetic construct
  source 1..80: mol_type = other DNA
aagtggaaagagcagatctctttgtctcattcctgatcttaacggggaaacattcagtcattcactgttaagtatgatat

SEQ ID NO: 89574 - DNA, 80 bp, synthetic construct
  source 1..80: mol_type = other DNA
aggcgcatgctgccatgcctggctaatttttttgtatttttagtaaagacggggtttcaccatattagccagtatggtct

SEQ ID NO: 89575 - DNA, 80 bp, synthetic construct; identical to SEQ ID NO: 16387
  source 1..80: mol_type = other DNA

SEQ ID NO: 89576 - DNA, 80 bp, synthetic construct
  source 1..80: mol_type = other DNA
gtgcccttgtaaaagagacctcagtgagctcctttttttcttccgtcatatgaggacacaagaagacaactgttcatgaa

SEQ ID NO: 89577 - DNA, 80 bp, synthetic construct
  source 1..80: mol_type = other DNA
gttataacagtctgaacagactgacagaaatcgtggtgttttgtcttttattctgttgataatggtgtattacattaatt

SEQ ID NO: 89578 - DNA, 80 bp, synthetic construct
  source 1..80: mol_type = other DNA
aaaaatcaatagtattcctatacactgtcaaaaacaatctgaaaataagaaaacaattctatttacaacatcaagaaagc

SEQ ID NO: 89579 - DNA, 80 bp, synthetic construct; identical to SEQ ID NO: 16388
  source 1..80: mol_type = other DNA

SEQ ID NO: 89580 - DNA, 80 bp, synthetic construct
  source 1..80: mol_type = other DNA
tgtcaatttcatctaagttttataatttattggcacaaaattgttcatagtgttccttcataatcctttttatttctgtc

SEQ ID NO: 89581 - DNA, 80 bp, synthetic construct
  source 1..80: mol_type = other DNA
ctcctagtctcaagtgatccttgccccttagcctatgacaggtgtgcaccacaacaccagctgttattcaaaaaatattt

SEQ ID NO: 89582 - DNA, 80 bp, synthetic construct; identical to SEQ ID NO: 16389
  source 1..80: mol_type = other DNA

SEQ ID NO: 89583 - DNA, 80 bp, synthetic construct
  source 1..80: mol_type = other DNA
ttattattttgttttttctacttgctttaggtttagtttgctcttctttttctagtttcttgaggtggagagttggctta

SEQ ID NO: 89584 - DNA, 80 bp, synthetic construct
  source 1..80: mol_type = other DNA
agtacgttccatttcccttgtgaattctttcacccattgattatttaagaatgtagtgttgtttaatttccacatgtgta

SEQ ID NO: 89585 - DNA, 80 bp, synthetic construct
  source 1..80: mol_type = other DNA
tgtatattcaatgttggttgttgggcgaagtgctctataattaccttttgagtctagttggtttatggtgttgctcatat

SEQ ID NO: 89586 - DNA, 80 bp, synthetic construct
  source 1..80: mol_type = other DNA
tcttatgttttagttctctattgttaggtgaatatatgtttataatcattgtatcttctcatgaattgacattttatcat

SEQ ID NO: 89587 - DNA, 80 bp, synthetic construct; identical to SEQ ID NO: 16390
  source 1..80: mol_type = other DNA

SEQ ID NO: 89588 - DNA, 80 bp, synthetic construct
  source 1..80: mol_type = other DNA
agttttacttttggtcttttctatgtactatttcttgttcctctatttctcctttgctgctttcttttccatctagtgac

SEQ ID NO: 89589 - DNA, 80 bp, synthetic construct
  source 1..80: mol_type = other DNA
cctggtgagatacagaagttattcctgtatgagtttattcagttttaccactttttgtggtattgttacatatattacat

SEQ ID NO: 89590 - DNA, 80 bp, synthetic construct
  source 1..80: mol_type = other DNA
ggtggtatttccttactctagaacagctttgctcctatttacctccttgctctttgcttttggatatatgtgaacttcct

SEQ ID NO: 89591 - DNA, 80 bp, synthetic construct
  source 1..80: mol_type = other DNA
gtttatctgggaatgcttttattttgccttctttttgaaagaaacttttctggacacagtattcttggttggcttttttt

SEQ ID NO: 89592 - DNA, 80 bp, synthetic construct; identical to SEQ ID NO: 16391
  source 1..80: mol_type = other DNA

SEQ ID NO: 89593 - DNA, 80 bp, synthetic construct
  source 1..80: mol_type = other DNA
cttcctgttaaattttcccttttgtcattgtaaaatgcttctcagtatctctaataacatggtttgtttttaaagtctat

SEQ ID NO: 89594 - DNA, 80 bp, synthetic construct
  source 1..80: mol_type = other DNA
catttgccaccatacccagctaatttttagtagagacagagtttcaccatgttgaccaggctggtcttgaactcctgacc

SEQ ID NO: 89595 - DNA, 80 bp, synthetic construct
  source 1..80: mol_type = other DNA
gaatctagaatgtgactcttatagaccatatatatttggatcctgcttttaaggcagtctggcaatctctgctctttatt

SEQ ID NO: 89596 - DNA, 80 bp, synthetic construct
  source 1..80: mol_type = other DNA
gccttctgcaggttgaatagatatgttctagagtaccattctaattcctttgttagtttatttcccccatttttaaagtg

SEQ ID NO: 89597 - DNA, 80 bp, synthetic construct; identical to SEQ ID NO: 16392
  source 1..80: mol_type = other DNA

SEQ ID NO: 89598 - DNA, 80 bp, synthetic construct
  source 1..80: mol_type = other DNA
tctaggttgtgcactccgtatgagaatctaactaaagcctcccccaactggctgtggaaaaattgtcttccacaaaactg

SEQ ID NO: 89599 - DNA, 80 bp, synthetic construct
  source 1..80: mol_type = other DNA
ttagccgcactagtgagtttttcacctaagttattatatttcacaactacagaatttctatttggtttctaatttctatc

SEQ ID NO: 89600 - DNA, 80 bp, synthetic construct
  source 1..80: mol_type = other DNA
tggggcccttcagagataattcctatttattgctcattattcttgttcaagggtcacaattttctgtttctttgcatatc

SEQ ID NO: 89601 - DNA, 80 bp, synthetic construct; identical to SEQ ID NO: 16393
  source 1..80: mol_type = other DNA

SEQ ID NO: 89602 - DNA, 80 bp, synthetic construct
  source 1..80: mol_type = other DNA
cattcaaagttcaggcactttataactctgtcctgtattttactgtctgcttgcaaaaggtctcacagtcagccaaggat

SEQ ID NO: 89603 - DNA, 80 bp, synthetic construct
  source 1..80: mol_type = other DNA
aaatccttgttgcttaacatagtgcatagggttttctatggaattcaaaatcagatgagccttctttgttgctggtcctc

SEQ ID NO: 89604 - DNA, 80 bp, synthetic construct
  source 1..80: mol_type = other DNA
tctttgtccagttttatcattgcttttcagggagtggttatatcaaggtgctcattccaccacctcagaagtggtcccta

SEQ ID NO: 89605 - DNA, 80 bp, synthetic construct; identical to SEQ ID NO: 16394
  source 1..80: mol_type = other DNA

SEQ ID NO: 89606 - DNA, 80 bp, synthetic construct
  source 1..80: mol_type = other DNA
attgctaaagttgcatagtattccttagtgtgactgtgctataacctttcaaccaatctcttatgcttgcatgtgtaggt

SEQ ID NO: 89607 - DNA, 80 bp, synthetic construct
  source 1..80: mol_type = other DNA
ctggactacctatttctgacatgtgttctccatgttgacatttaatatagagtcttctttttctggtgataattctgtct

SEQ ID NO: 89608 - DNA, 80 bp, synthetic construct
  source 1..80: mol_type = other DNA
tgttttctactaagaaatttatgcctttaactcttattttttggtctctgatacattttgagataatttttatatgctat

SEQ ID NO: 89609 - DNA, 80 bp, synthetic construct; identical to SEQ ID NO: 16395
  source 1..80: mol_type = other DNA

SEQ ID NO: 89610 - DNA, 80 bp, synthetic construct
  source 1..80: mol_type = other DNA
aatctgtagatcactgggtaatatcgccaacttaacaatatttaatcttccaatctgtgaacacaggatgtatagttcta

SEQ ID NO: 89611 - DNA, 80 bp, synthetic construct
  source 1..80: mol_type = other DNA
cctggtatatagaggcacaaatgattttcttaaaataaatgttgaacatgtaccctgcaattttgctggacttgtttatt

SEQ ID NO: 89612 - DNA, 80 bp, synthetic construct
  source 1..80: mol_type = other DNA
tgcctaattgtcatggttaaaactttcagtacattgttcaatagcactgggtaaagcatacagccatatcttactctttg

SEQ ID NO: 89613 - DNA, 80 bp, synthetic construct; identical to SEQ ID NO: 16396
  source 1..80: mol_type = other DNA

SEQ ID NO: 89614 - DNA, 80 bp, synthetic construct
  source 1..80: mol_type = other DNA
atgctgctgaatttggcttactagtactttgttaaataaaagattttagtatctagtttgtcttttcttgtggtatattt

SEQ ID NO: 89615 - DNA, 80 bp, synthetic construct
  source 1..80: mol_type = other DNA
aaggtttttggttactgattcaaactttctacttgttatgggtctgctcataatttcaatttctgttttggtctgtatta

SEQ ID NO: 89616 - DNA, 80 bp, synthetic construct
  source 1..80: mol_type = other DNA
acttttgtttatgattttagatatgtgcaacttctctaattttttattagtcattctagttaaaggttttcaactttgat

SEQ ID NO: 89617 - DNA, 80 bp, synthetic construct; identical to SEQ ID NO: 16397
  source 1..80: mol_type = other DNA

SEQ ID NO: 89618 - DNA, 80 bp, synthetic construct
  source 1..80: mol_type = other DNA
cctcactatattgtagttagagaagatattttgtatgatttctatattttaaaatttattgagactcttttgtggcctaa

SEQ ID NO: 89619 - DNA, 80 bp, synthetic construct
  source 1..80: mol_type = other DNA
ttttttttttttaattttaaaaatatgcatatttagtgtataaaacatacagttaaatcgttaacatagtgatgcaaatt

SEQ ID NO: 89620 - DNA, 80 bp, synthetic construct
  source 1..80: mol_type = other DNA
ctttgacctacatctttccattttcttcccccacaccttgcccatggtaaccactagtttattctatctctgtatatttg

SEQ ID NO: 89621 - DNA, 80 bp, synthetic construct
  source 1..80: mol_type = other DNA
cacaccacagtttagtcatccatcaatggacacgtaagttttcatatcgtgactcatgcatataatgccacaatgaatat

SEQ ID NO: 89622 - DNA, 80 bp, synthetic construct; identical to SEQ ID NO: 16398
  source 1..80: mol_type = other DNA

SEQ ID NO: 89623 - DNA, 80 bp, synthetic construct
  source 1..80: mol_type = other DNA
ttggatattatcctcttataagatatatggttggcaaatattttcttctagtccataggttgccttttccttttgttgac

SEQ ID NO: 89624 - DNA, 80 bp, synthetic construct
  source 1..80: mol_type = other DNA
aggtcttttatccattttgagtttatttctatgtatggtgtaaggcagcgatatcaaatcttttggcttcccggggccac

SEQ ID NO: 89625 - DNA, 80 bp, synthetic construct; identical to SEQ ID NO: 16399
  source 1..80: mol_type = other DNA

SEQ ID NO: 89626 - DNA, 80 bp, synthetic construct
  source 1..80: mol_type = other DNA
tgtaaaataaaccagaaagtatgaagtctccctttgtttttcagaacagaattttcagaatttcgttggctacttaaggt

SEQ ID NO: 89627 - DNA, 80 bp, synthetic construct
  source 1..80: mol_type = other DNA
tttaatttctttcatcaatgattcatagttttcagtgtacaggtctttcatctttttggctaaatttattcctaagcaat

SEQ ID NO: 89628 - DNA, 80 bp, synthetic construct
  source 1..80: mol_type = other DNA
tcggggttttctatatgtaggatcatgtcatcttcatataaagataatattacttcttacttcctgatttgaatgtcttt

SEQ ID NO: 89629 - DNA, 80 bp, synthetic construct; identical to SEQ ID NO: 16400
  source 1..80: mol_type = other DNA

SEQ ID NO: 89630 - DNA, 80 bp, synthetic construct
  source 1..80: mol_type = other DNA
ctttcagtctgttagtatcacattgattgctacatgtatattaaataagatttgcatgccagaaattaattccacataga

SEQ ID NO: 89631 - DNA, 80 bp, synthetic construct
  source 1..80: mol_type = other DNA
tgtgttaggaagtattccctttagctgcatttttttttttttggaagtattccctatagctgcatttttttggaagagtt

SEQ ID NO: 89632 - DNA, 80 bp, synthetic construct
  source 1..80: mol_type = other DNA
tatatgtacaggtctatatgttgcatggtatatggagtatactgcatgatgatgaggtttggagtgtggataagcctatc

SEQ ID NO: 89633 - DNA, 80 bp, synthetic construct; identical to SEQ ID NO: 16401
  source 1..80: mol_type = other DNA

SEQ ID NO: 89634 - DNA, 80 bp, synthetic construct
  source 1..80: mol_type = other DNA
gcgccaccacgtccagctaattttgtagttttagtagagacagggtttttccatgttggtcaggctggtctcgaactcct

SEQ ID NO: 89635 - DNA, 80 bp, synthetic construct
  source 1..80: mol_type = other DNA
agtggattccatgtctttgctgttgtgaatagtgctgtgatgaacatacaaatgcatgtgtctttttgatagaacaattt

SEQ ID NO: 89636 - DNA, 80 bp, synthetic construct
  source 1..80: mol_type = other DNA
cagcaacttttatttttttgactttttaataattgccattctgactggtgtgagatggcatcccattatggtttggtgtt

SEQ ID NO: 89637 - DNA, 80 bp, synthetic construct
  source 1..80: mol_type = other DNA
tctcctgtctcagactcctgagtagctgggattacaggtgaccgccaccatacctggctaatttttgtgtttttagtaga

SEQ ID NO: 89638 - DNA, 80 bp, synthetic construct; identical to SEQ ID NO: 16402
  source 1..80: mol_type = other DNA

SEQ ID NO: 89639 - DNA, 80 bp, synthetic construct
  source 1..80: mol_type = other DNA
tttgctattggtctgttcaggctttctattcctgatttaatcttagcaggttggtttttttctaggaatttgtccatttc

SEQ ID NO: 89640 - DNA, 80 bp, synthetic construct
  source 1..80: mol_type = other DNA
attctttgtttcaaaaattgaagtcttagttttactgacttttttcccctatggtttttctttctaacttgtctctgttc

SEQ ID NO: 89641 - DNA, 80 bp, synthetic construct; identical to SEQ ID NO: 16403
  source 1..80: mol_type = other DNA

SEQ ID NO: 89642 - DNA, 80 bp, synthetic construct
  source 1..80: mol_type = other DNA
gtatacgtttccaattgcgaagtcttgagtaattttccattttctcagtatgtaatgtcctcctttgtctcctataacaa

SEQ ID NO: 89643 - DNA, 80 bp, synthetic construct
  source 1..80: mol_type = other DNA
caaaagtgagtttgttatatacagcataggttgatggttttcttttaaatccattctgccaacctctgctttttggagaa

SEQ ID NO: 89644 - DNA, 80 bp, synthetic construct
  source 1..80: mol_type = other DNA
tttgatgattttctgatagtgtaccattatgattctctattcgattgtctgtatgtgtgtatgtgtattttaaagacttt

SEQ ID NO: 89645 - DNA, 80 bp, synthetic construct
  source 1..80: mol_type = other DNA
ggcacgtttgttacaacttatgaatctgcatttacacattattatcaaagtccctagttaacattagggctcactgttgg

SEQ ID NO: 89646 - DNA, 80 bp, synthetic construct; identical to SEQ ID NO: 16404
  source 1..80: mol_type = other DNA

SEQ ID NO: 89647 - DNA, 80 bp, synthetic construct
  source 1..80: mol_type = other DNA
atatttacatatatttgtacattttcactgccctaaaagtactctgtgcactgcctattcaacccttcttccccaacaac

SEQ ID NO: 89648 - DNA, 80 bp, synthetic construct
  source 1..80: mol_type = other DNA
atttctatttagtgatgaataatatttcattgcctggatgtactacagtttatctgtctactcacctatggaaggacatc

SEQ ID NO: 89649 - DNA, 80 bp, synthetic construct; identical to SEQ ID NO: 16405
  source 1..80: mol_type = other DNA

SEQ ID NO: 89650 - DNA, 80 bp, synthetic construct
  source 1..80: mol_type = other DNA
tgtcagtgttttgaattttggccattctaataagcgtgtagatatatcacatttcttgttttaatttccatttccctaat

SEQ ID NO: 89651 - DNA, 80 bp, synthetic construct
  source 1..80: mol_type = other DNA
atcaggtatatcttttacaagtattgtctcccttctgtggcctgtcctttcatcctcttgacagtatgttttacagagca

SEQ ID NO: 89652 - DNA, 80 bp, synthetic construct
  source 1..80: mol_type = other DNA
atcttctgggatttctatttgttgttgatttccaaatcttttattgtggcaaaatacacttaacataaaaattaccatcc

SEQ ID NO: 89653 - DNA, 80 bp, synthetic construct; identical to SEQ ID NO: 16406
  source 1..80: mol_type = other DNA

SEQ ID NO: 89654 - DNA, 80 bp, synthetic construct
  source 1..80: mol_type = other DNA
acattttgcttatccattcttccatggacatttgggttgcattgatgttttaactgttgtaaataatgccactacaatcg

SEQ ID NO: 89655 - DNA, 80 bp, synthetic construct
  source 1..80: mol_type = other DNA
aaggattccaatttctccatgtcccttccagcagtggttattttctgtttatgtgggatttttttgagacaagatctggc

SEQ ID NO: 89656 - DNA, 80 bp, synthetic construct
  source 1..80: mol_type = other DNA
tagtcatctgagtgtatgtaaggttgtggttttgacttgtatttcctaatgactagagatgttaaacaacttttcacgta

SEQ ID NO: 89657 - DNA, 80 bp, synthetic construct
  source 1..80: mol_type = other DNA
tcctgcctcccgagtagctgggactacaggcgcccaccaccacgcctggctaattttttgtatttttagtagagacgggg

SEQ ID NO: 89658 - DNA, 80 bp, synthetic construct; identical to SEQ ID NO: 16407
  source 1..80: mol_type = other DNA

SEQ ID NO: 89659 - DNA, 80 bp, synthetic construct
  source 1..80: mol_type = other DNA
catacaagaagcactgccaatgatgtaaagtttttcccctatgtttccttataagacttcatagttttaggactttgacc

SEQ ID NO: 89660 - DNA, 80 bp, synthetic construct
  source 1..80: mol_type = other DNA
cattttgagtaagtttttgtacacagtgttaggtaagggtctcaacttcattctcttttatacatggttaggtaaggatc

SEQ ID NO: 89661 - DNA, 80 bp, synthetic construct
  source 1..80: mol_type = other DNA
tttgggctctctattcaattccattggtctctacatctttatgtcaataccacatagttttgattactgtagcttcgtaa

SEQ ID NO: 89662 - DNA, 80 bp, synthetic construct; identical to SEQ ID NO: 16408
  source 1..80: mol_type = other DNA

SEQ ID NO: 89663 - DNA, 80 bp, synthetic construct
  source 1..80: mol_type = other DNA
tgaattttaggatggggtttcttctttctgcaaataacatcattaggatttttattgggattaccttggatttgtagatt

SEQ ID NO: 89664 - DNA, 80 bp, synthetic construct
  source 1..80: mol_type = other DNA
tattcttgatgcttttttcagcttttattgaggtataattgacaaattaaaagtgcatatatttaagaacatatttgacc

SEQ ID NO: 89665 - DNA, 80 bp, synthetic construct
  source 1..80: mol_type = other DNA
gaacttattcatctgataactctatgtttgtacccttcaacatttcctatttcccctactccctgacccctagtaaccac

SEQ ID NO: 89666 - DNA, 80 bp, synthetic construct; identical to SEQ ID NO: 16409
  source 1..80: mol_type = other DNA

SEQ ID NO: 89667 - DNA, 80 bp, synthetic construct
  source 1..80: mol_type = other DNA
aaattttatgtagagatagggtatcactatgtttcctaggctggtctcaaactcctgtgttcaagctatccttcaccttg

SEQ ID NO: 89668 - DNA, 80 bp, synthetic construct
  source 1..80: mol_type = other DNA
aaatctatcgtgttttccataatgactgtatcaatttacattcctaacaaaaatgtataagggacaccttttctccacat

SEQ ID NO: 89669 - DNA, 80 bp, synthetic construct
  source 1..80: mol_type = other DNA
aatgtctattcagtcccttgtccatcttaacaggttattaattgggttattaagtttttttgctagttatatgagttcct

SEQ ID NO: 89670 - DNA, 80 bp, synthetic construct; identical to SEQ ID NO: 16410
  source 1..80: mol_type = other DNA

SEQ ID NO: 89671 - DNA, 80 bp, synthetic construct
  source 1..80: mol_type = other DNA
ttgtgtactcttggtgtctttgtcaaagattagttgaccataaatgtgtgggtttatttctatgctttctattctgttcc

SEQ ID NO: 89672 - DNA, 80 bp, synthetic construct
  source 1..80: mol_type = other DNA
gaaaaaaagtcactggaaatttgataggcattgccttgaatctgtagatcactttgagtagtatagctatttcggcaata

SEQ ID NO: 89673 - DNA, 80 bp, synthetic construct
  source 1..80: mol_type = other DNA
atctgtgcctttcatattatatccaaatgaagtcaataccaaatccaatgtcatgcagtttttgccccatgttttcttct

SEQ ID NO: 89674 - DNA, 80 bp, synthetic construct; identical to SEQ ID NO: 16411
  source 1..80: mol_type = other DNA

SEQ ID NO: 89675 - DNA, 80 bp, synthetic construct
  source 1..80: mol_type = other DNA
tgctgattttgtatcctgccactttactgagttagattattacttctaacaggttttttttgtggagtctgtagcatttt

SEQ ID NO: 89676 - DNA, 80 bp, synthetic construct
  source 1..80: mol_type = other DNA
tagaagtggtgagaatatctttttcttgttcctcatcttagaggagaggcattcagcttttcagcattgagtatgatgtt

SEQ ID NO: 89677 - DNA, 80 bp, synthetic construct
  source 1..80: mol_type = other DNA
aagtatcccatttcttgtatatgtacacttaactgtccttatgtactaaggataaatcccatgtttgtgatatatgattt

SEQ ID NO: 89678 - DNA, 80 bp, synthetic construct; identical to SEQ ID NO: 16412
  source 1..80: mol_type = other DNA

SEQ ID NO: 89679 - DNA, 80 bp, synthetic construct
  source 1..80: mol_type = other DNA
taagcctgaataactccctctggcatatcttgtaaggcaagagtagttgctgataaactccttcaacttttgtttacctg

SEQ ID NO: 89680 - DNA, 80 bp, synthetic construct
  source 1..80: mol_type = other DNA
aagtttttgctcagaaatccactgatagccttatggaggttcctgcagatgtaagaactttatttatcttgccgctttca

SEQ ID NO: 89681 - DNA, 80 bp, synthetic construct
  source 1..80: mol_type = other DNA
ctgaattaactttctaccctttacctctctactttccttctataaatcctgtgtgaacattaactctcctgatggtgtcc

SEQ ID NO: 89682 - DNA, 80 bp, synthetic construct
  source 1..80: mol_type = other DNA
tccagttgatgaattcctccttctatttgatcaagtctgctgctgatgctttctatttcacttttcatttcatgcactat

SEQ ID NO: 89683 - DNA, 80 bp, synthetic construct; identical to SEQ ID NO: 16413
  source 1..80: mol_type = other DNA

SEQ ID NO: 89684 - DNA, 80 bp, synthetic construct
  source 1..80: mol_type = other DNA
ccaaggctgagtgtcctgatgctgtcgtgtaaatagagttgtgttaataatatccctttcagattgtttgtgattaatgt

SEQ ID NO: 89685 - DNA, 80 bp, synthetic construct
  source 1..80: mol_type = other DNA
aaccccatctctactaaaaatacaaaaacattagccaggcatagcagcgtgtgcctgtagtcccagctacttgggaggct

SEQ ID NO: 89686 - DNA, 80 bp, synthetic construct
  source 1..80: mol_type = other DNA
tactttgctgaattaatttattcagtttttgtggtgagttttcagggatttctacaaatatgatcatatctatgaacaaa

SEQ ID NO: 89687 - DNA, 80 bp, synthetic construct; identical to SEQ ID NO: 16414
  source 1..80: mol_type = other DNA

SEQ ID NO: 89688 - DNA, 80 bp, synthetic construct
  source 1..80: mol_type = other DNA
atctttctgtgcctaatttcatttaacatattatccaagttcatccatgttgctgtgaatgacaggacttaatgctttat

SEQ ID NO: 89689 - DNA, 80 bp, synthetic construct
  source 1..80: mol_type = other DNA
agtcaatacccggtagtggattgtcaaactgtatgatagtctacttttagtttttttgacaaaacaccacagtattttcc

SEQ ID NO: 89690 - DNA, 80 bp, synthetic construct
  source 1..80: mol_type = other DNA
agatgttgagcattttttcacatacctgttggccagttgttctattttgcacatttctaaatcagataatctggtgtttt

SEQ ID NO: 89691 - DNA, 80 bp, synthetic construct; identical to SEQ ID NO: 16415
  source 1..80: mol_type = other DNA

SEQ ID NO: 89692 - DNA, 80 bp, synthetic construct
  source 1..80: mol_type = other DNA
agtttcattcttctgcatatgatatcctgttttcccaacatgatgtgttcaacatggtgtcctttccccagagtgtgttc

SEQ ID NO: 89693 - DNA, 80 bp, synthetic construct
  source 1..80: mol_type = other DNA
tatataccaaaagccatgtatattcaagtcccagagtcagccctgtgtaatgcgcatatacaaaatgtcagtcatctgta

SEQ ID NO: 89694 - DNA, 80 bp, synthetic construct; identical to SEQ ID NO: 16416
  source 1..80: mol_type = other DNA

SEQ ID NO: 89695 - DNA, 80 bp, synthetic construct
  source 1..80: mol_type = other DNA
tacatgtgcacaacgtgcaggtttgttacatatgtatacatgtgccatgttggtgtgctgcactgattaccttgtcattt

SEQ ID NO: 89696 - DNA, 80 bp, synthetic construct
  source 1..80: mol_type = other DNA
ttgctatagtttgctgagaatgatggtttccagcttcatccatgtccctacaaaggacgtgaactcatcctttttttatg

SEQ ID NO: 89697 - DNA, 80 bp, synthetic construct
  source 1..80: mol_type = other DNA
ggtatatacccagtaaggggatggctggatcaaatggtatttctagttctagatccttgaggaatcaccacactgtcttc

SEQ ID NO: 89698 - DNA, 80 bp, synthetic construct; identical to SEQ ID NO: 16417
  source 1..80: mol_type = other DNA

SEQ ID NO: 89699 - DNA, 80 bp, synthetic construct
  source 1..80: mol_type = other DNA
gtgcagaagctctttagtttaattagatcccatttgtcaattttggcttttgttgccattgcttttggtgttttagacat

SEQ ID NO: 89700 - DNA, 80 bp, synthetic construct
  source 1..80: mol_type = other DNA
agccagttttcccagcaccatttattaaatagggaatcctttccccatttcttgtttctgtcagctttgtcaaagatcag

SEQ ID NO: 89701 - DNA, 80 bp, synthetic construct
  source 1..80: mol_type = other DNA
aggattgtcttggcaatgcgggctcttttttggttccatatgaactttaaagtagtttttttccaattctgtgaagaaag

SEQ ID NO: 89702 - DNA, 80 bp, synthetic construct
  source 1..80: mol_type = other DNA
gaagaggtccttcacatcccttgtaagttggattcctaggtattttattctctttgaagcaattgtgaatgggagttcac

SEQ ID NO: 89703 - DNA, 80 bp, synthetic construct; identical to SEQ ID NO: 16418
  source 1..80: mol_type = other DNA

SEQ ID NO: 89704 - DNA, 80 bp, synthetic construct
  source 1..80: mol_type = other DNA
tacctaatttattgagagtttttagcatgaagggctgttgaattttgtcaaaggccttttctgcatctattgagataatc

SEQ ID NO: 89705 - DNA, 80 bp, synthetic construct
  source 1..80: mol_type = other DNA
tttttgcatcaatgttcatcagggatattggtctaaaattctctttttttgttgtgtctctgccaggctttggtatcagg

SEQ ID NO: 89706 - DNA, 80 bp, synthetic construct
  source 1..80: mol_type = other DNA
ttattgcctaaatttcagagcctgttattggtcttttcagggattcaacttcttcctggtttagtcttggaagggtgtat

SEQ ID NO: 89707 - DNA, 80 bp, synthetic construct; identical to SEQ ID NO: 16419
  source 1..80: mol_type = other DNA

SEQ ID NO: 89708 - DNA, 80 bp, synthetic construct
  source 1..80: mol_type = other DNA
ttttagatttttcctgctttctcttgtgggcatttagtgctataaatttccctctacacactgctttaaatgtgtcccag

SEQ ID NO: 89709 - DNA, 80 bp, synthetic construct
  source 1..80: mol_type = other DNA
tttgattgcactgtggtctgagagacagtttgttatagtttctgttcttttacatttgctgaggagtgctttacttccaa

SEQ ID NO: 89710 - DNA, 80 bp, synthetic construct; identical to SEQ ID NO: 16420
  source 1..80: mol_type = other DNA

SEQ ID NO: 89711 - DNA, 80 bp, synthetic construct
  source 1..80: mol_type = other DNA
tgcctttttttattttccatttgcttggtagatcttcctccatccctttattttgagcctatgtgtgtctctgcacgtga

SEQ ID NO: 89712 - DNA, 80 bp, synthetic construct
  source 1..80: mol_type = other DNA
tagttgatgcagtttcttcctagcatctatggtctttacaatttgtcatgtttttgcagtggctggtaccaattgttcct

SEQ ID NO: 89713 - DNA, 80 bp, synthetic construct
  source 1..80: mol_type = other DNA
agaatgttgaatattggcccccactctcttctggcttgtagagtttctgctgagagatccgccgttagtctgatgggttt

SEQ ID NO: 89714 - DNA, 80 bp, synthetic construct; identical to SEQ ID NO: 16421
  source 1..80: mol_type = other DNA

SEQ ID NO: 89715 - DNA, 80 bp, synthetic construct
  source 1..80: mol_type = other DNA
tgatcttcaatcaccgatatcctttcttccagttgatcaaatcggctactgaagcttgtgcatttgtcacgtagttcttg

SEQ ID NO: 89716 - DNA, 80 bp, synthetic construct
  source 1..80: mol_type = other DNA
tctctcaacttgtcaaagtcattctccgtccagctttgttccattgctggcgagtggctgcgttcctttggatggggaga

SEQ ID NO: 89717 - DNA, 80 bp, synthetic construct
  source 1..80: mol_type = other DNA
gctgcaggtctgttggagtttgctggaggtccactccagaccctgtttgcctgggtatcagcagcagaggctgcagaaca

SEQ ID NO: 89718 - DNA, 80 bp, synthetic construct; identical to SEQ ID NO: 16422
  source 1..80: mol_type = other DNA

SEQ ID NO: 89719 - DNA, 80 bp, synthetic construct
  source 1..80: mol_type = other DNA
gcctcgctgccgccttgcagttcgatctcagactgctgtgctagcaatgagcgaggctccatgggcgtgggaccctccga

SEQ ID NO: 89720 - DNA, 80 bp, synthetic construct
  source 1..80: mol_type = other DNA
cgatgcctcgccctacttcgtctcacactcagtgggctgcacccactgtcctgtacccactgtcttgacgagccccagtg

SEQ ID NO: 89721 - DNA, 80 bp, synthetic construct
  source 1..80: mol_type = other DNA
acccctcaagtagctgggactacaggcatgcaccaccatgcctggataacttcttaattttttgtagagacagggtcgtg

SEQ ID NO: 89722 - DNA, 80 bp, synthetic construct; identical to SEQ ID NO: 16423
  source 1..80: mol_type = other DNA

SEQ ID NO: 89723 - DNA, 80 bp, synthetic construct
  source 1..80: mol_type = other DNA
cagcctttggtatctatccttctactctctacctccatgagatcaacttttatagctcccacatatgataataacataag

SEQ ID NO: 89724 - DNA, 80 bp, synthetic construct
  source 1..80: mol_type = other DNA
ctgagtccatatctttgctgttgtgaatagtgctgcaataaacacggggatgcaggtacatttttagtatactgatatct

SEQ ID NO: 89725 - DNA, 80 bp, synthetic construct
  source 1..80: mol_type = other DNA
ttgtctttttaaaatagccattctcactatggttttggcttgcatttcccttataattactgatgttgggcttttttttt

SEQ ID NO: 89726 - DNA, 80 bp, synthetic construct; identical to SEQ ID NO: 16424
  source 1..80: mol_type = other DNA

SEQ ID NO: 89727 - DNA, 80 bp, synthetic construct
  source 1..80: mol_type = other DNA
ttgattttagtatagcaagagatagaaacggtttcatttttcacatggatatcttattttcccagctccattaagtgaag

SEQ ID NO: 89728 - DNA, 80 bp, synthetic construct
  source 1..80: mol_type = other DNA
tcaggcagtgtgatgcatccaactttgttatttttgctcagaattgctgtggctattccagctcttttttggttccatct

SEQ ID NO: 89729 - DNA, 80 bp, synthetic construct
  source 1..80: mol_type = other DNA
ctttcatcagacttttgtagttttccttgttagaggtttctcacctctttggttaaactcattcctagattttttgtagt

SEQ ID NO: 89730 - DNA, 80 bp, synthetic construct
  source 1..80: mol_type = other DNA
tttttcatttttgattttattcatgtaggtcttctctcttttcttcttggatagtttagccactggttattttgtttctt

SEQ ID NO: 89731 - DNA, 80 bp, synthetic construct; identical to SEQ ID NO: 16425
  source 1..80: mol_type = other DNA

SEQ ID NO: 89732 - DNA, 80 bp, synthetic construct
  source 1..80: mol_type = other DNA
tgtggtctgagaagatatgtgatatgaatccaatttaaaatatatatatatttaaaatcatacttagtgtcctaacatat

SEQ ID NO: 89733 - DNA, 80 bp, synthetic construct
  source 1..80: mol_type = other DNA
tactggaaatggagaattgaagttcccaagattattgtgttgaagtctacctttcccttcagatttgatgtttgccttat

SEQ ID NO: 89734 - DNA, 80 bp, synthetic construct
  source 1..80: mol_type = other DNA
ttttgtttccttttgcatgtaatatcttttcccattcctttctttcaactatgtgtctttacaggtgagatgcgtttctt

SEQ ID NO: 89735 - DNA, 80 bp, synthetic construct; identical to SEQ ID NO: 16426
  source 1..80: mol_type = other DNA

SEQ ID NO: 89736 - DNA, 80 bp, synthetic construct
  source 1..80: mol_type = other DNA
tctgttagtctgcaggttgttcccttgtaagtgtctacaacctcttttatcgctggttttatgattctctctttgtcttg

SEQ ID NO: 89737 - DNA, 80 bp, synthetic construct
  source 1..80: mol_type = other DNA
ttcaccttctgggacactgaaggtgtcaccttatggcatcctatagtcacatagcctttgttcattcttttctatttttt

SEQ ID NO: 89738 - DNA, 80 bp, synthetic construct
  source 1..80: mol_type = other DNA
tctcttgggcaaatttctcattcataccccgaattgttttttctgatttctttgtatagtctatcagatcttctttaata

SEQ ID NO: 89739 - DNA, 80 bp, synthetic construct; identical to SEQ ID NO: 16427
  source 1..80: mol_type = other DNA

SEQ ID NO: 89740 - DNA, 80 bp, synthetic construct
  source 1..80: mol_type = other DNA
ggccccagtggcagcagtggctggccccgaatgcttatccttgggcccaatggtagtgtatgctggtaccagtgttagca

SEQ ID NO: 89741 - DNA, 80 bp, synthetic construct
  source 1..80: mol_type = other DNA
tccatgctggtattgggatggctgggataagctggatgagcttgtcccaaggcccacaggtggcaaattcaagtgaatgc

SEQ ID NO: 89742 - DNA, 80 bp, synthetic construct; identical to SEQ ID NO: 16428
  source 1..80: mol_type = other DNA

SEQ ID NO: 89743 - DNA, 80 bp, synthetic construct
  source 1..80: mol_type = other DNA
tgcttcggaggtagcagagtattgccaatggctcatgctttggcctggagggagcagtcaggagtggcaaccagctttgt

SEQ ID NO: 89744 - DNA, 80 bp, synthetic construct
  source 1..80: mol_type = other DNA
tctctgggagctgttcattgccatttcacagtctgtaggtagcctcttgttagtctcaaggcatctatgggtcagggggt

SEQ ID NO: 89745 - DNA, 80 bp, synthetic construct
  source 1..80: mol_type = other DNA
attacttctcagttgaattccagcattctctcagaggcgatctatataaactgtggttacctacttgctatattttgtgg

SEQ ID NO: 89746 - DNA, 80 bp, synthetic construct
  source 1..80: mol_type = other DNA
gcccctgctgatatctggatagggatttcatagcatctgtatattgctataggtaaatatgatcattttaacatttttct

SEQ ID NO: 89747 - DNA, 80 bp, synthetic construct; identical to SEQ ID NO: 16429
  source 1..80: mol_type = other DNA

SEQ ID NO: 89748 - DNA, 80 bp, synthetic construct
  source 1..80: mol_type = other DNA
caggacagtctcaaactcctgggctcaagcaatccacccgcctcatcctttcaaagtgctgaaattacaagcatgagcca

SEQ ID NO: 89749 - DNA, 80 bp, synthetic construct
  source 1..80: mol_type = other DNA
ttggataccctttttcttttacttgcctaattgttctggtgaggacttttcttactctgctgaataagaatagtgaaagt

SEQ ID NO: 89750 - DNA, 80 bp, synthetic construct
  source 1..80: mol_type = other DNA
atgctttttctgcatctattgagatgatcatgtatttttttgtccttccttctgttaatgtgatgtatcacatttattga

SEQ ID NO: 89751 - DNA, 80 bp, synthetic construct; identical to SEQ ID NO: 16430
  source 1..80: mol_type = other DNA

SEQ ID NO: 89752 - DNA, 80 bp, synthetic construct
  source 1..80: mol_type = other DNA
ctctgttcagattttttttcttcctggttcaatcttgggaggttatatatgtccaggaatttatctctttcctctaggtt

SEQ ID NO: 89753 - DNA, 80 bp, synthetic construct
  source 1..80: mol_type = other DNA
agttttttggctgggtttgttggctcacacctgtaaacccagtactttggaaggccaaggcaggccgatcgcttgagtcc

SEQ ID NO: 89754 - DNA, 80 bp, synthetic construct
  source 1..80: mol_type = other DNA
cactgcgctctagcctgggtgacagagtgagaccgtgtctcggggggtgggggggaggcctcatttcattgatcttttgt

SEQ ID NO: 89755 - DNA, 80 bp, synthetic construct; identical to SEQ ID NO: 16431
  source 1..80: mol_type = other DNA

SEQ ID NO: 89756 - DNA, 80 bp, synthetic construct
  source 1..80: mol_type = other DNA
aagattttgacttttaaaaatttattgagacccgttttgtgtcctaacatatggtatatcctggagaatgtgctgtgtgc

SEQ ID NO: 89757 - DNA, 80 bp, synthetic construct
  source 1..80: mol_type = other DNA
ccagtgttgttggttgcatatataattgttatatcttcttgctgaattgatccatttataattatataatgacctccttt

SEQ ID NO: 89758 - DNA, 80 bp, synthetic construct
  source 1..80: mol_type = other DNA
tataggcagcatgtaattgggttttatttttttaattcatttagccagtatctatctttcatttgggaaatttaaattac

SEQ ID NO: 89759 - DNA, 80 bp, synthetic construct; identical to SEQ ID NO: 16432
  source 1..80: mol_type = other DNA

SEQ ID NO: 89760 - DNA, 80 bp, synthetic construct
  source 1..80: mol_type = other DNA
atagtatttgtggctagcaattttgtgagcttttccccaccttgcagcacttttaatatggcattcaattctttcctggc

SEQ ID NO: 89761 - DNA, 80 bp, synthetic construct
  source 1..80: mol_type = other DNA
cctcagagaggcccttttagggttgaatctatttagggatttgtgagcttcctttatctgttagtctctttctctcccaa

SEQ ID NO: 89762 - DNA, 80 bp, synthetic construct
  source 1..80: mol_type = other DNA
tctggtccttatcccaacacttcttctggaactcccaaaatgtgaaatattgttagcttaatagtgtctcatatgtcacg

SEQ ID NO: 89763 - DNA, 80 bp, synthetic construct; identical to SEQ ID NO: 16433
  source 1..80: mol_type = other DNA

SEQ ID NO: 89764 - DNA, 80 bp, synthetic construct
  source 1..80: mol_type = other DNA
tatctggaataacagagacttccaattttatggagtagccttagtaaggacttttcctgtacacgcgtctgtagtatcat

SEQ ID NO: 89765 - DNA, 80 bp, synthetic construct
  source 1..80: mol_type = other DNA
ggtacttactcctctatttttgctgatgttgctaactaccttcaaactttttgacaaagcattttaagcctcttctctga

SEQ ID NO: 89766 - DNA, 80 bp, synthetic construct
  source 1..80: mol_type = other DNA
tcatgtggttttatttgcacttactgattttatgcttttaggggaggatgagtgagatgatttatagtcagaggggatga

SEQ ID NO: 89767 - DNA, 80 bp, synthetic construct; identical to SEQ ID NO: 16434
  source 1..80: mol_type = other DNA

SEQ ID NO: 89768 - DNA, 80 bp, synthetic construct
  source 1..80: mol_type = other DNA
caggaattaagctgtgctggtcacttattgagaaagagcttcatggtgggcagctgggaagctgcacagaacactcctca

SEQ ID NO: 89769 - DNA, 80 bp, synthetic construct
  source 1..80: mol_type = other DNA
cattaagaagctgtcagtgtgaagaacgtgaatgctaagggcatatgagtgtgtccctgagaacatggatattgtgttct

SEQ ID NO: 89770 - DNA, 80 bp, synthetic construct
  source 1..80: mol_type = other DNA
catttctatacgttttctctgattactggaaattcctcaagtgttgaccattttgattcctgggccccttaagagtccat

SEQ ID NO: 89771 - DNA, 80 bp, synthetic construct
  source 1..80: mol_type = other DNA
ccaagctgagttgattacttttgacatcagttgttaacataattttgatgttgagcctccccccagttctggggtggctc

SEQ ID NO: 89772 - DNA, 80 bp, synthetic construct; identical to SEQ ID NO: 16435
  source 1..80: mol_type = other DNA

SEQ ID NO: 89773 - DNA, 80 bp, synthetic construct
  source 1..80: mol_type = other DNA
tcctgtgtaattttgtcttgaaaatcaaggccacttttttgttttctccatccaaagacctccagaaactttcctcccca

SEQ ID NO: 89774 - DNA, 80 bp, synthetic construct
  source 1..80: mol_type = other DNA
ttaaagtttcctagggctgctcttgctgcctggaaccttcccctgaaaatgtgtcttgggagacctagacagtgacttcc

SEQ ID NO: 89775 - DNA, 80 bp, synthetic construct; identical to SEQ ID NO: 16436
  source 1..80: mol_type = other DNA

SEQ ID NO: 89776 - DNA, 80 bp, synthetic construct
  source 1..80: mol_type = other DNA
gcaaatctattctgcacacctttgatccaatgtgagatccaacatgttccataatttgcatcaaacatcctcatacagca

SEQ ID NO: 89777 - DNA, 80 bp, synthetic construct
  source 1..80: mol_type = other DNA
gacttgcatcacagcagtagaaagccaatgtcccaccttaggaaatccctttccaagagttccctgtgctgttgcagggc

SEQ ID NO: 89778 - DNA, 80 bp, synthetic construct
  source 1..80: mol_type = other DNA
ttgtcatgcacattcctgaagactctcttggtaacaaatgatggaaccccaactcaaacaagcttaagcacaaaagggac

SEQ ID NO: 89779 - DNA, 80 bp, synthetic construct; identical to SEQ ID NO: 16437
  source 1..80: mol_type = other DNA

SEQ ID NO: 89780 - DNA, 80 bp, synthetic construct
  source 1..80: mol_type = other DNA
agggtacctaaacactgcacactaggagtgggaaaggaagagccccctaaggaagatttgagaagctgttcccagaagcc

SEQ ID NO: 89781 - DNA, 80 bp, synthetic construct
  source 1..80: mol_type = other DNA
cagctgttgtgggaatggcttttacactttccatccatgtcccttacttctcgcctctgagtggagacacaggtggtggc

SEQ ID NO: 89782 - DNA, 80 bp, synthetic construct
  source 1..80: mol_type = other DNA
atccactgagagggggagatttcttgagggggccagggagggggcttctacttgcaaaggatagggagagcttctgttca

SEQ ID NO: 89783 - DNA, 80 bp, synthetic construct
  source 1..80: mol_type = other DNA
gaagagggcttgggttacacctgggagattaggccggattttaatcaatcaggaggggaagggcagggggtgagtggttg

SEQ ID NO: 89784 - DNA, 80 bp, synthetic construct; identical to SEQ ID NO: 16438
  source 1..80: mol_type = other DNA

SEQ ID NO: 89785 - DNA, 80 bp, synthetic construct
  source 1..80: mol_type = other DNA
aaggaaggaaatgaaaatcacccaaagacaaagttaacatttggatctgtttccttctagtcttttttctgtgcctgtat

SEQ ID NO: 89786 - DNA, 80 bp, synthetic construct
  source 1..80: mol_type = other DNA
cccagacctcccactttcctagaaaacaaaattgttttgttctgccctgaaaatttaggcccagatcctggccttgacaa

SEQ ID NO: 89787 - DNA, 80 bp, synthetic construct; identical to SEQ ID NO: 16439
  source 1..80: mol_type = other DNA

SEQ ID NO: 89788 - DNA, 80 bp, synthetic construct
  source 1..80: mol_type = other DNA
tggctacgaccacaggtgaaaacagggaagaggtggcagctctggtcactgcctccctgtggtggagaaagcacgcccca

SEQ ID NO: 89789 - DNA, 80 bp, synthetic construct
  source 1..80: mol_type = other DNA
cccactctgggcagccaactgatgtgcacattttaatttcctaaaacaccaggacagaaccttcctcaggggtcaggtgg

SEQ ID NO: 89790 - DNA, 80 bp, synthetic construct
  source 1..80: mol_type = other DNA
aatcctggatgaagttttagctctgtcacttgacaactgcattatataacctagggtacttgaatctcagccccaaatct

SEQ ID NO: 89791 - DNA, 80 bp, synthetic construct
  source 1..80: mol_type = other DNA
aatgtctgtgtggtttcctgctggaagtctgccactcgcccccacgggccatgagctcctgagtttatttacatttccct

SEQ ID NO: 89792 - DNA, 80 bp, synthetic construct; identical to SEQ ID NO: 16440
  source 1..80: mol_type = other DNA

SEQ ID NO: 89793 - DNA, 80 bp, synthetic construct
  source 1..80: mol_type = other DNA
tgaatttttggtatatgatgtgaggtaattaagggtccaacttaatgtttttccagtgtgggtatccaactgctcctgaa

SEQ ID NO: 89794 - DNA, 80 bp, synthetic construct
  source 1..80: mol_type = other DNA
gccttggaagaagtactgatgtttggtacagcaagttctcccaccttgttcttcttcaagaatattgccaattcttggct

SEQ ID NO: 89795 - DNA, 80 bp, synthetic construct
  source 1..80: mol_type = other DNA
agagatttattcagattttgagataatcttttcagtattgagtcttctagtcattggaatgaaggcatatttctccattt

SEQ ID NO: 89796 - DNA, 80 bp, synthetic construct; identical to SEQ ID NO: 16441
  source 1..80: mol_type = other DNA

SEQ ID NO: 89797 - DNA, 80 bp, synthetic construct
  source 1..80: mol_type = other DNA
tgttccaagatcccatctaggatcgatcattacatttattgtcatctctgatcggtgacgggcttctcagtcttgttctt

SEQ ID NO: 89798 - DNA, 80 bp, synthetic construct
  source 1..80: mol_type = other DNA
gtgagatgctttcctcattgtggaacatgacatcaacatggtttatcactggtaatattaaccttgagccactcgtttaa

SEQ ID NO: 89799 - DNA, 80 bp, synthetic construct; identical to SEQ ID NO: 16442
  source 1..80: mol_type = other DNA

SEQ ID NO: 89800 - DNA, 80 bp, synthetic construct
  source 1..80: mol_type = other DNA
tttatttggaattcctttataaggaagatttgtccctctcctccaattgtttatttaattttatcagtgtggatttggga

SEQ ID NO: 89801 - DNA, 80 bp, synthetic construct
  source 1..80: mol_type = other DNA
gctcatcttttattttccctaccctagccctagaatcatccattcatccagagagccctggctccctggagaatgaatag

SEQ ID NO: 89802 - DNA, 80 bp, synthetic construct
  source 1..80: mol_type = other DNA
tactgacatttctgaccagagttcatccttgccccctcccccacaacttatttatagctttttctctgacagctagaaac

SEQ ID NO: 89803 - DNA, 80 bp, synthetic construct; identical to SEQ ID NO: 16443
  source 1..80: mol_type = other DNA

SEQ ID NO: 89804 - DNA, 80 bp, synthetic construct
  source 1..80: mol_type = other DNA
tgagtcttttgaagtcaagtacttctcccctaaccactggcagctattgatctgttttatgtccctgtagttttgttttt

SEQ ID NO: 89805 - DNA, 80 bp, synthetic construct
  source 1..80: mol_type = other DNA
cattttgtttatgcattcacctgttgaaggacatcttcattgtttccagtatttggtaattatgagcagagttactatac

SEQ ID NO: 89806 - DNA, 80 bp, synthetic construct
  source 1..80: mol_type = other DNA
agagttctacatgttccacatcctcaagagtggttggtattgtcaggttttgaattttttttttaatttatggaatttca

SEQ ID NO: 89807 - DNA, 80 bp, synthetic construct; identical to SEQ ID NO: 16444
  source 1..80: mol_type = other DNA

SEQ ID NO: 89808 - DNA, 80 bp, synthetic construct
  source 1..80: mol_type = other DNA
tttgtatgtagtaccctttaaattttcattttctaattgttgatcatctgtcctatcaggcatagatactaaatgcatta

SEQ ID NO: 89809 - DNA, 80 bp, synthetic construct
  source 1..80: mol_type = other DNA
aaaagcaacataattcaggtgaaaaaacagactggggaagctatctatgcctcatataacaaggagttaatgtctgtaat

SEQ ID NO: 89810 - DNA, 80 bp, synthetic construct
  source 1..80: mol_type = other DNA
aaggacatgaacaggcaattctgcaagaggaaacccaaacagatgccaagcccataaaaggtattcaacacagatggaaa

SEQ ID NO: 89811 - DNA, 80 bp, synthetic construct
  source 1..80: mol_type = other DNA
ctgaattgctacaacttcttgggaaagcaatctagcaacatttattaaaattactaaggacacaccctctcaccctgctc

SEQ ID NO: 89812 - DNA, 80 bp, synthetic construct; identical to SEQ ID NO: 16445
  source 1..80: mol_type = other DNA

SEQ ID NO: 89813 - DNA, 80 bp, synthetic construct
  source 1..80: mol_type = other DNA
actgatgaccttgggggaggaaagccattgtgaatctttgaattattccacttctcacagatgagtacttaatccttttg

SEQ ID NO: 89814 - DNA, 80 bp, synthetic construct
  source 1..80: mol_type = other DNA
aaatactgatagtgtcaacagagagtggggagtgataaggatcagtatcctgagctcctgtgtcaaagttgcagaggtgg

SEQ ID NO: 89815 - DNA, 80 bp, synthetic construct
  source 1..80: mol_type = other DNA
atctttcctgacccactactctgtcaatgtatgagtgtgacaatgtatggtggtgggagctgttgtcccttaccaggcct

SEQ ID NO: 89816 - DNA, 80 bp, synthetic construct; identical to SEQ ID NO: 16446
  source 1..80: mol_type = other DNA

SEQ ID NO: 89817 - DNA, 80 bp, synthetic construct
  source 1..80: mol_type = other DNA
catgagaaccaacagcttcgccgaggacctggacctggaaggggagactctgctgacacccatcacccacatctcacagt

SEQ ID NO: 89818 - DNA, 80 bp, synthetic construct
  source 1..80: mol_type = other DNA
agagaggagagcaagggcacttcccactgagcctgggaacatgatcctcttgttttgacttatggaaaaccagactgatc

SEQ ID NO: 89819 - DNA, 80 bp, synthetic construct
  source 1..80: mol_type = other DNA
gctgctgctgtcctcaggggctccttcaggtggaggaaatggctgattttccacgccttccagttggccttcccctgagg

SEQ ID NO: 89820 - DNA, 80 bp, synthetic construct; identical to SEQ ID NO: 16447
  source 1..80: mol_type = other DNA

SEQ ID NO: 89821 - DNA, 80 bp, synthetic construct
  source 1..80: mol_type = other DNA
cctttgcagccagccaggtgcaaggcctggccttgcaaatcactgaggaaatcgggacccatggtgctgggggctgcagg

SEQ ID NO: 89822 - DNA, 80 bp, synthetic construct
  source 1..80: mol_type = other DNA
ggtgtgaagaggctccaagggagccagcagatcactggaaagcaggggtgactagtcatggacaccctgagaatagggct

SEQ ID NO: 89823 - DNA, 80 bp, synthetic construct
  source 1..80: mol_type = other DNA
ctccaaagtgatcagtgttagtttagtggctcatgttgtgtgcaatacaggtggcagtgcctgtattgcctcttggctgt

SEQ ID NO: 89824 - DNA, 80 bp, synthetic construct
  source 1..80: mol_type = other DNA
gcagccaggccttaccaactcttgggtcttgcaaggcccctgcaggtgaaggtggtgagagaccaggcacttatgtggat

SEQ ID NO: 89825 - DNA, 80 bp, synthetic construct; identical to SEQ ID NO: 16448
  source 1..80: mol_type = other DNA

SEQ ID NO: 89826 - DNA, 80 bp, synthetic construct
  source 1..80: mol_type = other DNA
gtaacttaccaaggcctctctcagagcaggctgttccaaaagtggctgctagatatgagccagcctgggaaggcaggaag

SEQ ID NO: 89827 - DNA, 80 bp, synthetic construct
  source 1..80: mol_type = other DNA
agtcagggtacggtccctccagagaggcctgaaggggagagtgggcacgtacagtgtcagggcctaggaacccaggctcc

SEQ ID NO: 89828 - DNA, 80 bp, synthetic construct
  source 1..80: mol_type = other DNA
acagcccgcccagtgatgcccataattaaattcggctccagctgctcagggatgcagcgaagctcctgtgggcagcctgg

SEQ ID NO: 89829 - DNA, 80 bp, synthetic construct; identical to SEQ ID NO: 16449
  source 1..80: mol_type = other DNA

SEQ ID NO: 89830 - DNA, 80 bp, synthetic construct
  source 1..80: mol_type = other DNA
atgcaagctagggagtcatgacaagctgaggcacggggtacccaggagataaagagtggcgtcgctgcaccccagcctat

SEQ ID NO: 89831 - DNA, 80 bp, synthetic construct
  source 1..80: mol_type = other DNA
cagaaccatatgacagggcttctgagagaaaggtgggaagtagagactgtaggcctgcatgggcagttggggagcacccc

SEQ ID NO: 89832 - DNA, 80 bp, synthetic construct; identical to SEQ ID NO: 16450
  source 1..80: mol_type = other DNA

SEQ ID NO: 89833 - DNA, 80 bp, synthetic construct
  source 1..80: mol_type = other DNA
ctccccagaacccccaaagccccaggcatggagaagccctaggattgctgctcactcaaccctgcctaagatgaagcaag

SEQ ID NO: 89834 - DNA, 80 bp, synthetic construct
  source 1..80: mol_type = other DNA
aggctgaaatcatttttgtgaaatcctccctcacactgcatccccaactgccaagccagccaggactggcctggaattca

SEQ ID NO: 89835 - DNA, 80 bp, synthetic construct
  source 1..80: mol_type = other DNA
ctgtctcttctgttttggcatcttagatgggcaagccccagctcgaggttaacagataccgccctcagtcccactctcca

SEQ ID NO: 89836 - DNA, 80 bp, synthetic construct; identical to SEQ ID NO: 16451
  source 1..80: mol_type = other DNA

SEQ ID NO: 89837 - DNA, 80 bp, synthetic construct
  source 1..80: mol_type = other DNA
gggcaaacgtcacaagggtggccccaaatttggcttcatggaccaaggggctagctcttttgatgggaccagcttggcct

SEQ ID NO: 89838 - DNA, 80 bp, synthetic construct
  source 1..80: mol_type = other DNA
agaaggatgagtgaggggcttgtcaagaacagatgagaccattttgtctttctagaccagtgtcctgtcttctgcaaagc

SEQ ID NO: 89839 - DNA, 80 bp, synthetic construct
  source 1..80: mol_type = other DNA
ttcttctaattaaattaaaaccgaggcgtaatggctcagtgggaaagagatgggattgggaatcagatgccctcaatctg

SEQ ID NO: 89840 - DNA, 80 bp, synthetic construct; identical to SEQ ID NO: 16452
  source 1..80: mol_type = other DNA

SEQ ID NO: 89841 - DNA, 80 bp, synthetic construct
  source 1..80: mol_type = other DNA
cagttggggcagggggtcggggcggggttgggcggggggcacatcccatatagatctcttgtgtgctctgctgatacctg

SEQ ID NO: 89842 - DNA, 80 bp, synthetic construct
  source 1..80: mol_type = other DNA
taccctggtatagggtggtggtgttaaacttttagttaaagggtaatgtgcatgcacacagattagtacacaggtctcaa

SEQ ID NO: 89843 - DNA, 80 bp, synthetic construct
  source 1..80: mol_type = other DNA
catttgaactttatgcggtgggaatgatgcaactcatacacctttgtgtccaatgtccctcactcaatttgatgtctggc

SEQ ID NO: 89844 - DNA, 80 bp, synthetic construct; identical to SEQ ID NO: 16453
  source 1..80: mol_type = other DNA

SEQ ID NO: 89845 - DNA, 80 bp, synthetic construct
  source 1..80: mol_type = other DNA
atcctaacacttggcattttccgtcgtttccttttcagccatgatggtgaatgtctagcagcatcaaatggtgattttaa

SEQ ID NO: 89846 - DNA, 80 bp, synthetic construct
  source 1..80: mol_type = other DNA
gcctacatcttctgcctgttttatgtttatttatggtcctatatatctttagatattctggagtcatttgtcagagagag

SEQ ID NO: 89847 - DNA, 80 bp, synthetic construct
  source 1..80: mol_type = other DNA
atgtggtccagttaatcaaacatttcctctctggatagggctgtttgtgtcctatttaagaaactttgactactccaagg

SEQ ID NO: 89848 - DNA, 80 bp, synthetic construct
  source 1..80: mol_type = other DNA
tcataaagatattctggtttattctaaagctttattagctcacctttcccatgtagatctgcactccatctgggattgat

SEQ ID NO: 89849 - DNA, 80 bp, synthetic construct
  source 1..80: mol_type = other DNA
tggaccctattgggtgccactggtcagattcaagttgttctttgtggccaggaccttgcttccttctcactgtagtttgc

SEQ ID NO: 89850 - DNA, 80 bp, synthetic construct; identical to SEQ ID NO: 16454
  source 1..80: mol_type = other DNA

SEQ ID NO: 89851 - DNA, 80 bp, synthetic construct
  source 1..80: mol_type = other DNA
agtcacctaatctctatcagcctcagtttcctcttgtatacattgggagtatatctcacagtattagtgtaaggccttga

SEQ ID NO: 89852 - DNA, 80 bp, synthetic construct
  source 1..80: mol_type = other DNA
acaaatggggtcacaacatatggctgtcagctgctgtccttaataagatgtgcctagaggcctgagagtcccaagctcca

SEQ ID NO: 89853 - DNA, 80 bp, synthetic construct
  source 1..80: mol_type = other DNA
tcagtggactgtgtctcatggcagtcacaggtgccccagtatgcatctgtcatttgttcttatcactgtcgggcccatct

SEQ ID NO: 89854 - DNA, 80 bp, synthetic construct; identical to SEQ ID NO: 16455
  source 1..80: mol_type = other DNA

SEQ ID NO: 89855 - DNA, 80 bp, synthetic construct
  source 1..80: mol_type = other DNA
attgaagcctcaagaaggatagggacttgccagtatcactgggagataggagcagaagccagggctcattcccagacaca

SEQ ID NO: 89856 - DNA, 80 bp, synthetic construct
  source 1..80: mol_type = other DNA
acagtctgcagatattatctgggcactggccagtggctcttgtggctgccctctgcaataagaattcttcaagttcagcc

SEQ ID NO: 89857 - DNA, 80 bp, synthetic construct
  source 1..80: mol_type = other DNA
caaattggcaggcccagcttcatgccttcttatggtgccccagagcccctggctaggcattcatgctttagatatgtggg

SEQ ID NO: 89858 - DNA, 80 bp, synthetic construct; identical to SEQ ID NO: 16456
  source 1..80: mol_type = other DNA

SEQ ID NO: 89859 - DNA, 80 bp, synthetic construct
  source 1..80: mol_type = other DNA
cagaagagcaacccagcaggggatatacacaaagatctgagaaagggattatttttagggccaattcaagggatttttca

SEQ ID NO: 89860 - DNA, 80 bp, synthetic construct
  source 1..80: mol_type = other DNA
aaggcaatagagggtacttgggaagtagggtggtaggcaaggcttttcagagaacaaggagctacatacacatacatgca

SEQ ID NO: 89861 - DNA, 80 bp, synthetic construct
  source 1..80: mol_type = other DNA
caggcagctagtctctgtatctggggtagaaagagtgggctaaaaagtcagctagcacccctgacttcaagtcctcgagt

SEQ ID NO: 89862 - DNA, 80 bp, synthetic construct; identical to SEQ ID NO: 16457
  source 1..80: mol_type = other DNA

SEQ ID NO: 89863 - DNA, 80 bp, synthetic construct
  source 1..80: mol_type = other DNA
cacaggctgatatgattgagctcaggctggtatgggttaggggatgagagtacagaacagtccaccccaggggctctgaa

SEQ ID NO: 89864 - DNA, 80 bp, synthetic construct
  source 1..80: mol_type = other DNA
aaaccacatggcctgaattttgattgggaaagcatccctgtaggtgtcaggtgatggaaggactctgggtaaatggaagc

SEQ ID NO: 89865 - DNA, 80 bp, synthetic construct; identical to SEQ ID NO: 16458
  source 1..80: mol_type = other DNA

SEQ ID NO: 89866 - DNA, 80 bp, synthetic construct
  source 1..80: mol_type = other DNA
ccaaaagggacagtgaagttggcttctcaggccacagtaggccttcacggtactcagcaggagaccccagcaggcagcat

SEQ ID NO: 89867 - DNA, 80 bp, synthetic construct
  source 1..80: mol_type = other DNA
gaagaaatcttgagagaaacaatcccacaggctaccaggccagcttttggaaacagtctcattagcaaacaaagggaagt

SEQ ID NO: 89868 - DNA, 80 bp, synthetic construct
  source 1..80: mol_type = other DNA
agaaagattgctctcagcctatcccctccctggccatgcaggtggaagaccctattacttgggctaaagagaagctaaac

SEQ ID NO: 89869 - DNA, 80 bp, synthetic construct; identical to SEQ ID NO: 16459
  source 1..80: mol_type = other DNA

SEQ ID NO: 89870 - DNA, 80 bp, synthetic construct
  source 1..80: mol_type = other DNA
caaggttggatatgaagagggacttcctgaaagcaggcacaggaagggatgggagctcagctcaccgggtgctagacaag

SEQ ID NO: 89871 - DNA, 80 bp, synthetic construct
  source 1..80: mol_type = other DNA
atttgtacttgctggctgccccatgggggcttgggctaggtctccctgccggtggggagggaggtgtggaagctggtttg

SEQ ID NO: 89872 - DNA, 80 bp, synthetic construct
  source 1..80: mol_type = other DNA
ctttcttcatcatgcagccgtagagctggaggccaaggacaccctctggaaatctgaattccattcgctcttggcaaaga

SEQ ID NO: 89873 - DNA, 80 bp, synthetic construct
  source 1..80: mol_type = other DNA
gcccattcggaggatttagacaaatacctcgagtgagtgaatctgaagcatgctagttgtgttgccttttaaataggctc

SEQ ID NO: 89874 - DNA, 80 bp, synthetic construct; identical to SEQ ID NO: 16460
  source 1..80: mol_type = other DNA

SEQ ID NO: 89875 - DNA, 80 bp, synthetic construct
  source 1..80: mol_type = other DNA
cttcccgcctgacttctctgccagagcccaggtgggggacggggatgccaagggcagagcccctggagaggctagtgtgg

SEQ ID NO: 89876 - DNA, 80 bp, synthetic construct
  source 1..80: mol_type = other DNA
cagtactgtttcagaagtgaagataactcacctctcccaaaagcagagttttggcaatataaaacatgaaagtgggatgg

SEQ ID NO: 89877 - DNA, 80 bp, synthetic construct; identical to SEQ ID NO: 16461
  source 1..80: mol_type = other DNA

SEQ ID NO: 89878 - DNA, 80 bp, synthetic construct
  source 1..80: mol_type = other DNA
tctgcctttccctgtcaaaaacctctttgtgctggagcagcccctgctccacagagtgacatgaaccagagactcacagc

SEQ ID NO: 89879 - DNA, 80 bp, synthetic construct
  source 1..80: mol_type = other DNA
gtctttacacacatggtaaaaccaattcagagtacaaaaggggtgaaaaataacactctccccacccaaccctaattccc

SEQ ID NO: 89880 - DNA, 80 bp, synthetic construct
  source 1..80: mol_type = other DNA
tttgcctttgacttcttccataggtatgccatacttctttttgagctgtacatacaatgctgatttattatggtgcagta

SEQ ID NO: 89881 - DNA, 80 bp, synthetic construct
  source 1..80: mol_type = other DNA
tataattggaaggagcatagtctctgtgttcagctagagatttagcccaatgggctgggcttttcccagataggacatgc

SEQ ID NO: 89882 - DNA, 80 bp, synthetic construct; identical to SEQ ID NO: 16462
  source 1..80: mol_type = other DNA

SEQ ID NO: 89883 - DNA, 80 bp, synthetic construct
  source 1..80: mol_type = other DNA
cctgtcagctttgactggggagccctttcatttcttagtaagtgttcagccccagtgtgcaccacttaaaaggaagacac

SEQ ID NO: 89884 - DNA, 80 bp, synthetic construct
  source 1..80: mol_type = other DNA
tcactactgaaatgaccacttatgaaattagtttccctgaaacatccctccctattgaacactgttgtttctccctatcc

SEQ ID NO: 89885 - DNA, 80 bp, synthetic construct; identical to SEQ ID NO: 16463
  source 1..80: mol_type = other DNA

SEQ ID NO: 89886 - DNA, 80 bp, synthetic construct
  source 1..80: mol_type = other DNA
tcctctgccaagtataaaagatgccctcagatgttaccatataatgctttacaaaagacaaaccaaaatcccctctggat

SEQ ID NO: 89887 - DNA, 80 bp, synthetic construct
  source 1..80: mol_type = other DNA
gagatcctccctttccccccatttccagcaggattaaaatgttcatttatgttgtgatagatactgccaaataagggctg

SEQ ID NO: 89888 - DNA, 80 bp, synthetic construct
  source 1..80: mol_type = other DNA
aaatgcttaaaatcatttgtttttctttcttgtgaactatttcttcataccctttggactttgtaaaataccttgtctta

SEQ ID NO: 89889 - DNA, 80 bp, synthetic construct; identical to SEQ ID NO: 16464
  source 1..80: mol_type = other DNA

SEQ ID NO: 89890 - DNA, 80 bp, synthetic construct
  source 1..80: mol_type = other DNA
ctaatttcaactgctacctttatcatatttcaaactctcatttaatttgtgtccatttctagactctattctggactgct

SEQ ID NO: 89891 - DNA, 80 bp, synthetic construct
  source 1..80: mol_type = other DNA
attttcacaaatgcagtcaaccaggggaattcatggcatggcctaagatctaaacactcttaagatttaaacacaggatt

SEQ ID NO: 89892 - DNA, 80 bp, synthetic construct
  source 1..80: mol_type = other DNA
gaccatttcgtatacatgtatgatcatactttcagggcatcttggaaaaactgaatttgctaactcaatagagaacaaaa

SEQ ID NO: 89893 - DNA, 80 bp, synthetic construct
  source 1..80: mol_type = other DNA
ccataccaaccaccaaaaaaacccactaacaccataaagtgtcatagctagagctagagtgctgttataagctgtgcagg

SEQ ID NO: 89894 - DNA, 80 bp, synthetic construct; identical to SEQ ID NO: 16465
  source 1..80: mol_type = other DNA

SEQ ID NO: 89895 - DNA, 80 bp, synthetic construct
  source 1..80: mol_type = other DNA
cctatagtagtgacacagtgttacttaaatgtattgctatacctcatgatggccattccatccattgtaatcatgtgtac

SEQ ID NO: 89896 - DNA, 80 bp, synthetic construct
  source 1..80: mol_type = other DNA
ttagattttttttaaatcagccgttctctgtattcttgtccagatgctgtggacagtgatgatgggaaaatagtccctgc

SEQ ID NO: 89897 - DNA, 80 bp, synthetic construct
  source 1..80: mol_type = other DNA
gcacaaggggccagactgctgctacttctgaattttataggacatgcatttttttcatataaacttagaactagcacgcc

SEQ ID NO: 89898 - DNA, 80 bp, synthetic construct
  source 1..80: mol_type = other DNA
ccaccatgactggctaatttttttttttattagagacagggtttcaccatgttggccaggctggtctcaaactcctgacc

SEQ ID NO: 89899 - DNA, 80 bp, synthetic construct; identical to SEQ ID NO: 16466
  source 1..80: mol_type = other DNA

SEQ ID NO: 89900 - DNA, 80 bp, synthetic construct
  source 1..80: mol_type = other DNA
gtacatttctcatgcagttctaagaaacaacacagagaaatcttacatactcctttacctagtctcccccgatagtaaca

SEQ ID NO: 89901 - DNA, 80 bp, synthetic construct
  source 1..80: mol_type = other DNA
tcccaccctaccctgtccttagcccctgacaactactaacctattcttcatttctttatcattccaagaaaattatataa

SEQ ID NO: 89902 - DNA, 80 bp, synthetic construct
  source 1..80: mol_type = other DNA
caagattgcactgaccatcataggtgaaataggtatgtgttcttttattatgaaagcctcctcagatgtggacattagtg

SEQ ID NO: 89903 - DNA, 80 bp, synthetic construct; identical to SEQ ID NO: 16467
  source 1..80: mol_type = other DNA

SEQ ID NO: 89904 - DNA, 80 bp, synthetic construct
  source 1..80: mol_type = other DNA
aaagaatggggatccctgtgacagctctaggggattttgggaccagataaccttaatggcctcaggctccctagatgaga

SEQ ID NO: 89905 - DNA, 80 bp, synthetic construct
  source 1..80: mol_type = other DNA
ccctctctcaggagaaggtgctccctcacccttaaagaccaggctgccgttgcttcccatgtgtctgttcctctattcag

SEQ ID NO: 89906 - DNA, 80 bp, synthetic construct
  source 1..80: mol_type = other DNA
gggagaaaacacaccggccataatgaacacacgtttaggctgaagaataatcttcaaatgatactactacttacacttcc

SEQ ID NO: 89907 - DNA, 80 bp, synthetic construct; identical to SEQ ID NO: 16468
  source 1..80: mol_type = other DNA

SEQ ID NO: 89908 - DNA, 80 bp, synthetic construct
  source 1..80: mol_type = other DNA
ctcagaggagccaatttctaaagcttaagactgggctgtaaaaaatcacatacctcccctcccattcttaatgtgtaact

SEQ ID NO: 89909 - DNA, 80 bp, synthetic construct
  source 1..80: mol_type = other DNA
ttctattcagtgttttatcttcagtgcttaatccatatggagcctgtcacggaccctcagtgaatgtttgacgagtgagt

SEQ ID NO: 89910 - DNA, 80 bp, synthetic construct
  source 1..80: mol_type = other DNA
tggggtccaaagttgaccagaatatctctagtcataaagaatctcttccccttgagcccactcatctctgttgacattct

SEQ ID NO: 89911 - DNA, 80 bp, synthetic construct; identical to SEQ ID NO: 16469
  source 1..80: mol_type = other DNA

SEQ ID NO: 89912 - DNA, 80 bp, synthetic construct
  source 1..80: mol_type = other DNA
tagcatctgcattaaaaggctcccactgacagctcatgcattgtgatggaactagaggtgagatacagagcaggagtcca

SEQ ID NO: 89913 - DNA, 80 bp, synthetic construct
  source 1..80: mol_type = other DNA
atggctaagctttccccaggaatgggtaactggaaaaatgtaggaattacatatgattccatcaatgacagttttcctat

SEQ ID NO: 89914 - DNA, 80 bp, synthetic construct
  source 1..80: mol_type = other DNA
ggaacatcccttactttcccatctcaatacaactgtgaaaagcctagcctgggactcaggcctttccttactccctctgg

SEQ ID NO: 89915 - DNA, 80 bp, synthetic construct; identical to SEQ ID NO: 16470
  source 1..80: mol_type = other DNA

SEQ ID NO: 89916 - DNA, 80 bp, synthetic construct
  source 1..80: mol_type = other DNA
tacagcaatttcagaaccctttcacatagattcttaaggggaccgtttcccttgaagaatggggtacaccagaggactta

SEQ ID NO: 89917 - DNA, 80 bp, synthetic construct
  source 1..80: mol_type = other DNA
ggagcattgcaactcatttcttccctgcagtctctctcctgaggtggcccaggtatgtgtttgaggcctgggacttgctg

SEQ ID NO: 89918 - DNA, 80 bp, synthetic construct; identical to SEQ ID NO: 16471
  source 1..80: mol_type = other DNA

SEQ ID NO: 89919 - DNA, 80 bp, synthetic construct
  source 1..80: mol_type = other DNA
actgcctcccagccttccctccccactggtctgggcacattccaaggcttgaggtctcctagtcaaggcctcctgttatt

SEQ ID NO: 89920 - DNA, 80 bp, synthetic construct
  source 1..80: mol_type = other DNA
atcttcttgccatccctgtctcatgggtgagcacatttcctggatttaaaatgtatgggacagcctgtgagaattacaga

SEQ ID NO: 89921 - DNA, 80 bp, synthetic construct
  source 1..80: mol_type = other DNA
taccaaactccagggcacacgtgccactgtgtcttgcccacaaacatgcacacagagtatcgatctgtctgatgtttcag

SEQ ID NO: 89922 - DNA, 80 bp, synthetic construct; identical to SEQ ID NO: 16472
  source 1..80: mol_type = other DNA

SEQ ID NO: 89923 - DNA, 80 bp, synthetic construct
  source 1..80: mol_type = other DNA
gacagtccgccgaaatggccagcaggcaggcatcctcccaggtggcagtgagaaagggccctgcacagtcagcgttcctg

SEQ ID NO: 89924 - DNA, 80 bp, synthetic construct
  source 1..80: mol_type = other DNA
aggcctgtacactctgggcctcagactccacaccaagaagagtcaggggggctcactctaagccccgccagctcgcacca

SEQ ID NO: 89925 - DNA, 80 bp, synthetic construct
  source 1..80: mol_type = other DNA
ctccaacctagctgtgtgacctttaggccttgggatagcacacagcaaatgtctgccaccccagtactgccactggcttg

SEQ ID NO: 89926 - DNA, 80 bp, synthetic construct; identical to SEQ ID NO: 16473
  source 1..80: mol_type = other DNA

SEQ ID NO: 89927 - DNA, 80 bp, synthetic construct
  source 1..80: mol_type = other DNA
gacaaacccatgttcaaggctgggaagtcctactcggccccacttctacccaggaccagtagctttcaattgtaaatgtg

SEQ ID NO: 89928 - DNA, 80 bp, synthetic construct
  source 1..80: mol_type = other DNA
ggtctccgtgatgcggagcatgcccagcttaccatcctgatgcagaggcaaggacaacactgggccctgacttgctaaga

SEQ ID NO: 89929 - DNA, 80 bp, synthetic construct
  source 1..80: mol_type = other DNA
acagaagtctgccaaaagcccaggctggatagggagcatcacactgttgggaaatgtgcaattttcactcagccagcatc

SEQ ID NO: 89930 - DNA, 80 bp, synthetic construct
  source 1..80: mol_type = other DNA
gctgtcactcagggctgagctctgctgaaggatctgggaggtcagtaggcacctgtgtccacccagctgtccatacagat

SEQ ID NO: 89931 - DNA, 80 bp, synthetic construct; identical to SEQ ID NO: 16474
  source 1..80: mol_type = other DNA

SEQ ID NO: 89932 - DNA, 80 bp, synthetic construct
  source 1..80: mol_type = other DNA
cccccctcctctgccccaactggctccaggccaaactctggttcctgaggagcctcaaaggctggacttggggtgtcccg

SEQ ID NO: 89933 - DNA, 80 bp, synthetic construct
  source 1..80: mol_type = other DNA
gggtcagcacccctctaggcttgggcaggcacacactccactcagctgcagccatggagttggtgcttctagggcctggg

SEQ ID NO: 89934 - DNA, 80 bp, synthetic construct; identical to SEQ ID NO: 16475
  source 1..80: mol_type = other DNA

SEQ ID NO: 89935 - DNA, 80 bp, synthetic construct
  source 1..80: mol_type = other DNA
ctggttgccctgctctgggtgatgaggtagaggtcacacagccaggccagtggccctagtgtcaaggttccacaccacag

SEQ ID NO: 89936 - DNA, 80 bp, synthetic construct
  source 1..80: mol_type = other DNA
gcccggctctgagctgctgctggttactgtggcagtttccacctataccacacctatatacttgccctcccccacacaca

SEQ ID NO: 89937 - DNA, 80 bp, synthetic construct
  source 1..80: mol_type = other DNA
agtaggggtctgatctggagagcaggggagcctgcaggtccctgggttggaatcctggagccctgggctgcagggttttg

SEQ ID NO: 89938 - DNA, 80 bp, synthetic construct; identical to SEQ ID NO: 16476
  source 1..80: mol_type = other DNA

SEQ ID NO: 89939 - DNA, 80 bp, synthetic construct
  source 1..80: mol_type = other DNA
aatgacactcccagagacctctgctctgcctacctgcattctgctgaaggttttgggtcaccttgttttatggtccctgt

SEQ ID NO: 89940 - DNA, 80 bp, synthetic construct
  source 1..80: mol_type = other DNA
agctgcaggggcagctgtcctttgcacctgggcctagagtgccagagacttagtctcatttgtttacaggagactgatgg

SEQ ID NO: 89941 - DNA, 80 bp, synthetic construct
  source 1..80: mol_type = other DNA
caggctgcctcacccaacgatgacagtgactagcctcagagcctggctgcttggaagacctttgcccaagcagagaactg

SEQ ID NO: 89942 - DNA, 80 bp, synthetic construct; identical to SEQ ID NO: 16477
  source 1..80: mol_type = other DNA

SEQ ID NO: 89943 - DNA, 80 bp, synthetic construct
  source 1..80: mol_type = other DNA
cttggcatggaacatgtgccagaccaaaagagctatctctctccctgcgaaaggctggggtcctgggagctagagctggg

SEQ ID NO: 89944 - DNA, 80 bp, synthetic construct
  source 1..80: mol_type = other DNA
cacatatgtgcatgttcatatatgtgtcagaatgcgtatttgtcagtgtatgtgtgtcagtgcacataggtataggggct

SEQ ID NO: 89945 - DNA, 80 bp, synthetic construct
  source 1..80: mol_type = other DNA
ccttggcttccagcttccaggctctggcactcccactgttaggaacaggtacctttagggacacaggagtgtaagccact

SEQ ID NO: 89946 - DNA, 80 bp, synthetic construct; identical to SEQ ID NO: 16478
  source 1..80: mol_type = other DNA

SEQ ID NO: 89947 - DNA, 80 bp, synthetic construct
  source 1..80: mol_type = other DNA
ttagcaagtggaggagttagaggatctgcagttaaccccttgagtctcggaaggctgtttgagccactaatcaggaagga

SEQ ID NO: 89948 - DNA, 80 bp, synthetic construct
  source 1..80: mol_type = other DNA
tgagtctctgatgttgacagcctctttgttttttcatctcagcctattcaaggccatttttcagcttgcttggctttgca

SEQ ID NO: 89949 - DNA, 80 bp, synthetic construct
  source 1..80: mol_type = other DNA
ggggtctctccccatctgtccaggggagaggcagcccacagggagccacacaggcaggggacattccactagggccattt

SEQ ID NO: 89950 - DNA, 80 bp, synthetic construct; identical to SEQ ID NO: 16479
  source 1..80: mol_type = other DNA

SEQ ID NO: 89951 - DNA, 80 bp, synthetic construct
  source 1..80: mol_type = other DNA
cactctactgaaggcccctgtcctttcagtgtcacccatcctttcagtggcacaagtcagaagttctggggtcatttccg

SEQ ID NO: 89952 - DNA, 80 bp, synthetic construct
  source 1..80: mol_type = other DNA
tggcattctcacatcccctgccccattccaatcaattatctactcagtggacagacatcctttcaaagtttagagacctg

SEQ ID NO: 89953 - DNA, 80 bp, synthetic construct
  source 1..80: mol_type = other DNA
ttcctgctatacacctgctgtgctcccaggcctcagcactcccctcagggtgcaaacggtccttcaacattagttagtct

SEQ ID NO: 89954 - DNA, 80 bp, synthetic construct
  source 1..80: mol_type = other DNA
gacataattcactgcctgggaaggcactgtgctgtgtagatgcagcaagctggctaaaatcaactgtagcatggcctatg

SEQ ID NO: 89955 - DNA, 80 bp, synthetic construct; identical to SEQ ID NO: 16480
  source 1..80: mol_type = other DNA

SEQ ID NO: 89956 - DNA, 80 bp, synthetic construct
  source 1..80: mol_type = other DNA
acccttttctgagaggaccacaagtcatagcccagggctacctgtacagctaccaggcttaacaactcagatgcacaccc

SEQ ID NO: 89957 - DNA, 80 bp, synthetic construct
  source 1..80: mol_type = other DNA
atcgagtccccattctctaatgctaattgctacaattagcaggagaaaggccttttagatccatttcttctcctggctga

SEQ ID NO: 89958 - DNA, 80 bp, synthetic construct
  source 1..80: mol_type = other DNA
gagaaaggcttttagttccgcagacagagcagccagagactgggtgcgctccagcctcatgggccttcctggctggtgtg

SEQ ID NO: 89959 - DNA, 80 bp, synthetic construct; identical to SEQ ID NO: 16481
  source 1..80: mol_type = other DNA

SEQ ID NO: 89960 - DNA, 80 bp, synthetic construct
  source 1..80: mol_type = other DNA
ttgccaaacaaattatactgctgaccagggaagagggtactctgattggccaggcctgggccagggtctttctcaccgag

SEQ ID NO: 89961 - DNA, 80 bp, synthetic construct
  source 1..80: mol_type = other DNA
atttttggctatcatgactatgggagaattactaatatcaactaggtagagaccaggcagggtgctaaacatcttacaat

SEQ ID NO: 89962 - DNA, 80 bp, synthetic construct
  source 1..80: mol_type = other DNA
ttgtgaaaatggaggcacactttcctggcctggcctcttccttcgttcaataaatgaatgaaaccattcaacagaaatct

SEQ ID NO: 89963 - DNA, 80 bp, synthetic construct; identical to SEQ ID NO: 16482
  source 1..80: mol_type = other DNA

SEQ ID NO: 89964 - DNA, 80 bp, synthetic construct
  source 1..80: mol_type = other DNA
gagggaggacagtggtcagagaggtaagcagggcagatcttgtaaaaacctgatggaatttgaattttatttcctagaaa

SEQ ID NO: 89965 - DNA, 80 bp, synthetic construct
  source 1..80: mol_type = other DNA
catgcttttccacttcatctctagcctctatccttgctctcctccctacacaaacagcttctccagggtaatttatttat

SEQ ID NO: 89966 - DNA, 80 bp, synthetic construct; identical to SEQ ID NO: 16483
  source 1..80: mol_type = other DNA

SEQ ID NO: 89967 - DNA, 80 bp, synthetic construct
  source 1..80: mol_type = other DNA
ctccagcatgtttacttaggagggaaactgctgggccacaggtataaaatattttatttgaggaagaagtgttggccagc

SEQ ID NO: 89968 - DNA, 80 bp, synthetic construct
  source 1..80: mol_type = other DNA
tgggcaaattttcatctgtttgttaaccctcctgcaaactggcaatcttcctacctttttcttaatgatttgtggtgctt

SEQ ID NO: 89969 - DNA, 80 bp, synthetic construct
  source 1..80: mol_type = other DNA
tcatgagtgtaaaagtgaaaaacgcaaattgtttccttagtattattatgaaaacagtcttgacccttgccatgatggat

SEQ ID NO: 89970 - DNA, 80 bp, synthetic construct
  source 1..80: mol_type = other DNA
ttttgctttcaaatatttagtccatttggagtctacttttcctaggggctcagttaggaatccatattcctattcctcca

SEQ ID NO: 89971 - DNA, 80 bp, synthetic construct; identical to SEQ ID NO: 16484
  source 1..80: mol_type = other DNA

SEQ ID NO: 89972 - DNA, 80 bp, synthetic construct
  source 1..80: mol_type = other DNA
ggaaaatcctgacgtcattctaatgccaagttgccctgttcaagaaaataaaatgtctctgcatatggaaagatctccct

SEQ ID NO: 89973 - DNA, 80 bp, synthetic construct
  source 1..80: mol_type = other DNA
ttttgttttttgttttgagtacactgatcttatatccaaaacctctctgaaatctgaaatctctctttagttgttaagtt

SEQ ID NO: 89974 - DNA, 80 bp, synthetic construct
  source 1..80: mol_type = other DNA
ccagaggcagcacaccatgaccccagtggaatatgtgcttgtatagttctgctttaaacatttcttagttttaacttcta

SEQ ID NO: 89975 - DNA, 80 bp, synthetic construct; identical to SEQ ID NO: 16485
  source 1..80: mol_type = other DNA

SEQ ID NO: 89976 - DNA, 80 bp, synthetic construct
  source 1..80: mol_type = other DNA
tttttttctgcctctattgagggaaccatatggtttttctcctgtagcctcttaatgtgaattacatggataaagtttct

SEQ ID NO: 89977 - DNA, 80 bp, synthetic construct
  source 1..80: mol_type = other DNA
aatttggacatgctctgattcgcaattttaaaaaatccctctagctggagcataaatcctgaaacagacccacttttctc

SEQ ID NO: 89978 - DNA, 80 bp, synthetic construct
  source 1..80: mol_type = other DNA
aagcaactcaatccttaaatttttctcctactgagtatctggaaaacaggtgcagaaatggatcatttgagacaccatag

SEQ ID NO: 89979 - DNA, 80 bp, synthetic construct; identical to SEQ ID NO: 16486
  source 1..80: mol_type = other DNA

SEQ ID NO: 89980 - DNA, 80 bp, synthetic construct
  source 1..80: mol_type = other DNA
aacatagtggtggcccttcaagcctactacccagactgagacctgcatctgatcaactctcatctccaatatgaccaaga

SEQ ID NO: 89981 - DNA, 80 bp, synthetic construct
  source 1..80: mol_type = other DNA
atcccaatctcttaactcagagccccccattcagaacctctacccaaagacagactccagaccctgactccagtcgccaa

SEQ ID NO: 89982 - DNA, 80 bp, synthetic construct
  source 1..80: mol_type = other DNA
gatcccaactcaggcaaactcccagccaggatgtggaccctagacccgaattctgatcccaactaggatacctaactcag

SEQ ID NO: 89983 - DNA, 80 bp, synthetic construct; identical to SEQ ID NO: 16487
  source 1..80: mol_type = other DNA

SEQ ID NO: 89984 - DNA, 80 bp, synthetic construct
  source 1..80: mol_type = other DNA
cgcccaggtccgtgctgaccgtgttcaaaccctcccagagagatggggagggccgcgctgaggagagtctgggagaaccg

SEQ ID NO: 89985 - DNA, 80 bp, synthetic construct
  source 1..80: mol_type = other DNA
aggcccccggagagaaccgcgccgaagaacccccggggacaaccgcgccgaagaacccccggggagaaccgcgccgaaaa

SEQ ID NO: 89986 - DNA, 80 bp, synthetic construct
  source 1..80: mol_type = other DNA
tgaggggcgcaccgggagaatcgtgctgaggagccccggggaggaccacgctgagaggcaccccggcagaatcgcgctga

SEQ ID NO: 89987 - DNA, 80 bp, synthetic construct; identical to SEQ ID NO: 16488
  source 1..80: mol_type = other DNA

SEQ ID NO: 89988 - DNA, 80 bp, synthetic construct
  source 1..80: mol_type = other DNA
tcgccggggtgagctggagacacgggccagttctctgcgtgatgtgttcaccaccccggggtgaccgcgtgaggacagcg

SEQ ID NO: 89989 - DNA, 80 bp, synthetic construct
  source 1..80: mol_type = other DNA
cccagcgggtccatgcaggggatcgggatgttctgaagcccccactgctgtgcctggaacacccgtgtctgccgctcacc

SEQ ID NO: 89990 - DNA, 80 bp, synthetic construct
  source 1..80: mol_type = other DNA
ccctgcccacctcccatcccccatccgggcgtgacacttgaccgcgtctgccggcccctccccttgtccgtcccctccgc

SEQ ID NO: 89991 - DNA, 80 bp, synthetic construct; identical to SEQ ID NO: 16489
  source 1..80: mol_type = other DNA

SEQ ID NO: 89992 - DNA, 80 bp, synthetic construct
  source 1..80: mol_type = other DNA
ggtgaccgggttgggggttttgttgttcttcagcccagaagagaaagagaaaatggtgtcattttttcaggcagcaagtg

SEQ ID NO: 89993 - DNA, 80 bp, synthetic construct
  source 1..80: mol_type = other DNA
ctcactatctagctgggaagtttttgtcatctgcctgtccgagaggcagctgtgcaaccagtgccatcactcagagccag

SEQ ID NO: 89994 - DNA, 80 bp, synthetic construct
  source 1..80: mol_type = other DNA
cctcaggacagattatcagctgcctgtctgcctgcttcctctgtgcccagcctctctcttgacatccaaaggatcacaac

SEQ ID NO: 89995 - DNA, 80 bp, synthetic construct; identical to SEQ ID NO: 16490
  source 1..80: mol_type = other DNA

SEQ ID NO: 89996 - DNA, 80 bp, synthetic construct
  source 1..80: mol_type = other DNA
tcccaggtcttcagagtcatttcacagatttcaccagaataaaagtcccactcatgtggggtttacattctggtgggaaa

SEQ ID NO: 89997 - DNA, 80 bp, synthetic construct
  source 1..80: mol_type = other DNA
aagctccctaaatcaatttcacttaaaatggtgtccaccctcctactaaagagtgacaaagggtgttggttaggattttt

SEQ ID NO: 89998 - DNA, 80 bp, synthetic construct; identical to SEQ ID NO: 16491
  source 1..80: mol_type = other DNA

SEQ ID NO: 89999 - DNA, 80 bp, synthetic construct
  source 1..80: mol_type = other DNA
gccacacacggggtgccgtcaatcagccagcgccgcctgccagcccagcgcacctgttgtgtgcccccactcccgcctcc

SEQ ID NO: 90000 - DNA, 80 bp, synthetic construct
  source 1..80: mol_type = other DNA
aggctgggaggtgagcccagggctggccttgggcaccatggcagaattctgggagggggctgcagtcacggccagctccc

SEQ ID NO: 90001 - DNA, 80 bp, synthetic construct
  source 1..80: mol_type = other DNA
ttctccttttgtgtctggtttgcctcatctgtacatggtaggggctgagctagcgttccttgcactccctccagctttac

SEQ ID NO: 90002 - DNA, 80 bp, synthetic construct; identical to SEQ ID NO: 16492
  source 1..80: mol_type = other DNA

SEQ ID NO: 90003 - DNA, 80 bp, synthetic construct
  source 1..80: mol_type = other DNA
ccctgcccccaccctcggagtctaagggtggaaccatcttcagacccagccaggttcccaagttgctgcttccctcggaa

SEQ ID NO: 90004 - DNA, 80 bp, synthetic construct
  source 1..80: mol_type = other DNA
ttaaggtcagcccttgcagttggcagtctgtggcccctcctcggtccccttcagtgaggctttttgcatgcattggtcca

SEQ ID NO: 90005 - DNA, 80 bp, synthetic construct
  source 1..80: mol_type = other DNA
cactggggcttcccttccaacttgatggtttcaggtacatgggcctgttgtcaactctgttcccactgagcccatgagac

SEQ ID NO: 90006 - DNA, 80 bp, synthetic construct; identical to SEQ ID NO: 16493
  source 1..80: mol_type = other DNA

SEQ ID NO: 90007 - DNA, 80 bp, synthetic construct
  source 1..80: mol_type = other DNA
gacttctggctgaggacagggaggagcttaaggtagccctcagcatccaacaggggtagcagcctagtgcatgtatgacc

SEQ ID NO: 90008 - DNA, 80 bp, synthetic construct
  source 1..80: mol_type = other DNA
gtcttagctacccaaggcccagggagaggcacacggctcaggctgacagagtgtgacagatgcaggtcctgctccctcag

SEQ ID NO: 90009 - DNA, 80 bp, synthetic construct
  source 1..80: mol_type = other DNA
gaggccagacgggtggggggtctggagttcaggcggtctccatgagtggcagcacggggtgtgggccagttcccattggg

SEQ ID NO: 90010 - DNA, 80 bp, synthetic construct
  source 1..80: mol_type = other DNA
gtgggaaaatgaagtgaactgggcctgccagacccattgcctgcagggccttttctaccaccaccttccagaggcagctt

SEQ ID NO: 90011 - DNA, 80 bp, synthetic construct; identical to SEQ ID NO: 16494
  source 1..80: mol_type = other DNA

SEQ ID NO: 90012 - DNA, 80 bp, synthetic construct
  source 1..80: mol_type = other DNA
taaaggtccttagagaacctgaagagaatattctaatcaagctaggcaggctcagaagatggatgtaatttggaggaaaa

SEQ ID NO: 90013 - DNA, 80 bp, synthetic construct
  source 1..80: mol_type = other DNA
ttgacaatccgttcttccggaagtggcacttaattcccctctaattaagttttggctggactgtgatttgcttctttcaa

SEQ ID NO: 90014 - DNA, 80 bp, synthetic construct
  source 1..80: mol_type = other DNA
cagccctctggagaggtcctgtggtgaggaactgaggcctcctataaatggcctcctgtatgagcttgggagtggatcct

SEQ ID NO: 90015 - DNA, 80 bp, synthetic construct; identical to SEQ ID NO: 16495
  source 1..80: mol_type = other DNA

SEQ ID NO: 90016 - DNA, 80 bp, synthetic construct
  source 1..80: mol_type = other DNA
catgcccaccccaggcatacatagcatgtctttgctcttgcagagtttgaactctgcccaccagaccagtggctcttaac

SEQ ID NO: 90017 - DNA, 80 bp, synthetic construct
  source 1..80: mol_type = other DNA
gtgatttaggaaatgtaacgggtgaccttttctccccaagagaacaccaaatccatttccttgggacatggataaggcta

SEQ ID NO: 90018 - DNA, 80 bp, synthetic construct; identical to SEQ ID NO: 16496
  source 1..80: mol_type = other DNA

SEQ ID NO: 90019 - DNA, 80 bp, synthetic construct
  source 1..80: mol_type = other DNA
cacagagctgccaccactcttccaagagccctcccttttggggactgtgcccccaccccacccccaggcagcccctgcct

SEQ ID NO: 90020 - DNA, 80 bp, synthetic construct
  source 1..80: mol_type = other DNA
tagcacttagtatgtcaggcatggttctgagggcttcatccacactaccacccactgtagagatgggaaaactgaggcat

SEQ ID NO: 90021 - DNA, 80 bp, synthetic construct
  source 1..80: mol_type = other DNA
catgggggacagggcaggtgtgccttggcccacatttggcttcttgagcgccgaacctgcatgtgccaccccccagagtt

SEQ ID NO: 90022 - DNA, 80 bp, synthetic construct; identical to SEQ ID NO: 16497
  source 1..80: mol_type = other DNA

SEQ ID NO: 90023 - DNA, 80 bp, synthetic construct
  source 1..80: mol_type = other DNA
cgtggtcctgaggctccttgctggcgtttctgttttgctccctgctcctttcttttctttgtaacttctcttcagggcac

SEQ ID NO: 90024 - DNA, 80 bp, synthetic construct
  source 1..80: mol_type = other DNA
gggcctctaattttgacccttgatctgggtctaagcacctctgagcaagaggtgagggtttcaggcagcctcagctctta

SEQ ID NO: 90025 - DNA, 80 bp, synthetic construct
  source 1..80: mol_type = other DNA
ccagggctaaagccctccttgggacatgtcaatagcagcaaacattttaaagatgtgacatgttcgaagcctggcaacag

SEQ ID NO: 90026 - DNA, 80 bp, synthetic construct; identical to SEQ ID NO: 16498
  source 1..80: mol_type = other DNA

SEQ ID NO: 90027 - DNA, 80 bp, synthetic construct
  source 1..80: mol_type = other DNA
cacgtcagcttggccctggagcgtgggagcctccatctctcctgcacggcttccaggccccccccacccccaccccccag

SEQ ID NO: 90028 - DNA, 80 bp, synthetic construct
  source 1..80: mol_type = other DNA
tcctggaattgggagccactctcggtgtctgctctggtgctacggtcctgcagggctgttttttttttattttgtatttt

SEQ ID NO: 90029 - DNA, 80 bp, synthetic construct
  source 1..80: mol_type = other DNA
gcaaccctgcattctttagccgtcactccccacttcccttctctcattccccagccccagtcagccacggctctgctttc

SEQ ID NO: 90030 - DNA, 80 bp, synthetic construct
  source 1..80: mol_type = other DNA
attcattgaacacttgggccatttttactttttagctattagtgaataatactgccaggaacatttgggtacgagttttt

SEQ ID NO: 90031 - DNA, 80 bp, synthetic construct; identical to SEQ ID NO: 16499
  source 1..80: mol_type = other DNA

SEQ ID NO: 90032 - DNA, 80 bp, synthetic construct
  source 1..80: mol_type = other DNA
ataagttttttatattctagattcaagttccttatcagatatattttcttcctttttgtgggttgtcttttcactttctt

SEQ ID NO: 90033 - DNA, 80 bp, synthetic construct
  source 1..80: mol_type = other DNA
gttttggctcttacacttaggtctttcatccgctttcagttagtttaacatatggtgtgaggtaggggtctaactttatt

SEQ ID NO: 90034 - DNA, 80 bp, synthetic construct; identical to SEQ ID NO: 16500
  source 1..80: mol_type = other DNA

SEQ ID NO: 90035 - DNA, 80 bp, synthetic construct
  source 1..80: mol_type = other DNA
gttttcagtatagtttttgcactactttgtaaatcctacagggttttgtgtgacagtgactggcagccatacttcctccc

SEQ ID NO: 90036 - DNA, 80 bp, synthetic construct
  source 1..80: mol_type = other DNA
tcctgcctggagtgttctctctcctcccttttctgtgagccgtcatgaaacacctcctgtgggcttactgagccaccatc

SEQ ID NO: 90037 - DNA, 80 bp, synthetic construct; identical to SEQ ID NO: 16501
  source 1..80: mol_type = other DNA

SEQ ID NO: 90038 - DNA, 80 bp, synthetic construct
  source 1..80: mol_type = other DNA
ccagggaaatagaactttggcagcttacaaaggagttttatttttcaaatttcctttcaactcgagggtctcaaatccac

SEQ ID NO: 90039 - DNA, 80 bp, synthetic construct
  source 1..80: mol_type = other DNA
acacagccaagtccttttggaccaaattggatcactgccaaatggtatgcccagccttgctgaatctctacccatctgta

SEQ ID NO: 90040 - DNA, 80 bp, synthetic construct
  source 1..80: mol_type = other DNA
agccctttggaaacctgagtggggttttgtgcttgcatctcatttaagccatgaacacttgccggctctctattcatcca

SEQ ID NO: 90041 - DNA, 80 bp, synthetic construct
  source 1..80: mol_type = other DNA
tggggtgcaaatggggcaggaacaggagtccggcctgggggatgttagactcaccagccatcccctggaaagctgtgggg

SEQ ID NO: 90042 - DNA, 80 bp, synthetic construct; identical to SEQ ID NO: 16502
  source 1..80: mol_type = other DNA

SEQ ID NO: 90043 - DNA, 80 bp, synthetic construct
  source 1..80: mol_type = other DNA
tgggttgggagcacacatggcatctcctagagagtttgggggctggacacagggaggaggcagcatgggaaatggaagga

SEQ ID NO: 90044 - DNA, 80 bp, synthetic construct
  source 1..80: mol_type = other DNA
ggcagcaggctaacgactccccatgaaattaacaactttgtgaagcatttggtatttgggggattttacattagggttaa

SEQ ID NO: 90045 - DNA, 80 bp, synthetic construct
  source 1..80: mol_type = other DNA
attgttcactgcgcttctcaggccttctgggctcttcctctgctgctcgccataaaaactctccagtcatcttttccgct

SEQ ID NO: 90046 - DNA, 80 bp, synthetic construct
  source 1..80: mol_type = other DNA
tcccactgtgggaagggggtctggaggacaggcacccttgttggccgtggataggtttctgttctccctcgacccaccca

SEQ ID NO: 90047 - DNA, 80 bp, synthetic construct; identical to SEQ ID NO: 16503
  source 1..80: mol_type = other DNA

SEQ ID NO: 90048 - DNA, 80 bp, synthetic construct
  source 1..80: mol_type = other DNA
gcgccttggggcacccaggcctgcagccctcccccacacaggcagtctccacagagatagagcgccaaggatgcgggcca

SEQ ID NO: 90049 - DNA, 80 bp, synthetic construct
  source 1..80: mol_type = other DNA
gggcctcacctccctggcagcccactcacctcacatggcctgagccgcaaggtcagccccctcccaggcccgtgagaggc

SEQ ID NO: 90050 - DNA, 80 bp, synthetic construct; identical to SEQ ID NO: 16504
  source 1..80: mol_type = other DNA

SEQ ID NO: 90051 - DNA, 80 bp, synthetic construct
  source 1..80: mol_type = other DNA
aagcccttggggccggggtggtaggggtaggagagcatcttgagggtggctgcagcatcgtcgtcatctttccaatggtg

SEQ ID NO: 90052 - DNA, 80 bp, synthetic construct
  source 1..80: mol_type = other DNA
tgcaggaggggcctagccagggccaggtgtcacacaagcagagctccagggtgcagctgggcagattgccggtggttggt

SEQ ID NO: 90053 - DNA, 80 bp, synthetic construct
  source 1..80: mol_type = other DNA
aggagcctcagtagagacacagctagaaagtggccagctggggtttggtgctgagcctctgtctgactctctgctctctg

SEQ ID NO: 90054 - DNA, 80 bp, synthetic construct
  source 1..80: mol_type = other DNA
cagggaggaccccctgcagcctggctcaggcaggggcatgtgtgaaggcccagggggaagagagcagccaggtagacttc

SEQ ID NO: 90055 - DNA, 80 bp, synthetic construct; identical to SEQ ID NO: 16505
  source 1..80: mol_type = other DNA

SEQ ID NO: 90056 - DNA, 80 bp, synthetic construct
  source 1..80: mol_type = other DNA
atggtgatgcaaaccataaacctgtcccccacgtcacctccaaaccctttgggctggcctcttggtgaggaatggccctg

SEQ ID NO: 90057 - DNA, 80 bp, synthetic construct
  source 1..80: mol_type = other DNA
tggttgccggatcctcattaatggctgtttgtatcacttaacaatttttcacttttggaggggtcgtgaataaccccaaa

SEQ ID NO: 90058 - DNA, 80 bp, synthetic construct
  source 1..80: mol_type = other DNA
cgtggtcagctggccaagccacagtgggaaaaggtggcccattggccagaacacagtccccaagcctcctcagctaggct

SEQ ID NO: 90059 - DNA, 80 bp, synthetic construct; identical to SEQ ID NO: 16506
  source 1..80: mol_type = other DNA

SEQ ID NO: 90060 - DNA, 80 bp, synthetic construct
  source 1..80: mol_type = other DNA
ctggcagacatcactctggcccaaggccaggcctgcagtaggagctctgtgcatatcccctatgtgagtacaggaacctc

SEQ ID NO: 90061 - DNA, 80 bp, synthetic construct
  source 1..80: mol_type = other DNA
aacccaagtcttccttcctactcctggcagggcaggcaattccactgatggctgcagtgcgacacagactgggcctggca

SEQ ID NO: 90062 - DNA, 80 bp, synthetic construct; identical to SEQ ID NO: 16507
  source 1..80: mol_type = other DNA

SEQ ID NO: 90063 - DNA, 80 bp, synthetic construct
  source 1..80: mol_type = other DNA
gttcctgtcccaatcctcccatccccatattcaggaaagttccccaggcccgtatgaactggcttcttaattttgtttta

SEQ ID NO: 90064 - DNA, 80 bp, synthetic construct
  source 1..80: mol_type = other DNA
agcagggagcacacgcctgtccaagaccttgggccagaggaaccccctctcccccgatggcccactcgccccagggcctc

SEQ ID NO: 90065 - DNA, 80 bp, synthetic construct
  source 1..80: mol_type = other DNA
cagaagtgaaccttgttttgttttgttgatgggtgtagtctcagggcatgttcaatgtctgtggagctgcctcttctgga

SEQ ID NO: 90066 - DNA, 80 bp, synthetic construct
  source 1..80: mol_type = other DNA
gcttgctctgggcttcaggggcctgagccccaggtagacccccacacttagggtgcctcaccacactccatccctagccc

SEQ ID NO: 90067 - DNA, 80 bp, synthetic construct; identical to SEQ ID NO: 16508
  source 1..80: mol_type = other DNA

SEQ ID NO: 90068 - DNA, 80 bp, synthetic construct
  source 1..80: mol_type = other DNA
acttatatctgtcaggggaagggcagttgcagttaggaccacactaaaaggttaatgtccacgctggtgttgaccaagcc

SEQ ID NO: 90069 - DNA, 80 bp, synthetic construct
  source 1..80: mol_type = other DNA
attcaaatgcagattcctgggctattccaagagttactgaatccccaccctggggtgaaggcttggcgtctgccagggac

SEQ ID NO: 90070 - DNA, 80 bp, synthetic construct; identical to SEQ ID NO: 16509
  source 1..80: mol_type = other DNA

SEQ ID NO: 90071 - DNA, 80 bp, synthetic construct
  source 1..80: mol_type = other DNA
tgcgtgcctgtggtcccagctgtttgggggctgagatgggaggatcgcctgagcctgggaggtcaagagtgcagtgagcc

SEQ ID NO: 90072 - DNA, 80 bp, synthetic construct
  source 1..80: mol_type = other DNA
ataagaagtcagagaatcctctccagctgaaaaccctcatttgttatcacccaaatgctgcctgctggctggcgagcctt

SEQ ID NO: 90073 - DNA, 80 bp, synthetic construct
  source 1..80: mol_type = other DNA
gtgctggtttcagagaaacaaacagccctgatgtagctgtggcccttggaggtgtccgaatagtccatcattttcagtga

SEQ ID NO: 90074 - DNA, 80 bp, synthetic construct; identical to SEQ ID NO: 16510
  source 1..80: mol_type = other DNA

SEQ ID NO: 90075 - DNA, 80 bp, synthetic construct
  source 1..80: mol_type = other DNA
gttatctttaaaaagtatcggtgggctcatgggggcttgagtgtcctggcagctctcctcatccatcctatgtgtacact

SEQ ID NO: 90076 - DNA, 80 bp, synthetic construct
  source 1..80: mol_type = other DNA
ctgaccagagcaagcagtgtgccattaacccctacctgtccagaactctgagctcctgtgggtccttctctgagtgtcct

SEQ ID NO: 90077 - DNA, 80 bp, synthetic construct
  source 1..80: mol_type = other DNA
tctcagccaatgggaagtcgtgcccttggatcatttggggcaaatggtcctcgttttcttcattatatggtgttgagttg

SEQ ID NO: 90078 - DNA, 80 bp, synthetic construct; identical to SEQ ID NO: 16511
  source 1..80: mol_type = other DNA

SEQ ID NO: 90079 - DNA, 80 bp, synthetic construct
  source 1..80: mol_type = other DNA
ctaccgtggaggtcgagttaaaaggcagcacttcgggggttgaaaagctacccgcaggggtctgctcgtgagggaccccc

SEQ ID NO: 90080 - DNA, 80 bp, synthetic construct
  source 1..80: mol_type = other DNA
ggatgtgtttcacccccaaggtgtgagtggaatcagcaaattgtatcaagaaatatttctagggatttacattccggcgg

SEQ ID NO: 90081 - DNA, 80 bp, synthetic construct
  source 1..80: mol_type = other DNA
ttccgacagcagcggtggtgatggtcccctcggcctgcctggcctgcagcagccctggctggaggctgaccgagcctccg

SEQ ID NO: 90082 - DNA, 80 bp, synthetic construct
  source 1..80: mol_type = other DNA
agcccaaggagcctgtccctacgcacaccccctgcccctgggaggcacatgccgagctttcctgtcctccatttggtggc

SEQ ID NO: 90083 - DNA, 80 bp, synthetic construct; identical to SEQ ID NO: 16512
  source 1..80: mol_type = other DNA

SEQ ID NO: 90084 - DNA, 80 bp, synthetic construct
  source 1..80: mol_type = other DNA
agggatcaaggaggacctcacaaaggagatcgggaaggtggaggcttggtcacccccaggaggagctttttctaaggaag

SEQ ID NO: 90085 - DNA, 80 bp, synthetic construct
  source 1..80: mol_type = other DNA
gttgggagtcatgacctgtttagtaaataggctatggcagcctcttggaacttagtgaggtggctaagctgcccctagat

SEQ ID NO: 90086 - DNA, 80 bp, synthetic construct; identical to SEQ ID NO: 16513
  source 1..80: mol_type = other DNA

SEQ ID NO: 90087 - DNA, 80 bp, synthetic construct
  source 1..80: mol_type = other DNA
ctctgtggctctgccttcctcttggctccgccttcctccgtggtggcctgagaggggtgtggtgctgcttgtccgtggtg

SEQ ID NO: 90088 - DNA, 80 bp, synthetic construct
  source 1..80: mol_type = other DNA
tctcagagccttggtgtccccatctgtaaagtgggatgtgacaatacccttcttgctgaatgggcagggagagaggagct

SEQ ID NO: 90089 - DNA, 80 bp, synthetic construct
  source 1..80: mol_type = other DNA
tagagaggaccctgaagtccaaagaggggatgccagcctcaaactcagcagctcgaagtagcaacagcctcgaatccctc

SEQ ID NO: 90090 - DNA, 80 bp, synthetic construct; identical to SEQ ID NO: 16514
  source 1..80: mol_type = other DNA

SEQ ID NO: 90091 - DNA, 80 bp, synthetic construct
  source 1..80: mol_type = other DNA
ccccaccacctctgcacacagcccctccggtggtgcctgggggcccaggcttttgatagagaatcacatctggaccagga

SEQ ID NO: 90092 - DNA, 80 bp, synthetic construct
  source 1..80: mol_type = other DNA
agggaggagagccctcccgctccaccaggtgacggccctaaatcctcaggagtgacagcgtcctcccgcccggattgggt

SEQ ID NO: 90093 - DNA, 80 bp, synthetic construct
  source 1..80: mol_type = other DNA
cgtggctgcactgagggcagaaggggccttgtcacctaggaaggaccccactaggaaccccttcccgcggaaacacagct

SEQ ID NO: 90094 - DNA, 80 bp, synthetic construct
  source 1..80: mol_type = other DNA
aaggggccagttcacccacagagggtggagtcactgggctgaagcttctggccatcgtatggagctggaacaaggcactg

SEQ ID NO: 90095 - DNA, 80 bp, synthetic construct; identical to SEQ ID NO: 16515
  source 1..80: mol_type = other DNA

SEQ ID NO: 90096 - DNA, 80 bp, synthetic construct
  source 1..80: mol_type = other DNA
tccgggacagacggctggacttgtgaaacactccagggtcgggggctcagccacgggaccagcgcttgccagaaatgttc

SEQ ID NO: 90097 - DNA, 80 bp, synthetic construct
  source 1..80: mol_type = other DNA
aatcgtcttcgagctactgatatagaacctctgcgtttagctgtggtttaggaagtgcattcacgtgaagtcgccaagtt

SEQ ID NO: 90098 - DNA, 80 bp, synthetic construct
  source 1..80: mol_type = other DNA
atcactgggctttgtgaaacctgtcagcttgtgtgaaagctatctcccccaggccccacccccgcccccacccaaagcac

SEQ ID NO: 90099 - DNA, 80 bp, synthetic construct; identical to SEQ ID NO: 16516
  source 1..80: mol_type = other DNA

SEQ ID NO: 90100 - DNA, 80 bp, synthetic construct
  source 1..80: mol_type = other DNA
cgggcagtggcccagagaagctgagctcgctcacgagatgtgtgctgacgtggcaagatgggcgggagtcttcatgaagg

SEQ ID NO: 90101 - DNA, 80 bp, synthetic construct
  source 1..80: mol_type = other DNA
ggatgctgccctgtcagagtggggaaactgaggccccaggcggagacaccacccactgcaggttccagccgtcccccacc

SEQ ID NO: 90102 - DNA, 80 bp, synthetic construct; identical to SEQ ID NO: 16517
  source 1..80: mol_type = other DNA

SEQ ID NO: 90103 - DNA, 80 bp, synthetic construct
  source 1..80: mol_type = other DNA
catttgcctccaatcctgactctccaagccctgtccctgcccccaggtgaagggttggccctgggcatggaggtcggcag

SEQ ID NO: 90104 - DNA, 80 bp, synthetic construct
  source 1..80: mol_type = other DNA
gtggggctctggagcaacagaggcctcaaaagctcagcgtctacagatgttagggacaaggaggcagcttgggggatgtg

SEQ ID NO: 90105 - DNA, 80 bp, synthetic construct
  source 1..80: mol_type = other DNA
tgagtcaggtgtcagggaccaccaggccttgtgcaggaacatggggtagtgtccctgggggaaatcctaccccagactcg

SEQ ID NO: 90106 - DNA, 80 bp, synthetic construct; identical to SEQ ID NO: 16518
  source 1..80: mol_type = other DNA

SEQ ID NO: 90107 - DNA, 80 bp, synthetic construct
  source 1..80: mol_type = other DNA
gctttgctgtggaggcagagggagcatctgatggcccccggggccgcgctagtcaaagcgcttcatttccatcatatgtg

SEQ ID NO: 90108 - DNA, 80 bp, synthetic construct
  source 1..80: mol_type = other DNA
cacaaatcccttccaggacttccgatggttctgtcctcccctcacacaggcctcacctcttttgccccctccacctctgg

SEQ ID NO: 90109 - DNA, 80 bp, synthetic construct
  source 1..80: mol_type = other DNA
gggaccacagccggctgaacgccaactggttagctgctttttctataggacctaccgagcgtttgactctagaaccgggg

SEQ ID NO: 90110 - DNA, 80 bp, synthetic construct
  source 1..80: mol_type = other DNA
cacggggcctgagcctactgcatcctcccagaagctggcctacaggacggaggctcagggtggccagttgggcatggggt

SEQ ID NO: 90111 - DNA, 80 bp, synthetic construct; identical to SEQ ID NO: 16519
  source 1..80: mol_type = other DNA

SEQ ID NO: 90112 - DNA, 80 bp, synthetic construct
  source 1..80: mol_type = other DNA
caggcgggcacaaagggcgctcgggccaggaacccatgagctgggctctcccggggccgagggtccagacctgttgccga

SEQ ID NO: 90113 - DNA, 80 bp, synthetic construct
  source 1..80: mol_type = other DNA
aataaagtccccacattgtagcactgccaggtggattaaatgaaagaagatagtgaagtccttaaagtgagatgtgttgg

SEQ ID NO: 90114 - DNA, 80 bp, synthetic construct; identical to SEQ ID NO: 16520
  source 1..80: mol_type = other DNA

SEQ ID NO: 90115 - DNA, 80 bp, synthetic construct
  source 1..80: mol_type = other DNA
acgcagcatttgtgttgttaggtatcgtaagtggtctggagatgggaggatgtatgtggcctccatgtcagtatcacacc

SEQ ID NO: 90116 - DNA, 80 bp, synthetic construct
  source 1..80: mol_type = other DNA
gggtcgtggaggaccttacagtgtccccaaagcgaggtgaatctcatggtgtcagggctaagagcattgtggagagaggg

SEQ ID NO: 90117 - DNA, 80 bp, synthetic construct
  source 1..80: mol_type = other DNA
gcagagccaagaatggaccactgaggggctgggacagacctggcagaccaggagggaggccactgcactagtccaggcgg

SEQ ID NO: 90118 - DNA, 80 bp, synthetic construct; identical to SEQ ID NO: 16521
  source 1..80: mol_type = other DNA

SEQ ID NO: 90119 - DNA, 80 bp, synthetic construct
  source 1..80: mol_type = other DNA
ggaggccccaggaggcaggtggactttgtccctaggcatccagtgcagaggtgagacctgtatggccacagagtctccct

SEQ ID NO: 90120 - DNA, 80 bp, synthetic construct
  source 1..80: mol_type = other DNA
ttttggtggcaggcctctgtggctgtggccagaagcagggctgggcaccaggccagatggaccagaggctgcccccagct

SEQ ID NO: 90121 - DNA, 80 bp, synthetic construct
  source 1..80: mol_type = other DNA
agggacctgggggaaagagagggcagccaggcacctctgttcacggcaggggctgcgttgcccagcctggcagagggagg

SEQ ID NO: 90122 - DNA, 80 bp, synthetic construct
  source 1..80: mol_type = other DNA
caaatgccctcgtcccacagtcggcatgccagacccctcgggaattcaggccttggtgagtctggcacattccggctgtg

SEQ ID NO: 90123 - DNA, 80 bp, synthetic construct; identical to SEQ ID NO: 16522
  source 1..80: mol_type = other DNA

SEQ ID NO: 90124 - DNA, 80 bp, synthetic construct
  source 1..80: mol_type = other DNA
aagacagtggtgggtaactcactcagctagagcgtctgatcacaccactgcagcggctgctcacagccttcaccatcagg

SEQ ID NO: 90125 - DNA, 80 bp, synthetic construct
  source 1..80: mol_type = other DNA
ggaaaccaggcttgagttcctgatttttgccctttagggtttttaaattgtgggagagccaggagtgcctgcgtggtggc

SEQ ID NO: 90126 - DNA, 80 bp, synthetic construct; identical to SEQ ID NO: 16523
  source 1..80: mol_type = other DNA

SEQ ID NO: 90127 - DNA, 80 bp, synthetic construct
  source 1..80: mol_type = other DNA
tgtggatgcagccgggcagtgaggagcgcaggcgaatgttacagcaggcgcgagcgaaggggcccgaggcaccggtgctt

SEQ ID NO: 90128 - DNA, 80 bp, synthetic construct
  source 1..80: mol_type = other DNA
ttgtggccgccaccgaggcctcgccttgcagccggagcctgggggcctctgtcccacccactggggcccagggaggggac

SEQ ID NO: 90129 - DNA, 80 bp, synthetic construct
  source 1..80: mol_type = other DNA
aagagggggtctgggacacagccacacctgagcccatcctccacctggagccagccccttaccttctggagcctcagttt

SEQ ID NO: 90130 - DNA, 80 bp, synthetic construct
  source 1..80: mol_type = other DNA
gtgctcctttgtgtgtccagagggaaggggcatcctccatcagcactgaccccactcaggcctctcagctgcactcaaca

SEQ ID NO: 90131 - DNA, 80 bp, synthetic construct; identical to SEQ ID NO: 16524
  source 1..80: mol_type = other DNA

SEQ ID NO: 90132 - DNA, 80 bp, synthetic construct
  source 1..80: mol_type = other DNA
tcttggcctcagatctgaagctatagagcctcctggagggcagaggcagtggagaggggtctagcgggcaggagggggac

SEQ ID NO: 90133 - DNA, 80 bp, synthetic construct
  source 1..80: mol_type = other DNA
atgcacacgctctcctcttccctgcttaatcctcttgagtcttcaggcctcaacccacgcttcccctgaacatcctcctc

SEQ ID NO: 90134 - DNA, 80 bp, synthetic construct; identical to SEQ ID NO: 16525
  source 1..80: mol_type = other DNA

SEQ ID NO: 90135 - DNA, 80 bp, synthetic construct
  source 1..80: mol_type = other DNA
ccaccgcaggtcgggggagcactgtccccggggccccgcagccagctgtgctgggcaaggcaggacgggatccttggtga

SEQ ID NO: 90136 - DNA, 80 bp, synthetic construct
  source 1..80: mol_type = other DNA
gtctcgggggtagcttcctgaagagatgagtcaggtcccaggcacattcagtgccagccagggaggtgagaggtaatcct

SEQ ID NO: 90137 - DNA, 80 bp, synthetic construct
  source 1..80: mol_type = other DNA
tgggaccaccgcagaggtgatgtctccaggaggcttctgggccagcagcatgttccagtgcgacacatgtgccccggagt

SEQ ID NO: 90138 - DNA, 80 bp, synthetic construct; identical to SEQ ID NO: 16526
  source 1..80: mol_type = other DNA

SEQ ID NO: 90139 - DNA, 80 bp, synthetic construct
  source 1..80: mol_type = other DNA
gccgcccccacctcccctcccgcaagcttctccccttccttcagagcccaaccactgcttgctccttcccacccctccta

SEQ ID NO: 90140 - DNA, 80 bp, synthetic construct
  source 1..80: mol_type = other DNA
gctgggggatgacatgagtccactccgctgtcaccaccaagaccacagtggggcagtttaaacagcaggcattcatcccc

SEQ ID NO: 90141 - DNA, 80 bp, synthetic construct
  source 1..80: mol_type = other DNA
tcaggtgggattagggctcacccttatacccccattctgctttaattacttcttataagaccccatctccagacacacag

SEQ ID NO: 90142 - DNA, 80 bp, synthetic construct
  source 1..80: mol_type = other DNA
tatgtgtgtgcagaaggcccatgagctgcctggggttggggggtggtccttatacatactttagatgccagagggggctc

SEQ ID NO: 90143 - DNA, 80 bp, synthetic construct; identical to SEQ ID NO: 16527
  source 1..80: mol_type = other DNA

SEQ ID NO: 90144 - DNA, 80 bp, synthetic construct
  source 1..80: mol_type = other DNA
cctggagagaaggtgcactttggggatgggaggcgctaggtgccaatggccctaggagggggctttggagctggaccctt

SEQ ID NO: 90145 - DNA, 80 bp, synthetic construct
  source 1..80: mol_type = other DNA
ccatttcacctgcgcatctgcagctggtatgcggctgccctggtgggttcctggctggctggcatgcgccctgcgcctct

SEQ ID NO: 90146 - DNA, 80 bp, synthetic construct
  source 1..80: mol_type = other DNA
ccccaccgcctgccttcccaagacatcctgagtgcccctcgccagcactccctgctcggggatcccattattccaggagg

SEQ ID NO: 90147 - DNA, 80 bp, synthetic construct; identical to SEQ ID NO: 16528
  source 1..80: mol_type = other DNA

SEQ ID NO: 90148 - DNA, 80 bp, synthetic construct
  source 1..80: mol_type = other DNA
ggagttaattcctggccttgtgggctggcaaactctgactcacagagcaataaaattcttgtgttttaaaaatcagtata

SEQ ID NO: 90149 - DNA, 80 bp, synthetic construct
  source 1..80: mol_type = other DNA
taaaagtctcctaattatatttatgatcccaacgtgagtgaatttgactccgttcacggcgaagaagctttgtgtaaaat

SEQ ID NO: 90150 - DNA, 80 bp, synthetic construct; identical to SEQ ID NO: 16529
  source 1..80: mol_type = other DNA

SEQ ID NO: 90151 - DNA, 80 bp, synthetic construct
  source 1..80: mol_type = other DNA
gggaggggccgagcctggcctggactgctggccccaggagcctgggcctgtggtcagggcaggaaatggagaagatgaac

SEQ ID NO: 90152 - DNA, 80 bp, synthetic construct
  source 1..80: mol_type = other DNA
ttccttggccatgggggtgggcagacgtgttatcatgaagccgggagatcaaggaaggctctctgagggaggtgacattt

SEQ ID NO: 90153 - DNA, 80 bp, synthetic construct
  source 1..80: mol_type = other DNA
acctccccccactcccagccaggcctagagcagagtgcccttggaggctggaggaggccaagtcagcctgtcccatccct

SEQ ID NO: 90154 - DNA, 80 bp, synthetic construct
  source 1..80: mol_type = other DNA
cacagacagaccctggggggattgtccttctgccacctgggcattggcacactggccttccgcagacactcagcaggcca

SEQ ID NO: 90155 - DNA, 80 bp, synthetic construct; identical to SEQ ID NO: 16530
  source 1..80: mol_type = other DNA

SEQ ID NO: 90156 - DNA, 80 bp, synthetic construct
  source 1..80: mol_type = other DNA
gtgacaccaacccagcccctgtgtgaggtactgagagcccatcacacagatggaccaaccaaagccacagatgacaggtg

SEQ ID NO: 90157 - DNA, 80 bp, synthetic construct
  source 1..80: mol_type = other DNA
tcccccacccccaaaggtggatggacataggtgggcaacatttttattacgcaaaaaaggacatttcgtagaacaacatt

SEQ ID NO: 90158 - DNA, 80 bp, synthetic construct; identical to SEQ ID NO: 16531
  source 1..80: mol_type = other DNA

SEQ ID NO: 90159 - DNA, 80 bp, synthetic construct
  source 1..80: mol_type = other DNA
atgggtcgggacagaggcctcaccagtgggatccagtcactggggctgaggcctgggtgtgcaggtggggtggtgagcca

SEQ ID NO: 90160 - DNA, 80 bp, synthetic construct
  source 1..80: mol_type = other DNA
gctctcaaaccatgagaaacgttagaacttctttacccctctgtgagatgggctgggcctggcctctgaggagcctccag

SEQ ID NO: 90161 - DNA, 80 bp, synthetic construct
  source 1..80: mol_type = other DNA
taaggaaacagagtctatttaaggaacaatgttaagcaaacaatagtacaggtgttcaaagatatggaatgagtgacaga

SEQ ID NO: 90162 - DNA, 80 bp, synthetic construct; identical to SEQ ID NO: 16532
  source 1..80: mol_type = other DNA

SEQ ID NO: 90163 - DNA, 80 bp, synthetic construct
  source 1..80: mol_type = other DNA
tcccctgcctctttcccgtatcaggacccttgtcatcacattgggccacccagagaacccaggattttctccccattgca

SEQ ID NO: 90164 - DNA, 80 bp, synthetic construct
  source 1..80: mol_type = other DNA
ctgcagcccctgcttggacacatgaccagctcaggcagtgctgcctccgggggaagtcaagagtctctggtgagtctcag

SEQ ID NO: 90165 - DNA, 80 bp, synthetic construct
  source 1..80: mol_type = other DNA
tggcgcttgccggggtggctgtgtgcagcaggcattggggccctggagatatttgctctttctttttgttttattatcca

SEQ ID NO: 90166 - DNA, 80 bp, synthetic construct; identical to SEQ ID NO: 16533
  source 1..80: mol_type = other DNA

SEQ ID NO: 90167 - DNA, 80 bp, synthetic construct
  source 1..80: mol_type = other DNA
cctccgcctgtggttttcctccttgaccttcttaggagggtccagttccttctcctggccaaggccccactctctgccac

SEQ ID NO: 90168 - DNA, 80 bp, synthetic construct
  source 1..80: mol_type = other DNA
aagacactctgctgggtgctgcgacatggttaggttttctccacattagaaggtagaaggaagaaaaataagttctgaaa

SEQ ID NO: 90169 - DNA, 80 bp, synthetic construct
  source 1..80: mol_type = other DNA
agggcaggggaagccctgtgccccaagatcagatacatcagctacaatgagaggcatcaggcggcctcaggccctcaagc

SEQ ID NO: 90170 - DNA, 80 bp, synthetic construct; identical to SEQ ID NO: 16534
  source 1..80: mol_type = other DNA

SEQ ID NO: 90171 - DNA, 80 bp, synthetic construct
  source 1..80: mol_type = other DNA
gggcccgctgtggcctcctctgcacggctgctgagggaatgcaggtcaaacaaagtaggccagcggcttagggacccccg

SEQ ID NO: 90172 - DNA, 80 bp, synthetic construct
  source 1..80: mol_type = other DNA
cagggagtgcaggtggtttgttcttgcctcagatccaggagagcagcttttttgcctgaacccactcgtgaatttttcat

SEQ ID NO: 90173 - DNA, 80 bp, synthetic construct
  source 1..80: mol_type = other DNA
aggggcattcccagaaatcacagggatgactggtgtgagcccaccgcccacctagactcccgtaccatgcggggcccctc

SEQ ID NO: 90174 - DNA, 80 bp, synthetic construct
  source 1..80: mol_type = other DNA
ctggttcacttaggggtagaaattatcccagcttttacccagagctcagggcccaagatgtcagtttgcctgccggctgt

SEQ ID NO: 90175 - DNA, 80 bp, synthetic construct; identical to SEQ ID NO: 16535
  source 1..80: mol_type = other DNA

SEQ ID NO: 90176 - DNA, 80 bp, synthetic construct
  source 1..80: mol_type = other DNA
taaacaggtgttgtcacagaacggcagactggggcctcccctggtgggccttgagggtgctggcctgcagacctgctcct

SEQ ID NO: 90177 - DNA, 80 bp, synthetic construct
  source 1..80: mol_type = other DNA
tttagtccctccttgaacttaaaaagtcaaacttaaaaagagattattacagggagctggggactcaggcttgcaccctg

SEQ ID NO: 90178 - DNA, 80 bp, synthetic construct
  source 1..80: mol_type = other DNA
ctcctgcagagccttctgggagggaagaatgtgtttcttgctccagtactgcagagcatgtgatacctgcaggggtgcaa

SEQ ID NO: 90179 - DNA, 80 bp, synthetic construct; identical to SEQ ID NO: 16536
  source 1..80: mol_type = other DNA

SEQ ID NO: 90180 - DNA, 80 bp, synthetic construct
  source 1..80: mol_type = other DNA
cacatgtgctgttgggcagtattttcctacattttcttctgtgaaatttataattcagcctttgtcattcaggcctgtcg

SEQ ID NO: 90181 - DNA, 80 bp, synthetic construct
  source 1..80: mol_type = other DNA
atctttgtggtctagtgtgttcccgagtatacaagggtgtgtgatcggggctccctctttgcactgatagtctgctggtc

SEQ ID NO: 90182 - DNA, 80 bp, synthetic construct
  source 1..80: mol_type = other DNA
tattgcatttcttaaaaatttcaactggaagtttgcttgggattgcctcgaatttgcaggttaaatttgggaaaaactgg

SEQ ID NO: 90183 - DNA, 80 bp, synthetic construct; identical to SEQ ID NO: 16537
  source 1..80: mol_type = other DNA

SEQ ID NO: 90184 - DNA, 80 bp, synthetic construct
  source 1..80: mol_type = other DNA
ttgcctcatgtcttcaggtgcggggctggcagaggctggggttacctgacacttgtcatccttctgctgggcctcagcac

SEQ ID NO: 90185 - DNA, 80 bp, synthetic construct
  source 1..80: mol_type = other DNA
catcctcggctgcctcttctccctcactactatttggtttttgttttgttttgttttgttttttgagatggagtctcatt

SEQ ID NO: 90186 - DNA, 80 bp, synthetic construct
  source 1..80: mol_type = other DNA
ttcaccatgctggccaggctgatctcgaactcctggcctcaagtgatccatccgcctcggcctcccaaagtgctgggatt

SEQ ID NO: 90187 - DNA, 80 bp, synthetic construct; identical to SEQ ID NO: 16538
  source 1..80: mol_type = other DNA

SEQ ID NO: 90188 - DNA, 80 bp, synthetic construct
  source 1..80: mol_type = other DNA
ggtgtcccttactaggatccgtctgctgctgtcctcacgattcgactgggctgtgggtgtgaggagggagagcacagagg

SEQ ID NO: 90189 - DNA, 80 bp, synthetic construct
  source 1..80: mol_type = other DNA
agcatttggctctggggccctagagagaccctgggatgtggatcacactggtgacccctgtgagccccactggggacaga

SEQ ID NO: 90190 - DNA, 80 bp, synthetic construct
  source 1..80: mol_type = other DNA
tgctgtccctggggctctggcggggtcctggagcctctctcattgggcacatccgagcccagcctggcccatggtggaaa

SEQ ID NO: 90191 - DNA, 80 bp, synthetic construct; identical to SEQ ID NO: 16539
  source 1..80: mol_type = other DNA

SEQ ID NO: 90192 - DNA, 80 bp, synthetic construct
  source 1..80: mol_type = other DNA
tgttcactaggcatccaccgtgtgccagtcactggaatacggccatgagaaagacaggaccctcaagaaacaacctgttc

SEQ ID NO: 90193 - DNA, 80 bp, synthetic construct
  source 1..80: mol_type = other DNA
gagtgggggtcatgggggcaggttccagagatcagaaggaggtggtgggaagaggcacgcagggtgaggctggctggagg

SEQ ID NO: 90194 - DNA, 80 bp, synthetic construct; identical to SEQ ID NO: 16540
  source 1..80: mol_type = other DNA

SEQ ID NO: 90195 - DNA, 80 bp, synthetic construct
  source 1..80: mol_type = other DNA
caagttcccctcaggaatgctggtgaagctggcatgcccccaccccctagctcaccctgggtccacgcagggcctgctcc

SEQ ID NO: 90196 - DNA, 80 bp, synthetic construct
  source 1..80: mol_type = other DNA
tccactcttcctccaggtgagcccgagggcccagctgggcgtccacgtggaggtgtggggcccgggtgggacaagcctgg

SEQ ID NO: 90197 - DNA, 80 bp, synthetic construct
  source 1..80: mol_type = other DNA
gggcctcaagaccatctgtcacgtgacaggggcaggctaggcctttcttgaactcactgtgagctacagagactgtgttc

SEQ ID NO: 90198 - DNA, 80 bp, synthetic construct; identical to SEQ ID NO: 16541
  source 1..80: mol_type = other DNA

SEQ ID NO: 90199 - DNA, 80 bp, synthetic construct
  source 1..80: mol_type = other DNA
ggatgagaggatgccatgatttccagggtggtgtcagaacctgtctgccagggctctgcagggaggggtttggggttgag

SEQ ID NO: 90200 - DNA, 80 bp, synthetic construct
  source 1..80: mol_type = other DNA
ctgagcctctctgggccccagttcccttattcgtacaacgggaatgatcgaggagttaacatgtgtttaaaagcaccgag

SEQ ID NO: 90201 - DNA, 80 bp, synthetic construct
  source 1..80: mol_type = other DNA
aatggcgtgaacccaggaggcagagcttgcagtgagccaagattgcgccactgcactccagcctgggcaacagagcgaga

SEQ ID NO: 90202 - DNA, 80 bp, synthetic construct; identical to SEQ ID NO: 16542
  source 1..80: mol_type = other DNA

SEQ ID NO: 90203 - DNA, 80 bp, synthetic construct
  source 1..80: mol_type = other DNA
aagttgaggaatgacatgtattccagggaagaattgggccggaggctgaaacaggacgacagagccctcagcccagggcg

SEQ ID NO: 90204 - DNA, 80 bp, synthetic construct
  source 1..80: mol_type = other DNA
gcccaagctccaagttctctggctcccagggtctgtgtggaatccaccggtttcaccccacgtcttttcctctcctgcct

SEQ ID NO: 90205 - DNA, 80 bp, synthetic construct
  source 1..80: mol_type = other DNA
ttctgagacattaggggttttctctcccttgttttaatcaaccagttcccaataagtcatttcagtcaggccattaccaa

SEQ ID NO: 90206 - DNA, 80 bp, synthetic construct
  source 1..80: mol_type = other DNA
tggctcataatctcctgggctgctgggcgaaatgggatcccctggctctttcactgaaaacacttttcttgttttctttc

SEQ ID NO: 90207 - DNA, 80 bp, synthetic construct; identical to SEQ ID NO: 16543
  source 1..80: mol_type = other DNA

SEQ ID NO: 90208 - DNA, 80 bp, synthetic construct
  source 1..80: mol_type = other DNA
ggtcaccatgaaaactttatcctcatccacacctttctttctccaactagcatgggaatcagtttagggtcctcccacac

SEQ ID NO: 90209 - DNA, 80 bp, synthetic construct
  source 1..80: mol_type = other DNA
ccacgttccacccccaggaaaccctctctcctgacgcggggacttgcgtctcagtgcagagggcagtggagggacagtgc

SEQ ID NO: 90210 - DNA, 80 bp, synthetic construct
  source 1..80: mol_type = other DNA
cgttaccatggtttttaaattaaagcatctgcagatgcgctgtgtccctgcaagggcaggcagatcgggaccccagggac

SEQ ID NO: 90211 - DNA, 80 bp, synthetic construct
  source 1..80: mol_type = other DNA
tggatgcccacacacggcaagacgtttcctcaaagatgctcttctgcaaagctgcactttctcggttgccgctgccacct

SEQ ID NO: 90212 - DNA, 80 bp, synthetic construct; identical to SEQ ID NO: 16544
  source 1..80: mol_type = other DNA

SEQ ID NO: 90213 - DNA, 80 bp, synthetic construct
  source 1..80: mol_type = other DNA
tggcttccatgaagctgatccggactaagctaaactgagtttcattgagcagcttgtttagctggtgtgtgccaggtggt

SEQ ID NO: 90214 - DNA, 80 bp, synthetic construct
  source 1..80: mol_type = other DNA
gtctgattcatggaagtcagcgggctgtgtcctcacgtggcagaagaggcaaaaataaggtgcaaacaagctccctcagg

SEQ ID NO: 90215 - DNA, 80 bp, synthetic construct; identical to SEQ ID NO: 16545
  source 1..80: mol_type = other DNA

SEQ ID NO: 90216 - DNA, 80 bp, synthetic construct
  source 1..80: mol_type = other DNA
catgtgtgatgcatcaacccagggggaggagagaacgtgcattcacgcagaactctctcagccacaagctctgtttctgt

SEQ ID NO: 90217 - DNA, 80 bp, synthetic construct
  source 1..80: mol_type = other DNA
gttggaaggggtgaggctggagcccaaatagggagttcagaggcctccgtgtctgcccagggaaggagggaggccagctt

SEQ ID NO: 90218 - DNA, 80 bp, synthetic construct
  source 1..80: mol_type = other DNA
gtcagatgcaccttttgaagtatacacctcagtggcttttggtatattcagagtcatgcaacttcacgactctctaactt

SEQ ID NO: 90219 - DNA, 80 bp, synthetic construct
  source 1..80: mol_type = other DNA
catttgagaaacttcccagcttccctctatctgaggctcactccattacaacacaaggaactgagacatctgtggctggt

SEQ ID NO: 90220 - DNA, 80 bp, synthetic construct; identical to SEQ ID NO: 16546
  source 1..80: mol_type = other DNA

SEQ ID NO: 90221 - DNA, 80 bp, synthetic construct
  source 1..80: mol_type = other DNA
agccatgccatgtatctggaggagggccctggaggggtgtgcccattgcatgtctgtgtgttcccatgcagtgggcacag

SEQ ID NO: 90222 - DNA, 80 bp, synthetic construct
  source 1..80: mol_type = other DNA
tggctgaataaagaactgaataaaaataaccaagaagatcaaggaagggccctgccttccagatatcaggatgtggaaga

SEQ ID NO: 90223 - DNA, 80 bp, synthetic construct; identical to SEQ ID NO: 16547
  source 1..80: mol_type = other DNA

SEQ ID NO: 90224 - DNA, 80 bp, synthetic construct
  source 1..80: mol_type = other DNA
caaagataccttaaagaacgtgacaagttgcagactggcgattgcactagttttctggcactggtttaacaggtgacccc

SEQ ID NO: 90225 - DNA, 80 bp, synthetic construct
  source 1..80: mol_type = other DNA
cttggcctttagccccttcctctatcttcagagccatcatgttcctcctctctgacattttttttcgtaatcacagctct

SEQ ID NO: 90226 - DNA, 80 bp, synthetic construct
  source 1..80: mol_type = other DNA
cctcaacttcctgagtagctgggactacacgcacgtgccaccgcgcctggctaattttgtttaattttgtgtagaggtgg

SEQ ID NO: 90227 - DNA, 80 bp, synthetic construct; identical to SEQ ID NO: 16548
  source 1..80: mol_type = other DNA

SEQ ID NO: 90228 - DNA, 80 bp, synthetic construct
  source 1..80: mol_type = other DNA
tattcataggttctaggacatctttgggggagcccttattctgcctaccaaagaaatggatattcacaatacaatgaatt

SEQ ID NO: 90229 - DNA, 80 bp, synthetic construct
  source 1..80: mol_type = other DNA
ttatcagacagaaaaatggccaaagacaaagacttgttctgcccttcatggtcgaggaacacatgtggccagtgagtacg

SEQ ID NO: 90230 - DNA, 80 bp, synthetic construct
  source 1..80: mol_type = other DNA
gtacagtgggactaccactttaaaagggtggcatcacctccaaggtggtgaattcacatacctgttgacccagcagtccc

SEQ ID NO: 90231 - DNA, 80 bp, synthetic construct
  source 1..80: mol_type = other DNA
agggagagtgagtaaacatggaatgcccatacaaaagagaattttaaactaattaaagcaaacaagccagagtgacagac

SEQ ID NO: 90232 - DNA, 80 bp, synthetic construct; identical to SEQ ID NO: 16549
  source 1..80: mol_type = other DNA

SEQ ID NO: 90233 - DNA, 80 bp, synthetic construct
  source 1..80: mol_type = other DNA
ttttgaataacgagtccttgggagctttctacattgtttttaaaaactaattatatgacattttataagaaaattatatt

SEQ ID NO: 90234 - DNA, 80 bp, synthetic construct
  source 1..80: mol_type = other DNA
acttaatagtgaagaacagaatactttccccctaaaataaaaaagaaggcaagggtatctgttctcaccacttctattca

SEQ ID NO: 90235 - DNA, 80 bp, synthetic construct
  source 1..80: mol_type = other DNA
gttcagcacacaaaaatcacttgcatttctatacactaacaatgaacctgtgaaaaccaaaattagaaacaataccattt

SEQ ID NO: 90236 - DNA, 80 bp, synthetic construct; identical to SEQ ID NO: 16550
  source 1..80: mol_type = other DNA

SEQ ID NO: 90237 - DNA, 80 bp, synthetic construct
  source 1..80: mol_type = other DNA
cagaacagaacgaggaatccagaaatagacacacgcaaacatgcctgactaattttaagacaaagatgcaaaattcagcg

SEQ ID NO: 90238 - DNA, 80 bp, synthetic construct
  source 1..80: mol_type = other DNA
gaaaaaacatagaggagatagtatttaggatttaggaagggcaaacagttctcacattggatgctaaaagcatgatctgt

SEQ ID NO: 90239 - DNA, 80 bp, synthetic construct
  source 1..80: mol_type = other DNA
tcaacagtaaaaaacagcctgtccaactagaagatgggcaaaagacacgaagagacatttcaccaaagaaaataaatagg

SEQ ID NO: 90240 - DNA, 80 bp, synthetic construct; identical to SEQ ID NO: 16551
  source 1..80: mol_type = other DNA

SEQ ID NO: 90241 - DNA, 80 bp, synthetic construct
  source 1..80: mol_type = other DNA
acagtggtgcatccctaccctgaaacactacccagcagtagaaaggaacccactatcggtacaacctaagcggatcttac

SEQ ID NO: 90242 - DNA, 80 bp, synthetic construct
  source 1..80: mol_type = other DNA
agagggggtctttctggtggggaggacttccattcctcgttgctgtgtgaatctgcacgtgtgaacacaaggcagagcca

SEQ ID NO: 90243 - DNA, 80 bp, synthetic construct
  source 1..80: mol_type = other DNA
aagcaaaacaacacactgggaggtgcaggaaaccacacacgtgatgtgcttgtgtctgctgacataagtgctcaaggaag

SEQ ID NO: 90244 - DNA, 80 bp, synthetic construct
  source 1..80: mol_type = other DNA
tgccaagacccccacccatctgcctctcttcatctcacaagcctgcatgtgtgcagagggcaggggtccccaggggatgt

SEQ ID NO: 90245 - DNA, 80 bp, synthetic construct; identical to SEQ ID NO: 16552
  source 1..80: mol_type = other DNA

SEQ ID NO: 90246 - DNA, 80 bp, synthetic construct
  source 1..80: mol_type = other DNA
ccagccccaccctgagctgtactggacccaagccccaggaccccctggagtcacctccagccctcccacatgccagcccc

SEQ ID NO: 90247 - DNA, 80 bp, synthetic construct
  source 1..80: mol_type = other DNA
tgttgaatgtggcgctggccccttgggcagcccagcagcccccaccccagccagcccagcctgggcagcactgggggctc

SEQ ID NO: 90248 - DNA, 80 bp, synthetic construct; identical to SEQ ID NO: 16553
  source 1..80: mol_type = other DNA

SEQ ID NO: 90249 - DNA, 80 bp, synthetic construct
  source 1..80: mol_type = other DNA
catccgcccttcagtaggtgaggaagccacgggcctggagggtggcccagcccaggcaggagggcaccagccccgggccc

SEQ ID NO: 90250 - DNA, 80 bp, synthetic construct
  source 1..80: mol_type = other DNA
ggtgtggctcgcttcttcagtgccccactactcaaagttctaggggagcatacagtcggacaggttgtggggctccgacc

SEQ ID NO: 90251 - DNA, 80 bp, synthetic construct
  source 1..80: mol_type = other DNA
tcttgccttggcgtactggaagaatcagatcacacgtgggcttggagaatgagtgcaaggttttattgagtggaggtagc

SEQ ID NO: 90252 - DNA, 80 bp, synthetic construct; identical to SEQ ID NO: 16554
  source 1..80: mol_type = other DNA

SEQ ID NO: 90253 - DNA, 80 bp, synthetic construct
  source 1..80: mol_type = other DNA
aggccgtagggtggaaccctagccagggacccgcccttctcctcccagcacttccctgcccctcttccgtatcactacca

SEQ ID NO: 90254 - DNA, 80 bp, synthetic construct
  source 1..80: mol_type = other DNA
acccacagcatggcctggacagagctgggggcctgggctggcaccctcagccctggctgcttgcagtcccggccggctgt

SEQ ID NO: 90255 - DNA, 80 bp, synthetic construct
  source 1..80: mol_type = other DNA
accttggcggtcatggccacaggctcccaaggccctaagtgacagccagtggtagacccttcacggtcaggcacctatga

SEQ ID NO: 90256 - DNA, 80 bp, synthetic construct; identical to SEQ ID NO: 16555
  source 1..80: mol_type = other DNA

SEQ ID NO: 90257 - DNA, 80 bp, synthetic construct
  source 1..80: mol_type = other DNA
aaaggcgtcttttctatgaaccagtggccacaggagggtttgtgtgtctaatgtcctattccacgggtccccaggccaca

SEQ ID NO: 90258 - DNA, 80 bp, synthetic construct
  source 1..80: mol_type = other DNA
ggtctaggctgtgtactccttatgagaatctaatgcctgctggtctgaactggaacagtttcatcctgaaaccatctccc

SEQ ID NO: 90259 - DNA, 80 bp, synthetic construct
  source 1..80: mol_type = other DNA
tgtcagacctctgactttgttgttcttcaagatcgtcttggctattcttggcccttcacgttgttaggaatattttagaa

SEQ ID NO: 90260 - DNA, 80 bp, synthetic construct; identical to SEQ ID NO: 16556
  source 1..80: mol_type = other DNA

SEQ ID NO: 90261 - DNA, 80 bp, synthetic construct
  source 1..80: mol_type = other DNA
aaccagcctgggcaaaataacaagaccccatcttagaagaaaaaaaaaaaaataagaaagaaagaaagaaagaaagattg

SEQ ID NO: 90262 - DNA, 80 bp, synthetic construct
  source 1..80: mol_type = other DNA
actagcatatagaaatatacatatacatattttaaaggcagggtctctgcattccaggctcagagcttacagcagccttg

SEQ ID NO: 90263 - DNA, 80 bp, synthetic construct
  source 1..80: mol_type = other DNA
gagccactctgtcaggcctagaaatataattattatatatcatccttaaaaccggcgttcttgttaaattcatgtattcc

SEQ ID NO: 90264 - DNA, 80 bp, synthetic construct
  source 1..80: mol_type = other DNA
atagaaacgataacatccttgccttgcttcctgtctcaggaggaaagcgtatcacatttcactattaagtatgatgtctg

SEQ ID NO: 90265 - DNA, 80 bp, synthetic construct; identical to SEQ ID NO: 16557
  source 1..80: mol_type = other DNA

SEQ ID NO: 90266 - DNA, 80 bp, synthetic construct
  source 1..80: mol_type = other DNA
tacttgtataaaattgacattattttttccttaaacatttggaagaatttactggtgatgtcgtctagatacagagtttt

SEQ ID NO: 90267 - DNA, 80 bp, synthetic construct
  source 1..80: mol_type = other DNA
ctgaataaatgtttctgcacctctaggtctatagtgacattccatctttaactcctgatggcggtcatttgtgtcccctc

SEQ ID NO: 90268 - DNA, 80 bp, synthetic construct; identical to SEQ ID NO: 16558
  source 1..80: mol_type = other DNA

SEQ ID NO: 90269 - DNA, 80 bp, synthetic construct
  source 1..80: mol_type = other DNA
tttttctttgacccctgggttatttagattgtttaatatccaaaatacatggagattccctagttatctctttttatgga

SEQ ID NO: 90270 - DNA, 80 bp, synthetic construct
  source 1..80: mol_type = other DNA
gtgttctgtatatgtcaagttgctaatcaggctgttcaaatttgtctctgacttgacaaagctttgactgcttttctatc

SEQ ID NO: 90271 - DNA, 80 bp, synthetic construct
  source 1..80: mol_type = other DNA
cttctttagtaatacttaaagtctgctattggttttcctttactagttttcatttggctacaccatgacctatctttttc

SEQ ID NO: 90272 - DNA, 80 bp, synthetic construct
  source 1..80: mol_type = other DNA
ctttaagtctattttcttttcatgctccaagctggctattttctttgggttcacagctattcttttctactctgtcgtcc

SEQ ID NO: 90273 - DNA, 80 bp, synthetic construct; identical to SEQ ID NO: 16559
  source 1..80: mol_type = other DNA

SEQ ID NO: 90274 - DNA, 80 bp, synthetic construct
  source 1..80: mol_type = other DNA
gtccatgagccaacagaattctaagagggtaagagtagatgccacaaggtccttgaggctgagcttcagaagacatgatc

SEQ ID NO: 90275 - DNA, 80 bp, synthetic construct
  source 1..80: mol_type = other DNA
aggaaccacaatggattgtgcccatctttaattaatcacagtctgccctctggccataacttttcgcattctcccctatg

SEQ ID NO: 90276 - DNA, 80 bp, synthetic construct; identical to SEQ ID NO: 16560
  source 1..80: mol_type = other DNA

SEQ ID NO: 90277 - DNA, 80 bp, synthetic construct
  source 1..80: mol_type = other DNA
gtgtgcacctgctactcaggaggctgaggcagaaaaatcacttgaacccgggaggcggaggctgcagtgagccgaggttg

SEQ ID NO: 90278 - DNA, 80 bp, synthetic construct
  source 1..80: mol_type = other DNA
atgtggcctctctaatcagcaagcttgtttgcagggccacattccaaaaggacatgaattatataccgtgtacattcccc

SEQ ID NO: 90279 - DNA, 80 bp, synthetic construct
  source 1..80: mol_type = other DNA
tcgtgtataaaattgtagatgctcgagggtattatctccctacagataattttattttcttctgccacgcgcaaagcacc

SEQ ID NO: 90280 - DNA, 80 bp, synthetic construct; identical to SEQ ID NO: 16561
  source 1..80: mol_type = other DNA

SEQ ID NO: 90281 - DNA, 80 bp, synthetic construct
  source 1..80: mol_type = other DNA
caggcgcagctcagttcatttcctttctatgtgggatcctcaccttctatgtctttcttggtctccaaagcctcacacag

SEQ ID NO: 90282 - DNA, 80 bp, synthetic construct
  source 1..80: mol_type = other DNA
ctttgtttccttttgtgatgctgtttctaaaaggatctttatttctagaagaaactttaggaggcaaaaacagcgcagcc

SEQ ID NO: 90283 - DNA, 80 bp, synthetic construct
  source 1..80: mol_type = other DNA
catcgccagcatgtaccctcttatcccatttgctgacaaggatcctgaaggcccaagcatagaaagaagttgctatggct

SEQ ID NO: 90284 - DNA, 80 bp, synthetic construct; identical to SEQ ID NO: 16562
  source 1..80: mol_type = other DNA

SEQ ID NO: 90285 - DNA, 80 bp, synthetic construct
  source 1..80: mol_type = other DNA
gccctgtgctgagccttcctgccctcagcctgcccctcgcagcctgatgcagctgcccacacctctcctgggttctctcc

SEQ ID NO: 90286 - DNA, 80 bp, synthetic construct
  source 1..80: mol_type = other DNA
cttcaccaagtagaaggcagcagccgtgtagctcactcagtcctcccgtggggtgggtcgtgcaaggcagcattagtgag

SEQ ID NO: 90287 - DNA, 80 bp, synthetic construct
  source 1..80: mol_type = other DNA
gggaggctgggccctgctctgtaagaggtggggtccccttggccaggtgaggctggagctccagggcttccataagctgc

SEQ ID NO: 90288 - DNA, 80 bp, synthetic construct; identical to SEQ ID NO: 16563
  source 1..80: mol_type = other DNA

SEQ ID NO: 90289 - DNA, 80 bp, synthetic construct
  source 1..80: mol_type = other DNA
tcagcaatgtccgccgaccaccaggacccacagtcggtggcatcccagcccaccaagacttatcctggagccactgagct

SEQ ID NO: 90290 - DNA, 80 bp, synthetic construct
  source 1..80: mol_type = other DNA
gccatgtctttcacaccaggccacaccttccactccaggccccaggattgacacaggcccgcccacagtctccttggtgg

SEQ ID NO: 90291 - DNA, 80 bp, synthetic construct
  source 1..80: mol_type = other DNA
acccgggccttgcccccagcaaccccaggccagcacccgctaggctcgtcgtcactctgagccccaagagcagccctcgg

SEQ ID NO: 90292 - DNA, 80 bp, synthetic construct; identical to SEQ ID NO: 16564
  source 1..80: mol_type = other DNA

SEQ ID NO: 90293 - DNA, 80 bp, synthetic construct
  source 1..80: mol_type = other DNA
gcctcctggcagcaccagtgctctcccagacagggaaggggctgcgtgaacccctttgggactcagatctgggcagggca

SEQ ID NO: 90294 - DNA, 80 bp, synthetic construct
  source 1..80: mol_type = other DNA
gcagagcaggtcccagcagggcagagccagagcccaccaaggcttgcagaactgcgccacttgggcatcctgggggctgc

SEQ ID NO: 90295 - DNA, 80 bp, synthetic construct
  source 1..80: mol_type = other DNA
ttctccatcagccaggaaggacactggcattgaggttgatatcaaggatatcccatcgtgataataactaccatggcttc

SEQ ID NO: 90296 - DNA, 80 bp, synthetic construct
  source 1..80: mol_type = other DNA
accaagaaaaaaagcacacgatttctacagatattatgatgccgtcaaagattttgaggtgatgaggaaggctggcatct

SEQ ID NO: 90297 - DNA, 80 bp, synthetic construct; identical to SEQ ID NO: 16565
  source 1..80: mol_type = other DNA

SEQ ID NO: 90298 - DNA, 80 bp, synthetic construct
  source 1..80: mol_type = other DNA
cttccagacaggagggagtgggtcccctttcctgtcttaggacacaggccgggaccctgagaatggcccaggaggcttcc

SEQ ID NO: 90299 - DNA, 80 bp, synthetic construct
  source 1..80: mol_type = other DNA
ttgctgggagcagcatggaggggtggggccagggtgaggggagcagtagcccgtggcagtgaggagctgtgtgtggctcc

SEQ ID NO: 90300 - DNA, 80 bp, synthetic construct; identical to SEQ ID NO: 16566
  source 1..80: mol_type = other DNA

SEQ ID NO: 90301 - DNA, 80 bp, synthetic construct
  source 1..80: mol_type = other DNA
gccaccgggccgtgggtcctcatggtctgcgggcattgctgagccttcttgggctatgccctacaccaggtaaggctgtg

SEQ ID NO: 90302 - DNA, 80 bp, synthetic construct
  source 1..80: mol_type = other DNA
tcacagtggcccagagactcctagggcttggttttcccctgccctgcctcccttcacctgcccacaccgcacccagatgg

SEQ ID NO: 90303 - DNA, 80 bp, synthetic construct
  source 1..80: mol_type = other DNA
ttctcaactcccatcctatgtcatcctcactccctcccttaaggcagagcaaggcagtgctcagcatcccatcttagaga

SEQ ID NO: 90304 - DNA, 80 bp, synthetic construct; identical to SEQ ID NO: 16567
  source 1..80: mol_type = other DNA

SEQ ID NO: 90305 - DNA, 80 bp, synthetic construct
  source 1..80: mol_type = other DNA
cagcatcccatcttacagaagggagctcagcattttcatcctataggaaggagaaacatcccatcttccaaaagggggga

SEQ ID NO: 90306 - DNA, 80 bp, synthetic construct
  source 1..80: mol_type = other DNA
aaggagaatcaaggctcagcattccatcttacagaagggagcttagcatctccatcttacaggagatgctaccaggtaca

SEQ ID NO: 90307 - DNA, 80 bp, synthetic construct
  source 1..80: mol_type = other DNA
gacagggttcagcatcccatcttacagaaaagagaattaagactcaacatcccatttcatagaagagaactcagtatctc

SEQ ID NO: 90308 - DNA, 80 bp, synthetic construct; identical to SEQ ID NO: 16568
  source 1..80: mol_type = other DNA

SEQ ID NO: 90309 - DNA, 80 bp, synthetic construct
  source 1..80: mol_type = other DNA
gagggccctacctgcttgtgtcaggtggaagaggaaccccctgaacttctgaggcccagcctttggtagggaggaggtct

SEQ ID NO: 90310 - DNA, 80 bp, synthetic construct
  source 1..80: mol_type = other DNA
tgggaacttgctgcttcccagggtagaagtggctgcatcctcagattaaggtcaccctggtctcaggagtaggaccccaa

SEQ ID NO: 90311 - DNA, 80 bp, synthetic construct
  source 1..80: mol_type = other DNA
cttgggccttgcaaattccccagcaaaaggcaggaaagccactagctcagtgctaaggtggctatttgagcactaatgat

SEQ ID NO: 90312 - DNA, 80 bp, synthetic construct; identical to SEQ ID NO: 16569
  source 1..80: mol_type = other DNA

SEQ ID NO: 90313 - DNA, 80 bp, synthetic construct
  source 1..80: mol_type = other DNA
gcacaaactgccaggaacgatgcagaggagacccgctccctaccctgaggacagtggcggctgcagccagtgagcatgtc

SEQ ID NO: 90314 - DNA, 80 bp, synthetic construct
  source 1..80: mol_type = other DNA
gaggagacagcaggcccctgccggtgagtagacaggaagctgggacccagagaggccgagctgatggcccaggactaccc

SEQ ID NO: 90315 - DNA, 80 bp, synthetic construct
  source 1..80: mol_type = other DNA
gggaggagaagtgatgcgtgtctttttgtcccgcagcaagcgcggaagccttacgatgtgcgggacgtcattgagcagta

SEQ ID NO: 90316 - DNA, 80 bp, synthetic construct; identical to SEQ ID NO: 16570
  source 1..80: mol_type = other DNA

SEQ ID NO: 90317 - DNA, 80 bp, synthetic construct
  source 1..80: mol_type = other DNA
cagcccacccgccttccctgtcacctctgagcaaggggccaggcccagccctgggaagacactgcctggtgccaggcccc

SEQ ID NO: 90318 - DNA, 80 bp, synthetic construct
  source 1..80: mol_type = other DNA
agggcatggctgggagcccgtgtccatcctggccacaggcgaggggtcaggctgccttgcccatggctgatccactgcct

SEQ ID NO: 90319 - DNA, 80 bp, synthetic construct
  source 1..80: mol_type = other DNA
actgtcttgccgggcacgtcaagctgtctgtcccacagacgacagtgcatctgcgcagtgccagggccaggtgtgaactg

SEQ ID NO: 90320 - DNA, 80 bp, synthetic construct; identical to SEQ ID NO: 16571
  source 1..80: mol_type = other DNA

SEQ ID NO: 90321 - DNA, 80 bp, synthetic construct
  source 1..80: mol_type = other DNA
gtgagctgccagcccagaattcaagagactatgggtgggggccttgcagggctcaagttgagagggacagaagcacctgg

SEQ ID NO: 90322 - DNA, 80 bp, synthetic construct
  source 1..80: mol_type = other DNA
gcccagatgcaaacagcagccacggctcatagtgtgggctggtgtaacggagcagcggaatggctgtgcccccagcctgg

SEQ ID NO: 90323 - DNA, 80 bp, synthetic construct
  source 1..80: mol_type = other DNA
accacccctggtatttttgtcatagcatgctttttaaaaatgtcctagtaggtttaggcattttgactctcagctacctc

SEQ ID NO: 90324 - DNA, 80 bp, synthetic construct
  source 1..80: mol_type = other DNA
tcacgcgccggcctgcggtggttctggttagcgtcctggggccagcaggcacctccctgtggtctgcgtgtgaacgtgaa

SEQ ID NO: 90325 - DNA, 80 bp, synthetic construct; identical to SEQ ID NO: 16572
  source 1..80: mol_type = other DNA

SEQ ID NO: 90326 - DNA, 80 bp, synthetic construct
  source 1..80: mol_type = other DNA
ccagctgggatgggttcatgggaagagaggcatcttctgttcaccccgaacccaccaggcccccactccccaccaggctc

SEQ ID NO: 90327 - DNA, 80 bp, synthetic construct
  source 1..80: mol_type = other DNA
aacagcaagtccgtctacatggactttatctgaaagtagctgagaggctaaaaatagaggagtttcagttgggcagggag

SEQ ID NO: 90328 - DNA, 80 bp, synthetic construct
  source 1..80: mol_type = other DNA
gcaccatctgcccatggcctggggcggccgtggggccctgagaccagcaaattgggtcatgcagaaagagcgaaggctgg

SEQ ID NO: 90329 - DNA, 80 bp, synthetic construct; identical to SEQ ID NO: 16573
  source 1..80: mol_type = other DNA

SEQ ID NO: 90330 - DNA, 80 bp, synthetic construct
  source 1..80: mol_type = other DNA
aaagccgtggtagagacagggagtggcacccagttccccagcctccactcctgcttccatctcggctgcagccaggcagg

SEQ ID NO: 90331 - DNA, 80 bp, synthetic construct
  source 1..80: mol_type = other DNA
atgggacaggccaccctctaagcccagacctggagtctggcatcctgcgggggtgatggtgggtggcagacagggcctcc

SEQ ID NO: 90332 - DNA, 80 bp, synthetic construct; identical to SEQ ID NO: 16574
  source 1..80: mol_type = other DNA

SEQ ID NO: 90333 - DNA, 80 bp, synthetic construct
  source 1..80: mol_type = other DNA
gccccgctgaggggtctacctggaacctggctgcccatcaaggagttgacagagctgtgctgacctaggtgggtaggtgg

SEQ ID NO: 90334 - DNA, 80 bp, synthetic construct
  source 1..80: mol_type = other DNA
tcctgctgacttcgggaagtaggggcaggaaatccagcagccgcccggccctcggaggcccagcaggcgtgcagcggtgc

SEQ ID NO: 90335 - DNA, 80 bp, synthetic construct
  source 1..80: mol_type = other DNA
tgcagtgagtcccaccccaggccagcttgcctagccataggatgagaggtctccgggatgcacagctggctggcacccct

SEQ ID NO: 90336 - DNA, 80 bp, synthetic construct
  source 1..80: mol_type = other DNA
cgtcacagtcctgcgggctcgtcaaaactcttgcttgacagtgcagtgtctgctccaacacagacctcccaactaccttg

SEQ ID NO: 90337 - DNA, 80 bp, synthetic construct; identical to SEQ ID NO: 16575
  source 1..80: mol_type = other DNA

SEQ ID NO: 90338 - DNA, 80 bp, synthetic construct
  source 1..80: mol_type = other DNA
tcttagattattgtcttctttatcctggagaggactcttatttgctcaaatgcccacataaatcctcttttacagatggg

SEQ ID NO: 90339 - DNA, 80 bp, synthetic construct
  source 1..80: mol_type = other DNA
ggttgaggccaggggcaggctgggggcaccagcagcagggcccagggccttcagtgtgggccagggaccaatgcaggcgg

SEQ ID NO: 90340 - DNA, 80 bp, synthetic construct; identical to SEQ ID NO: 16576
  source 1..80: mol_type = other DNA

SEQ ID NO: 90341 - DNA, 80 bp, synthetic construct
  source 1..80: mol_type = other DNA
ctcctttcactgcctccggtcgcagaatccaggcctccaggatgagaatgccccccaacccaggactcccaaaaccacac

SEQ ID NO: 90342 - DNA, 80 bp, synthetic construct
  source 1..80: mol_type = other DNA
cttttttgtcttgggcagttccccgagctgcacccccagagccgccgtgctgctgttcatcctctccctttagcccaacc

SEQ ID NO: 90343 - DNA, 80 bp, synthetic construct
  source 1..80: mol_type = other DNA
ttgtgccagtatttatgtgtgagatacatacatgacataattttcctgtcttgtatggtcttcatcaggctttggtgtca

SEQ ID NO: 90344 - DNA, 80 bp, synthetic construct
  source 1..80: mol_type = other DNA
acatctaggcctggtgttttctttgtgggaagattcatcattcctgattcaatcgctctaataattatggactgttcagg

SEQ ID NO: 90345 - DNA, 80 bp, synthetic construct; identical to SEQ ID NO: 16577
  source 1..80: mol_type = other DNA

SEQ ID NO: 90346 - DNA, 80 bp, synthetic construct
  source 1..80: mol_type = other DNA
tcttaattttcaggcttcctaaatttccttttcgttttaatttttctaaccactgtcaatctcatggctttctaaatttt

SEQ ID NO: 90347 - DNA, 80 bp, synthetic construct
  source 1..80: mol_type = other DNA
cattatgatctcttgtttatcctaggagttctgtagcaatgtggtttttgtcattgttataattgtagcacagctttctc

SEQ ID NO: 90348 - DNA, 80 bp, synthetic construct; identical to SEQ ID NO: 16578
  source 1..80: mol_type = other DNA

SEQ ID NO: 90349 - DNA, 80 bp, synthetic construct
  source 1..80: mol_type = other DNA
accattttgctttctcaccagtaaagtataaaggttccactttctccacagccttgcaaatacatggtcttttctatttt

SEQ ID NO: 90350 - DNA, 80 bp, synthetic construct
  source 1..80: mol_type = other DNA
agtctgttctattattgagttgcaagggttttttatatgttctggatacaagtcctttatcagatctatgacttgcaaat

SEQ ID NO: 90351 - DNA, 80 bp, synthetic construct
  source 1..80: mol_type = other DNA
ttctcctgttttgttttgggtttttttccttctagaagttgtatagaattagctcttacatttcggtctatatttacttt

SEQ ID NO: 90352 - DNA, 80 bp, synthetic construct
  source 1..80: mol_type = other DNA
ataggtttatttctggattttcaattctattatgttggtctatatgcctttctgtaagtctatatgcctttctgtaaacc

SEQ ID NO: 90353 - DNA, 80 bp, synthetic construct; identical to SEQ ID NO: 16579
  source 1..80: mol_type = other DNA

SEQ ID NO: 90354 - DNA, 80 bp, synthetic construct
  source 1..80: mol_type = other DNA
tttcttaatttcattttgaattaattgttcattactagtatatagaagtaacattaaatttttatatcaatcttgtaaac

SEQ ID NO: 90355 - DNA, 80 bp, synthetic construct
  source 1..80: mol_type = other DNA
acttcaaaaaaaatattgactagaagtgctagagcagatcttctggggaaaatcattcaatcaatttccattagctctga

SEQ ID NO: 90356 - DNA, 80 bp, synthetic construct
  source 1..80: mol_type = other DNA
taatacattaattttcaggtgttaaaccaatctcacatttctggaatatatcctacctgggcatgatatataatcctttt

SEQ ID NO: 90357 - DNA, 80 bp, synthetic construct; identical to SEQ ID NO: 16580
  source 1..80: mol_type = other DNA

SEQ ID NO: 90358 - DNA, 80 bp, synthetic construct
  source 1..80: mol_type = other DNA
ctctttcttgcctctcattagattattacttctcattctacttttctctctactggttttgaagttatgtattctactac

SEQ ID NO: 90359 - DNA, 80 bp, synthetic construct
  source 1..80: mol_type = other DNA
aaaatagggatcctagaacactttaacttcaattattctccccctgacttagtactttgctgttgtatattttagttgaa

SEQ ID NO: 90360 - DNA, 80 bp, synthetic construct
  source 1..80: mol_type = other DNA
ttttcttcagtgaaaaactctcagattttgtccgcaaatgaccattttactgtcatgttaaaaaatatttccaccaatta

SEQ ID NO: 90361 - DNA, 80 bp, synthetic construct; identical to SEQ ID NO: 16581
  source 1..80: mol_type = other DNA

SEQ ID NO: 90362 - DNA, 80 bp, synthetic construct
  source 1..80: mol_type = other DNA
gtctctctgtactgtattctggaatccatcttccagttcactagttgtttctttgactgtgtttaatctgctgttaaaac

SEQ ID NO: 90363 - DNA, 80 bp, synthetic construct
  source 1..80: mol_type = other DNA
tattgagcttctcttaattccagtatctaaagtatttctgagttcacctccctgtttgattttttcttctgctgactctc

SEQ ID NO: 90364 - DNA, 80 bp, synthetic construct; identical to SEQ ID NO: 16582
  source 1..80: mol_type = other DNA

SEQ ID NO: 90365 - DNA, 80 bp, synthetic construct
  source 1..80: mol_type = other DNA
tgttctccttctcttagcagtaatgcagttttctttacaatcttctcagggagtaggagatttttcattggccctcacaa

SEQ ID NO: 90366 - DNA, 80 bp, synthetic construct
  source 1..80: mol_type = other DNA
ggggttccactttcactgagttttcagcctctaacctcccttacttcctggtcagctcatccatgctagccacagatatc

SEQ ID NO: 90367 - DNA, 80 bp, synthetic construct
  source 1..80: mol_type = other DNA
ctgggtcttcaaaagccactgcatattttacacatttcaatttagacaccgagttttcatgagaacgacttggtctgtat

SEQ ID NO: 90368 - DNA, 80 bp, synthetic construct; identical to SEQ ID NO: 16583
  source 1..80: mol_type = other DNA

SEQ ID NO: 90369 - DNA, 80 bp, synthetic construct
  source 1..80: mol_type = other DNA
caaggaaatgctcagtgagtgcccatagaatgtggtgaatgtggatggcagggaccatacgggagagcacactccagtag

SEQ ID NO: 90370 - DNA, 80 bp, synthetic construct
  source 1..80: mol_type = other DNA
gaatgtccgcttgggattctggttcttttccggttctctgcagccaggtctgttccctggcgtagcttcgcaactggaag

SEQ ID NO: 90371 - DNA, 80 bp, synthetic construct
  source 1..80: mol_type = other DNA
gcagctccccctcccctctgcaccaccccccgccccccacacccaacccaacactcctctctctgctgctgggctgctct

SEQ ID NO: 90372 - DNA, 80 bp, synthetic construct; identical to SEQ ID NO: 16584
  source 1..80: mol_type = other DNA

SEQ ID NO: 90373 - DNA, 80 bp, synthetic construct
  source 1..80: mol_type = other DNA
tctcacagccatcatggcttgcctggccagggaccgaggccccgtaccctcccccaacttcaggctacccccaaaggcca

SEQ ID NO: 90374 - DNA, 80 bp, synthetic construct
  source 1..80: mol_type = other DNA
agagcagacgctcttctgtcttactaggaggtgggaattaatgaaagtaacaactcctggaagggactctagcactgcct

SEQ ID NO: 90375 - DNA, 80 bp, synthetic construct
  source 1..80: mol_type = other DNA
cacagacgagcttttgccggcagtcattgctcgggagggatattattgatgtgttgctcagtaagaaaccaaagttgcca

SEQ ID NO: 90376 - DNA, 80 bp, synthetic construct; identical to SEQ ID NO: 16585
  source 1..80: mol_type = other DNA

SEQ ID NO: 90377 - DNA, 80 bp, synthetic construct
  source 1..80: mol_type = other DNA
ctcggataggttgccatgaggttgccagaggctggcaaagggcacttgtcagctgcagattccagccctgccctgggact

SEQ ID NO: 90378 - DNA, 80 bp, synthetic construct
  source 1..80: mol_type = other DNA
gaggagaagcctgtctgatgtggctcccgtcctcctctgctggggttgtctacactgtccccactcggtgacaccaggag

SEQ ID NO: 90379 - DNA, 80 bp, synthetic construct
  source 1..80: mol_type = other DNA
gctcatcactcagggtcctcatccaggtgtggcccatccacacccagcatccagctgtgcacacagggccacacacagac

SEQ ID NO: 90380 - DNA, 80 bp, synthetic construct
  source 1..80: mol_type = other DNA
ccagtggaggggacaggcaccattatgccgatcgctcgcgtgcaaaggccctgtggcgtgggcagtgtcacaagctcctg

SEQ ID NO: 90381 - DNA, 80 bp, synthetic construct; identical to SEQ ID NO: 16586
  source 1..80: mol_type = other DNA

SEQ ID NO: 90382 - DNA, 80 bp, synthetic construct
  source 1..80: mol_type = other DNA
ggccagagaggaaatttaagtctttttaaaaattcagctcaagtgtgtgtcaacttctgtgagtgcaactgcttcagaga

SEQ ID NO: 90383 - DNA, 80 bp, synthetic construct
  source 1..80: mol_type = other DNA
ccagggcgtgagggcggtgcggagccttgtctgtgcggcaaaccctgcctggctgccctggccaacctcagaaaaacatg

SEQ ID NO: 90384 - DNA, 80 bp, synthetic construct
  source 1..80: mol_type = other DNA
gtgccggctgggctgggaaaccgcgggcggggaaggaaggacggggcgaaccggcggcacaggcccagcacgtcccgggc

SEQ ID NO: 90385 - DNA, 80 bp, synthetic construct; identical to SEQ ID NO: 16587
  source 1..80: mol_type = other DNA

SEQ ID NO: 90386 - DNA, 80 bp, synthetic construct
  source 1..80: mol_type = other DNA
ctgagccctccccaccccgttccgcgtccgctgcttcccgccctggtccggcgcttccattcatgccttcccgggtccct

SEQ ID NO: 90387 - DNA, 80 bp, synthetic construct
  source 1..80: mol_type = other DNA
ggagcccctctggccgccagatctttgtctgtgaaacagcagccagtgtgtggaccaggcaggagtggatggggtgtgtg

SEQ ID NO: 90388 - DNA, 80 bp, synthetic construct
  source 1..80: mol_type = other DNA
ttcaagaagaggttgcagggtgtgcgggctgccaggaaaaggtctgtgcgggtgagggagcgcatcctatggatatctag

SEQ ID NO: 90389 - DNA, 80 bp, synthetic construct; identical to SEQ ID NO: 16588
  source 1..80: mol_type = other DNA

SEQ ID NO: 90390 - DNA, 80 bp, synthetic construct
  source 1..80: mol_type = other DNA
ccgcaggtcaggcacacaagagccatctgtgtgggcggcaaggtggctgcctgtctgctgcccgcaaagggatgcttgtc

SEQ ID NO: 90391 - DNA, 80 bp, synthetic construct
  source 1..80: mol_type = other DNA
ctcttgttctaaggctctgtgatagcccctcttactgagagggaccatatccaataacgggtggaaattgcactagcagg

SEQ ID NO: 90392 - DNA, 80 bp, synthetic construct
  source 1..80: mol_type = other DNA
accctgtctctatgaaaataaaaataaaaaattagccaagcgtgatggtgtgtgcctgtggtcccggctgctcagcaggc

SEQ ID NO: 90393 - DNA, 80 bp, synthetic construct; identical to SEQ ID NO: 16589
  source 1..80: mol_type = other DNA

SEQ ID NO: 90394 - DNA, 80 bp, synthetic construct
  source 1..80: mol_type = other DNA
ggagcccagagccaaccaggagtgagtgaggaggaggagggtgacacagggtggaagagtgtccagtgtgtgcagccttg

SEQ ID NO: 90395 - DNA, 80 bp, synthetic construct
  source 1..80: mol_type = other DNA
ggtgaggggctgctgtgggatgagggagagcatcagcactttggactagggtggaggccttggggccagcccccagtctg

SEQ ID NO: 90396 - DNA, 80 bp, synthetic construct
  source 1..80: mol_type = other DNA
caaaaccccagtgcttagagatcaagtggaaaagaaaagaggaagaagatgggggagtgagagagatgggaaggcagtga

SEQ ID NO: 90397 - DNA, 80 bp, synthetic construct
  source 1..80: mol_type = other DNA
tggaggggcgtcagggagtacaccgccttcccaggtgagggtgtcctggaggaggcacaagttctgctgggctggactgg

SEQ ID NO: 90398 - DNA, 80 bp, synthetic construct; identical to SEQ ID NO: 16590
  source 1..80: mol_type = other DNA

SEQ ID NO: 90399 - DNA, 80 bp, synthetic construct
  source 1..80: mol_type = other DNA
caagaagccagggcatcacttgaccttccgctgcgtcagtctccgcatctcgcctcccctacccccgacctctcgggtgc

SEQ ID NO: 90400 - DNA, 80 bp, synthetic construct
  source 1..80: mol_type = other DNA
tgtatcccacttcgtttctctctttccctaaaggtgaagttctggagcaaaaagagcctgagctgtgagccgaggggctc

SEQ ID NO: 90401 - DNA, 80 bp, synthetic construct; identical to SEQ ID NO: 16591
  source 1..80: mol_type = other DNA

SEQ ID NO: 90402 - DNA, 80 bp, synthetic construct
  source 1..80: mol_type = other DNA
cctccacaagcaggggtcccatggggcgggggccgggggaacagggggtaagtgtggccaaccccttgcacagggcttgg

SEQ ID NO: 90403 - DNA, 80 bp, synthetic construct
  source 1..80: mol_type = other DNA
agcagcctagaaccgacacgtgtgaaaccattggcttatggcgcaatgcacttcctcccggcatgcatgaaaacataaat

SEQ ID NO: 90404 - DNA, 80 bp, synthetic construct
  source 1..80: mol_type = other DNA
caaggcggccacgtcagttctcacggctcctcccaaactgaggagcatggaggaccctgggcattgatggcagggtggca

SEQ ID NO: 90405 - DNA, 80 bp, synthetic construct
  source 1..80: mol_type = other DNA
tctccatggggaaggaaaacgtgccccgaaggggcctgtgtccaggttcctgcccactcagcccctcggggccgtgtctc

SEQ ID NO: 90406 - DNA, 80 bp, synthetic construct; identical to SEQ ID NO: 16592
  source 1..80: mol_type = other DNA

SEQ ID NO: 90407 - DNA, 80 bp, synthetic construct
  source 1..80: mol_type = other DNA
gtccccacggggccacaacggggcattgttcacggcctcacctgggctgtctccagcaccccaggatttacgaggactcg

SEQ ID NO: 90408 - DNA, 80 bp, synthetic construct
  source 1..80: mol_type = other DNA
aacgggccccaacctgcctgcagaccaagcggtcacatcgcgaatgagtcctcatgctgtgcgtcccccactgggcagcc

SEQ ID NO: 90409 - DNA, 80 bp, synthetic construct
  source 1..80: mol_type = other DNA
acctcctggccacctgcccctgcgtacccaccacccttgctccggagctcgagggccctttccccactagcatctgaccg

SEQ ID NO: 90410 - DNA, 80 bp, synthetic construct; identical to SEQ ID NO: 16593
  source 1..80: mol_type = other DNA

SEQ ID NO: 90411 - DNA, 80 bp, synthetic construct
  source 1..80: mol_type = other DNA
cctctcaccctcacaggggacccaattgcacagccatccacagcggccttgggacaatactgagtcttgagttaggggtg

SEQ ID NO: 90412 - DNA, 80 bp, synthetic construct
  source 1..80: mol_type = other DNA
ccaaccacccttcccctcctggtcacctttcggcttggcatcaggagggcttgaagaagactcctcagccccacctgcag

SEQ ID NO: 90413 - DNA, 80 bp, synthetic construct
  source 1..80: mol_type = other DNA
cggcagcagcagcagacgtttttaaactaattcattggtgatggcaaaattatgccgagttccctgaaaaaaaaaaaaaa

SEQ ID NO: 90414 - DNA, 80 bp, synthetic construct; identical to SEQ ID NO: 16594
  source 1..80: mol_type = other DNA

SEQ ID NO: 90415 - DNA, 80 bp, synthetic construct
  source 1..80: mol_type = other DNA
ggaaaatgtaacttaatcgtagcagagaaaattgtttataaattggtcgcgttgtttgaactctcgcctctgtggctcag

SEQ ID NO: 90416 - DNA, 80 bp, synthetic construct
  source 1..80: mol_type = other DNA
caggtggtcaggcggcacttacctggcaggtgaaatctaaacaggcaccttcaaaggaggacaaagcagctcccttgggt

SEQ ID NO: 90417 - DNA, 80 bp, synthetic construct
  source 1..80: mol_type = other DNA
cggtggtgctcagattccatgtggctgtccatccatggtgggccaggaggtcactgttgtggtgacaaccagcgctcttt

SEQ ID NO: 90418 - DNA, 80 bp, synthetic construct; identical to SEQ ID NO: 16595
  source 1..80: mol_type = other DNA

SEQ ID NO: 90419 - DNA, 80 bp, synthetic construct
  source 1..80: mol_type = other DNA
tttcccttgtgtttgatttgccaggagcagaatttctgggttggaatcgggaacatttagaggagcttctcagtagagtt

SEQ ID NO: 90420 - DNA, 80 bp, synthetic construct
  source 1..80: mol_type = other DNA
catgtctacctgggcgaccccattttgaagatgcagaactgaggtccggagaggcctgggtagctgcctaagggtggggt

SEQ ID NO: 90421 - DNA, 80 bp, synthetic construct
  source 1..80: mol_type = other DNA
aggccaggaggtcacagatctgggatcctttcccgccaccttcaagaagggaataaagccacttcctgctccatcccagt

SEQ ID NO: 90422 - DNA, 80 bp, synthetic construct
  source 1..80: mol_type = other DNA
aaccactcccagcccctgccagctttgtagcctctttcttccccaccccacttgcctcacctcggcccaaacctgggtac

SEQ ID NO: 90423 - DNA, 80 bp, synthetic construct; identical to SEQ ID NO: 16596
  source 1..80: mol_type = other DNA

SEQ ID NO: 90424 - DNA, 80 bp, synthetic construct
  source 1..80: mol_type = other DNA
gggcaggaggagaaggtgtggctggcaggcactcatgaggacagggtctcagagcccattctagagaatgttccagaagg

SEQ ID NO: 90425 - DNA, 80 bp, synthetic construct
  source 1..80: mol_type = other DNA
cctggggtgctggtggcccagacagactagagatggtggaagggtagagtgcagtcaggtttggagtgggtccactcttt

SEQ ID NO: 90426 - DNA, 80 bp, synthetic construct
  source 1..80: mol_type = other DNA
ccctctagctctccagcttcctgctggccagtcgtatcagctggctcagcagcaaaggcttcagaccaggggacttaggt

SEQ ID NO: 90427 - DNA, 80 bp, synthetic construct; identical to SEQ ID NO: 16597
  source 1..80: mol_type = other DNA

SEQ ID NO: 90428 - DNA, 80 bp, synthetic construct
  source 1..80: mol_type = other DNA
aggaagtgagggaggggagagcttgttgcgggggtgtccttgcctctcagggccacgcccactgcctgcgccagggaaga

SEQ ID NO: 90429 - DNA, 80 bp, synthetic construct
  source 1..80: mol_type = other DNA
agccagagcagggtctggggtctttgcctccagtagggtgttgggggagctttgtattctctgtggctggaggcgatttc

SEQ ID NO: 90430 - DNA, 80 bp, synthetic construct
  source 1..80: mol_type = other DNA
gacaatgcgaagcccacctggtctgtgagctgtcgcctctgtcctcacagtgacagagctggctttgagggcagcaggac

SEQ ID NO: 90431 - DNA, 80 bp, synthetic construct; identical to SEQ ID NO: 16598
  source 1..80: mol_type = other DNA

SEQ ID NO: 90432 - DNA, 80 bp, synthetic construct
  source 1..80: mol_type = other DNA
ccagcagatgctcattctcccggtcaaacccctagatgacactcactggggaacagaggggctgggtccaggaaggaggc

SEQ ID NO: 90433 - DNA, 80 bp, synthetic construct
  source 1..80: mol_type = other DNA
ccagccccagcagaccctacagcgctacctgcaaaggccagaccggccagccagggaggtgggctagacagtgccctggc

SEQ ID NO: 90434 - DNA, 80 bp, synthetic construct
  source 1..80: mol_type = other DNA
ggctcagggtagcccagaaaacccagccgggcccccccccccacgggcacccaggaaccgccctggctttgctggaggac

SEQ ID NO: 90435 - DNA, 80 bp, synthetic construct; identical to SEQ ID NO: 16599
  source 1..80: mol_type = other DNA

SEQ ID NO: 90436 - DNA, 80 bp, synthetic construct
  source 1..80: mol_type = other DNA
gcctgtaccgtctgcagccccatctccaggtcccggcctgccccagcctgcccacccccagcctgtcccccaaatgccca

SEQ ID NO: 90437 - DNA, 80 bp, synthetic construct
  source 1..80: mol_type = other DNA
cagcttttatgcacactcaggtactcaggacaccccacaccagccattggatggggccgcctctgccacctgctccagcc

SEQ ID NO: 90438 - DNA, 80 bp, synthetic construct
  source 1..80: mol_type = other DNA
aggaagtgctgcagggacccactggattctctacagcgcccagtagcccattagaagatacagaggcagcaatattcaca

SEQ ID NO: 90439 - DNA, 80 bp, synthetic construct; identical to SEQ ID NO: 16600
  source 1..80: mol_type = other DNA

SEQ ID NO: 90440 - DNA, 80 bp, synthetic construct
  source 1..80: mol_type = other DNA
accccagttttgtctgtgggtttgtggagagcatcactgaaatttctaacttgacagagtggttccagggctcatataga

SEQ ID NO: 90441 - DNA, 80 bp, synthetic construct
  source 1..80: mol_type = other DNA
cgcccacacccagcgtctggagctgctggaaatatgtgtccccaccatgaaactgatgctgctgttcatcccattttgtg

SEQ ID NO: 90442 - DNA, 80 bp, synthetic construct; identical to SEQ ID NO: 16601
  source 1..80: mol_type = other DNA

SEQ ID NO: 90443 - DNA, 80 bp, synthetic construct
  source 1..80: mol_type = other DNA
acaggccgctggggacccaggtcacagagcctttcccccagctccagcctggctggggagagcaaaggctgcagctgcac

SEQ ID NO: 90444 - DNA, 80 bp, synthetic construct
  source 1..80: mol_type = other DNA
aatttacaaaaggatctgaaggtcctcactgcactcatcctgtaaggtggacttggggcctcatctggccccgctgcctg

SEQ ID NO: 90445 - DNA, 80 bp, synthetic construct
  source 1..80: mol_type = other DNA
cgtgctagcccttgctctaagagtttcagtgaagagacgcaagatgcagaaatgaacctaattgtgtggtcttccgtgct

SEQ ID NO: 90446 - DNA, 80 bp, synthetic construct; identical to SEQ ID NO: 16602
  source 1..80: mol_type = other DNA

SEQ ID NO: 90447 - DNA, 80 bp, synthetic construct
  source 1..80: mol_type = other DNA
gtctctggagggtggacttagagatatgtttttgaaacagattttttcatatttttcaaaatttctcccgtaagtggttc

SEQ ID NO: 90448 - DNA, 80 bp, synthetic construct
  source 1..80: mol_type = other DNA
ctggggccacatgggccactgtgcccagtgaagcctggcttccttgtctgtggtgccagccatgtgggagggtaggcgac

SEQ ID NO: 90449 - DNA, 80 bp, synthetic construct
  source 1..80: mol_type = other DNA
gctccatcttccacctgtcctgggggatccccattcattctctccgtgggcatcatcagaggctcagctgtaccagacca

SEQ ID NO: 90450 - DNA, 80 bp, synthetic construct
  source 1..80: mol_type = other DNA
ttgcgtgctggctccggtgacacacaaaggcctctgcttctccactctcaggccagcccgagagggacggcaccaccggg

SEQ ID NO: 90451 - DNA, 80 bp, synthetic construct; identical to SEQ ID NO: 16603
  source 1..80: mol_type = other DNA

SEQ ID NO: 90452 - DNA, 80 bp, synthetic construct
  source 1..80: mol_type = other DNA
gctaattggcccggggtcttcccagccctgtgctgtttgtgtgctattttaattcgcttatgaaaagcccccgctttgat

SEQ ID NO: 90453 - DNA, 80 bp, synthetic construct
  source 1..80: mol_type = other DNA
tgaggtaactgaacaaacagtcctgctgaaaaatatgcttttgtttcactaataaatccctcctcggaacactcccgggc

SEQ ID NO: 90454 - DNA, 80 bp, synthetic construct; identical to SEQ ID NO: 16604
  source 1..80: mol_type = other DNA

SEQ ID NO: 90455 - DNA, 80 bp, synthetic construct
  source 1..80: mol_type = other DNA
ccacatctgtaaggatgagacaggaacggtctctctgggggcagggccggtggtacctggagccctccccactgagcacc

SEQ ID NO: 90456 - DNA, 80 bp, synthetic construct
  source 1..80: mol_type = other DNA
tgaacccatccaggctggcccgccttccagccctcccccagcacccaccaagcccctgcgatatcccagtggaagataat

SEQ ID NO: 90457 - DNA, 80 bp, synthetic construct
  source 1..80: mol_type = other DNA
ggaggggcatttgaaaatagcattcagagttgctattaataggctctgatgcagaactgagcagagaagaaaacaaaaga

SEQ ID NO: 90458 - DNA, 80 bp, synthetic construct; identical to SEQ ID NO: 16605
  source 1..80: mol_type = other DNA

SEQ ID NO: 90459 - DNA, 80 bp, synthetic construct
  source 1..80: mol_type = other DNA
acatggacaatgggtgggtagatgggtgaatagatgggtggacagatggaaggatggatggatatatggatgcatggaga

SEQ ID NO: 90460 - DNA, 80 bp, synthetic construct
  source 1..80: mol_type = other DNA
atggatgtgtgagtgagtagatgaatgagtgggcagacagacagacacaccatcagaagcaaatataaatatggaatcaa

SEQ ID NO: 90461 - DNA, 80 bp, synthetic construct
  source 1..80: mol_type = other DNA
taaatgtcactttcaggttaaggaaaataaaatgtgggacgctggactcatcgtgggtttttgcggtcttctctcagctt

SEQ ID NO: 90462 - DNA, 80 bp, synthetic construct
  source 1..80: mol_type = other DNA
gtatgaaggtggcaacagactccccatagtcctctcaccacagacacctcttctcagttcttcgtttccagttggactca

SEQ ID NO: 90463 - DNA, 80 bp, synthetic construct; identical to SEQ ID NO: 16606
  source 1..80: mol_type = other DNA

SEQ ID NO: 90464 - DNA, 80 bp, synthetic construct
  source 1..80: mol_type = other DNA
gaactgtgtggaaggtaagcattcaaagttcttacatggtgaaaatatcttcattcaaccatggtgccctattgatagtt

SEQ ID NO: 90465 - DNA, 80 bp, synthetic construct
  source 1..80: mol_type = other DNA
tacttttgtaagtggcctttcttttcttcctggaaatgtttagtatctaccatctggactcaggggtttcaatttcccag

SEQ ID NO: 90466 - DNA, 80 bp, synthetic construct; identical to SEQ ID NO: 16607
  source 1..80: mol_type = other DNA

SEQ ID NO: 90467 - DNA, 80 bp, synthetic construct
  source 1..80: mol_type = other DNA
cattccgccctcatttgatgggcacgacagctcctaggatctttctggagactccagatacatcttatatcttaagttct

SEQ ID NO: 90468 - DNA, 80 bp, synthetic construct
  source 1..80: mol_type = other DNA
gtgttgacaatgactgggggaggtgcctgtcattacactgaggaaccccatatgttagagctctgaggctgctgcatctg

SEQ ID NO: 90469 - DNA, 80 bp, synthetic construct
  source 1..80: mol_type = other DNA
agcatggcattcagagcagcagatggcttagactcacccccgcccagtcttggcacccttacagccccggcgagacccgg

SEQ ID NO: 90470 - DNA, 80 bp, synthetic construct; identical to SEQ ID NO: 16608
  source 1..80: mol_type = other DNA

SEQ ID NO: 90471 - DNA, 80 bp, synthetic construct
  source 1..80: mol_type = other DNA
ttcttgaggttcactgccctaaaggccgcatgaggggacagaaggtgaacacagggccctgcttggtctgacaagcccag

SEQ ID NO: 90472 - DNA, 80 bp, synthetic construct
  source 1..80: mol_type = other DNA
ggctgcgtgggagacggtgcagcagtgggcctgggagctgagcaacggtggctgggatgggtggagaccaccaaagagga

SEQ ID NO: 90473 - DNA, 80 bp, synthetic construct
  source 1..80: mol_type = other DNA
gacagtcctcacaggggcatgctcaggccctgccccaggcagaccccacgccctggcacgcagccccaccggctgtgccg

SEQ ID NO: 90474 - DNA, 80 bp, synthetic construct; identical to SEQ ID NO: 16609
  source 1..80: mol_type = other DNA

SEQ ID NO: 90475 - DNA, 80 bp, synthetic construct
  source 1..80: mol_type = other DNA
tcgggggctccagttgaaaatgatgggggacacatttgcatcacagcctgcccggccggctctgtggcccctgatcttcc

SEQ ID NO: 90476 - DNA, 80 bp, synthetic construct
  source 1..80: mol_type = other DNA
gactttaaaacataaaccagaccacagcactgcctgctcaagccccccatggcctccctcttccctaggaagcaatccag

SEQ ID NO: 90477 - DNA, 80 bp, synthetic construct
  source 1..80: mol_type = other DNA
atggccagccctcaaaccatctgaagtctgctgttggcacctgccctctcctggctgcaaagctgccccctcatggcctc

SEQ ID NO: 90478 - DNA, 80 bp, synthetic construct; identical to SEQ ID NO: 16610
  source 1..80: mol_type = other DNA

SEQ ID NO: 90479 - DNA, 80 bp, synthetic construct
  source 1..80: mol_type = other DNA
ccactctcacaggggtggagacctgcacctctttttcacccccaaacccgcctgcccgtcagtgcttagagcaaatgccc

SEQ ID NO: 90480 - DNA, 80 bp, synthetic construct
  source 1..80: mol_type = other DNA
aggatgagagaaggaacagaggggaggaccaacatctcggctgatcctggtctatttttagtcggtggtgggctgtcact

SEQ ID NO: 90481 - DNA, 80 bp, synthetic construct; identical to SEQ ID NO: 16611
  source 1..80: mol_type = other DNA

SEQ ID NO: 90482 - DNA, 80 bp, synthetic construct
  source 1..80: mol_type = other DNA
gcatgaatggatagaggtggatggataaatgcagagatagagggaaggagggctgaataaaggatggatggatggtggga

SEQ ID NO: 90483 - DNA, 80 bp, synthetic construct
  source 1..80: mol_type = other DNA
agatgggtgggtggatggatggatgagtggtgaatgaatggatggatggggagatggagggaagggaaggctggataaag

SEQ ID NO: 90484 - DNA, 80 bp, synthetic construct
  source 1..80: mol_type = other DNA
gggagcaagcaggcttggatgagtagctaaagcacctcaagcaagggtgtctcccttagaaatacatgtgcctccaagtc

SEQ ID NO: 90485 - DNA, 80 bp, synthetic construct; identical to SEQ ID NO: 16612
  source 1..80: mol_type = other DNA

SEQ ID NO: 90486 - DNA, 80 bp, synthetic construct
  source 1..80: mol_type = other DNA
gggtgtcactgagggtcccaagtctggggtggccaggtcacagcttgaacctgggcagcctttattctctaggggccttg

SEQ ID NO: 90487 - DNA, 80 bp, synthetic construct
  source 1..80: mol_type = other DNA
ggcccacagggtagttctgagttcgggggaccctctcctggccctgtggggtcggaggaggtcctgggagcccacctcct

SEQ ID NO: 90488 - DNA, 80 bp, synthetic construct
  source 1..80: mol_type = other DNA
tcgcccccagccccaggctgaccccagtccctccctatgcaggcagaggggcaattggaagaggctggagactattcagg

SEQ ID NO: 90489 - DNA, 80 bp, synthetic construct
  source 1..80: mol_type = other DNA
ctgcctgtgccgaaaaattaagcaccgctgagtcgccgcacacctgtcagggtggaggggacttgggggaccagccagct

SEQ ID NO: 90490 - DNA, 80 bp, synthetic construct; identical to SEQ ID NO: 16613
  source 1..80: mol_type = other DNA

SEQ ID NO: 90491 - DNA, 80 bp, synthetic construct
  source 1..80: mol_type = other DNA
agccttttgtgaaaatggtcaggctgctgaaagtgagaccacactcaccctgtggtccagtgatctccttctgagaatcc

SEQ ID NO: 90492 - DNA, 80 bp, synthetic construct
  source 1..80: mol_type = other DNA
ggcagcagaaagggggctataggaccctttgactcaagggctaaccatgatgtttcattaagggagaaatgcacttgctg

SEQ ID NO: 90493 - DNA, 80 bp, synthetic construct; identical to SEQ ID NO: 16614
  source 1..80: mol_type = other DNA

SEQ ID NO: 90494 - DNA, 80 bp, synthetic construct
  source 1..80: mol_type = other DNA
cctgaccccaggagacagagggaacccaccctcaccctagtccacatgcccgacccatgacccaggcctgtggcgccagc

SEQ ID NO: 90495 - DNA, 80 bp, synthetic construct
  source 1..80: mol_type = other DNA
aactacgttggacagaacccacggcggccctttccgtggcttcagccagtttctgagcgctaccttgaacccctgttgca

SEQ ID NO: 90496 - DNA, 80 bp, synthetic construct
  source 1..80: mol_type = other DNA
gaacaggttccccaattttggttcatggtacctgagatgacggcttcagatgatgtccctggccagggaggtggaggacg

SEQ ID NO: 90497 - DNA, 80 bp, synthetic construct; identical to SEQ ID NO: 16615
  source 1..80: mol_type = other DNA

SEQ ID NO: 90498 - DNA, 80 bp, synthetic construct
  source 1..80: mol_type = other DNA
ctcttttatcattaaagaatatgcattaacacctaaaacccactatcctggcaaaaaagtggcaggattgtctgaaaaac

SEQ ID NO: 90499 - DNA, 80 bp, synthetic construct
  source 1..80: mol_type = other DNA
atggcgtccttgtgcccttgtcacccactcctgtgggtacacagcttccctttctgcaaagtcacaccccaagccctggc

SEQ ID NO: 90500 - DNA, 80 bp, synthetic construct
  source 1..80: mol_type = other DNA
agccagatgatgggagctgtcacaggactttgccacccggggtgaggggcctagaaacccctctccaccagatgccttac

SEQ ID NO: 90501 - DNA, 80 bp, synthetic construct; identical to SEQ ID NO: 16616
  source 1..80: mol_type = other DNA

SEQ ID NO: 90502 - DNA, 80 bp, synthetic construct
  source 1..80: mol_type = other DNA
agctagtcctctccagcccctttgaaaagaccagctggacattctccagggagattctgccctacaggattagggagtac

SEQ ID NO: 90503 - DNA, 80 bp, synthetic construct
  source 1..80: mol_type = other DNA
ttgtgtgctctatgcctgcccatgtgctgaggaaggagcaggagaggaagacaaaccagagtttaagtgaggagtgggca

SEQ ID NO: 90504 - DNA, 80 bp, synthetic construct
  source 1..80: mol_type = other DNA
cattgaaccttccttgaattcctgaggtaaaccttatgtgatcttgactcaagtccagctgctgatgcatttttaggttt

SEQ ID NO: 90505 - DNA, 80 bp, synthetic construct; identical to SEQ ID NO: 16617
  source 1..80: mol_type = other DNA

SEQ ID NO: 90506 - DNA, 80 bp, synthetic construct
  source 1..80: mol_type = other DNA
cctaattcttatttgttactttacttgcttaaggtttatctactttactggctcttcaaacaacctgcatttggttttat

SEQ ID NO: 90507 - DNA, 80 bp, synthetic construct
  source 1..80: mol_type = other DNA
catcgatacttctccaaataccctataggaagcatcccacactcttggcatgtaatcagctccttgtaaatccatcctaa

SEQ ID NO: 90508 - DNA, 80 bp, synthetic construct
  source 1..80: mol_type = other DNA
ctaataggatcatttctgtgacctttttgtatatgtgtggaggcggtggagtcttttctgttaattgtgttaaacttgtt

SEQ ID NO: 90509 - DNA, 80 bp, synthetic construct; identical to SEQ ID NO: 16618
  source 1..80: mol_type = other DNA

SEQ ID NO: 90510 - DNA, 80 bp, synthetic construct
  source 1..80: mol_type = other DNA
ttctccctgacagagctgtcaaggggagtgcctacaccccacctccattgctgctcaccctcccctggcccgtgctgggc

SEQ ID NO: 90511 - DNA, 80 bp, synthetic construct
  source 1..80: mol_type = other DNA
cagggtggggtgggtctgtcaagtgttcggtggcccctggctggtgctgtagcaacacgggtgtcagagggcggacaccg

SEQ ID NO: 90512 - DNA, 80 bp, synthetic construct
  source 1..80: mol_type = other DNA
ggtcacgccagccacacacactttctcgagaagtttcaagtggagccacagggccattgtgtgtcctgaatcattgctct

SEQ ID NO: 90513 - DNA, 80 bp, synthetic construct
  source 1..80: mol_type = other DNA
tgttcacagtggcttccaaggcctttgggatgggccttgcgtgctgcccttctgctggaaaccctcccagccatttgagg

SEQ ID NO: 90514 - DNA, 80 bp, synthetic construct; identical to SEQ ID NO: 16619
  source 1..80: mol_type = other DNA

SEQ ID NO: 90515 - DNA, 80 bp, synthetic construct
  source 1..80: mol_type = other DNA
ctgaaggtgctgtgctgctggctttgaagacggaggaggggccacagcccaggaacgcaggcagcttctagaaaaccgga

SEQ ID NO: 90516 - DNA, 80 bp, synthetic construct
  source 1..80: mol_type = other DNA
caagcaccagcacagcgccaggccctggggtatagtgtggataagatggactggaccctaccctcctagggatgtccctc

SEQ ID NO: 90517 - DNA, 80 bp, synthetic construct
  source 1..80: mol_type = other DNA
ctgtgagccgaaccccaaaggatgggtggaaattagcttaactaagtggagaggtgggatagtcatgggccaaggcccca

SEQ ID NO: 90518 - DNA, 80 bp, synthetic construct; identical to SEQ ID NO: 16620
  source 1..80: mol_type = other DNA

SEQ ID NO: 90519 - DNA, 80 bp, synthetic construct
  source 1..80: mol_type = other DNA
ccctgaaagtggaatgaagactgaaagacagaaaatcagaacacccaagaaacatgcagactcaatccaaggacatccaa

SEQ ID NO: 90520 - DNA, 80 bp, synthetic construct
  source 1..80: mol_type = other DNA
taacaggtgattttccaaacatgggcctctgaacagatcagtctttggtagagaaaatttatgaagagagatgccttcaa

SEQ ID NO: 90521 - DNA, 80 bp, synthetic construct; identical to SEQ ID NO: 16621
  source 1..80: mol_type = other DNA

SEQ ID NO: 90522 - DNA, 80 bp, synthetic construct
  source 1..80: mol_type = other DNA
aaaataggtgggactgggaagaaaatctgcaacggagcttccaaaacagcggaggatctccctgagggaggtgttgttag

SEQ ID NO: 90523 - DNA, 80 bp, synthetic construct
  source 1..80: mol_type = other DNA
agcttaagcctcaccttcatacaaggaagattctagtagctaagattgacaagtcgagaaaccatgtggccagcatgtca

SEQ ID NO: 90524 - DNA, 80 bp, synthetic construct
  source 1..80: mol_type = other DNA
cacacattcacacaaacacacccagacacatgcatgcacatggataactaactcttccagcaagagccaccccctggctg

SEQ ID NO: 90525 - DNA, 80 bp, synthetic construct; identical to SEQ ID NO: 16622
  source 1..80: mol_type = other DNA

SEQ ID NO: 90526 - DNA, 80 bp, synthetic construct
  source 1..80: mol_type = other DNA
gaggctgcaacatggaggtggtacctgaagaaggggtgtggatgaggttgcctggcaagagattgcagggagaggagaga

SEQ ID NO: 90527 - DNA, 80 bp, synthetic construct
  source 1..80: mol_type = other DNA
attctgtacttggcctgtctcagtgccgtgccgcatccatcctgcccctggcaccggagggtacactgatcagggacacg

SEQ ID NO: 90528 - DNA, 80 bp, synthetic construct
  source 1..80: mol_type = other DNA
gtctgcacatgtggctggtgcaggaggcgcagtgtgctgggcctcagcctggacacggctgtcccatgcgcagagacagg

SEQ ID NO: 90529 - DNA, 80 bp, synthetic construct
  source 1..80: mol_type = other DNA
ggtgcagacccagaccaatgggaggccaagggaggcccgcagcccagaccttccgagccctcagcctgctcagctcagtg

SEQ ID NO: 90530 - DNA, 80 bp, synthetic construct; identical to SEQ ID NO: 16623
  source 1..80: mol_type = other DNA

SEQ ID NO: 90531 - DNA, 80 bp, synthetic construct
  source 1..80: mol_type = other DNA
agtctccgggtactttgctcagtaacggactggaccagcgcggcctccacgccagggactggggcaagggtggagtttgg

SEQ ID NO: 90532 - DNA, 80 bp, synthetic construct
  source 1..80: mol_type = other DNA
tcgtcctccccgccatcctggaaacgattttgttgtctgcagagattatgtgtaactgcctgtgagttataagcctccac

SEQ ID NO: 90533 - DNA, 80 bp, synthetic construct; identical to SEQ ID NO: 16624
  source 1..80: mol_type = other DNA

SEQ ID NO: 90534 - DNA, 80 bp, synthetic construct
  source 1..80: mol_type = other DNA
gcggttccgcgcagacagtcacggaaactcaggcagacccggcgttgggtgcgccaggccggtgtgggagcactttcccc

SEQ ID NO: 90535 - DNA, 80 bp, synthetic construct
  source 1..80: mol_type = other DNA
gagggccagagaggcacggggctcccctgggcacccctcgtcttggggcccctgccctgcctccactcagaatcccacta

SEQ ID NO: 90536 - DNA, 80 bp, synthetic construct
  source 1..80: mol_type = other DNA
cccatgagccgtggagtaggtggggaaggggacatctccaaggaggtgacatcggagcagtcctctaaggagtttggagt

SEQ ID NO: 90537 - DNA, 80 bp, synthetic construct
  source 1..80: mol_type = other DNA
cagagtcagggcaggtgggagaaggggaggttcttggttcagctgctgctgagacagtgaccctggggacagcccaaata

SEQ ID NO: 90538 - DNA, 80 bp, synthetic construct; identical to SEQ ID NO: 16625
  source 1..80: mol_type = other DNA

SEQ ID NO: 90539 - DNA, 80 bp, synthetic construct
  source 1..80: mol_type = other DNA
ggacggagtctctattccaggcaggcaaacactcagcttaattcagggttctgttgattaaaaaaaaaaagtggggtcgg

SEQ ID NO: 90540 - DNA, 80 bp, synthetic construct
  source 1..80: mol_type = other DNA
gcaggtatgtggtggtactgttttccggaatgaagaggaaggggcgggcagaaggcagcgagagctttgtttggggtgtg

SEQ ID NO: 90541 - DNA, 80 bp, synthetic construct
  source 1..80: mol_type = other DNA
aaggggcgagggcaggacaaaggctggcagcaccacacaggagccagcagggaaggggccacagccgggactcagaggag

SEQ ID NO: 90542 - DNA, 80 bp, synthetic construct; identical to SEQ ID NO: 16626
  source 1..80: mol_type = other DNA

SEQ ID NO: 90543 - DNA, 80 bp, synthetic construct
  source 1..80: mol_type = other DNA
gagactggcctaggagactggagagggtagacaccaagccctgcaggaagaagagccaccaagaatgaggcagttcccaa

SEQ ID NO: 90544 - DNA, 80 bp, synthetic construct
  source 1..80: mol_type = other DNA
gtgatgaaaacaacagggattcagtaaatgcattcaagctaaaaaggaagacctcctcccccacttccctcatcaactcc

SEQ ID NO: 90545 - DNA, 80 bp, synthetic construct
  source 1..80: mol_type = other DNA
gaaatgccttcaaacatctgagggaaaaaatgatttcccatccagaattctatacctagtcaaactctcaggtatgagaa

SEQ ID NO: 90546 - DNA, 80 bp, synthetic construct; identical to SEQ ID NO: 16627
  source 1..80: mol_type = other DNA

SEQ ID NO: 90547 - DNA, 80 bp, synthetic construct
  source 1..80: mol_type = other DNA
gtgacagatgcagtaaaaaacaagcaaaacctaaggccatttgtaacccaagggaaaacaagaagatgtaatcataacag

SEQ ID NO: 90548 - DNA, 80 bp, synthetic construct
  source 1..80: mol_type = other DNA
tcttgatcacttctcttccatgttaggcagtcactagataatgtctaaagtgacaaaatttcaaggaacagcaatgtaaa

SEQ ID NO: 90549 - DNA, 80 bp, synthetic construct; identical to SEQ ID NO: 16628
  source 1..80: mol_type = other DNA

SEQ ID NO: 90550 - DNA, 80 bp, synthetic construct
  source 1..80: mol_type = other DNA
ttggccaaggagctctgagaggggaaggtgggtgcatgccaccctggctgggaacagcaggtgtgtggtgaaggggaaag

SEQ ID NO: 90551 - DNA, 80 bp, synthetic construct
  source 1..80: mol_type = other DNA
gagggatctgggctcttccctgggcaggcatcccagagctatgacctgaatgatatcttagatgatctccaaggccccgg

SEQ ID NO: 90552 - DNA, 80 bp, synthetic construct
  source 1..80: mol_type = other DNA
gcaggatggggcctgaatctctcatcaactcacagggtcagcctgggccaggcaggctgggggccagcccaggacctcct

SEQ ID NO: 90553 - DNA, 80 bp, synthetic construct; identical to SEQ ID NO: 16629
  source 1..80: mol_type = other DNA

SEQ ID NO: 90554 - DNA, 80 bp, synthetic construct
  source 1..80: mol_type = other DNA
gagggaagctgcccatgctctctgcgccccattttctggcctctggcatgcagagggcagccctgcctgcttcccagtat

SEQ ID NO: 90555 - DNA, 80 bp, synthetic construct
  source 1..80: mol_type = other DNA
ccatgagaagaagtatgtggcccggcctgccctacaccatcagggggtgcttggaccagtggcggctggaaataacccat

SEQ ID NO: 90556 - DNA, 80 bp, synthetic construct
  source 1..80: mol_type = other DNA
taggcccagatctattcctgatccttctctagacttcagtcagtttcctcttgatgtcctggatggccacaaccatagtg

SEQ ID NO: 90557 - DNA, 80 bp, synthetic construct; identical to SEQ ID NO: 16630
  source 1..80: mol_type = other DNA

SEQ ID NO: 90558 - DNA, 80 bp, synthetic construct
  source 1..80: mol_type = other DNA
gaggcccaggcagacctccacctccaggcagccctgcaggtggacagctgggcctcaggcttaggacctgggacaactgc

SEQ ID NO: 90559 - DNA, 80 bp, synthetic construct
  source 1..80: mol_type = other DNA
agagaagccttggacctggccctgcaaatggaggtaccagagggctgaactagatgagggacttgaaggctcagatgcct

SEQ ID NO: 90560 - DNA, 80 bp, synthetic construct
  source 1..80: mol_type = other DNA
aaccaggatacccacaagctgctcgctcagacgggctctgcgactccacaactcaccttcccctactgcaagatcaggga

SEQ ID NO: 90561 - DNA, 80 bp, synthetic construct
  source 1..80: mol_type = other DNA
ccggtagggcctgtgtggagaaggttgctgatggcatcactgagcggcccagctgtggggtgaaaggcaaggctggggct

SEQ ID NO: 90562 - DNA, 80 bp, synthetic construct; identical to SEQ ID NO: 16631
  source 1..80: mol_type = other DNA

SEQ ID NO: 90563 - DNA, 80 bp, synthetic construct
  source 1..80: mol_type = other DNA
ggagtcgaggcaattagaggccctgtggaagcccctgcacgcaaggggcccacgcgccagggcagaggacatagcccctt

SEQ ID NO: 90564 - DNA, 80 bp, synthetic construct
  source 1..80: mol_type = other DNA
ttgggacctctgtgaagactgcatagatgtgagggagtctcagccttagggtgggcacctgggcgcagctgtcaggcccc

SEQ ID NO: 90565 - DNA, 80 bp, synthetic construct; identical to SEQ ID NO: 16632
  source 1..80: mol_type = other DNA

SEQ ID NO: 90566 - DNA, 80 bp, synthetic construct
  source 1..80: mol_type = other DNA
aaatatgtccagatggggctggagccccagcaacttcctgccctcccagcctgctcccccacctcctcacccccttccca

SEQ ID NO: 90567 - DNA, 80 bp, synthetic construct
  source 1..80: mol_type = other DNA
gtggctgtgtgcatggcatggtggtggcatggtgggagtggtgtggcacatggtgtggcacatggcatggctggggctgg

SEQ ID NO: 90568 - DNA, 80 bp, synthetic construct
  source 1..80: mol_type = other DNA
aggaggaaatcccttgttctccggagctggagagccagaaagagccctgcagcctgggcctcatcatcacacctcgccct

SEQ ID NO: 90569 - DNA, 80 bp, synthetic construct
  source 1..80: mol_type = other DNA
agcagaggcagggaggcgcttgatgtcggatggagaaaggacaggggaggggtgtggggctcagggccccgccaggtgaa

SEQ ID NO: 90570 - DNA, 80 bp, synthetic construct; identical to SEQ ID NO: 16633
  source 1..80: mol_type = other DNA

SEQ ID NO: 90571 - DNA, 80 bp, synthetic construct
  source 1..80: mol_type = other DNA
ccgggggctgggggctgcccgcccgtctgggtcagccgcagctgcaaaccggccctggctgagtcatggggcctccatct

SEQ ID NO: 90572 - DNA, 80 bp, synthetic construct
  source 1..80: mol_type = other DNA
ctgctcccatattcctcacacccagcacagaacccagcatgtctcctgtagacacctgcatataaaccctgactcacaca

SEQ ID NO: 90573 - DNA, 80 bp, synthetic construct
  source 1..80: mol_type = other DNA
tgcaagtctttattgagcacctactgtgtgccaggcagtggtacagcaagggcagaagccccacctccaaggagctgacc

SEQ ID NO: 90574 - DNA, 80 bp, synthetic construct; identical to SEQ ID NO: 16634
  source 1..80: mol_type = other DNA

SEQ ID NO: 90575 - DNA, 80 bp, synthetic construct
  source 1..80: mol_type = other DNA
aggggtcggggacaggtgggaatcgaagtcataggaggcggggcaaaggccacggggaaagggacagagctgctcccaag

SEQ ID NO: 90576 - DNA, 80 bp, synthetic construct
  source 1..80: mol_type = other DNA
caaggcatttctgagggagagggacacgactagtggctcaaatctttagaaatgaggggatgggtctggtagagcacccc

SEQ ID NO: 90577 - DNA, 80 bp, synthetic construct
  source 1..80: mol_type = other DNA
ttcacccaggaggtagagggtgaggccggactgcactccaaggggaggaggtgggagagcacagcctggctgctgccacc

SEQ ID NO: 90578 - DNA, 80 bp, synthetic construct; identical to SEQ ID NO: 16635
  source 1..80: mol_type = other DNA

SEQ ID NO: 90579 - DNA, 80 bp, synthetic construct
  source 1..80: mol_type = other DNA
gtgtctttgaaatgtctttatttggcgggagaacgtcttcatagggtacttataccatgaaaaaccctgtacacagacta

SEQ ID NO: 90580 - DNA, 80 bp, synthetic construct
  source 1..80: mol_type = other DNA
gcgtgtttgggagcaccctgggcagcctctcgagtgtccagagagaggacaccgtcttgagccagcagggacagccaaga

SEQ ID NO: 90581 - DNA, 80 bp, synthetic construct
  source 1..80: mol_type = other DNA
tggcctggggcccaggagagcccgctccgcgctcacagcctccgttcccagacacgcccgggcctgagcccccaggctgc

SEQ ID NO: 90582 - DNA, 80 bp, synthetic construct; identical to SEQ ID NO: 16636
  source 1..80: mol_type = other DNA

SEQ ID NO: 90583 - DNA, 80 bp, synthetic construct
  source 1..80: mol_type = other DNA
gggccggcggcgagggaccctcagccgaggctggtatctcgagaacagcagggatgcctcaaaggttctcgcccagcaag

SEQ ID NO: 90584 - DNA, 80 bp, synthetic construct
  source 1..80: mol_type = other DNA
ggaatatttagggtatacctgctgcacgccaagggcagtttcaggaaggggacctacttctgagaagcaaacaccaccag

SEQ ID NO: 90585 - DNA, 80 bp, synthetic construct
  source 1..80: mol_type = other DNA
tggggctgggggccagggaccggcgcgccgggaagcaggctgcagagtgaggccagggatgggggctgggccagaccaca

SEQ ID NO: 90586 - DNA, 80 bp, synthetic construct; identical to SEQ ID NO: 16637
  source 1..80: mol_type = other DNA

SEQ ID NO: 90587 - DNA, 80 bp, synthetic construct
  source 1..80: mol_type = other DNA
ctgcctggtgtcccctggcctccgggcctctgcgggctcgccagagggggcagctcaggaggcagcggcagagaatcaaa

SEQ ID NO: 90588 - DNA, 80 bp, synthetic construct
  source 1..80: mol_type = other DNA
ctgcctcgggctcttggacagagccgcccctgcctggcgtctgccggcaggaagctcctgaggccgggctagggataggc

SEQ ID NO: 90589 - DNA, 80 bp, synthetic construct
  source 1..80: mol_type = other DNA
agggagtgttgtgccacgtgggcccccctggctctgccactgactccctccatgacctctgtccccaccctgaagttgac

SEQ ID NO: 90590 - DNA, 80 bp, synthetic construct
  source 1..80: mol_type = other DNA
cggcacacatagaccccctgggggctatgacgaggtgagggctgagccgagggagaatccaggaaggcgtgcgggccgag

SEQ ID NO: 90591 - DNA, 80 bp, synthetic construct; identical to SEQ ID NO: 16638
  source 1..80: mol_type = other DNA

SEQ ID NO: 90592 - DNA, 80 bp, synthetic construct
  source 1..80: mol_type = other DNA
aacaatgcagggttggggcaccgacccccgaactgcccagtcaaaaacccatgtataacttttgactccccagaaacttc

SEQ ID NO: 90593 - DNA, 80 bp, synthetic construct
  source 1..80: mol_type = other DNA
tcacgttgagtcagctggggaggaggaggggtggctcttactgtctcgggtgacagaggaggaagaaaatccacgtagaa

SEQ ID NO: 90594 - DNA, 80 bp, synthetic construct
  source 1..80: mol_type = other DNA
attcaaagatttagggggtaaaacacaaatcaaaaaagtattaggaaaaaagattttggcgttggaatggaggaggccct

SEQ ID NO: 90595 - DNA, 80 bp, synthetic construct; identical to SEQ ID NO: 16639
  source 1..80: mol_type = other DNA

SEQ ID NO: 90596 - DNA, 80 bp, synthetic construct
  source 1..80: mol_type = other DNA
gaaattggccggggcctcacttactaattcaacaaacatttgtgcagcgccaactctaccctccatgtatttactgggca

SEQ ID NO: 90597 - DNA, 80 bp, synthetic construct
  source 1..80: mol_type = other DNA
ggacatttcagggagtggtgaaggcttacaggaacatggggagagatgagacgaggaggccgcccaggattttgagctaa

SEQ ID NO: 90598 - DNA, 80 bp, synthetic construct; identical to SEQ ID NO: 16640
  source 1..80: mol_type = other DNA

SEQ ID NO: 90599 - DNA, 80 bp, synthetic construct
  source 1..80: mol_type = other DNA
ggatacaggattcgggccggcttgggaggaatctgagctcccgctgggacacgctgagctgtggggctgttggcctgcag

SEQ ID NO: 90600 - DNA, 80 bp, synthetic construct
  source 1..80: mol_type = other DNA
tccgtcagtgggcagaggctggtaaaagtggatgtcagcagcagggggaagggtctttctttcaccatcttgggcctctc

SEQ ID NO: 90601 - DNA, 80 bp, synthetic construct
  source 1..80: mol_type = other DNA
ggtccccagccgcggcagagcttcctctggctgctcggcagacaacagacaccagggacagagacaaggttgaggatttg

SEQ ID NO: 90602 - DNA, 80 bp, synthetic construct
  source 1..80: mol_type = other DNA
ggggacagggggagcagctggtatgtgtgtgaccatgggtcccagactcagtgccatctgtctccccattaggagaggac

SEQ ID NO: 90603 - DNA, 80 bp, synthetic construct; identical to SEQ ID NO: 16641
  source 1..80: mol_type = other DNA

SEQ ID NO: 90604 - DNA, 80 bp, synthetic construct
  source 1..80: mol_type = other DNA
caggccacaggcatacatgtgcaactgtacgtgcactctaggaatccctaatgatcatggccatcgggtggctcgcagtg

SEQ ID NO: 90605 - DNA, 80 bp, synthetic construct
  source 1..80: mol_type = other DNA
gcggcagaggcaggatctgaccccagacccgctgcggcacacacacgcctgcctgcacgctcccgtgaggaggtgctttg

SEQ ID NO: 90606 - DNA, 80 bp, synthetic construct; identical to SEQ ID NO: 16642
  source 1..80: mol_type = other DNA

SEQ ID NO: 90607 - DNA, 80 bp, synthetic construct
  source 1..80: mol_type = other DNA
aggtgacctttgccctgcgaccctacagagggccctggggaggccctgcctggtctttagacactgcccaacaaggatgc

SEQ ID NO: 90608 - DNA, 80 bp, synthetic construct
  source 1..80: mol_type = other DNA
caaggccgggcaggttctgcaaaaatttcccttgaaagactctttttcaagattttcttttgaaaacaaattcataacca

SEQ ID NO: 90609 - DNA, 80 bp, synthetic construct
  source 1..80: mol_type = other DNA
ctgccttgccttttaatcactatcaaattgcaaataatggtggaggctgagatccccaaaattgatctgtcccagcagtt

SEQ ID NO: 90610 - DNA, 80 bp, synthetic construct
  source 1..80: mol_type = other DNA
tgccagcgagatgaaggcgccctgcccgcagagtggtggggtgggactcttcagggacacgtgctgtgacaagtgcttga

SEQ ID NO: 90611 - DNA, 80 bp, synthetic construct; identical to SEQ ID NO: 16643
  source 1..80: mol_type = other DNA

SEQ ID NO: 90612 - DNA, 80 bp, synthetic construct
  source 1..80: mol_type = other DNA
tggctgagtgcctctctacacggtgccgggactccctgccgggaggagctgtcaccaaagtggctcaggactgagcgctg

SEQ ID NO: 90613 - DNA, 80 bp, synthetic construct
  source 1..80: mol_type = other DNA
aaatgttcatctgtgatgtatttggtgctttaattaatgccaaaccaattgatacccaagctggggcctgcacagttagt

SEQ ID NO: 90614 - DNA, 80 bp, synthetic construct
  source 1..80: mol_type = other DNA
tttcctcatgtgcaccctgaaggctgagagacctcccatgacccctaccaggcatgagcaggtcgtgggactgagagggc

SEQ ID NO: 90615 - DNA, 80 bp, synthetic construct; identical to SEQ ID NO: 16644
  source 1..80: mol_type = other DNA

SEQ ID NO: 90616 - DNA, 80 bp, synthetic construct
  source 1..80: mol_type = other DNA
tttatctgggaaaaataaaacatggggctccctctggcctggaccgtcagacctcggatgtacacctgcccttgtgttca

SEQ ID NO: 90617 - DNA, 80 bp, synthetic construct
  source 1..80: mol_type = other DNA
ccacctagccctctagacagacgctcggccccactcaggcaggcgcccccctctcatctcagcctctcacagcaccctgt

SEQ ID NO: 90618 - DNA, 80 bp, synthetic construct; identical to SEQ ID NO: 16645
  source 1..80: mol_type = other DNA

SEQ ID NO: 90619 - DNA, 80 bp, synthetic construct
  source 1..80: mol_type = other DNA
tctggagccatacgtttccctgaagcagctctgctgttcagcccttatcgcgtgctgatctgtttgcccctcccccacca

SEQ ID NO: 90620 - DNA, 80 bp, synthetic construct
  source 1..80: mol_type = other DNA
ctcactcatgctagggcccccaggtccaacctcctagggagaggggtccccaacctggactccctcacctgccctagtct

SEQ ID NO: 90621 - DNA, 80 bp, synthetic construct
  source 1..80: mol_type = other DNA
gagctctcagatcacctggctgtccactcgtttggggcttctctgctgcctccgcagcactgcgaggcctctgatcacct

SEQ ID NO: 90622 - DNA, 80 bp, synthetic construct; identical to SEQ ID NO: 16646
  source 1..80: mol_type = other DNA

SEQ ID NO: 90623 - DNA, 80 bp, synthetic construct
  source 1..80: mol_type = other DNA
tgcccatgagccagccttgctgaactctgccctctgtccagttctcctccagacacagtagacatagcccccagcctttc

SEQ ID NO: 90624 - DNA, 80 bp, synthetic construct
  source 1..80: mol_type = other DNA
gctcctggccctgagcctgaatgcctgtggacacatatagggactcccagcacgcacgggatggactccaatcggcacac

SEQ ID NO: 90625 - DNA, 80 bp, synthetic construct
  source 1..80: mol_type = other DNA
tgcttcccaccactgactctctcgtctgcctttgtccccgcaggtgacgcagctggaccagaggctggcactcatcaccg

SEQ ID NO: 90626 - DNA, 80 bp, synthetic construct
  source 1..80: mol_type = other DNA
gctgaccgtgcccaggaggggccccgatgaggggtcctgaggaggggatggggctgggggatgggcctgagtgagagggg

SEQ ID NO: 90627 - DNA, 80 bp, synthetic construct; identical to SEQ ID NO: 16647
  source 1..80: mol_type = other DNA

SEQ ID NO: 90628 - DNA, 80 bp, synthetic construct
  source 1..80: mol_type = other DNA
caggcagggcaggaccagcccacgctgactacagggccgccggcaataaaagcccaggagcccatttggagggcctgggc

SEQ ID NO: 90629 - DNA, 80 bp, synthetic construct
  source 1..80: mol_type = other DNA
cttcctagctggagaggagccctgcctctccgcccctgagcccactgtgcgtggggctcccgcctccaacccctcgccca

SEQ ID NO: 90630 - DNA, 80 bp, synthetic construct; identical to SEQ ID NO: 16648
  source 1..80: mol_type = other DNA

SEQ ID NO: 90631 - DNA, 80 bp, synthetic construct; identical to SEQ ID NO: 16649
  source 1..80: mol_type = other DNA

SEQ ID NO: 90632 - DNA, 80 bp, synthetic construct
  source 1..80: mol_type = other DNA
gggggcccttgggaatttatttttttgggtacaaataatcactccatccctgggagacttgtggggtaatggcacggggt

SEQ ID NO: 90633 - DNA, 80 bp, synthetic construct
  source 1..80: mol_type = other DNA
gcccaggatggagtgcagtggcacgatctcagctcactgcaacctccgcctcccgggtttaagcgagtctcctctctcag

SEQ ID NO: 90634 - DNA, 80 bp, synthetic construct
  source 1..80: mol_type = other DNA
cgcccggccgggaccctctcttctaactcggagctgggtgtggggacctccagtcctaaaacaagggatcactcccaccc

SEQ ID NO: 90635 - DNA, 80 bp, synthetic construct
  source 1..80: mol_type = other DNA
acgggggccaccccctcccgcccctgcccccgcccctttggcccgccccccgaattccattgggtgtagtccaacaggcc

SEQ ID NO: 90636 - DNA, 80 bp, synthetic construct; identical to SEQ ID NO: 16650
  source 1..80: mol_type = other DNA

SEQ ID NO: 90637 - DNA, 80 bp, synthetic construct
  source 1..80: mol_type = other DNA
cccggccaccctcaaggcctcggttccttacgaggttgaaacgttgcctcagaatctccccgcccctccttggtctgcag

SEQ ID NO: 90638 - DNA, 80 bp, synthetic construct
  source 1..80: mol_type = other DNA
gttagtgcatgatcctgagttagagctttttaggtggctttaaattagttgcagagagacagcctcgccctagacaacag

SEQ ID NO: 90639 - DNA, 80 bp, synthetic construct
  source 1..80: mol_type = other DNA
taacacaccagtttcctctgggaggccagagagggagggagggtgtaatgaaatacggatgattgttcttttatttttat

SEQ ID NO: 90640 - DNA, 80 bp, synthetic construct; identical to SEQ ID NO: 16651
  source 1..80: mol_type = other DNA

SEQ ID NO: 90641 - DNA, 80 bp, synthetic construct
  source 1..80: mol_type = other DNA
agaatgtgatgtttcctctgttgtcaaggagactacacccctgatgttttcctccagacttctgagagctggtgtgtgtt

SEQ ID NO: 90642 - DNA, 80 bp, synthetic construct
  source 1..80: mol_type = other DNA
caaacgtgtcaatgactcacccaaatttgagtaagggagttggctgctttaacgagccgcagggtgattcccttgtcatt

SEQ ID NO: 90643 - DNA, 80 bp, synthetic construct
  source 1..80: mol_type = other DNA
gataagatccaattctagatgggtcggttgctccttgctttgatgggtgctttgatgggctttattattattattattat

SEQ ID NO: 90644 - DNA, 80 bp, synthetic construct; identical to SEQ ID NO: 16652
  source 1..80: mol_type = other DNA

SEQ ID NO: 90645 - DNA, 80 bp, synthetic construct
  source 1..80: mol_type = other DNA
gtagagatggggtttcaccacgttggccaggctggtctcgaactcctgacctcgtgatccacccgcctcagcctcccaaa

SEQ ID NO: 90646 - DNA, 80 bp, synthetic construct
  source 1..80: mol_type = other DNA
tttcagtagcacagggaaagaaaacatcgaaagcattcaccacctcatttgtgtgctgggggaaaaagcagaaatgtgta

SEQ ID NO: 90647 - DNA, 80 bp, synthetic construct
  source 1..80: mol_type = other DNA
gcaacctctgcctcccaggttcaagcgattcttcggcctcagcctcctgagtagctggaactacaggcgcccgccaccac

SEQ ID NO: 90648 - DNA, 80 bp, synthetic construct; identical to SEQ ID NO: 16653
  source 1..80: mol_type = other DNA

SEQ ID NO: 90649 - DNA, 80 bp, synthetic construct
  source 1..80: mol_type = other DNA
tctcagctcattgcaacttctgcctccggggttcaagggattctcgtgtctcagcctcctgggtagctaggatacgggca

SEQ ID NO: 90650 - DNA, 80 bp, synthetic construct
  source 1..80: mol_type = other DNA
cttttcctgaaattcaaatggtctaatatgaaaaacgccaaccttgcttgaaagaataagaaagaggtgcggtttcgttg

SEQ ID NO: 90651 - DNA, 80 bp, synthetic construct
  source 1..80: mol_type = other DNA
actagctaggccaagggagctcatttggcaggcaactgctgtctggctgcgcctgtggcagtaaaatctgcctttatttt

SEQ ID NO: 90652 - DNA, 80 bp, synthetic construct
  source 1..80: mol_type = other DNA
ttatttatttatttatttattgagatggagttttgctcttgctgcccaggctggagtgcaatggcgcgatctcggctcac

SEQ ID NO: 90653 - DNA, 80 bp, synthetic construct; identical to SEQ ID NO: 16654
  source 1..80: mol_type = other DNA

SEQ ID NO: 90654 - DNA, 80 bp, synthetic construct
  source 1..80: mol_type = other DNA
ggctaagttgtgtattttttgtagagatggggttcaagggattctcgctttgttgcctcggttggtctcaaactcctggg

SEQ ID NO: 90655 - DNA, 80 bp, synthetic construct
  source 1..80: mol_type = other DNA
gagaataatagtcaggggagagcttgaggtccagggaaaggttttgtttttcttcagggaaaggtttttattgttcttta

SEQ ID NO: 90656 - DNA, 80 bp, synthetic construct
  source 1..80: mol_type = other DNA
cccttaagatcttgattgccaacgcctctggcccaactttcctttttatttatcgcaagcctcctggaatctcaattgct

SEQ ID NO: 90657 - DNA, 80 bp, synthetic construct; identical to SEQ ID NO: 16655
  source 1..80: mol_type = other DNA

SEQ ID NO: 90658 - DNA, 80 bp, synthetic construct
  source 1..80: mol_type = other DNA
ctgagcagctgggattacaggcgcccgccaccacgcccggctaatttttgtatttttagtagagacggggtttcaccatg

SEQ ID NO: 90659 - DNA, 80 bp, synthetic construct
  source 1..80: mol_type = other DNA
tacagatcaggaaactgagtcccagaaggatttagtcagttacccaagttgttctagttaaatggcctggaaagccagtg

SEQ ID NO: 90660 - DNA, 80 bp, synthetic construct
  source 1..80: mol_type = other DNA
ggattgcttgagcccaagagtttgagaccagcctgggcaacatagtgagacacctgtctctgcaaaaaataaataaaaag

SEQ ID NO: 90661 - DNA, 80 bp, synthetic construct; identical to SEQ ID NO: 16656
  source 1..80: mol_type = other DNA

SEQ ID NO: 90662 - DNA, 80 bp, synthetic construct
  source 1..80: mol_type = other DNA
attggcaggagagaaaaacatattttcagaagctgcaggcataggaagacttggctggggttgaaggatccacttccaag

SEQ ID NO: 90663 - DNA, 80 bp, synthetic construct
  source 1..80: mol_type = other DNA
tgtcgtctctacattttcctatcagaagcaagtcattaaaagtccagtgccactccaggggagacgaattaggctctgcc

SEQ ID NO: 90664 - DNA, 80 bp, synthetic construct
  source 1..80: mol_type = other DNA
caggcatgagccactgcacctggtcatgtggtcatattttctttttcttttttttttttttttgagacagagtctctgtc

SEQ ID NO: 90665 - DNA, 80 bp, synthetic construct; identical to SEQ ID NO: 16657
  source 1..80: mol_type = other DNA

SEQ ID NO: 90666 - DNA, 80 bp, synthetic construct
  source 1..80: mol_type = other DNA
ctcaaaaacaaaaaacaaacccttgtatgtgattttcctggatagcatctgttacatcttcacaaagataaaaagtcaga

SEQ ID NO: 90667 - DNA, 80 bp, synthetic construct
  source 1..80: mol_type = other DNA
gtattcccaagctactcaggaagctaaggcaggagaatcacttgaacccagaggtggaggtttgcagtgagttgagattg

SEQ ID NO: 90668 - DNA, 80 bp, synthetic construct; identical to SEQ ID NO: 16658
  source 1..80: mol_type = other DNA

SEQ ID NO: 90669 - DNA, 80 bp, synthetic construct
  source 1..80: mol_type = other DNA
ggtgacagagtgagactctgtctgaaaataataataataataatttgttattgcttttattgccttagtttacataggga

SEQ ID NO: 90670 - DNA, 80 bp, synthetic construct
  source 1..80: mol_type = other DNA
gccagcctaggcaacatagtgagaccttgtctctacaaaaaattccaacattagctgggcatggtggcatgtgcctgtag

SEQ ID NO: 90671 - DNA, 80 bp, synthetic construct
  source 1..80: mol_type = other DNA
aatatataaaactaaatgcaggccaagtgtggtggcatatacctataatcacaacactttgggaggctgaggtgggagga

SEQ ID NO: 90672 - DNA, 80 bp, synthetic construct; identical to SEQ ID NO: 16659
  source 1..80: mol_type = other DNA

SEQ ID NO: 90673 - DNA, 80 bp, synthetic construct
  source 1..80: mol_type = other DNA
cttttgatctgatcttcagatacatgattatcttcactgctaaatttgtgttctctggcctctacatttataatttctca

SEQ ID NO: 90674 - DNA, 80 bp, synthetic construct
  source 1..80: mol_type = other DNA
gtttttgtttttttaatggtcagatggatagaacaacacaggttttgtttgttttgttttaacttttaaaaaaattataa

SEQ ID NO: 90675 - DNA, 80 bp, synthetic construct
  source 1..80: mol_type = other DNA
aggctggagtgcaatggcacaatcttggctcaccacaaagtctgcctcccaggttcaagtgattctcctgcctcagcctc

SEQ ID NO: 90676 - DNA, 80 bp, synthetic construct
  source 1..80: mol_type = other DNA
gccaccatgcccagctgtagtacaggttttaatatgctaaatactcttcctttctttattaatgtgcatggaagttctaa

SEQ ID NO: 90677 - DNA, 80 bp, synthetic construct; identical to SEQ ID NO: 16660
  source 1..80: mol_type = other DNA

SEQ ID NO: 90678 - DNA, 80 bp, synthetic construct
  source 1..80: mol_type = other DNA
cgctgagtgccaggatggctctgatgagtcccaggagacgtgctgtgagtcccctttgggcatgatatgcatttattttt

SEQ ID NO: 90679 - DNA, 80 bp, synthetic construct
  source 1..80: mol_type = other DNA
cacgattcttaacccctttttgatgatggcggctggaaaagtggccagtggattttgatgtattcaatcatgaattagga

SEQ ID NO: 90680 - DNA, 80 bp, synthetic construct; identical to SEQ ID NO: 16661
  source 1..80: mol_type = other DNA

SEQ ID NO: 90681 - DNA, 80 bp, synthetic construct
  source 1..80: mol_type = other DNA
tcgatctcctgacctcgtgatccacctgcctccgcctcccaaagtgctggcattacaggcgtgagccaccatgcccggcc

SEQ ID NO: 90682 - DNA, 80 bp, synthetic construct
  source 1..80: mol_type = other DNA
cctaatgtccagtttttaacaagctccatttaaatgccctccgttttgacccataaaggggtaggcttggccgggcacaa

SEQ ID NO: 90683 - DNA, 80 bp, synthetic construct
  source 1..80: mol_type = other DNA
tttcttttcttttttttttttttttgagacggagtcttgctctgttgcccaggctggagtgcagtggcgcgatctcagct

SEQ ID NO: 90684 - DNA, 80 bp, synthetic construct; identical to SEQ ID NO: 16662
  source 1..80: mol_type = other DNA

SEQ ID NO: 90685 - DNA, 80 bp, synthetic construct
  source 1..80: mol_type = other DNA
taggtcaggcacggtggctcacacctgtaatcccagcactttcagaggccgaggcaggaggatcatgaggtcaggagatc

SEQ ID NO: 90686 - DNA, 80 bp, synthetic construct
  source 1..80: mol_type = other DNA
gtgccactgtactccagcctgggcgacagagcaagactctgtctcaaaaaaaaaaaaaaaagtgggattgacattctctt

SEQ ID NO: 90687 - DNA, 80 bp, synthetic construct
  source 1..80: mol_type = other DNA
ctcctgcctcagcctcccgagtagctgggactacaggtgcccgccaccacacccaactaatttttgtatttttagtagag

SEQ ID NO: 90688 - DNA, 80 bp, synthetic construct
  source 1..80: mol_type = other DNA
agtgtctgtcacctgcaaatccggggacttcagctgtgggggccgtgtcaaccgctgcattcctcagttctggaggtgcg

SEQ ID NO: 90689 - DNA, 80 bp, synthetic construct; identical to SEQ ID NO: 16663
  source 1..80: mol_type = other DNA

SEQ ID NO: 90690 - DNA, 80 bp, synthetic construct
  source 1..80: mol_type = other DNA
tagccaagcctcaatgacccacgtaacatgaagggggaaaagccagaaagttctgccaaggagcaaggccaagaatcccg

SEQ ID NO: 90691 - DNA, 80 bp, synthetic construct
  source 1..80: mol_type = other DNA
tttcggatttttaccactgagtgtggagtcctaattaggaaaaaaaccaggctgaccgaaccaaaggaaagcaataaaag

SEQ ID NO: 90692 - DNA, 80 bp, synthetic construct
  source 1..80: mol_type = other DNA
gcgtctgcctgtaatcccagctactcgggaggctgagacaggagaatcacttgaacctgggaggcagaggttgcagtgag

SEQ ID NO: 90693 - DNA, 80 bp, synthetic construct; identical to SEQ ID NO: 16664
  source 1..80: mol_type = other DNA

SEQ ID NO: 90694 - DNA, 80 bp, synthetic construct
  source 1..80: mol_type = other DNA
gtctctattaaaaatacaaaaaaattagccaggcgtggtggcaggtgcctgtaatcccagctacttggaaggctgaggca

SEQ ID NO: 90695 - DNA, 80 bp, synthetic construct
  source 1..80: mol_type = other DNA
tgctcattgctttcttgcaaggtattttcctacctactttctggaataaatctgtctttctgtacttacaactacctttt

SEQ ID NO: 90696 - DNA, 80 bp, synthetic construct
  source 1..80: mol_type = other DNA
agcttcccgagtagctgggattacaggcgtgcaccagcacgcaggctaatttttgtatttttagtagagacggggtttca

SEQ ID NO: 90697 - DNA, 80 bp, synthetic construct; identical to SEQ ID NO: 16665
  source 1..80: mol_type = other DNA

SEQ ID NO: 90698 - DNA, 80 bp, synthetic construct
  source 1..80: mol_type = other DNA
agcaattctataaattgtgctaccatcttgcaggtctcagtttaacagctttacacctattagcgcaccagtgctcatag

SEQ ID NO: 90699 - DNA, 80 bp, synthetic construct
  source 1..80: mol_type = other DNA
acacggtgatggtggtctcggcccatccatccctgcagcccccaagacgtgctcccaggacgagtttcgctgccacgatg

SEQ ID NO: 90700 - DNA, 80 bp, synthetic construct
  source 1..80: mol_type = other DNA
ctgcgaagatggctcggatgagtggccgcagcgctgtaggggtctttacgtgttccaaggggacagtagcccctgctcgg

SEQ ID NO: 90701 - DNA, 80 bp, synthetic construct; identical to SEQ ID NO: 16666
  source 1..80: mol_type = other DNA

SEQ ID NO: 90702 - DNA, 80 bp, synthetic construct
  source 1..80: mol_type = other DNA
agtctcactctgtgatttttttcatctctaaatttcctacatccatatggccaccatgaggccccaggctggccgatggt

SEQ ID NO: 90703 - DNA, 80 bp, synthetic construct
  source 1..80: mol_type = other DNA
tcaagccattctcctgcctcagcctcccaagtagcgcggattacaggcatgtgccaccacctccggctatttttttttct

SEQ ID NO: 90704 - DNA, 80 bp, synthetic construct
  source 1..80: mol_type = other DNA
ccaggttgaagtaaggtggcacgattatggctcactgcggccttgatctccttggctcaagcgatcctctcacttcagcc

SEQ ID NO: 90705 - DNA, 80 bp, synthetic construct; identical to SEQ ID NO: 16667
  source 1..80: mol_type = other DNA

SEQ ID NO: 90706 - DNA, 80 bp, synthetic construct
  source 1..80: mol_type = other DNA
caaatgatttgtgaagccagagggcgcttccctggtcagctctgcaccagctgtgcgtctgtgggcaagtgacttgactt

SEQ ID NO: 90707 - DNA, 80 bp, synthetic construct
  source 1..80: mol_type = other DNA
ccacgcccggctaattttttgtatttttattagagacagggtttctccatgttggccaggctggtcttgaactcctggtc

SEQ ID NO: 90708 - DNA, 80 bp, synthetic construct; identical to SEQ ID NO: 16668
  source 1..80: mol_type = other DNA

SEQ ID NO: 90709 - DNA, 80 bp, synthetic construct
  source 1..80: mol_type = other DNA
atcaaagagtgcggtgagtctcggtgcaggcggcttgcagagtttgtggggagccaggaaagggactgagacatgagtgc

SEQ ID NO: 90710 - DNA, 80 bp, synthetic construct
  source 1..80: mol_type = other DNA
ctcctgagtagctgggattacaggcgcccaccaccaagcccgggtaattttttgtatgtttagtagagatggggtttcac

SEQ ID NO: 90711 - DNA, 80 bp, synthetic construct
  source 1..80: mol_type = other DNA
gaagctgaggcaggcagatcacgagggcaggagattgagaccatcctggctaatacggtgaaaccccatctctactaaaa

SEQ ID NO: 90712 - DNA, 80 bp, synthetic construct; identical to SEQ ID NO: 16669
  source 1..80: mol_type = other DNA

SEQ ID NO: 90713 - DNA, 80 bp, synthetic construct
  source 1..80: mol_type = other DNA
aatttttgtatttttagtagagatggggtttcaccatgttggccaggctggcctcgaactcctgacctcgagtgatctgc

SEQ ID NO: 90714 - DNA, 80 bp, synthetic construct
  source 1..80: mol_type = other DNA
tgggcttgggcatggtggcatactcctgtagtctcagctaatcaggaggctgaggaaggaggatcgcttgggcccaggag

SEQ ID NO: 90715 - DNA, 80 bp, synthetic construct
  source 1..80: mol_type = other DNA
acagaacgcaaaccaatacacgtggctgtgggcccagaaaatgttatttatggacacaaaaattggaatttcatataact

SEQ ID NO: 90716 - DNA, 80 bp, synthetic construct
  source 1..80: mol_type = other DNA
accatcctggccaacacagtgaaaccccgtctctactaaaaatacaaaaaattaaccaggcttggtggcgcgcgtctgta

SEQ ID NO: 90717 - DNA, 80 bp, synthetic construct; identical to SEQ ID NO: 16670
  source 1..80: mol_type = other DNA

SEQ ID NO: 90718 - DNA, 80 bp, synthetic construct
  source 1..80: mol_type = other DNA
gtgcacagttctgtgccattagcaaattcacactgttgtacaacatcacaaccaccatctccagaacttttttttttttt

SEQ ID NO: 90719 - DNA, 80 bp, synthetic construct
  source 1..80: mol_type = other DNA
aatttttgtattttcagtagagactgactgggtttcaccatgttggccaggctggtctcgaactcctgacctcaagtgat

SEQ ID NO: 90720 - DNA, 80 bp, synthetic construct; identical to SEQ ID NO: 16671
  source 1..80: mol_type = other DNA

SEQ ID NO: 90721 - DNA, 80 bp, synthetic construct
  source 1..80: mol_type = other DNA
cttgtacccaggaggcggaggtcgcagtgagccgagatcgtgccattacactccagcctgggcaacaagagtgaaactcc

SEQ ID NO: 90722 - DNA, 80 bp, synthetic construct
  source 1..80: mol_type = other DNA
gaccagtctgcatcccctggccctgcgcagggaccaacgaatgcttggacaacaacggcggctgttcccacgtctgcaat

SEQ ID NO: 90723 - DNA, 80 bp, synthetic construct; identical to SEQ ID NO: 16672
  source 1..80: mol_type = other DNA

SEQ ID NO: 90724 - DNA, 80 bp, synthetic construct
  source 1..80: mol_type = other DNA
tagccgggcttggtggtgcatgcctataatcccagctactcaggaggctgaggcaggagaatcacttgaacctgggaggt

SEQ ID NO: 90725 - DNA, 80 bp, synthetic construct
  source 1..80: mol_type = other DNA
gtcaggtgatgactggggatgacacctggctgtttccttgattacatctcccgagaggctgggctgtctcctggctgcct

SEQ ID NO: 90726 - DNA, 80 bp, synthetic construct
  source 1..80: mol_type = other DNA
tgccagtgtgaggaaggcttccagctggacccccacacgaaggcctgcaaggctgtgggtgagcacgggaaggcggcggg

SEQ ID NO: 90727 - DNA, 80 bp, synthetic construct
  source 1..80: mol_type = other DNA
ctgcatatgtcctagtttttgggaatatccagttaacggaaccctcagccctactggtggaacaggaaccggctttcctt

SEQ ID NO: 90728 - DNA, 80 bp, synthetic construct; identical to SEQ ID NO: 16673
  source 1..80: mol_type = other DNA

SEQ ID NO: 90729 - DNA, 80 bp, synthetic construct
  source 1..80: mol_type = other DNA
ggtttcactgtgttagccaggatggtctcgatctcctgacttcgtgatccgcccacctcggccttccaaagtgctcggat

SEQ ID NO: 90730 - DNA, 80 bp, synthetic construct
  source 1..80: mol_type = other DNA
tattattttttagagacagggtgctgctctatcttccagcctgtagtgcagtgcagcctccatcatagctcgctgcagcc

SEQ ID NO: 90731 - DNA, 80 bp, synthetic construct
  source 1..80: mol_type = other DNA
ctgaaacctccacctcccaggttccagcaattctcctgcctcacccttctgagtagctgggattacaggttccggctacc

SEQ ID NO: 90732 - DNA, 80 bp, synthetic construct
  source 1..80: mol_type = other DNA
tctcattgtcttgcccaggctagccttatgctcctagcctcaagtgatcctcctccctcagcctcccaaagtgctgggat

SEQ ID NO: 90733 - DNA, 80 bp, synthetic construct; identical to SEQ ID NO: 16674
  source 1..80: mol_type = other DNA

SEQ ID NO: 90734 - DNA, 80 bp, synthetic construct
  source 1..80: mol_type = other DNA
tggcgctgatgcccttctctcctcctgcctcagcacccagcttgacagagcccacggcgtctcttcctatgacaccgtca

SEQ ID NO: 90735 - DNA, 80 bp, synthetic construct
  source 1..80: mol_type = other DNA
cgtggtggatcctgttcatgggtgcgtatccacgacgctgagggctgcagagggaatggagggagcaggaaggagcttca

SEQ ID NO: 90736 - DNA, 80 bp, synthetic construct
  source 1..80: mol_type = other DNA
tgtaatcccagctgctcgggaggctgaggcaggagaatcacttgaacctgggagatggaggttgcagtgagccaagacag

SEQ ID NO: 90737 - DNA, 80 bp, synthetic construct; identical to SEQ ID NO: 16675
  source 1..80: mol_type = other DNA

SEQ ID NO: 90738 - DNA, 80 bp, synthetic construct
  source 1..80: mol_type = other DNA
cctttttatttttatttatttatttatttgagatggaatctcgctctgtcgcccagactgtagtgcagtggtgcgatcac

SEQ ID NO: 90739 - DNA, 80 bp, synthetic construct
  source 1..80: mol_type = other DNA
gaccctgtgatccacccgcctcggcctccctaagtgcttggattacaagcgtgagccaccacgcccggccccctttttat

SEQ ID NO: 90740 - DNA, 80 bp, synthetic construct
  source 1..80: mol_type = other DNA
attttttgtatttttagtagagactgggtttcaccatgttggctaggctggtctcgaacccttagcctcaagtaatctgc

SEQ ID NO: 90741 - DNA, 80 bp, synthetic construct; identical to SEQ ID NO: 16676
  source 1..80: mol_type = other DNA

SEQ ID NO: 90742 - DNA, 80 bp, synthetic construct
  source 1..80: mol_type = other DNA
ttatttttagtagagatgaggtctcactatgttgcccaggctggtcttgacctcctagcctcaagcaatcctcctgcctt

SEQ ID NO: 90743 - DNA, 80 bp, synthetic construct
  source 1..80: mol_type = other DNA
agcaatcctcttgatttcagcctcccgggcctggccagcatggtgaaaccccgtctctactaaaaatacaaaaatgtagc

SEQ ID NO: 90744 - DNA, 80 bp, synthetic construct; identical to SEQ ID NO: 16677
  source 1..80: mol_type = other DNA

SEQ ID NO: 90745 - DNA, 80 bp, synthetic construct
  source 1..80: mol_type = other DNA
gggcctgaatggtgtggacatctactcgctggtgactgaaaacattcagtggcccaatggcatcaccctaggtatgttcg

SEQ ID NO: 90746 - DNA, 80 bp, synthetic construct
  source 1..80: mol_type = other DNA
ggagtgcactggcgcaatcgtagctcactgcagcctccacctcccaggctcaagtgatcctcctgcctcaccctcctgag

SEQ ID NO: 90747 - DNA, 80 bp, synthetic construct
  source 1..80: mol_type = other DNA
caccgtacccagcctccttgaagtttttctgacctgcaactcccctacctgcccattggagagggcgtcacaggggaggg

SEQ ID NO: 90748 - DNA, 80 bp, synthetic construct
  source 1..80: mol_type = other DNA
cagcacgtgacctctccttatccacttgtgtgtctagatctcctcagtggccgcctctactgggttgactccaaacttca

SEQ ID NO: 90749 - DNA, 80 bp, synthetic construct; identical to SEQ ID NO: 16678
  source 1..80: mol_type = other DNA

SEQ ID NO: 90750 - DNA, 80 bp, synthetic construct
  source 1..80: mol_type = other DNA
cggctaattttgtatttttagtagagacggagtttctccatgttggtcaggctggtctcgaactcccgacctcaggtgat

SEQ ID NO: 90751 - DNA, 80 bp, synthetic construct
  source 1..80: mol_type = other DNA
cagcctcccaagtagctggaactacaggtgcacaccaccatgcccagctcatttttgtattttttttttttttgagacag

SEQ ID NO: 90752 - DNA, 80 bp, synthetic construct; identical to SEQ ID NO: 16679
  source 1..80: mol_type = other DNA

SEQ ID NO: 90753 - DNA, 80 bp, synthetic construct
  source 1..80: mol_type = other DNA
tcagccttcttagtagctgggattacaagcatgtgccaccacgcccggctgattttgtatttttagtagagatggggttt

SEQ ID NO: 90754 - DNA, 80 bp, synthetic construct
  source 1..80: mol_type = other DNA
tcttggctctcaggggacatttggcaatttctagagattttttggttgtcacaagtcaatggggaagactgttggcattt

SEQ ID NO: 90755 - DNA, 80 bp, synthetic construct
  source 1..80: mol_type = other DNA
agtgtgttcgtccatttgcattgcagtaaaggaatagctgaggccgggtaatttataaagaaaagagatttaaactgggt

SEQ ID NO: 90756 - DNA, 80 bp, synthetic construct
  source 1..80: mol_type = other DNA
aatcccagcactttgggaggccgaggcgggcggatcacgaggtcaggagatcgagaccatcctggctaacacggtgaaac

SEQ ID NO: 90757 - DNA, 80 bp, synthetic construct; identical to SEQ ID NO: 16680
  source 1..80: mol_type = other DNA

SEQ ID NO: 90758 - DNA, 80 bp, synthetic construct
  source 1..80: mol_type = other DNA
tggtgatacttccacaacagcgtgaatctgcttaaggccaccgaactgtgcactcacaaatagtcgagatggtacatttt

SEQ ID NO: 90759 - DNA, 80 bp, synthetic construct
  source 1..80: mol_type = other DNA
aaatacaaaaattagccaggcgtggtggcacatgcctgtagtcccagctacttgagaggctgaagcaggagaatcgcttg

SEQ ID NO: 90760 - DNA, 80 bp, synthetic construct
  source 1..80: mol_type = other DNA
ctggccaacatggtgaaagcccgtctctactaaaaatacaaaaaattagtcaggtatgttggcacacctgtaatcccagc

SEQ ID NO: 90761 - DNA, 80 bp, synthetic construct; identical to SEQ ID NO: 16681
  source 1..80: mol_type = other DNA

SEQ ID NO: 90762 - DNA, 80 bp, synthetic construct
  source 1..80: mol_type = other DNA
accttgaaacctccttgtggaaactctggaatgttctggaaatttctggaatcttctggtatagctgatgatctcgttcc

SEQ ID NO: 90763 - DNA, 80 bp, synthetic construct
  source 1..80: mol_type = other DNA
acatgaggagctgcctcacaggtgtggcacacgccttgtttctgcgtcctgtgtcctccaactgccccctcctgagcctc

SEQ ID NO: 90764 - DNA, 80 bp, synthetic construct; identical to SEQ ID NO: 16682
  source 1..80: mol_type = other DNA

SEQ ID NO: 90765 - DNA, 80 bp, synthetic construct
  source 1..80: mol_type = other DNA
ttggctcactgctacctctcccactgggttcaagcaattctcctgcctcagcctcccaagtagctgggattacaagcatg

SEQ ID NO: 90766 - DNA, 80 bp, synthetic construct; identical to SEQ ID NO: 16683
  source 1..80: mol_type = other DNA

SEQ ID NO: 90767 - DNA, 80 bp, synthetic construct
  source 1..80: mol_type = other DNA
ctgaaaaaaacaaaaaaagaaaaaggaaaaagaaacaatacgatcacaaagtagatattcatagtgtttattttcagtac

SEQ ID NO: 90768 - DNA, 80 bp, synthetic construct
  source 1..80: mol_type = other DNA
ctcagcctccccagtagctgggactataggcacgtcccactacgcccagctaattttttgtattttttagtagagatggg

SEQ ID NO: 90769 - DNA, 80 bp, synthetic construct
  source 1..80: mol_type = other DNA
gcaatggtgtgatctcggctcactgcaacctctgcctcctgggttcaagcaattctcctgcctcagcctcccgagtagct

SEQ ID NO: 90770 - DNA, 80 bp, synthetic construct; identical to SEQ ID NO: 16684
  source 1..80: mol_type = other DNA

SEQ ID NO: 90771 - DNA, 80 bp, synthetic construct
  source 1..80: mol_type = other DNA
ttagccaggatggtctcgatctcctgactttgtgatccgcccgcctcggcctcccaaagtgctgggattacaggcgtgag

SEQ ID NO: 90772 - DNA, 80 bp, synthetic construct
  source 1..80: mol_type = other DNA
ggggcccgccaccacactcggctaatttttttgtatttttagtagagacggggtttcaccatgttagccaggctggtctt

SEQ ID NO: 90773 - DNA, 80 bp, synthetic construct; identical to SEQ ID NO: 16685
  source 1..80: mol_type = other DNA

SEQ ID NO: 90774 - DNA, 80 bp, synthetic construct
  source 1..80: mol_type = other DNA
tgaccaggctagtcttaaactcctggactcactcaagagatcctcctgccttggcctcccaaggtcatttgagactttcg

SEQ ID NO: 90775 - DNA, 80 bp, synthetic construct
  source 1..80: mol_type = other DNA
ccgacctgttcccgacacctcccggctgcctggggccacccctgggctcaccacggtggagatagtgacaatgtctcacc

SEQ ID NO: 90776 - DNA, 80 bp, synthetic construct; identical to SEQ ID NO: 16686
  source 1..80: mol_type = other DNA

SEQ ID NO: 90777 - DNA, 80 bp, synthetic construct
  source 1..80: mol_type = other DNA
agagggagggattcctcagtactcagcttttcacagaggctccaaaaggctaaggaatccagtaacgttttaacacaatt

SEQ ID NO: 90778 - DNA, 80 bp, synthetic construct
  source 1..80: mol_type = other DNA
cggctaattttgtatttttagtacagaaggggcttctctgttggtcaggctggtcgtgaactctcaacctcaggtgagcc

SEQ ID NO: 90779 - DNA, 80 bp, synthetic construct
  source 1..80: mol_type = other DNA
gcagcctcccatgtagagtagctgggattacaggcacccgccaccatgcctggctaattcttgcatttttagtagagatg

SEQ ID NO: 90780 - DNA, 80 bp, synthetic construct; identical to SEQ ID NO: 16687
  source 1..80: mol_type = other DNA

SEQ ID NO: 90781 - DNA, 80 bp, synthetic construct
  source 1..80: mol_type = other DNA
cctcccaggtccaagtgattctcctgcttcagcctcccgagtagctgggattacaggcacccaccaccatacccagctaa

SEQ ID NO: 90782 - DNA, 80 bp, synthetic construct
  source 1..80: mol_type = other DNA
ttttgggacacggtctcactgtgtaccccagactggagtgatagagtgctgtcatggctcactgcagcctcaacctccct

SEQ ID NO: 90783 - DNA, 80 bp, synthetic construct
  source 1..80: mol_type = other DNA
ggcctcccaaagtgctgagattaatgcaatttaaaaaattttttggccaggcctggtggctcatgcctgtattcacaaca

SEQ ID NO: 90784 - DNA, 80 bp, synthetic construct
  source 1..80: mol_type = other DNA
attgcttgaacctgggaggcagaagttgcagtaagccaagatcatgccactggactccagcctcagtgacagagcaaaac

SEQ ID NO: 90785 - DNA, 80 bp, synthetic construct; identical to SEQ ID NO: 16688
  source 1..80: mol_type = other DNA

SEQ ID NO: 90786 - DNA, 80 bp, synthetic construct
  source 1..80: mol_type = other DNA
cctgtaatcccagcactttgggaggctgaggtgggtggatcacctgaggtcaggagtttgagaccagcctggccaacatg

SEQ ID NO: 90787 - DNA, 80 bp, synthetic construct
  source 1..80: mol_type = other DNA
gacaagagtgaaactccattcccctctgcaaagaaaaggaatattatcagattcctaagctttttggctccccctttagt

SEQ ID NO: 90788 - DNA, 80 bp, synthetic construct; identical to SEQ ID NO: 16689
  source 1..80: mol_type = other DNA

SEQ ID NO: 90789 - DNA, 80 bp, synthetic construct
  source 1..80: mol_type = other DNA
ttttttttttttttttggttccagagtagctgaaatctttgttcagttacaagcaggataaaatggaaactgcctgggag

SEQ ID NO: 90790 - DNA, 80 bp, synthetic construct
  source 1..80: mol_type = other DNA
ggtctcaaattcctggcctcaagtgatcctcctgccttggtctactaatgtgctgcgattacaggcatgagccaccgtgc

SEQ ID NO: 90791 - DNA, 80 bp, synthetic construct; identical to SEQ ID NO: 16690
  source 1..80: mol_type = other DNA

SEQ ID NO: 90792 - DNA, 80 bp, synthetic construct
  source 1..80: mol_type = other DNA
ctaatttttgtatttttagtagagacagggtttcaccgtgttggccaggctggtcttgaactcctgacctcaggcaacct

SEQ ID NO: 90793 - DNA, 80 bp, synthetic construct
  source 1..80: mol_type = other DNA
tctcctccctcagcctcccaagtagctgggattacaggtgcatgccaccacggccagctaattttgtatttttagtagag

SEQ ID NO: 90794 - DNA, 80 bp, synthetic construct
  source 1..80: mol_type = other DNA
tgctcattttaataaaatgcacaagtaggttgacaagaatttcacctgcaaccttgtcaaccacctagaataaaagcctc

SEQ ID NO: 90795 - DNA, 80 bp, synthetic construct
  source 1..80: mol_type = other DNA
ctgtttctatcccccacaaaaagaaccttcttaaaccggaattgagtcctacaacctcgataactcacaaataagcccgt

SEQ ID NO: 90796 - DNA, 80 bp, synthetic construct; identical to SEQ ID NO: 16691
  source 1..80: mol_type = other DNA

SEQ ID NO: 90797 - DNA, 80 bp, synthetic construct
  source 1..80: mol_type = other DNA
gacagggaacagccccactggtgtcctttatcacccccacggcctctcctggcttggggctgacagtgacaagatcagac

SEQ ID NO: 90798 - DNA, 80 bp, synthetic construct
  source 1..80: mol_type = other DNA
tctccctgcctcacccatgctcatcctaactcggttaccatcacatctcttttttctttttttcttaaattttaagaaaa

SEQ ID NO: 90799 - DNA, 80 bp, synthetic construct
  source 1..80: mol_type = other DNA
tatttcttaaaaagtcacagccctgtgtgtggctaatcctggacagaaatctagaagaagtcagctacttctggggcgtg

SEQ ID NO: 90800 - DNA, 80 bp, synthetic construct; identical to SEQ ID NO: 16692
  source 1..80: mol_type = other DNA

SEQ ID NO: 90801 - DNA, 80 bp, synthetic construct
  source 1..80: mol_type = other DNA
agatttgcctcttttctgtttgtttgttttgagatggagtctcgctctgtcgcccaggctggagtacagtggctcaacct

SEQ ID NO: 90802 - DNA, 80 bp, synthetic construct
  source 1..80: mol_type = other DNA
tcttgacctcatgatccgcccgcctcagcctcccaaaatgctgggattacaggcgtgagccaccaggcccaggccgcaag

SEQ ID NO: 90803 - DNA, 80 bp, synthetic construct
  source 1..80: mol_type = other DNA
ttccttctatggaagaactggcggcttaagaacatcaacagcatcaactttgacaaccccgtctatcagaagaccacaga

SEQ ID NO: 90804 - DNA, 80 bp, synthetic construct; identical to SEQ ID NO: 16693
  source 1..80: mol_type = other DNA

SEQ ID NO: 90805 - DNA, 80 bp, synthetic construct
  source 1..80: mol_type = other DNA
acaaaaccccgtctctattaaaaatacaaaaaattagccaggcgtgggagtgggcgcctgtaatcccagctactcgggag

SEQ ID NO: 90806 - DNA, 80 bp, synthetic construct
  source 1..80: mol_type = other DNA
cagaacttggggaggttgaggcaggagaatcacctgagctcagagttcaagaccagcctgggcagcacagcaagacccca

SEQ ID NO: 90807 - DNA, 80 bp, synthetic construct
  source 1..80: mol_type = other DNA
agcccttgtctcttaaaaaaaaaaaaaaattcaaagaagggtttccagagggccaggagggaggaagggagaggaggtgt

SEQ ID NO: 90808 - DNA, 80 bp, synthetic construct
  source 1..80: mol_type = other DNA
cactatgcccgggtaatttttgtatttttagtagagacgaggtttcgccatgttgcccagactggtctcgaactcctgac

SEQ ID NO: 90809 - DNA, 80 bp, synthetic construct; identical to SEQ ID NO: 16694
  source 1..80: mol_type = other DNA

SEQ ID NO: 90810 - DNA, 80 bp, synthetic construct
  source 1..80: mol_type = other DNA
ccagccgtgtttcctgaatgctggactgatagtttccgctgtttaccatttgttggcagagacagatggtcagtctggag

SEQ ID NO: 90811 - DNA, 80 bp, synthetic construct
  source 1..80: mol_type = other DNA
caaagacagagaagaccaaagcattgcctgccagagctttgttttatatatttattcatctgggaggcagaacaggcttc

SEQ ID NO: 90812 - DNA, 80 bp, synthetic construct
  source 1..80: mol_type = other DNA
atgaaaggggaggggatgtcaggcccagagaagcaagtggctttcaacacacaacagcagatggcaccaacgggaccccc

SEQ ID NO: 90813 - DNA, 80 bp, synthetic construct; identical to SEQ ID NO: 16695
  source 1..80: mol_type = other DNA

SEQ ID NO: 90814 - DNA, 80 bp, synthetic construct
  source 1..80: mol_type = other DNA
ctacccacttccattcccgtggtctccttgcactttctcagttcagagttgtacactgtgtacatttggcatttgtgtta

SEQ ID NO: 90815 - DNA, 80 bp, synthetic construct
  source 1..80: mol_type = other DNA
cacctagtgcttccacttctatgcaaatgcctccaagccattcacttccccaatcttgtcgttgatgggtatgtgtttaa

SEQ ID NO: 90816 - DNA, 80 bp, synthetic construct
  source 1..80: mol_type = other DNA
ccgtctctactaaaaatacaaaaaattagccgggcgtggtggcgggcacctgtagtcccagctactcgggaggctgaggc

SEQ ID NO: 90817 - DNA, 80 bp, synthetic construct; identical to SEQ ID NO: 16696
  source 1..80: mol_type = other DNA

SEQ ID NO: 90818 - DNA, 80 bp, synthetic construct
  source 1..80: mol_type = other DNA
gagttggagaccaggcctgagcaacaaagcgagatcccatctctacaaaaaccaaaaagttaaaaatcagctgggtacgg

SEQ ID NO: 90819 - DNA, 80 bp, synthetic construct
  source 1..80: mol_type = other DNA
tgaagaccctatttcagaaatacaactataaaaaaataaataaatcctccagtctggatcgtttgacgggacttcaggtt

SEQ ID NO: 90820 - DNA, 80 bp, synthetic construct
  source 1..80: mol_type = other DNA
gtttcggagcacgtaaatgcgtccctgtacagatagtggggattttttgttatgtttgcactttgtatattggttgaaac

SEQ ID NO: 90821 - DNA, 80 bp, synthetic construct
  source 1..80: mol_type = other DNA
ctctgaaatgcctcttctttatgtacaaagattatttgcacgaactggactgtgtgcaacgctttttgggagaatgatgt

SEQ ID NO: 90822 - DNA, 80 bp, synthetic construct; identical to SEQ ID NO: 16697
  source 1..80: mol_type = other DNA

SEQ ID NO: 90823 - DNA, 80 bp, synthetic construct; identical to SEQ ID NO: 16698
  source 1..80: mol_type = other DNA

SEQ ID NO: 90824 - DNA, 80 bp, synthetic construct
  source 1..80: mol_type = other DNA
gccgtccccgctcgctcactgcggctttctctctcgctcccctctccccgctccctgccgcgctcactctccgcttcccc

SEQ ID NO: 90825 - DNA, 80 bp, synthetic construct
  source 1..80: mol_type = other DNA
tggggtcccctcatccctaaacagcaagccatctcccctcgcccgccccccgcccccccagtctcggagatctcagaggc

SEQ ID NO: 90826 - DNA, 80 bp, synthetic construct
  source 1..80: mol_type = other DNA
ttaaccgtttggggtgagggccttgagctttggatatgacaggagggaggagagaccaggatggactgggaacccaggct

SEQ ID NO: 90827 - DNA, 80 bp, synthetic construct
  source 1..80: mol_type = other DNA
cgggtggatcacctgaggtcaggagttcgagaccagcctgaccaacaaggtgaaacctcgtctctactaaaaatacaaaa

SEQ ID NO: 90828 - DNA, 80 bp, synthetic construct; identical to SEQ ID NO: 16699
  source 1..80: mol_type = other DNA

SEQ ID NO: 90829 - DNA, 80 bp, synthetic construct
  source 1..80: mol_type = other DNA
agaacttccataaagagttttataatagtgggtgggtgagccacagtggtaaggtgtccttttctggagtgacttgaaaa

SEQ ID NO: 90830 - DNA, 80 bp, synthetic construct
  source 1..80: mol_type = other DNA
taaactgtttcttggaaagagtgaatttgcacactaatgggagtgctggaacctgagctgaggatctcagaaggtcgggg

SEQ ID NO: 90831 - DNA, 80 bp, synthetic construct; identical to SEQ ID NO: 16700
  source 1..80: mol_type = other DNA

SEQ ID NO: 90832 - DNA, 80 bp, synthetic construct
  source 1..80: mol_type = other DNA
gggagaaagtttttgctttgtggaccaggtgactatctttcacataaatagaaatagcaaacagttgcataggtcttatt

SEQ ID NO: 90833 - DNA, 80 bp, synthetic construct
  source 1..80: mol_type = other DNA
ctaattaaggcaggaggttaatgaccaaagaagccttggggatttggccagggaggaaaacaaagggcagaaacaagtat

SEQ ID NO: 90834 - DNA, 80 bp, synthetic construct
  source 1..80: mol_type = other DNA
ggactccagacaaatttccttcacagcagatgtgagcctggcacctggagggcaaaggatatgtgtgcgaatgcagttag

SEQ ID NO: 90835 - DNA, 80 bp, synthetic construct; identical to SEQ ID NO: 16701
  source 1..80: mol_type = other DNA

SEQ ID NO: 90836 - DNA, 80 bp, synthetic construct
  source 1..80: mol_type = other DNA
ggtatgttgagtgtaactgcatttttaaaacttcatggtgtcaggaggaaagagcaggtctccaaagataaacatgctgc

SEQ ID NO: 90837 - DNA, 80 bp, synthetic construct
  source 1..80: mol_type = other DNA
ccagaccagcctgggcaacatggcaaaaccctgtctctactaaaaatacaaaaattagctgggcatggtggtgcacacct

SEQ ID NO: 90838 - DNA, 80 bp, synthetic construct
  source 1..80: mol_type = other DNA
aaaataaaataaaataagccaaggtcctaacacagtgcctggctatcttaggtgttcaatcagttttagtttcctggccc

SEQ ID NO: 90839 - DNA, 80 bp, synthetic construct; identical to SEQ ID NO: 16702
  source 1..80: mol_type = other DNA

SEQ ID NO: 90840 - DNA, 80 bp, synthetic construct
  source 1..80: mol_type = other DNA
aaaggtgacacagtggagagtccaggattcttgtggaggttgggggaggagtggggtggatgatccagactgtgtgcttg

SEQ ID NO: 90841 - DNA, 80 bp, synthetic construct
  source 1..80: mol_type = other DNA
ggcattacagcatgcaccaccactcctggctaattcttgtacttttagtagagacggggtttcaccatcttgaccaggct

SEQ ID NO: 90842 - DNA, 80 bp, synthetic construct
  source 1..80: mol_type = other DNA
gggatgggggtgcacacctaacacttgcccctccttagccctattctcagaaccctgagggagggagacacaggaggctg

SEQ ID NO: 90843 - DNA, 80 bp, synthetic construct
  source 1..80: mol_type = other DNA
ttttgtggggggacagagtcttgctctgtcacccaggctggagtgcagtggcgccatctcggctcactgcaacctccgcc

SEQ ID NO: 90844 - DNA, 80 bp, synthetic construct; identical to SEQ ID NO: 16703
  source 1..80: mol_type = other DNA

SEQ ID NO: 90845 - DNA, 80 bp, synthetic construct
  source 1..80: mol_type = other DNA
tgtagagatgagatctcgctatgttgcccagtctggtcttgaactcctggcctcaggtgatcctcccacttcagcctccc

SEQ ID NO: 90846 - DNA, 80 bp, synthetic construct
  source 1..80: mol_type = other DNA
gtgattctcctgcctcagcctcctgagtagctgggactacaggcgcgcaccaccacacccagctaatttttgtattttta

SEQ ID NO: 90847 - DNA, 80 bp, synthetic construct; identical to SEQ ID NO: 16704
  source 1..80: mol_type = other DNA

SEQ ID NO: 90848 - DNA, 80 bp, synthetic construct
  source 1..80: mol_type = other DNA
agaaactggcctgcatgacccagagaacatgggtaagcaggattaaatgtaaggacaaaatggtctttggggtagagcac

SEQ ID NO: 90849 - DNA, 80 bp, synthetic construct
  source 1..80: mol_type = other DNA
aggctggagtgcagtagcacaatctcagctcactggagcctctgcctcctggattcaagcaattctcctgcctcagcctc

SEQ ID NO: 90850 - DNA, 80 bp, synthetic construct
  source 1..80: mol_type = other DNA
tgagccaccgcacccagcctattttattttattgattaatttatttgtttgtttgtttattttgagccagggtcttgctc

SEQ ID NO: 90851 - DNA, 80 bp, synthetic construct; identical to SEQ ID NO: 16705
  source 1..80: mol_type = other DNA

SEQ ID NO: 90852 - DNA, 80 bp, synthetic construct
  source 1..80: mol_type = other DNA
agcctcctgagtacctgggattacaggcgcgcacccccacgcccagctaatttttgtatttttagtagagacggggtttt

SEQ ID NO: 90853 - DNA, 80 bp, synthetic construct
  source 1..80: mol_type = other DNA
gttgggggagagaggtcactgtgagtccttctgttgttgtggatctgatctccaagggctttgcaggctcagcctaggtt

SEQ ID NO: 90854 - DNA, 80 bp, synthetic construct
  source 1..80: mol_type = other DNA
cttagggctggacccaggcgtccaggaggcgggtgatactggagctgtgacagttggtccccagattccacacccagtgg

SEQ ID NO: 90855 - DNA, 80 bp, synthetic construct; identical to SEQ ID NO: 16706
  source 1..80: mol_type = other DNA

SEQ ID NO: 90856 - DNA, 80 bp, synthetic construct
  source 1..80: mol_type = other DNA
tcagagctggactagaagttgaatgaatgaatgagtaggggaatgagtgaatgaatagttcatcagttacctaatgcact

SEQ ID NO: 90857 - DNA, 80 bp, synthetic construct
  source 1..80: mol_type = other DNA
ctgttctggtcttttcagacttgatgtaattgtcttcacaattctgtgaagatggacttggtgtctctgcttcacatgaa

SEQ ID NO: 90858 - DNA, 80 bp, synthetic construct
  source 1..80: mol_type = other DNA
ggagtggttcctggatgaagtagatctgaagggtgggtgaggttcatttgaaaggcgagaattggaggcatgtctggaag

SEQ ID NO: 90859 - DNA, 80 bp, synthetic construct
  source 1..80: mol_type = other DNA
ttccgcttgcccctggcttctggcatccaacacatgggggataatgatgctaccagtcgtttcctgactcgggacgaaca

SEQ ID NO: 90860 - DNA, 80 bp, synthetic construct; identical to SEQ ID NO: 16707
  source 1..80: mol_type = other DNA

SEQ ID NO: 90861 - DNA, 80 bp, synthetic construct
  source 1..80: mol_type = other DNA
tcaggaggctgaggcaggagaatctcttgaacctgggagacagaggttgcggtaagccaagatcgcgccactgcactcca

SEQ ID NO: 90862 - DNA, 80 bp, synthetic construct
  source 1..80: mol_type = other DNA
ctgatactctactggggaggaaggcagacagtagtcaagtagataatgtactttctggtagtgatcatcactgcaaagaa

SEQ ID NO: 90863 - DNA, 80 bp, synthetic construct
  source 1..80: mol_type = other DNA
agtggcatgattttggctcactgcaacctccgcctcctgggttcaagccattctcctgcctcggcctccctagtagctgg

SEQ ID NO: 90864 - DNA, 80 bp, synthetic construct; identical to SEQ ID NO: 16708
  source 1..80: mol_type = other DNA

SEQ ID NO: 90865 - DNA, 80 bp, synthetic construct
  source 1..80: mol_type = other DNA
tggatcacttgaggtcgggagtttgagaccagcctgggcaatatggcaaaaccccgtctctacaaaaaatacaaaaatta

SEQ ID NO: 90866 - DNA, 80 bp, synthetic construct; identical to SEQ ID NO: 16709
  source 1..80: mol_type = other DNA

SEQ ID NO: 90867 - DNA, 80 bp, synthetic construct
  source 1..80: mol_type = other DNA
ccgcctcctgggttcaagcaattctcctgcctcagcctcccaagtagctaggattacagatgcctgccaccacgctcagc

SEQ ID NO: 90868 - DNA, 80 bp, synthetic construct
  source 1..80: mol_type = other DNA
ttggcctgtgctatcatcatctgctattccctgacccttcacctggctaatgtttgttcatcttgcaggactcaatttat

SEQ ID NO: 90869 - DNA, 80 bp, synthetic construct
  source 1..80: mol_type = other DNA
ctctcacctcagcctcccaagtagctgggattacaggcgtgcgccaccatgctcagctaatttttgtaatttttttagag

SEQ ID NO: 90870 - DNA, 80 bp, synthetic construct
  source 1..80: mol_type = other DNA
actttttcctagaaatctcccctggtcacttctggatatcccttacaattcatcatgctctattgtaactgtatgtttac

SEQ ID NO: 90871 - DNA, 80 bp, synthetic construct; identical to SEQ ID NO: 16710
  source 1..80: mol_type = other DNA

SEQ ID NO: 90872 - DNA, 80 bp, synthetic construct
  source 1..80: mol_type = other DNA
tgaggtttagtatatcctgtcactgggttcctccactctccagcacctggtctggggccgtacacagcaggaactccata

SEQ ID NO: 90873 - DNA, 80 bp, synthetic construct
  source 1..80: mol_type = other DNA
gcacacactgttccctctgcctcgaaccctctctctcattttggctatctcccactcatccttcagacctgagctgaagt

SEQ ID NO: 90874 - DNA, 80 bp, synthetic construct
  source 1..80: mol_type = other DNA
catgcctggctaatttttgtatttttagtagagacagggttttaccatattggccagggctttggcctgtgctatctcaa

SEQ ID NO: 90875 - DNA, 80 bp, synthetic construct; identical to SEQ ID NO: 16711
  source 1..80: mol_type = other DNA

SEQ ID NO: 90876 - DNA, 80 bp, synthetic construct
  source 1..80: mol_type = other DNA
gagattacaggcgtttgtcaccacaaccagctaatttttttttttttttttgagaacggagtcttgctctgtcgcccagg

SEQ ID NO: 90877 - DNA, 80 bp, synthetic construct
  source 1..80: mol_type = other DNA
tggccaggctggtcttgaactcctgacctcaggtgatctgtcctcctcagcctcccaaagtgatgggattacaggcgtta

SEQ ID NO: 90878 - DNA, 80 bp, synthetic construct
  source 1..80: mol_type = other DNA
atgaaaggaataaaatgaccatgtgatactgaatgagtcactccccatctcagtttcctcttctcaagtgattctcctgc

SEQ ID NO: 90879 - DNA, 80 bp, synthetic construct
  source 1..80: mol_type = other DNA
tctcaaagtgctgggattacaggcgtgagccactgcgcccggtgtccaagacacttctaacgccaacatccttgtactag

SEQ ID NO: 90880 - DNA, 80 bp, synthetic construct; identical to SEQ ID NO: 16712
  source 1..80: mol_type = other DNA

SEQ ID NO: 90881 - DNA, 80 bp, synthetic construct
  source 1..80: mol_type = other DNA
tgcctcctttccctctgaagtcttgattttctccctggcttttctccaccttctgggtgttcctttttggccttctttgc

SEQ ID NO: 90882 - DNA, 80 bp, synthetic construct
  source 1..80: mol_type = other DNA
cacatctctgaacctgttttcccatctataaagtgaagctaatagtagcaattacctcatgggattgttgtgcaattagt

SEQ ID NO: 90883 - DNA, 80 bp, synthetic construct; identical to SEQ ID NO: 16713
  source 1..80: mol_type = other DNA

SEQ ID NO: 90884 - DNA, 80 bp, synthetic construct
  source 1..80: mol_type = other DNA
ctccccttggccacctcccttgcgcttgctcatctcatgcccaggcgctgagggttctcagctggggcaggagagatggg

SEQ ID NO: 90885 - DNA, 80 bp, synthetic construct
  source 1..80: mol_type = other DNA
ctgatgaggctgctattctcttgaggacatgaaatgagaggcggtgaagtcagtcagtgagtcaaaagctgagatctagg

SEQ ID NO: 90886 - DNA, 80 bp, synthetic construct
  source 1..80: mol_type = other DNA
cccgcaagcagtgattcaccacaggaaagggaaggctgcagagtgacctggtgctggggaccggatgccttgtggctcct

SEQ ID NO: 90887 - DNA, 80 bp, synthetic construct; identical to SEQ ID NO: 16714
  source 1..80: mol_type = other DNA

SEQ ID NO: 90888 - DNA, 80 bp, synthetic construct
  source 1..80: mol_type = other DNA
cccagaggagatggaccccaaggcccctagcctccctgcctgccctgccctatgcgagcccaacactgatacggaggaaa

SEQ ID NO: 90889 - DNA, 80 bp, synthetic construct
  source 1..80: mol_type = other DNA
gcgtgtgcgtgtgtgcgtgcgtgtgtgtgtgtgtgtgatcatcatgtctacaccacccaccaccatcacccctatcctcc

SEQ ID NO: 90890 - DNA, 80 bp, synthetic construct
  source 1..80: mol_type = other DNA
atctattcccttgtagtagaagggatggaggttggaaagaccttagaaatcttccagtctggttctcttgttttgaaggt

SEQ ID NO: 90891 - DNA, 80 bp, synthetic construct; identical to SEQ ID NO: 16715
  source 1..80: mol_type = other DNA

SEQ ID NO: 90892 - DNA, 80 bp, synthetic construct
  source 1..80: mol_type = other DNA
gcccgactgtctaccatgttacatcaggaataactgaggtgagatcatgggaaagacttctcacatatgtatgttagggg

SEQ ID NO: 90893 - DNA, 80 bp, synthetic construct
  source 1..80: mol_type = other DNA
tcagttgtcagggaaggcaagtcatgtctagtgggactgagatagagctaccctgcagtgcaaaggtaaggggtaagcca

SEQ ID NO: 90894 - DNA, 80 bp, synthetic construct
  source 1..80: mol_type = other DNA
tctggctttctaatcgggcttaattgcctcctcatgatgggcaattaggaagctgcatcaattagcacagggaggtgaca

SEQ ID NO: 90895 - DNA, 80 bp, synthetic construct
  source 1..80: mol_type = other DNA
gcaattaggccttagttccttagctcctaggagctactagccttctaggcctggattgtggcttttctggccttggttta

SEQ ID NO: 90896 - DNA, 80 bp, synthetic construct; identical to SEQ ID NO: 16716
  source 1..80: mol_type = other DNA

SEQ ID NO: 90897 - DNA, 80 bp, synthetic construct
  source 1..80: mol_type = other DNA
tggtggatcatctgagcttgggagttcaagaccagcctggccaacatggcgaaaaccctacagagtctactaaaaataca

SEQ ID NO: 90898 - DNA, 80 bp, synthetic construct
  source 1..80: mol_type = other DNA
atgcccatgtgtcaccccagatcaattactaatcaaaatatccaagactttgggcatttgcagttttgaaagcccccttc

SEQ ID NO: 90899 - DNA, 80 bp, synthetic construct
  source 1..80: mol_type = other DNA
agtgtggctggaagcaggttcctctccactcacttagagggagttctcctctataaaatgagaataatgaccttgccatg

SEQ ID NO: 90900 - DNA, 80 bp, synthetic construct; identical to SEQ ID NO: 16717
  source 1..80: mol_type = other DNA

SEQ ID NO: 90901 - DNA, 80 bp, synthetic construct
  source 1..80: mol_type = other DNA
gccaaggaatggaaagagcctagaacaggtcctgacacatggtgagtgctctctaaacagtagctctccttactattgtt

SEQ ID NO: 90902 - DNA, 80 bp, synthetic construct
  source 1..80: mol_type = other DNA
tagagcacatcgaggttgctggttggtgagggggctatgatgaggatactctactcaaacatgtattgagaaccttttgt

SEQ ID NO: 90903 - DNA, 80 bp, synthetic construct
  source 1..80: mol_type = other DNA
gtggcacttttagctgagcctggatgatgagtaggagttgatcagagggtaaagtaaatgccatgtctggaaaaattagt

SEQ ID NO: 90904 - DNA, 80 bp, synthetic construct; identical to SEQ ID NO: 16718
  source 1..80: mol_type = other DNA

SEQ ID NO: 90905 - DNA, 80 bp, synthetic construct
  source 1..80: mol_type = other DNA
aaataaaaataattagttggttgtggttgcatgaacctggtcccagctactcaggaggctgaggcaggaggatcacttga

SEQ ID NO: 90906 - DNA, 80 bp, synthetic construct
  source 1..80: mol_type = other DNA
cactgtgggaaggagaaacaatgggagcagaggcaagggtggaggcagagagactggttgggaggctgctgcagttaccc

SEQ ID NO: 90907 - DNA, 80 bp, synthetic construct
  source 1..80: mol_type = other DNA
gttggtggtgagcagaccagagagctggaggtagaacatagaacagataacaattctggaggtaggaaccacaaggactt

SEQ ID NO: 90908 - DNA, 80 bp, synthetic construct; identical to SEQ ID NO: 16719
  source 1..80: mol_type = other DNA

SEQ ID NO: 90909 - DNA, 80 bp, synthetic construct
  source 1..80: mol_type = other DNA
cagtggagtggaggtgagtgaattcaggggtgttcctcacttcccccatcctggacttctaggctcagttgtggccccag

SEQ ID NO: 90910 - DNA, 80 bp, synthetic construct
  source 1..80: mol_type = other DNA
agggctcattcttgtcctaaaactgggtcttcaagatggtttggtttaggtggtgtgaatgaacccttccatctccaccc

SEQ ID NO: 90911 - DNA, 80 bp, synthetic construct
  source 1..80: mol_type = other DNA
tggtttctgtgggaatgtgacttgaattaactcttgggagaaaaatcacagaaatcaggaaaggggggccatggggaggg

SEQ ID NO: 90912 - DNA, 80 bp, synthetic construct; identical to SEQ ID NO: 16720
  source 1..80: mol_type = other DNA

SEQ ID NO: 90913 - DNA, 80 bp, synthetic construct
  source 1..80: mol_type = other DNA
aggaagtcctgggctctaggaacctccttcctgcccccacagcttcctctttgtgtcctgcctaccagtccttcccgccc

SEQ ID NO: 90914 - DNA, 80 bp, synthetic construct
  source 1..80: mol_type = other DNA
cctctgtctgggactcctctaacagctgtggggagggtgccaggatccccattttgcatacagtagctgaggctcagcca

SEQ ID NO: 90915 - DNA, 80 bp, synthetic construct
  source 1..80: mol_type = other DNA
aaggaaggggtcctggactagctctcctgtgtcccctctccgggggctgccccctcccagtttctgactaatcctttcca

SEQ ID NO: 90916 - DNA, 80 bp, synthetic construct
  source 1..80: mol_type = other DNA
ccccttctctggctccaccagccctgctcccctgccctttcgaagcctctagtggagtcactcctttccttccccgaacc

SEQ ID NO: 90917 - DNA, 80 bp, synthetic construct; identical to SEQ ID NO: 16721
  source 1..80: mol_type = other DNA

SEQ ID NO: 90918 - DNA, 80 bp, synthetic construct
  source 1..80: mol_type = other DNA
cctgcagctactggcctccctcctccttcctccttgcttagcaactgttgtcgtctggtaaatatttgccccaacaggat

SEQ ID NO: 90919 - DNA, 80 bp, synthetic construct
  source 1..80: mol_type = other DNA
gtctcccttttactctccttcatccccactcatcctctgtgcccaggtctctctcgtccatcctccactcctggatccat

SEQ ID NO: 90920 - DNA, 80 bp, synthetic construct; identical to SEQ ID NO: 16722
  source 1..80: mol_type = other DNA

SEQ ID NO: 90921 - DNA, 80 bp, synthetic construct
  source 1..80: mol_type = other DNA
tttagcctgtcttcctgtccttcccagccagacccctctcatcctcctcccccagtggttttctcattacctgtcactga

SEQ ID NO: 90922 - DNA, 80 bp, synthetic construct
  source 1..80: mol_type = other DNA
taatgtggatctagaagggaggtggttgggctgcacgatgccttaagactcctcccagctctgaagttctacttctaggc

SEQ ID NO: 90923 - DNA, 80 bp, synthetic construct
  source 1..80: mol_type = other DNA
ccaccctcctggctgggagttcactttcctagttgacctcctggcctgagggccagaggagagctttcaacggggacctt

SEQ ID NO: 90924 - DNA, 80 bp, synthetic construct; identical to SEQ ID NO: 16723
  source 1..80: mol_type = other DNA

SEQ ID NO: 90925 - DNA, 80 bp, synthetic construct
  source 1..80: mol_type = other DNA
aaaaaacaaaaaaatagcggggcgtggtggctggctcctgtagtcccaggtactagggaggctgaggccggagaatggcg

SEQ ID NO: 90926 - DNA, 80 bp, synthetic construct
  source 1..80: mol_type = other DNA
caggctccacaaacatttggcccacactgggttgagggtgagggagaaagggaatccttttctgcctcacttcctggaaa

SEQ ID NO: 90927 - DNA, 80 bp, synthetic construct
  source 1..80: mol_type = other DNA
ccagccgtcaggccctcgctgcccgcctgcggggtgtggagtggggagaacagccccgcctgaatccagtccgactaccc

SEQ ID NO: 90928 - DNA, 80 bp, synthetic construct; identical to SEQ ID NO: 16724
  source 1..80: mol_type = other DNA

SEQ ID NO: 90929 - DNA, 80 bp, synthetic construct
  source 1..80: mol_type = other DNA
agactgtaggattttgctgttggattgggttccttgggatctgggtcgaagagggaaagagtatatttaacctggaggca

SEQ ID NO: 90930 - DNA, 80 bp, synthetic construct
  source 1..80: mol_type = other DNA
gtctcctcagctgtaatatgcagataatggtgcttgcctgtgcacctcaaagaaatttgagaaggctaaggtagtaacct

SEQ ID NO: 90931 - DNA, 80 bp, synthetic construct
  source 1..80: mol_type = other DNA
acatctgtccagtgtggctgccctgtctcccatggcagcgtggcactgagctgcagtgctgtcttggaggttttgaccct

SEQ ID NO: 90932 - DNA, 80 bp, synthetic construct; identical to SEQ ID NO: 16725
  source 1..80: mol_type = other DNA

SEQ ID NO: 90933 - DNA, 80 bp, synthetic construct
  source 1..80: mol_type = other DNA
ttctttttttttgagatggagtctcactctgtcacccaggctggagtgcagtgacatgatctcctgcctcagctccctga

SEQ ID NO: 90934 - DNA, 80 bp, synthetic construct
  source 1..80: mol_type = other DNA
tgcagataataatacctacctcataagattgaggtgaagattaaatgggatcacctccatatagcccctagcctggttgc

SEQ ID NO: 90935 - DNA, 80 bp, synthetic construct
  source 1..80: mol_type = other DNA
actgtcaaggttataactatcacctgcacatgagtgactcagcacttcaatcattgtttaataccctgtagtcaaaggat

SEQ ID NO: 90936 - DNA, 80 bp, synthetic construct; identical to SEQ ID NO: 16726
  source 1..80: mol_type = other DNA

SEQ ID NO: 90937 - DNA, 80 bp, synthetic construct
  source 1..80: mol_type = other DNA
ctactcgggaggctgaggcaggagaatcgcttgaattcaggaggtgcaggttgcagtgagctgagatcgtgccattgcac

SEQ ID NO: 90938 - DNA, 80 bp, synthetic construct
  source 1..80: mol_type = other DNA
gaatggaagtgctactggcctaaagtcgggagaggctagggatgttacaaaccatctcagagtacaaagaaccttctctg

SEQ ID NO: 90939 - DNA, 80 bp, synthetic construct
  source 1..80: mol_type = other DNA
taatgcaagtacctagtgcctaataataaaggtagtccataaatattccctacacgaatggttcttagcatgcctctgga

SEQ ID NO: 90940 - DNA, 80 bp, synthetic construct
  source 1..80: mol_type = other DNA
ccccatcccagcaccaggcccctgcctccacctcccacttctcccttcccgtctctcttccccctctttccagccttacc

SEQ ID NO: 90941 - DNA, 80 bp, synthetic construct; identical to SEQ ID NO: 16727
  source 1..80: mol_type = other DNA

SEQ ID NO: 90942 - DNA, 80 bp, synthetic construct
  source 1..80: mol_type = other DNA
aaagcagggaaataatttccaacccatgaggttgttgtatggacccagttgagaatgtatgaaaacatgcaacaactata

SEQ ID NO: 90943 - DNA, 80 bp, synthetic construct
  source 1..80: mol_type = other DNA
gctggagtgcagtagtgcaatcacagctcactgcagccttgacctcccaagctcaggtgatcctcccatcttagcctcct

SEQ ID NO: 90944 - DNA, 80 bp, synthetic construct
  source 1..80: mol_type = other DNA
agccaccatgctcagcctctgctttatatttttatttccatagctcctaccgtgttctaacaaactataactttgtcttt

SEQ ID NO: 90945 - DNA, 80 bp, synthetic construct; identical to SEQ ID NO: 16728
  source 1..80: mol_type = other DNA

SEQ ID NO: 90946 - DNA, 80 bp, synthetic construct
  source 1..80: mol_type = other DNA
ggtgggaggatcacttgactccaggagttcaagaccaacttggcaacatagtgagacccccatctcttaaaaaaataaag

SEQ ID NO: 90947 - DNA, 80 bp, synthetic construct
  source 1..80: mol_type = other DNA
ataatcccagcaacccttgaggctgaggcaggcaaatcgcttgaacatggaaggcagaggttgcagtgagccgagattgt

SEQ ID NO: 90948 - DNA, 80 bp, synthetic construct
  source 1..80: mol_type = other DNA
acactaggatgctataagaacacagaggagcccccccacccaatcaaggtcattggtcttcaagataaagtgcctaggcc

SEQ ID NO: 90949 - DNA, 80 bp, synthetic construct
  source 1..80: mol_type = other DNA
cagctactcaggaggctaaggcaggagaagcgcttgaacctgggaggcagaggttgcagtgagctgagattgtactgttg

SEQ ID NO: 90950 - DNA, 80 bp, synthetic construct; identical to SEQ ID NO: 16729
  source 1..80: mol_type = other DNA

SEQ ID NO: 90951 - DNA, 80 bp, synthetic construct
  source 1..80: mol_type = other DNA
atagccactctacccatactacaggtaagaaaactgaggtccagagaattcagtagcagatctagcatcactcagcagtt

SEQ ID NO: 90952 - DNA, 80 bp, synthetic construct
  source 1..80: mol_type = other DNA
ggattgaatattcaggataaagtttcactttgaagttcagatttaggattgaggccattttgatggtggtcgcagggaac

SEQ ID NO: 90953 - DNA, 80 bp, synthetic construct
  source 1..80: mol_type = other DNA
ttggaaggctgaagtgaggatcatttggggccaggagttttagaccaaattgggcaacatagcaaggctccgtctctatc

SEQ ID NO: 90954 - DNA, 80 bp, synthetic construct; identical to SEQ ID NO: 16730
  source 1..80: mol_type = other DNA

SEQ ID NO: 90955 - DNA, 80 bp, synthetic construct
  source 1..80: mol_type = other DNA
gctgagggtgggtgccacgccctgggggagagaagccatattctgggccccctcatccgggtgcatccctagtgctcacc

SEQ ID NO: 90956 - DNA, 80 bp, synthetic construct
  source 1..80: mol_type = other DNA
tgagggaagccctgatatcttggagctgtacaaggtagcaacataatttgatttccctggttgctcatcggaggataagc

SEQ ID NO: 90957 - DNA, 80 bp, synthetic construct
  source 1..80: mol_type = other DNA
gagaccagtttggccaacatggtgaaaccccatctctactaaaaataaaaataaaaaaaaaattagctgggcttggtggc

SEQ ID NO: 90958 - DNA, 80 bp, synthetic construct; identical to SEQ ID NO: 16731
  source 1..80: mol_type = other DNA

SEQ ID NO: 90959 - DNA, 80 bp, synthetic construct
  source 1..80: mol_type = other DNA
acctggccagagaggaaagtagagatgagtatggtgctggcctttgcagccagcaaggctgtggggtctttgctgttcct

SEQ ID NO: 90960 - DNA, 80 bp, synthetic construct
  source 1..80: mol_type = other DNA
agaaatctgggacctagtgtcttggcaacgtaatgaatgcatgcacagctctggtatctgttttaaattatccattaaaa

SEQ ID NO: 90961 - DNA, 80 bp, synthetic construct; identical to SEQ ID NO: 16732
  source 1..80: mol_type = other DNA

SEQ ID NO: 90962 - DNA, 80 bp, synthetic construct
  source 1..80: mol_type = other DNA
acgtgtggaggggggttggggtgactcactattactactgggaggacagggggagccagtggtggaagaagggtgagtca

SEQ ID NO: 90963 - DNA, 80 bp, synthetic construct
  source 1..80: mol_type = other DNA
ctgaggcaatgggggcaagcttggagccgacagtgctgagcaggcaggagccaagagaggggaagcttgagcctcacgca

SEQ ID NO: 90964 - DNA, 80 bp, synthetic construct
  source 1..80: mol_type = other DNA
ccccggcgtcggtgactcagtgttcgcgggagcgccgcacctacaccagccaacccagatcccgaggtccgacagcgccc

SEQ ID NO: 90965 - DNA, 80 bp, synthetic construct
  source 1..80: mol_type = other DNA
ccagcggcgcgccacccgcagcggggcgcaggccagctccactccgctgtcgcccacccgcatcacccggctgcaggaga

SEQ ID NO: 90966 - DNA, 80 bp, synthetic construct; identical to SEQ ID NO: 16733
  source 1..80: mol_type = other DNA

SEQ ID NO: 90967 - DNA, 80 bp, synthetic construct
  source 1..80: mol_type = other DNA
gcccccagcgggtgactggcagtgtcaaggggaattgtcaagacaggacagagagggaagtggtggtctctgggagaggg

SEQ ID NO: 90968 - DNA, 80 bp, synthetic construct
  source 1..80: mol_type = other DNA
aggacacatcggagtggcagaaagggtcctgttagaactttgttagcgggcttggcactgtgctagctttgcccaagctg

SEQ ID NO: 90969 - DNA, 80 bp, synthetic construct
  source 1..80: mol_type = other DNA
ggaagttctccctcactctgccactctgcgtgtctgggaccttccttgggctctgacaggcccaccaaaagagctccggg

SEQ ID NO: 90970 - DNA, 80 bp, synthetic construct
  source 1..80: mol_type = other DNA
ttcgagggttgggggcactgtccttccctccttggggtgagccactttcattttcccagcggggccaggcagtctttgct

SEQ ID NO: 90971 - DNA, 80 bp, synthetic construct; identical to SEQ ID NO: 16734
  source 1..80: mol_type = other DNA

SEQ ID NO: 90972 - DNA, 80 bp, synthetic construct
  source 1..80: mol_type = other DNA
ggagtgcaatggcacaatctcggctcactgcaacctccgcctcccaggttcaagtgattctcctgcctcagcctcccgaa

SEQ ID NO: 90973 - DNA, 80 bp, synthetic construct
  source 1..80: mol_type = other DNA
cacgctgggcccatcacccttctttctgaagagtcaatggaagttgtgtgtaggaagacaggcttaacggtttttttttg

SEQ ID NO: 90974 - DNA, 80 bp, synthetic construct
  source 1..80: mol_type = other DNA
ttttttttttaatttttagtagagatggggtttcaccatgttggctaggctggtctcaaactcctgacttcaaatgatcc

SEQ ID NO: 90975 - DNA, 80 bp, synthetic construct
  source 1..80: mol_type = other DNA
agtgtgacctcaggtcactgcaacctctgcctcccaggttcaagccatgctcctgcctcagcctcccaagtagctgggac

SEQ ID NO: 90976 - DNA, 80 bp, synthetic construct; identical to SEQ ID NO: 16735
  source 1..80: mol_type = other DNA

SEQ ID NO: 90977 - DNA, 80 bp, synthetic construct
  source 1..80: mol_type = other DNA
tgttgcccacagtcttgaactcctgggttcattctgctgaaagagaccacacctgtccttttctttatttttattatatt

SEQ ID NO: 90978 - DNA, 80 bp, synthetic construct
  source 1..80: mol_type = other DNA
ttttttttttttttttttttttgctttttgtttgtaaagatggaaacttgctatgttgctcagctggttccgaagttttg

SEQ ID NO: 90979 - DNA, 80 bp, synthetic construct; identical to SEQ ID NO: 16736
  source 1..80: mol_type = other DNA

SEQ ID NO: 90980 - DNA, 80 bp, synthetic construct
  source 1..80: mol_type = other DNA
atttagccacctccctctgttctcccccactgatcctggctggaaaggctgggcttccggaaaagagaggtggatttgca

SEQ ID NO: 90981 - DNA, 80 bp, synthetic construct
  source 1..80: mol_type = other DNA
aatttgggagaggaaaaaaggcattttcccaacccctcccaccaaagcctagagagaaggtgttgtctggtttaatgttt

SEQ ID NO: 90982 - DNA, 80 bp, synthetic construct; identical to SEQ ID NO: 16737
  source 1..80: mol_type = other DNA

SEQ ID NO: 90983 - DNA, 80 bp, synthetic construct
  source 1..80: mol_type = other DNA
agtggtgcgatctcggctcattgcaacctccacctcccaggttcaagcgattctcctgcctcagcctcccgagtagctgg

SEQ ID NO: 90984 - DNA, 80 bp, synthetic construct
  source 1..80: mol_type = other DNA
gccactaatttttatatattttgtagagatggggtttcaccgtgttgcccaagctggtctcgaactcctaggctcaagta

SEQ ID NO: 90985 - DNA, 80 bp, synthetic construct
  source 1..80: mol_type = other DNA
gaagcctgtctggagtccaggcttgcagctgggccccaccccaggcaaggcagctgggtggatgactcagatgctgcccc

SEQ ID NO: 90986 - DNA, 80 bp, synthetic construct; identical to SEQ ID NO: 16738
  source 1..80: mol_type = other DNA

SEQ ID NO: 90987 - DNA, 80 bp, synthetic construct
  source 1..80: mol_type = other DNA
gttgcagccccagtgtggacaggcagggagatgcaggctccagttcatgtaggctctgatcaagacaagaacagcaaagg

SEQ ID NO: 90988 - DNA, 80 bp, synthetic construct
  source 1..80: mol_type = other DNA
aagtcaggtagctgaggctcacttctgcagcctggaaactctgctctggggccagtgacaccttagtgctctatggccat

SEQ ID NO: 90989 - DNA, 80 bp, synthetic construct
  source 1..80: mol_type = other DNA
tgaggcgggaggatcacctgaagccaggagtttgaggctattgtgagctatgactgcactactgcactctagcctgggag

SEQ ID NO: 90990 - DNA, 80 bp, synthetic construct; identical to SEQ ID NO: 16739
  source 1..80: mol_type = other DNA

SEQ ID NO: 90991 - DNA, 80 bp, synthetic construct
  source 1..80: mol_type = other DNA
aggctggagtgcagtggcatgatcttggcttactgcaatctccacctcccaggctcaagtgatcctcccacctcagcctc

SEQ ID NO: 90992 - DNA, 80 bp, synthetic construct
  source 1..80: mol_type = other DNA
agcccaaatccacgttctgattcaaagggaaagaagaagggtgcagctaaacctggggggtgagaagtacttaaaaagcc

SEQ ID NO: 90993 - DNA, 80 bp, synthetic construct
  source 1..80: mol_type = other DNA
ttcggtagcttagtgtctgcgctgaagcccaggacagctggatggacaactggtagatcccttcacctaccaactgtgct

SEQ ID NO: 90994 - DNA, 80 bp, synthetic construct; identical to SEQ ID NO: 16740
  source 1..80: mol_type = other DNA

SEQ ID NO: 90995 - DNA, 80 bp, synthetic construct
  source 1..80: mol_type = other DNA
cgagatcacgccactgcactccagccagggcgacagagcaagattccgtctcaaaaaaataatactaataataaataaat

SEQ ID NO: 90996 - DNA, 80 bp, synthetic construct
  source 1..80: mol_type = other DNA
agaaagggattggagcggaaagtctccagagaccttttaggttccaaagtagtacagtgacccacaaagtgagaaaacag

SEQ ID NO: 90997 - DNA, 80 bp, synthetic construct
  source 1..80: mol_type = other DNA
ttaaattgtgacattaccctcttggcaaatgttttgttttcattgctactaggaaagggcaactcgttttcgatgcctct

SEQ ID NO: 90998 - DNA, 80 bp, synthetic construct
  source 1..80: mol_type = other DNA
cggggggaggggcacggtgaccttgggctgcccaccttctacccttccagcacccatactggctcccccaacctgcggct

SEQ ID NO: 90999 - DNA, 80 bp, synthetic construct; identical to SEQ ID NO: 16741
  source 1..80: mol_type = other DNA

SEQ ID NO: 91000 - DNA, 80 bp, synthetic construct
  source 1..80: mol_type = other DNA
gctcaggggagctagacttcatttcaaggggtctaggttctgggcagttgagaaggaggctatttggggtcaccaaggct

SEQ ID NO: 91001 - DNA, 80 bp, synthetic construct
  source 1..80: mol_type = other DNA
cctcagggttaataactatgtgccaccagatagagagttaaggggctgctgaattggcttcttgtgaagggaatccccta

SEQ ID NO: 91002 - DNA, 80 bp, synthetic construct
  source 1..80: mol_type = other DNA
gagaggccaggaagaaggaaagtggcacttggcaggagaccttgcagggggcggctggtgaggaagccagccgcccattg

SEQ ID NO: 91003 - DNA, 80 bp, synthetic construct; identical to SEQ ID NO: 16742
  source 1..80: mol_type = other DNA

SEQ ID NO: 91004 - DNA, 80 bp, synthetic construct
  source 1..80: mol_type = other DNA
ggggcacctgtgggcttttgaggtgtatgatattcagaacttcacaggttggggtttggggaaggctcaaggggcttcta

SEQ ID NO: 91005 - DNA, 80 bp, synthetic construct
  source 1..80: mol_type = other DNA
caagtagctgggactataggtgcccgccaccatgcctggctaatttttgtatttttagtagaaatggggtttcaccatgc

SEQ ID NO: 91006 - DNA, 80 bp, synthetic construct
  source 1..80: mol_type = other DNA
tctccacatcctgcccttacccgagttgtggcagacccacagactagccaagaaaccaagcagtggttactttgccgggt

SEQ ID NO: 91007 - DNA, 80 bp, synthetic construct; identical to SEQ ID NO: 16743
  source 1..80: mol_type = other DNA

SEQ ID NO: 91008 - DNA, 80 bp, synthetic construct
  source 1..80: mol_type = other DNA
ttttagtgcctgagcctacccgtctccaggctttagtttccccctgtaaaagtataggagttggttcaagagaaggttcc

SEQ ID NO: 91009 - DNA, 80 bp, synthetic construct
  source 1..80: mol_type = other DNA
ggagggagggacagagagaaggaggatatattgcagtaggaggagttgctggaacaaaaggaggggtggtaggagtggct

SEQ ID NO: 91010 - DNA, 80 bp, synthetic construct
  source 1..80: mol_type = other DNA
tgatgcaggaggatcacgtgaggtcaggagttcaagaccagcctggccaacatggcgaaaccctatctctactaaaaatg

SEQ ID NO: 91011 - DNA, 80 bp, synthetic construct; identical to SEQ ID NO: 16744
  source 1..80: mol_type = other DNA

SEQ ID NO: 91012 - DNA, 80 bp, synthetic construct
  source 1..80: mol_type = other DNA
tgagatcacctgggcgacagaatgagactccacctcaaaataataataatagtaataataataaatgaaaaattttaaaa

SEQ ID NO: 91013 - DNA, 80 bp, synthetic construct
  source 1..80: mol_type = other DNA
cttctgctcccttcctgtgtgctgcctggcaatggggaactctgagggctggtgagcagggctgctgaggagtgggtcta

SEQ ID NO: 91014 - DNA, 80 bp, synthetic construct
  source 1..80: mol_type = other DNA
ccgggcccaaacaggcctgtggccggccctggcttccatatctggcatcagagttgggctgagcagggtgactcagaggg

SEQ ID NO: 91015 - DNA, 80 bp, synthetic construct; identical to SEQ ID NO: 16745
  source 1..80: mol_type = other DNA

SEQ ID NO: 91016 - DNA, 80 bp, synthetic construct
  source 1..80: mol_type = other DNA
cgggcgaagccagggtctcccctgtgagcactagaggatttcccgacccctgcccgggtattgtgtgcctgagcatgagt

SEQ ID NO: 91017 - DNA, 80 bp, synthetic construct
  source 1..80: mol_type = other DNA
cctggctagggtctactttggtccctgctaggtctgaggacccctcctaggaaggaaatggcacttgggggcgggggcag

SEQ ID NO: 91018 - DNA, 80 bp, synthetic construct; identical to SEQ ID NO: 16746
  source 1..80: mol_type = other DNA

SEQ ID NO: 91019 - DNA, 80 bp, synthetic construct
  source 1..80: mol_type = other DNA
agttcaagtgatcctcctacctcagcctcctcagtagctgggactacaggtgcacaccaccgtacccagctaaatttttt

SEQ ID NO: 91020 - DNA, 80 bp, synthetic construct
  source 1..80: mol_type = other DNA
atttttgtatttttgatagagtcagagtttcaccatgttggcaggctggtctcgaactcctggcctcaagtgatccacct

SEQ ID NO: 91021 - DNA, 80 bp, synthetic construct
  source 1..80: mol_type = other DNA
ttctgtgcctatttcctcaattgcataggaatagcacctatcgcatagggtagctgtgaagatgacgtgagttaacataa

SEQ ID NO: 91022 - DNA, 80 bp, synthetic construct; identical to SEQ ID NO: 16747
  source 1..80: mol_type = other DNA

SEQ ID NO: 91023 - DNA, 80 bp, synthetic construct
  source 1..80: mol_type = other DNA
agggaaacgctttgtgccatagtgtctgccctcttcctcctcctggcttctccattctctctggaacttgtggcttagga

SEQ ID NO: 91024 - DNA, 80 bp, synthetic construct
  source 1..80: mol_type = other DNA
ctcatctataaaagggagagggttgagctgaatcaactctaagctccttctagttctctaaattctgagagcctcctagt

SEQ ID NO: 91025 - DNA, 80 bp, synthetic construct
  source 1..80: mol_type = other DNA
agcggtttttcttcattttccctcctccccctgcagctgcttcagcttcggaaaagttctgaagtcatggaaagttgggg

SEQ ID NO: 91026 - DNA, 80 bp, synthetic construct
  source 1..80: mol_type = other DNA
gctcttttttgcaggagacagacacttacattaaacaacttgttctgaggtgtggccagaggcctggactgagcaagtgt

SEQ ID NO: 91027 - DNA, 80 bp, synthetic construct; identical to SEQ ID NO: 16748
  source 1..80: mol_type = other DNA

SEQ ID NO: 91028 - DNA, 80 bp, synthetic construct
  source 1..80: mol_type = other DNA
tgggtctgctgctttctctcaccctatatttgtgaagcaattgtaacatctagaaagttcttgggttctctggaggtttt

SEQ ID NO: 91029 - DNA, 80 bp, synthetic construct
  source 1..80: mol_type = other DNA
gacctggaggcctgggatccacatctggaaccagatgctgaggctatggtagatgggtagggctcagccttctcccaggg

SEQ ID NO: 91030 - DNA, 80 bp, synthetic construct; identical to SEQ ID NO: 16749
  source 1..80: mol_type = other DNA

SEQ ID NO: 91031 - DNA, 80 bp, synthetic construct
  source 1..80: mol_type = other DNA
attcatatcacggggtagagctctgcccttggccccaggcacgttcctgagccctgagtcatgggaagggtggagaagca

SEQ ID NO: 91032 - DNA, 80 bp, synthetic construct
  source 1..80: mol_type = other DNA
cacagactccttctcttaaatctactctcccctctcttctttagcaataccaagaaggagggtgacctgatagctgctca

SEQ ID NO: 91033 - DNA, 80 bp, synthetic construct; identical to SEQ ID NO: 16750
  source 1..80: mol_type = other DNA

SEQ ID NO: 91034 - DNA, 80 bp, synthetic construct
  source 1..80: mol_type = other DNA
tggtggcgggcgcctgtagtcccaactactcgggaggctgaggcaggagaatggcgtgagcctgcgaggcagagcttgca

SEQ ID NO: 91035 - DNA, 80 bp, synthetic construct
  source 1..80: mol_type = other DNA
agtccaggagtttgagaccagcctgggcaacacagaccccatctctagaaaataaaaatttaaagaaattagctgggcat

SEQ ID NO: 91036 - DNA, 80 bp, synthetic construct
  source 1..80: mol_type = other DNA
aaataatccacaagccatttctacttaactttgcaatgaactgtacctgaccctagatccctcccagtttggccctccgg

SEQ ID NO: 91037 - DNA, 80 bp, synthetic construct
  source 1..80: mol_type = other DNA
tgctttgtgtatatagagtggcctttactttcaaaacactcttctccaatttatcatgttaaaagctaggaattgggctg

SEQ ID NO: 91038 - DNA, 80 bp, synthetic construct; identical to SEQ ID NO: 16751
  source 1..80: mol_type = other DNA

SEQ ID NO: 91039 - DNA, 80 bp, synthetic construct
  source 1..80: mol_type = other DNA
aaccccatctctactacaaatacaaaaattagctaggcatggtggcagccacctgtaatcccagctacttgggaggctga

SEQ ID NO: 91040 - DNA, 80 bp, synthetic construct
  source 1..80: mol_type = other DNA
agtttattcctaatttcacagtctcatctgttcatagtggggccaggattagagtcagtggccaagcttccatcctgggt

SEQ ID NO: 91041 - DNA, 80 bp, synthetic construct; identical to SEQ ID NO: 16752
  source 1..80: mol_type = other DNA

SEQ ID NO: 91042 - DNA, 80 bp, synthetic construct
  source 1..80: mol_type = other DNA
gatttttagtagagacagggtttcaccatgttggtcaggctggtcttgaactcctgaccttaggtgttctgcccgcctca

SEQ ID NO: 91043 - DNA, 80 bp, synthetic construct
  source 1..80: mol_type = other DNA
cccagcctgtgctttcttaaatgaaaatctaagcatacggctgggtgtggtggctcacgcctgtaatcccagcattttgg

SEQ ID NO: 91044 - DNA, 80 bp, synthetic construct
  source 1..80: mol_type = other DNA
cctgggaggcagagcttgcagtgagctgagatcgcgccactgctctccagcctaggtgacagagcgagactccatctcaa

SEQ ID NO: 91045 - DNA, 80 bp, synthetic construct; identical to SEQ ID NO: 16753
  source 1..80: mol_type = other DNA

SEQ ID NO: 91046 - DNA, 80 bp, synthetic construct
  source 1..80: mol_type = other DNA
tcatgtcccctcagtactttgcacatacctcctttatagcagttgctatgttgtgccagagaagggagtcctgtggctgg

SEQ ID NO: 91047 - DNA, 80 bp, synthetic construct
  source 1..80: mol_type = other DNA
tcatgcctggctacttttttgtattagatatatattttctctcttagcacagtacctaccaagagtgagtgagtagatgt

SEQ ID NO: 91048 - DNA, 80 bp, synthetic construct
  source 1..80: mol_type = other DNA
ttttcctcatctctgcctgcttcctcacagcttgaggcagccctaggtgaggccaagaagcaacttcaggatgagatgct

SEQ ID NO: 91049 - DNA, 80 bp, synthetic construct
  source 1..80: mol_type = other DNA
gacagacttgggctgggctaggggggaccagctgtgtgcagagctcgccttcctgagtcccttgccctagtggacaggga

SEQ ID NO: 91050 - DNA, 80 bp, synthetic construct; identical to SEQ ID NO: 16754
  source 1..80: mol_type = other DNA

SEQ ID NO: 91051 - DNA, 80 bp, synthetic construct
  source 1..80: mol_type = other DNA
cttggcagccctacccttacccacgctgggctatgccttctggggatcaggcagatggtggcagggagctcagggtggcc

SEQ ID NO: 91052 - DNA, 80 bp, synthetic construct
  source 1..80: mol_type = other DNA
cagcagtcgcgcatccgcatcgacagcctctctgcccagctcagccagctccagaagcaggtgataccccacctcacccc

SEQ ID NO: 91053 - DNA, 80 bp, synthetic construct; identical to SEQ ID NO: 16755
  source 1..80: mol_type = other DNA

SEQ ID NO: 91054 - DNA, 80 bp, synthetic construct
  source 1..80: mol_type = other DNA
atgtttagagcttgtgatgttcagagctggctctgatgagggctctggggaagctctgattgcagatcctggagagagta

SEQ ID NO: 91055 - DNA, 80 bp, synthetic construct
  source 1..80: mol_type = other DNA
ctgctggcggaaaaggagcgggagatggccgagatgcgggcaaggatgcagcagcagctggacgagtaccaggagcttct

SEQ ID NO: 91056 - DNA, 80 bp, synthetic construct
  source 1..80: mol_type = other DNA
ggctacgcctgtcccccagccctacctcgcagcgcagccgtggccgtgcttcctctcactcatcccagacacagggtggg

SEQ ID NO: 91057 - DNA, 80 bp, synthetic construct
  source 1..80: mol_type = other DNA
ggtctaaggggatacagctgcatcagggagagagtggcaagacagaaggatggcatgtggagagaggaacatccttgccc

SEQ ID NO: 91058 - DNA, 80 bp, synthetic construct; identical to SEQ ID NO: 16756
  source 1..80: mol_type = other DNA

SEQ ID NO: 91059 - DNA, 80 bp, synthetic construct
  source 1..80: mol_type = other DNA
ggcaattggcagatcaagcgccagaatggagatgatcccttgctgacttaccggttcccaccaaagttcaccctgaaggc

SEQ ID NO: 91060 - DNA, 80 bp, synthetic construct
  source 1..80: mol_type = other DNA
cagaacacctggggctgcgggaacagcctgcgtacggctctcatcaactccactggggaagtaagtaggcctgggcctgg

SEQ ID NO: 91061 - DNA, 80 bp, synthetic construct; identical to SEQ ID NO: 16757
  source 1..80: mol_type = other DNA

SEQ ID NO: 91062 - DNA, 80 bp, synthetic construct
  source 1..80: mol_type = other DNA
cctggccctgacccttggacctggttccatgtccccaccaggaagtggccatgcgcaagctggtgcgctcagtgactgtg

SEQ ID NO: 91063 - DNA, 80 bp, synthetic construct
  source 1..80: mol_type = other DNA
gttttggaactttactcgctggcctggcctttcttctctctcctccctataccttgaacagggaacccaggtgtctgggt

SEQ ID NO: 91064 - DNA, 80 bp, synthetic construct
  source 1..80: mol_type = other DNA
atatcctctcatttccctcatttttcctgcaagaatgttctctctcattcctgaccgcccctccactccaattaatagtg

SEQ ID NO: 91065 - DNA, 80 bp, synthetic construct
  source 1..80: mol_type = other DNA
agcctcccaaacccccattgcccgctggctccttgggcacagaaccacaccttcctgcctggcggctgggagcctgcagg

SEQ ID NO: 91066 - DNA, 80 bp, synthetic construct; identical to SEQ ID NO: 16758
  source 1..80: mol_type = other DNA

SEQ ID NO: 91067 - DNA, 80 bp, synthetic construct
  source 1..80: mol_type = other DNA
gggtaggacgaggtggccttgcaggggggagagcctgccttctcttccgcagcccgggggagtgggagcctcctccccac

SEQ ID NO: 91068 - DNA, 80 bp, synthetic construct
  source 1..80: mol_type = other DNA
acctctctcctctgttttctctcttagagcccccagaactgcagcatcatgtaatctgggacctgccaggcaggggtggg

SEQ ID NO: 91069 - DNA, 80 bp, synthetic construct; identical to SEQ ID NO: 16759
  source 1..80: mol_type = other DNA

SEQ ID NO: 91070 - DNA, 80 bp, synthetic construct
  source 1..80: mol_type = other DNA
ggaccctgtgacatggtgcctgagaggcaggcatagaggcttctccgccagcctcctctggacggcaggctcactgccag

SEQ ID NO: 91071 - DNA, 80 bp, synthetic construct
  source 1..80: mol_type = other DNA
ggtaccagctgcgcttgcttttctgtattttatttagacaagagatgggaatgaggtgggaggtggaagaagggagaaga

SEQ ID NO: 91072 - DNA, 80 bp, synthetic construct; identical to SEQ ID NO: 16760
  source 1..80: mol_type = other DNA

SEQ ID NO: 91073 - DNA, 80 bp, synthetic construct; identical to SEQ ID NO: 16761
  source 1..80: mol_type = other DNA

SEQ ID NO: 91074 - DNA, 80 bp, synthetic construct
  source 1..80: mol_type = other DNA
cagctagagattagcaaatgacgccatttatttaaatagcttgggagaacgagctctcttaaatgtaatggtatccttgg

SEQ ID NO: 91075 - DNA, 80 bp, synthetic construct
  source 1..80: mol_type = other DNA
gcctgggctctggggacacacagcctctgtttctcacatgaacctttgattatttgacattcccttttcacttaccatca

SEQ ID NO: 91076 - DNA, 80 bp, synthetic construct
  source 1..80: mol_type = other DNA
gaggaagcagttgttttttgagagtggtggtagatgatattaaaggagtgaaatcccctgattcatagctggtaggtcaa

SEQ ID NO: 91077 - DNA, 80 bp, synthetic construct
  source 1..80: mol_type = other DNA
gatactatacattttggctgaatggctgagtatataattcaacatatcaatataaggctgaaggcaaacatcaccatcat

SEQ ID NO: 91078 - DNA, 80 bp, synthetic construct; identical to SEQ ID NO: 16762
  source 1..80: mol_type = other DNA

SEQ ID NO: 91079 - DNA, 80 bp, synthetic construct
  source 1..80: mol_type = other DNA
ccagaaatgattttcttctctaaggttgggactgtctacctggagtgaggtagtcagtcccaaggagctttttgaccatg

SEQ ID NO: 91080 - DNA, 80 bp, synthetic construct
  source 1..80: mol_type = other DNA
ctcgctcacatgtagtttttaaatttgttttctcctgggcaaggagacgggtgctcctcagaagtgagaaatattgataa

SEQ ID NO: 91081 - DNA, 80 bp, synthetic construct
  source 1..80: mol_type = other DNA
gatcctgagcaggtagaggatgtattcccttcttactgttgttctttccaaggtctcacaaataagttcacctttcctcg

SEQ ID NO: 91082 - DNA, 80 bp, synthetic construct
  source 1..80: mol_type = other DNA
ggggaggaagtggctttgctctcattccattctgctgcctttgtgtgatcctctctttcagcagcagtatctagagagtc

SEQ ID NO: 91083 - DNA, 80 bp, synthetic construct; identical to SEQ ID NO: 16763
  source 1..80: mol_type = other DNA

SEQ ID NO: 91084 - DNA, 80 bp, synthetic construct
  source 1..80: mol_type = other DNA
attgtgaagagtctggaagcccagtgggctcacccctcataagaaattctatttaaatcattacccagtacacatagatg

SEQ ID NO: 91085 - DNA, 80 bp, synthetic construct
  source 1..80: mol_type = other DNA
gaaacctgtcttattctgctccatgtaattgaatggttttggggctgaattgttcaggtaaaaataggaagagctctacc

SEQ ID NO: 91086 - DNA, 80 bp, synthetic construct; identical to SEQ ID NO: 16764
  source 1..80: mol_type = other DNA

SEQ ID NO: 91087 - DNA, 80 bp, synthetic construct
  source 1..80: mol_type = other DNA
cttcttcccacatcagagacctatatttcgctagcttcgtacccatcatttctcgctcaaagaatgcagcatccttcctt

SEQ ID NO: 91088 - DNA, 80 bp, synthetic construct
  source 1..80: mol_type = other DNA
atgtgtcatggtgttttcttcattttgcctgcttaactcatgtctttccagccttaaactcaatgctcttccctttggga

SEQ ID NO: 91089 - DNA, 80 bp, synthetic construct
  source 1..80: mol_type = other DNA
gggtgctccctgcgtcctgagtggactttcctgaaagagaaactgagtctggccttctcttgtttacaatttgccttcac

SEQ ID NO: 91090 - DNA, 80 bp, synthetic construct
  source 1..80: mol_type = other DNA
tgtaaactctcctgtttctctccttcactggctcctccaaacccttagagatgggtcttcccacagttttgtttccaaac

SEQ ID NO: 91091 - DNA, 80 bp, synthetic construct; identical to SEQ ID NO: 16765
  source 1..80: mol_type = other DNA

SEQ ID NO: 91092 - DNA, 80 bp, synthetic construct
  source 1..80: mol_type = other DNA
atttctttcctcatctcaaaaaccttcaggacttccctttgcctagtaaattgagtagaaatgccttagtcagcatccca

SEQ ID NO: 91093 - DNA, 80 bp, synthetic construct
  source 1..80: mol_type = other DNA
acctgcagctatttaaacttgaattaaaattgaattaaaattttctccttctgccagggccactcatcgcacattcctcc

SEQ ID NO: 91094 - DNA, 80 bp, synthetic construct
  source 1..80: mol_type = other DNA
tttttcacacaaactttcctgatcattcctttcttcatgagatatcccctcccttttgagcctcagtagtatgtttttcc

SEQ ID NO: 91095 - DNA, 80 bp, synthetic construct
  source 1..80: mol_type = other DNA
ggtcaggagttcaagaccagcctgggcaacatggtgaaacccccgtctccactaaaaatacaaaaattagctgggtgtgg

SEQ ID NO: 91096 - DNA, 80 bp, synthetic construct; identical to SEQ ID NO: 16766
  source 1..80: mol_type = other DNA

SEQ ID NO: 91097 - DNA, 80 bp, synthetic construct
  source 1..80: mol_type = other DNA
ggcacattccatcttaaagccagtattgctgacttgaaagccaaggacagcgactggctgcagaacacggtcctctggcc

SEQ ID NO: 91098 - DNA, 80 bp, synthetic construct
  source 1..80: mol_type = other DNA
tttaaattgcttataggatggggaggcacaaagatatctgttcttagatgctggaggaagtttctgggtggactgtcatt

SEQ ID NO: 91099 - DNA, 80 bp, synthetic construct
  source 1..80: mol_type = other DNA
agagcttcttttctctggtttagttgctctttggaaccagagaagttgctggttatccagtcagtgattgcagggggacg

SEQ ID NO: 91100 - DNA, 80 bp, synthetic construct; identical to SEQ ID NO: 16767
  source 1..80: mol_type = other DNA

SEQ ID NO: 91101 - DNA, 80 bp, synthetic construct
  source 1..80: mol_type = other DNA
ggctttcttctgttactagatgatgactaaggggttcacgtgctttatctagacctccttgacagctggctaaatgccag

SEQ ID NO: 91102 - DNA, 80 bp, synthetic construct
  source 1..80: mol_type = other DNA
ttaaagagacaaaaaaccctttcttgtaataagatctaatttctatactgactagaggaccagtatagagagtggtcctt

SEQ ID NO: 91103 - DNA, 80 bp, synthetic construct
  source 1..80: mol_type = other DNA
tgaacaggaagtctccagtctttctgccctgcttaacacagagcagcatctctatttttaatctgctttttatttgggtt

SEQ ID NO: 91104 - DNA, 80 bp, synthetic construct; identical to SEQ ID NO: 16768
  source 1..80: mol_type = other DNA

SEQ ID NO: 91105 - DNA, 80 bp, synthetic construct
  source 1..80: mol_type = other DNA
agttggtaccatatcagctaacaatttattgaacagtgtgctgaaagcttaccatgcattctctcataatttatgagatg

SEQ ID NO: 91106 - DNA, 80 bp, synthetic construct
  source 1..80: mol_type = other DNA
gacagggtttcaccatattggccaggctggtctcgagctcctgacctcaagtgatccacctgcctcagcctcctgaggct

SEQ ID NO: 91107 - DNA, 80 bp, synthetic construct
  source 1..80: mol_type = other DNA
ctgggattcaaacttaagctgcatccctggcagtgtcttcagtagctcaccagcctaccttccaggtggtgggttagcca

SEQ ID NO: 91108 - DNA, 80 bp, synthetic construct; identical to SEQ ID NO: 16769
  source 1..80: mol_type = other DNA

SEQ ID NO: 91109 - DNA, 80 bp, synthetic construct
  source 1..80: mol_type = other DNA
tatgtctgtccagtgctctcttcccctacaggtaaccacacacattctatatcccaagcatctcaagaacagaaaccagt

SEQ ID NO: 91110 - DNA, 80 bp, synthetic construct
  source 1..80: mol_type = other DNA
gtcccagctacttaggaggctgaggtgggaggattgcttgagcccgggaggttgaggctgcagtgagctgagatcatacc

SEQ ID NO: 91111 - DNA, 80 bp, synthetic construct; identical to SEQ ID NO: 16770
  source 1..80: mol_type = other DNA

SEQ ID NO: 91112 - DNA, 80 bp, synthetic construct
  source 1..80: mol_type = other DNA
tgcttcggcctcccaagtcgctgggattacaggcgcacatcactatgcccagctaatttttgtaattttaatagagacag

SEQ ID NO: 91113 - DNA, 80 bp, synthetic construct
  source 1..80: mol_type = other DNA
tcctggctaaggccacaaagcaaagtgtcctttattcactgattgttgtttgagcaagggtgccctcctcccccttgcca

SEQ ID NO: 91114 - DNA, 80 bp, synthetic construct
  source 1..80: mol_type = other DNA
atcccccagatagtggctacagagtgagtctgtctttgggaaatctggggtgttctctgaaattgtattttgagtttggg

SEQ ID NO: 91115 - DNA, 80 bp, synthetic construct; identical to SEQ ID NO: 16771
  source 1..80: mol_type = other DNA

SEQ ID NO: 91116 - DNA, 80 bp, synthetic construct
  source 1..80: mol_type = other DNA
gggactggatgtgttactggtgtggcatacaaatgccatgactctcagttttcctaaacctgatcgatgattagagatct

SEQ ID NO: 91117 - DNA, 80 bp, synthetic construct
  source 1..80: mol_type = other DNA
tttatatattaaagaagaaaagactgatcatgactccagtcctagggatacctggaataagaaagggcagccaggaattg

SEQ ID NO: 91118 - DNA, 80 bp, synthetic construct
  source 1..80: mol_type = other DNA
cctcagtcacattgtcaggtcagaggaacagaactgcacattgtctcattcattctgtcttaacaataacctctcattct

SEQ ID NO: 91119 - DNA, 80 bp, synthetic construct; identical to SEQ ID NO: 16772
  source 1..80: mol_type = other DNA

SEQ ID NO: 91120 - DNA, 80 bp, synthetic construct
  source 1..80: mol_type = other DNA
tgtatttttagtagaggtaggctttcaccatattgaccaggctggtcttgaactcctgacctcagctgatctacctgcct

SEQ ID NO: 91121 - DNA, 80 bp, synthetic construct
  source 1..80: mol_type = other DNA
atcaggatatttggaaagttttcccttcactcttgcacaatgggaaagttgggtgtgagagaagaaagaaaaaatgggga

SEQ ID NO: 91122 - DNA, 80 bp, synthetic construct
  source 1..80: mol_type = other DNA
ttctgaggaagtgtcagcgccgcttctggggcaatgtcacataggaagagaggagcctttaaagggcctttcattggaag

SEQ ID NO: 91123 - DNA, 80 bp, synthetic construct
  source 1..80: mol_type = other DNA
ggtgaaaccccatctctactaaaatacaaaaattagctgggcatggtggtgcatgcctgtcatcccagctactcgggagg

SEQ ID NO: 91124 - DNA, 80 bp, synthetic construct; identical to SEQ ID NO: 16773
  source 1..80: mol_type = other DNA

SEQ ID NO: 91125 - DNA, 80 bp, synthetic construct
  source 1..80: mol_type = other DNA
acttctagttctagctgctcaggaggccgagacaggagttcaggggtttgaggctgcagtgagccatgatggcaccactg

SEQ ID NO: 91126 - DNA, 80 bp, synthetic construct
  source 1..80: mol_type = other DNA
agatagaaccagaaagatacatgtagtagttatttctggacgatggggttaaaagtgattttataaactttctgggctgg

SEQ ID NO: 91127 - DNA, 80 bp, synthetic construct; identical to SEQ ID NO: 16774
  source 1..80: mol_type = other DNA

SEQ ID NO: 91128 - DNA, 80 bp, synthetic construct
  source 1..80: mol_type = other DNA
aaccccgtctctactaaaaatacaaaattagccaagcgtggtggcgcatgcctgtaatcctactcaggaggctgtttgtt

SEQ ID NO: 91129 - DNA, 80 bp, synthetic construct
  source 1..80: mol_type = other DNA
aaaaaaagaaaaagaaaaagaagaactttctggctggatgtagtggctcatggctgtaatcccaggactttgagaggctg

SEQ ID NO: 91130 - DNA, 80 bp, synthetic construct
  source 1..80: mol_type = other DNA
gaggcagaggttgcagtgagccgagatcacaccactgcactccagcctgggtaacagaaggagactgttgtctcaaaaaa

SEQ ID NO: 91131 - DNA, 80 bp, synthetic construct; identical to SEQ ID NO: 16775
  source 1..80: mol_type = other DNA

SEQ ID NO: 91132 - DNA, 80 bp, synthetic construct
  source 1..80: mol_type = other DNA
ctagctgaaatagaatattgcctttttatttatcttgcacagggaaatgaaatgctttgaaatgcgttcagttttctttc

SEQ ID NO: 91133 - DNA, 80 bp, synthetic construct
  source 1..80: mol_type = other DNA
tagggaacaatatgataagctgggttccctctagtggacaaaatacttttgtcagctgctatgaccgctgaccaaagcca

SEQ ID NO: 91134 - DNA, 80 bp, synthetic construct; identical to SEQ ID NO: 16776
  source 1..80: mol_type = other DNA

SEQ ID NO: 91135 - DNA, 80 bp, synthetic construct
  source 1..80: mol_type = other DNA
agtagagattgggttttaccatgttggccaagttggtctcgaactcctgacctcaggtgatccacctgcctcagcctccc

SEQ ID NO: 91136 - DNA, 80 bp, synthetic construct
  source 1..80: mol_type = other DNA
cccaagtagctaggattacaggggtgtgccaccacgcccagctaatttttgtattttgtaaagacaggctttcaacatgt

SEQ ID NO: 91137 - DNA, 80 bp, synthetic construct
  source 1..80: mol_type = other DNA
attttggaactagactaagtacatttgctttgcttaatggttttggcactgaaggaagcatcctctaatgagaatcccat

SEQ ID NO: 91138 - DNA, 80 bp, synthetic construct
  source 1..80: mol_type = other DNA
agataaattcaaattttgctatttcagtgttttatcctttccctttcaaaaggttgttagtagcttatccccggaatagc

SEQ ID NO: 91139 - DNA, 80 bp, synthetic construct; identical to SEQ ID NO: 16777
  source 1..80: mol_type = other DNA

SEQ ID NO: 91140 - DNA, 80 bp, synthetic construct
  source 1..80: mol_type = other DNA
cagctgggactacgggcgcatgccactatgcctggctaatttttgtatttttagtagagatggggtttcaccatgttggc

SEQ ID NO: 91141 - DNA, 80 bp, synthetic construct
  source 1..80: mol_type = other DNA
tcttccagaacagcagccatccagagacttgccggtgcttgatgaagagtcaaataacacgtctgactctgtgagcagca

SEQ ID NO: 91142 - DNA, 80 bp, synthetic construct
  source 1..80: mol_type = other DNA
tacatcccctcctaagccgttctgcccatggatgactgttcctatttccaaagctgtaatctttttttctgttttttttt

SEQ ID NO: 91143 - DNA, 80 bp, synthetic construct
  source 1..80: mol_type = other DNA
tatgtaattatcctttgtatatttgaggtattttgctgggtagctttctcactgtgattgtctgtaatattaagcttttt

SEQ ID NO: 91144 - DNA, 80 bp, synthetic construct; identical to SEQ ID NO: 16778
  source 1..80: mol_type = other DNA

SEQ ID NO: 91145 - DNA, 80 bp, synthetic construct
  source 1..80: mol_type = other DNA
ccacccctgccatctctaagcgtaattcttgctatttgtacctgttgcatttgttttattcttattggtttctgatttgt

SEQ ID NO: 91146 - DNA, 80 bp, synthetic construct
  source 1..80: mol_type = other DNA
tgcaacctggacttccccaagctcaagtgatcctcccacctcagcctcctgagtagctggggctagaggtgggtgccaac

SEQ ID NO: 91147 - DNA, 80 bp, synthetic construct
  source 1..80: mol_type = other DNA
tcagtcctcagccatcacctaagagtcccaagtaaactccttataaggctgagaggcaatcgctgatatccctgctttga

SEQ ID NO: 91148 - DNA, 80 bp, synthetic construct; identical to SEQ ID NO: 16779
  source 1..80: mol_type = other DNA

SEQ ID NO: 91149 - DNA, 80 bp, synthetic construct
  source 1..80: mol_type = other DNA
ctctcagccgggcatggtggctcacgcctgtaatcctagcactttgggaggccaaggcgggcggattgtctgagctcggg

SEQ ID NO: 91150 - DNA, 80 bp, synthetic construct
  source 1..80: mol_type = other DNA
atcgctcaactgcactccagcctgggcgacagagggacactccatctcctaaaaaaaaaaaaaaagaggactctcagacc

SEQ ID NO: 91151 - DNA, 80 bp, synthetic construct; identical to SEQ ID NO: 16780
  source 1..80: mol_type = other DNA

SEQ ID NO: 91152 - DNA, 80 bp, synthetic construct
  source 1..80: mol_type = other DNA
gatatagaagatagtttcccactttgctggtaattggcacgtaagctagaatgaaatgccttgctgacgttaaagaaaat

SEQ ID NO: 91153 - DNA, 80 bp, synthetic construct
  source 1..80: mol_type = other DNA
tttgtgggaaaaaaaaatatttttttgtagagctggggtctcactgtgttgcccaggctggtcttgaactactggcttca

SEQ ID NO: 91154 - DNA, 80 bp, synthetic construct
  source 1..80: mol_type = other DNA
tagttcatagtcaacttgccaattccttaaggtgcaagttggaaagccttgggatcagaatgttctgtaatacggaagtg

SEQ ID NO: 91155 - DNA, 80 bp, synthetic construct; identical to SEQ ID NO: 16781
  source 1..80: mol_type = other DNA

SEQ ID NO: 91156 - DNA, 80 bp, synthetic construct
  source 1..80: mol_type = other DNA
ggcatgagcttattaactatttgtttctgggaaatgtcataagaattgatgacgatttggaaagaaggaacaaattcaag

SEQ ID NO: 91157 - DNA, 80 bp, synthetic construct
  source 1..80: mol_type = other DNA
aaaatacaaaaactagccaggcgtggtggctcatgcctgtaattctagctacttgggaggctgaggtgggaggatagctt

SEQ ID NO: 91158 - DNA, 80 bp, synthetic construct
  source 1..80: mol_type = other DNA
ttgtaggtgcaaaaagaagtatgtgttgttttaacctgtgacgtttcagaactcacagagcaaggcagcagcgtttgctt

SEQ ID NO: 91159 - DNA, 80 bp, synthetic construct
  source 1..80: mol_type = other DNA
agcaattaaatgtgatgttggcaaacagttataaacttgtgtcttcttggagagtaggctatgtagtctttctggcagca

SEQ ID NO: 91160 - DNA, 80 bp, synthetic construct; identical to SEQ ID NO: 16782
  source 1..80: mol_type = other DNA

SEQ ID NO: 91161 - DNA, 80 bp, synthetic construct
  source 1..80: mol_type = other DNA
gcaattaaggtgagcatgagagcagcctgcctctcttctgttctcccagccatggaagcaggctccattaaaaatgtgtt

SEQ ID NO: 91162 - DNA, 80 bp, synthetic construct
  source 1..80: mol_type = other DNA
cgcctgtaatcccagctacttggaagggtgaggcaaaagaatctcttgaacctgggagacggatgctgcaatgagctgag

SEQ ID NO: 91163 - DNA, 80 bp, synthetic construct
  source 1..80: mol_type = other DNA
gataggcctaggtgatggatcctgactaggatggttagtgtggaaagaagcagttgagcaccatgttttggcaaaattca

SEQ ID NO: 91164 - DNA, 80 bp, synthetic construct
  source 1..80: mol_type = other DNA
cttcatgaccaacaagcgcttaagtacgaaactcagaggagggcagacagaaatgatgatagctggagagagaattaagc

SEQ ID NO: 91165 - DNA, 80 bp, synthetic construct; identical to SEQ ID NO: 16783
  source 1..80: mol_type = other DNA

SEQ ID NO: 91166 - DNA, 80 bp, synthetic construct
  source 1..80: mol_type = other DNA
agcagtgacagaaacctagaggagttccccgcctgctgacacgcactgactgttgcctctcctacctctttccctgtttc

SEQ ID NO: 91167 - DNA, 80 bp, synthetic construct
  source 1..80: mol_type = other DNA
taaggaacatcatggggaagctgctgctttgtcccagaatgacacatgggatgacatgtcagtgacacgtcagaatcatt

SEQ ID NO: 91168 - DNA, 80 bp, synthetic construct
  source 1..80: mol_type = other DNA
atgatataccacaatataaataactgtatggtgtaatgtattccttcacctctctgagataggaagggaggggaaagtcc

SEQ ID NO: 91169 - DNA, 80 bp, synthetic construct; identical to SEQ ID NO: 16784
  source 1..80: mol_type = other DNA

SEQ ID NO: 91170 - DNA, 80 bp, synthetic construct
  source 1..80: mol_type = other DNA
tacacaagttgattaatagtctggcttaagcatctggtttaaccattggtttgaaagtataggggaggaaaaaaccacga

SEQ ID NO: 91171 - DNA, 80 bp, synthetic construct
  source 1..80: mol_type = other DNA
cagtatgtgttgattcttcttaaggaaaatgttaaaagagtttttttccctcgtgttcactacattttcgttcctgttct

SEQ ID NO: 91172 - DNA, 80 bp, synthetic construct
  source 1..80: mol_type = other DNA
tttttttttccctatgctctttatttatatgttctagataaatgctaggaaacttctccagtaaggcagcttggttcccc

SEQ ID NO: 91173 - DNA, 80 bp, synthetic construct; identical to SEQ ID NO: 16785
  source 1..80: mol_type = other DNA

SEQ ID NO: 91174 - DNA, 80 bp, synthetic construct
  source 1..80: mol_type = other DNA
acactgctgatagtttcagagatgagcctactcaagggtctgtagttccagtgtattgtaaaaaatcaaatcacagtgaa

SEQ ID NO: 91175 - DNA, 80 bp, synthetic construct
  source 1..80: mol_type = other DNA
agacctcctttctaggttatataatctagatcattctgtgaggataaggtggaggcagggatctagcatttgcagaagtt

SEQ ID NO: 91176 - DNA, 80 bp, synthetic construct
  source 1..80: mol_type = other DNA
gaaatctcctatggagtctggagtttagtgatgtgatctgatttgtattttcttagaagtttcccaattgcagtgatgga

SEQ ID NO: 91177 - DNA, 80 bp, synthetic construct; identical to SEQ ID NO: 16786
  source 1..80: mol_type = other DNA

SEQ ID NO: 91178 - DNA, 80 bp, synthetic construct
  source 1..80: mol_type = other DNA
tcaagagcaaatgcatctgagcctctttaagaggcctacaattgcaaggaaattagacagatcttcaaaattagctgctg

SEQ ID NO: 91179 - DNA, 80 bp, synthetic construct
  source 1..80: mol_type = other DNA
gcagcttctgcagagacttctttggaatacctcagtaagtctgacttcatgttatatctatactgagtaagatggaaacc

SEQ ID NO: 91180 - DNA, 80 bp, synthetic construct
  source 1..80: mol_type = other DNA
catctgtagcctcagctgcttaggaggctgaggcaagatcagtttgagcccaggagtttgaggttgcagtgagccatgat

SEQ ID NO: 91181 - DNA, 80 bp, synthetic construct
  source 1..80: mol_type = other DNA
caggagcgcagtggtgggatcttggctcactgcaacctctgtctctggggttcaaacgattctcctgcctcggtctccca

SEQ ID NO: 91182 - DNA, 80 bp, synthetic construct; identical to SEQ ID NO: 16787
  source 1..80: mol_type = other DNA

SEQ ID NO: 91183 - DNA, 80 bp, synthetic construct
  source 1..80: mol_type = other DNA
ttgagacagagtctcactctgttgcccaagctggaatgcagtggcatgatcttggctcactgcaacccccgcctcccggg

SEQ ID NO: 91184 - DNA, 80 bp, synthetic construct
  source 1..80: mol_type = other DNA
ccaaagtgctgggattacaggcatgagcaactgtgcccagcctaataatgcttttttaaaaaatagcccgggcgcggtgg

SEQ ID NO: 91185 - DNA, 80 bp, synthetic construct
  source 1..80: mol_type = other DNA
gggaggctgatacaggagaattgcttgaacccaggaggcggaggttgcagtgagctgagatcataccactgcactctagc

SEQ ID NO: 91186 - DNA, 80 bp, synthetic construct; identical to SEQ ID NO: 16788
  source 1..80: mol_type = other DNA

SEQ ID NO: 91187 - DNA, 80 bp, synthetic construct
  source 1..80: mol_type = other DNA
tttgaaagaagagctgaatccacttttgacatgaattgatatggctgttatttcctctgatgtagattggaccatgtgga

SEQ ID NO: 91188 - DNA, 80 bp, synthetic construct
  source 1..80: mol_type = other DNA
gtccgcccgcggagttcactgagcctcattagctcttccgtagagcttaatgtgtttcccgtttctgtctttccagaagc

SEQ ID NO: 91189 - DNA, 80 bp, synthetic construct
  source 1..80: mol_type = other DNA
gcaggcggtcacgacactacttcagaaaaataaagaaaatgcagagggacttggaaggaaatacaaaaatcacaggagat

SEQ ID NO: 91190 - DNA, 80 bp, synthetic construct; identical to SEQ ID NO: 16789
  source 1..80: mol_type = other DNA

SEQ ID NO: 91191 - DNA, 80 bp, synthetic construct
  source 1..80: mol_type = other DNA
agcagattcagtgctcataagcacgagatgggtaagtgtggtatagttgcatcggaatataatgtagcagtgaaaatgaa

SEQ ID NO: 91192 - DNA, 80 bp, synthetic construct
  source 1..80: mol_type = other DNA
agcatagtgattcccgctgaggggagagcaaaggaaatgagataagtctgcataggagacttcagctgtaatagttaaca

SEQ ID NO: 91193 - DNA, 80 bp, synthetic construct
  source 1..80: mol_type = other DNA
ttgggaggccagggcaagcggatcatgaggtcaggaaatcgagaccatcctggctaacatggtgacaccccgtctctact

SEQ ID NO: 91194 - DNA, 80 bp, synthetic construct; identical to SEQ ID NO: 16790
  source 1..80: mol_type = other DNA

SEQ ID NO: 91195 - DNA, 80 bp, synthetic construct
  source 1..80: mol_type = other DNA
aaattgtctgtcagagctataaaaaattactctaaacatagtcaaacccttcaggtaacctgtctctgtgcacacgtgcg

SEQ ID NO: 91196 - DNA, 80 bp, synthetic construct
  source 1..80: mol_type = other DNA
tctccttcgttgaagtccctgtcctcctttttcttggttttcttattttcatgaagtattgtactccaacagatcccaaa

SEQ ID NO: 91197 - DNA, 80 bp, synthetic construct; identical to SEQ ID NO: 16791
  source 1..80: mol_type = other DNA

SEQ ID NO: 91198 - DNA, 80 bp, synthetic construct
  source 1..80: mol_type = other DNA
tccacatctgtgtgtcctggagttggcatgtcagctccatgagtcttcctgtgctgagtgatgttgtgttgtgtcctaga

SEQ ID NO: 91199 - DNA, 80 bp, synthetic construct
  source 1..80: mol_type = other DNA
ttagaagttgctttgtttccccagcacgtatgtggaaacttgaactgagtttaaatgcagaatttgggatttttcttctt

SEQ ID NO: 91200 - DNA, 80 bp, synthetic construct
  source 1..80: mol_type = other DNA
accagagagaaaaagttgtgggggaagggagggactaactgcatgctgttctctgttccaagtttcaaactccaccaaaa

SEQ ID NO: 91201 - DNA, 80 bp, synthetic construct
  source 1..80: mol_type = other DNA
aggggggttgactggttaggcacagactagatacggaactcagacagcctgggtttgaatcccagttttgccctttcttt

SEQ ID NO: 91202 - DNA, 80 bp, synthetic construct; identical to SEQ ID NO: 16792
  source 1..80: mol_type = other DNA

SEQ ID NO: 91203 - DNA, 80 bp, synthetic construct
  source 1..80: mol_type = other DNA
tgatcacggctcactgcagccttgacctcctgggctcaagcagtcttcccacctcagcctcctgagtagcagagaccaca

SEQ ID NO: 91204 - DNA, 80 bp, synthetic construct
  source 1..80: mol_type = other DNA
gccatttctaattagctttgtgcttggacaagttattccactgctctgtgtcatagtttccttatatgtcaagtggtggg

SEQ ID NO: 91205 - DNA, 80 bp, synthetic construct
  source 1..80: mol_type = other DNA
ctgcaggtgtatgccaccacacctggctaatttttgtgtttttagtagagacggggttttcccatgttgcccaggctggt

SEQ ID NO: 91206 - DNA, 80 bp, synthetic construct; identical to SEQ ID NO: 16793
  source 1..80: mol_type = other DNA

SEQ ID NO: 91207 - DNA, 80 bp, synthetic construct
  source 1..80: mol_type = other DNA
tctcaaactcctgacctcaagtgatctgccctcctgagcctcccaaagtactgggattacagacatgagccacctcgcct

SEQ ID NO: 91208 - DNA, 80 bp, synthetic construct
  source 1..80: mol_type = other DNA
gtgtttgctcttttttttttttcctttgagacggagtcttgctgttgttacccgggctggagtgcaatggcgtgatctcg

SEQ ID NO: 91209 - DNA, 80 bp, synthetic construct
  source 1..80: mol_type = other DNA
cctcaagtgatcgcctgcctcggcctcccaaagtgctgagattataggcgtgagccaccacgccgggccctttttttttt

SEQ ID NO: 91210 - DNA, 80 bp, synthetic construct; identical to SEQ ID NO: 16794
  source 1..80: mol_type = other DNA

SEQ ID NO: 91211 - DNA, 80 bp, synthetic construct
  source 1..80: mol_type = other DNA
tctgttgcccaggctggagtgcggtggtgcagaccagctcactgcaacctctttctcccaggttcaagcgattctcctgc

SEQ ID NO: 91212 - DNA, 80 bp, synthetic construct; identical to SEQ ID NO: 16795
  source 1..80: mol_type = other DNA

SEQ ID NO: 91213 - DNA, 80 bp, synthetic construct
  source 1..80: mol_type = other DNA
cagctactcgggaggctgaggcaggagaattgcttgaacccaggaggcagaggttgcagtgagccgagatcgcaccattg

SEQ ID NO: 91214 - DNA, 80 bp, synthetic construct
  source 1..80: mol_type = other DNA
atggtgaaaccctgtctttactaaaaatacaaaaattagccgggcgtggtggcatgcacctgtaatcccacgtactcagg

SEQ ID NO: 91215 - DNA, 80 bp, synthetic construct
  source 1..80: mol_type = other DNA
aatccttcttcttatactttgagagattctcttagtatttatcttctaatcctcttgtttttatttttgtaatcctattt

SEQ ID NO: 91216 - DNA, 80 bp, synthetic construct
  source 1..80: mol_type = other DNA
cctccaatttatttttgtttgttttggtctcctctttcatagtagagactgtggtcaaatgtctggtactctacagctgt

SEQ ID NO: 91217 - DNA, 80 bp, synthetic construct; identical to SEQ ID NO: 16796
  source 1..80: mol_type = other DNA

SEQ ID NO: 91218 - DNA, 80 bp, synthetic construct
  source 1..80: mol_type = other DNA
cttaaaggtctgattcttatataagtttgcaaccaacaaacttggttcagacgcattccactttgtggaggttccctgta

SEQ ID NO: 91219 - DNA, 80 bp, synthetic construct
  source 1..80: mol_type = other DNA
ctgaggctgggtaacttagaaagaaaagaggtttatttggctcatggttctgcaggctgtttaagaagccatcaccacct

SEQ ID NO: 91220 - DNA, 80 bp, synthetic construct
  source 1..80: mol_type = other DNA
atcccaacgctttgggatgctggggtgggaggattccttgaggccagaaatttaagaccagcctgggtaacatggcaatg

SEQ ID NO: 91221 - DNA, 80 bp, synthetic construct; identical to SEQ ID NO: 16797
  source 1..80: mol_type = other DNA

SEQ ID NO: 91222 - DNA, 80 bp, synthetic construct
  source 1..80: mol_type = other DNA
ttattatgtttcttacacaagtaggctgtttctaagtgtctgggtttttaacattttacagtttttattatacttacatt

SEQ ID NO: 91223 - DNA, 80 bp, synthetic construct
  source 1..80: mol_type = other DNA
ggcatcttttcattcatagttgtgatggttcacaccttaatctgagtgaactttttctctgccacctaggatggtcctgg

SEQ ID NO: 91224 - DNA, 80 bp, synthetic construct
  source 1..80: mol_type = other DNA
ttctgtggcctggccgcgctggtaatcctcaagagggaacgttccttgaacttgaagagcttattagtaagtatcttttg

SEQ ID NO: 91225 - DNA, 80 bp, synthetic construct
  source 1..80: mol_type = other DNA
ttctgtcttcctgcttagagctttttacatagtgtgtagactacatagactgtgtgctgcagacatctggtgtgagcaga

SEQ ID NO: 91226 - DNA, 80 bp, synthetic construct; identical to SEQ ID NO: 16798
  source 1..80: mol_type = other DNA

SEQ ID NO: 91227 - DNA, 80 bp, synthetic construct
  source 1..80: mol_type = other DNA
tgtcatttggggagcatgtaccccctgaccatgacgtcaaagcaaaccagctgcaactgacatgcacctcctctccctga

SEQ ID NO: 91228 - DNA, 80 bp, synthetic construct
  source 1..80: mol_type = other DNA
ctgaaacagccaactttgtatgctgaacttaagagtttctcagatgttttaaaatctgaacaccaataaggcatgaaaca

SEQ ID NO: 91229 - DNA, 80 bp, synthetic construct; identical to SEQ ID NO: 16799
  source 1..80: mol_type = other DNA

SEQ ID NO: 91230 - DNA, 80 bp, synthetic construct
  source 1..80: mol_type = other DNA
tttctattattacactgtaatatataatgaaataattatacaactcaccataatgtagaatcagtgagagccctgagctt

SEQ ID NO: 91231 - DNA, 80 bp, synthetic construct
  source 1..80: mol_type = other DNA
gtcaggaagtggagctcaggcagtaatgggagcagtgaggagcagctgtaaatacagattaagcttcactggctcaccca

SEQ ID NO: 91232 - DNA, 80 bp, synthetic construct
  source 1..80: mol_type = other DNA
cctatagcccaaggaaacagaacaaatccatgggcttaggcactggaaaaagtaaattagtctgcttaaaaacacttaag

SEQ ID NO: 91233 - DNA, 80 bp, synthetic construct; identical to SEQ ID NO: 16800
  source 1..80: mol_type = other DNA

SEQ ID NO: 91234 - DNA, 80 bp, synthetic construct
  source 1..80: mol_type = other DNA
tagggagggaaatggaaatgtcatatctgctcagccagttggttctgctcattctgagggaccaaacccatgactatctt

SEQ ID NO: 91235 - DNA, 80 bp, synthetic construct
  source 1..80: mol_type = other DNA
taattagaatgaatggcttctgctttcaggcctgctagtgacttgctaagagaccttgggtaaatttccccaggtgccaa

SEQ ID NO: 91236 - DNA, 80 bp, synthetic construct
  source 1..80: mol_type = other DNA
ctactaaaaatacaaaaaattagccgggcgcggtggcgggcgcctgtggtcccagctactcgggaggctgaggcaggaga

SEQ ID NO: 91237 - DNA, 80 bp, synthetic construct; identical to SEQ ID NO: 16801
  source 1..80: mol_type = other DNA

SEQ ID NO: 91238 - DNA, 80 bp, synthetic construct
  source 1..80: mol_type = other DNA
ctgtgtctatggcagtgtggggagggaaggaaagaaaaccagagcaccaaaactagagtgccaagaagccacaagatggg

SEQ ID NO: 91239 - DNA, 80 bp, synthetic construct
  source 1..80: mol_type = other DNA
gtggatggctgctactccttctggcaggcggggctcctgcccctgctccaccgcgcactgcacgcccaaggtgagcctgg

SEQ ID NO: 91240 - DNA, 80 bp, synthetic construct
  source 1..80: mol_type = other DNA
atttagtttcattggtttagtgtcattctttgcttcttcaaattggctgcgacagaatgagcttccttgaaattgctacg

SEQ ID NO: 91241 - DNA, 80 bp, synthetic construct
  source 1..80: mol_type = other DNA
gtgttgcaacagtcactgttgcaacagcaacaggaaaggcaactgcgtaaaggggtagagaaccagaacccatgtgtagg

SEQ ID NO: 91242 - DNA, 80 bp, synthetic construct; identical to SEQ ID NO: 16802
  source 1..80: mol_type = other DNA

SEQ ID NO: 91243 - DNA, 80 bp, synthetic construct
  source 1..80: mol_type = other DNA
gagaagctgttcttcggacttagttggataatgtaactgctcaaatgtaaaagatgagattcttttctgcccctccccat

SEQ ID NO: 91244 - DNA, 80 bp, synthetic construct
  source 1..80: mol_type = other DNA
gcctcctgagtagctgggactacaggcgcgtgccaccacacctggctaatttttgtatttttagtagagacagggtttca

SEQ ID NO: 91245 - DNA, 80 bp, synthetic construct; identical to SEQ ID NO: 16803
  source 1..80: mol_type = other DNA

SEQ ID NO: 91246 - DNA, 80 bp, synthetic construct
  source 1..80: mol_type = other DNA
gcaacctctgccccctgggttcaagtaattctcctgccttagcctcctaaatagctgggattataggcatgcaccaccac

SEQ ID NO: 91247 - DNA, 80 bp, synthetic construct
  source 1..80: mol_type = other DNA
aaaaaacttggggtcatggtgatctctttatttggaactggtgaggtcaagcccctggtaaaatggtcagtcttttacaa

SEQ ID NO: 91248 - DNA, 80 bp, synthetic construct
  source 1..80: mol_type = other DNA
ttgtctatggaaaagggtgcctatgaatcttggtgcttccagcttttttcattggctgggagaaggcctgtgttgtcttc

SEQ ID NO: 91249 - DNA, 80 bp, synthetic construct; identical to SEQ ID NO: 16804
  source 1..80: mol_type = other DNA

SEQ ID NO: 91250 - DNA, 80 bp, synthetic construct
  source 1..80: mol_type = other DNA
atttgaaaaaaaatcatacaaaccagtaagaaatggatggacaacccaactgaaaaacaggcaaaggatctgaagaaaga

SEQ ID NO: 91251 - DNA, 80 bp, synthetic construct
  source 1..80: mol_type = other DNA
accattgtttacagatgaggaaacaaactacagtgaggttaagtgattgctttataatacctgattggcactcacaaggg

SEQ ID NO: 91252 - DNA, 80 bp, synthetic construct
  source 1..80: mol_type = other DNA
ttggcagagattaaaaaacttgataccctatgttggggagagtgtgagaaaacaggtaatttgatagtggggatgtaaat

SEQ ID NO: 91253 - DNA, 80 bp, synthetic construct; identical to SEQ ID NO: 16805
  source 1..80: mol_type = other DNA

SEQ ID NO: 91254 - DNA, 80 bp, synthetic construct
  source 1..80: mol_type = other DNA
ttagatttttttttttttttttttttttttttgagacagagtctcactctgttgctgaggctggagtgcagtggtgcaat

SEQ ID NO: 91255 - DNA, 80 bp, synthetic construct
  source 1..80: mol_type = other DNA
ctcaagtgatccaccttccttggccacacaaagtgctgagattacaggcgtgagccaccatacctggccaactttttaga

SEQ ID NO: 91256 - DNA, 80 bp, synthetic construct
  source 1..80: mol_type = other DNA
tctaggccatgccctgacccagcaagtgaccatcagtggctccatgccattgactaccttctatgtgtaaatgacagtat

SEQ ID NO: 91257 - DNA, 80 bp, synthetic construct; identical to SEQ ID NO: 16806
  source 1..80: mol_type = other DNA

SEQ ID NO: 91258 - DNA, 80 bp, synthetic construct
  source 1..80: mol_type = other DNA
ggccaacatggtgaaaccccatctctactaaagatacaaaaaattagccaggcatggtgccacgttgcctgtaatcccag

SEQ ID NO: 91259 - DNA, 80 bp, synthetic construct
  source 1..80: mol_type = other DNA
gtgagttactttgtttttttgttttgtggagcaataagaaagcagcaggcctgtgagtttccacttggcttggtagttac

SEQ ID NO: 91260 - DNA, 80 bp, synthetic construct
  source 1..80: mol_type = other DNA
cctataatttcaggaagaggtagaaaggatttaaaaggtggattccagtgtgcagttatcaccctataatcgtatctgct

SEQ ID NO: 91261 - DNA, 80 bp, synthetic construct; identical to SEQ ID NO: 16807
  source 1..80: mol_type = other DNA

SEQ ID NO: 91262 - DNA, 80 bp, synthetic construct
  source 1..80: mol_type = other DNA
aatatgcttttttaaataatagctttgttgagatataattcccataccacacaacttacctattcagttgcgaaccatca

SEQ ID NO: 91263 - DNA, 80 bp, synthetic construct
  source 1..80: mol_type = other DNA
ttaaaaagttttaaactcacataaccaaaacagaggagcaaaaaggagaaaatagatgcagcatatgatgtagacaaggg

SEQ ID NO: 91264 - DNA, 80 bp, synthetic construct
  source 1..80: mol_type = other DNA
caggtactatttctttttaccattttaattgctgataacttttaaaaagtaactaaagctggccgggcgtggtggctcac

SEQ ID NO: 91265 - DNA, 80 bp, synthetic construct
  source 1..80: mol_type = other DNA
gacaggagaatgacttgaacctgggaggcagaggttgcagtgagctgagatcacaccactgcactccagcctgggcgaca

SEQ ID NO: 91266 - DNA, 80 bp, synthetic construct; identical to SEQ ID NO: 16808
  source 1..80: mol_type = other DNA

SEQ ID NO: 91267 - DNA, 80 bp, synthetic construct
  source 1..80: mol_type = other DNA
atatatgtatgtatcttctacaacaaagttcactgtgcttacaggtgaggaaaagaaaggaagggaattaaaatagtgca

SEQ ID NO: 91268 - DNA, 80 bp, synthetic construct
  source 1..80: mol_type = other DNA
acctggccactgtccctcacctagtgctcaaccttggaaacccttttcctctgtgtctctttttaaagaaatttaataaa

SEQ ID NO: 91269 - DNA, 80 bp, synthetic construct
  source 1..80: mol_type = other DNA
tacaagaattagccaggcatggtggtgcatgcctgtaatcccagctactcgggaggctgaggcaggacaatcgcttgaac

SEQ ID NO: 91270 - DNA, 80 bp, synthetic construct; identical to SEQ ID NO: 16809
  source 1..80: mol_type = other DNA

SEQ ID NO: 91271 - DNA, 80 bp, synthetic construct
  source 1..80: mol_type = other DNA
acaggcgcccaccaccatgtccggctaatttttttgtatttttagtagagacagggtttcaccgtgttagccgggatggt

SEQ ID NO: 91272 - DNA, 80 bp, synthetic construct
  source 1..80: mol_type = other DNA
ttagctcagttctttttatgatacagttaccttatatgtccacttaatgaaatactatatggctattcacagtgatggct

SEQ ID NO: 91273 - DNA, 80 bp, synthetic construct
  source 1..80: mol_type = other DNA
taggtagaaaaacgcatagaaccaaaaagactggaagaaagaacaattagctttcaggtgccatttaccaattgttgggc

SEQ ID NO: 91274 - DNA, 80 bp, synthetic construct; identical to SEQ ID NO: 16810
  source 1..80: mol_type = other DNA

SEQ ID NO: 91275 - DNA, 80 bp, synthetic construct
  source 1..80: mol_type = other DNA
agaagaaacagactttattacccattaagagttctctgagctaatcagtctggttaacaagttatagagatatgctagag

SEQ ID NO: 91276 - DNA, 80 bp, synthetic construct
  source 1..80: mol_type = other DNA
aggatcaccatccacgttaacagggtgcatttcaagaaagtgaaagtgccactttgaattgctgctctttgacacatgtc

SEQ ID NO: 91277 - DNA, 80 bp, synthetic construct
  source 1..80: mol_type = other DNA
gaattaggtcattgatacttggctggatctgccgggcccttactgaccctttgcccttcaacaggtgaccctgcccttag

SEQ ID NO: 91278 - DNA, 80 bp, synthetic construct; identical to SEQ ID NO: 16811
  source 1..80: mol_type = other DNA

SEQ ID NO: 91279 - DNA, 80 bp, synthetic construct
  source 1..80: mol_type = other DNA
atagaataggatacaggattttaaaacccctcagtgttgtaaacagagactgtaatcatgacaactattatagagtggat

SEQ ID NO: 91280 - DNA, 80 bp, synthetic construct
  source 1..80: mol_type = other DNA
gaaggatgtggcccatttctagatatttaggtatttttctagagaagtgtatcaatttatcattagtactgcccctggag

SEQ ID NO: 91281 - DNA, 80 bp, synthetic construct
  source 1..80: mol_type = other DNA
acagggtctcactctgtcacccaggctggagtgcagtgtcacaatcatgactcactgcagccttcacctcttgggctcga

SEQ ID NO: 91282 - DNA, 80 bp, synthetic construct; identical to SEQ ID NO: 16812
  source 1..80: mol_type = other DNA

SEQ ID NO: 91283 - DNA, 80 bp, synthetic construct
  source 1..80: mol_type = other DNA
cctgtccatagcccagcacttcggcagcggagccatgttgcatgatgtggtcctgggtgtgcccgaaaacgctctggtaa

SEQ ID NO: 91284 - DNA, 80 bp, synthetic construct
  source 1..80: mol_type = other DNA
gaggagacgcacctctgggcaagctcagggttccagatgggcggtctgatctgtcaaagagctgttgtgcctttatccca

SEQ ID NO: 91285 - DNA, 80 bp, synthetic construct; identical to SEQ ID NO: 16813
  source 1..80: mol_type = other DNA

SEQ ID NO: 91286 - DNA, 80 bp, synthetic construct
  source 1..80: mol_type = other DNA
agtgatcaaatcacagggcccatgcagactgtcatgaatttttgtgtgcagttccctactcttactaagccctacttcca

SEQ ID NO: 91287 - DNA, 80 bp, synthetic construct
  source 1..80: mol_type = other DNA
tggcatgatattggctcactgcaacctccacctcccaggttcaagcaattctcgtgcctcagcctcctgagtagctggga

SEQ ID NO: 91288 - DNA, 80 bp, synthetic construct
  source 1..80: mol_type = other DNA
gccccatctttgtttcttttaattgggaaacatttcaaatggaagaaacacaaatggccaatagatagttgaaaagatgc

SEQ ID NO: 91289 - DNA, 80 bp, synthetic construct; identical to SEQ ID NO: 16814
  source 1..80: mol_type = other DNA

SEQ ID NO: 91290 - DNA, 80 bp, synthetic construct
  source 1..80: mol_type = other DNA
taactattatatgatactcccttatataaatgtaccccagtgtgtttctctgttctcctgctagttatcaattttttgct

SEQ ID NO: 91291 - DNA, 80 bp, synthetic construct
  source 1..80: mol_type = other DNA
tccatagtcagaccttttcctttttgccaatttgatgggtgtgaagtggtatttgtttgattttgtgttttcctgattac

SEQ ID NO: 91292 - DNA, 80 bp, synthetic construct
  source 1..80: mol_type = other DNA
cttctatcagttacatgtgtgtagtgaatatcttccagcttgtgacttgtcttttcattttgtgactctgatttgcattg

SEQ ID NO: 91293 - DNA, 80 bp, synthetic construct
  source 1..80: mol_type = other DNA
ttataacatgtggaaatcaaaggggaagccaacccatgcaaacagaggagagcctgagagcatcctggctttataacagc

SEQ ID NO: 91294 - DNA, 80 bp, synthetic construct; identical to SEQ ID NO: 16815
  source 1..80: mol_type = other DNA

SEQ ID NO: 91295 - DNA, 80 bp, synthetic construct
  source 1..80: mol_type = other DNA
gcccccagcaccccttccccacaaaaatattttaatattttaattttgaagtggtcaaatctatttgtcttttctgtcat

SEQ ID NO: 91296 - DNA, 80 bp, synthetic construct
  source 1..80: mol_type = other DNA
ggaggcacacattaaacaaatacatcacaaattgtgatgcgtgctatgaagggaatgaacaaggcaatgcagcaagtcat

SEQ ID NO: 91297 - DNA, 80 bp, synthetic construct; identical to SEQ ID NO: 16816
  source 1..80: mol_type = other DNA

SEQ ID NO: 91298 - DNA, 80 bp, synthetic construct
  source 1..80: mol_type = other DNA
ttgctttttcctgtgaattgtaggatcagcctgtcaagttctaatgggatttttattggaattgcactacattttagatt

SEQ ID NO: 91299 - DNA, 80 bp, synthetic construct
  source 1..80: mol_type = other DNA
gcattttttttttttcggttagagttatgtctaatttacagttttcatgtctcttgtgactggaatcttttcttattttc

SEQ ID NO: 91300 - DNA, 80 bp, synthetic construct
  source 1..80: mol_type = other DNA
gtgctgactaaaggtagtagagggcattcgtctcttgctcctgattataatgggaaggctttttataacctgatcattaa

SEQ ID NO: 91301 - DNA, 80 bp, synthetic construct; identical to SEQ ID NO: 16817
  source 1..80: mol_type = other DNA

SEQ ID NO: 91302 - DNA, 80 bp, synthetic construct
  source 1..80: mol_type = other DNA
tattgtattgtccttttccagtgtttcaggataatatcatagcctcataaaattaaatgggtagcttcctgcacctctta

SEQ ID NO: 91303 - DNA, 80 bp, synthetic construct
  source 1..80: mol_type = other DNA
caccagaacctgctaatttttaaattttttgtagagacagggttttgctatgttgcctagtctggtcttgaactcttggc

SEQ ID NO: 91304 - DNA, 80 bp, synthetic construct
  source 1..80: mol_type = other DNA
gaaaccatctaggtctagtatcttttaaggtatgtgggggtggcagaataagcaattgttgttactaatttcttcatgta

SEQ ID NO: 91305 - DNA, 80 bp, synthetic construct; identical to SEQ ID NO: 16818
  source 1..80: mol_type = other DNA

SEQ ID NO: 91306 - DNA, 80 bp, synthetic construct
  source 1..80: mol_type = other DNA
cacaatcttggctcactgcaacctccgcctcccgggttcaagcaattctcctgcttcagcctcccaactagctgggatta

SEQ ID NO: 91307 - DNA, 80 bp, synthetic construct
  source 1..80: mol_type = other DNA
cctttttcttgattataaatgtaaatacatgtttattgttttaataattgggatacataaaatataaaaaagaaaatgaa

SEQ ID NO: 91308 - DNA, 80 bp, synthetic construct
  source 1..80: mol_type = other DNA
aggtcaggagttcgagaccagccggaccaacatggtgaaaccctgtctctactaaaaatacaaaaataatcccagcactt

SEQ ID NO: 91309 - DNA, 80 bp, synthetic construct
  source 1..80: mol_type = other DNA
tgaacccgggaggcggagcttgcagtgagccgagatcccgccactgcactccagcctgggcgacagagcgagagactccg

SEQ ID NO: 91310 - DNA, 80 bp, synthetic construct; identical to SEQ ID NO: 16819
  source 1..80: mol_type = other DNA

SEQ ID NO: 91311 - DNA, 80 bp, synthetic construct
  source 1..80: mol_type = other DNA
tagaagtgcctttcatggagcaaaggatgtgttatgttttcaaggaccaccggggtgattaactggcaccttttcttctc

SEQ ID NO: 91312 - DNA, 80 bp, synthetic construct
  source 1..80: mol_type = other DNA
ctttgctcacccatctccccagtcagacaaggtttatacgtttcaatacatactgcattctgtgctacacaagccttagc

SEQ ID NO: 91313 - DNA, 80 bp, synthetic construct
  source 1..80: mol_type = other DNA
ttttaaaaattctttccacacctgtcaaaccaaaaatctatcagcccacgtggtgtggttggtgaacagtgcatgccagg

SEQ ID NO: 91314 - DNA, 80 bp, synthetic construct; identical to SEQ ID NO: 16820
  source 1..80: mol_type = other DNA

SEQ ID NO: 91315 - DNA, 80 bp, synthetic construct
  source 1..80: mol_type = other DNA
gcttcagccccaggtgtggtgacttagacctaggaaaccaattatgagtggaaagtgaccctctagttcaactgtgccag

SEQ ID NO: 91316 - DNA, 80 bp, synthetic construct
  source 1..80: mol_type = other DNA
gttgtcttttctcaccaagagtattaacactactaagtctttcaccttaacttatgactcaggatttattcacgtcctgc

SEQ ID NO: 91317 - DNA, 80 bp, synthetic construct
  source 1..80: mol_type = other DNA
tgcctctgctgtgctgcacattgagccctttctcagtcagtggagtatcaagttgggccatctgtctactgacctggcct

SEQ ID NO: 91318 - DNA, 80 bp, synthetic construct; identical to SEQ ID NO: 16821
  source 1..80: mol_type = other DNA

SEQ ID NO: 91319 - DNA, 80 bp, synthetic construct
  source 1..80: mol_type = other DNA
cccagccctccacacactgcacttcatggtctgtctccgacagacagcaaggactgggcctagtagccccagagcaggct

SEQ ID NO: 91320 - DNA, 80 bp, synthetic construct
  source 1..80: mol_type = other DNA
gagagaagatggtgtccttagagggcacccaaatccatgtaaataagccaaatgcacatccaggaatgtaattcctgccc

SEQ ID NO: 91321 - DNA, 80 bp, synthetic construct
  source 1..80: mol_type = other DNA
agggattgcttcagtctgaactggctttttaccaagaaggagggatctgagttgggccccaaagggtaggtaaagttagt

SEQ ID NO: 91322 - DNA, 80 bp, synthetic construct
  source 1..80: mol_type = other DNA
gagtgcagtggcacaatcatggctcactgcagcctcgacctcctgggctcagaagatcttcctgccttagcctcccaagt

SEQ ID NO: 91323 - DNA, 80 bp, synthetic construct; identical to SEQ ID NO: 16822
  source 1..80: mol_type = other DNA

SEQ ID NO: 91324 - DNA, 80 bp, synthetic construct
  source 1..80: mol_type = other DNA
acacccctgagataataataccagtaaacaatagttccacactgctctcccttcttggtattattgagcattcttccata

SEQ ID NO: 91325 - DNA, 80 bp, synthetic construct
  source 1..80: mol_type = other DNA
ggtagaaaacttgacccaaactggcttttgaagcaaaagaggcaatctgttgactcaaactgcagagtccaggaattagg

SEQ ID NO: 91326 - DNA, 80 bp, synthetic construct
  source 1..80: mol_type = other DNA
tccttccagcgagtatcattgtgtttcactggctttaatcaaaccaagtgcctttccaagaagcagtccaatggcttgga

SEQ ID NO: 91327 - DNA, 80 bp, synthetic construct; identical to SEQ ID NO: 16823
  source 1..80: mol_type = other DNA

SEQ ID NO: 91328 - DNA, 80 bp, synthetic construct
  source 1..80: mol_type = other DNA
taattttcatttatctctctttgccccagtaatttgttcaggttgggagtaactcaggcttaagtcagtcagcatgattt

SEQ ID NO: 91329 - DNA, 80 bp, synthetic construct
  source 1..80: mol_type = other DNA
aatgtgtggcctgggcctcctataaccatttttctacctagaaggaaaccagcgtgagaagccagcacacacatatgctc

SEQ ID NO: 91330 - DNA, 80 bp, synthetic construct
  source 1..80: mol_type = other DNA
atacagtcatgtcacttaatgacgaggatacaccctgagaaaagcagtcaggtgatctcgtcgttgtgtgaacatcatgg

SEQ ID NO: 91331 - DNA, 80 bp, synthetic construct; identical to SEQ ID NO: 16824
  source 1..80: mol_type = other DNA

SEQ ID NO: 91332 - DNA, 80 bp, synthetic construct
  source 1..80: mol_type = other DNA
ccttgtaaggtgggtgaagcaggcgtattacctgccttttacaactggagaaacaggttggagagcttacgtaaatcacc

SEQ ID NO: 91333 - DNA, 80 bp, synthetic construct
  source 1..80: mol_type = other DNA
gggggcactggtgaaacatgcttggtttacctctaggctggatggctgaggccctgaataccagctgccatctgtcacta

SEQ ID NO: 91334 - DNA, 80 bp, synthetic construct
  source 1..80: mol_type = other DNA
gctttctccaacctggcccaggcacatctaacaggttcctgcacatcctcacactttcctgcagtaaccctccttgcctc

SEQ ID NO: 91335 - DNA, 80 bp, synthetic construct; identical to SEQ ID NO: 16825
  source 1..80: mol_type = other DNA

SEQ ID NO: 91336 - DNA, 80 bp, synthetic construct
  source 1..80: mol_type = other DNA
atcgcttgaacccaggaggcagaggttgtggtgagctgagattgcacccttgcactccagccttggcaacaagagtgaaa

SEQ ID NO: 91337 - DNA, 80 bp, synthetic construct
  source 1..80: mol_type = other DNA
aaaattaaaaaaaaaaaaaaaaattagtcggatgcggtggcacacacctgtgctcacagctacttgggaggctaagatgg

SEQ ID NO: 91338 - DNA, 80 bp, synthetic construct; identical to SEQ ID NO: 16826
  source 1..80: mol_type = other DNA

SEQ ID NO: 91339 - DNA, 80 bp, synthetic construct
  source 1..80: mol_type = other DNA
tgacagttttgaaaagtatggccaggtattttgtagaacatccctcaggtgggatttgtttgatgttatccttatgacta

SEQ ID NO: 91340 - DNA, 80 bp, synthetic construct
  source 1..80: mol_type = other DNA
accatgtgcagctaattacatttttttttttttttttttggtagaggcaggctcttgctatgttgcccaggctggtcttg

SEQ ID NO: 91341 - DNA, 80 bp, synthetic construct
  source 1..80: mol_type = other DNA
tgcttcatcatgtttatgctgatgttacccttcatcgcctggctgaggtagtttgtcaggttcctccataaggttacttt

SEQ ID NO: 91342 - DNA, 80 bp, synthetic construct; identical to SEQ ID NO: 16827
  source 1..80: mol_type = other DNA

SEQ ID NO: 91343 - DNA, 80 bp, synthetic construct
  source 1..80: mol_type = other DNA
taaactacccggaattctacatgggagatgtttattctcaatttattcaaccatttctttcactatggactcgtttattt

SEQ ID NO: 91344 - DNA, 80 bp, synthetic construct
  source 1..80: mol_type = other DNA
ttcaacgagtactgcatgttgataattgttcacactatgtaatgggtacatttgggttcagtatactattctctcaaccc

SEQ ID NO: 91345 - DNA, 80 bp, synthetic construct
  source 1..80: mol_type = other DNA
agctctgtcaagggagaagggctgcaagggtgctgctcccaggtgtgctgaacagagaggtagccaggtaaggcagatgc

SEQ ID NO: 91346 - DNA, 80 bp, synthetic construct
  source 1..80: mol_type = other DNA
gatggctctggcccaccctcccttcaccaacagccccccacccccagcctgtctggacagctagatggggagcccaaggc

SEQ ID NO: 91347 - DNA, 80 bp, synthetic construct; identical to SEQ ID NO: 16828
  source 1..80: mol_type = other DNA

SEQ ID NO: 91348 - DNA, 80 bp, synthetic construct
  source 1..80: mol_type = other DNA
gcacacgcacatatgcatgcagcatttgtagagtacccaccacaagccaagcacagtgctaggagtccagtaacaagtgc

SEQ ID NO: 91349 - DNA, 80 bp, synthetic construct
  source 1..80: mol_type = other DNA
tgtggacatgacattcctcctcttagctggctggtcttgttgtggccttttggcccaaagctgttggccactgtccttta

SEQ ID NO: 91350 - DNA, 80 bp, synthetic construct; identical to SEQ ID NO: 16829
  source 1..80: mol_type = other DNA

SEQ ID NO: 91351 - DNA, 80 bp, synthetic construct
  source 1..80: mol_type = other DNA
aaaaaattaatagcagagaccgtgctacataattttgcccagagcaggctgtgggtatacaagagccccaccctgcaaag

SEQ ID NO: 91352 - DNA, 80 bp, synthetic construct
  source 1..80: mol_type = other DNA
gggtgtgttgtgtgtgcgagcgtgcacatgggatccagagtgagctagagcatgcgggcccctcggcccagtcatgaggc

SEQ ID NO: 91353 - DNA, 80 bp, synthetic construct
  source 1..80: mol_type = other DNA
gccacccggcactgcagaaatgcaaactgaaactggaatgaagaacagggcaaagtcgccagtatgttaatggttaatgg

SEQ ID NO: 91354 - DNA, 80 bp, synthetic construct; identical to SEQ ID NO: 16830
  source 1..80: mol_type = other DNA

SEQ ID NO: 91355 - DNA, 80 bp, synthetic construct
  source 1..80: mol_type = other DNA
actatgctcggctaatttttttgtatttttagtagagacggggtttcaccacattgaccaggctggtctcaaactcctga

SEQ ID NO: 91356 - DNA, 80 bp, synthetic construct
  source 1..80: mol_type = other DNA
gtattaaatgccaggaacaattcatgggcttctcacactcctttaagcctcacaatggcacttggtgctattattgtcct

SEQ ID NO: 91357 - DNA, 80 bp, synthetic construct
  source 1..80: mol_type = other DNA
caccaagcaaggacaacacttaccagcagggtgataagggtttgccaggagagcctccaaaacccatgcacaggcctgcc

SEQ ID NO: 91358 - DNA, 80 bp, synthetic construct; identical to SEQ ID NO: 16831
  source 1..80: mol_type = other DNA

SEQ ID NO: 91359 - DNA, 80 bp, synthetic construct
  source 1..80: mol_type = other DNA
ccccatgtcattacccctgcttggggcttctaaaggggctagtgtaggcagccctcagctttcttccttctcaagtttaa

SEQ ID NO: 91360 - DNA, 80 bp, synthetic construct
  source 1..80: mol_type = other DNA
aacttccccaacagcgtccttttggttccccgggttatattactgttgggagtcaaacctgagtgacttgaggaccacct

SEQ ID NO: 91361 - DNA, 80 bp, synthetic construct
  source 1..80: mol_type = other DNA
aagtgtccaaacctgagagatgccactgaatcgtggtgggagggaatgggcagagcctcactcgagttgacaccagatct

SEQ ID NO: 91362 - DNA, 80 bp, synthetic construct
  source 1..80: mol_type = other DNA
tttaggaaaggtgtctgggagctggctttttccaccttgctgagtcagccctggttacatgctttgtgtagataatgaca

SEQ ID NO: 91363 - DNA, 80 bp, synthetic construct; identical to SEQ ID NO: 16832
  source 1..80: mol_type = other DNA

SEQ ID NO: 91364 - DNA, 80 bp, synthetic construct
  source 1..80: mol_type = other DNA
gttgatgttttacaatggggttagcgtatcaagaactttaaaaactgggccattttaaatacccttgcacttggggcaac

SEQ ID NO: 91365 - DNA, 80 bp, synthetic construct
  source 1..80: mol_type = other DNA
aataaaccagagattaccattactgtgagagagtaagctatggtccgactttggtatcctgagggaatactcacactcgc

SEQ ID NO: 91366 - DNA, 80 bp, synthetic construct
  source 1..80: mol_type = other DNA
caatcaggtggtttggattttcctaggtgaaccagccacctagccactgtgccccttgtctgaactggtttactgaaatc

SEQ ID NO: 91367 - DNA, 80 bp, synthetic construct; identical to SEQ ID NO: 16833
  source 1..80: mol_type = other DNA

SEQ ID NO: 91368 - DNA, 80 bp, synthetic construct
  source 1..80: mol_type = other DNA
ttccttaatgtaatcatggcctttggaggcttgatcatgtttcaaattgacaagacccatctgccccagctcccattaaa

SEQ ID NO: 91369 - DNA, 80 bp, synthetic construct
  source 1..80: mol_type = other DNA
tgagctgcgttctggccataattcctttttcttccaaggtcaaacaagttcaggctggtgttgggtcccagtctgagtag

SEQ ID NO: 91370 - DNA, 80 bp, synthetic construct; identical to SEQ ID NO: 16834
  source 1..80: mol_type = other DNA

SEQ ID NO: 91371 - DNA, 80 bp, synthetic construct
  source 1..80: mol_type = other DNA
ccttaacaagggtaagaagacaccaccaccaagaaggataaaataagtttttatttatagtcttatagtaaagggggaag

SEQ ID NO: 91372 - DNA, 80 bp, synthetic construct
  source 1..80: mol_type = other DNA
cggagtaggaaaaagacaaagaaatgaggcctaaacacacaaaacccttcactggcatctgctgaccacagccagaacca

SEQ ID NO: 91373 - DNA, 80 bp, synthetic construct
  source 1..80: mol_type = other DNA
gggaagaaagaaagatttcatcattactttatgaatctgtcgctttgcaagaccgacatcatcagaaataggtacaattc

SEQ ID NO: 91374 - DNA, 80 bp, synthetic construct
  source 1..80: mol_type = other DNA
cacgagagtgtcacacggccctccgtgaggctggcgccgcaggcttaaacagctggctgagagaagcaggagtgaaacat

SEQ ID NO: 91375 - DNA, 80 bp, synthetic construct; identical to SEQ ID NO: 16835
  source 1..80: mol_type = other DNA

SEQ ID NO: 91376 - DNA, 80 bp, synthetic construct
  source 1..80: mol_type = other DNA
ggggtgttttggtttaaaaattcctgttggggacagggaatccctgaagggaatacattaaaaaatatacagtggaaatg

SEQ ID NO: 91377 - DNA, 80 bp, synthetic construct
  source 1..80: mol_type = other DNA
taaagagtctcttaaatggttctgagggctctaccaacgaactgaaaggaggatgagacgatggagacagacagttttta

SEQ ID NO: 91378 - DNA, 80 bp, synthetic construct; identical to SEQ ID NO: 16836
  source 1..80: mol_type = other DNA

SEQ ID NO: 91379 - DNA, 80 bp, synthetic construct
  source 1..80: mol_type = other DNA
ctggacctgggagccagcagacactctgcaatcccacccaactctgaagagaaggcttgtgatgtcaccgtcctgccgtg

SEQ ID NO: 91380 - DNA, 80 bp, synthetic construct
  source 1..80: mol_type = other DNA
cttagctctcgtgtacaagatccacttggaatgacaagctggacacttggaagcaagtcaccaatacacataaaatacct

SEQ ID NO: 91381 - DNA, 80 bp, synthetic construct
  source 1..80: mol_type = other DNA
ggttacttgcatttccttttacttgcatcttccatgagggaggaagagaagtgaattccccaggaacaaagaacttgatc

SEQ ID NO: 91382 - DNA, 80 bp, synthetic construct; identical to SEQ ID NO: 16837
  source 1..80: mol_type = other DNA

SEQ ID NO: 91383 - DNA, 80 bp, synthetic construct
  source 1..80: mol_type = other DNA
cctcaggtccttcctcaggacggctctaacactcagttactcaggccccaagaagcaggaccaagcctgctactgagcac

SEQ ID NO: 91384 - DNA, 80 bp, synthetic construct
  source 1..80: mol_type = other DNA
tctgccgcttgaggtcgtcaatatcttgctggtgtgtgtggtttttccttcgcatatactggatatattctgtggctttg

SEQ ID NO: 91385 - DNA, 80 bp, synthetic construct
  source 1..80: mol_type = other DNA
tggctactgtaggctttatttatttatttatttttttatttttttgagacagagtttcgctcttgttgcccaagctggag

SEQ ID NO: 91386 - DNA, 80 bp, synthetic construct
  source 1..80: mol_type = other DNA
ggctggtctcaaactcctggcctcaggtgatctgcccaccttggcctcccaaaatgctgggattataggtcacaggtgtg

SEQ ID NO: 91387 - DNA, 80 bp, synthetic construct; identical to SEQ ID NO: 16838
  source 1..80: mol_type = other DNA

SEQ ID NO: 91388 - DNA, 80 bp, synthetic construct
  source 1..80: mol_type = other DNA
cagaggtagctctactaagaacccaaggatcagagaagtacaccgctttattcaaaatcaccagctgcacagtagcatgg

SEQ ID NO: 91389 - DNA, 80 bp, synthetic construct
  source 1..80: mol_type = other DNA
ttgagacaggaatgggtacaatgtgtttcatcaagacccaagattccagccaaactctgaaaccactgttaactattccg

SEQ ID NO: 91390 - DNA, 80 bp, synthetic construct; identical to SEQ ID NO: 16839
  source 1..80: mol_type = other DNA

SEQ ID NO: 91391 - DNA, 80 bp, synthetic construct
  source 1..80: mol_type = other DNA
tcagggtagggagtgcttgacaattctgtattacaagcccaatgggtcctaaacaaccagaacacaacagcgggagaaag

SEQ ID NO: 91392 - DNA, 80 bp, synthetic construct
  source 1..80: mol_type = other DNA
ttattcataagtcctcacaagtactagaatttccaggctttcctctttagcacccttaaggtaatttcctcaaggaaatt

SEQ ID NO: 91393 - DNA, 80 bp, synthetic construct
  source 1..80: mol_type = other DNA
tgaggagataaatatgtctatacatggaaatatcacagggcagtgctgacaagcgtaacctgactagcagagactagaga

SEQ ID NO: 91394 - DNA, 80 bp, synthetic construct; identical to SEQ ID NO: 16840
  source 1..80: mol_type = other DNA

SEQ ID NO: 91395 - DNA, 80 bp, synthetic construct
  source 1..80: mol_type = other DNA
ggatactggagatggaatgaaaaatgattagtattgataagaggtggtagagtggcaaggaagaatttgggaattagagg

SEQ ID NO: 91396 - DNA, 80 bp, synthetic construct
  source 1..80: mol_type = other DNA
gactagaaattctctaagaccccatctagccctccaaagtctaccctttccatcactgatgtaatttacatccctctatt

SEQ ID NO: 91397 - DNA, 80 bp, synthetic construct
  source 1..80: mol_type = other DNA
agcacttgcaaatgttcagtgataacttttaatgaatgaccagactgagtaacagcctttttgctaccagtttctccttc

SEQ ID NO: 91398 - DNA, 80 bp, synthetic construct; identical to SEQ ID NO: 16841
  source 1..80: mol_type = other DNA

SEQ ID NO: 91399 - DNA, 80 bp, synthetic construct
  source 1..80: mol_type = other DNA
agcacaaaatacagaaataccccaaatttgcatgtgcatgtagtccaggaaagaaaaagcaaaaggctgaagctaaaaat

SEQ ID NO: 91400 - DNA, 80 bp, synthetic construct
  source 1..80: mol_type = other DNA
gcatggactatggaataaccctggactttcagtttctgttttctgaaaattgctctaagtcagctgagtcaactgcctat

SEQ ID NO: 91401 - DNA, 80 bp, synthetic construct
  source 1..80: mol_type = other DNA
gcagaatcataattttgagtctgtctttgtgaacagaaatggctctttaaatggcttggatggagccctgagacagggtg

SEQ ID NO: 91402 - DNA, 80 bp, synthetic construct
  source 1..80: mol_type = other DNA
caacacaagtgacaatgatgatgggggtggtaacaatggcagcactaacacttactgagtacttactaagtgtcaggcat

SEQ ID NO: 91403 - DNA, 80 bp, synthetic construct; identical to SEQ ID NO: 16842
  source 1..80: mol_type = other DNA

SEQ ID NO: 91404 - DNA, 80 bp, synthetic construct
  source 1..80: mol_type = other DNA
agaattgagttgcaagtgaggcaatgatgaagactagtcttcagaatttggttgaaaagtaagaagtaggccaggtgcag

SEQ ID NO: 91405 - DNA, 80 bp, synthetic construct
  source 1..80: mol_type = other DNA
aagattagctgggcatggtggtacacgaatgtggtcccagctacttgggaggcaaaggtgggaggatctcttgagcccat

SEQ ID NO: 91406 - DNA, 80 bp, synthetic construct; identical to SEQ ID NO: 16843
  source 1..80: mol_type = other DNA

SEQ ID NO: 91407 - DNA, 80 bp, synthetic construct
  source 1..80: mol_type = other DNA
cctcttggcagcccagaaggataaaagcaaaatgaataatgtagaagggacccagggtgtggcagagggtctgccaggtt

SEQ ID NO: 91408 - DNA, 80 bp, synthetic construct
  source 1..80: mol_type = other DNA
aactgactacatatgtcacaaaaggcctcagacccaaaagacttggattctaaatagaaccgtttaaggccccaaatgac

SEQ ID NO: 91409 - DNA, 80 bp, synthetic construct
  source 1..80: mol_type = other DNA
gttgttttagaaagtgggtggggagaggtgaggaaaagaatagtagtgctagattgttaacattaggaacaccactgccc

SEQ ID NO: 91410 - DNA, 80 bp, synthetic construct
  source 1..80: mol_type = other DNA
agaaccaaaatgccatatctggagggatgaaaaaagaggtactgctggactcaacaactgacatctgttttattttgtac

SEQ ID NO: 91411 - DNA, 80 bp, synthetic construct; identical to SEQ ID NO: 16844
  source 1..80: mol_type = other DNA

SEQ ID NO: 91412 - DNA, 80 bp, synthetic construct
  source 1..80: mol_type = other DNA
cattttttaaatcttgcattcttttttcttgtgcacttggtagcttgaaatgaaggtgtggcatttctgcatcaaacttt

SEQ ID NO: 91413 - DNA, 80 bp, synthetic construct
  source 1..80: mol_type = other DNA
tgataatgaaactggtactctcaaaacactaccaaaagactactctttagaatttgcttgaaaaaaagaaagaaatggaa

SEQ ID NO: 91414 - DNA, 80 bp, synthetic construct; identical to SEQ ID NO: 16845
  source 1..80: mol_type = other DNA

SEQ ID NO: 91415 - DNA, 80 bp, synthetic construct
  source 1..80: mol_type = other DNA
tggggagaaaaaaaggaggcaggtttcttttcacatccactttaagatgatgtctaattttagtcacattaaatggggca

SEQ ID NO: 91416 - DNA, 80 bp, synthetic construct
  source 1..80: mol_type = other DNA
ttacatgttgagatcatacttacttttgaatattaggctaaataaattatattattcaaattttcacctgtttaactttt

SEQ ID NO: 91417 - DNA, 80 bp, synthetic construct
  source 1..80: mol_type = other DNA
ttctaaagtttttgcaattttgttggagaaaacaaaaatgctaaaggcaaggcctagtaatcaatctctatccttccgaa

SEQ ID NO: 91418 - DNA, 80 bp, synthetic construct; identical to SEQ ID NO: 16846
  source 1..80: mol_type = other DNA

SEQ ID NO: 91419 - DNA, 80 bp, synthetic construct
  source 1..80: mol_type = other DNA
gtggctggggttggaccttgagaaaagcaaagcactcagataagctgagaatgaaattcctgggcaaacagaagaggggt

SEQ ID NO: 91420 - DNA, 80 bp, synthetic construct
  source 1..80: mol_type = other DNA
tggttttaaaaacagcagtttccctgcacaagttctcttcgcctgctgccatccatgtaaaacgtgacttgcttctcctt

SEQ ID NO: 91421 - DNA, 80 bp, synthetic construct
  source 1..80: mol_type = other DNA
aaagatacctgaaaatgtggaagcaactttggaactaggtaacaggcagaggttggaacaatttgaagggctcagaagaa

SEQ ID NO: 91422 - DNA, 80 bp, synthetic construct; identical to SEQ ID NO: 16847
  source 1..80: mol_type = other DNA

SEQ ID NO: 91423 - DNA, 80 bp, synthetic construct
  source 1..80: mol_type = other DNA
tcaagccagctgcagagatttgcataagtaatgagaagccgaatgttaatccccaagacaatggggaaaatgtctccagg

SEQ ID NO: 91424 - DNA, 80 bp, synthetic construct
  source 1..80: mol_type = other DNA
aatgcagagctcaggttgcggcttcagagggtgccagccccaagccttggcagcttcctcatggtattgagcctgggagt

SEQ ID NO: 91425 - DNA, 80 bp, synthetic construct
  source 1..80: mol_type = other DNA
ccccacacagtctctactggggccctctctagtggagctgtgagaagagtgccaccatcctgcagaccccagaatggtag

SEQ ID NO: 91426 - DNA, 80 bp, synthetic construct
  source 1..80: mol_type = other DNA
tgtgagacatggagtcaaaggagatcattacagggcttttagatttgactgccctgctggattttggacttgcatgaggc

SEQ ID NO: 91427 - DNA, 80 bp, synthetic construct; identical to SEQ ID NO: 16848
  source 1..80: mol_type = other DNA

SEQ ID NO: 91428 - DNA, 80 bp, synthetic construct
  source 1..80: mol_type = other DNA
tctgatggttttaaaaacaggagtttccctgcacaagctctctctctttgcctgctgccatccatgtaagacatgacttg

SEQ ID NO: 91429 - DNA, 80 bp, synthetic construct
  source 1..80: mol_type = other DNA
aatgtcaggaaggaggcgaaaaagcaggtaggtaagctgggtatcttatttacagaacatggaataccagtccttaccta

SEQ ID NO: 91430 - DNA, 80 bp, synthetic construct
  source 1..80: mol_type = other DNA
ttggagtctgactagctaatataaccttaatgagtaatgaggagaagtggatagggctatagtttacatttcatttaaac

SEQ ID NO: 91431 - DNA, 80 bp, synthetic construct; identical to SEQ ID NO: 16849
  source 1..80: mol_type = other DNA

SEQ ID NO: 91432 - DNA, 80 bp, synthetic construct
  source 1..80: mol_type = other DNA
acatctacctgttaagaaaaccagattttaatggaaatgaaactgagattaactcaatgtaaagctcttatctgatgctc

SEQ ID NO: 91433 - DNA, 80 bp, synthetic construct
  source 1..80: mol_type = other DNA
ttttctttaatggctgagcaagcctgctgtttcctctggctctctctctccaccacaatttactaactgagaacctacta

SEQ ID NO: 91434 - DNA, 80 bp, synthetic construct
  source 1..80: mol_type = other DNA
gagagcaatgagtttgataacaacaggcactgagggagagacttaaaagatgagaaattactataaaccactgtagagct

SEQ ID NO: 91435 - DNA, 80 bp, synthetic construct; identical to SEQ ID NO: 16850
  source 1..80: mol_type = other DNA

SEQ ID NO: 91436 - DNA, 80 bp, synthetic construct
  source 1..80: mol_type = other DNA
gctggctgatgattctaattccatcctattgttcccagtggaacaacagtggaactccacatacagttgagaaactgcaa

SEQ ID NO: 91437 - DNA, 80 bp, synthetic construct
  source 1..80: mol_type = other DNA
aataccctgcatttcagtgttacctacatacgccacctcagaggatagcatttctgtagtagccgtggtatgacacactg

SEQ ID NO: 91438 - DNA, 80 bp, synthetic construct; identical to SEQ ID NO: 16851
  source 1..80: mol_type = other DNA

SEQ ID NO: 91439 - DNA, 80 bp, synthetic construct
  source 1..80: mol_type = other DNA
agctcactgcagcctggacctcccagactcaagtgatcctcccaccacagcctcccaagtagccaggactacaggtaagc

SEQ ID NO: 91440 - DNA, 80 bp, synthetic construct
  source 1..80: mol_type = other DNA
aaaatgtttaatttatagtagaaatacagaaaacaaagggtaaatagagtttgggtcccacatttaaagctttctttctt

SEQ ID NO: 91441 - DNA, 80 bp, synthetic construct
  source 1..80: mol_type = other DNA
tcagctgaaacataaagatgcttaagtcaaaggagactggaacacagagagacccaaatcaaaggctttccctttaagaa

SEQ ID NO: 91442 - DNA, 80 bp, synthetic construct; identical to SEQ ID NO: 16852
  source 1..80: mol_type = other DNA

SEQ ID NO: 91443 - DNA, 80 bp, synthetic construct
  source 1..80: mol_type = other DNA
atggtatctagtaaattctcaaattggggttttgttgactggctctagaatctggttcccctggaccactcctctctcct

SEQ ID NO: 91444 - DNA, 80 bp, synthetic construct
  source 1..80: mol_type = other DNA
ccagacagatgcactactctttgcttcactttgttcaaagctttgctaaaatgtcaccttgccagcaacactcttcttct

SEQ ID NO: 91445 - DNA, 80 bp, synthetic construct
  source 1..80: mol_type = other DNA
tatctaggatagtgcctggcatgtagcagaccctcagtaagtatgtgttgaatggcatgaatgagtaaataaatgagcca

SEQ ID NO: 91446 - DNA, 80 bp, synthetic construct; identical to SEQ ID NO: 16853
  source 1..80: mol_type = other DNA

SEQ ID NO: 91447 - DNA, 80 bp, synthetic construct
  source 1..80: mol_type = other DNA
tttaattgatactatggtacaggaataagcaccaactgtcaacaggtcaaagaagcctaagagataatctttggcatgtg

SEQ ID NO: 91448 - DNA, 80 bp, synthetic construct
  source 1..80: mol_type = other DNA
ttgcaataccaggtatgtacatggcctgttttgttctttataaaggtcagaacttctccatgtttacgccacatggaaag

SEQ ID NO: 91449 - DNA, 80 bp, synthetic construct
  source 1..80: mol_type = other DNA
acagaatagttccttctttataaaacactggatcactaaagcaaaaacacaggtcctcttcccagcttgccagttattcc

SEQ ID NO: 91450 - DNA, 80 bp, synthetic construct
  source 1..80: mol_type = other DNA
ggaaaacactaggttccagaagggagtggggaagaatggttattttttttctgtttcacatgaacatgtctcttcactca

SEQ ID NO: 91451 - DNA, 80 bp, synthetic construct; identical to SEQ ID NO: 16854
  source 1..80: mol_type = other DNA

SEQ ID NO: 91452 - DNA, 80 bp, synthetic construct
  source 1..80: mol_type = other DNA
aaactggagtacgtaaggtgtgcagtgatcctccaaacagtcaaaaataaggcaaccatgctacctgaatatctctgact

SEQ ID NO: 91453 - DNA, 80 bp, synthetic construct
  source 1..80: mol_type = other DNA
acgttttcgttccagtgcattatgatgagcccgtttgtcagcctagaagaatgggagaaagaacacattaggaatgtcac

SEQ ID NO: 91454 - DNA, 80 bp, synthetic construct; identical to SEQ ID NO: 16855
  source 1..80: mol_type = other DNA

SEQ ID NO: 91455 - DNA, 80 bp, synthetic construct
  source 1..80: mol_type = other DNA
aagagttaagtcactggtgcttctttaatgtgaaaccatcaccatgagtcccaagcccactaaaaggcactagtttaaga

SEQ ID NO: 91456 - DNA, 80 bp, synthetic construct
  source 1..80: mol_type = other DNA
tgataagatgacaactgaattctgagttcctattttttaaaagtagatccaaggtgctatcctgccaagggcttccttgc

SEQ ID NO: 91457 - DNA, 80 bp, synthetic construct
  source 1..80: mol_type = other DNA
agtcaaagccttagcctgcttggaatcacaaagaacggtcagctggagatggaccaaaactgccaacaccaaatcaggaa

SEQ ID NO: 91458 - DNA, 80 bp, synthetic construct
  source 1..80: mol_type = other DNA
ttatgctctgaacattcaccttgaatgcacaacgttgcactgagctaatctagagagccagtctgtacatgggaagttca

SEQ ID NO: 91459 - DNA, 80 bp, synthetic construct; identical to SEQ ID NO: 16856
  source 1..80: mol_type = other DNA

SEQ ID NO: 91460 - DNA, 80 bp, synthetic construct
  source 1..80: mol_type = other DNA
ttcactgtaaaatgaatgtttactgaactatagtgacatgaaatatgaagctgagaggacagtcaagtttggaacaccac

SEQ ID NO: 91461 - DNA, 80 bp, synthetic construct
  source 1..80: mol_type = other DNA
ttttgaacttactgttgttccctctgatcatctacataaagataagttgggctgcgactatacctaaggagcttaaaggc

SEQ ID NO: 91462 - DNA, 80 bp, synthetic construct
  source 1..80: mol_type = other DNA
aagagctgtgcaccagaattacccacaatccctcttgttgatacaaataaaattctaattgtctgttttctttctgggag

SEQ ID NO: 91463 - DNA, 80 bp, synthetic construct; identical to SEQ ID NO: 16857
  source 1..80: mol_type = other DNA

SEQ ID NO: 91464 - DNA, 80 bp, synthetic construct
  source 1..80: mol_type = other DNA
ttaactagcagaagagtggaatcttacaccaatccctgctgccatgtccatccctgagctactagtggagtcaattttaa

SEQ ID NO: 91465 - DNA, 80 bp, synthetic construct
  source 1..80: mol_type = other DNA
tcactaatgttttgaaagagcacatgaaaaacagaaaaacctttacacaaggctgagaattctctgtgggaaacatttcc

SEQ ID NO: 91466 - DNA, 80 bp, synthetic construct; identical to SEQ ID NO: 16858
  source 1..80: mol_type = other DNA

SEQ ID NO: 91467 - DNA, 80 bp, synthetic construct
  source 1..80: mol_type = other DNA
tcccctacacatcctatggttacagtggctggatgctgcccactcttctagtacgctggatttgtacgtctggatgtctg

SEQ ID NO: 91468 - DNA, 80 bp, synthetic construct
  source 1..80: mol_type = other DNA
tccacactggtagacagaataaaaatcttcacctacaatttgtccatctttgacactaccaagcacgtgtatcttaagtg

SEQ ID NO: 91469 - DNA, 80 bp, synthetic construct
  source 1..80: mol_type = other DNA
tcacatcagtcagtaatcttatttcctccaagttctaggcaaatagcacggggaaataaatgcttcattattccaggatg

SEQ ID NO: 91470 - DNA, 80 bp, synthetic construct
  source 1..80: mol_type = other DNA
ttttagagggaagcttgtgttgcttatgattcttatcaagctattcttattagagactaaggacacgagaatacacagac

SEQ ID NO: 91471 - DNA, 80 bp, synthetic construct; identical to SEQ ID NO: 16859
  source 1..80: mol_type = other DNA

SEQ ID NO: 91472 - DNA, 80 bp, synthetic construct
  source 1..80: mol_type = other DNA
actatttcaccgttactggcatcttggaaaaattcttttagacataagaacaacttttaccctaacacaggcacatttag

SEQ ID NO: 91473 - DNA, 80 bp, synthetic construct
  source 1..80: mol_type = other DNA
cgttctcttctgaatattcctaaagaagcaaagagctctgagaagttaaaaatatttcatgccagaaaggtccagaagtg

SEQ ID NO: 91474 - DNA, 80 bp, synthetic construct
  source 1..80: mol_type = other DNA
cccaaacagaaataaagcaaaaggaagcccttgcaatataatatacctgtcccacaaatttatctttaaaatgcaacctc

SEQ ID NO: 91475 - DNA, 80 bp, synthetic construct; identical to SEQ ID NO: 16860
  source 1..80: mol_type = other DNA

SEQ ID NO: 91476 - DNA, 80 bp, synthetic construct
  source 1..80: mol_type = other DNA
tatatttattatccatattaaatattgagaagtaagcagatgcattcacagaggggaaaaaatggaatcctttttaccct

SEQ ID NO: 91477 - DNA, 80 bp, synthetic construct
  source 1..80: mol_type = other DNA
gcctacccccaaaatcaaaaggaaaaatcctaggcaccttaacagcaaactaaaaacatctagacaaaacaatgagatta

SEQ ID NO: 91478 - DNA, 80 bp, synthetic construct; identical to SEQ ID NO: 16861
  source 1..80: mol_type = other DNA

SEQ ID NO: 91479 - DNA, 80 bp, synthetic construct
  source 1..80: mol_type = other DNA
aaataaaataaaacaaattatctttaatgactattacccagggataatttttaagacttttggaacaactacatccccgg

SEQ ID NO: 91480 - DNA, 80 bp, synthetic construct
  source 1..80: mol_type = other DNA
accctgtggttatcaagttcttataccagaggtatcaaagtgacatcctgcaaattctaacaagcccccaaacagttgtt

SEQ ID NO: 91481 - DNA, 80 bp, synthetic construct
  source 1..80: mol_type = other DNA
agcctggccaacatggtgaaaccccgtctctactaaaaatacaaaaattagctgggtgtggtggcacgcgcctgtagtcc

SEQ ID NO: 91482 - DNA, 80 bp, synthetic construct; identical to SEQ ID NO: 16862
  source 1..80: mol_type = other DNA

SEQ ID NO: 91483 - DNA, 80 bp, synthetic construct
  source 1..80: mol_type = other DNA
gtgtattcttttttccctcaaatctattcatgaaacatccatattactgtctcagactccaaagacatggaattagtgct

SEQ ID NO: 91484 - DNA, 80 bp, synthetic construct
  source 1..80: mol_type = other DNA
aaatacagagaatcagaccataataactttatgtgacactttgatgatgtaacgtttggctcctctacatttccaatttt

SEQ ID NO: 91485 - DNA, 80 bp, synthetic construct
  source 1..80: mol_type = other DNA
aaataatactaccagaccagaatgctgcatttctcatttccacttacatagtggcatctggatcccctatctgaaaacta

SEQ ID NO: 91486 - DNA, 80 bp, synthetic construct
  source 1..80: mol_type = other DNA
cctcaccttagtggttaacattagagtttactacaatattaaaagtaatagtacgatctctttttctctctgaccccaaa

SEQ ID NO: 91487 - DNA, 80 bp, synthetic construct; identical to SEQ ID NO: 16863
  source 1..80: mol_type = other DNA

SEQ ID NO: 91488 - DNA, 80 bp, synthetic construct
  source 1..80: mol_type = other DNA
ctaggcacccccaacccctctccgcccttccccggcccccaggatccgcgggtcacgggaggagaggatcgcagtccgaa

SEQ ID NO: 91489 - DNA, 80 bp, synthetic construct
  source 1..80: mol_type = other DNA
tcttcccccaacctccagtcccaggaggccgctccggccaggagccggaggggagcgaaccgggaacgcgacggaggcac

SEQ ID NO: 91490 - DNA, 80 bp, synthetic construct
  source 1..80: mol_type = other DNA
gctcatttcctacggcccagggagcggccactgcagcggcggcggggaggggaaggggtgaaggggagggggaagtcacc

SEQ ID NO: 91491 - DNA, 80 bp, synthetic construct; identical to SEQ ID NO: 16864
  source 1..80: mol_type = other DNA

SEQ ID NO: 91492 - DNA, 80 bp, synthetic construct
  source 1..80: mol_type = other DNA
ctttcttggaactgaaaaataaatctatgtacaaaacaggaagagatcaggctcttgtcacccactcctaaccctctgca

SEQ ID NO: 91493 - DNA, 80 bp, synthetic construct; identical to SEQ ID NO: 16865
  source 1..80: mol_type = other DNA

SEQ ID NO: 91494 - DNA, 80 bp, synthetic construct
  source 1..80: mol_type = other DNA
taaagactggtaattaggacccagcgtgaggtttccattggccggctgggattctgggagaagagacctatattctaacg

SEQ ID NO: 91495 - DNA, 80 bp, synthetic construct
  source 1..80: mol_type = other DNA
tagttcagaggcctttgcgctgccgcttgaggaaagacagagtgtagtcactaggggtggacactttctgcttcttcatc

SEQ ID NO: 91496 - DNA, 80 bp, synthetic construct
  source 1..80: mol_type = other DNA
tgccaccttcagggcctcgggctgtgccagcgacagtcccaggaggcttccgggggggtcctgacactgcaccctggccg

SEQ ID NO: 91497 - DNA, 80 bp, synthetic construct; identical to SEQ ID NO: 16866
  source 1..80: mol_type = other DNA

SEQ ID NO: 91498 - DNA, 80 bp, synthetic construct
  source 1..80: mol_type = other DNA
cctagggactgcacaagaaaggtggcccagcccacatgcagcacaggcgtgggactgccctcctcccatttgcagatgcc

SEQ ID NO: 91499 - DNA, 80 bp, synthetic construct
  source 1..80: mol_type = other DNA
ctggctccagaaaaggtaagcataggttgggaacattcttagaacctctttccttttataaagccaatccatagccagga

SEQ ID NO: 91500 - DNA, 80 bp, synthetic construct
  source 1..80: mol_type = other DNA
aggacctcagttatagcaaaagggaacatagctgtctgctcagggccaccttcctcctgccatccctaatcccgtacatg

SEQ ID NO: 91501 - DNA, 80 bp, synthetic construct
  source 1..80: mol_type = other DNA
acttcaaagaactccttgtagatctcctcgtcttcccggcagtagttgtagctgtgagagcagtggggtctctgtagggt

SEQ ID NO: 91502 - DNA, 80 bp, synthetic construct; identical to SEQ ID NO: 16867
  source 1..80: mol_type = other DNA

SEQ ID NO: 91503 - DNA, 80 bp, synthetic construct
  source 1..80: mol_type = other DNA
gccctagtagggggatcctcactcctggatgacagtggccgtgtccgcccaggcctgcagggcttcccgcacattgcggt

SEQ ID NO: 91504 - DNA, 80 bp, synthetic construct
  source 1..80: mol_type = other DNA
cagaaggggccacaggaagatcccagggagtcctctccatctccactcccacctccactcgctgccagcccttctacctg

SEQ ID NO: 91505 - DNA, 80 bp, synthetic construct
  source 1..80: mol_type = other DNA
acccaccaagtgaacaccccctcttcatcagtgctcctgccacatttgacctctgttatactccaggaaggacagtaagc

SEQ ID NO: 91506 - DNA, 80 bp, synthetic construct; identical to SEQ ID NO: 16868
  source 1..80: mol_type = other DNA

SEQ ID NO: 91507 - DNA, 80 bp, synthetic construct
  source 1..80: mol_type = other DNA
taggaaaggatcataattcaggctgccacccagccccccggcctcaccaggcgcagcctggccacttccctctactgacc

SEQ ID NO: 91508 - DNA, 80 bp, synthetic construct
  source 1..80: mol_type = other DNA
attctgggaccagccctttaatggagtcaaagcaatttcacatctcaattctactctcccaagagccctgggaaaggcca

SEQ ID NO: 91509 - DNA, 80 bp, synthetic construct; identical to SEQ ID NO: 16869
  source 1..80: mol_type = other DNA

SEQ ID NO: 91510 - DNA, 80 bp, synthetic construct
  source 1..80: mol_type = other DNA
cttgggctactacagtatgaaggggacaaggctggggggagggaacaatacccgctcagccacaccggcattgactgtct

SEQ ID NO: 91511 - DNA, 80 bp, synthetic construct
  source 1..80: mol_type = other DNA
aatttggtgcctgtggaagggggaggtaatgaaagagggtcctctgtgctttaacatggggaaagggggccaggtagtga

SEQ ID NO: 91512 - DNA, 80 bp, synthetic construct
  source 1..80: mol_type = other DNA
ttggccctacctcgtctttctctgcaactctattatatattctatggatttagggattccattttactgcacttactagg

SEQ ID NO: 91513 - DNA, 80 bp, synthetic construct; identical to SEQ ID NO: 16870
  source 1..80: mol_type = other DNA

SEQ ID NO: 91514 - DNA, 80 bp, synthetic construct
  source 1..80: mol_type = other DNA
cccagctactcaggaggctgaggcaggaggcaggagaatggcatgaaagcaggaggcagagcttgcagtgagccgagatt

SEQ ID NO: 91515 - DNA, 80 bp, synthetic construct
  source 1..80: mol_type = other DNA
tcacttgagcccaagagttcaagaccagtctgggccacatagtgagacaccatctctacaaaaaaaatacaaaaaattaa

SEQ ID NO: 91516 - DNA, 80 bp, synthetic construct
  source 1..80: mol_type = other DNA
aaaatcttcatagccattattttgtttaactgcctcaaatgcagcccaatttcatcttcttgccccctaaatctgctgcc

SEQ ID NO: 91517 - DNA, 80 bp, synthetic construct; identical to SEQ ID NO: 16871
  source 1..80: mol_type = other DNA

SEQ ID NO: 91518 - DNA, 80 bp, synthetic construct
  source 1..80: mol_type = other DNA
tggagacacccccttctcgaggatagagggacaggtcgacggcgcctcggatctgggcggtgaagcgggcatagagggcg

SEQ ID NO: 91519 - DNA, 80 bp, synthetic construct
  source 1..80: mol_type = other DNA
ggtccggctcctctcggcccagctcggcagcaaacaggcgcaccacgtcgtcgatggagcgcagcgggaacagcgtcttc

SEQ ID NO: 91520 - DNA, 80 bp, synthetic construct
  source 1..80: mol_type = other DNA
tcttcagcctctgctcaccggcttcccctcttttgtcggtgagacccctcagccgagactgcagagcctttttgtccccc

SEQ ID NO: 91521 - DNA, 80 bp, synthetic construct
  source 1..80: mol_type = other DNA
ctggcctcggtccccctcgcccacctccgcgcttacatcccacactaggcaccgcggcgcacgccgcccggagcctgctg

SEQ ID NO: 91522 - DNA, 80 bp, synthetic construct; identical to SEQ ID NO: 16872
  source 1..80: mol_type = other DNA

SEQ ID NO: 91523 - DNA, 80 bp, synthetic construct
  source 1..80: mol_type = other DNA
agagtaaatgtgttcagccgctttagctgggtatcagtgtctgttaacatataaagatgcctactctgtgtgcagcactc

SEQ ID NO: 91524 - DNA, 80 bp, synthetic construct
  source 1..80: mol_type = other DNA
cctcagcctcccgagtagctgtgatcacaggcgtgcgccaccactcccgcctaattttgtgtgtatgtgcatatacataa

SEQ ID NO: 91525 - DNA, 80 bp, synthetic construct; identical to SEQ ID NO: 16873
  source 1..80: mol_type = other DNA

SEQ ID NO: 91526 - DNA, 80 bp, synthetic construct
  source 1..80: mol_type = other DNA
cagctaatgctatcaaagagatgattgagaactggtacggagggagtcgagccgggctcacttaagggctacgacttaac

SEQ ID NO: 91527 - DNA, 80 bp, synthetic construct
  source 1..80: mol_type = other DNA
cttttaagggttgtttggagtgtaagtggaggaatatacgtagtgttgtcttaatggtaccgttaactaagtaaggaagc

SEQ ID NO: 91528 - DNA, 80 bp, synthetic construct; identical to SEQ ID NO: 16874
  source 1..80: mol_type = other DNA

SEQ ID NO: 91529 - DNA, 80 bp, synthetic construct
  source 1..80: mol_type = other DNA
tatttcggaggacgcacttcgaagataccagattttatgggtcatccttggattttgaagcttataactgtgacaaaaaa

SEQ ID NO: 91530 - DNA, 80 bp, synthetic construct
  source 1..80: mol_type = other DNA
agtttggagtggtaggtttctagagggatttattgtgaaagtataaactattcagggcaatgggactgagagaacagtgg

SEQ ID NO: 91531 - DNA, 80 bp, synthetic construct; identical to SEQ ID NO: 16875
  source 1..80: mol_type = other DNA

SEQ ID NO: 91532 - DNA, 80 bp, synthetic construct
  source 1..80: mol_type = other DNA
ataggcatgtgccaccacacctggctaattttgtatttttagtagagatgggatttctccatgttggtcaggctggtgtc

SEQ ID NO: 91533 - DNA, 80 bp, synthetic construct
  source 1..80: mol_type = other DNA
gccaccgcgcccggctcaagtggagatttttatatggagtccagttatactctttttaatatataagttgagatgactaa

SEQ ID NO: 91534 - DNA, 80 bp, synthetic construct
  source 1..80: mol_type = other DNA
cgatcttcctgcctcagcctcccgagtagctgggagtacaggcgtgcatgaccacacccggctaatttttttatttttag

SEQ ID NO: 91535 - DNA, 80 bp, synthetic construct; identical to SEQ ID NO: 16876
  source 1..80: mol_type = other DNA

SEQ ID NO: 91536 - DNA, 80 bp, synthetic construct
  source 1..80: mol_type = other DNA
acctcctgggttcaagtgattctcctgccttagcctcctgagtagctgggattacaggcatgcgtcaccatgcctggcta

SEQ ID NO: 91537 - DNA, 80 bp, synthetic construct
  source 1..80: mol_type = other DNA
attgcgcctggccagaaaattcattgacttcctaaagatttattaactttctgcattacttttttttttcccctccatcg

SEQ ID NO: 91538 - DNA, 80 bp, synthetic construct
  source 1..80: mol_type = other DNA
tttttaacttcacttgctgtctttcctagaggaacagaaatagtgctgaatgtcctattagaaatgatggttgctctgcc

SEQ ID NO: 91539 - DNA, 80 bp, synthetic construct
  source 1..80: mol_type = other DNA
gataaattattttctgtttgatttgccagtttagatgcaaaatccacaagtattcaagtgattgttaaagagggaggcct

SEQ ID NO: 91540 - DNA, 80 bp, synthetic construct; identical to SEQ ID NO: 16877
  source 1..80: mol_type = other DNA

SEQ ID NO: 91541 - DNA, 80 bp, synthetic construct
  source 1..80: mol_type = other DNA
tgtggagaaaactaaagcagggaggaagataggagtgtgcaagccagaaaggttgcaattaaattgagtagttcaggaag

SEQ ID NO: 91542 - DNA, 80 bp, synthetic construct
  source 1..80: mol_type = other DNA
tagaggctgaaaaggaaagagtaataggagatgaggtctgagtgaaaacacgtaaatccttgtgggccaaggtaaaatct

SEQ ID NO: 91543 - DNA, 80 bp, synthetic construct
  source 1..80: mol_type = other DNA
agatgtaagaagcagtgagattctgggttaattatggaggcaaagttctcagaatttgctgatatagggtatgagagaaa

SEQ ID NO: 91544 - DNA, 80 bp, synthetic construct; identical to SEQ ID NO: 16878
  source 1..80: mol_type = other DNA

SEQ ID NO: 91545 - DNA, 80 bp, synthetic construct
  source 1..80: mol_type = other DNA
taaaaatatataattagccgggcgtggtggcacatgcctgtaatcccagctactcgggaggctgaggcaggagaatcgct

SEQ ID NO: 91546 - DNA, 80 bp, synthetic construct
  source 1..80: mol_type = other DNA
aatgaaaaccacaatgagataccacttcacacctattaggatggctattatcaaaaacaaaaacaagtgtttgcaaggat

SEQ ID NO: 91547 - DNA, 80 bp, synthetic construct
  source 1..80: mol_type = other DNA
tgtacactcatattcatggcagcattatttacagtagccaaaaggtgaaagcaacctaagtgtccgtcagtggatgaatg

SEQ ID NO: 91548 - DNA, 80 bp, synthetic construct; identical to SEQ ID NO: 16879
  source 1..80: mol_type = other DNA

SEQ ID NO: 91549 - DNA, 80 bp, synthetic construct
  source 1..80: mol_type = other DNA
tattattatactttaagttttagggtacatgtgcacaacatgcaggtttgttacatatgtatacatgtgccatgttggtg

SEQ ID NO: 91550 - DNA, 80 bp, synthetic construct
  source 1..80: mol_type = other DNA
gtttggttttttgtccttgtgatagtttgctgagaatgatggtttccagcttcatccatgtccctgcaaaggacatgaac

SEQ ID NO: 91551 - DNA, 80 bp, synthetic construct
  source 1..80: mol_type = other DNA
atttataatcctttgggtatatacccagtaatgggatggctgggtcaaatggtatttctagttctagatccctgaggaat

SEQ ID NO: 91552 - DNA, 80 bp, synthetic construct
  source 1..80: mol_type = other DNA
ttgcatttctctgatggccagtgatgatgagcatttcttcatgtgttttttggctgcataaatgtcttctttcgagaagt

SEQ ID NO: 91553 - DNA, 80 bp, synthetic construct; identical to SEQ ID NO: 16880
  source 1..80: mol_type = other DNA

SEQ ID NO: 91554 - DNA, 80 bp, synthetic construct
  source 1..80: mol_type = other DNA
gccactgcacccagccttggagatttttaataaagaagcttgtcaattaaacaaacaacaaaaagccctgagactgaatg

SEQ ID NO: 91555 - DNA, 80 bp, synthetic construct
  source 1..80: mol_type = other DNA
aagaaaggaggaacaccaggacagtgtggtattctggattccaaacaaggaagttactgctaattttaaagctcttctca

SEQ ID NO: 91556 - DNA, 80 bp, synthetic construct
  source 1..80: mol_type = other DNA
ctgtaatcccagtgctttgggaggtcaaggcagccagatcatttgagatcaggagttcgagaccagcatggccagcatag

SEQ ID NO: 91557 - DNA, 80 bp, synthetic construct; identical to SEQ ID NO: 16881
  source 1..80: mol_type = other DNA

SEQ ID NO: 91558 - DNA, 80 bp, synthetic construct
  source 1..80: mol_type = other DNA
aacagaaagaagatctggatattgtatgtgaaaggttcactactagtaaactgcagtcctttgaggatttagccagtatt

SEQ ID NO: 91559 - DNA, 80 bp, synthetic construct
  source 1..80: mol_type = other DNA
ttggtaccttttacttgttaaatgtatgcaaatctgagcaaacttaatgaactttaactttcaaagactgagaattgttc

SEQ ID NO: 91560 - DNA, 80 bp, synthetic construct; identical to SEQ ID NO: 16882
  source 1..80: mol_type = other DNA

SEQ ID NO: 91561 - DNA, 80 bp, synthetic construct
  source 1..80: mol_type = other DNA
ggagaaattatgaattatcttggtataagaatattgtcatgggtttttttttttgagtccttacctgttaagatacatac

SEQ ID NO: 91562 - DNA, 80 bp, synthetic construct
  source 1..80: mol_type = other DNA
tacatgtatgtactgtagtttgtttaaatggtttcctattgaacatttatgctctttgccattttttcctgtttaacgtt

SEQ ID NO: 91563 - DNA, 80 bp, synthetic construct
  source 1..80: mol_type = other DNA
ccactatgcccagctaatttttgtattttgggtagagacagggtttggccatgttggccaggctggtcttgaactcctga

SEQ ID NO: 91564 - DNA, 80 bp, synthetic construct; identical to SEQ ID NO: 16883
  source 1..80: mol_type = other DNA

SEQ ID NO: 91565 - DNA, 80 bp, synthetic construct
  source 1..80: mol_type = other DNA
cagagaaactactttacagtagttattttaagggaatgaaagtgaagatggggttgggcagtcaaagaggctgttacttt

SEQ ID NO: 91566 - DNA, 80 bp, synthetic construct
  source 1..80: mol_type = other DNA
agattattccaagaagggacaatttccaagacttggtttacactgagacggctcctgattttaaggataccttagatcaa

SEQ ID NO: 91567 - DNA, 80 bp, synthetic construct; identical to SEQ ID NO: 16884
  source 1..80: mol_type = other DNA

SEQ ID NO: 91568 - DNA, 80 bp, synthetic construct
  source 1..80: mol_type = other DNA
tggtactctatcttcctggtgtgatgttgtgttctactttgcattttcatgtctttccttatacaggtctcaaaatcatt

SEQ ID NO: 91569 - DNA, 80 bp, synthetic construct
  source 1..80: mol_type = other DNA
gctagcaaatttttgtatttttagtagagattggtgtttcaccatgttggccaggctgttcttgaactcctgacctcagg

SEQ ID NO: 91570 - DNA, 80 bp, synthetic construct
  source 1..80: mol_type = other DNA
atgctgtcacacagaccccgtcatagcacagttcctgagttacatctttacatactgtagtatccttcttgtgaaaaaag

SEQ ID NO: 91571 - DNA, 80 bp, synthetic construct; identical to SEQ ID NO: 16885
  source 1..80: mol_type = other DNA

SEQ ID NO: 91572 - DNA, 80 bp, synthetic construct
  source 1..80: mol_type = other DNA
aagtgctcatcgttgccacatattaatacaaaatggaagcagcagttcagataacctttccctttggtgaggtgacagtg

SEQ ID NO: 91573 - DNA, 80 bp, synthetic construct
  source 1..80: mol_type = other DNA
ttctgaaatgtattttttgcctaggtctcagagtaatcctgtctcaacaccagtgttatcttttttggcagagatcttga

SEQ ID NO: 91574 - DNA, 80 bp, synthetic construct
  source 1..80: mol_type = other DNA
gtgtctgttacacgtaggtattttaagtaaatggtagctgctgatgtaatttctgcccctttgcccttcagttggggtat

SEQ ID NO: 91575 - DNA, 80 bp, synthetic construct; identical to SEQ ID NO: 16886
  source 1..80: mol_type = other DNA

SEQ ID NO: 91576 - DNA, 80 bp, synthetic construct
  source 1..80: mol_type = other DNA
cctgtgagtttgggaggctgaagtgggaggattgcttgaagtcaggagtttgagaccagcctgggaaacagagcaagacc

SEQ ID NO: 91577 - DNA, 80 bp, synthetic construct
  source 1..80: mol_type = other DNA
aataagggaaaatatcttcaacaaaggatagttctgtctgtttctcagtcttcctcaacagataaatgtgtgaagtaatg

SEQ ID NO: 91578 - DNA, 80 bp, synthetic construct
  source 1..80: mol_type = other DNA
acgggctgatactattagaatcccctgtcactaactgaagacagagttgtaagttaatgccttcctagatagcctagatt

SEQ ID NO: 91579 - DNA, 80 bp, synthetic construct; identical to SEQ ID NO: 16887
  source 1..80: mol_type = other DNA

SEQ ID NO: 91580 - DNA, 80 bp, synthetic construct
  source 1..80: mol_type = other DNA
tttttttttcttttttttttgagacagagtctcgctctgtcgcccaggctggagtgcagtgcacaatcttggctcactgc

SEQ ID NO: 91581 - DNA, 80 bp, synthetic construct
  source 1..80: mol_type = other DNA
ccatgttagttagccaggatggtctcgatctcctgacctcgtgatccacccacctcggcctcccaaagcactgggattac

SEQ ID NO: 91582 - DNA, 80 bp, synthetic construct
  source 1..80: mol_type = other DNA
cagcaagtaaatagcaacatttgctggaagaacagatagtttttcaaatccaattcaaggactgggtatggtggctcatg

SEQ ID NO: 91583 - DNA, 80 bp, synthetic construct
  source 1..80: mol_type = other DNA
agaatcgcttgaacctggtaggcggaggttgtagtgagctgagattgtgccattgctctccagcctgggaaacaagagca

SEQ ID NO: 91584 - DNA, 80 bp, synthetic construct; identical to SEQ ID NO: 16888
  source 1..80: mol_type = other DNA

SEQ ID NO: 91585 - DNA, 80 bp, synthetic construct
  source 1..80: mol_type = other DNA
cccaagatatcctctaagcaagataaatgactattggcttttgtggcatggcagcctgccacgtccttgtcttttttaag

SEQ ID NO: 91586 - DNA, 80 bp, synthetic construct
  source 1..80: mol_type = other DNA
ttttctcatctgtcaaatgaagcaaagaatacttgccctcttgacttaaagggtgtctgatgagacatatgactgtatca

SEQ ID NO: 91587 - DNA, 80 bp, synthetic construct; identical to SEQ ID NO: 16889
  source 1..80: mol_type = other DNA

SEQ ID NO: 91588 - DNA, 80 bp, synthetic construct
  source 1..80: mol_type = other DNA
aatcccagctactcaggaaggctgaggcaggagaattgcttgaacccgggaggcagaggttgtggtgagttgagatcatg

SEQ ID NO: 91589 - DNA, 80 bp, synthetic construct
  source 1..80: mol_type = other DNA
ttttttttttgagacaaagtctcactctgttgcccaggctgaagtgcagtggtgtgatctcagctcactgcaatcactac

SEQ ID NO: 91590 - DNA, 80 bp, synthetic construct
  source 1..80: mol_type = other DNA
ctgcacccagcctgaaaaatatctttgaatgccatgtgatactatacttgtcagtttacatgtgtgtcccactaaatcat

SEQ ID NO: 91591 - DNA, 80 bp, synthetic construct
  source 1..80: mol_type = other DNA
aaaaatgtcctttaattcttctgttaatgctgtcttatccctggccccagtcagtgcttagaactgtgctgttggtaaat

SEQ ID NO: 91592 - DNA, 80 bp, synthetic construct; identical to SEQ ID NO: 16890
  source 1..80: mol_type = other DNA

SEQ ID NO: 91593 - DNA, 80 bp, synthetic construct
  source 1..80: mol_type = other DNA
ctcttttatggcagacaaaacaaagtgactctagccaacttgagctaaaaagaaatttagtggaaggctaggagttacca

SEQ ID NO: 91594 - DNA, 80 bp, synthetic construct
  source 1..80: mol_type = other DNA
tggggagaagatttcttgattggcagtcttactaagggtgcatatcaagtagaatggaatagaggtagtttcctaaagga

SEQ ID NO: 91595 - DNA, 80 bp, synthetic construct; identical to SEQ ID NO: 16891
  source 1..80: mol_type = other DNA

SEQ ID NO: 91596 - DNA, 80 bp, synthetic construct
  source 1..80: mol_type = other DNA
atatatgtatatgtgtgtatatatatatttatatatatgtatatgtgtgtatatatatatatttttttttgaaacggaat

SEQ ID NO: 91597 - DNA, 80 bp, synthetic construct
  source 1..80: mol_type = other DNA
ttgccaccatgcccggcaattttttttttgtttttttttagtagagagggggtttaatcattttggccaggctggtcttg

SEQ ID NO: 91598 - DNA, 80 bp, synthetic construct
  source 1..80: mol_type = other DNA
aatggtgtgatctcggctcaccgcaacctctacttcccaggttcaagcaattcgcctgcctcagccttctcaagtagctg

SEQ ID NO: 91599 - DNA, 80 bp, synthetic construct; identical to SEQ ID NO: 16892
  source 1..80: mol_type = other DNA

SEQ ID NO: 91600 - DNA, 80 bp, synthetic construct
  source 1..80: mol_type = other DNA
gctgggattacaggcacatgccaccacacccggctaattttttttttttttttgtatttttagtagagacagggtttcac

SEQ ID NO: 91601 - DNA, 80 bp, synthetic construct
  source 1..80: mol_type = other DNA
aatcagtgtcagaatattcattacctcctaaaaataaaggagttctagttggctgttttgattctaggtgtggtaaagtg

SEQ ID NO: 91602 - DNA, 80 bp, synthetic construct
  source 1..80: mol_type = other DNA
agctctgagagagaataaaagcaggggttgttggagctagcttctcaagatgtccttgaggcaaaccagacctttgggac

SEQ ID NO: 91603 - DNA, 80 bp, synthetic construct
  source 1..80: mol_type = other DNA
tacaaaaaaaattagctgggcctggtggcaggcgcctataatcccagctactcgggaggctgaggcgggagaatcgcttg

SEQ ID NO: 91604 - DNA, 80 bp, synthetic construct; identical to SEQ ID NO: 16893
  source 1..80: mol_type = other DNA

SEQ ID NO: 91605 - DNA, 80 bp, synthetic construct
  source 1..80: mol_type = other DNA
cacaatgcaggcattagtttctcagttaaaaaagtaagttcttggtttatgggggatggttttgttttatgaaaagaaaa

SEQ ID NO: 91606 - DNA, 80 bp, synthetic construct
  source 1..80: mol_type = other DNA
atgttaggacactacccaatgcctcaaccgtggacaatattcgctccatctttggaaatgctgttagtcggtatgtcgat

SEQ ID NO: 91607 - DNA, 80 bp, synthetic construct; identical to SEQ ID NO: 16894
  source 1..80: mol_type = other DNA

SEQ ID NO: 91608 - DNA, 80 bp, synthetic construct
  source 1..80: mol_type = other DNA
acaaataagatatttcctgcccttaaagactagattcgtgttgctaagtcttcattatcaagaaaagcataagtggggaa

SEQ ID NO: 91609 - DNA, 80 bp, synthetic construct
  source 1..80: mol_type = other DNA
tatggatgagacagctcctgacttcacttttcccagaaatctgaaaagcagcagcagtcattccagagcccagtttctac

SEQ ID NO: 91610 - DNA, 80 bp, synthetic construct
  source 1..80: mol_type = other DNA
agctccgcctcccgggttcacgccattctcctgcctcagcctcccgagtagctgggactacaggcgcctgtcaccacacc

SEQ ID NO: 91611 - DNA, 80 bp, synthetic construct
  source 1..80: mol_type = other DNA
taatgaattaattttttaaaactgtgctcctagagcgaagggagagctctgtttacagtgtaacttttcagagcttcttt

SEQ ID NO: 91612 - DNA, 80 bp, synthetic construct; identical to SEQ ID NO: 16895
  source 1..80: mol_type = other DNA

SEQ ID NO: 91613 - DNA, 80 bp, synthetic construct
  source 1..80: mol_type = other DNA
ggtagggttatagtagtgaacaaagaagaaatgatgcctgctctcagctgactttgcagttggaaagacacatgaaataa

SEQ ID NO: 91614 - DNA, 80 bp, synthetic construct
  source 1..80: mol_type = other DNA
taggttaggagtagagctttccagacagagggactagttcttgggaaggtctccagacagaaataagtgtggcttgtctg

SEQ ID NO: 91615 - DNA, 80 bp, synthetic construct; identical to SEQ ID NO: 16896
  source 1..80: mol_type = other DNA

SEQ ID NO: 91616 - DNA, 80 bp, synthetic construct
  source 1..80: mol_type = other DNA
tcggggccctcatttcacaaagttagtttatgggaaggaaccttgtgtttttaaattctgattcttttgtaatgtttgag

SEQ ID NO: 91617 - DNA, 80 bp, synthetic construct
  source 1..80: mol_type = other DNA
agtgaagaagtgcatcttcttactcttcatcaaccgtaagttaaaaagaaccacatgggaaatccactcacaggaaacac

SEQ ID NO: 91618 - DNA, 80 bp, synthetic construct
  source 1..80: mol_type = other DNA
ttggttttattgggaagcatgtataatttttgtcctaagtctgtgctcagccctcccacatgtgctcattgctggttgac

SEQ ID NO: 91619 - DNA, 80 bp, synthetic construct; identical to SEQ ID NO: 16897
  source 1..80: mol_type = other DNA

SEQ ID NO: 91620 - DNA, 80 bp, synthetic construct
  source 1..80: mol_type = other DNA
tataacttaattgtttattacaaggttttgatggtgacctaccaacaacaagtaatcccaaacacagtctgaattttttg

SEQ ID NO: 91621 - DNA, 80 bp, synthetic construct
  source 1..80: mol_type = other DNA
cttccatttagactgctaaccagctgtaaatgtttcaaaatatgcatgttttacagcagttgttcaaagcaatacaggaa

SEQ ID NO: 91622 - DNA, 80 bp, synthetic construct
  source 1..80: mol_type = other DNA
ccatgaagaataactgctttgtaacacacatgctggctataaagcagacaaaaaattcactgtaggtgctgcctgactgg

SEQ ID NO: 91623 - DNA, 80 bp, synthetic construct
  source 1..80: mol_type = other DNA
atttatctacactgtgcaggcgcactcaggtggcagggacaaagaccactcctttggcgcatctcaagttcagaattctc

SEQ ID NO: 91624 - DNA, 80 bp, synthetic construct; identical to SEQ ID NO: 16898
  source 1..80: mol_type = other DNA

SEQ ID NO: 91625 - DNA, 80 bp, synthetic construct
  source 1..80: mol_type = other DNA
tctggaaaactcagtatggctactccaccgtcagaacttcctgagcaaagttagttgctctctcggctcactgttttgtt

SEQ ID NO: 91626 - DNA, 80 bp, synthetic construct
  source 1..80: mol_type = other DNA
acctttgggagcctgagctggaactgaaggtggagctgcagcctgggccttggtttgatccttggccttggcctttggcc

SEQ ID NO: 91627 - DNA, 80 bp, synthetic construct
  source 1..80: mol_type = other DNA
actcatggccttggcattgttggcctgcatcttctttaggcccttcttgttgtgcttcttggcaaagtgcatgttcctca

SEQ ID NO: 91628 - DNA, 80 bp, synthetic construct; identical to SEQ ID NO: 16899
  source 1..80: mol_type = other DNA

SEQ ID NO: 91629 - DNA, 80 bp, synthetic construct
  source 1..80: mol_type = other DNA
agctaatgggggcaaagggaagtgaggagggagaatgtactgccttatcatgttttctattacttggctgaagtaaaaca

SEQ ID NO: 91630 - DNA, 80 bp, synthetic construct
  source 1..80: mol_type = other DNA
actttgtgtgaatgtacacctgtgacctcacccctcaggacagttttgaactggttgctttctttttattgtttagatcg

SEQ ID NO: 91631 - DNA, 80 bp, synthetic construct
  source 1..80: mol_type = other DNA
aagagatgagcatgctaatagtacaatcagagtgaatcccatacaccactggcaaaaggatgttctgtcccttcttacag

SEQ ID NO: 91632 - DNA, 80 bp, synthetic construct; identical to SEQ ID NO: 16900
  source 1..80: mol_type = other DNA

SEQ ID NO: 91633 - DNA, 80 bp, synthetic construct
  source 1..80: mol_type = other DNA
agtcccagctactcgggaggctgaggcaggagaatcgcttgaacctaggaggtggaggttgcagtgagctgagactgtac

SEQ ID NO: 91634 - DNA, 80 bp, synthetic construct
  source 1..80: mol_type = other DNA
cagaataaatgtgaggtacccctgctctaaaggagtttatagtccagagctgacttatggaggatttctttctattattt

SEQ ID NO: 91635 - DNA, 80 bp, synthetic construct
  source 1..80: mol_type = other DNA
ctcatctcattgcaacctccacctcccgcgttcaagcaattctcctgcctcagcctcccgagtagctgggattacaggtg

SEQ ID NO: 91636 - DNA, 80 bp, synthetic construct; identical to SEQ ID NO: 16901
  source 1..80: mol_type = other DNA

SEQ ID NO: 91637 - DNA, 80 bp, synthetic construct
  source 1..80: mol_type = other DNA
taccatcccctcaccacactcccccacctactcactgagatgcagaccttattgaagagaatgtaactggcttgctgcga

SEQ ID NO: 91638 - DNA, 80 bp, synthetic construct
  source 1..80: mol_type = other DNA
gtccctctagcaccttatactggcaaagctttacattgcaaacctccattatcacagagcaagcaatgaaagatggactc

SEQ ID NO: 91639 - DNA, 80 bp, synthetic construct; identical to SEQ ID NO: 16902
  source 1..80: mol_type = other DNA

SEQ ID NO: 91640 - DNA, 80 bp, synthetic construct
  source 1..80: mol_type = other DNA
atgcgccaccacgcccagctaatttttgtatttttagtagagacgtggtttcatcatgttggccaggatggtctcgatct

SEQ ID NO: 91641 - DNA, 80 bp, synthetic construct
  source 1..80: mol_type = other DNA
gaaagatgatgtaacttacgcaaagctacacagctcttaagtagcagtgccaatatttgaacacactcagactcgatcct

SEQ ID NO: 91642 - DNA, 80 bp, synthetic construct
  source 1..80: mol_type = other DNA
cactatctaaggtaattgttctctcttattttcctgacagtttagaaatcagtccccagaatgtggatgttaatgtgcac

SEQ ID NO: 91643 - DNA, 80 bp, synthetic construct; identical to SEQ ID NO: 16903
  source 1..80: mol_type = other DNA

SEQ ID NO: 91644 - DNA, 80 bp, synthetic construct
  source 1..80: mol_type = other DNA
aatgtgctcttcactggagatgttcaggaggaggctactcccacctacacagggtgcagtggagggtctgggccccaggg

SEQ ID NO: 91645 - DNA, 80 bp, synthetic construct
  source 1..80: mol_type = other DNA
agtgtctggtacaggttctaagtgcttattattctaagtcacttcacttacctgagttctcagttttcctatctataaga

SEQ ID NO: 91646 - DNA, 80 bp, synthetic construct
  source 1..80: mol_type = other DNA
aagcaaaaactggaactgtgaaaccctacttcacagaaaacttaaaattcccaagcagatgaatgcttctcggaaggaca

SEQ ID NO: 91647 - DNA, 80 bp, synthetic construct
  source 1..80: mol_type = other DNA
tatgtggcaggtgggaggaagaagttctgtctggaaaccaacccttgttcctccgttattgattgactcctggtaccaac

SEQ ID NO: 91648 - DNA, 80 bp, synthetic construct; identical to SEQ ID NO: 16904
  source 1..80: mol_type = other DNA

SEQ ID NO: 91649 - DNA, 80 bp, synthetic construct
  source 1..80: mol_type = other DNA
ctcatggtctgctagagaatatatcccatgggagagaaaaacagactcgggagaatatagcaggggcccttgtcctggac

SEQ ID NO: 91650 - DNA, 80 bp, synthetic construct
  source 1..80: mol_type = other DNA
gatctgaaagttgagtgcagtgggtccagtgttctctaccctggctgccattagaattacctgggaaacttttagaaaat

SEQ ID NO: 91651 - DNA, 80 bp, synthetic construct; identical to SEQ ID NO: 16905
  source 1..80: mol_type = other DNA

SEQ ID NO: 91652 - DNA, 80 bp, synthetic construct
  source 1..80: mol_type = other DNA
acaggaagtagccccattcactaatagttgagtatgtagatttgctaggacctggaaatggtttggctggtggggagtgg

SEQ ID NO: 91653 - DNA, 80 bp, synthetic construct
  source 1..80: mol_type = other DNA
tatcctgggttagtcagattcattttgttagattacattttttttccagtggaactctgcttaagtcctgaccagtatgt

SEQ ID NO: 91654 - DNA, 80 bp, synthetic construct
  source 1..80: mol_type = other DNA
atctttctgcttcttagattgtgccttgtactccactgatcatggccagtacatcagaagccctggtttgcagtgaatgc

SEQ ID NO: 91655 - DNA, 80 bp, synthetic construct; identical to SEQ ID NO: 16906
  source 1..80: mol_type = other DNA

SEQ ID NO: 91656 - DNA, 80 bp, synthetic construct
  source 1..80: mol_type = other DNA
tcaagttggggttcccacaaccccccactttatttttgattaatttgctggagtggctcatagaactcagggaaacactt

SEQ ID NO: 91657 - DNA, 80 bp, synthetic construct
  source 1..80: mol_type = other DNA
ctcccagcagatggatgagttcttattcattttcttgtcagcttcgacatgttcagctctctggaagcccgcaaactctt

SEQ ID NO: 91658 - DNA, 80 bp, synthetic construct
  source 1..80: mol_type = other DNA
tggggcaggacccctatggaatgagggtcttatgacccacaatcaaattagagtcctgccttgggcaagtgaaaggaaag

SEQ ID NO: 91659 - DNA, 80 bp, synthetic construct
  source 1..80: mol_type = other DNA
ttacgtatattaagtgtatgtgtgtgtgtgtatatatatatttttttaatttactggttggttttgggaagcagaaatta

SEQ ID NO: 91660 - DNA, 80 bp, synthetic construct; identical to SEQ ID NO: 16907
  source 1..80: mol_type = other DNA

SEQ ID NO: 91661 - DNA, 80 bp, synthetic construct
  source 1..80: mol_type = other DNA
tgaattatatccctctagctatcaattttcgaaggaatgaatggtgtcctagtaatttccagtggtgtttaattacgttt

SEQ ID NO: 91662 - DNA, 80 bp, synthetic construct
  source 1..80: mol_type = other DNA
tagtcccatggaagcaagcccttggagctagggccctctaccttttgatggatttccatttgtcttgataatttccttgt

SEQ ID NO: 91663 - DNA, 80 bp, synthetic construct; identical to SEQ ID NO: 16908
  source 1..80: mol_type = other DNA

SEQ ID NO: 91664 - DNA, 80 bp, synthetic construct
  source 1..80: mol_type = other DNA
attttaccacaataaaaaaaagtcttcttctgggagcacccccccaagacaaaaatatgaaaattttacactgatacttc

SEQ ID NO: 91665 - DNA, 80 bp, synthetic construct
  source 1..80: mol_type = other DNA
catactagcttctttcttagtactgctccatttggggacctgtatatctatacttcttattctgagtctctccactatat

SEQ ID NO: 91666 - DNA, 80 bp, synthetic construct
  source 1..80: mol_type = other DNA
tcgtacagattcccgggaacagaagcttgatgcatttctgcagcctctgagcaaacccctgtccagtcagccccaggcca

SEQ ID NO: 91667 - DNA, 80 bp, synthetic construct; identical to SEQ ID NO: 16909
  source 1..80: mol_type = other DNA

SEQ ID NO: 91668 - DNA, 80 bp, synthetic construct
  source 1..80: mol_type = other DNA
ccaagcatgagttaaaaacacttcagaatgtagagtagttgttcaattgaataaacacacacaccagaaaaaaaagcaag

SEQ ID NO: 91669 - DNA, 80 bp, synthetic construct
  source 1..80: mol_type = other DNA
ctccctggccgggtgctgtggctcacacctataatcccagcactttgggaggctgaggcaggtggatcacctgaaatcaa

SEQ ID NO: 91670 - DNA, 80 bp, synthetic construct
  source 1..80: mol_type = other DNA
tcgcgccattgcactccagcctgggcaacaagagcgaaactccgtctcaaaacaaacgaacaaacaaaaaccccaaaaat

SEQ ID NO: 91671 - DNA, 80 bp, synthetic construct; identical to SEQ ID NO: 16910
  source 1..80: mol_type = other DNA

SEQ ID NO: 91672 - DNA, 80 bp, synthetic construct
  source 1..80: mol_type = other DNA
tctaggagttacacacaacacacacacacacacacacacacacactagccaggcatggtggcaaatgcctgtagtctcag

SEQ ID NO: 91673 - DNA, 80 bp, synthetic construct
  source 1..80: mol_type = other DNA
aagctaatatttatggagcatctacggtgtgccaaatactttgcatacgttatctcatttaatgctcttatccctgcagg

SEQ ID NO: 91674 - DNA, 80 bp, synthetic construct
  source 1..80: mol_type = other DNA
cccttgctccaaccctccactttccttctcccatgtggtgatttggccatacagctcttgtggctgatctgaactgactg

SEQ ID NO: 91675 - DNA, 80 bp, synthetic construct; identical to SEQ ID NO: 16911
  source 1..80: mol_type = other DNA

SEQ ID NO: 91676 - DNA, 80 bp, synthetic construct
  source 1..80: mol_type = other DNA
ttcgagaccagcctggccaacacggtgaaaccccatctctactaaaaatacaaaaaatagctgggtatggtggctcgtac

SEQ ID NO: 91677 - DNA, 80 bp, synthetic construct
  source 1..80: mol_type = other DNA
tgagggcaggtaccttctctgttttgttcattgctggatgtagttagtatacagcagtatctgatggatggatagatgga

SEQ ID NO: 91678 - DNA, 80 bp, synthetic construct
  source 1..80: mol_type = other DNA
tctgtagaaccagcacagagaagttgcttgctcctccaaaatgcaacccacaaaatttggctaagtttaaaaacaagaat

SEQ ID NO: 91679 - DNA, 80 bp, synthetic construct
  source 1..80: mol_type = other DNA
ggatcattaacctcactagtgttttgagtctccaggaagaaattaatgagcagggacatgagggtacgtaaacgctgtgg

SEQ ID NO: 91680 - DNA, 80 bp, synthetic construct; identical to SEQ ID NO: 16912
  source 1..80: mol_type = other DNA

SEQ ID NO: 91681 - DNA, 80 bp, synthetic construct
  source 1..80: mol_type = other DNA
cagtgtaatggtcagcaaaattcttatcttgtgtactgaatggcatgtcctgttgctgaaagtgcacaggcttgggaggt

SEQ ID NO: 91682 - DNA, 80 bp, synthetic construct
  source 1..80: mol_type = other DNA
acagagcaaggagttgacacttttatattctgaagacaaagtggtaaatcattatcatctatgtcagaaatagcttttga

SEQ ID NO: 91683 - DNA, 80 bp, synthetic construct; identical to SEQ ID NO: 16913
  source 1..80: mol_type = other DNA

SEQ ID NO: 91684 - DNA, 80 bp, synthetic construct
  source 1..80: mol_type = other DNA
tcctgagtagctgtaattacaggcatgtgccatcatgcccagctaatttttcttttcttagaggtggggttttgccatgt

SEQ ID NO: 91685 - DNA, 80 bp, synthetic construct
  source 1..80: mol_type = other DNA
tttaatttttaaaagatatgagtagccaaggagcaattctgtgcctttcccactagtccctaaccttttaaagcagctgc

SEQ ID NO: 91686 - DNA, 80 bp, synthetic construct
  source 1..80: mol_type = other DNA
agaaaaaaatagctgggcggggtggcggatgcctatagtcccagctactcgggaggctgaggcaggagaatggcatgaac

SEQ ID NO: 91687 - DNA, 80 bp, synthetic construct; identical to SEQ ID NO: 16914
  source 1..80: mol_type = other DNA

SEQ ID NO: 91688 - DNA, 80 bp, synthetic construct
  source 1..80: mol_type = other DNA
cagtggctcttcccttccatcattgttagctttcaagctaggaacttttaaaatgcttttaaataaaagtgagctgttac

SEQ ID NO: 91689 - DNA, 80 bp, synthetic construct
  source 1..80: mol_type = other DNA
tgcagtgtattaacaaaactaacctgcctcaagtttggtcagctttggagtcttactgaggctaaaatgataaatctaaa

SEQ ID NO: 91690 - DNA, 80 bp, synthetic construct
  source 1..80: mol_type = other DNA
aggcccaggttcatgccttgttggcagtgggttgctactggctgtggccttcatgcaggaaggctagatgcataaccagg

SEQ ID NO: 91691 - DNA, 80 bp, synthetic construct
  source 1..80: mol_type = other DNA
ccaccacctacaccattcagaggccagacagaaatttgttcaccattttgggcatgattttcgtgcttttgtaaaatgtg

SEQ ID NO: 91692 - DNA, 80 bp, synthetic construct; identical to SEQ ID NO: 16915
  source 1..80: mol_type = other DNA

SEQ ID NO: 91693 - DNA, 80 bp, synthetic construct
  source 1..80: mol_type = other DNA
gaagtaagagatacattccttgtaacagctttcttagttgcacctgtatgattatttgatcagtgtgttgtctgtgcagg

SEQ ID NO: 91694 - DNA, 80 bp, synthetic construct
  source 1..80: mol_type = other DNA
aacattcagttagacagttctcttgagtccagggatttacccatccatggtggacacactttcagttaaaaagtaaggtt

SEQ ID NO: 91695 - DNA, 80 bp, synthetic construct; identical to SEQ ID NO: 16916
  source 1..80: mol_type = other DNA

SEQ ID NO: 91696 - DNA, 80 bp, synthetic construct
  source 1..80: mol_type = other DNA
ggaagtgaaatggataaactatgacccctgccttaaagaacaccatggtgttgtatgggaattgtttaggtagaatgaaa

SEQ ID NO: 91697 - DNA, 80 bp, synthetic construct
  source 1..80: mol_type = other DNA
ttgcaagtgagcattaggaactagaggactgattgccctttcttcagctttggtttcccttgctgcagaaaaagatgctg

SEQ ID NO: 91698 - DNA, 80 bp, synthetic construct
  source 1..80: mol_type = other DNA
gacgaaatgcaagttgattaagtcctgataagaggctgtgaagaggtccaagaagcctcacaatgcccaatgaagaaaag

SEQ ID NO: 91699 - DNA, 80 bp, synthetic construct
  source 1..80: mol_type = other DNA
ttcagtattatttgatgttctccagcttttaaaataatcattttccgcctacgcagaacatcctgtagagacgttgaggt

SEQ ID NO: 91700 - DNA, 80 bp, synthetic construct; identical to SEQ ID NO: 16917
  source 1..80: mol_type = other DNA

SEQ ID NO: 91701 - DNA, 80 bp, synthetic construct
  source 1..80: mol_type = other DNA
acctttgaggctcttatgtgctgctcccctgtgccattcccttcccttcttccttagaggtgattactattctaaatttt

SEQ ID NO: 91702 - DNA, 80 bp, synthetic construct
  source 1..80: mol_type = other DNA
tatattcctaagattcatccatcttgttacatatagctctggtttaccttttctgtataatatagattctgcttcgtgaa

SEQ ID NO: 91703 - DNA, 80 bp, synthetic construct; identical to SEQ ID NO: 16918
  source 1..80: mol_type = other DNA

SEQ ID NO: 91704 - DNA, 80 bp, synthetic construct
  source 1..80: mol_type = other DNA
gagttcaagaccagcccagccaacgtggcaaaaccccatctctactaaaaatacaaaaattagatgggtatggtgtcaca

SEQ ID NO: 91705 - DNA, 80 bp, synthetic construct
  source 1..80: mol_type = other DNA
ctcagctgttaagtacctgttcaagttttttacccaatatttgatgggctctttttttgtcttttctaattaatttttgg

SEQ ID NO: 91706 - DNA, 80 bp, synthetic construct; identical to SEQ ID NO: 16919
  source 1..80: mol_type = other DNA

SEQ ID NO: 91707 - DNA, 80 bp, synthetic construct
  source 1..80: mol_type = other DNA
taagctcactgtcttatgtgggcataaaccatgcccacataagacagtgagcttaattaataaatgtgtgtgctcagacc

SEQ ID NO: 91708 - DNA, 80 bp, synthetic construct
  source 1..80: mol_type = other DNA
tcacaaatgagcccatgctcatttgccattccaaaaatcccagggcccttaagaattatgctaactctactctgcctctg

SEQ ID NO: 91709 - DNA, 80 bp, synthetic construct
  source 1..80: mol_type = other DNA
acctgaggtcaagagttcgagaccagcctggccaacatggtgaaacacgtctttattaaaaatacaaaaattagccaggc

SEQ ID NO: 91710 - DNA, 80 bp, synthetic construct; identical to SEQ ID NO: 16920
  source 1..80: mol_type = other DNA

SEQ ID NO: 91711 - DNA, 80 bp, synthetic construct
  source 1..80: mol_type = other DNA
gggtgaggaagctacagaagaaaacttggaagccagcagagattgatgaggtttaagggaagaagccacaagtgctgatg

SEQ ID NO: 91712 - DNA, 80 bp, synthetic construct
  source 1..80: mol_type = other DNA
aagacaggttgactctaataggtactaatgcatctggtgactttaagttgaagccagtgctcatttgctattccaaaaat

SEQ ID NO: 91713 - DNA, 80 bp, synthetic construct
  source 1..80: mol_type = other DNA
ttactgctcattaacaatgtacctggccaccctagatctgtaatggagatatataaggacatgaacactaacacagcatc

SEQ ID NO: 91714 - DNA, 80 bp, synthetic construct
  source 1..80: mol_type = other DNA
tgagaaacattcgagattcctgggaagaagtcaaaatatcaacattaacaggagtttggaagaaattgcatccagccctc

SEQ ID NO: 91715 - DNA, 80 bp, synthetic construct; identical to SEQ ID NO: 16921
  source 1..80: mol_type = other DNA

SEQ ID NO: 91716 - DNA, 80 bp, synthetic construct
  source 1..80: mol_type = other DNA
ttcactgttgtcttatttcaagaaattgcaacagcttcctcagccttcagcaatcaccaccctgatcagtcaacagccat

SEQ ID NO: 91717 - DNA, 80 bp, synthetic construct
  source 1..80: mol_type = other DNA
cagctcactgcaaccaccacctcccaggttcaagtgactcttgtgcctcagcctcccaagtagctgggattataagcatg

SEQ ID NO: 91718 - DNA, 80 bp, synthetic construct; identical to SEQ ID NO: 16922
  source 1..80: mol_type = other DNA

SEQ ID NO: 91719 - DNA, 80 bp, synthetic construct
  source 1..80: mol_type = other DNA
gttttatggtctgcctaaacctttagtggggcctttgatggcttagtcctttcaggcttaagacaatagaagtttatttc

SEQ ID NO: 91720 - DNA, 80 bp, synthetic construct
  source 1..80: mol_type = other DNA
ctaatcccaattatgagggaagacctaatcacctcccaaaggccccacctcctaatagtatcaccttgggggttaggatt

SEQ ID NO: 91721 - DNA, 80 bp, synthetic construct
  source 1..80: mol_type = other DNA
cattttctgatttctactcttgctcttgaaaattcagctatcaatcttaaaatttattacctgttgaaaatccagctacc

SEQ ID NO: 91722 - DNA, 80 bp, synthetic construct; identical to SEQ ID NO: 16923
  source 1..80: mol_type = other DNA

SEQ ID NO: 91723 - DNA, 80 bp, synthetic construct
  source 1..80: mol_type = other DNA
ttgtatttttcatttttaaaaactttatgtgctcttttggaaatcttgatcccaggagatagtggatagtgtcctgctgc

SEQ ID NO: 91724 - DNA, 80 bp, synthetic construct
  source 1..80: mol_type = other DNA
ctttatctgtggggaattacttgaagcctgggttgacaatgaaattctgcagagagaatttgcatttgattctactggag

SEQ ID NO: 91725 - DNA, 80 bp, synthetic construct
  source 1..80: mol_type = other DNA
tggaaaagcatgtgaggaccagtttatgattacacattcacagggtgtcatgttttcttccaacaccaatgctagaggtg

SEQ ID NO: 91726 - DNA, 80 bp, synthetic construct; identical to SEQ ID NO: 16924
  source 1..80: mol_type = other DNA

SEQ ID NO: 91727 - DNA, 80 bp, synthetic construct
  source 1..80: mol_type = other DNA
gcaattccttgttgcatgttaaaagattagttatattttattcctcatttgtgttcgttttcaccaggaggctcaattca

SEQ ID NO: 91728 - DNA, 80 bp, synthetic construct
  source 1..80: mol_type = other DNA
aatcctcagtgggccttggcacagcatcaaaccaagttataccttctcaacaccaccaagcttaggtaaatcagctgagt

SEQ ID NO: 91729 - DNA, 80 bp, synthetic construct
  source 1..80: mol_type = other DNA
atccaagttcgaccatttcccatttatttgactgtagacaagttacattcctaaactatgtctcagatttctcatctgta

SEQ ID NO: 91730 - DNA, 80 bp, synthetic construct
  source 1..80: mol_type = other DNA
ttctggtatctgctctgtgcaacagagtactgtaggtgatgcaagagaaagaagacctgatgccttctttcctcccagct

SEQ ID NO: 91731 - DNA, 80 bp, synthetic construct; identical to SEQ ID NO: 16925
  source 1..80: mol_type = other DNA

SEQ ID NO: 91732 - DNA, 80 bp, synthetic construct
  source 1..80: mol_type = other DNA
gcacatgtacctccttgtatgtattcagaactcattccatttaggcttggaaacccgtttggtgcaactctgttcaagtt

SEQ ID NO: 91733 - DNA, 80 bp, synthetic construct
  source 1..80: mol_type = other DNA
atacaatccaggccagtcccagatttgcagctgttaataaatgtgaatggttttccagtaagggggtagaaaaacatagg

SEQ ID NO: 91734 - DNA, 80 bp, synthetic construct
  source 1..80: mol_type = other DNA
gcaagtctatggggttcaatgtgttttaagaactataaagtaccatataaatgtggcctttattcccattgtgttcttgg

SEQ ID NO: 91735 - DNA, 80 bp, synthetic construct; identical to SEQ ID NO: 16926
  source 1..80: mol_type = other DNA

SEQ ID NO: 91736 - DNA, 80 bp, synthetic construct
  source 1..80: mol_type = other DNA
cagaactatttctgtctcatccatgtttcagggattacttctcccattttgtcccaactggttgtatctcaagcatgaat

SEQ ID NO: 91737 - DNA, 80 bp, synthetic construct
  source 1..80: mol_type = other DNA
ctctccactaatatcttatttgtagtatgttaaatttttctaaaacttctaaggatagttgctgtattgtatgatttgca

SEQ ID NO: 91738 - DNA, 80 bp, synthetic construct
  source 1..80: mol_type = other DNA
gcgggcagatcatttgaggtcaggagttcaagaccagcctgaccaatatgatgaaaccctgtctctactaaattacaaat

SEQ ID NO: 91739 - DNA, 80 bp, synthetic construct; identical to SEQ ID NO: 16927
  source 1..80: mol_type = other DNA

SEQ ID NO: 91740 - DNA, 80 bp, synthetic construct
  source 1..80: mol_type = other DNA
gcctgctgagattttgattgggattatgttgaatctagatcaatttagggtgaaaaacttttgttagataaatcccttag

SEQ ID NO: 91741 - DNA, 80 bp, synthetic construct
  source 1..80: mol_type = other DNA
gcctcagcctcccaagtagctgggattacaggcatgtgccaccatgcccggctaattttttaaactatttatagtagaga

SEQ ID NO: 91742 - DNA, 80 bp, synthetic construct
  source 1..80: mol_type = other DNA
cctaggctggagtgcagtggcgtgatcataggtcactgaagctttgaactcctaggctcaagtagctaggaatacaagtg

SEQ ID NO: 91743 - DNA, 80 bp, synthetic construct; identical to SEQ ID NO: 16928
  source 1..80: mol_type = other DNA

SEQ ID NO: 91744 - DNA, 80 bp, synthetic construct
  source 1..80: mol_type = other DNA
caccttttctttctttctttctttttttaagacggagttttgctcttgtcacccaggctggagtgcagtggctggatctc

SEQ ID NO: 91745 - DNA, 80 bp, synthetic construct
  source 1..80: mol_type = other DNA
gacctcaggtaatctgcttgtctcggcctcccaaagtgctgggattacaggcgtgaattactgcgcccggctgcctttta

SEQ ID NO: 91746 - DNA, 80 bp, synthetic construct; identical to SEQ ID NO: 16929
  source 1..80: mol_type = other DNA

SEQ ID NO: 91747 - DNA, 80 bp, synthetic construct
  source 1..80: mol_type = other DNA
aaggggaaagttacaaaacattcagtatgctgttagccatataggtttttttgtagatgcccattatgaggttgaggaag

SEQ ID NO: 91748 - DNA, 80 bp, synthetic construct
  source 1..80: mol_type = other DNA
cctttttatttattatgggatttgatttgctaaaatttttattataattattttatctgtgctcatgattgttactagtt

SEQ ID NO: 91749 - DNA, 80 bp, synthetic construct
  source 1..80: mol_type = other DNA
atctgggcttggagattttcttcatgggaaggtttttaactgcaaattctatttctttaatagtatagagctattcaggt

SEQ ID NO: 91750 - DNA, 80 bp, synthetic construct; identical to SEQ ID NO: 16930
  source 1..80: mol_type = other DNA

SEQ ID NO: 91751 - DNA, 80 bp, synthetic construct
  source 1..80: mol_type = other DNA
ttttttttttttttttttgagacagagtcttgctctgtcgcccaggctggagtgcagtacagtggtgcgatcttggctca

SEQ ID NO: 91752 - DNA, 80 bp, synthetic construct
  source 1..80: mol_type = other DNA
ccacctgccttggcctcccagagtgctgggattacaggtgtgagccactgtggctggcctgtttcacatttcttaaggta

SEQ ID NO: 91753 - DNA, 80 bp, synthetic construct
  source 1..80: mol_type = other DNA
tcgtctttgacctacaggttttttagaactgtgttatttagtttccaatctcttgaggatttttaaaacaatatgttatt

SEQ ID NO: 91754 - DNA, 80 bp, synthetic construct; identical to SEQ ID NO: 16931
  source 1..80: mol_type = other DNA

SEQ ID NO: 91755 - DNA, 80 bp, synthetic construct
  source 1..80: mol_type = other DNA
gatcttggctcactgcaagctccgcctcccaggttcacgccattctcctgcctcagcctcccgaatagctgggactacag

SEQ ID NO: 91756 - DNA, 80 bp, synthetic construct
  source 1..80: mol_type = other DNA
tgggattacaggcatgagccactgcacccagcccatatattttaaagctctgttattgggtacataaacatttaggattg

SEQ ID NO: 91757 - DNA, 80 bp, synthetic construct
  source 1..80: mol_type = other DNA
tagatgatttacctgaaatgtcattcaatttaacttactctccatcctcacccgcccagctttggttatgaggcagtaga

SEQ ID NO: 91758 - DNA, 80 bp, synthetic construct
  source 1..80: mol_type = other DNA
aaaggggttttgttgtggattgttcaggcacttcctttggggtatatgggggatgagtgttacatttatggtttctcacc

SEQ ID NO: 91759 - DNA, 80 bp, synthetic construct; identical to SEQ ID NO: 16932
  source 1..80: mol_type = other DNA

SEQ ID NO: 91760 - DNA, 80 bp, synthetic construct
  source 1..80: mol_type = other DNA
catgatgaaaccccgtctctactaaaaaaatagaaaaattagccaggcgtggtggcgggtacctgtaatccaagctgctc

SEQ ID NO: 91761 - DNA, 80 bp, synthetic construct
  source 1..80: mol_type = other DNA
gcaagtgacatatgtgacatcctctccactccctatttgcatttctaggttatataactgtactactatccatgcatgcc

SEQ ID NO: 91762 - DNA, 80 bp, synthetic construct
  source 1..80: mol_type = other DNA
gctcccatttcttcttattctttcatttttggggctctccatcttgatgtgttctttggatcgtgaacagatccaaagaa

SEQ ID NO: 91763 - DNA, 80 bp, synthetic construct; identical to SEQ ID NO: 16933
  source 1..80: mol_type = other DNA

SEQ ID NO: 91764 - DNA, 80 bp, synthetic construct
  source 1..80: mol_type = other DNA
taagcatttcggtacatgcatgtgtgctggagggaaagggcaaatgaccaccctttgatctggaatgataaagatgataa

SEQ ID NO: 91765 - DNA, 80 bp, synthetic construct
  source 1..80: mol_type = other DNA
acctattttgaggtattgaatttctttggaccaggtgaattgggacgaagaaaaggaatgttttgaaagcctcagtaaag

SEQ ID NO: 91766 - DNA, 80 bp, synthetic construct; identical to SEQ ID NO: 16934
  source 1..80: mol_type = other DNA

SEQ ID NO: 91767 - DNA, 80 bp, synthetic construct
  source 1..80: mol_type = other DNA
tctgaagtgtgtagccagtcttcagattctgggtcagttgcctcagtctctcttagcttttgccttactctttatccgac

SEQ ID NO: 91768 - DNA, 80 bp, synthetic construct
  source 1..80: mol_type = other DNA
ttgaaatattctaagaatcaaagagtagcccactttaatcagagtatgacccctgattgctcacagtcatctcctgagca

SEQ ID NO: 91769 - DNA, 80 bp, synthetic construct
  source 1..80: mol_type = other DNA
actccagtggagaaggcaacacacttaccaaactgtgtggaaactatctcatttgattagaaattttacctcaagaagag

SEQ ID NO: 91770 - DNA, 80 bp, synthetic construct; identical to SEQ ID NO: 16935
  source 1..80: mol_type = other DNA

SEQ ID NO: 91771 - DNA, 80 bp, synthetic construct
  source 1..80: mol_type = other DNA
gtagagctatgatcacaccactgcccttcagcctgggtgacagagcaagaccttgtctctaaataaacaaacaaacaaaa

SEQ ID NO: 91772 - DNA, 80 bp, synthetic construct
  source 1..80: mol_type = other DNA
ctaatgtgttttccagagtgaagtgcctggctccattccaaactcctggaagtggactgtggaacacattgtctataaag

SEQ ID NO: 91773 - DNA, 80 bp, synthetic construct
  source 1..80: mol_type = other DNA
agtgttgtatcaaagtgtgatatacaaagtgtaccaacataagtgttggtagcacttaagacttatacttgccttctgat

SEQ ID NO: 91774 - DNA, 80 bp, synthetic construct; identical to SEQ ID NO: 16936
  source 1..80: mol_type = other DNA

SEQ ID NO: 91775 - DNA, 80 bp, synthetic construct
  source 1..80: mol_type = other DNA
atgccggagaagccgaccaccacagtgcgccttttcgaccggggcgacttctatacggcgcacggcgaggacgcgctgct

SEQ ID NO: 91776 - DNA, 80 bp, synthetic construct
  source 1..80: mol_type = other DNA
gcacgggggcggaacgttggtgcttgtgcggattccgccgtccccaggttctgcttggctccggagggacgcccccctca

SEQ ID NO: 91777 - DNA, 80 bp, synthetic construct; identical to SEQ ID NO: 16937
  source 1..80: mol_type = other DNA

SEQ ID NO: 91778 - DNA, 80 bp, synthetic construct
  source 1..80: mol_type = other DNA
accttgggccagtcatggacgctatctgcttcagctcagcattcagtgctctccgtcacccgaccccatctatccaggat

SEQ ID NO: 91779 - DNA, 80 bp, synthetic construct
  source 1..80: mol_type = other DNA
ctagtcctgactagaggactagtgcaaatgcgatactcctgatgaaaaatgtttcattcgttagatataaatgtgttagg

SEQ ID NO: 91780 - DNA, 80 bp, synthetic construct
  source 1..80: mol_type = other DNA
agactttggaagagtctcatacaacggaagaggcgttatatgagacaccaaagtccacgttgagtcttggtggactagaa

SEQ ID NO: 91781 - DNA, 80 bp, synthetic construct; identical to SEQ ID NO: 16938
  source 1..80: mol_type = other DNA

SEQ ID NO: 91782 - DNA, 80 bp, synthetic construct
  source 1..80: mol_type = other DNA
ctagctaatttttgtatttttagtagagatggggtttcaccatgttggccaggctggtctcaaactcctgacctcaagtg

SEQ ID NO: 91783 - DNA, 80 bp, synthetic construct
  source 1..80: mol_type = other DNA
caggagatcaagaccatcctggctaacatggtgaaaccctgtctacactaaaaatacaaaaatcccagcactttgggagg

SEQ ID NO: 91784 - DNA, 80 bp, synthetic construct
  source 1..80: mol_type = other DNA
ggaaggcagagcttgcagtgagccgagattgtgccactgcactccagcctgggcaacagagcgagactccatctcaaaaa

SEQ ID NO: 91785 - DNA, 80 bp, synthetic construct; identical to SEQ ID NO: 16939
  source 1..80: mol_type = other DNA

SEQ ID NO: 91786 - DNA, 80 bp, synthetic construct
  source 1..80: mol_type = other DNA
cccatgttttgtgggaggtacctggtgggacataattgaatcatgtgggcaggtttttcctgtgctgttctcctggtagt

SEQ ID NO: 91787 - DNA, 80 bp, synthetic construct
  source 1..80: mol_type = other DNA
cattaaacttcgttcttttgtaaattgcccagtctcaggtatgtctttttttatttttttttgagacagagtctggctct

SEQ ID NO: 91788 - DNA, 80 bp, synthetic construct; identical to SEQ ID NO: 16940
  source 1..80: mol_type = other DNA

SEQ ID NO: 91789 - DNA, 80 bp, synthetic construct
  source 1..80: mol_type = other DNA
agaccagaaaatgtgggaaagtttggaacttcctagagacttgttcaatggctttgaccaaaatcctgataatgatatgg

SEQ ID NO: 91790 - DNA, 80 bp, synthetic construct
  source 1..80: mol_type = other DNA
tatctggtgggagaaatttctaagcagcaaagcattcaagaggtgacttgggtgctgttaaaggcattcagttttaaaag

SEQ ID NO: 91791 - DNA, 80 bp, synthetic construct
  source 1..80: mol_type = other DNA
atgtcagaggccttcatggcagcccctctcatcacaagcctagaggcctaggagaaaaaagtgatttcatgggccagccc

SEQ ID NO: 91792 - DNA, 80 bp, synthetic construct
  source 1..80: mol_type = other DNA
cagaaatcaataattgaggtttgagaatctctgcctaggtttcaaagatgtatggaaacgcctgcatgtccaggcagaag

SEQ ID NO: 91793 - DNA, 80 bp, synthetic construct; identical to SEQ ID NO: 16941
  source 1..80: mol_type = other DNA

SEQ ID NO: 91794 - DNA, 80 bp, synthetic construct
  source 1..80: mol_type = other DNA
ctttgttttggccaatttctcccatttggaatggctgtatttacccaattcctataccccattgtatctgggaagtaact

SEQ ID NO: 91795 - DNA, 80 bp, synthetic construct
  source 1..80: mol_type = other DNA
ggaggggtcatggcagaatgatatggtttggctatgtccccacctaaatcccatcttgaattcccatgtattgtgggagg

SEQ ID NO: 91796 - DNA, 80 bp, synthetic construct
  source 1..80: mol_type = other DNA
cttgccttctgccatgattgtgagacctccccagccatgtggaactataagtccagtaagcctctttttcttcccagtct

SEQ ID NO: 91797 - DNA, 80 bp, synthetic construct
  source 1..80: mol_type = other DNA
ttctggttcgtcagtatagagttgaagtttataagaatagagctggaaataaggcatccaaggagaatgattggtatttg

SEQ ID NO: 91798 - DNA, 80 bp, synthetic construct; identical to SEQ ID NO: 16942
  source 1..80: mol_type = other DNA

SEQ ID NO: 91799 - DNA, 80 bp, synthetic construct
  source 1..80: mol_type = other DNA
gatgaggttagaggatcacttgagcccaggaggttgaggttacagtttaactttcagaggccaaggcaggaggattgctt

SEQ ID NO: 91800 - DNA, 80 bp, synthetic construct
  source 1..80: mol_type = other DNA
agacatgtatctgtaagatccttataataggtgaggatggccacaaattagcgccacagatttgtatttttagtagagac

SEQ ID NO: 91801 - DNA, 80 bp, synthetic construct
  source 1..80: mol_type = other DNA
gacagtcttgctctgtcgccaggctggagtgcagtggcgccatctgggctcactgcaaactctgactccctggttcaagc

SEQ ID NO: 91802 - DNA, 80 bp, synthetic construct; identical to SEQ ID NO: 16943
  source 1..80: mol_type = other DNA

SEQ ID NO: 91803 - DNA, 80 bp, synthetic construct
  source 1..80: mol_type = other DNA
gaggctgaagcaggagaatcgattgaacccttgaggcagaggttgcagtgagttgagatcgcaccattgcactctagcct

SEQ ID NO: 91804 - DNA, 80 bp, synthetic construct
  source 1..80: mol_type = other DNA
atctctctcagtttgaagacattctctttggtaacaatgatatgtcagcttccattggtgttgtgggtgttaaaatgtcc

SEQ ID NO: 91805 - DNA, 80 bp, synthetic construct
  source 1..80: mol_type = other DNA
attggaccaaaggaatgtgttttacccggaggagagactgctggagacatggggaaactgagacaggtaagcaaattgag

SEQ ID NO: 91806 - DNA, 80 bp, synthetic construct; identical to SEQ ID NO: 16944
  source 1..80: mol_type = other DNA

SEQ ID NO: 91807 - DNA, 80 bp, synthetic construct
  source 1..80: mol_type = other DNA
gaccgagtctcgctctgtcgcccaggctggagtgcagtggtgcgatctcggctcactgcaacctctgcctcccaggttca

SEQ ID NO: 91808 - DNA, 80 bp, synthetic construct
  source 1..80: mol_type = other DNA
agtgctgggattacagccatgagccaccatgctcggctttgattgtgtcatttgtataggcatgtggtttattatttagt

SEQ ID NO: 91809 - DNA, 80 bp, synthetic construct
  source 1..80: mol_type = other DNA
tggccaattttgtgtttttagtagagacagggttccaccatgttggtcaggctggtcttgaactcctgacctcaggtgat

SEQ ID NO: 91810 - DNA, 80 bp, synthetic construct
  source 1..80: mol_type = other DNA
atgggttcaagcgattcttctgcctcagcctcccaagtagctgggactgcaggcacatgccaacacgcccggcttatttt

SEQ ID NO: 91811 - DNA, 80 bp, synthetic construct; identical to SEQ ID NO: 16945
  source 1..80: mol_type = other DNA

SEQ ID NO: 91812 - DNA, 80 bp, synthetic construct
  source 1..80: mol_type = other DNA
tactaaaaatgcaaagaaaaaaaaaatctagccaagcatggtggcttgctcctgtaatcctagctacttgggaggctgag

SEQ ID NO: 91813 - DNA, 80 bp, synthetic construct
  source 1..80: mol_type = other DNA
attttgatgaaaatttagtttattgatgtaaaaagtgtatcagtacatcatatcagtgtcttgcacattgtataaacatt

SEQ ID NO: 91814 - DNA, 80 bp, synthetic construct
  source 1..80: mol_type = other DNA
gaggaattctgatcacagaaagaaaaaaagctgacttttccacaaaagacatttatcaggacctcaaccggttgttgaaa

SEQ ID NO: 91815 - DNA, 80 bp, synthetic construct; identical to SEQ ID NO: 16946
  source 1..80: mol_type = other DNA

SEQ ID NO: 91816 - DNA, 80 bp, synthetic construct
  source 1..80: mol_type = other DNA
gctcatcttttttgtatttttagtagagatggggtttctctatgttggtcaggctggtctcaaactcctgaacctcaggt

SEQ ID NO: 91817 - DNA, 80 bp, synthetic construct; identical to SEQ ID NO: 16947
  source 1..80: mol_type = other DNA

SEQ ID NO: 91818 - DNA, 80 bp, synthetic construct
  source 1..80: mol_type = other DNA
agtagaggggattttgctatgttggccaggctggtcttgaactcctgacctcaggtgatccacccaccttggcctgccag

SEQ ID NO: 91819 - DNA, 80 bp, synthetic construct
  source 1..80: mol_type = other DNA
gatctcagcccactgcaaccttcaccttctggattcaagcaattctcctttctcatctcctaagtagctggggtttacag

SEQ ID NO: 91820 - DNA, 80 bp, synthetic construct
  source 1..80: mol_type = other DNA
ctaatttttgtgtttttagtagagacggggtttcactatgttggctaggctggtctcaaactcctagcctcgagtcatcc

SEQ ID NO: 91821 - DNA, 80 bp, synthetic construct; identical to SEQ ID NO: 16948
  source 1..80: mol_type = other DNA

SEQ ID NO: 91822 - DNA, 80 bp, synthetic construct
  source 1..80: mol_type = other DNA
ctgactacttttgacttcagccagtatatgaaattggatattgcagcagtcagagcccttaacctttttcaggtaaaaaa

SEQ ID NO: 91823 - DNA, 80 bp, synthetic construct
  source 1..80: mol_type = other DNA
ttagataactagctttaaatggctgtatttttctctcccctcctccactccactttttaacttttttttttttaagtcag

SEQ ID NO: 91824 - DNA, 80 bp, synthetic construct
  source 1..80: mol_type = other DNA
gtgcccagcctactttttacttttttagagactgggcttggtggagtgaagtggcaagatcatagctcactgcagtattg

SEQ ID NO: 91825 - DNA, 80 bp, synthetic construct; identical to SEQ ID NO: 16949
  source 1..80: mol_type = other DNA

SEQ ID NO: 91826 - DNA, 80 bp, synthetic construct
  source 1..80: mol_type = other DNA
ctcattgtgccttgctctcgaattgctttttttttttttttctggtttcaagctatctatgtggtattagtcctcacttt

SEQ ID NO: 91827 - DNA, 80 bp, synthetic construct
  source 1..80: mol_type = other DNA
ctgccaccatgcccagctaatttttgtatttttagtagacatggggtttcatcttgttggctaggctggactctaactcc

SEQ ID NO: 91828 - DNA, 80 bp, synthetic construct
  source 1..80: mol_type = other DNA
ggagtccagggtgggaggatgacttgaggccaggagttgagaccagcctgggcaacatagtgagactctgtctctacaaa

SEQ ID NO: 91829 - DNA, 80 bp, synthetic construct
  source 1..80: mol_type = other DNA
caaataaaataaaactgtagtaattataaagtggttttggctgggggagaaatgtacagttgaacatacggattaagagg

SEQ ID NO: 91830 - DNA, 80 bp, synthetic construct; identical to SEQ ID NO: 16950
  source 1..80: mol_type = other DNA

SEQ ID NO: 91831 - DNA, 80 bp, synthetic construct
  source 1..80: mol_type = other DNA
tgcagttttggaagtatatgttaccatttaactgtacagagtacatagtaatagagtggtaattatttagattgattaaa

SEQ ID NO: 91832 - DNA, 80 bp, synthetic construct
  source 1..80: mol_type = other DNA
agctacttaataggattataagcatgagatgatttaatatacataaaatacttacagtctgatatataggaagcacttaa

SEQ ID NO: 91833 - DNA, 80 bp, synthetic construct
  source 1..80: mol_type = other DNA
tttaagtgaagtgtaatatacgtaagtactgcttgatgaatttaaggtgatttctaaagccaggtttgttggggaagagg

SEQ ID NO: 91834 - DNA, 80 bp, synthetic construct; identical to SEQ ID NO: 16951
  source 1..80: mol_type = other DNA

SEQ ID NO: 91835 - DNA, 80 bp, synthetic construct
  source 1..80: mol_type = other DNA
gataattgcttgagcccaggagtttgagaccagtctgggcaacaaaatgacaccccatttctaccaaaaaaaaaattgtt

SEQ ID NO: 91836 - DNA, 80 bp, synthetic construct
  source 1..80: mol_type = other DNA
aatcaacaggccagatgcagtggctcacccctgtaatcccaacactttgggaggccgaggtgggtggattacttgaggtc

SEQ ID NO: 91837 - DNA, 80 bp, synthetic construct; identical to SEQ ID NO: 16952
  source 1..80: mol_type = other DNA

SEQ ID NO: 91838 - DNA, 80 bp, synthetic construct
  source 1..80: mol_type = other DNA
tacaaacccccaaatgtgtacaattatgaggtatcaataaaagagattggaaggactgggtaatttgcaagtaattaagg

SEQ ID NO: 91839 - DNA, 80 bp, synthetic construct
  source 1..80: mol_type = other DNA
ccctgtcttgcatggctccagggtcacatttcctattgtattttgccaccacctgccctgggagcaacagtgttagtttc

SEQ ID NO: 91840 - DNA, 80 bp, synthetic construct
  source 1..80: mol_type = other DNA
agtgtcagtgatccccttctggtttaagaactggaggatgcatgtgtttagaccctttagaaacctgaaatgtcacctaa

SEQ ID NO: 91841 - DNA, 80 bp, synthetic construct; identical to SEQ ID NO: 16953
  source 1..80: mol_type = other DNA

SEQ ID NO: 91842 - DNA, 80 bp, synthetic construct
  source 1..80: mol_type = other DNA
ttttgtagagatgaggtctcactatgttgcccaggctggtctctcttttttttttgagcccgagtttcactcttgacgcc

SEQ ID NO: 91843 - DNA, 80 bp, synthetic construct
  source 1..80: mol_type = other DNA
tgggtcaggctgctctcgaactcccggcctcggatgatccacttgcctcggcctcccacagtgctgggattacaggcgtg

SEQ ID NO: 91844 - DNA, 80 bp, synthetic construct
  source 1..80: mol_type = other DNA
aagccttcttgggagttctcaggagaaatctgttatctcccttactaagcatttgggattgatgttccttccaggttact

SEQ ID NO: 91845 - DNA, 80 bp, synthetic construct; identical to SEQ ID NO: 16954
  source 1..80: mol_type = other DNA

SEQ ID NO: 91846 - DNA, 80 bp, synthetic construct
  source 1..80: mol_type = other DNA
cctgtctcagcctcccgagtagctgggactacaggcatgtaccaccacacctggctaatttttatattcttaatagaaac

SEQ ID NO: 91847 - DNA, 80 bp, synthetic construct
  source 1..80: mol_type = other DNA
tcttcaaaaaagaaaaaaatttgctggagaaggtcacacaatgctgataggtcccattgtgctttcatgctttctagttt

SEQ ID NO: 91848 - DNA, 80 bp, synthetic construct; identical to SEQ ID NO: 16955
  source 1..80: mol_type = other DNA

SEQ ID NO: 91849 - DNA, 80 bp, synthetic construct
  source 1..80: mol_type = other DNA
cacaccacacccggccaagttttgggtttttagtagagacagggttttgccgtgttggccaggctggtctctaactcctg

SEQ ID NO: 91850 - DNA, 80 bp, synthetic construct
  source 1..80: mol_type = other DNA
agaccagcctgaccaacatggagaaaccctgtctctattaaaaatacaaaattagctgggtgtggtggcatatgcctgta

SEQ ID NO: 91851 - DNA, 80 bp, synthetic construct
  source 1..80: mol_type = other DNA
atttatttatttatttattttgagacagagtctcacactattgccagggctggagtgcaatggcataatcttagctcact

SEQ ID NO: 91852 - DNA, 80 bp, synthetic construct
  source 1..80: mol_type = other DNA
tgatttgcccacctcagcctcccaaagtgctgggattacaggcgtgagccaccgtgcctggcttatgttaatcttatttt

SEQ ID NO: 91853 - DNA, 80 bp, synthetic construct; identical to SEQ ID NO: 16956
  source 1..80: mol_type = other DNA

SEQ ID NO: 91854 - DNA, 80 bp, synthetic construct
  source 1..80: mol_type = other DNA
tttgctctcagccttttaaatacgctgtcaggcaattccagtcagcacttttgaaaaaaacctacctacctacctaccta

SEQ ID NO: 91855 - DNA, 80 bp, synthetic construct
  source 1..80: mol_type = other DNA
gcgtgagtcaccatgcccaaccaattccagtcagctcttaaaatgaaagcctagaaatggtagggttaaagaggggacag

SEQ ID NO: 91856 - DNA, 80 bp, synthetic construct
  source 1..80: mol_type = other DNA
cggtgaaaccccttctctagtaaaatacaaaaaattagctgcatgtggcggcgtgcacctgtggtcccagttacttggga

SEQ ID NO: 91857 - DNA, 80 bp, synthetic construct; identical to SEQ ID NO: 16957
  source 1..80: mol_type = other DNA

SEQ ID NO: 91858 - DNA, 80 bp, synthetic construct
  source 1..80: mol_type = other DNA
ctagcaatttattaggcttttaatgatatctggaccaaaggctgagggagctgtgctgtgtgtatgttgctttgtgcttt

SEQ ID NO: 91859 - DNA, 80 bp, synthetic construct
  source 1..80: mol_type = other DNA
agtagctgggactacaggcgcccaccaccacgcccggctaattttctgtattttttagtagagatggggtttcaccatgt

SEQ ID NO: 91860 - DNA, 80 bp, synthetic construct
  source 1..80: mol_type = other DNA
gatggagtttcgctcttgttgcccaggctggagtgcaacggtgccattttggcccactgcaacctctgcctcccaggttc

SEQ ID NO: 91861 - DNA, 80 bp, synthetic construct; identical to SEQ ID NO: 16958
  source 1..80: mol_type = other DNA

SEQ ID NO: 91862 - DNA, 80 bp, synthetic construct
  source 1..80: mol_type = other DNA
tgctgtatatgaaatccagcttggagagaatatgtccattgttaaggaaaaattaatgaagatttgatctagataaggca

SEQ ID NO: 91863 - DNA, 80 bp, synthetic construct
  source 1..80: mol_type = other DNA
ggattacaggtatgggctaccatccccagctaatttttttttttggatggaatcttgctcccgtcgggcaggctggagtg

SEQ ID NO: 91864 - DNA, 80 bp, synthetic construct
  source 1..80: mol_type = other DNA
tcgccatgttggccaggctggtcatgaactcctgacctcaggtgatccacctgcttggcctcccaaagtgctaggattac

SEQ ID NO: 91865 - DNA, 80 bp, synthetic construct; identical to SEQ ID NO: 16959
  source 1..80: mol_type = other DNA

SEQ ID NO: 91866 - DNA, 80 bp, synthetic construct
  source 1..80: mol_type = other DNA
caaaaaagaaacaggaaagagatgttttgattttttaagtctagagtgttctgttcttactctacagcacttagcagtag

SEQ ID NO: 91867 - DNA, 80 bp, synthetic construct
  source 1..80: mol_type = other DNA
tcctttgtaagatgtgaaagggatatgaagagcaaataggaagtgttactcttgctgcttgagagaaagctgttttacaa

SEQ ID NO: 91868 - DNA, 80 bp, synthetic construct
  source 1..80: mol_type = other DNA
gcactacagggtcacgtcatgtttttaaaaaataaattaagaaggtaaacacccgtacttctactttacctctagtccta

SEQ ID NO: 91869 - DNA, 80 bp, synthetic construct
  source 1..80: mol_type = other DNA
atgggatcgtattaggaatacaatctgtattccttcccaacagtatatacagtttttttccatttcactatgtatctatt

SEQ ID NO: 91870 - DNA, 80 bp, synthetic construct; identical to SEQ ID NO: 16960
  source 1..80: mol_type = other DNA

SEQ ID NO: 91871 - DNA, 80 bp, synthetic construct
  source 1..80: mol_type = other DNA
ctgcctcagcctcccgagtagctgggactacaggcgcccgccaccacgccctgctaattttttttttgtatttttagtag

SEQ ID NO: 91872 - DNA, 80 bp, synthetic construct
  source 1..80: mol_type = other DNA
gcccaggctgaagtgcagtggcgcgatctcggcttgctgcaagctccgcctcccaggttcacgccattctcctgcctcag

SEQ ID NO: 91873 - DNA, 80 bp, synthetic construct
  source 1..80: mol_type = other DNA
tgtgcgccgctacgcccagctaatttttgtatttttagtagagatagggtttcgccatgttggttggccaggatggtctc

SEQ ID NO: 91874 - DNA, 80 bp, synthetic construct; identical to SEQ ID NO: 16961
  source 1..80: mol_type = other DNA

SEQ ID NO: 91875 - DNA, 80 bp, synthetic construct
  source 1..80: mol_type = other DNA
aattaatctcgatgtttgtttatagccccattgatggggctataaacttggcagcaaattgttttcccactaatttggca

SEQ ID NO: 91876 - DNA, 80 bp, synthetic construct
  source 1..80: mol_type = other DNA
taaattttaattcaagttcctttaagccagcagtctcaacctggggcagtttttccctccaggggacattcagcagtgtc

SEQ ID NO: 91877 - DNA, 80 bp, synthetic construct
  source 1..80: mol_type = other DNA
atatggccattttgtgtttactctggagataacatgcttttcctcatataacatgcttgataaacattttggtaacacag

SEQ ID NO: 91878 - DNA, 80 bp, synthetic construct
  source 1..80: mol_type = other DNA
acctgtagtcccagctactcaatttagaaagcagatttgtttcctttctatacctgtgtaatttgaggtttagtttactg

SEQ ID NO: 91879 - DNA, 80 bp, synthetic construct; identical to SEQ ID NO: 16962
  source 1..80: mol_type = other DNA

SEQ ID NO: 91880 - DNA, 80 bp, synthetic construct
  source 1..80: mol_type = other DNA
tgacccagtagtgggtcgttaaattagtaggtgacagagcatttttgaagaattaaatacaatagaacatagcagagtgg

SEQ ID NO: 91881 - DNA, 80 bp, synthetic construct
  source 1..80: mol_type = other DNA
tctagtcccagctactcaggaggctgaggcacgagaatcacttgaatccgggagctggaggttgcagtgagccgagattg

SEQ ID NO: 91882 - DNA, 80 bp, synthetic construct
  source 1..80: mol_type = other DNA
tgctggattgtgatgtaaagacatttcttgctgtggttacactgaaaaaaatgaaaagtcactgatttccaataacttac

SEQ ID NO: 91883 - DNA, 80 bp, synthetic construct
  source 1..80: mol_type = other DNA
atttggcaacattcttgaactgtaattctgtttcgttaaacatcactatttacatgtgcaacagcgtgtctgtaacaatg

SEQ ID NO: 91884 - DNA, 80 bp, synthetic construct; identical to SEQ ID NO: 16963
  source 1..80: mol_type = other DNA

SEQ ID NO: 91885 - DNA, 80 bp, synthetic construct
  source 1..80: mol_type = other DNA
ggcgtgcgccaccatgcccagctaatttttttgtatttttagtagagacagggtttcaccatgctgggtggccaggcggg

SEQ ID NO: 91886 - DNA, 80 bp, synthetic construct
  source 1..80: mol_type = other DNA
atgatctcagtgcaccacaatctctgcttcccaggtttaagcgattctcctgcctcagcctcccaagtagatgggatcac

SEQ ID NO: 91887 - DNA, 80 bp, synthetic construct
  source 1..80: mol_type = other DNA
ttcaagctttttaaatggaattttgagctgatttagttgagacttacgtgcttagttgataaattttaattttatactaa

SEQ ID NO: 91888 - DNA, 80 bp, synthetic construct; identical to SEQ ID NO: 16964
  source 1..80: mol_type = other DNA

SEQ ID NO: 91889 - DNA, 80 bp, synthetic construct
  source 1..80: mol_type = other DNA
gtgcagtggcacaatctcagctcactgcaacctctgcctcctgggttcaagcgattctcctgcctcagcttcctgagtgg

SEQ ID NO: 91890 - DNA, 80 bp, synthetic construct
  source 1..80: mol_type = other DNA
gttcagacttctaataacaggtttgtattgactcttagcctcatggcagaagccaagagacatgagacagcttagaaatt

SEQ ID NO: 91891 - DNA, 80 bp, synthetic construct
  source 1..80: mol_type = other DNA
ggttatgcatctacagtttattacaggagaaggatacaatccagtagcaggattatggtaaggatatgcatcacagtcaa

SEQ ID NO: 91892 - DNA, 80 bp, synthetic construct
  source 1..80: mol_type = other DNA
ttaatatttttcttgtcaagcggacatgttcctgttctctaactagcctcttcagtggaggtcagaggaagagcctcatt

SEQ ID NO: 91893 - DNA, 80 bp, synthetic construct; identical to SEQ ID NO: 16965
  source 1..80: mol_type = other DNA

SEQ ID NO: 91894 - DNA, 80 bp, synthetic construct
  source 1..80: mol_type = other DNA
acataaagcattttttacttttttaaaaaatttttaggcaatgtggggtccaaagtaattaaaaaaaaatttttttaaca

SEQ ID NO: 91895 - DNA, 80 bp, synthetic construct; identical to SEQ ID NO: 16966
  source 1..80: mol_type = other DNA

SEQ ID NO: 91896 - DNA, 80 bp, synthetic construct
  source 1..80: mol_type = other DNA
cattctggctaacatggtgaaaccctgtctctaccaaaaatacaaaaaattagctgacatggtggtgcgcacctgtagtc

SEQ ID NO: 91897 - DNA, 80 bp, synthetic construct
  source 1..80: mol_type = other DNA
gatcacctgaggtcgggcattcgagaccagcctgaccaatatggagaaaccccatttgtactaaaaatacaaaattagcg

SEQ ID NO: 91898 - DNA, 80 bp, synthetic construct; identical to SEQ ID NO: 16967
  source 1..80: mol_type = other DNA

SEQ ID NO: 91899 - DNA, 80 bp, synthetic construct
  source 1..80: mol_type = other DNA
gatttggcagggtcacaggacaatagtggagggaaggtcagcagataaacaagtgaacaaaggtctctggttttcctagg

SEQ ID NO: 91900 - DNA, 80 bp, synthetic construct
  source 1..80: mol_type = other DNA
gtttcagagagcacagggttgggggtaaggtcacagatcaacaggatcccaaggcagaataatttttcgtagtacagaac

SEQ ID NO: 91901 - DNA, 80 bp, synthetic construct; identical to SEQ ID NO: 16968
  source 1..80: mol_type = other DNA

SEQ ID NO: 91902 - DNA, 80 bp, synthetic construct
  source 1..80: mol_type = other DNA
gggcagaggggctcctctcttcccagtaggggcagccgggcagaggcgcccctcacctcccggatggggcggctggccgg

SEQ ID NO: 91903 - DNA, 80 bp, synthetic construct
  source 1..80: mol_type = other DNA
ccgggcagaggcgcccctcacctcccggatggggcggctggccgggcggggggctgacccccccacatccttcccggacg

SEQ ID NO: 91904 - DNA, 80 bp, synthetic construct
  source 1..80: mol_type = other DNA
tctccctcctggatggggcggctggccgggcggggggctaacccccccacctcccttccggacggggtggctgccgggcg

SEQ ID NO: 91905 - DNA, 80 bp, synthetic construct; identical to SEQ ID NO: 16969
  source 1..80: mol_type = other DNA

SEQ ID NO: 91906 - DNA, 80 bp, synthetic construct
  source 1..80: mol_type = other DNA
ctcggcactttgcggggccaaggcaggcagctgggaggtggaggttgtagcgaactgagatcacgccactgcaccccagc

SEQ ID NO: 91907 - DNA, 80 bp, synthetic construct
  source 1..80: mol_type = other DNA
gtggcggcgcgcacctgcaatcgcaggcactcggcaggctgaggcaggagaatcaggcagggaggttgtagtgagccgag

SEQ ID NO: 91908 - DNA, 80 bp, synthetic construct
  source 1..80: mol_type = other DNA
ttagggatggaatcagggtacaattatggagacaggctatctaaacaattcactctcaccatttaaatcagctgtttgat

SEQ ID NO: 91909 - DNA, 80 bp, synthetic construct; identical to SEQ ID NO: 16970
  source 1..80: mol_type = other DNA

SEQ ID NO: 91910 - DNA, 80 bp, synthetic construct
  source 1..80: mol_type = other DNA
gcatttgctaggtgacctttatttttttttaaatccagtgaatgcggtatagtccccccgcttttttctttctttttttt

SEQ ID NO: 91911 - DNA, 80 bp, synthetic construct
  source 1..80: mol_type = other DNA
ccaccacagctggctaattttgtatttttagtagagatgggttttctcgatgttggtcaggctggtttcgaactcccgac

SEQ ID NO: 91912 - DNA, 80 bp, synthetic construct
  source 1..80: mol_type = other DNA
tcttgctctgtcacccaggctggagtgcagtggcacaatctcagctcactgcaacctccacctcccaggttcaagcgatt

SEQ ID NO: 91913 - DNA, 80 bp, synthetic construct; identical to SEQ ID NO: 16971
  source 1..80: mol_type = other DNA

SEQ ID NO: 91914 - DNA, 80 bp, synthetic construct
  source 1..80: mol_type = other DNA
caacctccgccttctgggttcaagcgattcttgtgcctcagcctcctgtgtagctgggattgcaggcatgtgccaccacg

SEQ ID NO: 91915 - DNA, 80 bp, synthetic construct
  source 1..80: mol_type = other DNA
gagttcttagaggcttcctgaaactttgtgcaacattttgtgtatgtgtatattttctggggaaaggatttgtaactttc

SEQ ID NO: 91916 - DNA, 80 bp, synthetic construct
  source 1..80: mol_type = other DNA
gaatttgtaactttcatcagatatcccaagggatatatgtctttcctggtagagagggaagaaacaaaaaacgtgtgtaa

SEQ ID NO: 91917 - DNA, 80 bp, synthetic construct; identical to SEQ ID NO: 16972
  source 1..80: mol_type = other DNA

SEQ ID NO: 91918 - DNA, 80 bp, synthetic construct
  source 1..80: mol_type = other DNA
agagctgtgttcttttcttttacacaatatgtttgacatttgttgaattttaggtgtaccctggtcattaggaactccct

SEQ ID NO: 91919 - DNA, 80 bp, synthetic construct
  source 1..80: mol_type = other DNA
accaaaggtactatgtttaaaagcaaaatcatggcttaaaagtttttctttttcttaatatattaatatattgctataaa

SEQ ID NO: 91920 - DNA, 80 bp, synthetic construct
  source 1..80: mol_type = other DNA
attgagtgattacggctcttttaaatctttctccactaagagatagctaatttccgaaaaggtatacttggcctcccata

SEQ ID NO: 91921 - DNA, 80 bp, synthetic construct; identical to SEQ ID NO: 16973
  source 1..80: mol_type = other DNA

SEQ ID NO: 91922 - DNA, 80 bp, synthetic construct
  source 1..80: mol_type = other DNA
attgatgaattttattataacagctacaatactgagatgcataacccttccctttcctgatacccagttatcatctgttt

SEQ ID NO: 91923 - DNA, 80 bp, synthetic construct
  source 1..80: mol_type = other DNA
cagagcacattacctctttagttcagaacacattaattgcttcccataatcttcaggacacggccccatttcttcacgtg

SEQ ID NO: 91924 - DNA, 80 bp, synthetic construct
  source 1..80: mol_type = other DNA
cctgtctttaatgtccttgtccatgtgatgaacccctactcatttttccaagattgaactcaaatgtcaccttttctgtg

SEQ ID NO: 91925 - DNA, 80 bp, synthetic construct
  source 1..80: mol_type = other DNA
gcaaagggagatgataaaaagaatctgcgttacttagcctttttaaaaaacccttagcctatgaaggctactatttaagg

SEQ ID NO: 91926 - DNA, 80 bp, synthetic construct; identical to SEQ ID NO: 16974
  source 1..80: mol_type = other DNA

SEQ ID NO: 91927 - DNA, 80 bp, synthetic construct
  source 1..80: mol_type = other DNA
ccattcacatctggtattacaactttgccacccatttcagacagtattcctttgaccattctgcagtaactcagaagctg

SEQ ID NO: 91928 - DNA, 80 bp, synthetic construct
  source 1..80: mol_type = other DNA
gtggtggtgggcatttgtggtcccagctactcgggaggccgaggcaggagaatggcgtgaaccggggaggcagagcttgc

SEQ ID NO: 91929 - DNA, 80 bp, synthetic construct; identical to SEQ ID NO: 16975
  source 1..80: mol_type = other DNA

SEQ ID NO: 91930 - DNA, 80 bp, synthetic construct
  source 1..80: mol_type = other DNA
tatcctcccacctcagcctcccaaatagctgggactgcaggcgtgagcctttgcccacctaatttttatacttttgtaga

SEQ ID NO: 91931 - DNA, 80 bp, synthetic construct
  source 1..80: mol_type = other DNA
atttactgcatagtgttctgatttttaggaatacatacgttgcattatatagcagaactggctgtattcaaaagtctaat

SEQ ID NO: 91932 - DNA, 80 bp, synthetic construct
  source 1..80: mol_type = other DNA
tcaacctcctgaggatgtttgacattttttgacttttttttttttttttttgagacggagtcttgctctgtctcccaggc

SEQ ID NO: 91933 - DNA, 80 bp, synthetic construct
  source 1..80: mol_type = other DNA
ttggtcaggctggtcttgaactcctgacctcgtgatcctcctgtgtcagcctcccaaagtgctgtgggtacaggcgtgag

SEQ ID NO: 91934 - DNA, 80 bp, synthetic construct; identical to SEQ ID NO: 16976
  source 1..80: mol_type = other DNA

SEQ ID NO: 91935 - DNA, 80 bp, synthetic construct
  source 1..80: mol_type = other DNA
gaggtggagtttcaccgtgttgcccaggctggtctggaacttctgagctcaggcagtctgcctgccttggcctcccaaag

SEQ ID NO: 91936 - DNA, 80 bp, synthetic construct
  source 1..80: mol_type = other DNA
tcaattctcatccctctctctgcctctgcccttttggagttcccagtatctgttaattctctctgtatgtccatgtgtac

SEQ ID NO: 91937 - DNA, 80 bp, synthetic construct
  source 1..80: mol_type = other DNA
tggaattacaggtccgtgccacgatgcccggctaatttttgtattttcagtagaggtggagtttcgccatgttggccagg

SEQ ID NO: 91938 - DNA, 80 bp, synthetic construct; identical to SEQ ID NO: 16977
  source 1..80: mol_type = other DNA

SEQ ID NO: 91939 - DNA, 80 bp, synthetic construct
  source 1..80: mol_type = other DNA
tgacctcgtgatccacccgcctcgatgctgggattacaggcgtgagccactgagcctggccaatccattcctttttatgg

SEQ ID NO: 91940 - DNA, 80 bp, synthetic construct
  source 1..80: mol_type = other DNA
atatgtggtatgtatatatatgtggtatatatatgtggtatgtgtatatatatatgtggtatgtgtatatatatatgtat

SEQ ID NO: 91941 - DNA, 80 bp, synthetic construct; identical to SEQ ID NO: 16978
  source 1..80: mol_type = other DNA

SEQ ID NO: 91942 - DNA, 80 bp, synthetic construct
  source 1..80: mol_type = other DNA
acttttaaggaatctccacactgttttccttagtggttatactggtttacattcccaccagaagtgtagaagtgttccct

SEQ ID NO: 91943 - DNA, 80 bp, synthetic construct
  source 1..80: mol_type = other DNA
agaattgtctattcatgtccttagcccattttttgataggattgtttgttttttttcttgctagtttgtttgagcttgtt

SEQ ID NO: 91944 - DNA, 80 bp, synthetic construct
  source 1..80: mol_type = other DNA
gctggtaacaaagacacaggtactggtaataactgccatggcttattgcctacattaatgatgaaagcaaatgctaaatt

SEQ ID NO: 91945 - DNA, 80 bp, synthetic construct; identical to SEQ ID NO: 16979
  source 1..80: mol_type = other DNA

SEQ ID NO: 91946 - DNA, 80 bp, synthetic construct
  source 1..80: mol_type = other DNA
ggattcttggaaaaccttctttagtcatgtgatagaaaaataacagcttatggaaaaaacagggttgaggcagacctgaa

SEQ ID NO: 91947 - DNA, 80 bp, synthetic construct
  source 1..80: mol_type = other DNA
ctgtggctcttgttttctcctttgaggtgtaggtccttgagggcatttgcttctaatagaggctagtttcatcagaatta

SEQ ID NO: 91948 - DNA, 80 bp, synthetic construct
  source 1..80: mol_type = other DNA
agctttcccacatatcttaacatagtgagtggaaagtacagtggctgttaagccaactactctgaggtcttcactgctaa

SEQ ID NO: 91949 - DNA, 80 bp, synthetic construct; identical to SEQ ID NO: 16980
  source 1..80: mol_type = other DNA

SEQ ID NO: 91950 - DNA, 80 bp, synthetic construct
  source 1..80: mol_type = other DNA
gtttgggaactattgttttggagtgaaatgcagtgtgttagatatcacttgcagaattcttctaagggtatttattggcg

SEQ ID NO: 91951 - DNA, 80 bp, synthetic construct
  source 1..80: mol_type = other DNA
agctattgttattattacttcgtacaaaaagggaaaaggaggctcaaagtatcatgctccagataacagagccagtaggt

SEQ ID NO: 91952 - DNA, 80 bp, synthetic construct
  source 1..80: mol_type = other DNA
ggcaggcagtagtgtgatcttgggctaactgcaacctccatctcctgcattcaagcagttctcctgcttcaacctcctga

SEQ ID NO: 91953 - DNA, 80 bp, synthetic construct; identical to SEQ ID NO: 16981
  source 1..80: mol_type = other DNA

SEQ ID NO: 91954 - DNA, 80 bp, synthetic construct
  source 1..80: mol_type = other DNA
gacgaggtagtgtattattagtgggaagctttgagtgctacatcatctccctttctataaaataaattgagtacgaaaca

SEQ ID NO: 91955 - DNA, 80 bp, synthetic construct
  source 1..80: mol_type = other DNA
ggaaaacaccagaaattattgttggcagtttttgtgactcctcttactgatcttcgttctgacttctccaagtttcagga

SEQ ID NO: 91956 - DNA, 80 bp, synthetic construct
  source 1..80: mol_type = other DNA
tctaattgtagcacctttgtggacagtggatgtaatattaagtgacagatgggaaaaggatttttaaaaaaatagcaact

SEQ ID NO: 91957 - DNA, 80 bp, synthetic construct
  source 1..80: mol_type = other DNA
attttcaaagagaaggaaaattatagtcactggaaacggaaagagaagttagaggtaaacataggacacacaagaaaact

SEQ ID NO: 91958 - DNA, 80 bp, synthetic construct; identical to SEQ ID NO: 16982
  source 1..80: mol_type = other DNA

SEQ ID NO: 91959 - DNA, 80 bp, synthetic construct
  source 1..80: mol_type = other DNA
cttctgtttcttttccatgtagagttctttgcaggaggaggttagaataggtgtgcatctcctaaatagttgtcgaatat

SEQ ID NO: 91960 - DNA, 80 bp, synthetic construct
  source 1..80: mol_type = other DNA
tacatgaaagtgaattttaaagcacagtttatgtaatgttaatgttttgttttgtatctgttaaaaatttgtttatatga

SEQ ID NO: 91961 - DNA, 80 bp, synthetic construct
  source 1..80: mol_type = other DNA
attctcctgccttagcctcccgagtagctgggattataggcacctgtcaccaaacccggctaagttttgtatttttggta

SEQ ID NO: 91962 - DNA, 80 bp, synthetic construct; identical to SEQ ID NO: 16983
  source 1..80: mol_type = other DNA

SEQ ID NO: 91963 - DNA, 80 bp, synthetic construct
  source 1..80: mol_type = other DNA
agctggaattacaggaatacgccaccaagcccggctaattttgtatttttagtagagatggggtttctccatgttggtca

SEQ ID NO: 91964 - DNA, 80 bp, synthetic construct
  source 1..80: mol_type = other DNA
cttgaatctgggctcaagtgatcctcccacttcagcctcccaagtagttggaaccatagatgtgcatcaccacacctggc

SEQ ID NO: 91965 - DNA, 80 bp, synthetic construct; identical to SEQ ID NO: 16984
  source 1..80: mol_type = other DNA

SEQ ID NO: 91966 - DNA, 80 bp, synthetic construct
  source 1..80: mol_type = other DNA
tatgttggtcaggcttgtcccaaactcctgacctcagatgatccacctgcgtctgcctcccaaagtgctgggattatagg

SEQ ID NO: 91967 - DNA, 80 bp, synthetic construct
  source 1..80: mol_type = other DNA
catgggtgtgcacgtgtgtaggtataaatgtttccatattctagtatattctgtgtcagtgatagagcagtcttagagct

SEQ ID NO: 91968 - DNA, 80 bp, synthetic construct
  source 1..80: mol_type = other DNA
gtgttcaactttcagatcaatgggagacagaaatattgttctgagacatctggaagccgaatgtgttttattcctgcctg

SEQ ID NO: 91969 - DNA, 80 bp, synthetic construct; identical to SEQ ID NO: 16985
  source 1..80: mol_type = other DNA

SEQ ID NO: 91970 - DNA, 80 bp, synthetic construct
  source 1..80: mol_type = other DNA
gccaacatggtgaaaccctgtctctactaaaaatacaaaaattagctgggtgtggtggtgcatgcctgtaatcccagcta

SEQ ID NO: 91971 - DNA, 80 bp, synthetic construct
  source 1..80: mol_type = other DNA
ctacagttaattttgccatttgtggtcagcattcttcttctaaattgctataatcttgccttcatattatgtgtctcaaa

SEQ ID NO: 91972 - DNA, 80 bp, synthetic construct
  source 1..80: mol_type = other DNA
tgctgtttgtctggggtccacgcttgcctaacttctgatgtgatttatttctgccagtttctttttttgttgttgtttta

SEQ ID NO: 91973 - DNA, 80 bp, synthetic construct
  source 1..80: mol_type = other DNA
ctggggttataggcacactgcaccacacccagctaatttttgtatttttcgtagagacagggtttcaccatgttggccag

SEQ ID NO: 91974 - DNA, 80 bp, synthetic construct; identical to SEQ ID NO: 16986
  source 1..80: mol_type = other DNA

SEQ ID NO: 91975 - DNA, 80 bp, synthetic construct
  source 1..80: mol_type = other DNA
tcttccacctccccactacctctccttccctacttttggactgtaaaagctgtctttctgcagttaattgttttattctt

SEQ ID NO: 91976 - DNA, 80 bp, synthetic construct
  source 1..80: mol_type = other DNA
gtctctgcttgacagcaaataagcctaacgttccctaacaaatgatgatgtcccattaatgatttgatgacttcctgttt

SEQ ID NO: 91977 - DNA, 80 bp, synthetic construct
  source 1..80: mol_type = other DNA
aggagttcaacaccagcctggccaacagggcgacaccccatttctactaaaaatacaaaaattaggccgggtgcggtggc

SEQ ID NO: 91978 - DNA, 80 bp, synthetic construct
  source 1..80: mol_type = other DNA
aaggctgaggcaggagaatggcttgaacccaggaggtggagcttgcagtgagccgagatggcgctgctgcactccaacct

SEQ ID NO: 91979 - DNA, 80 bp, synthetic construct; identical to SEQ ID NO: 16987
  source 1..80: mol_type = other DNA

SEQ ID NO: 91980 - DNA, 80 bp, synthetic construct
  source 1..80: mol_type = other DNA
agaaaagttttatttcaagtacacatgagagcttcatagaaaagaagtgaagacctaaagaaacagactggagagttcat

SEQ ID NO: 91981 - DNA, 80 bp, synthetic construct
  source 1..80: mol_type = other DNA
aaaggcacatattacatggtgtcaggcaagagagtgtgtgcaggggaactgccctttataaaaccatcagatctcgagag

SEQ ID NO: 91982 - DNA, 80 bp, synthetic construct; identical to SEQ ID NO: 16988
  source 1..80: mol_type = other DNA

SEQ ID NO: 91983 - DNA, 80 bp, synthetic construct
  source 1..80: mol_type = other DNA
tatggtgatcaagagtagttctcttcctgctagaagaggggtgggagagaacaccttcacaaagggaaatttatattctg

SEQ ID NO: 91984 - DNA, 80 bp, synthetic construct
  source 1..80: mol_type = other DNA
cagtgacaatccttgatatttttccttctttctctccaggtaaacagtgttaacatcctggtatgcttcccccaattcca

SEQ ID NO: 91985 - DNA, 80 bp, synthetic construct
  source 1..80: mol_type = other DNA
agagcctggatttgaggaaggtaagcagtgcagttaggtggatgtagactagaagaggtcatttgttctcatttcattgt

SEQ ID NO: 91986 - DNA, 80 bp, synthetic construct
  source 1..80: mol_type = other DNA
ctggaactacaggcgcctgccaccatgcccagctaattttttgtattttcagtagacacggggtttcaccatgttggcca

SEQ ID NO: 91987 - DNA, 80 bp, synthetic construct; identical to SEQ ID NO: 16989
  source 1..80: mol_type = other DNA

SEQ ID NO: 91988 - DNA, 80 bp, synthetic construct
  source 1..80: mol_type = other DNA
aatgtctgtttaggtggttacttctcttcttgttatgagagtcagtcttctggttgctggaaactgctaggagatttata

SEQ ID NO: 91989 - DNA, 80 bp, synthetic construct
  source 1..80: mol_type = other DNA
gtagactgtttgaggttatttatatcaggacttgttatgcaggtaactgaaaactcaacataatctaggttatgtagtta

SEQ ID NO: 91990 - DNA, 80 bp, synthetic construct; identical to SEQ ID NO: 16990
  source 1..80: mol_type = other DNA

SEQ ID NO: 91991 - DNA, 80 bp, synthetic construct
  source 1..80: mol_type = other DNA
aaatcagattccctgttaaagatctgttctagattccctagggggttgacctcatatagtatcttctttttctttggtta

SEQ ID NO: 91992 - DNA, 80 bp, synthetic construct
  source 1..80: mol_type = other DNA
ctgttttctaggtgtgcacttaattcatgtgatgaagggaacagtatttacatgagtggtttggttaatttttcccctcc

SEQ ID NO: 91993 - DNA, 80 bp, synthetic construct; identical to SEQ ID NO: 16991
  source 1..80: mol_type = other DNA

SEQ ID NO: 91994 - DNA, 80 bp, synthetic construct
  source 1..80: mol_type = other DNA
gaccatcctggctaacacggtgaaaccccgtctgtactaaaaatacaaaaaaattagccgggcatggtggcaggtccctg

SEQ ID NO: 91995 - DNA, 80 bp, synthetic construct; identical to SEQ ID NO: 16992
  source 1..80: mol_type = other DNA

SEQ ID NO: 91996 - DNA, 80 bp, synthetic construct
  source 1..80: mol_type = other DNA
ctttaagttctagggtacatgtgtacaatgtgcaggtttgttacatatgtatacatgtgacatgttggtgtgttgcaccc

SEQ ID NO: 91997 - DNA, 80 bp, synthetic construct
  source 1..80: mol_type = other DNA
ttgcgatagtttgctgagaatgatagtttccagcttcatccatttccctacaaaggacatgaactcatcattttttatgg

SEQ ID NO: 91998 - DNA, 80 bp, synthetic construct
  source 1..80: mol_type = other DNA
gtatatacccagtaatgggatggctgggtccaatggtatttctacttctagatccctgaggaatcgccacagtcttccac

SEQ ID NO: 91999 - DNA, 80 bp, synthetic construct; identical to SEQ ID NO: 16993
  source 1..80: mol_type = other DNA

SEQ ID NO: 92000 - DNA, 80 bp, synthetic construct
  source 1..80: mol_type = other DNA
atgtcaatgcagtctctttacattactaactaaagaaaaataggtgctctttaaagatcttttaagattaggaacaaaaa

SEQ ID NO: 92001 - DNA, 80 bp, synthetic construct
  source 1..80: mol_type = other DNA
aactttctcaaaacactctaataataagcagagcttatgttctttatccccccagaacatcagcaagcaaaatgcctgaa

SEQ ID NO: 92002 - DNA, 80 bp, synthetic construct; identical to SEQ ID NO: 16994
  source 1..80: mol_type = other DNA

SEQ ID NO: 92003 - DNA, 80 bp, synthetic construct
  source 1..80: mol_type = other DNA
gttctcttcaattagggaatgaacaaaattaatttttcctgaaaaattgatgtggatggtctgccgctgtgggcttcatc

SEQ ID NO: 92004 - DNA, 80 bp, synthetic construct
  source 1..80: mol_type = other DNA
ttagcagaactcatactgctctgacatctaaactgatgtcttagccttcatagtgtctctgactagatcctattcagacg

SEQ ID NO: 92005 - DNA, 80 bp, synthetic construct; identical to SEQ ID NO: 16995
  source 1..80: mol_type = other DNA

SEQ ID NO: 92006 - DNA, 80 bp, synthetic construct
  source 1..80: mol_type = other DNA
tgaccaccaccatctagtttgaaaatatttcatcacaaccaaaagaaaacctcatatctattagcggtctctcctgtttc

SEQ ID NO: 92007 - DNA, 80 bp, synthetic construct
  source 1..80: mol_type = other DNA
tttagaggctcatccacattgtagcatgtgtcagtacttcatttccttgtgtattggtccattcttgtactgctataaag

SEQ ID NO: 92008 - DNA, 80 bp, synthetic construct
  source 1..80: mol_type = other DNA
tggagcaggagcaagagagagaagggggaggtgctccacacttttaaacaactagatctcaggacaagtcagtcactata

SEQ ID NO: 92009 - DNA, 80 bp, synthetic construct; identical to SEQ ID NO: 16996
  source 1..80: mol_type = other DNA

SEQ ID NO: 92010 - DNA, 80 bp, synthetic construct
  source 1..80: mol_type = other DNA
ctttgaactcctgggctcaagcaatcctcctgccttggcttcccaaagttgtaggattacaagtgtgagtttagagaggt

SEQ ID NO: 92011 - DNA, 80 bp, synthetic construct
  source 1..80: mol_type = other DNA
ggattgctttttcattgtctatatatgcttgctaatttttgatctgctgggttactgagaaggatgtgggtttctccatc

SEQ ID NO: 92012 - DNA, 80 bp, synthetic construct
  source 1..80: mol_type = other DNA
ttcattgtaagagagctatgtcagagtactttttaaaacactttttaatatggtatatatttttttcttttttaatgagg

SEQ ID NO: 92013 - DNA, 80 bp, synthetic construct
  source 1..80: mol_type = other DNA
ggtttaagtgattctcctgccttagcctccctaggagctgggattacaggcgtgcgccaccacgcctggctaatttttgt

SEQ ID NO: 92014 - DNA, 80 bp, synthetic construct; identical to SEQ ID NO: 16997
  source 1..80: mol_type = other DNA

SEQ ID NO: 92015 - DNA, 80 bp, synthetic construct
  source 1..80: mol_type = other DNA
cttgcccattctgttttacttttgtattgcttgggtttctaaaattccattttgtcctctccctttgctcttccccaatc

SEQ ID NO: 92016 - DNA, 80 bp, synthetic construct
  source 1..80: mol_type = other DNA
gcctatcagtatcttctcagatatcccaaaaaatactaggaccttaagacacctaaaatcaggttacatttcttcataat

SEQ ID NO: 92017 - DNA, 80 bp, synthetic construct; identical to SEQ ID NO: 16998
  source 1..80: mol_type = other DNA

SEQ ID NO: 92018 - DNA, 80 bp, synthetic construct
  source 1..80: mol_type = other DNA
acaggtgcccaccatcacacctggctaatttttggtatttttagtagacggggtttcaccatgctggccaggctggtctt

SEQ ID NO: 92019 - DNA, 80 bp, synthetic construct
  source 1..80: mol_type = other DNA
cttttgtgtagcctgaagcaataactgtgtttctgatgcctaggtaagtatactgtaggtaggctgatactgttcagcta

SEQ ID NO: 92020 - DNA, 80 bp, synthetic construct
  source 1..80: mol_type = other DNA
taagttagaggctagttgttcacttttcccttgtttaactggggactcctcagcagccctttcaaaacagtataacctca

SEQ ID NO: 92021 - DNA, 80 bp, synthetic construct
  source 1..80: mol_type = other DNA
ttcattggaagaggcaagttcattagcacagtttcagtccaccattacagcatttttttcctgaattattataagtctta

SEQ ID NO: 92022 - DNA, 80 bp, synthetic construct; identical to SEQ ID NO: 16999
  source 1..80: mol_type = other DNA

SEQ ID NO: 92023 - DNA, 80 bp, synthetic construct
  source 1..80: mol_type = other DNA
tttcttatctgtgagttgtaagtgcttacacatgcccacttgatgaccttgatgttttcttacacatggaagcaagtgct

SEQ ID NO: 92024 - DNA, 80 bp, synthetic construct
  source 1..80: mol_type = other DNA
attctctttttttgctagctttctgtaatttgattttaattccttattccttgcatagtttgcttctggtatgttaaagt

SEQ ID NO: 92025 - DNA, 80 bp, synthetic construct; identical to SEQ ID NO: 17000
  source 1..80: mol_type = other DNA

SEQ ID NO: 92026 - DNA, 80 bp, synthetic construct
  source 1..80: mol_type = other DNA
ttcgcgccattctcctgcctcagcctcccaactagctgggactacaggtgccccccaccactcctggctaattttttttt

SEQ ID NO: 92027 - DNA, 80 bp, synthetic construct
  source 1..80: mol_type = other DNA
ttttctttttcttttcttttcttttcttttcttttcttttcttttcttttcttttcttttctttcctttcctttcctttc

SEQ ID NO: 92028 - DNA, 80 bp, synthetic construct
  source 1..80: mol_type = other DNA
ttgttcaagtgattgtcctgcctcagcctgccaaatagctgggactacaggtgcgcactgctacgcccggctaattttgt

SEQ ID NO: 92029 - DNA, 80 bp, synthetic construct
  source 1..80: mol_type = other DNA
acattcaaattcttcttttaaatcttccaataggcagttatctttataaagatcctatataatcaagactttgtttctga

SEQ ID NO: 92030 - DNA, 80 bp, synthetic construct; identical to SEQ ID NO: 17001
  source 1..80: mol_type = other DNA

SEQ ID NO: 92031 - DNA, 80 bp, synthetic construct
  source 1..80: mol_type = other DNA
catttctataaatagaaagtccttaatagttgtgactgaataacttatggatagcaaattatttaactgaaaacagtaaa

SEQ ID NO: 92032 - DNA, 80 bp, synthetic construct
  source 1..80: mol_type = other DNA
tggaaaagaagatgcagtcaacattaataagtgcagccagagatcttggtaagaatgggtcattggaggttggaataatt

SEQ ID NO: 92033 - DNA, 80 bp, synthetic construct; identical to SEQ ID NO: 17002
  source 1..80: mol_type = other DNA

SEQ ID NO: 92034 - DNA, 80 bp, synthetic construct
  source 1..80: mol_type = other DNA
caagcagttcattaatgtcacttttggaaaaagtctgtctttcataccagcttattaattccctatgggttcacacggtt

SEQ ID NO: 92035 - DNA, 80 bp, synthetic construct
  source 1..80: mol_type = other DNA
caaacatggagtagatccctaattaagagcctttgcattaaagtccaccttcctcatttcatagctaaggatattgaggc

SEQ ID NO: 92036 - DNA, 80 bp, synthetic construct
  source 1..80: mol_type = other DNA
aagtttttctgctgataattggttttatgaaggaagaatcctgttaagaatgcatcattggactgggtgtggtggctcac

SEQ ID NO: 92037 - DNA, 80 bp, synthetic construct
  source 1..80: mol_type = other DNA
gaggctgaggtgagaggatcacttgagccagggaggttgaggctataatgagccataattgcactactgcactccagcct

SEQ ID NO: 92038 - DNA, 80 bp, synthetic construct; identical to SEQ ID NO: 17003
  source 1..80: mol_type = other DNA

SEQ ID NO: 92039 - DNA, 80 bp, synthetic construct
  source 1..80: mol_type = other DNA
acaccttgtctttaaaaaaaaaaacagaggaatgcatcatagtatatattaaattattgcctatttttttatctatttta

SEQ ID NO: 92040 - DNA, 80 bp, synthetic construct
  source 1..80: mol_type = other DNA
atagcactcaaattgagacagaaactgtaactgtagtataagaagcattaggctgggaattgggaaacacgagttctagt

SEQ ID NO: 92041 - DNA, 80 bp, synthetic construct
  source 1..80: mol_type = other DNA
catcagaaatgccattacactttgaggatttgagccttattttaaataaagttgtgatcctcatggcagcctaggtttac

SEQ ID NO: 92042 - DNA, 80 bp, synthetic construct; identical to SEQ ID NO: 17004
  source 1..80: mol_type = other DNA

SEQ ID NO: 92043 - DNA, 80 bp, synthetic construct
  source 1..80: mol_type = other DNA
tatgaagagggaatgtatttataaaaactcaaattcttgatgcagaaggtctagctgattgtgaacccaaaatatccgag

SEQ ID NO: 92044 - DNA, 80 bp, synthetic construct
  source 1..80: mol_type = other DNA
gcaaggggctttcaggtaataagtagataagagacaaaaggttgcatacttttgagtccttgatcagcctttcactgaat

SEQ ID NO: 92045 - DNA, 80 bp, synthetic construct; identical to SEQ ID NO: 17005
  source 1..80: mol_type = other DNA

SEQ ID NO: 92046 - DNA, 80 bp, synthetic construct
  source 1..80: mol_type = other DNA
ttcctatgcttaacagaaaatatgtgcactagttttcctagagtttcattgtcagagtctcaagtttttgtttggaaatt

SEQ ID NO: 92047 - DNA, 80 bp, synthetic construct
  source 1..80: mol_type = other DNA
tctgcagccttggatgggtttacccagaaagcagctttcaagtcagaaactaacattcataagggagttaaggattttat

SEQ ID NO: 92048 - DNA, 80 bp, synthetic construct
  source 1..80: mol_type = other DNA
aatactttttcttttcttcttgattatcaaggcttggaccctggcaaacagattaaactggattccagtgcacagtttgg

SEQ ID NO: 92049 - DNA, 80 bp, synthetic construct; identical to SEQ ID NO: 17006
  source 1..80: mol_type = other DNA

SEQ ID NO: 92050 - DNA, 80 bp, synthetic construct
  source 1..80: mol_type = other DNA
ttttatcgcttattctgtgttaccatatctattagagctagttccccctcatatctctgctttagttattttcacatgtt

SEQ ID NO: 92051 - DNA, 80 bp, synthetic construct
  source 1..80: mol_type = other DNA
cgcccagctaattttttgtatttttagtagagacggggtttcaccgtggtctcgatctcctgacctcgtgatccgcctgc

SEQ ID NO: 92052 - DNA, 80 bp, synthetic construct
  source 1..80: mol_type = other DNA
cgattctcatgcttcagcttcctgagtagctaggattataggcatgcaccaccacgcctagttcatttttgtatttttag

SEQ ID NO: 92053 - DNA, 80 bp, synthetic construct
  source 1..80: mol_type = other DNA
aagttaagaaaattattctgatatttcaattgggtgtttaaattagttgagggaaatatgaggccattcactagatgata

SEQ ID NO: 92054 - DNA, 80 bp, synthetic construct; identical to SEQ ID NO: 17007
  source 1..80: mol_type = other DNA

SEQ ID NO: 92055 - DNA, 80 bp, synthetic construct
  source 1..80: mol_type = other DNA
ttttataggtgaagaagctaagactttacttttcctcagttagacagctagtgctggtgggtgcctaaacttagatcttc

SEQ ID NO: 92056 - DNA, 80 bp, synthetic construct
  source 1..80: mol_type = other DNA
gaatgggccacatgatgccaaaagtgaaaaagtcactcactagattatgacctgcagaatctggtccttgcctgcctctg

SEQ ID NO: 92057 - DNA, 80 bp, synthetic construct; identical to SEQ ID NO: 17008
  source 1..80: mol_type = other DNA

SEQ ID NO: 92058 - DNA, 80 bp, synthetic construct
  source 1..80: mol_type = other DNA
ctttgtcgctcaggctggagtgcagtggcacaattttggcccactgcaacctccacctcctgggctcaagccatcccacc

SEQ ID NO: 92059 - DNA, 80 bp, synthetic construct
  source 1..80: mol_type = other DNA
tgctgtgcccggcccaacctctaattttaattttctcttcaaattgttcaataagatttagtttcaagacattttcctgg

SEQ ID NO: 92060 - DNA, 80 bp, synthetic construct; identical to SEQ ID NO: 17009
  source 1..80: mol_type = other DNA

SEQ ID NO: 92061 - DNA, 80 bp, synthetic construct
  source 1..80: mol_type = other DNA
gaaaccctacctctagtaaaaatataaaacattagccgggcgtagtggttggtgcctgtagtcccagctactcaggaggc

SEQ ID NO: 92062 - DNA, 80 bp, synthetic construct; identical to SEQ ID NO: 17010
  source 1..80: mol_type = other DNA

SEQ ID NO: 92063 - DNA, 80 bp, synthetic construct
  source 1..80: mol_type = other DNA
cttgaactcctgacctcaggtgatccacctgcctcggcctcccaaagtgctgggattacaggcaccctgcctgtgtttgt

SEQ ID NO: 92064 - DNA, 80 bp, synthetic construct
  source 1..80: mol_type = other DNA
ggattacaagcacgcgccaccatgctgggctaatttttgtatttttagtagagacggggtttctccatgttggtcaggct

SEQ ID NO: 92065 - DNA, 80 bp, synthetic construct; identical to SEQ ID NO: 17011
  source 1..80: mol_type = other DNA

SEQ ID NO: 92066 - DNA, 80 bp, synthetic construct
  source 1..80: mol_type = other DNA
tgttatttcgatttgcagcaaattgacttctttaaatgaagagtataccaaaaataaaacagaatatgaagaagcccagg

SEQ ID NO: 92067 - DNA, 80 bp, synthetic construct
  source 1..80: mol_type = other DNA
gttaggtttcctatataaaataaggcatggtatgttacagtaggacacataactggaagttactcttgcacatagaaaca

SEQ ID NO: 92068 - DNA, 80 bp, synthetic construct
  source 1..80: mol_type = other DNA
tgggtcatctatgggctcatgaggctctaggttatggaagtaaataccactgaaaagcaaatattaattacacatgaggc

SEQ ID NO: 92069 - DNA, 80 bp, synthetic construct
  source 1..80: mol_type = other DNA
atgcgttaagttggaaggctttgccgatcatggtgtgtatgttgactaacctttattgtgcctttaaaaaatatactcaa

SEQ ID NO: 92070 - DNA, 80 bp, synthetic construct; identical to SEQ ID NO: 17012
  source 1..80: mol_type = other DNA

SEQ ID NO: 92071 - DNA, 80 bp, synthetic construct
  source 1..80: mol_type = other DNA
agacaatatggtgttagtgtcagatttcttgtgtgaaatggtagtgttatgattaggagaatgtccttgttctcaggata

SEQ ID NO: 92072 - DNA, 80 bp, synthetic construct
  source 1..80: mol_type = other DNA
gaattgatttgtaaagattacatttttgcttgttggtgtcagataactgtgacgtaataatcttttgctgaattatgttt

SEQ ID NO: 92073 - DNA, 80 bp, synthetic construct; identical to SEQ ID NO: 17013
  source 1..80: mol_type = other DNA

SEQ ID NO: 92074 - DNA, 80 bp, synthetic construct
  source 1..80: mol_type = other DNA
ctcaggaggctgaggcaggagaatcacttgaacccaggaggtcgagggtgtggtgagccataattatgctactgtacttc

SEQ ID NO: 92075 - DNA, 80 bp, synthetic construct
  source 1..80: mol_type = other DNA
tatttatttatttatttttcagatggggtcttaccatgttgcccaggctttagtgcagtgatgcgatcatgactcactgc

SEQ ID NO: 92076 - DNA, 80 bp, synthetic construct
  source 1..80: mol_type = other DNA
cttcctgccttggcctccgaaagtgttgggattacaggcgtgagccaccctgcccagcctagttttcttttttttactat

SEQ ID NO: 92077 - DNA, 80 bp, synthetic construct; identical to SEQ ID NO: 17014
  source 1..80: mol_type = other DNA

SEQ ID NO: 92078 - DNA, 80 bp, synthetic construct
  source 1..80: mol_type = other DNA
agagcaagactctgtctccaaaaaaaaaaaaaaaaaaaaaaaaaaaaagtatactgaaacagaggaagataattaggtct

SEQ ID NO: 92079 - DNA, 80 bp, synthetic construct
  source 1..80: mol_type = other DNA
cttttgacatgattgatagctgtatgatagtctgaatgacatgtgggtcatgcaccagcccctccaacctgttaacattt

SEQ ID NO: 92080 - DNA, 80 bp, synthetic construct
  source 1..80: mol_type = other DNA
tatgctgacatcctctgcatgtgatactgatgaggaaagaaagccaaactgtcttacggtcagttcgtacaatataccag

SEQ ID NO: 92081 - DNA, 80 bp, synthetic construct; identical to SEQ ID NO: 17015
  source 1..80: mol_type = other DNA

SEQ ID NO: 92082 - DNA, 80 bp, synthetic construct
  source 1..80: mol_type = other DNA
tatctgggtttacagacatgcaccaccatacctggctaatttttgtatttttggtagagatggggtttcgccgtgttacc

SEQ ID NO: 92083 - DNA, 80 bp, synthetic construct
  source 1..80: mol_type = other DNA
tttgatagctattcacaatgggaaaggatgtagcaacacattttaaccctatgttgagttttaggtgggttcctttgaaa

SEQ ID NO: 92084 - DNA, 80 bp, synthetic construct
  source 1..80: mol_type = other DNA
tatgtagaaccaatgcagacactcaatgatgtgttagctcagctagatgctgttgtcagctttgctcacgtgtcaaatgg

SEQ ID NO: 92085 - DNA, 80 bp, synthetic construct
  source 1..80: mol_type = other DNA
cgtatactttgaaaaagataaacagatgttccacatcattactggtaaaaaacctggtttttgggctttgtgggggtaac

SEQ ID NO: 92086 - DNA, 80 bp, synthetic construct; identical to SEQ ID NO: 17016
  source 1..80: mol_type = other DNA

SEQ ID NO: 92087 - DNA, 80 bp, synthetic construct
  source 1..80: mol_type = other DNA
atgtgaaactcgcaaaaactagccttgcatataggctcatgtatcatgtctcagctgagatgtttgagagatcttaacta

SEQ ID NO: 92088 - DNA, 80 bp, synthetic construct
  source 1..80: mol_type = other DNA
aattgcctgtttttcaaaagaaagatcatgtcttcaggtttttgtgtggggtttaaatgattcgaaagatttgaccatac

SEQ ID NO: 92089 - DNA, 80 bp, synthetic construct; identical to SEQ ID NO: 17017
  source 1..80: mol_type = other DNA

SEQ ID NO: 92090 - DNA, 80 bp, synthetic construct
  source 1..80: mol_type = other DNA
tgatataatttgttttgtaggccccaatatgggaggtaaatcaacatatattcgacaaactggggtgatagtactcatgg

SEQ ID NO: 92091 - DNA, 80 bp, synthetic construct
  source 1..80: mol_type = other DNA
agtcccttgaagatagaaatgtatgtctctgtcctgtgagaaggaaaagtatatttgcagattctcatgtaaaaacatct

SEQ ID NO: 92092 - DNA, 80 bp, synthetic construct
  source 1..80: mol_type = other DNA
aatctccactaccatgtttttgcttggactgttcacacttcctggaatggtccttcttgccgtttatccaacttctttct

SEQ ID NO: 92093 - DNA, 80 bp, synthetic construct; identical to SEQ ID NO: 17018
  source 1..80: mol_type = other DNA

SEQ ID NO: 92094 - DNA, 80 bp, synthetic construct
  source 1..80: mol_type = other DNA
taggtgcctagtaaattatgtattgatttaacttctttgaggttctgttgtttgtgaagaattataaaagcaatacaaat

SEQ ID NO: 92095 - DNA, 80 bp, synthetic construct
  source 1..80: mol_type = other DNA
ttggttaaaattgagaaaagaatagtaatagatggtattggtaggactgtggcaggcacacaatttacatgaccaccaaa

SEQ ID NO: 92096 - DNA, 80 bp, synthetic construct
  source 1..80: mol_type = other DNA
atattcaaaatctgtttttcctttcatccgttgtttgttcatgttcatgacctttttttttttttcctattctcctccct

SEQ ID NO: 92097 - DNA, 80 bp, synthetic construct
  source 1..80: mol_type = other DNA
gctcaagtgatcctcccacctccgccttccaaagtgctgggattacagacgtgagccatcatgcctggcccttgcccatt

SEQ ID NO: 92098 - DNA, 80 bp, synthetic construct; identical to SEQ ID NO: 17019
  source 1..80: mol_type = other DNA

SEQ ID NO: 92099 - DNA, 80 bp, synthetic construct
  source 1..80: mol_type = other DNA
ccttggccaatcagataccaactgttaataatctacatgtcacagcactcaccactgaagagaccttaactatgctttat

SEQ ID NO: 92100 - DNA, 80 bp, synthetic construct
  source 1..80: mol_type = other DNA
ttgttatagaacccatttaccccttaattcacagtctgggggtaggaacatgtacatcatatttctgtatctcatagtag

SEQ ID NO: 92101 - DNA, 80 bp, synthetic construct
  source 1..80: mol_type = other DNA
tcaagcgattctcctgcctcagcttcccgagtagctgggattacaggcgcctgccaccacacctggctaatttttatatt

SEQ ID NO: 92102 - DNA, 80 bp, synthetic construct; identical to SEQ ID NO: 17020
  source 1..80: mol_type = other DNA

SEQ ID NO: 92103 - DNA, 80 bp, synthetic construct
  source 1..80: mol_type = other DNA
aaagctgggggttccagaaatcttgaaatagtagttatcacatgcagagtgacttatctgttgttgtttcatcctttcag

SEQ ID NO: 92104 - DNA, 80 bp, synthetic construct
  source 1..80: mol_type = other DNA
cacgtttttctgcatcagttggttgcacatgagtgagataatcttggttctttatcctttgttatttgtacttcattggg

SEQ ID NO: 92105 - DNA, 80 bp, synthetic construct
  source 1..80: mol_type = other DNA
gtgtgaagatagaaaaacttcatccttcactgtgaatgtttaacaaacatttgcttctactttatttttgtttgcttcct

SEQ ID NO: 92106 - DNA, 80 bp, synthetic construct; identical to SEQ ID NO: 17021
  source 1..80: mol_type = other DNA

SEQ ID NO: 92107 - DNA, 80 bp, synthetic construct
  source 1..80: mol_type = other DNA
ccttcccttccctcctcttcctccttcccttcccccttcctccttcccttcccccttcctccttccctttcctcttccct

SEQ ID NO: 92108 - DNA, 80 bp, synthetic construct
  source 1..80: mol_type = other DNA
gtttatctattgagcttttttgtctcctatttttatttttcctactatgtttgtcgaggataaaatacagcactgtgtgc

SEQ ID NO: 92109 - DNA, 80 bp, synthetic construct
  source 1..80: mol_type = other DNA
aaattccatttacataaattgctgtctcttctcatgctgtcccctcacgcttccccaaatttcttataggtgtctgtgat

SEQ ID NO: 92110 - DNA, 80 bp, synthetic construct; identical to SEQ ID NO: 17022
  source 1..80: mol_type = other DNA

SEQ ID NO: 92111 - DNA, 80 bp, synthetic construct
  source 1..80: mol_type = other DNA
gttattttgatttctgcagtatatacatctgcatgatcaatattcgatttcaagtaccaaagtaggagtaaaggaatatt

SEQ ID NO: 92112 - DNA, 80 bp, synthetic construct
  source 1..80: mol_type = other DNA
ctgccctctatttgtctagaatttagttgggaagataagaataacgaacgtgacacagagaataaagtggcatatgacaa

SEQ ID NO: 92113 - DNA, 80 bp, synthetic construct
  source 1..80: mol_type = other DNA
gttctcatgggagaagtggattttatggtgcctttgagtaatgggtcatatttgggcgttcacacagaaagacccaagca

SEQ ID NO: 92114 - DNA, 80 bp, synthetic construct
  source 1..80: mol_type = other DNA
gcagctgggactacaggcgcctgccaccacgcccggctaaattttttgtattttttagtagagatggggtttcaccgtgt

SEQ ID NO: 92115 - DNA, 80 bp, synthetic construct; identical to SEQ ID NO: 17023
  source 1..80: mol_type = other DNA

SEQ ID NO: 92116 - DNA, 80 bp, synthetic construct
  source 1..80: mol_type = other DNA
caggctgccatcctaaatatgaagtggtctttgtatttgcactttaatgtgttgaaatcatagctttcagtgatccagga

SEQ ID NO: 92117 - DNA, 80 bp, synthetic construct
  source 1..80: mol_type = other DNA
atgaatgaggaatgtgtgttaaggagtttgcccaagagtcacatagcaagtcatagtcatgctctctgaagcagcaataa

SEQ ID NO: 92118 - DNA, 80 bp, synthetic construct
  source 1..80: mol_type = other DNA
tcaattgtaaaggtggaggaatttgggaactagacagtgcacacataaataataaatatgttcttcaaatattgggtggg

SEQ ID NO: 92119 - DNA, 80 bp, synthetic construct; identical to SEQ ID NO: 17024
  source 1..80: mol_type = other DNA

SEQ ID NO: 92120 - DNA, 80 bp, synthetic construct
  source 1..80: mol_type = other DNA
ctattgtctgtaatagttttatattgttttatattaaccctttttccatagtgttaactgtcagtgcccatgggctatca

SEQ ID NO: 92121 - DNA, 80 bp, synthetic construct
  source 1..80: mol_type = other DNA
gagatgcattgtagttcttcgcagtgtgacttcaaatattttggaagaaacaaatagctcagagacctcgtaaaatatct

SEQ ID NO: 92122 - DNA, 80 bp, synthetic construct; identical to SEQ ID NO: 17025
  source 1..80: mol_type = other DNA

SEQ ID NO: 92123 - DNA, 80 bp, synthetic construct
  source 1..80: mol_type = other DNA
attggacccctactccatgtcatatataaaaacctccactttgggaggcgaagcaggcaatcacttgaactcaggagatc

SEQ ID NO: 92124 - DNA, 80 bp, synthetic construct
  source 1..80: mol_type = other DNA
ccatcctgggtaatacagtgataactgtgtctcaaacaaaacaaaacaaatcaccttcagtgatttttagaccaaatgta

SEQ ID NO: 92125 - DNA, 80 bp, synthetic construct
  source 1..80: mol_type = other DNA
aaaggcaccacaagtgaaaagacatgaatcgtaatggaagaacatactggtacgttataaaatatcaaagagttgggcat

SEQ ID NO: 92126 - DNA, 80 bp, synthetic construct; identical to SEQ ID NO: 17026
  source 1..80: mol_type = other DNA

SEQ ID NO: 92127 - DNA, 80 bp, synthetic construct
  source 1..80: mol_type = other DNA
ggcagttcctcagacaattccactccaacgtatatccaagtggaatcacaacatatgtccccacaaacttgtacataaat

SEQ ID NO: 92128 - DNA, 80 bp, synthetic construct
  source 1..80: mol_type = other DNA
gagtcaacacgtatgatttcattcatgtgaaagttcagaatagagacagcagtagagacaaagtagcagttcagggttgg

SEQ ID NO: 92129 - DNA, 80 bp, synthetic construct
  source 1..80: mol_type = other DNA
gaggaaatctaagtggtccataaacatgaaaaggtctttaatcaccagtcagaaaaatgaaaatgaaaaccatgccaggc

SEQ ID NO: 92130 - DNA, 80 bp, synthetic construct; identical to SEQ ID NO: 17027
  source 1..80: mol_type = other DNA

SEQ ID NO: 92131 - DNA, 80 bp, synthetic construct
  source 1..80: mol_type = other DNA
gggatgcagtctttgggatggcaactgtaaagaaaaagtgattgtgttaatcagagtgattgtctttagggaaatggagt

SEQ ID NO: 92132 - DNA, 80 bp, synthetic construct
  source 1..80: mol_type = other DNA
tttcagtttaccaagttctttttcgtcatcgttaatttagagtgggttacatcagtttttcttttctggctgccaaaggc

SEQ ID NO: 92133 - DNA, 80 bp, synthetic construct; identical to SEQ ID NO: 17028
  source 1..80: mol_type = other DNA

SEQ ID NO: 92134 - DNA, 80 bp, synthetic construct
  source 1..80: mol_type = other DNA
aaaaccaggccttcagttagtgtttccttccttttagaatggtgtatgtaaagcaaaatataaactaatttctgacctgt

SEQ ID NO: 92135 - DNA, 80 bp, synthetic construct
  source 1..80: mol_type = other DNA
actctgttgttaagaaatctgttgaccacataaccatgtttctgagaaaatacatgattttttgcatctttaaaaaaaat

SEQ ID NO: 92136 - DNA, 80 bp, synthetic construct
  source 1..80: mol_type = other DNA
taagtcttgtctcatactctattgactaagctagcccggtgactagggtagatgtatttaaagaataacttttccccctt

SEQ ID NO: 92137 - DNA, 80 bp, synthetic construct
  source 1..80: mol_type = other DNA
tacattctgctgattaaaatggtgtacagaatagtcaggaaaaaccagtccctggtctgaaataaacaatgttaattagc

SEQ ID NO: 92138 - DNA, 80 bp, synthetic construct; identical to SEQ ID NO: 17029
  source 1..80: mol_type = other DNA

SEQ ID NO: 92139 - DNA, 80 bp, synthetic construct
  source 1..80: mol_type = other DNA
ttgctacagccgtttccttgacctccctggaagaacagtatttcatggtgtcagacaacattcagaacatgctcaaatta

SEQ ID NO: 92140 - DNA, 80 bp, synthetic construct
  source 1..80: mol_type = other DNA
ctggatttggtgagtagaagatcacactgttgcttgctgccctgggttcacctcaaagagggaaagaagaattagcaact

SEQ ID NO: 92141 - DNA, 80 bp, synthetic construct
  source 1..80: mol_type = other DNA
agcaattaacctatcactatcacgattgtttatttcctggaattttgttgacagaattagtccaataaatgttatgaata

SEQ ID NO: 92142 - DNA, 80 bp, synthetic construct; identical to SEQ ID NO: 17030
  source 1..80: mol_type = other DNA

SEQ ID NO: 92143 - DNA, 80 bp, synthetic construct
  source 1..80: mol_type = other DNA
agaccatcctggctaacacggtgaaaacccgtctctactaaaaatacaaaaagccatgcatggtggcgggtgcctgtagt

SEQ ID NO: 92144 - DNA, 80 bp, synthetic construct
  source 1..80: mol_type = other DNA
gcttggctccccaaaggctcctcttaatcctgaaaggcaggtgcttttattatcttttatcttattatctacattttcca

SEQ ID NO: 92145 - DNA, 80 bp, synthetic construct
  source 1..80: mol_type = other DNA
aagtggtatgggcaatgcaccaggattaagaaaaacagtgtgtggtaaagatgtaaaatatttctaattctgttgtgggc

SEQ ID NO: 92146 - DNA, 80 bp, synthetic construct; identical to SEQ ID NO: 17031
  source 1..80: mol_type = other DNA

SEQ ID NO: 92147 - DNA, 80 bp, synthetic construct
  source 1..80: mol_type = other DNA
ggccggaaatgttttatccaagctttagggaataaccctggagattctcttcgttactctactgttaagtacgtgcttac

SEQ ID NO: 92148 - DNA, 80 bp, synthetic construct
  source 1..80: mol_type = other DNA
tagctgtgtgactttaaacatcactgtttttcctcctgccttccttctgtaacttaagggggttggattattagagttct

SEQ ID NO: 92149 - DNA, 80 bp, synthetic construct; identical to SEQ ID NO: 17032
  source 1..80: mol_type = other DNA

SEQ ID NO: 92150 - DNA, 80 bp, synthetic construct
  source 1..80: mol_type = other DNA
tatgctaagtcttagaaatattcatcagtgatgtttttccctgaagctcgtttggtgactgctaaactagaaccagaatt

SEQ ID NO: 92151 - DNA, 80 bp, synthetic construct
  source 1..80: mol_type = other DNA
cctatcttagtgagagtgaacaaataaagtaggctgtatctttcagaattgggtatgactcaaataactttttttttttt

SEQ ID NO: 92152 - DNA, 80 bp, synthetic construct
  source 1..80: mol_type = other DNA
agctaatttttgtagttttagtagagacagagctttaccatgttggccaggctggtctggaactcctgacctcaggtgat

SEQ ID NO: 92153 - DNA, 80 bp, synthetic construct; identical to SEQ ID NO: 17033
  source 1..80: mol_type = other DNA

SEQ ID NO: 92154 - DNA, 80 bp, synthetic construct
  source 1..80: mol_type = other DNA
atttcgtttttagatggagtcttgcactgtcgcccgggctggagtgcaatggtgcgatctcggctcactgcaacctccgc

SEQ ID NO: 92155 - DNA, 80 bp, synthetic construct
  source 1..80: mol_type = other DNA
ggcgggatctcggctcactgcaagctccgcctcccgggttcacgccattctcctgcctcagcctcccaagtagctggcac

SEQ ID NO: 92156 - DNA, 80 bp, synthetic construct
  source 1..80: mol_type = other DNA
caattgtaaattttattcatttaaacaccaacaagtgatttaagaacaataataaaataactgtagctggtatgatggct

SEQ ID NO: 92157 - DNA, 80 bp, synthetic construct
  source 1..80: mol_type = other DNA
aaaaaaaaaataactgggcatggtggtagtcccagctacttgggaggctgaggtggggaggtttgcttgagcccaagagt

SEQ ID NO: 92158 - DNA, 80 bp, synthetic construct; identical to SEQ ID NO: 17034
  source 1..80: mol_type = other DNA

SEQ ID NO: 92159 - DNA, 80 bp, synthetic construct
  source 1..80: mol_type = other DNA
aagataaatccaatgcaatgtcatactcttaccccaaataagttgcattgtaatgtaaggtcattctcttggggagaatc

SEQ ID NO: 92160 - DNA, 80 bp, synthetic construct
  source 1..80: mol_type = other DNA
taatttgttgtttagaaatatatatacctaggtctggggaggaatagaagggaaatggagagtgactgttaaggtttctt

SEQ ID NO: 92161 - DNA, 80 bp, synthetic construct; identical to SEQ ID NO: 17035
  source 1..80: mol_type = other DNA

SEQ ID NO: 92162 - DNA, 80 bp, synthetic construct
  source 1..80: mol_type = other DNA
tcatcctcctttgttcagtccagcatggtctgtggcaaacattcaacaatctctaaggtagataatattatcccatttta

SEQ ID NO: 92163 - DNA, 80 bp, synthetic construct
  source 1..80: mol_type = other DNA
gaccatcagacatgaatagattagaaattatttttctttcatgtaaaagaagtctggaggtaggctgtctagggctagta

SEQ ID NO: 92164 - DNA, 80 bp, synthetic construct
  source 1..80: mol_type = other DNA
atgcttatcccacctttaaagaaacaaaagtacacagcttccacttgcatcttccatgggagaactgagtcacacatcta

SEQ ID NO: 92165 - DNA, 80 bp, synthetic construct; identical to SEQ ID NO: 17036
  source 1..80: mol_type = other DNA

SEQ ID NO: 92166 - DNA, 80 bp, synthetic construct
  source 1..80: mol_type = other DNA
atgtgaattatcaacacccttgagcatggctggaacgaatcgcccctcccgaggacagacaggtagagccagagtgcagg

SEQ ID NO: 92167 - DNA, 80 bp, synthetic construct
  source 1..80: mol_type = other DNA
ttatgtatgcagaaattgtttctctcctcccctcctcttggggttgattaacttagctggaagtaatgaacctgaactga

SEQ ID NO: 92168 - DNA, 80 bp, synthetic construct
  source 1..80: mol_type = other DNA
aggagagagccctttcttttttttctaggagttgtgtcatatttctaaagggcagcactgtaagtactctgctcccttca

SEQ ID NO: 92169 - DNA, 80 bp, synthetic construct; identical to SEQ ID NO: 17037
  source 1..80: mol_type = other DNA

SEQ ID NO: 92170 - DNA, 80 bp, synthetic construct
  source 1..80: mol_type = other DNA
acctgcttgtttttgggtacttggtaagcccggcatcacaatctcccctggagctagtcccatggtgacacctgcccaga

SEQ ID NO: 92171 - DNA, 80 bp, synthetic construct
  source 1..80: mol_type = other DNA
agcccagtagctaagtgaggagaggcacaacctcctggcctgaagctgagttgcttctattccacctacaggttttcctc

SEQ ID NO: 92172 - DNA, 80 bp, synthetic construct
  source 1..80: mol_type = other DNA
tgacatcggttcttcaggcctgggccactcactgagcaatttgatcttccatttatgcctctgcccagctgcgtcctgat

SEQ ID NO: 92173 - DNA, 80 bp, synthetic construct; identical to SEQ ID NO: 17038
  source 1..80: mol_type = other DNA

SEQ ID NO: 92174 - DNA, 80 bp, synthetic construct
  source 1..80: mol_type = other DNA
cttccacaaactcaaatctgctttgacagtgaggagatacctgatgtcttgtttgttccccagtccctccctgtctttgc

SEQ ID NO: 92175 - DNA, 80 bp, synthetic construct
  source 1..80: mol_type = other DNA
attgagcttgtatgctgctatagccgtctgtgggcataccccacctctacctcttctcatctttgtgtaccctacccagc

SEQ ID NO: 92176 - DNA, 80 bp, synthetic construct
  source 1..80: mol_type = other DNA
gttcctttttggcttaagctgctctcttattctcctacaccaactgggtatccaacaatgcaacccaatcctgacaataa

SEQ ID NO: 92177 - DNA, 80 bp, synthetic construct
  source 1..80: mol_type = other DNA
caactcaccaaactcaggaaagcactttacttactattattggtttattataaaggctaaaactcaggaacagccaaatg

SEQ ID NO: 92178 - DNA, 80 bp, synthetic construct; identical to SEQ ID NO: 17039
  source 1..80: mol_type = other DNA

SEQ ID NO: 92179 - DNA, 80 bp, synthetic construct
  source 1..80: mol_type = other DNA
gcggaggtgggaggagccaaggaggttgttctctcttgagattggagggtggggctgaaaattccaaccctctacacaca

SEQ ID NO: 92180 - DNA, 80 bp, synthetic construct
  source 1..80: mol_type = other DNA
agacaaacaccaaacaaattttatataccagaaatgctataagtgcagtttctgttgcctgtgaccaaagggtccctgga

SEQ ID NO: 92181 - DNA, 80 bp, synthetic construct; identical to SEQ ID NO: 17040
  source 1..80: mol_type = other DNA

SEQ ID NO: 92182 - DNA, 80 bp, synthetic construct
  source 1..80: mol_type = other DNA
tacctatctactaataatcagaactcttttgctttcaggtgagagaaatgcaacccataccaccttctaccctaagaacc

SEQ ID NO: 92183 - DNA, 80 bp, synthetic construct
  source 1..80: mol_type = other DNA
tcagatccttacagtatcttctttttcttttcttttttttttttgagatggagtctcacactgtcacctgggctggagtg

SEQ ID NO: 92184 - DNA, 80 bp, synthetic construct
  source 1..80: mol_type = other DNA
agagtgcagtggtgcgatcttggctcactgcaacttctgcctcccgggttcaaataattctcctgcctcagcctcctgag

SEQ ID NO: 92185 - DNA, 80 bp, synthetic construct; identical to SEQ ID NO: 17041
  source 1..80: mol_type = other DNA

SEQ ID NO: 92186 - DNA, 80 bp, synthetic construct
  source 1..80: mol_type = other DNA
tggtatctgaccactgtctacatcttatcagcctgatctgccttcagcaagagtcctattgggttggtctaacaggattc

SEQ ID NO: 92187 - DNA, 80 bp, synthetic construct
  source 1..80: mol_type = other DNA
tggctccccttgtgtagtctgccttactatccataacaagtgtcatgaataattttttctttaacaatacccccctccag

SEQ ID NO: 92188 - DNA, 80 bp, synthetic construct; identical to SEQ ID NO: 17042
  source 1..80: mol_type = other DNA

SEQ ID NO: 92189 - DNA, 80 bp, synthetic construct
  source 1..80: mol_type = other DNA
gcccaggctggagggcaatggcatgatcttggctcactgcaacctttgcctcctggttcaagtgattctcctgcctcagc

SEQ ID NO: 92190 - DNA, 80 bp, synthetic construct
  source 1..80: mol_type = other DNA
tatgagccaccacactcagccatctgcacatttctttataggagacttgtgaggattctaggagagaaggcatgaggaaa

SEQ ID NO: 92191 - DNA, 80 bp, synthetic construct
  source 1..80: mol_type = other DNA
tgcactccagcctgcaagctgctacatgccagggtgtgtgtggtttgtctgctcagaggggtgccttgttctacttcatg

SEQ ID NO: 92192 - DNA, 80 bp, synthetic construct
  source 1..80: mol_type = other DNA
atggtgtagtgaaatgagaaaggttttggaaaatcatttccaaggccccagaagctgctgagcctggatggctttctaag

SEQ ID NO: 92193 - DNA, 80 bp, synthetic construct; identical to SEQ ID NO: 17043
  source 1..80: mol_type = other DNA

SEQ ID NO: 92194 - DNA, 80 bp, synthetic construct
  source 1..80: mol_type = other DNA
ccatctccttggctgcagcacccaaataaagccttcttccctagcaatgttccttgtctcagagatcagctttctgtgcg

SEQ ID NO: 92195 - DNA, 80 bp, synthetic construct
  source 1..80: mol_type = other DNA
tgaggacggcaaacatctctcagaagggaactaaaatctattgcacacttggtttgtggtctacactctgcatggatgat

SEQ ID NO: 92196 - DNA, 80 bp, synthetic construct
  source 1..80: mol_type = other DNA
gatcactgtcactctggcactcagacaagctggttgtgtaggcaaggtgtgtgaagtcctcacagccaagtaagataata

SEQ ID NO: 92197 - DNA, 80 bp, synthetic construct; identical to SEQ ID NO: 17044
  source 1..80: mol_type = other DNA

SEQ ID NO: 92198 - DNA, 80 bp, synthetic construct
  source 1..80: mol_type = other DNA
tgttagccaggctggtctcaaactcctgacctcaggcaatccacctgcctcaacctcccaaagtgctggaattacaggca

SEQ ID NO: 92199 - DNA, 80 bp, synthetic construct
  source 1..80: mol_type = other DNA
gcctacaggcatgtgccaccatgcctgtctaatttttgtatttttcgtagagacggggttttgccatgttggccaggctg

SEQ ID NO: 92200 - DNA, 80 bp, synthetic construct
  source 1..80: mol_type = other DNA
tctctaaatctaccacaccaaacaactcaactggcagcattttctcagcaacatctttgcaggaaccttgtggtcaattc

SEQ ID NO: 92201 - DNA, 80 bp, synthetic construct
  source 1..80: mol_type = other DNA
ctgtggcaacaaaaggtgtgagatttttgtctttcatcagctacaaactacactgttggtcaggcacttttactgggaga

SEQ ID NO: 92202 - DNA, 80 bp, synthetic construct; identical to SEQ ID NO: 17045
  source 1..80: mol_type = other DNA

SEQ ID NO: 92203 - DNA, 80 bp, synthetic construct
  source 1..80: mol_type = other DNA
tggtcttcatcagggaaagagaaatgttttatcaaataaagtgtaatcctggcagttggcttcaactgaggcttgaagag

SEQ ID NO: 92204 - DNA, 80 bp, synthetic construct
  source 1..80: mol_type = other DNA
ccatagcctttatagttaatttttgcttctagattatatatttccacttctgtggacaacttgcagcagtttgtgcatag

SEQ ID NO: 92205 - DNA, 80 bp, synthetic construct
  source 1..80: mol_type = other DNA
atggatggatggatggatggatggataaatggatggatggatggatggatgagtggatggatggatggatgagtggatgg

SEQ ID NO: 92206 - DNA, 80 bp, synthetic construct; identical to SEQ ID NO: 17046
  source 1..80: mol_type = other DNA

SEQ ID NO: 92207 - DNA, 80 bp, synthetic construct
  source 1..80: mol_type = other DNA
tttgcttaatgggaccctcatctagatcagtctgaatagaaagaactaccagactcttaaagtcagcctagcaccaagta

SEQ ID NO: 92208 - DNA, 80 bp, synthetic construct
  source 1..80: mol_type = other DNA
tcagcctccaaagcccattcccctccttcattggagaggagtttgaggacagttgtggttgaacccccagcaaaactatt

SEQ ID NO: 92209 - DNA, 80 bp, synthetic construct
  source 1..80: mol_type = other DNA
caggagctacctgggggttgaggggtgggcaggctttagagaaggggagagaagaggcctcactgtgggagctgggggct

SEQ ID NO: 92210 - DNA, 80 bp, synthetic construct; identical to SEQ ID NO: 17047
  source 1..80: mol_type = other DNA

SEQ ID NO: 92211 - DNA, 80 bp, synthetic construct
  source 1..80: mol_type = other DNA
ggcttttttctgtctcagcctggccataagcagccctctgcaagagttccgttaccagtcatttgcattgtagtataagt

SEQ ID NO: 92212 - DNA, 80 bp, synthetic construct
  source 1..80: mol_type = other DNA
tcgttgacatgattttttcacatatgtcatcttctggggatggattcgtataaccctgcttcacttgcttccctgtggga

SEQ ID NO: 92213 - DNA, 80 bp, synthetic construct
  source 1..80: mol_type = other DNA
aagggggagaagaaacttcttgtgagcttgcgatgacttgtggcacttgcatcagaccttggagttccctggggagaggc

SEQ ID NO: 92214 - DNA, 80 bp, synthetic construct; identical to SEQ ID NO: 17048
  source 1..80: mol_type = other DNA

SEQ ID NO: 92215 - DNA, 80 bp, synthetic construct
  source 1..80: mol_type = other DNA
ggtgggaagggcagggagtcaagaccagctgtgtcttccactgctcttcttgtccactttggttactggcctctgttggc

SEQ ID NO: 92216 - DNA, 80 bp, synthetic construct
  source 1..80: mol_type = other DNA
agaataccctgctttgtattcaaagagtatctttgaatgctgaacttagaaccactctagaaaatgtatgctaacaatgc

SEQ ID NO: 92217 - DNA, 80 bp, synthetic construct; identical to SEQ ID NO: 17049
  source 1..80: mol_type = other DNA

SEQ ID NO: 92218 - DNA, 80 bp, synthetic construct
  source 1..80: mol_type = other DNA
aacccagtggaggaggatctgtacttcattcacatgtgttgtcacatcattactgggagaattaagcactgtccacgtga

SEQ ID NO: 92219 - DNA, 80 bp, synthetic construct
  source 1..80: mol_type = other DNA
aatcattgaatccaaggtggtcttggggacctctaacaaaagatgtctggacctgaacttcctgttgtttcaaagatcct

SEQ ID NO: 92220 - DNA, 80 bp, synthetic construct
  source 1..80: mol_type = other DNA
ggcagcctctgattcacctgagggtttttccttgaatactttctgggtacaagtatttgagacaggtgatgtgctggtca

SEQ ID NO: 92221 - DNA, 80 bp, synthetic construct
  source 1..80: mol_type = other DNA
aaatatgtgctgacattttaagctctcacttatagtgagaaaagcaatcttcagcaaggtgatgacttgtccaagggaag

SEQ ID NO: 92222 - DNA, 80 bp, synthetic construct; identical to SEQ ID NO: 17050
  source 1..80: mol_type = other DNA

SEQ ID NO: 92223 - DNA, 80 bp, synthetic construct
  source 1..80: mol_type = other DNA
ggtcgaaaaagtcaagcagtcttcactttttgctgtggtcccagcaaatctgcttccaatccaggcttctcccatataaa

SEQ ID NO: 92224 - DNA, 80 bp, synthetic construct
  source 1..80: mol_type = other DNA
tgtggcaaatctctctggagtttctctagcgggagcgaagcacctaaagcacatgggtgcaggagcagccaggcctgcac

SEQ ID NO: 92225 - DNA, 80 bp, synthetic construct
  source 1..80: mol_type = other DNA
aatacccaggagacaactagactttagaattcttggggccagaaacttgattccacctctagtgctttcttttagatttc

SEQ ID NO: 92226 - DNA, 80 bp, synthetic construct; identical to SEQ ID NO: 17051
  source 1..80: mol_type = other DNA

SEQ ID NO: 92227 - DNA, 80 bp, synthetic construct
  source 1..80: mol_type = other DNA
tgagccgagattgcactactgcactctagcctgggtaacagaacaagactctatctcaaaaaaaaaataaataaataaaa

SEQ ID NO: 92228 - DNA, 80 bp, synthetic construct
  source 1..80: mol_type = other DNA
gtacctgggaccacaggcatgtgccaccatgcctggctaatttttaaattttttgtagagatgaggtcttgatacgttgt

SEQ ID NO: 92229 - DNA, 80 bp, synthetic construct
  source 1..80: mol_type = other DNA
tttcctttttattgttttgattttttagccaatgagaaggaaaattccttattagggagggcgagggtgaggatatgtgg

SEQ ID NO: 92230 - DNA, 80 bp, synthetic construct
  source 1..80: mol_type = other DNA
tgctgtgaaatgttggggtgtttggtgaataatattagaagttgggctggcagagaccctgtcacataaacattaaatca

SEQ ID NO: 92231 - DNA, 80 bp, synthetic construct; identical to SEQ ID NO: 17052
  source 1..80: mol_type = other DNA

SEQ ID NO: 92232 - DNA, 80 bp, synthetic construct
  source 1..80: mol_type = other DNA
tgaacttttctgtgaaagttactgtcactgtgaaaggcagttcagcccccagggattgaaaaaggaaatcattttgggta

SEQ ID NO: 92233 - DNA, 80 bp, synthetic construct
  source 1..80: mol_type = other DNA
ggctcaggaccaggcagatgccctgcctctgcttcccttggcacagtggcctccttctcccttcaagtaggcagatgctg

SEQ ID NO: 92234 - DNA, 80 bp, synthetic construct; identical to SEQ ID NO: 17053
  source 1..80: mol_type = other DNA

SEQ ID NO: 92235 - DNA, 80 bp, synthetic construct
  source 1..80: mol_type = other DNA
caaactagagctcaaccctagagtctcttcaggcttcccaggggtgggggtgcatttaacagtccaagttaaagagaaaa

SEQ ID NO: 92236 - DNA, 80 bp, synthetic construct
  source 1..80: mol_type = other DNA
ggggtaggtctttgaaaaccaacagattgcaaattctctgtcccatagcaggaaaccacagtctctgatgtcagctggct

SEQ ID NO: 92237 - DNA, 80 bp, synthetic construct
  source 1..80: mol_type = other DNA
cagtcaggtcatcagtgtcagagagctaggtggccaggttggagttgattgccaatgataggtctttttctgcttaaatc

SEQ ID NO: 92238 - DNA, 80 bp, synthetic construct
  source 1..80: mol_type = other DNA
atcaatggctgtttctctgagaatgcggaaccgtgattaatccagccttgatggggaggcagcaggaactgtaggcattc

SEQ ID NO: 92239 - DNA, 80 bp, synthetic construct; identical to SEQ ID NO: 17054
  source 1..80: mol_type = other DNA

SEQ ID NO: 92240 - DNA, 80 bp, synthetic construct
  source 1..80: mol_type = other DNA
tattccttaaaactacccttcaatgggttttctgttcattacagttgaatgctttcataactgatacaggagggaccctg

SEQ ID NO: 92241 - DNA, 80 bp, synthetic construct
  source 1..80: mol_type = other DNA
ccgcacgtatttggtcagctatgaatatgaccaactctcgtcgtttatctctattcagtggaacacagcagcactgtgac

SEQ ID NO: 92242 - DNA, 80 bp, synthetic construct; identical to SEQ ID NO: 17055
  source 1..80: mol_type = other DNA

SEQ ID NO: 92243 - DNA, 80 bp, synthetic construct
  source 1..80: mol_type = other DNA
catgtctcattgactgtgtaatctctgtgtggcccagtacagagcatgcacaccgtaggttctcacatatgtttgttgag

SEQ ID NO: 92244 - DNA, 80 bp, synthetic construct
  source 1..80: mol_type = other DNA
ttcccctgctgccagagcatggcagagtaaatgtgtgagttgaagggagcaacctcatgaggttttgctttgtgtcttaa

SEQ ID NO: 92245 - DNA, 80 bp, synthetic construct
  source 1..80: mol_type = other DNA
ccatattacagagagatgcccacagtgcatgacgttacccgcacaggtgtgacatcacagggtaaccaaatgcttttgcc

SEQ ID NO: 92246 - DNA, 80 bp, synthetic construct
  source 1..80: mol_type = other DNA
caggctttcggatcccagagctctcattagagcagccctgcgttgtagacttttctgcagtgacagaaatgttctatatc

SEQ ID NO: 92247 - DNA, 80 bp, synthetic construct; identical to SEQ ID NO: 17056
  source 1..80: mol_type = other DNA

SEQ ID NO: 92248 - DNA, 80 bp, synthetic construct
  source 1..80: mol_type = other DNA
attgaacaaactgtctaagctgggtcaggtactctgcagatgtttgctgagtatcgttcttgatggaaatccccgtggaa

SEQ ID NO: 92249 - DNA, 80 bp, synthetic construct
  source 1..80: mol_type = other DNA
tctcatgacctggtgtctgttgccttctggttaagtttttcatttgtaattctacaaacatcccttctgtaaacatttcc

SEQ ID NO: 92250 - DNA, 80 bp, synthetic construct
  source 1..80: mol_type = other DNA
aaagtgtgctaatgggatgatgtgcccttgtacacccactgcctctgaactctgctctgcattgctgagcaaactacatt

SEQ ID NO: 92251 - DNA, 80 bp, synthetic construct; identical to SEQ ID NO: 17057
  source 1..80: mol_type = other DNA

SEQ ID NO: 92252 - DNA, 80 bp, synthetic construct
  source 1..80: mol_type = other DNA
tagaagtgtctgatactacatagattatgcttgcactcactcttaagagagagacatgaacttttaccaacggaagccag

SEQ ID NO: 92253 - DNA, 80 bp, synthetic construct
  source 1..80: mol_type = other DNA
tcttgtgggtgttttcttcagtccttgtcttaatcactcagtggcacttggcacttattccttcttgaaacccttgtttc

SEQ ID NO: 92254 - DNA, 80 bp, synthetic construct; identical to SEQ ID NO: 17058
  source 1..80: mol_type = other DNA

SEQ ID NO: 92255 - DNA, 80 bp, synthetic construct
  source 1..80: mol_type = other DNA
tctctctcagtcttatcatccccatccaggcaaatcattgattctgtggacctactctttcgggtgtccctcaaatctct

SEQ ID NO: 92256 - DNA, 80 bp, synthetic construct
  source 1..80: mol_type = other DNA
tgttttacaaggcccttcgctatctggccccctcattacctcccttgctctgcatgctccagtcctgcagaactacacac

SEQ ID NO: 92257 - DNA, 80 bp, synthetic construct
  source 1..80: mol_type = other DNA
ctttggtgtgcccatggcagcccagaatgcctggtggacagggagccctcagcaggccgtactgcagcgccctgcccccg

SEQ ID NO: 92258 - DNA, 80 bp, synthetic construct; identical to SEQ ID NO: 17059
  source 1..80: mol_type = other DNA

SEQ ID NO: 92259 - DNA, 80 bp, synthetic construct
  source 1..80: mol_type = other DNA
actccaggcgtgcaccaccatgactggctaattttttgtatttttagtaaagacagggtttcgacatgttgcctaggctg

SEQ ID NO: 92260 - DNA, 80 bp, synthetic construct
  source 1..80: mol_type = other DNA
cagtccatccagggatcactggagtgtcatatgaaatgttataggaatcacaggccttagaacttgaaaggaacccaagg

SEQ ID NO: 92261 - DNA, 80 bp, synthetic construct
  source 1..80: mol_type = other DNA
aggaaggcctctttccagaaacactgtaagccagtgtttctcagattgctgggtgtaattcataggcagatcatgaaatc

SEQ ID NO: 92262 - DNA, 80 bp, synthetic construct
  source 1..80: mol_type = other DNA
acaagacaaaacaaaacaataccagaatggaaaatagtgcatgatctgtacagtatagttgtagaaaacttcttgtttta

SEQ ID NO: 92263 - DNA, 80 bp, synthetic construct; identical to SEQ ID NO: 17060
  source 1..80: mol_type = other DNA

SEQ ID NO: 92264 - DNA, 80 bp, synthetic construct
  source 1..80: mol_type = other DNA
ggcagcctggtcccatatcctcatgaaatgcctcttataattgtgacatcttgcaattgtggaggactttacacttttcg

SEQ ID NO: 92265 - DNA, 80 bp, synthetic construct
  source 1..80: mol_type = other DNA
tttctacaccaccataatgtgagtgttctgtgtttacagggtgtattcaagtccatgactgcccattagaatccccccaa

SEQ ID NO: 92266 - DNA, 80 bp, synthetic construct
  source 1..80: mol_type = other DNA
caagctgcccaggaggtcccttggtgccctgggctctgtttcactgttgttttgtagagcaacttcccagtgatgctgcc

SEQ ID NO: 92267 - DNA, 80 bp, synthetic construct; identical to SEQ ID NO: 17061
  source 1..80: mol_type = other DNA

SEQ ID NO: 92268 - DNA, 80 bp, synthetic construct
  source 1..80: mol_type = other DNA
ctgaaagtgccagagctgcttcaggggcaagagtccaggccccaagtccatgctgatgagcccaccctgggggtcaggaa

SEQ ID NO: 92269 - DNA, 80 bp, synthetic construct
  source 1..80: mol_type = other DNA
tttccagacagtgtgtatgtggaattgtgctttttgttttttaagaatgtaaaaagttacagtaagatcgaaccacaggg

SEQ ID NO: 92270 - DNA, 80 bp, synthetic construct; identical to SEQ ID NO: 17062
  source 1..80: mol_type = other DNA

SEQ ID NO: 92271 - DNA, 80 bp, synthetic construct
  source 1..80: mol_type = other DNA
tgtatatatatatacatatatgcatgatgctgtgcaaatgcccagggctgtctggcattttccacaaaatgagagcctga

SEQ ID NO: 92272 - DNA, 80 bp, synthetic construct
  source 1..80: mol_type = other DNA
ttctctgtggccacagtcatatggtgagggcctcttggagttcattcaaactttaagggagccccacagcaccggcatga

SEQ ID NO: 92273 - DNA, 80 bp, synthetic construct
  source 1..80: mol_type = other DNA
aagaacctgcaccaaagaaaggcatccctatcaatgtcactgttcctgaaatgatgggagaaccacatccctgcttcagg

SEQ ID NO: 92274 - DNA, 80 bp, synthetic construct; identical to SEQ ID NO: 17063
  source 1..80: mol_type = other DNA

SEQ ID NO: 92275 - DNA, 80 bp, synthetic construct
  source 1..80: mol_type = other DNA
ggggattgcctggaggtttctttagacctgtctagctcacacagtcttgatgcctgggttttaggctgctgtactgttgc

SEQ ID NO: 92276 - DNA, 80 bp, synthetic construct
  source 1..80: mol_type = other DNA
taatcgttcccttttttaaagggataaatgtggattttatttccaggtcctgtcagagggccctgccctagagaacacgt

SEQ ID NO: 92277 - DNA, 80 bp, synthetic construct
  source 1..80: mol_type = other DNA
gctgcttcactggcttcaccccagattagggcctgtgtttaaaaaccaatcccaactcaaatcagaaattacccaaaata

SEQ ID NO: 92278 - DNA, 80 bp, synthetic construct
  source 1..80: mol_type = other DNA
tgccatgaactagaaggggaaagaagagtttgacattcaagtttgactctaatgctgggtgcgtgagcgcatgcgtgcat

SEQ ID NO: 92279 - DNA, 80 bp, synthetic construct; identical to SEQ ID NO: 17064
  source 1..80: mol_type = other DNA

SEQ ID NO: 92280 - DNA, 80 bp, synthetic construct
  source 1..80: mol_type = other DNA
taggctgtgcatggagaagacaaatcctcttgataaacaatatttagaaagggattctatctttcctgaccccaaacaca

SEQ ID NO: 92281 - DNA, 80 bp, synthetic construct
  source 1..80: mol_type = other DNA
tcttaaagggggaaaagttgaactgatcaacagtagttaagaaaaaaaaaatccacaccaacaaataaatatcttgtctg

SEQ ID NO: 92282 - DNA, 80 bp, synthetic construct; identical to SEQ ID NO: 17065
  source 1..80: mol_type = other DNA

SEQ ID NO: 92283 - DNA, 80 bp, synthetic construct
  source 1..80: mol_type = other DNA
gaccagaaggaagctgctaggctgggccaggattctaaatgctgaggaggtaattcagagccacgaaaagttgcaccata

SEQ ID NO: 92284 - DNA, 80 bp, synthetic construct
  source 1..80: mol_type = other DNA
ctcacaaggaacacaggcgtccccaaaacctgcccttgataacatcaggcctggccaaatagtatttctttaaaaaaatt

SEQ ID NO: 92285 - DNA, 80 bp, synthetic construct
  source 1..80: mol_type = other DNA
atgcccagcgcgcccacgccgcccgagaagccgttctggcgcgtgttgacgcacacgctgcgcgggtagccgttggccgt

SEQ ID NO: 92286 - DNA, 80 bp, synthetic construct
  source 1..80: mol_type = other DNA
cctggggtgatggcattgcgccgggccaggggcgcgccaggagccgggcagcagcgcgcgcagcagcggcagctcagctt

SEQ ID NO: 92287 - DNA, 80 bp, synthetic construct; identical to SEQ ID NO: 17066
  source 1..80: mol_type = other DNA

SEQ ID NO: 92288 - DNA, 80 bp, synthetic construct
  source 1..80: mol_type = other DNA
gcgcgcatgatgaaggccagcagcgagatgatgcgctccaggaagaggttgaagaacaggatggtcccagcgcagccgaa

SEQ ID NO: 92289 - DNA, 80 bp, synthetic construct
  source 1..80: mol_type = other DNA
cgcggctcctatctcgagtggcaccactcaggtggaggaagaacagcacttagtcatttatctcccttggtggcacttaa

SEQ ID NO: 92290 - DNA, 80 bp, synthetic construct
  source 1..80: mol_type = other DNA
ctacccacaaagccaacaagggacacctgctctcccactcctccaaatttttttttaaaaactgtcatctttattttagt

SEQ ID NO: 92291 - DNA, 80 bp, synthetic construct; identical to SEQ ID NO: 17067
  source 1..80: mol_type = other DNA

SEQ ID NO: 92292 - DNA, 80 bp, synthetic construct
  source 1..80: mol_type = other DNA
accatgtccagtgaattctttgttattttttctaatggcagagaaaggaccatattttcttagtctgccaacatttcatg

SEQ ID NO: 92293 - DNA, 80 bp, synthetic construct
  source 1..80: mol_type = other DNA
cttccctagttcttacagtgtgaatatggggtgacaagaaaatgtgcatttcaaatcaattcccagatgactccaaagtc

SEQ ID NO: 92294 - DNA, 80 bp, synthetic construct
  source 1..80: mol_type = other DNA
ccaaaattaagtgtcagtgctcaaaagtcaactgcagctcctcttctttcctcaagttatttggaattgtgagtgaatcc

SEQ ID NO: 92295 - DNA, 80 bp, synthetic construct
  source 1..80: mol_type = other DNA
agctagagttaatggtctctgaaaagagctttgtgaggctgacaaaaggattgcttgagagtagtccacccacacccttc

SEQ ID NO: 92296 - DNA, 80 bp, synthetic construct; identical to SEQ ID NO: 17068
  source 1..80: mol_type = other DNA

SEQ ID NO: 92297 - DNA, 80 bp, synthetic construct
  source 1..80: mol_type = other DNA
catctcttggtggaaagattcacttactgcttggagtctgagctgaaaaaatggatcatttgagcagcaccatgatactg

SEQ ID NO: 92298 - DNA, 80 bp, synthetic construct
  source 1..80: mol_type = other DNA
tatttcttgtaatactttcagagtacattccttaagcctatgtgctaacaatcattttctagactgtctgaaggaaatgc

SEQ ID NO: 92299 - DNA, 80 bp, synthetic construct; identical to SEQ ID NO: 17069
  source 1..80: mol_type = other DNA

SEQ ID NO: 92300 - DNA, 80 bp, synthetic construct
  source 1..80: mol_type = other DNA
gaatgtggaacaaaataagctggacacaaaataatacattctgcattattccattaacataaaattcaaaatcaggccaa

SEQ ID NO: 92301 - DNA, 80 bp, synthetic construct
  source 1..80: mol_type = other DNA
tttgttgacctgggtggtagttacatgtgtgttagctgtgtaataatctgttaaattgtatgttttgtgagtttttttgt

SEQ ID NO: 92302 - DNA, 80 bp, synthetic construct
  source 1..80: mol_type = other DNA
tggtgcatagatcggtatacagaacactgcatctactcactgagggaacacaaagtctcttatagaaggataactctgtt

SEQ ID NO: 92303 - DNA, 80 bp, synthetic construct; identical to SEQ ID NO: 17070
  source 1..80: mol_type = other DNA

SEQ ID NO: 92304 - DNA, 80 bp, synthetic construct
  source 1..80: mol_type = other DNA
gaggacttatggagtgtcagcaagagcccggcagctcacttcctagctggctgggcacagccgctcacaggcctacccag

SEQ ID NO: 92305 - DNA, 80 bp, synthetic construct
  source 1..80: mol_type = other DNA
tcatcaggagatgtgagggtgacatgggtcaccagagggtgacaagtggatactgaaaggaagagatctgaagagactgc

SEQ ID NO: 92306 - DNA, 80 bp, synthetic construct
  source 1..80: mol_type = other DNA
ggacccataaatagatgccgtgaaagcacatatgcctgttctaacagggagccttgcagccccaccagcaaaagttaaga

SEQ ID NO: 92307 - DNA, 80 bp, synthetic construct; identical to SEQ ID NO: 17071
  source 1..80: mol_type = other DNA

SEQ ID NO: 92308 - DNA, 80 bp, synthetic construct
  source 1..80: mol_type = other DNA
gtggcggcgggtgcctgtagtcccagctactcgggaggctgaggcaggagaatgccgtgaacccaggaggcggagcttgc

SEQ ID NO: 92309 - DNA, 80 bp, synthetic construct
  source 1..80: mol_type = other DNA
tgcatcacttgaggccaggagttcaagaccagcctgggcaacttggcgaaactccgtttatactaaaaatacaaaaatta

SEQ ID NO: 92310 - DNA, 80 bp, synthetic construct
  source 1..80: mol_type = other DNA
accccaaaacacaaaaagacataaaaactatttggataactctagcatttacccaagatgttaaggaatctaaaagggag

SEQ ID NO: 92311 - DNA, 80 bp, synthetic construct
  source 1..80: mol_type = other DNA
ctgcatcatcgcatgtcatcatgacaacctatgggggagaacagctccattcaacagatgcagaaactgcaggttaaagg

SEQ ID NO: 92312 - DNA, 80 bp, synthetic construct; identical to SEQ ID NO: 17072
  source 1..80: mol_type = other DNA

SEQ ID NO: 92313 - DNA, 80 bp, synthetic construct
  source 1..80: mol_type = other DNA
gagtctgccaaggtagactcataacctccccgtggcacagctcagacaagctgggctatttacataagacttgacccagg

SEQ ID NO: 92314 - DNA, 80 bp, synthetic construct
  source 1..80: mol_type = other DNA
ctctctgggggcctcttctgactcctccaaactcttccatgtctggactcctggcttctgcccaaggccatctattggag

SEQ ID NO: 92315 - DNA, 80 bp, synthetic construct; identical to SEQ ID NO: 17073
  source 1..80: mol_type = other DNA

SEQ ID NO: 92316 - DNA, 80 bp, synthetic construct
  source 1..80: mol_type = other DNA
tcttacggccctggttcagcttgcattcagcataacaacttagctagggagtgctgcaggccccaaatgatgctaaatac

SEQ ID NO: 92317 - DNA, 80 bp, synthetic construct
  source 1..80: mol_type = other DNA
cagtgaaagcgtccttactgtcctgttcctgaggtctctctgtgcctgctttactgcccttcgctttcctacagagcaca

SEQ ID NO: 92318 - DNA, 80 bp, synthetic construct
  source 1..80: mol_type = other DNA
gcctcccagagtagagaagcagtctcccaagctcttgcaatttgtggggagccaagctgctctggagaggggcctcaaag

SEQ ID NO: 92319 - DNA, 80 bp, synthetic construct; identical to SEQ ID NO: 17074
  source 1..80: mol_type = other DNA

SEQ ID NO: 92320 - DNA, 80 bp, synthetic construct
  source 1..80: mol_type = other DNA
tcctcccatccaggcccccagccaccctgtgagggaggcactattacgcccaaaaatgcaggcaaggaaatgggctgagg

SEQ ID NO: 92321 - DNA, 80 bp, synthetic construct
  source 1..80: mol_type = other DNA
acgtactgtacagtccaatctgggatacttctgagagtgaaagtggctctactagtaattaccccaggacagcatgtata

SEQ ID NO: 92322 - DNA, 80 bp, synthetic construct
  source 1..80: mol_type = other DNA
gaatgccattcctttaagaaataatgttaataaggtattccagatgaccctattggttggaatctgtccaactacaaata

SEQ ID NO: 92323 - DNA, 80 bp, synthetic construct; identical to SEQ ID NO: 17075
  source 1..80: mol_type = other DNA

SEQ ID NO: 92324 - DNA, 80 bp, synthetic construct
  source 1..80: mol_type = other DNA
agggatggaaaaagactcagaaatactgggcatggcccatggctcattagggttgccaggtaaaatacagaacacccagt

SEQ ID NO: 92325 - DNA, 80 bp, synthetic construct
  source 1..80: mol_type = other DNA
gactccacttgtcagcttggtacactcctctgagaagcttctcccaatattcccatctcatttgatccttcctgactggc

SEQ ID NO: 92326 - DNA, 80 bp, synthetic construct
  source 1..80: mol_type = other DNA
ctgccaacagcctgctccgtggctggaactgcgacatcgcctctctgggagtaggagtgggcttctggccagactcagtg

SEQ ID NO: 92327 - DNA, 80 bp, synthetic construct; identical to SEQ ID NO: 17076
  source 1..80: mol_type = other DNA

SEQ ID NO: 92328 - DNA, 80 bp, synthetic construct
  source 1..80: mol_type = other DNA
ggcctgatagtttatttggcagtattttaaattcctaatggtacgtaccatgatggtgtgttcataaccaatagtgtctt

SEQ ID NO: 92329 - DNA, 80 bp, synthetic construct
  source 1..80: mol_type = other DNA
tgtgataaagcagcaaatgtacaagagtttggaagaaggagaggtaggttgcttttggcaagagcagcaattctcaattc

SEQ ID NO: 92330 - DNA, 80 bp, synthetic construct
  source 1..80: mol_type = other DNA
ctttaggaggctgaggcggttggatcgcttgagcccaggagttcaagaccagcctgggcaacatagtgggaccccatttc

SEQ ID NO: 92331 - DNA, 80 bp, synthetic construct; identical to SEQ ID NO: 17077
  source 1..80: mol_type = other DNA

SEQ ID NO: 92332 - DNA, 80 bp, synthetic construct
  source 1..80: mol_type = other DNA
ggaagaaggcaagggacaatgctggtgaggcaggagaagagggaattggggtaaccaaaggttaaggcgtaaaaacagtg

SEQ ID NO: 92333 - DNA, 80 bp, synthetic construct
  source 1..80: mol_type = other DNA
ccctaggcctctaaagggcacctaggggtgctagcaaattcttttagctttataaaaaccctggggagaggcagaggttg

SEQ ID NO: 92334 - DNA, 80 bp, synthetic construct
  source 1..80: mol_type = other DNA
acggtgtagcaggctgtcataggcattagggatacagctttaaacaaaacagacaacattgactatcctggagcacacat

SEQ ID NO: 92335 - DNA, 80 bp, synthetic construct
  source 1..80: mol_type = other DNA
tcttgggccacctgcttgagtctgctcccactttgtggaatgtacttttgcctcaataaatctgtgcttttattactgct

SEQ ID NO: 92336 - DNA, 80 bp, synthetic construct; identical to SEQ ID NO: 17078
  source 1..80: mol_type = other DNA

SEQ ID NO: 92337 - DNA, 80 bp, synthetic construct
  source 1..80: mol_type = other DNA
aagcctagcacctggcattgtgccctgctctgtagaaacttctaggatctggtaagcctcatgttcagaagacaaactca

SEQ ID NO: 92338 - DNA, 80 bp, synthetic construct
  source 1..80: mol_type = other DNA
cacattccttaccttctcggaccctcgcttctccctctaaaaatggcccaatgccctacttatttatttattttttattt

SEQ ID NO: 92339 - DNA, 80 bp, synthetic construct
  source 1..80: mol_type = other DNA
ttttagtagagacggggttttaccatgttggccaggctggtctccaactcctgacctcaggtgatctgcccaccttggcc

SEQ ID NO: 92340 - DNA, 80 bp, synthetic construct; identical to SEQ ID NO: 17079
  source 1..80: mol_type = other DNA

SEQ ID NO: 92341 - DNA, 80 bp, synthetic construct
  source 1..80: mol_type = other DNA
ggttaggcaccatcttttccagtccccaaagtgagagtgtgtgtgtgtgggagagatatttttaaatggggctgttgtgg

SEQ ID NO: 92342 - DNA, 80 bp, synthetic construct
  source 1..80: mol_type = other DNA
tgcgcagtgatccggacagagaggctccagtcagccaggcacagagaaaatggccctctgcccctgttctgcttgttttt

SEQ ID NO: 92343 - DNA, 80 bp, synthetic construct; identical to SEQ ID NO: 17080
  source 1..80: mol_type = other DNA

SEQ ID NO: 92344 - DNA, 80 bp, synthetic construct
  source 1..80: mol_type = other DNA
ttaacaacctctcctggggagcagctgtcaagctcggccctgagctggcgggaagatgactcatttacatacagcccgtc

SEQ ID NO: 92345 - DNA, 80 bp, synthetic construct
  source 1..80: mol_type = other DNA
aatccaagaccaagggaggcctttgatgggacaaagacgtgactgatgaacccggagtgaggagcaatgagatgaagaaa

SEQ ID NO: 92346 - DNA, 80 bp, synthetic construct
  source 1..80: mol_type = other DNA
acaatgtcaattcaatcactttacctcaattcctctatcacacaggaggagattttaaaaggaagtctctggtggtttgt

SEQ ID NO: 92347 - DNA, 80 bp, synthetic construct
  source 1..80: mol_type = other DNA
gacgactcaatgcacagaggccactccttaagggcccggctccctcaaactgaggtgtccccatgcttggtcttcccaca

SEQ ID NO: 92348 - DNA, 80 bp, synthetic construct; identical to SEQ ID NO: 17081
  source 1..80: mol_type = other DNA

SEQ ID NO: 92349 - DNA, 80 bp, synthetic construct
  source 1..80: mol_type = other DNA
gcacacaggaagtgagggatggtggggactgaatttatggagcccctatcccagaccaagcactctgctggtactttcac

SEQ ID NO: 92350 - DNA, 80 bp, synthetic construct
  source 1..80: mol_type = other DNA
atgagcattcaatcatactgcgccagggtacttgctgtggccaaaacgcctgccctggatctgtggcatgactttgtgtc

SEQ ID NO: 92351 - DNA, 80 bp, synthetic construct
  source 1..80: mol_type = other DNA
tcccttcatatgacctgggacccagactccctggttttctggaaatattctctctccttttggctcattctgtgcactgt

SEQ ID NO: 92352 - DNA, 80 bp, synthetic construct; identical to SEQ ID NO: 17082
  source 1..80: mol_type = other DNA

SEQ ID NO: 92353 - DNA, 80 bp, synthetic construct
  source 1..80: mol_type = other DNA
ccagcagacactgtaccagaaacattgtctccatcttagtttcagttaactcaacatgtttttgagacctgctgtgtgcc

SEQ ID NO: 92354 - DNA, 80 bp, synthetic construct
  source 1..80: mol_type = other DNA
gagggctaattctaggagttgggcttgagttcttgagttaggtgatttatggaggacttaaggaagcaggcttcgctctg

SEQ ID NO: 92355 - DNA, 80 bp, synthetic construct; identical to SEQ ID NO: 17083
  source 1..80: mol_type = other DNA

SEQ ID NO: 92356 - DNA, 80 bp, synthetic construct
  source 1..80: mol_type = other DNA
tactggatgccattcattattttttgtaaatgaaattctttccaagtgttccaatttacttggctatatatgtgcatgtg

SEQ ID NO: 92357 - DNA, 80 bp, synthetic construct
  source 1..80: mol_type = other DNA
ttcaagtgattctcctgcctcagcctcctgagtagctgggattacaggcgcccaccacgacgcccagctaatttttatat

SEQ ID NO: 92358 - DNA, 80 bp, synthetic construct
  source 1..80: mol_type = other DNA
aatatttcacattttctgtggtgcaaataggatagttgctacttttgaaaccgtaagttcactcccaacaagcactgtta

SEQ ID NO: 92359 - DNA, 80 bp, synthetic construct
  source 1..80: mol_type = other DNA
catacataatgaccacaatgccctatgaaaatgacagtaagggagatgtcaggggattccgggaagcaagagaagcggtt

SEQ ID NO: 92360 - DNA, 80 bp, synthetic construct; identical to SEQ ID NO: 17084
  source 1..80: mol_type = other DNA

SEQ ID NO: 92361 - DNA, 80 bp, synthetic construct
  source 1..80: mol_type = other DNA
agtactacaaaaaataaaaaatagagcaggctaagagggtgaggagtgtgcgggcagggaggaggcaggtcatggtttta

SEQ ID NO: 92362 - DNA, 80 bp, synthetic construct
  source 1..80: mol_type = other DNA
atgtctgtaatcccagcactttgggaggctgagacaggtggatcacttgaggtcaggagtttgagaccagcctggccaac

SEQ ID NO: 92363 - DNA, 80 bp, synthetic construct; identical to SEQ ID NO: 17085
  source 1..80: mol_type = other DNA

SEQ ID NO: 92364 - DNA, 80 bp, synthetic construct
  source 1..80: mol_type = other DNA
tctctgtcagcagagtctcatgcaattttaaaaggaaattcgatgaaacgaacacccatcaacatctttaatagctgcaa

SEQ ID NO: 92365 - DNA, 80 bp, synthetic construct
  source 1..80: mol_type = other DNA
ttttgtagacagggaaactgaatccaggataaataatgtagcttgcatgacaccaatcttcctcaagtctgagccagaat

SEQ ID NO: 92366 - DNA, 80 bp, synthetic construct
  source 1..80: mol_type = other DNA
aggactgtttattaaaaaattttaggaggtggtagtcaaaaagtgtctctggctgcagtactggggacagactgcagggg

SEQ ID NO: 92367 - DNA, 80 bp, synthetic construct; identical to SEQ ID NO: 17086
  source 1..80: mol_type = other DNA

SEQ ID NO: 92368 - DNA, 80 bp, synthetic construct
  source 1..80: mol_type = other DNA
tgaagtgctcaggaccatccacagctgaagtgctcagacactgcgttttctttatctcagagaggctgtgtgacttgccc

SEQ ID NO: 92369 - DNA, 80 bp, synthetic construct
  source 1..80: mol_type = other DNA
agaggggaggggacagctggcggatttagcagagtacgtggcacagaggaaacactaaatatgcttcttcagctccttat

SEQ ID NO: 92370 - DNA, 80 bp, synthetic construct
  source 1..80: mol_type = other DNA
atgtgtgtactcacagctactcactttcctactctgtgccagccatgaggtgtagtcactgtgccagggggctgagtgtc

SEQ ID NO: 92371 - DNA, 80 bp, synthetic construct
  source 1..80: mol_type = other DNA
cttcagtcagatttagcgctccatcttctgcctttctgaagggacagtggaagcatccatttgaagactcttcctgtgtc

SEQ ID NO: 92372 - DNA, 80 bp, synthetic construct; identical to SEQ ID NO: 17087
  source 1..80: mol_type = other DNA

SEQ ID NO: 92373 - DNA, 80 bp, synthetic construct
  source 1..80: mol_type = other DNA
ctacataaatcagtaagatccatctgtgcaattccttcctcctagaattcagaatctgaggtgctggtttcctgaggaca

SEQ ID NO: 92374 - DNA, 80 bp, synthetic construct
  source 1..80: mol_type = other DNA
atacatccctcacccttttccaattgatttttagcttccttcatccctccctctttcccttgtcctcttcgtgtccacag

SEQ ID NO: 92375 - DNA, 80 bp, synthetic construct
  source 1..80: mol_type = other DNA
aatcaccaagccacaccaaatatatgaaatatctttctctaaggtggtctttaaaatttgggctgactctcctccctcta

SEQ ID NO: 92376 - DNA, 80 bp, synthetic construct; identical to SEQ ID NO: 17088
  source 1..80: mol_type = other DNA

SEQ ID NO: 92377 - DNA, 80 bp, synthetic construct
  source 1..80: mol_type = other DNA
ggagaaaccaaccctgccagccccttgatcttagacttctggcctccagaattgtgagaaaatacatttccattgtttaa

SEQ ID NO: 92378 - DNA, 80 bp, synthetic construct
  source 1..80: mol_type = other DNA
ttggtttctgagccctgatcaggaggctgtgtttatatttatcctgctaactgcaggggactgtttattcccagagaaat

SEQ ID NO: 92379 - DNA, 80 bp, synthetic construct
  source 1..80: mol_type = other DNA
gcaaacaagtcacagtcctagtctgagattcagtgcaacactaggcgcttagtagatgctcagtaaacagaacaacaagg

SEQ ID NO: 92380 - DNA, 80 bp, synthetic construct; identical to SEQ ID NO: 17089
  source 1..80: mol_type = other DNA

SEQ ID NO: 92381 - DNA, 80 bp, synthetic construct
  source 1..80: mol_type = other DNA
ttcatcactggctagtgaaaacacattttatacttctgggccaacaaatacttgggtcaattcacacattggcttgagaa

SEQ ID NO: 92382 - DNA, 80 bp, synthetic construct
  source 1..80: mol_type = other DNA
ctgtaggtgtgcactactgtgcttggccaacgtgttcttttttgaggtgggaactttaatttacttgagcagatgtatca

SEQ ID NO: 92383 - DNA, 80 bp, synthetic construct; identical to SEQ ID NO: 17090
  source 1..80: mol_type = other DNA

SEQ ID NO: 92384 - DNA, 80 bp, synthetic construct
  source 1..80: mol_type = other DNA
gaaacccgtgggaagctctgctgtattgctgggtgctcctgttctgtggcaagacaacctagaaggtgatagggggtctt

SEQ ID NO: 92385 - DNA, 80 bp, synthetic construct
  source 1..80: mol_type = other DNA
tataattctggagatctgtaaaaggatgtttaacatgtttaaagtctttgtttcccatccttctgccaaggattgagaca

SEQ ID NO: 92386 - DNA, 80 bp, synthetic construct
  source 1..80: mol_type = other DNA
ttcaacagagtattaaaaacaaagacagccttccaccctgacgtcagacacacagacacacgagcacgagcatcttgtac

SEQ ID NO: 92387 - DNA, 80 bp, synthetic construct; identical to SEQ ID NO: 17091
  source 1..80: mol_type = other DNA

SEQ ID NO: 92388 - DNA, 80 bp, synthetic construct
  source 1..80: mol_type = other DNA
gctataatttcatgggatttgttttaagcgcccttttctggcagatgtaggctcagtatgagcactctgtaattttccag

SEQ ID NO: 92389 - DNA, 80 bp, synthetic construct
  source 1..80: mol_type = other DNA
accatggcacatcctttctgaggaatactatgcatccaacaagagggatgcttagaaagttgattctgacatcacatacc

SEQ ID NO: 92390 - DNA, 80 bp, synthetic construct; identical to SEQ ID NO: 17092
  source 1..80: mol_type = other DNA

SEQ ID NO: 92391 - DNA, 80 bp, synthetic construct
  source 1..80: mol_type = other DNA
tagatacatgaagggtaaaggacaggcagggatgctccaggcagggagaatgctatgaatgaagactggagggacagttc

SEQ ID NO: 92392 - DNA, 80 bp, synthetic construct
  source 1..80: mol_type = other DNA
ggatacagatggatgtcttttcccaattcagtcatttataagtagctcatatgtctctcaattcctcatcattttcgcag

SEQ ID NO: 92393 - DNA, 80 bp, synthetic construct
  source 1..80: mol_type = other DNA
tcaatttcctcatctgtaaatgagatgtgagctgtgctcacctccacaggatgctgatgaggattaaatgagaagaagtg

SEQ ID NO: 92394 - DNA, 80 bp, synthetic construct
  source 1..80: mol_type = other DNA
ttaacttcttttttttttttttctcaaataatttgctcagggctggggcagccagtatcatctacatgctctctccctca

SEQ ID NO: 92395 - DNA, 80 bp, synthetic construct; identical to SEQ ID NO: 17093
  source 1..80: mol_type = other DNA

SEQ ID NO: 92396 - DNA, 80 bp, synthetic construct
  source 1..80: mol_type = other DNA
aacttccatcatacaggtgctgtgaaactattcctcgcatttaaagcgattctcatgtttaaaaagttggaagcagccta

SEQ ID NO: 92397 - DNA, 80 bp, synthetic construct
  source 1..80: mol_type = other DNA
agcctgggtgacagagagagactctcagtgtcaaaaaaatagttgggagacttctggttcaagatgattatttaattacc

SEQ ID NO: 92398 - DNA, 80 bp, synthetic construct
  source 1..80: mol_type = other DNA
tttcaacatgcttgtgcaagatggacagcttgagagagctgtaactgatgaaggcaggtggagaaacccacagctcagag

SEQ ID NO: 92399 - DNA, 80 bp, synthetic construct; identical to SEQ ID NO: 17094
  source 1..80: mol_type = other DNA

SEQ ID NO: 92400 - DNA, 80 bp, synthetic construct
  source 1..80: mol_type = other DNA
tgacagcaactgaaattactctcatgaggagttttacaaaatgctaattcataagcccccacttccagagagaatgatac

SEQ ID NO: 92401 - DNA, 80 bp, synthetic construct
  source 1..80: mol_type = other DNA
tagctcactgcatccttgaattcctggcctcaagtgatcctcccacctcagcttccagagccccctagctgacattggca

SEQ ID NO: 92402 - DNA, 80 bp, synthetic construct
  source 1..80: mol_type = other DNA
gccaccatacttggcgaatttttatatttttagtagagagggggtttcaccgtgttggccaggctggtctcgaactccta

SEQ ID NO: 92403 - DNA, 80 bp, synthetic construct; identical to SEQ ID NO: 17095
  source 1..80: mol_type = other DNA

SEQ ID NO: 92404 - DNA, 80 bp, synthetic construct
  source 1..80: mol_type = other DNA
ataacattgctttagccagggttaagaaccagtggtctataggctggcaaatcccaaatttgtatctcaaacccaacctg

SEQ ID NO: 92405 - DNA, 80 bp, synthetic construct
  source 1..80: mol_type = other DNA
ggcaaatccatccttgcagttgctaagggcaaaagtcttagagcccttttttattcttttgctttctctcacaccctaca

SEQ ID NO: 92406 - DNA, 80 bp, synthetic construct
  source 1..80: mol_type = other DNA
accaggaaaccggaaaaagtctatgagataattattttcagacattggaaaaaaggtagttcaggattatggtccctgag

SEQ ID NO: 92407 - DNA, 80 bp, synthetic construct; identical to SEQ ID NO: 17096
  source 1..80: mol_type = other DNA

SEQ ID NO: 92408 - DNA, 80 bp, synthetic construct
  source 1..80: mol_type = other DNA
acctgagttcctatcagtcaaaggaggaaaggtttcactgaatccacaaggcattcagtagagaccccaaaaaggttatt

SEQ ID NO: 92409 - DNA, 80 bp, synthetic construct
  source 1..80: mol_type = other DNA
agtccaaccctgcttgaaagagtacaaaacaatcaagcatcaacaatgtaaaattcatgatgttctgatctctaataaaa

SEQ ID NO: 92410 - DNA, 80 bp, synthetic construct; identical to SEQ ID NO: 17097
  source 1..80: mol_type = other DNA

SEQ ID NO: 92411 - DNA, 80 bp, synthetic construct
  source 1..80: mol_type = other DNA
aggaggctgaggcaggagaattgcttgaacccaggaggcagaggttgcagtgagctgagatcgcaccactgcactccagc

SEQ ID NO: 92412 - DNA, 80 bp, synthetic construct
  source 1..80: mol_type = other DNA
taaccaaaaaaagactgaaaagagcctcagctacctgcagaacaatgtaaattaagactaacatatgtgcagttggagtt

SEQ ID NO: 92413 - DNA, 80 bp, synthetic construct
  source 1..80: mol_type = other DNA
acaaaggcacatcaaaatcaacttgttgaaagtcaggaatgaagagaaatcttaacagcagccaaagaaaggaggcacaa

SEQ ID NO: 92414 - DNA, 80 bp, synthetic construct
  source 1..80: mol_type = other DNA
cgagtagctgggattacaagcgtgtcccaccatgcccggctaatttttgtacttttagtagagacagggtttcaccatgc

SEQ ID NO: 92415 - DNA, 80 bp, synthetic construct; identical to SEQ ID NO: 17098
  source 1..80: mol_type = other DNA

SEQ ID NO: 92416 - DNA, 80 bp, synthetic construct
  source 1..80: mol_type = other DNA
acctggaatatttcaaaagcctgctaatgagtccccacacttctatatttcccccgtacagttttttttgaacagcaatg

SEQ ID NO: 92417 - DNA, 80 bp, synthetic construct
  source 1..80: mol_type = other DNA
ccctgcatgacctagtctctggctactgctctgagctcacattctaactcccacttgcccctcctccaaacactattcca

SEQ ID NO: 92418 - DNA, 80 bp, synthetic construct
  source 1..80: mol_type = other DNA
ttcagaccaccctacttccatcactttattcttaccctggttttgttctttttgcagcatttaccaccacctgacattta

SEQ ID NO: 92419 - DNA, 80 bp, synthetic construct; identical to SEQ ID NO: 17099
  source 1..80: mol_type = other DNA

SEQ ID NO: 92420 - DNA, 80 bp, synthetic construct
  source 1..80: mol_type = other DNA
gttctgaatgacatgtgtctcactacagtggcattacagagaaagcctggaaacattacaagggagtagagccagggcct

SEQ ID NO: 92421 - DNA, 80 bp, synthetic construct
  source 1..80: mol_type = other DNA
ctccgagtctgcagctaggatgccctttagccacaaacagctataaaagaataagctttatggaaaaacattaaaaaaga

SEQ ID NO: 92422 - DNA, 80 bp, synthetic construct; identical to SEQ ID NO: 17100
  source 1..80: mol_type = other DNA

SEQ ID NO: 92423 - DNA, 80 bp, synthetic construct
  source 1..80: mol_type = other DNA
ccccacttcctttgtggctgcagcatcttcaactgccttccccccattatgagacatgcccacaaatctccagatgcatt

SEQ ID NO: 92424 - DNA, 80 bp, synthetic construct
  source 1..80: mol_type = other DNA
gcatggtggtgcatgtctgtaatcccagctactcaggaggctgaggcacaagaaccacttgaacccaggaggcagaggtt

SEQ ID NO: 92425 - DNA, 80 bp, synthetic construct
  source 1..80: mol_type = other DNA
aatggagagcaagaagacccaagatcagcagaggtcttgttgagtcttgttgagtgccgataaccaaattctgtctttgg

SEQ ID NO: 92426 - DNA, 80 bp, synthetic construct; identical to SEQ ID NO: 17101
  source 1..80: mol_type = other DNA

SEQ ID NO: 92427 - DNA, 80 bp, synthetic construct
  source 1..80: mol_type = other DNA
agcgcgtaaagaaacaagtcatgttggcagtcctcttgaataagtttggaatcatatagcagttcagagctgaatataca

SEQ ID NO: 92428 - DNA, 80 bp, synthetic construct
  source 1..80: mol_type = other DNA
gctcttgataaagtgaggggacagttgataatggcctgatttaatgtttgaggtgaacagccaaaacaagggacttcaca

SEQ ID NO: 92429 - DNA, 80 bp, synthetic construct
  source 1..80: mol_type = other DNA
tgttgcccccataccaagtttaaatgtttccacctggctttcaaagccctccaatatgaccttaacctattgaagcagtt

SEQ ID NO: 92430 - DNA, 80 bp, synthetic construct
  source 1..80: mol_type = other DNA
aaaagatctggggtcagagaactcagctcagggtttagctttgccacttacatgtgaactcagccagattatctattaat

SEQ ID NO: 92431 - DNA, 80 bp, synthetic construct; identical to SEQ ID NO: 17102
  source 1..80: mol_type = other DNA

SEQ ID NO: 92432 - DNA, 80 bp, synthetic construct
  source 1..80: mol_type = other DNA
ggggaccagggaaggctcctcaagggtgacattttagctttagatatgaggcttgaatgtggttaagagaagtcagccat

SEQ ID NO: 92433 - DNA, 80 bp, synthetic construct
  source 1..80: mol_type = other DNA
ttgagtgtcatggtgaagagtcagattttttgcaacaggaagtcactgaaggatttcaaacaagcaaaggacttggcctg

SEQ ID NO: 92434 - DNA, 80 bp, synthetic construct
  source 1..80: mol_type = other DNA
ggatggaatcagaatgtattatgcggattgagctgacaagagttgatgatgaattggatatgaaagtttaggaaaaaaag

SEQ ID NO: 92435 - DNA, 80 bp, synthetic construct; identical to SEQ ID NO: 17103
  source 1..80: mol_type = other DNA

SEQ ID NO: 92436 - DNA, 80 bp, synthetic construct
  source 1..80: mol_type = other DNA
atcagagtatgccatccccaaatatgtcactttagcacaaggattgttttgagctgcaggcaatttggaagcagcagatg

SEQ ID NO: 92437 - DNA, 80 bp, synthetic construct
  source 1..80: mol_type = other DNA
aaaccaaagcttattctccattagtttccctcctatatttatcttcccataatttaccacttctagaagtccaaactcct

SEQ ID NO: 92438 - DNA, 80 bp, synthetic construct; identical to SEQ ID NO: 17104
  source 1..80: mol_type = other DNA

SEQ ID NO: 92439 - DNA, 80 bp, synthetic construct
  source 1..80: mol_type = other DNA
gatgttctggaagccaagagaaaagaggagtttgaggataaatggtcagccatgtcaaatgttgctgagatgctgaggac

SEQ ID NO: 92440 - DNA, 80 bp, synthetic construct
  source 1..80: mol_type = other DNA
aaggagggcagagaaatgggaaagtagcaggagggtgatgcagggtctattaagaaggaagaatatacatgtttgcatac

SEQ ID NO: 92441 - DNA, 80 bp, synthetic construct
  source 1..80: mol_type = other DNA
taggggtgtgaagattacttctgattacttttattacctcaatggagtgtgaaagaaaggtagttagcagagagtgaggg

SEQ ID NO: 92442 - DNA, 80 bp, synthetic construct
  source 1..80: mol_type = other DNA
tattcagctgcttgagggcagatgaagaatacgtgggaagttggtattttgataggggtacaacatagggagagaggggc

SEQ ID NO: 92443 - DNA, 80 bp, synthetic construct; identical to SEQ ID NO: 17105
  source 1..80: mol_type = other DNA

SEQ ID NO: 92444 - DNA, 80 bp, synthetic construct
  source 1..80: mol_type = other DNA
tcagtgaatgggcaggagatgcatgctggcaaccccaatgacagagcttgctatggtttgaatgtctcctccaaaactta

SEQ ID NO: 92445 - DNA, 80 bp, synthetic construct
  source 1..80: mol_type = other DNA
ctgattctgtcctgcacttgctcaccatgtgatgccttccacatggatgactcttgccagatgccagagccctctatcat

SEQ ID NO: 92446 - DNA, 80 bp, synthetic construct
  source 1..80: mol_type = other DNA
aaattcatacccaagaccagggcccccagcattctctccctaaccactacattgtactgcaaattgtcacttggcaatgc

SEQ ID NO: 92447 - DNA, 80 bp, synthetic construct; identical to SEQ ID NO: 17106
  source 1..80: mol_type = other DNA

SEQ ID NO: 92448 - DNA, 80 bp, synthetic construct
  source 1..80: mol_type = other DNA
aatggggtatgttgctgcttacaggagctttggaatgaatccctttgagaagcaaagccttcttttacaaagcaggtcat

SEQ ID NO: 92449 - DNA, 80 bp, synthetic construct
  source 1..80: mol_type = other DNA
aatggaggagatagcgttctcatcttccaggaacccagaatctggcaagagaagcagatgctaagcacacagtcacacaa

SEQ ID NO: 92450 - DNA, 80 bp, synthetic construct; identical to SEQ ID NO: 17107
  source 1..80: mol_type = other DNA

SEQ ID NO: 92451 - DNA, 80 bp, synthetic construct
  source 1..80: mol_type = other DNA
acgaggcgctcagaattcagaacacttggcagcagggaagaggatcatggccatttggaaaggattagagaggagtcacg

SEQ ID NO: 92452 - DNA, 80 bp, synthetic construct
  source 1..80: mol_type = other DNA
tcattactgattaaacttccgtcaaatgtgtgaagcaacctccagtttctaaggaatgtgtcctgggcaggtgaagagaa

SEQ ID NO: 92453 - DNA, 80 bp, synthetic construct
  source 1..80: mol_type = other DNA
gggtaacaagggctgaggcttagaattgtctagtttggtttcagtccagggcagggtcaggataaggacccagctgactc

SEQ ID NO: 92454 - DNA, 80 bp, synthetic construct
  source 1..80: mol_type = other DNA
gggaggccctgggaggttctggaaacgtggtctgggcccagcttgctcagtttttattttttgttgttaatttccagcag

SEQ ID NO: 92455 - DNA, 80 bp, synthetic construct; identical to SEQ ID NO: 17108
  source 1..80: mol_type = other DNA

SEQ ID NO: 92456 - DNA, 80 bp, synthetic construct
  source 1..80: mol_type = other DNA
accatttgagctggatcttgaagactgatttcacctggtagaaaacagggaggaagggaagggcattccaggtggagagt

SEQ ID NO: 92457 - DNA, 80 bp, synthetic construct
  source 1..80: mol_type = other DNA
acccttcaggaggcgagttctgagctggctatgtccccaggctttccttgctggtgtgcttaagggaggccctcctgttt

SEQ ID NO: 92458 - DNA, 80 bp, synthetic construct
  source 1..80: mol_type = other DNA
ggcagcctccttcacagagaggtactaggtggcgaaggatgggaagcaggcagccctcgctttagtgtagccactgacac

SEQ ID NO: 92459 - DNA, 80 bp, synthetic construct; identical to SEQ ID NO: 17109
  source 1..80: mol_type = other DNA

SEQ ID NO: 92460 - DNA, 80 bp, synthetic construct
  source 1..80: mol_type = other DNA
agttatccccctcactccccagaacaaaggcattggctgctggcatgatggagagtttggaaaggggagatactggtggg

SEQ ID NO: 92461 - DNA, 80 bp, synthetic construct
  source 1..80: mol_type = other DNA
ccttccttcagcgaccttcacccagcagccatgacactggacccacctcagagaagtgtggcgggacctggcctcagcca

SEQ ID NO: 92462 - DNA, 80 bp, synthetic construct; identical to SEQ ID NO: 17110
  source 1..80: mol_type = other DNA

SEQ ID NO: 92463 - DNA, 80 bp, synthetic construct
  source 1..80: mol_type = other DNA
agaggactggaccatgcacagggtggtgtggccgggtgagctacagggaaggaaatgtgccttggcctcccctccttcac

SEQ ID NO: 92464 - DNA, 80 bp, synthetic construct
  source 1..80: mol_type = other DNA
ctgaggcaaggagaagtatatccactcaccagaaccacacagtttgaatacttaagaattaggacgtgaatccaggcaag

SEQ ID NO: 92465 - DNA, 80 bp, synthetic construct
  source 1..80: mol_type = other DNA
actgaatggtgatatgtcctgcctaaagccacgcagccagttagtggcagagccaggtctagactcctagtgcctgactc

SEQ ID NO: 92466 - DNA, 80 bp, synthetic construct; identical to SEQ ID NO: 17111
  source 1..80: mol_type = other DNA

SEQ ID NO: 92467 - DNA, 80 bp, synthetic construct
  source 1..80: mol_type = other DNA
cttagccccatgttgggggttggccaagcgcagggaggaggcagcactcacaagacagagtccggagcattctccaccac

SEQ ID NO: 92468 - DNA, 80 bp, synthetic construct
  source 1..80: mol_type = other DNA
ctctaccagcacctccccaacctcctggaaactgctgtgcttcctgcagtttcaagcccctccaccccctgttcctcacc

SEQ ID NO: 92469 - DNA, 80 bp, synthetic construct
  source 1..80: mol_type = other DNA
aaagtcagtggaactggacggaaaaaatggaagggccagaaaacttggggaggactccagagctgggggtgacacaggaa

SEQ ID NO: 92470 - DNA, 80 bp, synthetic construct
  source 1..80: mol_type = other DNA
agccccctcacaagtcactcagcctgccttctgctcctcagatacccacccttctctccagctcctcccctctgtgcgta

SEQ ID NO: 92471 - DNA, 80 bp, synthetic construct; identical to SEQ ID NO: 17112
  source 1..80: mol_type = other DNA

SEQ ID NO: 92472 - DNA, 80 bp, synthetic construct
  source 1..80: mol_type = other DNA
ctataatgggctgattgttggcttttgttgacaaaatggtctacatgcctggggaaagttatgaaggatctttgtggtgc

SEQ ID NO: 92473 - DNA, 80 bp, synthetic construct
  source 1..80: mol_type = other DNA
ggggagagcagggggatccaggtacctttcttgtctcagtttttgatggcctggcagtgcccccacctgttttttcttct

SEQ ID NO: 92474 - DNA, 80 bp, synthetic construct; identical to SEQ ID NO: 17113
  source 1..80: mol_type = other DNA

SEQ ID NO: 92475 - DNA, 80 bp, synthetic construct
  source 1..80: mol_type = other DNA
aaactgggaaacacccagctatccagcaataggggtagtgaattacagaacatcaactagatggaatattatgcacccac

SEQ ID NO: 92476 - DNA, 80 bp, synthetic construct
  source 1..80: mol_type = other DNA
gcagtggtatcatgaatgacttgttctcttattcatataataaatattgtttactatgggctaggtctgatgctgggtgc

SEQ ID NO: 92477 - DNA, 80 bp, synthetic construct
  source 1..80: mol_type = other DNA
tgcttgagcccgggagtttgacatcagcctgggcaatgtagcgaggccctgtctcttaaaaaaaaaaaaaagtagccagg

SEQ ID NO: 92478 - DNA, 80 bp, synthetic construct; identical to SEQ ID NO: 17114
  source 1..80: mol_type = other DNA

SEQ ID NO: 92479 - DNA, 80 bp, synthetic construct
  source 1..80: mol_type = other DNA
agtgtgcctaattctgaaagtagcaagctaaattatgcagtgccaaaagtgacaactcttatacctacaccatcccgtct

SEQ ID NO: 92480 - DNA, 80 bp, synthetic construct
  source 1..80: mol_type = other DNA
cccagtggagagtttccatttaatcttttcaaagttaactgataaacatcctttaggatgtgaagtgatgggttaattct

SEQ ID NO: 92481 - DNA, 80 bp, synthetic construct
  source 1..80: mol_type = other DNA
agacaacatgccaaaggccacacatgcatctatgatgagtgatgcttgtcttagatgttttttaattggcagaatgaata

SEQ ID NO: 92482 - DNA, 80 bp, synthetic construct; identical to SEQ ID NO: 17115
  source 1..80: mol_type = other DNA

SEQ ID NO: 92483 - DNA, 80 bp, synthetic construct
  source 1..80: mol_type = other DNA
tgaaagcccattcctgctccttcttcccctcctctatacacatgtgctctcaagagtgtgtgtgtgcacgtgtgtacaca

SEQ ID NO: 92484 - DNA, 80 bp, synthetic construct
  source 1..80: mol_type = other DNA
agatgcttctaacttgtctggcctgtaaatctgtcttgtccttcaagttttctctggacttaatcagttgatgacgtgac

SEQ ID NO: 92485 - DNA, 80 bp, synthetic construct
  source 1..80: mol_type = other DNA
tgcatgaaattggtggatattgcacaacttggtttctggacctagctgaacccctcattaactgtgtgaccactgacaag

SEQ ID NO: 92486 - DNA, 80 bp, synthetic construct
  source 1..80: mol_type = other DNA
cctttcaaaatacagcctgatacatacaatcatgttacggaatgaatggaaggaaagatttccaatactaaagtctagat

SEQ ID NO: 92487 - DNA, 80 bp, synthetic construct; identical to SEQ ID NO: 17116
  source 1..80: mol_type = other DNA

SEQ ID NO: 92488 - DNA, 80 bp, synthetic construct
  source 1..80: mol_type = other DNA
gctgaaatgccaattatgctacttggggattcagcagaacttatctgactgatggaagtgaccaatttgaaccactgacc

SEQ ID NO: 92489 - DNA, 80 bp, synthetic construct
  source 1..80: mol_type = other DNA
ataaccacatgcttcagtgtagccctcctacattgcttgcctacatctgaaaacacgaatcaagaaagagaatatagctc

SEQ ID NO: 92490 - DNA, 80 bp, synthetic construct
  source 1..80: mol_type = other DNA
aatgacagattgatggagctcatcagagaggcacagagaccacaggccattggaatggggccttatttggatggactcat

SEQ ID NO: 92491 - DNA, 80 bp, synthetic construct; identical to SEQ ID NO: 17117
  source 1..80: mol_type = other DNA

SEQ ID NO: 92492 - DNA, 80 bp, synthetic construct
  source 1..80: mol_type = other DNA
gtatttttatccaatttgtgtgtgccttggacttgggccatatttgccttttctatttaaaataatcagatcaagcatga

SEQ ID NO: 92493 - DNA, 80 bp, synthetic construct
  source 1..80: mol_type = other DNA
tgcctctgtatctgaactggcataccaaaccactccagaaggtgtgtctatgaaatccctcacttctcaagcccagcaaa

SEQ ID NO: 92494 - DNA, 80 bp, synthetic construct
  source 1..80: mol_type = other DNA
cttgtcaaggtgataagcatgcgtttctgctgcactctatacaggtgagtaaccgagggtgggggctttgtttcacatga

SEQ ID NO: 92495 - DNA, 80 bp, synthetic construct; identical to SEQ ID NO: 17118
  source 1..80: mol_type = other DNA

SEQ ID NO: 92496 - DNA, 80 bp, synthetic construct
  source 1..80: mol_type = other DNA
ctggcctcaggctaacgggctttactttggggggcggtatagactgtaggagaagcaagtgggaaggagatgtagggaaa

SEQ ID NO: 92497 - DNA, 80 bp, synthetic construct
  source 1..80: mol_type = other DNA
actgaggcctgggggttgtgggtggaaaacaggaaggaaccggtagcccttggcacgtattcttagaggagaaaacggag

SEQ ID NO: 92498 - DNA, 80 bp, synthetic construct; identical to SEQ ID NO: 17119
  source 1..80: mol_type = other DNA

SEQ ID NO: 92499 - DNA, 80 bp, synthetic construct
  source 1..80: mol_type = other DNA
ctggctcggccacgccgtgcgcagcgctgaagttgcgcagcgtggcgccccagcgcgcccgcgcctccgcctcgccgggg

SEQ ID NO: 92500 - DNA, 80 bp, synthetic construct
  source 1..80: mol_type = other DNA
ggggccgggggctgcgggaggacatggtccggagctcagccccggggccggggcggcgctcggggcccgggccacgacat

SEQ ID NO: 92501 - DNA, 80 bp, synthetic construct
  source 1..80: mol_type = other DNA
ggcccagcgggtgcccgggcaggggcgctcctctgcgcgccccgacgcctcgccggctcccgcggctccttacccgccgc

SEQ ID NO: 92502 - DNA, 80 bp, synthetic construct
  source 1..80: mol_type = other DNA
gagagcccccgggggcgtcccatgaggcgttcgggatcggcgcctcctaggtgcgggctgtgcgggcagtcctgctcccg

SEQ ID NO: 92503 - DNA, 80 bp, synthetic construct; identical to SEQ ID NO: 17120
  source 1..80: mol_type = other DNA

SEQ ID NO: 92504 - DNA, 80 bp, synthetic construct
  source 1..80: mol_type = other DNA
atcgccgacactggattctcgggcgttagtccgaagtttaagttcccttcgttcactcctttgccctggatcgaaccgca

SEQ ID NO: 92505 - DNA, 80 bp, synthetic construct
  source 1..80: mol_type = other DNA
tcagcaccgcggacagcgcatcggtgccgcagccgcgggcgggcgccgctagggctgccaggggtccgaggcgcgggcaa

SEQ ID NO: 92506 - DNA, 80 bp, synthetic construct
  source 1..80: mol_type = other DNA
gggcggggacgctgcggaatagagacgggggaggagtcaagcgcgggtagggggccaaggtgccacagggagaaagagcc

SEQ ID NO: 92507 - DNA, 80 bp, synthetic construct; identical to SEQ ID NO: 17121
  source 1..80: mol_type = other DNA

SEQ ID NO: 92508 - DNA, 80 bp, synthetic construct
  source 1..80: mol_type = other DNA
tgatgatatgatggcagaaaataaaaataataatggtgactgtacttagatatcccaggtgggtgagcggtggcaaaaag

SEQ ID NO: 92509 - DNA, 80 bp, synthetic construct
  source 1..80: mol_type = other DNA
ggtgttgattgtcccaaaccagggtgctctggagatttggttcttcccagatatgctgcctcagtttatagatggagcca

SEQ ID NO: 92510 - DNA, 80 bp, synthetic construct; identical to SEQ ID NO: 17122
  source 1..80: mol_type = other DNA

SEQ ID NO: 92511 - DNA, 80 bp, synthetic construct
  source 1..80: mol_type = other DNA
ccgcttggctggtcagctcttgacagaagccctgagatgtgtcattctaggagttgccctggagactccagatgtaactg

SEQ ID NO: 92512 - DNA, 80 bp, synthetic construct
  source 1..80: mol_type = other DNA
gcaaatctctggcatcaatctcagctccgaatgacctaatcaatttgtgtaatagggaaatgatgagttccctgcacata

SEQ ID NO: 92513 - DNA, 80 bp, synthetic construct
  source 1..80: mol_type = other DNA
ggcacaggatttttagggaaccagccccgtgataaatgcggcttttgcccactaaatcaatatttaagctactgacttcc

SEQ ID NO: 92514 - DNA, 80 bp, synthetic construct; identical to SEQ ID NO: 17123
  source 1..80: mol_type = other DNA

SEQ ID NO: 92515 - DNA, 80 bp, synthetic construct
  source 1..80: mol_type = other DNA
aaccagctcaactcaagttagacattttttccagaaagtttttcctttgtaggatgttttgagccaatcactttgatgcc

SEQ ID NO: 92516 - DNA, 80 bp, synthetic construct
  source 1..80: mol_type = other DNA
cacgcacataaacacaatataggagtgttaacccagaaaattaggtaaggtcaaatggaaccagttggcaactccactcc

SEQ ID NO: 92517 - DNA, 80 bp, synthetic construct
  source 1..80: mol_type = other DNA
catatttggcaataagaaggaatgaagtactaatatatactacaatgtgcataaatcttgaaaacatactaaatgaaaga

SEQ ID NO: 92518 - DNA, 80 bp, synthetic construct; identical to SEQ ID NO: 17124
  source 1..80: mol_type = other DNA

SEQ ID NO: 92519 - DNA, 80 bp, synthetic construct
  source 1..80: mol_type = other DNA
cagtgaaaccctgtctctactaaaaatacaaaaaaattagctggacttggtggcaggcacctgtaatcccagctactcag

SEQ ID NO: 92520 - DNA, 80 bp, synthetic construct
  source 1..80: mol_type = other DNA
gataatctttatccaaaaaatggaaacaaatttatcccaaggaggccgggtgcggtggctcatgcctgtaatcccagcac

SEQ ID NO: 92521 - DNA, 80 bp, synthetic construct
  source 1..80: mol_type = other DNA
cgtgaacccgggaggcggagcttacagtgagccgagatcgggccactgcactccagcctgggcgacagagtgagactcca

SEQ ID NO: 92522 - DNA, 80 bp, synthetic construct; identical to SEQ ID NO: 17125
  source 1..80: mol_type = other DNA

SEQ ID NO: 92523 - DNA, 80 bp, synthetic construct
  source 1..80: mol_type = other DNA
cagcagctcttctccccccattctcctggaattaggtttttataaaaccttttatgttttaagtcatttggcaaatgttt

SEQ ID NO: 92524 - DNA, 80 bp, synthetic construct
  source 1..80: mol_type = other DNA
tcttgttgagaaaagcatggggagagtctggtcacagcccaggacctgggagaaaggccccttgaaataaaattattctg

SEQ ID NO: 92525 - DNA, 80 bp, synthetic construct
  source 1..80: mol_type = other DNA
ccttggtgcctgaagtggttccttatgataaagtgcatcttgagtggtaataggcaagaaatgtctcaaatggtacagca

SEQ ID NO: 92526 - DNA, 80 bp, synthetic construct; identical to SEQ ID NO: 17126
  source 1..80: mol_type = other DNA

SEQ ID NO: 92527 - DNA, 80 bp, synthetic construct
  source 1..80: mol_type = other DNA
tgtgtagtagtcaataaattacattaagatactcaacactttagtatacaataagctttgtgttagattattttgcccaa

SEQ ID NO: 92528 - DNA, 80 bp, synthetic construct
  source 1..80: mol_type = other DNA
tgtaaccctatcataatttgcggagcatctgtatatgatgtccttttttggtctcttataataaattttctttttcagac

SEQ ID NO: 92529 - DNA, 80 bp, synthetic construct
  source 1..80: mol_type = other DNA
agagatagggtctcactatgttgtccaggcttggtctctcaaagtgctaggattacaagcatgagccaccacaactggcc

SEQ ID NO: 92530 - DNA, 80 bp, synthetic construct
  source 1..80: mol_type = other DNA
gggtcttgagactatcttataactcaacttgttaaaaatttgtgactgttcagctgctctctggttatttccaaataact

SEQ ID NO: 92531 - DNA, 80 bp, synthetic construct; identical to SEQ ID NO: 17127
  source 1..80: mol_type = other DNA

SEQ ID NO: 92532 - DNA, 80 bp, synthetic construct
  source 1..80: mol_type = other DNA
ccaggagtattgacctgggtgcaaatatagaagcaagaaaaaacatattgcgttcaaggaactatggtgggcgcgtgttg

SEQ ID NO: 92533 - DNA, 80 bp, synthetic construct
  source 1..80: mol_type = other DNA
atatgtggactctggcttgatgaagccaattttatggcaaactttgttttcccacaaacatggccacactgaaaggcaca

SEQ ID NO: 92534 - DNA, 80 bp, synthetic construct; identical to SEQ ID NO: 17128
  source 1..80: mol_type = other DNA

SEQ ID NO: 92535 - DNA, 80 bp, synthetic construct
  source 1..80: mol_type = other DNA
aaaatctaatccagatttttttgttctctaggtaaggccattcatgtgttgatttttgtctcaaatggattttgatataa

SEQ ID NO: 92536 - DNA, 80 bp, synthetic construct
  source 1..80: mol_type = other DNA
aattactgttatcaatcattttaatgatcttactgcctggttggttggctctatctgtctatctatctacatatacatac

SEQ ID NO: 92537 - DNA, 80 bp, synthetic construct
  source 1..80: mol_type = other DNA
actatgtgccaagcactgttcaaggtacctgagattgttcagtgaacatggagtttatattactttcatgtcaataaata

SEQ ID NO: 92538 - DNA, 80 bp, synthetic construct
  source 1..80: mol_type = other DNA
tagttcatcactctcttttttcccctattagaatatcagcacatgtttgagtttggcttctcaatgagacttctagttcc

SEQ ID NO: 92539 - DNA, 80 bp, synthetic construct; identical to SEQ ID NO: 17129
  source 1..80: mol_type = other DNA

SEQ ID NO: 92540 - DNA, 80 bp, synthetic construct
  source 1..80: mol_type = other DNA
ttaaaccttcaaatgtggtgagaccatcaacaggcctgaccttcatttgcttccattttttcctcttatctcccaatctc

SEQ ID NO: 92541 - DNA, 80 bp, synthetic construct
  source 1..80: mol_type = other DNA
ttttccaatccaaaaccaataggctgtcagaaccaagagcaaaaacaaagcaagggaggaaggcttaggagaaagatgct

SEQ ID NO: 92542 - DNA, 80 bp, synthetic construct
  source 1..80: mol_type = other DNA
agacccagaggaggaaagaatggaaggtggcattggaagtagatagattatggaagcaatgatttttataatgaaacatt

SEQ ID NO: 92543 - DNA, 80 bp, synthetic construct; identical to SEQ ID NO: 17130
  source 1..80: mol_type = other DNA

SEQ ID NO: 92544 - DNA, 80 bp, synthetic construct
  source 1..80: mol_type = other DNA
ggcttctagggggaggaatgtttcttgtgaatagaaggtcttctttatagttgagcacatgagtgtggtcagtcagcttc

SEQ ID NO: 92545 - DNA, 80 bp, synthetic construct
  source 1..80: mol_type = other DNA
ttcacgccattctcctgcttcagcctcccaagtagctaggactacaggtgcccaccaccacgcctggctaattttttgta

SEQ ID NO: 92546 - DNA, 80 bp, synthetic construct; identical to SEQ ID NO: 17131
  source 1..80: mol_type = other DNA

SEQ ID NO: 92547 - DNA, 80 bp, synthetic construct
  source 1..80: mol_type = other DNA
cttggggctcttattgaatatgcaggcctttctgttcagcatattcagcaactcagagcctcatagtagaacaattggag

SEQ ID NO: 92548 - DNA, 80 bp, synthetic construct
  source 1..80: mol_type = other DNA
tacaatctgggtggggttgtctcactgtatgagccctcattatgttatacttaaaaagcataatatactgtaacctgagg

SEQ ID NO: 92549 - DNA, 80 bp, synthetic construct
  source 1..80: mol_type = other DNA
cccggttctcttaacagaagctatatcacaaagggccccaggctcattggaaggatcccagtttggtttgctcatttctt

SEQ ID NO: 92550 - DNA, 80 bp, synthetic construct; identical to SEQ ID NO: 17132
  source 1..80: mol_type = other DNA

SEQ ID NO: 92551 - DNA, 80 bp, synthetic construct
  source 1..80: mol_type = other DNA
gaaagaattcagggcgagttcatagactaaagcaaaagtaagtttattaagaaagtaaaggaataaagaatggctactcc

SEQ ID NO: 92552 - DNA, 80 bp, synthetic construct
  source 1..80: mol_type = other DNA
aggaatgtagcagtgaggatgaccagaggtcactgttgtcgccatcttggttttggtgggttttagccagcttctttact

SEQ ID NO: 92553 - DNA, 80 bp, synthetic construct
  source 1..80: mol_type = other DNA
acacctctgacagccccataagaattcctaagaaaaaggggaagccatggtgttctaagcagagggtgatggactcacca

SEQ ID NO: 92554 - DNA, 80 bp, synthetic construct; identical to SEQ ID NO: 17133
  source 1..80: mol_type = other DNA

SEQ ID NO: 92555 - DNA, 80 bp, synthetic construct
  source 1..80: mol_type = other DNA
atattacaaagcaccttctcaagggtggggagggtgtattgtcaaaaagtcaattgatcagttacggtgggacaggaaca

SEQ ID NO: 92556 - DNA, 80 bp, synthetic construct
  source 1..80: mol_type = other DNA
atattaataagaaaaacaaaacaaaatagtggtgaagtgttggggcggcaaaaattttggggggtgctatggagatataa

SEQ ID NO: 92557 - DNA, 80 bp, synthetic construct
  source 1..80: mol_type = other DNA
tgcggttttgtatgaattgagaaactaaatggaacacacaaggtccaaataaaagatgaagaaaaataggtattaaaggg

SEQ ID NO: 92558 - DNA, 80 bp, synthetic construct
  source 1..80: mol_type = other DNA
ttaaaaatatacagagtcctcctttttcagcagtgagtaaatcaaggccttggcagttccggaggacaactgcagctaaa

SEQ ID NO: 92559 - DNA, 80 bp, synthetic construct; identical to SEQ ID NO: 17134
  source 1..80: mol_type = other DNA

SEQ ID NO: 92560 - DNA, 80 bp, synthetic construct
  source 1..80: mol_type = other DNA
cattagaggttataatggggattgatggtgcaactgcatagagggagaggtttggttttcgtggtatatgagaaagtgca

SEQ ID NO: 92561 - DNA, 80 bp, synthetic construct
  source 1..80: mol_type = other DNA
ttttagtttgttaataatgatagagggcttatcagtaatgtgaagttggaacgctcccatctctttgataatgtgtgtgg

SEQ ID NO: 92562 - DNA, 80 bp, synthetic construct
  source 1..80: mol_type = other DNA
attgacataaggagaaaggtgccgtaaatagacgtggagaagtgtggcagcttgttggtgcaaaatatctggggagttct

SEQ ID NO: 92563 - DNA, 80 bp, synthetic construct; identical to SEQ ID NO: 17135
  source 1..80: mol_type = other DNA

SEQ ID NO: 92564 - DNA, 80 bp, synthetic construct
  source 1..80: mol_type = other DNA
ccacttcaagagagacttaggggtggcggtttgaggtaaaaccaggagatatcagttatgatggtttggaggaaaagtgt

SEQ ID NO: 92565 - DNA, 80 bp, synthetic construct
  source 1..80: mol_type = other DNA
gatgtattaggctcataagggttattactgctcttcagaaatgcgagtgagtttaagggaagtaggggagagtacttgca

SEQ ID NO: 92566 - DNA, 80 bp, synthetic construct; identical to SEQ ID NO: 17136
  source 1..80: mol_type = other DNA

SEQ ID NO: 92567 - DNA, 80 bp, synthetic construct
  source 1..80: mol_type = other DNA
tctgagaagggcaagaggtaaaagtactgcccagtcctttttaaattggaggctgagcttggtgaggtgtgtctttaaaa

SEQ ID NO: 92568 - DNA, 80 bp, synthetic construct
  source 1..80: mol_type = other DNA
tatgtcttacagaagggaagaaattaccatggtggccttctcagaccctgtgggaaagacctctacccatccagtgaaag

SEQ ID NO: 92569 - DNA, 80 bp, synthetic construct
  source 1..80: mol_type = other DNA
gaatagcagatggaacactgagaagtgatttccttgaggatagatttccatgaaagaaaggaaatgagatattctaagag

SEQ ID NO: 92570 - DNA, 80 bp, synthetic construct; identical to SEQ ID NO: 17137
  source 1..80: mol_type = other DNA

SEQ ID NO: 92571 - DNA, 80 bp, synthetic construct
  source 1..80: mol_type = other DNA
gcccatataacagcatggtggtgcaggatacggaaggcatatttagagtcagtataaatattgatgcgtagtccctttgc

SEQ ID NO: 92572 - DNA, 80 bp, synthetic construct
  source 1..80: mol_type = other DNA
agtgtgatcagggtgaggaacaagaaagaaggaaatatggggaaatggagtgaatggcaggtggatcagagagatacagt

SEQ ID NO: 92573 - DNA, 80 bp, synthetic construct
  source 1..80: mol_type = other DNA
ttggaagttatgagaactgtagagagtgagttgagcatagtttgtgattttgagggcctctaaaagtattagggtggcgg

SEQ ID NO: 92574 - DNA, 80 bp, synthetic construct
  source 1..80: mol_type = other DNA
agagctagtgtgggggcagtatttaaagctgtcttcaaggaacggaaagaggagtgggaaaaggatttaggatctatggg

SEQ ID NO: 92575 - DNA, 80 bp, synthetic construct; identical to SEQ ID NO: 17138
  source 1..80: mol_type = other DNA

SEQ ID NO: 92576 - DNA, 80 bp, synthetic construct
  source 1..80: mol_type = other DNA
aaggtgagaagtggaggcgtggaaagaaagtaagtcatgagaaagagcttggctaaagtaatgagggctgtcactgaagc

SEQ ID NO: 92577 - DNA, 80 bp, synthetic construct
  source 1..80: mol_type = other DNA
tgaggacaaaagaatgtatgggttgggcaccacaaggtggataggcaaaacaatttggttgataaggcacagatcctgaa

SEQ ID NO: 92578 - DNA, 80 bp, synthetic construct
  source 1..80: mol_type = other DNA
aagggtgattaggttttaatgggataataatgggtgtgtgattggttgccagggagggagtagaggtgtcccatacttgt

SEQ ID NO: 92579 - DNA, 80 bp, synthetic construct
  source 1..80: mol_type = other DNA
taaaaaggagtgcataaaagaatgttgtccaagttggcaccaaagtttgggagttttaagaggtttagaagcctggccgt

SEQ ID NO: 92580 - DNA, 80 bp, synthetic construct; identical to SEQ ID NO: 17139
  source 1..80: mol_type = other DNA

SEQ ID NO: 92581 - DNA, 80 bp, synthetic construct
  source 1..80: mol_type = other DNA
gccctggaggaatgcctggccactgcaatttaggcgttttgaagttcttgtgtggtggagatgtggctggggtttctctc

SEQ ID NO: 92582 - DNA, 80 bp, synthetic construct; identical to SEQ ID NO: 17140
  source 1..80: mol_type = other DNA

SEQ ID NO: 92583 - DNA, 80 bp, synthetic construct
  source 1..80: mol_type = other DNA
tagttccattggggatcttctcggggaactgctctaatgccttcctggaggcctggctcatgaagccggtggttgtcagt

SEQ ID NO: 92584 - DNA, 80 bp, synthetic construct
  source 1..80: mol_type = other DNA
tggctgatttcagaaagcattcagagaaaaaggcacatgtaccctgactatgccttcagctccagccacctctctaagag

SEQ ID NO: 92585 - DNA, 80 bp, synthetic construct
  source 1..80: mol_type = other DNA
agcagtctggggaggaggtgacaggtcagatgggtcggtagaaaaggaagattcagaagactcagcgatgcttggggttg

SEQ ID NO: 92586 - DNA, 80 bp, synthetic construct
  source 1..80: mol_type = other DNA
ggagaaatcaaaaatgccattttctggccatttagagccattatcaagtttgtgctggggccaagtggtattgcagaaga

SEQ ID NO: 92587 - DNA, 80 bp, synthetic construct; identical to SEQ ID NO: 17141
  source 1..80: mol_type = other DNA

SEQ ID NO: 92588 - DNA, 80 bp, synthetic construct
  source 1..80: mol_type = other DNA
agaaaaagaaaggaaccaaaattaaggaagaaagagattgaagggtggaaggatggtgagagagattggagaagagaatg

SEQ ID NO: 92589 - DNA, 80 bp, synthetic construct
  source 1..80: mol_type = other DNA
catgcacgtccgtgtgaggagaccaccaaacaggctttgtgtgagcaataaagctttttaatcacctgggtgcaggcggg

SEQ ID NO: 92590 - DNA, 80 bp, synthetic construct
  source 1..80: mol_type = other DNA
cattcttaagggcggggagaatattacaaagtaccttcttaagggtgggggaatatcacaaagtacattatcacaagggt

SEQ ID NO: 92591 - DNA, 80 bp, synthetic construct; identical to SEQ ID NO: 17142
  source 1..80: mol_type = other DNA

SEQ ID NO: 92592 - DNA, 80 bp, synthetic construct
  source 1..80: mol_type = other DNA
attcctctcaaatggatgtttccttcttcctgagcctactgcctctgcaagagtgggaggcctagcctttccaaacctgg

SEQ ID NO: 92593 - DNA, 80 bp, synthetic construct
  source 1..80: mol_type = other DNA
ttctgacctaacttacctgttgccttgtctcctttttccccaaaatcttcctaccttccctgtacatctgatgctttagc

SEQ ID NO: 92594 - DNA, 80 bp, synthetic construct
  source 1..80: mol_type = other DNA
gtacagcaaatcaatacaccaagatactgggatgcagcagagataagagatttaatcatagagttgcccagaaaagagat

SEQ ID NO: 92595 - DNA, 80 bp, synthetic construct
  source 1..80: mol_type = other DNA
acagggaactgaagaaactgtattcttatgctaattccatttctttgtgggagtcttcaaactggctggcatcagctatt

SEQ ID NO: 92596 - DNA, 80 bp, synthetic construct; identical to SEQ ID NO: 17143
  source 1..80: mol_type = other DNA

SEQ ID NO: 92597 - DNA, 80 bp, synthetic construct
  source 1..80: mol_type = other DNA
tagtacctggcccatggtggatgctcaagggatgatgaaaggagaggtcacatgttatatgctcccatttttgtgaaatt

SEQ ID NO: 92598 - DNA, 80 bp, synthetic construct
  source 1..80: mol_type = other DNA
gatagtggcgatggttgcccaatattgtgaatatactaaaaacaatggaattgtatactttaaaatggttacaatggtga

SEQ ID NO: 92599 - DNA, 80 bp, synthetic construct
  source 1..80: mol_type = other DNA
actaaattgtttatcttaccttgcaaggaatcaggagaaagagagagataacaagcaaatccccaaacaagccagtgtta

SEQ ID NO: 92600 - DNA, 80 bp, synthetic construct; identical to SEQ ID NO: 17144
  source 1..80: mol_type = other DNA

SEQ ID NO: 92601 - DNA, 80 bp, synthetic construct
  source 1..80: mol_type = other DNA
ttttatcccagaccctttttgtcattcttcagctactcccccatgtggaactattataatctaaatgaaagtgtttactc

SEQ ID NO: 92602 - DNA, 80 bp, synthetic construct
  source 1..80: mol_type = other DNA
tgtctaccttgctagagaccaaacttggactaatccctgcaaaagaaaaaccagcaaggagaaaaggcatcattaggaat

SEQ ID NO: 92603 - DNA, 80 bp, synthetic construct
  source 1..80: mol_type = other DNA
gctcttctgacctgttggttatttctgcaggataaggagagagaatgtgttgagctttctctgagtgaggcttgtgcctg

SEQ ID NO: 92604 - DNA, 80 bp, synthetic construct; identical to SEQ ID NO: 17145
  source 1..80: mol_type = other DNA

SEQ ID NO: 92605 - DNA, 80 bp, synthetic construct
  source 1..80: mol_type = other DNA
atttcaaccccattatagacacatgatgttattatttgtggtaagccaacattttcatggcacatgcgatgttgccagtg

SEQ ID NO: 92606 - DNA, 80 bp, synthetic construct
  source 1..80: mol_type = other DNA
taagataaacccctccccgaccaaggacatgccagcgccaagataacctcccctttgaccggagaaatgtcagccccaag

SEQ ID NO: 92607 - DNA, 80 bp, synthetic construct
  source 1..80: mol_type = other DNA
tcaggtttattctccgaaataaacctatctctgactgttgagctgctttttttgtatttcttgtcttctttctttaattc

SEQ ID NO: 92608 - DNA, 80 bp, synthetic construct; identical to SEQ ID NO: 17146
  source 1..80: mol_type = other DNA

SEQ ID NO: 92609 - DNA, 80 bp, synthetic construct
  source 1..80: mol_type = other DNA
gattacatggactattttcatatgtttgtgaactggccatttgggccagattaaggggtcaggcattggtggggaaggga

SEQ ID NO: 92610 - DNA, 80 bp, synthetic construct
  source 1..80: mol_type = other DNA
gcttcaactactcttcctttgtcaacatagcgaaggaaatgccagaacaccattggctctcccaggcagagtgtttctgc

SEQ ID NO: 92611 - DNA, 80 bp, synthetic construct; identical to SEQ ID NO: 17147
  source 1..80: mol_type = other DNA

SEQ ID NO: 92612 - DNA, 80 bp, synthetic construct
  source 1..80: mol_type = other DNA
attattttaaaattgcattggagagactcagcaaattctgagtataagttggatgcctgctgacttgggcccagacaaaa

SEQ ID NO: 92613 - DNA, 80 bp, synthetic construct
  source 1..80: mol_type = other DNA
tctggaataaaagccttctgccaggcatacccctttggtcaatccatcaccaagtctataatcaacactaaagtggtcct

SEQ ID NO: 92614 - DNA, 80 bp, synthetic construct
  source 1..80: mol_type = other DNA
cctgatccaaaatcattattcatcatcaaaataaaattccagagggccagcttgttctggcatggcaaggacagtcagat

SEQ ID NO: 92615 - DNA, 80 bp, synthetic construct
  source 1..80: mol_type = other DNA
agaaagaaaagctacactttccagagtcctggagtggacattggctatttcttcccacccagactccattgcccttgagg

SEQ ID NO: 92616 - DNA, 80 bp, synthetic construct; identical to SEQ ID NO: 17148
  source 1..80: mol_type = other DNA

SEQ ID NO: 92617 - DNA, 80 bp, synthetic construct
  source 1..80: mol_type = other DNA
tacaaacaccacctctagctccaaaacactttcatcacccccgaataaaaccctgtgctcatttagcggttactccctat

SEQ ID NO: 92618 - DNA, 80 bp, synthetic construct
  source 1..80: mol_type = other DNA
cattctcgggttgctataaagaaatagccaagactgggtaatttataaagaaaagaggtttaagtggctcacggttccac

SEQ ID NO: 92619 - DNA, 80 bp, synthetic construct; identical to SEQ ID NO: 17149
  source 1..80: mol_type = other DNA

SEQ ID NO: 92620 - DNA, 80 bp, synthetic construct
  source 1..80: mol_type = other DNA
cactctcacccaggctggagcgcagtggggtgatcatagcttgcctaatttaaaaaaacttttctttgtagagacaaggg

SEQ ID NO: 92621 - DNA, 80 bp, synthetic construct
  source 1..80: mol_type = other DNA
tccacctctgggctattgtgaacagcactgctattagaattcatatacgagtatttgtctgaacacctgttttcactttt

SEQ ID NO: 92622 - DNA, 80 bp, synthetic construct; identical to SEQ ID NO: 17150
  source 1..80: mol_type = other DNA

SEQ ID NO: 92623 - DNA, 80 bp, synthetic construct
  source 1..80: mol_type = other DNA
tgggctgaatttcgggtaggggcaaggctgtgggatggtctgtctctccatagatccaggcctttggatggccttttcca

SEQ ID NO: 92624 - DNA, 80 bp, synthetic construct
  source 1..80: mol_type = other DNA
ggactagtgcccttataaaagaggccccagagagtgaccttgcctcttccaccatgtgagaaggtgccacctatgacaat

SEQ ID NO: 92625 - DNA, 80 bp, synthetic construct
  source 1..80: mol_type = other DNA
gaaagagaaccaaggccaggacacttgtacttcacctaccacctatccagtatatggcattgaggaagtcactttctgtc

SEQ ID NO: 92626 - DNA, 80 bp, synthetic construct; identical to SEQ ID NO: 17151
  source 1..80: mol_type = other DNA

SEQ ID NO: 92627 - DNA, 80 bp, synthetic construct
  source 1..80: mol_type = other DNA
ttggactccgcaggattgccttggctaggcagcttcctgtttaaatgcagggcctggagacaccaatttcgtctacacca

SEQ ID NO: 92628 - DNA, 80 bp, synthetic construct
  source 1..80: mol_type = other DNA
ctatcatgaggcttgccctctactacatacacctaagagtgcccctctgtaatatttcatcattttaatcaaatgttcac

SEQ ID NO: 92629 - DNA, 80 bp, synthetic construct
  source 1..80: mol_type = other DNA
caacctcctaattgcaatttcaagaggagtctcagtaccaaaactttgatgttcattcacatgggaaatctaatgctctt

SEQ ID NO: 92630 - DNA, 80 bp, synthetic construct; identical to SEQ ID NO: 17152
  source 1..80: mol_type = other DNA

SEQ ID NO: 92631 - DNA, 80 bp, synthetic construct
  source 1..80: mol_type = other DNA
agtggcgttcctgctttttaagtgctgctgatgttggcaaggggaggaaggcaacggatgaggatgggataggggcagga

SEQ ID NO: 92632 - DNA, 80 bp, synthetic construct
  source 1..80: mol_type = other DNA
agggtatgtggtcttctctgtagaaggtggcacaaagcaggcacacagtgccacaaaaaggcctcgctcttgattgactc

SEQ ID NO: 92633 - DNA, 80 bp, synthetic construct
  source 1..80: mol_type = other DNA
ggggacatccatccatcaatccagtcagaccagggcaggctcttccttgggccccttctgttctgtcccttaggccagga

SEQ ID NO: 92634 - DNA, 80 bp, synthetic construct; identical to SEQ ID NO: 17153
  source 1..80: mol_type = other DNA

SEQ ID NO: 92635 - DNA, 80 bp, synthetic construct
  source 1..80: mol_type = other DNA
cctagagcgtggtaggggcagggtgcctcagtgggacagatgtgtagaagtccaaccttcttgacttccttgctttgctg

SEQ ID NO: 92636 - DNA, 80 bp, synthetic construct
  source 1..80: mol_type = other DNA
aatagaaggtattatcattaagaggcaattaggggacgtcatgtcgctcaatacagcgcaaggcagcagccagagcccca

SEQ ID NO: 92637 - DNA, 80 bp, synthetic construct; identical to SEQ ID NO: 17154
  source 1..80: mol_type = other DNA

SEQ ID NO: 92638 - DNA, 80 bp, synthetic construct
  source 1..80: mol_type = other DNA
accagcctggccaacatggtgaaaccgtgtctctactaaaaatacaaaaacttagccaggagtggtggcaggtgcctata

SEQ ID NO: 92639 - DNA, 80 bp, synthetic construct
  source 1..80: mol_type = other DNA
catcaccacaattttagaacattatcacccccaaaaagaattttatatcctttagctgtcacctgtccatctccccaaca

SEQ ID NO: 92640 - DNA, 80 bp, synthetic construct
  source 1..80: mol_type = other DNA
gatatactacgttttgtttatcggttcatcagttactgggcaggcatgtgggttatttctaccttttgactaccatgagc

SEQ ID NO: 92641 - DNA, 80 bp, synthetic construct; identical to SEQ ID NO: 17155
  source 1..80: mol_type = other DNA

SEQ ID NO: 92642 - DNA, 80 bp, synthetic construct
  source 1..80: mol_type = other DNA
aaaactcaataaactacacacaaagtgtacaatttcatgagttttggtgtgtgtgtatatacacacgaaaccatcaccac

SEQ ID NO: 92643 - DNA, 80 bp, synthetic construct
  source 1..80: mol_type = other DNA
gtgtcgcttttaaaatttggcataattgttttgaggtttatccatattgttgcttatattagtagttcatttctttttat

SEQ ID NO: 92644 - DNA, 80 bp, synthetic construct
  source 1..80: mol_type = other DNA
actcccaccagcagtatataaaagtactatcgattgcagtttttttccaacacttggaatggcccatcttttaaattgta

SEQ ID NO: 92645 - DNA, 80 bp, synthetic construct; identical to SEQ ID NO: 17156
  source 1..80: mol_type = other DNA

SEQ ID NO: 92646 - DNA, 80 bp, synthetic construct
  source 1..80: mol_type = other DNA
cgggagttaaagaccagcctgaccaacatggagaaacttcgtctctactgaaaatacaaaattagccaggtgtggtggcg

SEQ ID NO: 92647 - DNA, 80 bp, synthetic construct
  source 1..80: mol_type = other DNA
ttgactgatacagcaagaattttctcctggggccacttgctgggatcatggagatccttattaatacatggtatcagcag

SEQ ID NO: 92648 - DNA, 80 bp, synthetic construct
  source 1..80: mol_type = other DNA
cttttcctcacccattgctaggttcacagctgaggtcccgataacaaaagatagatcaacaagagatctatcagatcaac

SEQ ID NO: 92649 - DNA, 80 bp, synthetic construct; identical to SEQ ID NO: 17157
  source 1..80: mol_type = other DNA

SEQ ID NO: 92650 - DNA, 80 bp, synthetic construct
  source 1..80: mol_type = other DNA
tttcctagatcagatggcctgcttcaggggagaagaggggaaggtgaaagtgatcttcctacttccactgttttgcaaat

SEQ ID NO: 92651 - DNA, 80 bp, synthetic construct
  source 1..80: mol_type = other DNA
aactttttccaggaacacacccacagatgagaaatagctagaccaatgttgttgatgccaaaagccaagaattagtggtg

SEQ ID NO: 92652 - DNA, 80 bp, synthetic construct
  source 1..80: mol_type = other DNA
aggctcatctccttgcctctagactcttatctttaagcattgctgcacagtatgggccagattcattctcttctgttaca

SEQ ID NO: 92653 - DNA, 80 bp, synthetic construct
  source 1..80: mol_type = other DNA
aaatgagcctgaccaacatggtgaaaccctgcctctactaaaaatacaaaaaaattaaccaggcatggtggcaggcacct

SEQ ID NO: 92654 - DNA, 80 bp, synthetic construct; identical to SEQ ID NO: 17158
  source 1..80: mol_type = other DNA

SEQ ID NO: 92655 - DNA, 80 bp, synthetic construct
  source 1..80: mol_type = other DNA
gaagtgttaccaacaattatggccgacttcaccatcttctgttccttagggttaatcagaggttttattttagaacttgc

SEQ ID NO: 92656 - DNA, 80 bp, synthetic construct
  source 1..80: mol_type = other DNA
gttctaactcaaacagcaaaagtctggactcccagaaactctgtttgtagatgccaacatggggattcagagagcccagg

SEQ ID NO: 92657 - DNA, 80 bp, synthetic construct; identical to SEQ ID NO: 17159
  source 1..80: mol_type = other DNA

SEQ ID NO: 92658 - DNA, 80 bp, synthetic construct
  source 1..80: mol_type = other DNA
atatgatatgtggccttgtgtttctaggctttttcactgggccctttcattttaatgctgcacttgtggtagctcatctg

SEQ ID NO: 92659 - DNA, 80 bp, synthetic construct
  source 1..80: mol_type = other DNA
cctgccccagtgctttaagtttgacccctagccttgaattgcctctatttcatgaggtctatctgtcttcttgcttttct

SEQ ID NO: 92660 - DNA, 80 bp, synthetic construct
  source 1..80: mol_type = other DNA
cagctgaattccagcccctgctctcccgtctccaggtcagaacatcagcatttgaacttgagtacttcccccatgcctgt

SEQ ID NO: 92661 - DNA, 80 bp, synthetic construct; identical to SEQ ID NO: 17160
  source 1..80: mol_type = other DNA

SEQ ID NO: 92662 - DNA, 80 bp, synthetic construct
  source 1..80: mol_type = other DNA
ttgtaagagatttgaacattactttctgctctcaagggacccccctctatcaagtccaattttctgtccctgcctttacc

SEQ ID NO: 92663 - DNA, 80 bp, synthetic construct
  source 1..80: mol_type = other DNA
caggctgtagtgcagtggcacaatctcggctcactgcaacctccgctgcccgtgttcaagcgattctcctgcctcagcct

SEQ ID NO: 92664 - DNA, 80 bp, synthetic construct
  source 1..80: mol_type = other DNA
agccacagcgcccggccgccatttgagaataaaaacactgcactttataatgctagcactgtttccacccaaatctgcca

SEQ ID NO: 92665 - DNA, 80 bp, synthetic construct; identical to SEQ ID NO: 17161
  source 1..80: mol_type = other DNA

SEQ ID NO: 92666 - DNA, 80 bp, synthetic construct
  source 1..80: mol_type = other DNA
gcattggcttggggtctcatgccctctggcttgttccttaggctttcataggcctacataagtgactgatgtatttcctc

SEQ ID NO: 92667 - DNA, 80 bp, synthetic construct
  source 1..80: mol_type = other DNA
tcccctcttgccaccttaccctgaatgtgatctgagatccaacagtttctttcctggccattttatttgttcaaattgtt

SEQ ID NO: 92668 - DNA, 80 bp, synthetic construct; identical to SEQ ID NO: 17162
  source 1..80: mol_type = other DNA

SEQ ID NO: 92669 - DNA, 80 bp, synthetic construct
  source 1..80: mol_type = other DNA
agtttaggcacaacttctacataatcgggctcaagttatttgttgttgtcatgagaaaaattttcctgggtgtctatagc

SEQ ID NO: 92670 - DNA, 80 bp, synthetic construct
  source 1..80: mol_type = other DNA
cttaattgtggatataggccaggcttggtggctcacgcctgtaatcccagccctttggaaggccaagacaggtggatcac

SEQ ID NO: 92671 - DNA, 80 bp, synthetic construct
  source 1..80: mol_type = other DNA
agtgggctgagattgagccactgcactccagcctgggtgacagagcaagactccatctcaaaacaaaacaaaacaaaatt

SEQ ID NO: 92672 - DNA, 80 bp, synthetic construct; identical to SEQ ID NO: 17163
  source 1..80: mol_type = other DNA

SEQ ID NO: 92673 - DNA, 80 bp, synthetic construct
  source 1..80: mol_type = other DNA
ctttgggtttcattatggtagtatcccacttccaggtatctaagtctatgtcaagtattaattgctgagcaataaaccat

SEQ ID NO: 92674 - DNA, 80 bp, synthetic construct
  source 1..80: mol_type = other DNA
gcagctggtcctggctgtggactggagccttagctggggccttagccagcaaatctatacctaccttccccatgtggcct

SEQ ID NO: 92675 - DNA, 80 bp, synthetic construct
  source 1..80: mol_type = other DNA
cagtgttctagaagaacacgtgggaccaagatgtggccattttgagaaattgtaatctgtcacaattttgtacaggtctg

SEQ ID NO: 92676 - DNA, 80 bp, synthetic construct; identical to SEQ ID NO: 17164
  source 1..80: mol_type = other DNA

SEQ ID NO: 92677 - DNA, 80 bp, synthetic construct
  source 1..80: mol_type = other DNA
tgggcacctgtagtcccagctactcagggggctgaggcaggagaatagcttgaacccagaaggtggaggttgcagtgagc

SEQ ID NO: 92678 - DNA, 80 bp, synthetic construct
  source 1..80: mol_type = other DNA
caggagttcaagaccttgctatgcgcaacatagcaagacccagtctctatgaaaaagttttaaaaattagccaggtggta

SEQ ID NO: 92679 - DNA, 80 bp, synthetic construct
  source 1..80: mol_type = other DNA
catgtgatcacagaaggcagagaagagggaacccgacatctcagtctttcaggaaacattaagtgacagaaaatgtgaac

SEQ ID NO: 92680 - DNA, 80 bp, synthetic construct
  source 1..80: mol_type = other DNA
gtgtaaatcaatcattttgtttttacacatggtcccatatgcacgcaaaataaggaagtctttatccactgaacatattg

SEQ ID NO: 92681 - DNA, 80 bp, synthetic construct; identical to SEQ ID NO: 17165
  source 1..80: mol_type = other DNA

SEQ ID NO: 92682 - DNA, 80 bp, synthetic construct
  source 1..80: mol_type = other DNA
cacagaagacatcctttattctaaaaagtggtctcctaaggagtctgccacctccagttctgacatcacagggagatgag

SEQ ID NO: 92683 - DNA, 80 bp, synthetic construct
  source 1..80: mol_type = other DNA
ctcacatgatctgacagaaatatccagtgggcatttctagaggtggtcaggctccagcctctttaagcgcccaggtctgt

SEQ ID NO: 92684 - DNA, 80 bp, synthetic construct; identical to SEQ ID NO: 17166
  source 1..80: mol_type = other DNA

SEQ ID NO: 92685 - DNA, 80 bp, synthetic construct
  source 1..80: mol_type = other DNA
aaccagatttggaaatgcaagacctggggacaggccccaactcccctcttactagctatgtaactggggcaaatccctta

SEQ ID NO: 92686 - DNA, 80 bp, synthetic construct
  source 1..80: mol_type = other DNA
cttgaggccaggagtttgagaccatcctggccaacatggtgaaaccctgtctctactaaaaatacaaaaattagccgggc

SEQ ID NO: 92687 - DNA, 80 bp, synthetic construct
  source 1..80: mol_type = other DNA
aatttggaacattgaacagatcaggttctgagtcctctgcaggatcttgaagacagaattgactattctcagttgacccc

SEQ ID NO: 92688 - DNA, 80 bp, synthetic construct; identical to SEQ ID NO: 17167
  source 1..80: mol_type = other DNA

SEQ ID NO: 92689 - DNA, 80 bp, synthetic construct
  source 1..80: mol_type = other DNA
gaagttacttgacccttctcctgtgggtgtctgcactcccaatgcagaatggaaggcattggtcccaagttgaggaccat

SEQ ID NO: 92690 - DNA, 80 bp, synthetic construct
  source 1..80: mol_type = other DNA
aaataaacaaatatagagaagtgtcatctcctccaccactataaaaatggggagccacccagccccccagggctcatctg

SEQ ID NO: 92691 - DNA, 80 bp, synthetic construct
  source 1..80: mol_type = other DNA
ctctccccaccaccaaacttgaaaaaaaaaatagttctaatctgatccttgggctgtgtttaaaatgcaaattcccctgg

SEQ ID NO: 92692 - DNA, 80 bp, synthetic construct
  source 1..80: mol_type = other DNA
gattagacactaaagtatattttctcatgttggtctcacaataactatgtagagttgggcttatccttattgtataaacg

SEQ ID NO: 92693 - DNA, 80 bp, synthetic construct; identical to SEQ ID NO: 17168
  source 1..80: mol_type = other DNA

SEQ ID NO: 92694 - DNA, 80 bp, synthetic construct
  source 1..80: mol_type = other DNA
tctgactcagtaggtccaaagggaagggtcaaatttgcaatttacacaatatcccaggcgatgctaaccctgctgatctg

SEQ ID NO: 92695 - DNA, 80 bp, synthetic construct
  source 1..80: mol_type = other DNA
gctgtaataaagagaccctacaataaatcagtggcttaaagaagatcaaagtttctcccttaggtgacagtctgcagtgg

SEQ ID NO: 92696 - DNA, 80 bp, synthetic construct
  source 1..80: mol_type = other DNA
ccaaaaaggactagtaggtatggcgtaaaaagtttccatccccatgcctcagtctaggacatcttggaagggccatccca

SEQ ID NO: 92697 - DNA, 80 bp, synthetic construct; identical to SEQ ID NO: 17169
  source 1..80: mol_type = other DNA

SEQ ID NO: 92698 - DNA, 80 bp, synthetic construct
  source 1..80: mol_type = other DNA
agaggaaacacactgtgccttaagacatcggcctggaagtggcacacatcgcttctaccacttcactgtttcttaaaaca

SEQ ID NO: 92699 - DNA, 80 bp, synthetic construct
  source 1..80: mol_type = other DNA
catggcaacctctgaataagaatttgtgtagccctgagaatctgtaccacaaagctcgttagatagggccgcaggtgtga

SEQ ID NO: 92700 - DNA, 80 bp, synthetic construct; identical to SEQ ID NO: 17170
  source 1..80: mol_type = other DNA

SEQ ID NO: 92701 - DNA, 80 bp, synthetic construct
  source 1..80: mol_type = other DNA
cttattgcacccggatagggcagacaatccttggctgtcacggaagtcttgtcaaaggcccaagcaaagggtcacatcat

SEQ ID NO: 92702 - DNA, 80 bp, synthetic construct
  source 1..80: mol_type = other DNA
tttgggccaattcacttaatgtttattaccctaaacctcaaatgtgcaggcaacaccatggggcagtttttgccttgcat

SEQ ID NO: 92703 - DNA, 80 bp, synthetic construct
  source 1..80: mol_type = other DNA
tgcacctcaccccagtctctagtttctgtctaaggccaacccctcctcttggtctataaatcttatccccaagtcctgag

SEQ ID NO: 92704 - DNA, 80 bp, synthetic construct; identical to SEQ ID NO: 17171
  source 1..80: mol_type = other DNA

SEQ ID NO: 92705 - DNA, 80 bp, synthetic construct
  source 1..80: mol_type = other DNA
gtgtcccggtgtcccttctggggaagggaagggaggcaccagctgggtgaggagggagtgctctcgcagaggagcccctc

SEQ ID NO: 92706 - DNA, 80 bp, synthetic construct
  source 1..80: mol_type = other DNA
gttccttggccagcatctgggagccaatttattcagccctgaggtttgttttgttaaggactttaaaatgtattaagaaa

SEQ ID NO: 92707 - DNA, 80 bp, synthetic construct
  source 1..80: mol_type = other DNA
tggccaaatagcctgggctgtagcaatctgagccaggaggggtgttcatggaggagggtgtgatggctcgtggctgtaat

SEQ ID NO: 92708 - DNA, 80 bp, synthetic construct; identical to SEQ ID NO: 17172
  source 1..80: mol_type = other DNA

SEQ ID NO: 92709 - DNA, 80 bp, synthetic construct
  source 1..80: mol_type = other DNA
tttttttttttttttttggcatggtctcaccgtgtcacccaggctggagtgtagtagtgtgatcatagctcactgcagcc

SEQ ID NO: 92710 - DNA, 80 bp, synthetic construct
  source 1..80: mol_type = other DNA
cctccaccttggcctcccaaagtactgggattacagatgtgagctactgtgcccagcctaatgtgactggtatttttaaa

SEQ ID NO: 92711 - DNA, 80 bp, synthetic construct
  source 1..80: mol_type = other DNA
ccatctctactaaaaatacaaaaattaaccgggcatggtggtgcatgcctgtaatcccaactactcaggaagctgaggca

SEQ ID NO: 92712 - DNA, 80 bp, synthetic construct
  source 1..80: mol_type = other DNA
tcatgcaggctaaagccagccatttgacagtggaggcagagatggcagcaacacatctctctgtaagccaaggaatgcca

SEQ ID NO: 92713 - DNA, 80 bp, synthetic construct; identical to SEQ ID NO: 17173
  source 1..80: mol_type = other DNA

SEQ ID NO: 92714 - DNA, 80 bp, synthetic construct
  source 1..80: mol_type = other DNA
gttaatagacctggaccctaatccaggctttcaatatgtgttctgcaaagccacattaagggccaaccctgggaaatcta

SEQ ID NO: 92715 - DNA, 80 bp, synthetic construct
  source 1..80: mol_type = other DNA
tagagaatatctgactctatgaatgttacatctgtgaatgctgaggctatggcaatgaatgaggtatcctgatacattcc

SEQ ID NO: 92716 - DNA, 80 bp, synthetic construct
  source 1..80: mol_type = other DNA
catgaaaactcagctctcccaaaaccacacctggctaatctgagaaacaaattcaggtcctcagtaatagtaacacgccc

SEQ ID NO: 92717 - DNA, 80 bp, synthetic construct; identical to SEQ ID NO: 17174
  source 1..80: mol_type = other DNA

SEQ ID NO: 92718 - DNA, 80 bp, synthetic construct
  source 1..80: mol_type = other DNA
caaaatcataatccttgagaattttaggcaatgtgacgtgccatggttggaaaccattggagaggcaagtccttctaggg

SEQ ID NO: 92719 - DNA, 80 bp, synthetic construct
  source 1..80: mol_type = other DNA
catggcatttgagatgaggtgcttttcccaattaattctaacctgtcagttttgatttttttcctttgaagcccaaataa

SEQ ID NO: 92720 - DNA, 80 bp, synthetic construct
  source 1..80: mol_type = other DNA
ggaaagtaatgcagctattacaatgccaacgtatttattaacatgaaaaggtgtttatactacattgtggagtaacaaaa

SEQ ID NO: 92721 - DNA, 80 bp, synthetic construct; identical to SEQ ID NO: 17175
  source 1..80: mol_type = other DNA

SEQ ID NO: 92722 - DNA, 80 bp, synthetic construct
  source 1..80: mol_type = other DNA
ctcagcctcccaagtagctgggattacaggcacctgccaccacacccagctaattttctgtatttttaatagagacggag

SEQ ID NO: 92723 - DNA, 80 bp, synthetic construct
  source 1..80: mol_type = other DNA
tgtacatatttatggggtacaatgtgatgttctaatacatgtatacattgtgtaaaattcaaatcagggtaattagcgta

SEQ ID NO: 92724 - DNA, 80 bp, synthetic construct; identical to SEQ ID NO: 17176
  source 1..80: mol_type = other DNA

SEQ ID NO: 92725 - DNA, 80 bp, synthetic construct
  source 1..80: mol_type = other DNA
tcattctaactatttttttctgtacccattaatcatcctgatctatcccctatacccgcaccactagccttcccagcctc

SEQ ID NO: 92726 - DNA, 80 bp, synthetic construct
  source 1..80: mol_type = other DNA
gacaggattaattctttttttatgactgaatagtactccactgtgtatatgtagcatattttcttcatctattcatctgt

SEQ ID NO: 92727 - DNA, 80 bp, synthetic construct; identical to SEQ ID NO: 17177
  source 1..80: mol_type = other DNA

SEQ ID NO: 92728 - DNA, 80 bp, synthetic construct
  source 1..80: mol_type = other DNA
cactgcaacctccacctcctgggttcaatgattctcctgcctcagcctcccaagtagctgggattataggtgcccaccac

SEQ ID NO: 92729 - DNA, 80 bp, synthetic construct
  source 1..80: mol_type = other DNA
atttgcatttctctgatgatcagtgatggggaacaccttttcatatgcctgtttgctattgtatgtcttcttttgagaaa

SEQ ID NO: 92730 - DNA, 80 bp, synthetic construct
  source 1..80: mol_type = other DNA
attgtttccttcactatgcagaagctttttaacttgatgtgatcccatttgtccatttttgatttggttgcctatgcttg

SEQ ID NO: 92731 - DNA, 80 bp, synthetic construct
  source 1..80: mol_type = other DNA
gcatatagatattcagttttcccagcaccatttattgaagagactgtcttttccccagtatatgttcttggcacctttgt

SEQ ID NO: 92732 - DNA, 80 bp, synthetic construct; identical to SEQ ID NO: 17178
  source 1..80: mol_type = other DNA

SEQ ID NO: 92733 - DNA, 80 bp, synthetic construct
  source 1..80: mol_type = other DNA
attgtagagatttttcatttctttggttaattcctagctacttaattttatttgtggctactttaatggaattttttttt

SEQ ID NO: 92734 - DNA, 80 bp, synthetic construct
  source 1..80: mol_type = other DNA
acataaagatagtttgacttcttcctttccagcctgggtgccctttatttcttcctcttgtctgattgctctagctagga

SEQ ID NO: 92735 - DNA, 80 bp, synthetic construct
  source 1..80: mol_type = other DNA
ccctgcccctgcctccctcatcccctcccaaacttctagtggtcactattctactgtctacttctatgagatcaacttct

SEQ ID NO: 92736 - DNA, 80 bp, synthetic construct
  source 1..80: mol_type = other DNA
attttcttcatccatttatccattgatggacacttaggttggttccatatcttggctattgcgagtagagctgcaatgaa

SEQ ID NO: 92737 - DNA, 80 bp, synthetic construct; identical to SEQ ID NO: 17179
  source 1..80: mol_type = other DNA

SEQ ID NO: 92738 - DNA, 80 bp, synthetic construct
  source 1..80: mol_type = other DNA
tgattttctctttagaaaaacttaaaacccacagaaaaattgcaagaatggtgtaccattacaatcaatacccaaatttc

SEQ ID NO: 92739 - DNA, 80 bp, synthetic construct
  source 1..80: mol_type = other DNA
cctaacactgtgctgaataaatgaatggctggagtggcagaaaggccagtccttaaagggcaaggggggtcatacagtgg

SEQ ID NO: 92740 - DNA, 80 bp, synthetic construct; identical to SEQ ID NO: 17180
  source 1..80: mol_type = other DNA

SEQ ID NO: 92741 - DNA, 80 bp, synthetic construct
  source 1..80: mol_type = other DNA
tttaaaagtgtgtggcacctctctgcccccctctcttcctctcgctctggccatgtgaactgctggcttccccttcccct

SEQ ID NO: 92742 - DNA, 80 bp, synthetic construct
  source 1..80: mol_type = other DNA
aatacagggagccactgaaaggagtaacgtgagcagttttgtgcattttattttattttattttattttattttatttta

SEQ ID NO: 92743 - DNA, 80 bp, synthetic construct
  source 1..80: mol_type = other DNA
atcacaggcaaatgtaaccatgtccagctaatttttgtgtagagatggggtctcagcatgttggccaggctggtcttgaa

SEQ ID NO: 92744 - DNA, 80 bp, synthetic construct
  source 1..80: mol_type = other DNA
aagttatggtccaggacaaagacaaggaggcctgaacaggtgagaggggccagaaggatgtagaatgagtagctcttgga

SEQ ID NO: 92745 - DNA, 80 bp, synthetic construct; identical to SEQ ID NO: 17181
  source 1..80: mol_type = other DNA

SEQ ID NO: 92746 - DNA, 80 bp, synthetic construct
  source 1..80: mol_type = other DNA
aggtgcagcccctgttcatgcctatgttccagcatatttattaattgttccctctttcacttttccagtttgagcaatat

SEQ ID NO: 92747 - DNA, 80 bp, synthetic construct
  source 1..80: mol_type = other DNA
tttgaacaataattaatacagtcaccctaaaaagggtagatcagtcactccctgtattcacctaacacttgccacccctg

SEQ ID NO: 92748 - DNA, 80 bp, synthetic construct
  source 1..80: mol_type = other DNA
ccaccgttcttcccttgctatctttcaggtagatggtgcctaagaaatatttacctgtcccgtggttgagagattcatag

SEQ ID NO: 92749 - DNA, 80 bp, synthetic construct; identical to SEQ ID NO: 17182
  source 1..80: mol_type = other DNA

SEQ ID NO: 92750 - DNA, 80 bp, synthetic construct
  source 1..80: mol_type = other DNA
cctgaccgtccttggacaagccctgtccacctccaccttctgctgttcccctccatgtggcctttgctccagccacattc

SEQ ID NO: 92751 - DNA, 80 bp, synthetic construct
  source 1..80: mol_type = other DNA
ctgaggtgggtggatcacaaggtcagaagatcgagaacatcttggccaacatggtgaaaccccatctctgctaaaaatac

SEQ ID NO: 92752 - DNA, 80 bp, synthetic construct
  source 1..80: mol_type = other DNA
aaaaaaaaaaaaaatctacccactcttcagagctgactcaaacatgacctggtgcctaggagactgtcctggattctccc

SEQ ID NO: 92753 - DNA, 80 bp, synthetic construct
  source 1..80: mol_type = other DNA
aattatggtgtgtacagacaacatgtggaatgaactgccacatattttgtctccaggtaagagggcagcattaagggtta

SEQ ID NO: 92754 - DNA, 80 bp, synthetic construct; identical to SEQ ID NO: 17183
  source 1..80: mol_type = other DNA

SEQ ID NO: 92755 - DNA, 80 bp, synthetic construct
  source 1..80: mol_type = other DNA
tggactggaaggcattcactggggaagaggagaagacaataagcatgagggtaggggaggcaagggaatgccaggagatg

SEQ ID NO: 92756 - DNA, 80 bp, synthetic construct
  source 1..80: mol_type = other DNA
gccttgccaagtttgaacaataattaatacagtcaccctaaaaacggtagatcagtcactccctgtattcacctaacact

SEQ ID NO: 92757 - DNA, 80 bp, synthetic construct; identical to SEQ ID NO: 17184
  source 1..80: mol_type = other DNA

SEQ ID NO: 92758 - DNA, 80 bp, synthetic construct
  source 1..80: mol_type = other DNA
tgttcttgcagatgaaactagcagaaggaaggagcttgctgccagttggctccctaattttttttaaatcacaactttga

SEQ ID NO: 92759 - DNA, 80 bp, synthetic construct
  source 1..80: mol_type = other DNA
gttgtgaatgtttacacaaatggaaaatgtcagtgtttaatctgtaaagggagcccagattgcaaagctccaaaaagaaa

SEQ ID NO: 92760 - DNA, 80 bp, synthetic construct
  source 1..80: mol_type = other DNA
cagagcttcctaaagaaaaagacaaagttacaacttgtaaaatcccagagtcagtgtcacagtgctgtggctaactgaac

SEQ ID NO: 92761 - DNA, 80 bp, synthetic construct
  source 1..80: mol_type = other DNA
cgtctctactaaaaatacaaaaattagccaggcctggtggtgcatgcctataatcccagatacttgggaggctaaagcag

SEQ ID NO: 92762 - DNA, 80 bp, synthetic construct; identical to SEQ ID NO: 17185
  source 1..80: mol_type = other DNA

SEQ ID NO: 92763 - DNA, 80 bp, synthetic construct
  source 1..80: mol_type = other DNA
tggctttgccactaatcagcctgagccttgggcaagatacttctccctctgggtcagatgaggggggtggatcacagcaa

SEQ ID NO: 92764 - DNA, 80 bp, synthetic construct
  source 1..80: mol_type = other DNA
gatcactggctgaagtcatttctaagatcctgttagctctaaaatgaccatgtttctgaggcacgagtagttggtgacat

SEQ ID NO: 92765 - DNA, 80 bp, synthetic construct
  source 1..80: mol_type = other DNA
ggcctgaatgatccagataattgcagtgctggtgatgccctctcagcatgccccagggtgggtggtgggagcccattagt

SEQ ID NO: 92766 - DNA, 80 bp, synthetic construct; identical to SEQ ID NO: 17186
  source 1..80: mol_type = other DNA

SEQ ID NO: 92767 - DNA, 80 bp, synthetic construct
  source 1..80: mol_type = other DNA
ccattctctgttttagacagccggcctggtgtgtgaatgggagggaggaatgagctttgttactaccttctcagcaacct

SEQ ID NO: 92768 - DNA, 80 bp, synthetic construct
  source 1..80: mol_type = other DNA
aaagccagctattgacaaatctgcctaacactctcgcaaactccattttctacagggtgagatgcagacatctttccatg

SEQ ID NO: 92769 - DNA, 80 bp, synthetic construct
  source 1..80: mol_type = other DNA
ccaagggagccagcctgaggcttgcatcactgtttggtctcctcctacccttccagatcttcctggtgctggagttagtg

SEQ ID NO: 92770 - DNA, 80 bp, synthetic construct; identical to SEQ ID NO: 17187
  source 1..80: mol_type = other DNA

SEQ ID NO: 92771 - DNA, 80 bp, synthetic construct
  source 1..80: mol_type = other DNA
tatgttttcctttttatcttttaagtgggaaatgggaggtgagtatgaggggacaattgtgaagcttgcctgtgctccaa

SEQ ID NO: 92772 - DNA, 80 bp, synthetic construct
  source 1..80: mol_type = other DNA
taatccttccagagctatagagctgagcttgtattcaagccacagacagggcccttgaccttgaaccagacaaggctgac

SEQ ID NO: 92773 - DNA, 80 bp, synthetic construct
  source 1..80: mol_type = other DNA
ctgcctccattccagcactgggatgtggttggtaatgtgagattctcactatccaatgccgcaatcagagccatatgcgg

SEQ ID NO: 92774 - DNA, 80 bp, synthetic construct; identical to SEQ ID NO: 17188
  source 1..80: mol_type = other DNA

SEQ ID NO: 92775 - DNA, 80 bp, synthetic construct
  source 1..80: mol_type = other DNA
ctagcaacctaagatttgctgcccaaactaatgcttctccctgtccagtggacacttctcaactaggctgcccttctgtg

SEQ ID NO: 92776 - DNA, 80 bp, synthetic construct
  source 1..80: mol_type = other DNA
accatcaccaaaaataaaactgccttggtatccttgctgtagtccatgaagcttctgtattagaattacttggaaggaag

SEQ ID NO: 92777 - DNA, 80 bp, synthetic construct
  source 1..80: mol_type = other DNA
gccccagctactcaggaggctgagacaggagaattgcttgaacctgggaggcagaggtttcagtgagccgagatcgcacc

SEQ ID NO: 92778 - DNA, 80 bp, synthetic construct; identical to SEQ ID NO: 17189
  source 1..80: mol_type = other DNA

SEQ ID NO: 92779 - DNA, 80 bp, synthetic construct
  source 1..80: mol_type = other DNA
cacaggtgcatacacatatccacatgcacacactactctctcaggaggtctgctgggaaaccaatacactttcagaaaag

SEQ ID NO: 92780 - DNA, 80 bp, synthetic construct
  source 1..80: mol_type = other DNA
atttaatatctaggtttgacatgacatgggagccttcagaaatgaagacccaaagaaacaggaaaacctgtgtgttttta

SEQ ID NO: 92781 - DNA, 80 bp, synthetic construct; identical to SEQ ID NO: 17190
  source 1..80: mol_type = other DNA

SEQ ID NO: 92782 - DNA, 80 bp, synthetic construct
  source 1..80: mol_type = other DNA
tctttactctaaatcggtgttttgaaatcttttttaacccttgccccactttggtgaacacaaaagtctgtctctgggat

SEQ ID NO: 92783 - DNA, 80 bp, synthetic construct
  source 1..80: mol_type = other DNA
agagtataaaggtagagtatattgctagaaagaaagtcatactgctagactctagcatgagcctgcatcagaatcacctc

SEQ ID NO: 92784 - DNA, 80 bp, synthetic construct
  source 1..80: mol_type = other DNA
acactttgagaatcactgctctagaatgatgatacacactccctagggccagaagaaaggccaagcctttaatacaacag

SEQ ID NO: 92785 - DNA, 80 bp, synthetic construct
  source 1..80: mol_type = other DNA
tatgtagaccaagtctctatcttggcaaatacttcacccacttcagggagaaaggaaagaaagaggtgagaaatgaagaa

SEQ ID NO: 92786 - DNA, 80 bp, synthetic construct; identical to SEQ ID NO: 17191
  source 1..80: mol_type = other DNA

SEQ ID NO: 92787 - DNA, 80 bp, synthetic construct
  source 1..80: mol_type = other DNA
tgagctctcaccgtaaagcaggcaaacagccctttgacgcgcacatcttgaaagttttacactatttattttttcctctg

SEQ ID NO: 92788 - DNA, 80 bp, synthetic construct
  source 1..80: mol_type = other DNA
aatgaaaaatctcttagcaacaaccgagcagggctcatctgtcctccctgtcctgatgctgcctcctgtttagtatttat

SEQ ID NO: 92789 - DNA, 80 bp, synthetic construct; identical to SEQ ID NO: 17192
  source 1..80: mol_type = other DNA

SEQ ID NO: 92790 - DNA, 80 bp, synthetic construct
  source 1..80: mol_type = other DNA
ctcaagtgtatatgcctagcccagatcacttttctaaaatgagagcttggatattcagctgcctactcacgtctccactt

SEQ ID NO: 92791 - DNA, 80 bp, synthetic construct
  source 1..80: mol_type = other DNA
tttccttctcattcacacctcacatccaatccatcaccaagttctgtttattccacctccaaaatattcattgagctcct

SEQ ID NO: 92792 - DNA, 80 bp, synthetic construct
  source 1..80: mol_type = other DNA
aactactcttcttgcttccatgttacctgccatcctcccatccaacagccagagagacacctgaaaactcaacatctgac

SEQ ID NO: 92793 - DNA, 80 bp, synthetic construct; identical to SEQ ID NO: 17193
  source 1..80: mol_type = other DNA

SEQ ID NO: 92794 - DNA, 80 bp, synthetic construct
  source 1..80: mol_type = other DNA
ccccagcgccccctcccctcagtcttttagttctcatctcacatgccatctttccaaagaagccatcaattttagttatc

SEQ ID NO: 92795 - DNA, 80 bp, synthetic construct
  source 1..80: mol_type = other DNA
aaacaacaaccatcttatttcttgtaattctgtgagttgcctggggcttagcgggatggttcttctgctgatcttgcctg

SEQ ID NO: 92796 - DNA, 80 bp, synthetic construct
  source 1..80: mol_type = other DNA
atctctcccaacaagatgaccacactgatttggggctggaattatcccattaaaaactttgttagaatagagagctgtgg

SEQ ID NO: 92797 - DNA, 80 bp, synthetic construct
  source 1..80: mol_type = other DNA
attcttgcttattcattaaggctactttggttactaacaatagaaatggattctggcgaacttaagccaaaaagggtgaa

SEQ ID NO: 92798 - DNA, 80 bp, synthetic construct
  source 1..80: mol_type = other DNA
agagatttaccaggagggattggcacacacaattatgaaggctgagaaatctcacaatctgccatctgtaagctggaggc

SEQ ID NO: 92799 - DNA, 80 bp, synthetic construct; identical to SEQ ID NO: 17194
  source 1..80: mol_type = other DNA

SEQ ID NO: 92800 - DNA, 80 bp, synthetic construct
  source 1..80: mol_type = other DNA
atggaagggttgacaaccatgactcagcagtaggagccttttttccagagtgttgctactaacctttctcaaccttaatg

SEQ ID NO: 92801 - DNA, 80 bp, synthetic construct
  source 1..80: mol_type = other DNA
tcctgagtagctgggattacaggtgcctgccaccacgcccggctaattttgtatttttagtagagacggggtttcaccat

SEQ ID NO: 92802 - DNA, 80 bp, synthetic construct
  source 1..80: mol_type = other DNA
tatcaaattccttggtcgggccaggcacagtggctcacacctgtaatcccagcactttgggaggccaaagcgggtggatc

SEQ ID NO: 92803 - DNA, 80 bp, synthetic construct
  source 1..80: mol_type = other DNA
cagtgagctgagattttgctactgcactccagcctgagcaacaagaacaaaactctgcctcaaaaaaaaaaaaaaaaaaa

SEQ ID NO: 92804 - DNA, 80 bp, synthetic construct; identical to SEQ ID NO: 17195
  source 1..80: mol_type = other DNA

SEQ ID NO: 92805 - DNA, 80 bp, synthetic construct
  source 1..80: mol_type = other DNA
tttatattttttaaagagatggggttcttgctgtgttgcccaggctggtctcaaactcctggactcaagcgatcctccca

SEQ ID NO: 92806 - DNA, 80 bp, synthetic construct
  source 1..80: mol_type = other DNA
agctctcattccttttatgaaaaatggtattcaaaaaccaagacctggtccctagatgtgctcactgctattagggtgtc

SEQ ID NO: 92807 - DNA, 80 bp, synthetic construct
  source 1..80: mol_type = other DNA
cagcagagtaagacagagaagatgcagcctgagtggtttcccttctttaaaaaaaaaaaatctgttggtgaaagctgctt

SEQ ID NO: 92808 - DNA, 80 bp, synthetic construct; identical to SEQ ID NO: 17196
  source 1..80: mol_type = other DNA

SEQ ID NO: 92809 - DNA, 80 bp, synthetic construct
  source 1..80: mol_type = other DNA
ttgtttatttatacatttagatactggacacatttgaaacgtatactaatccaacttcatttttttcgcagagggcaacc

SEQ ID NO: 92810 - DNA, 80 bp, synthetic construct
  source 1..80: mol_type = other DNA
ctctcactttatctcccctatgtctctggccactccttctcagcctccttttctggcccctcctgccttcccctcccctc

SEQ ID NO: 92811 - DNA, 80 bp, synthetic construct; identical to SEQ ID NO: 17197
  source 1..80: mol_type = other DNA

SEQ ID NO: 92812 - DNA, 80 bp, synthetic construct
  source 1..80: mol_type = other DNA
gcaatggcgtagtctcggctcactgcaacctccacttcccaggttcaagcagttctcctgcctcagcctcccgagtagct

SEQ ID NO: 92813 - DNA, 80 bp, synthetic construct
  source 1..80: mol_type = other DNA
cccagccgactcctctcttctttgcgacatccacgcctattaagtcctgtcagctccattctcaaatagacccagagttg

SEQ ID NO: 92814 - DNA, 80 bp, synthetic construct; identical to SEQ ID NO: 17198
  source 1..80: mol_type = other DNA

SEQ ID NO: 92815 - DNA, 80 bp, synthetic construct
  source 1..80: mol_type = other DNA
tcctgtctctaccaatgcatcttctttgaataactgtatataaacctatcgacttaaacttctataagacttacataagc

SEQ ID NO: 92816 - DNA, 80 bp, synthetic construct
  source 1..80: mol_type = other DNA
aatcccagctgaggttgaggcatgaggaccgcttgagtgtgggaggtggaggttacaacgagctgagattgcaccactgc

SEQ ID NO: 92817 - DNA, 80 bp, synthetic construct
  source 1..80: mol_type = other DNA
tttccaaacaacattgttctctgtgccttcaagagtgctcgtttgatggtacagcattttttaaaagagtgccctactat

SEQ ID NO: 92818 - DNA, 80 bp, synthetic construct
  source 1..80: mol_type = other DNA
aaacaggaaacagaatcagtgaattatggtactctctggttgggctaattccctctacttactcttcttttccacaattt

SEQ ID NO: 92819 - DNA, 80 bp, synthetic construct; identical to SEQ ID NO: 17199
  source 1..80: mol_type = other DNA

SEQ ID NO: 92820 - DNA, 80 bp, synthetic construct
  source 1..80: mol_type = other DNA
acagtcacccaaggcatgtggatatgaaaagtagagaagtctaaatctgttatcagttcttcaacaatgcaggatgcatc

SEQ ID NO: 92821 - DNA, 80 bp, synthetic construct
  source 1..80: mol_type = other DNA
gtcgagtcatgcaagactcctctttagcaaagcagaaaggccagctatttttagttctacagtgttctcttttcccagcc

SEQ ID NO: 92822 - DNA, 80 bp, synthetic construct; identical to SEQ ID NO: 17200
  source 1..80: mol_type = other DNA

SEQ ID NO: 92823 - DNA, 80 bp, synthetic construct
  source 1..80: mol_type = other DNA
gtagtatttattatgatgaggcctctcctcttcgcttgtaggcagccaccatcatgttgtgctctcatatagcctctttc

SEQ ID NO: 92824 - DNA, 80 bp, synthetic construct
  source 1..80: mol_type = other DNA
tcccagtgggaggacacagtcagtccataactaaggaacagaacactggggagaaaaatcctactttgttgggacactgg

SEQ ID NO: 92825 - DNA, 80 bp, synthetic construct
  source 1..80: mol_type = other DNA
ttgtctaattatgaatctcagcatcctagaattatggggagaagccagttctcaattcgttttaacagagcttctctctg

SEQ ID NO: 92826 - DNA, 80 bp, synthetic construct
  source 1..80: mol_type = other DNA
ttgtggcaacatggaagttcccatggccaggtgcctccccctctaccctggatggctttggaaaacctgcctcaggtgtc

SEQ ID NO: 92827 - DNA, 80 bp, synthetic construct; identical to SEQ ID NO: 17201
  source 1..80: mol_type = other DNA

SEQ ID NO: 92828 - DNA, 80 bp, synthetic construct
  source 1..80: mol_type = other DNA
agacgcctgtaatcccagctgctcaggaggctgaggcaggagaattgcttgaacctgggaggcagaggttgcagtgagcc

SEQ ID NO: 92829 - DNA, 80 bp, synthetic construct
  source 1..80: mol_type = other DNA
aggagatcaagaccatcctggctaacacagtgaaaccctgtctctactaaaaatacaaagaattagccaggcgtggtggc

SEQ ID NO: 92830 - DNA, 80 bp, synthetic construct; identical to SEQ ID NO: 17202
  source 1..80: mol_type = other DNA

SEQ ID NO: 92831 - DNA, 80 bp, synthetic construct
  source 1..80: mol_type = other DNA
atagccacttaatcactgtgcattcattcatccaatagtaattgagcacctactctgccctaggcattgggcttagcctt

SEQ ID NO: 92832 - DNA, 80 bp, synthetic construct
  source 1..80: mol_type = other DNA
gcttcccaagtagctgggattacaggcctgtgccaccacacctggctaattttgtatttttaatagagatggggtttcac

SEQ ID NO: 92833 - DNA, 80 bp, synthetic construct
  source 1..80: mol_type = other DNA
gcagatgttaacaggaccacttggaaccagtgggagttgctgagaagtagaggtggggttattggtcacaggaaggggta

SEQ ID NO: 92834 - DNA, 80 bp, synthetic construct
  source 1..80: mol_type = other DNA
tctggcaagtgccttcttgctgcattataacatagcagaaggcatcacgttgcgggtggggaacatccacttccaagatg

SEQ ID NO: 92835 - DNA, 80 bp, synthetic construct; identical to SEQ ID NO: 17203
  source 1..80: mol_type = other DNA

SEQ ID NO: 92836 - DNA, 80 bp, synthetic construct
  source 1..80: mol_type = other DNA
ggctcaggtgtcatgctctgtatgtaagtatgaattcagaggagggaacagtctctgggataactaggattggtttaatg

SEQ ID NO: 92837 - DNA, 80 bp, synthetic construct
  source 1..80: mol_type = other DNA
tggagcagcaagtgcacgtagtaaagtaaaggtaataacacaatggagttgggtgacatcaaagttaagagggctttgga

SEQ ID NO: 92838 - DNA, 80 bp, synthetic construct; identical to SEQ ID NO: 17204
  source 1..80: mol_type = other DNA

SEQ ID NO: 92839 - DNA, 80 bp, synthetic construct
  source 1..80: mol_type = other DNA
tctctactaaaactacaaaaatcagctgagcgtggtggtgggtgcctgtagttccagcaactagggagcctgaggcatga

SEQ ID NO: 92840 - DNA, 80 bp, synthetic construct
  source 1..80: mol_type = other DNA
ggaggcagagttttaagtgttactacaaatgaagaattgacactacccccaatagactgggacccggaggctgggataag

SEQ ID NO: 92841 - DNA, 80 bp, synthetic construct
  source 1..80: mol_type = other DNA
atccacttgtagatagtacttattttaggactgagggaggtaaggtttggggaagaatagggcatatctgtgaacatgtc

SEQ ID NO: 92842 - DNA, 80 bp, synthetic construct; identical to SEQ ID NO: 17205
  source 1..80: mol_type = other DNA

SEQ ID NO: 92843 - DNA, 80 bp, synthetic construct
  source 1..80: mol_type = other DNA
ttcacatctgtctaatgtcttctggcccactcagttccttgccagaagttaatctgcagtgaaaacaaagctgtctcctc

SEQ ID NO: 92844 - DNA, 80 bp, synthetic construct
  source 1..80: mol_type = other DNA
tgaaattggtggccctatagaagagaccccagagagctccctcacctccctccaccatgtgaggacacagtgcaaagaca

SEQ ID NO: 92845 - DNA, 80 bp, synthetic construct
  source 1..80: mol_type = other DNA
ctgttaaccatgatgagattctggatttatactgccctcgtcatttccaatactttcacaaacattatcatgagggcgtg

SEQ ID NO: 92846 - DNA, 80 bp, synthetic construct; identical to SEQ ID NO: 17206
  source 1..80: mol_type = other DNA

SEQ ID NO: 92847 - DNA, 80 bp, synthetic construct
  source 1..80: mol_type = other DNA
taataaatttccagtgggacgtttccgcacttgcctttttttagagacatgaagagaggagaattgaaaacatttcctat

SEQ ID NO: 92848 - DNA, 80 bp, synthetic construct
  source 1..80: mol_type = other DNA
actgcagggaaggctcttgcgcagggaactgggaaggagctgccccagaccacaagtgtggcccagccttccctgggcat

SEQ ID NO: 92849 - DNA, 80 bp, synthetic construct
  source 1..80: mol_type = other DNA
cacagattaggtggctcacaatgacagaaacttattttctctcagccgtggagaccagaggttcaaaattaaggtgtctg

SEQ ID NO: 92850 - DNA, 80 bp, synthetic construct; identical to SEQ ID NO: 17207
  source 1..80: mol_type = other DNA

SEQ ID NO: 92851 - DNA, 80 bp, synthetic construct
  source 1..80: mol_type = other DNA
tttgtgtttttagtagaaatggggttttgccatgttggacaggctggtctcaagctcctgtcctaaggtgatccacccgc

SEQ ID NO: 92852 - DNA, 80 bp, synthetic construct
  source 1..80: mol_type = other DNA
accctttttctaaatgcaatcacatcctgaggttctggatggatataatttttggaaggaccacgattcaacccactgca

SEQ ID NO: 92853 - DNA, 80 bp, synthetic construct
  source 1..80: mol_type = other DNA
acccacttggtagagtattaggtatggtgatattttctggctggtgccttcctggttatcttgctgctcatagagaacca

SEQ ID NO: 92854 - DNA, 80 bp, synthetic construct
  source 1..80: mol_type = other DNA
actgctgctcttgaccttcccatttgctgacaagacagcagcctgcaaatccaagtgggtccccagttccccaaatatcc

SEQ ID NO: 92855 - DNA, 80 bp, synthetic construct; identical to SEQ ID NO: 17208
  source 1..80: mol_type = other DNA

SEQ ID NO: 92856 - DNA, 80 bp, synthetic construct
  source 1..80: mol_type = other DNA
acctagttttgtaacttgctgttttcacctcacaatattttcgagggtctttccatatcagccaaacacagcctgaccgt

SEQ ID NO: 92857 - DNA, 80 bp, synthetic construct
  source 1..80: mol_type = other DNA
atgaataactatatatgctcaggtcatgcatgtgtgggaataaatctataaggataattgctagaagtggcatatctggg

SEQ ID NO: 92858 - DNA, 80 bp, synthetic construct; identical to SEQ ID NO: 17209
  source 1..80: mol_type = other DNA

SEQ ID NO: 92859 - DNA, 80 bp, synthetic construct
  source 1..80: mol_type = other DNA
tcccttgcagagcttactgcaagccatgcccctagtagcaatcacattgcatttattaatagagcagggtggacagatct

SEQ ID NO: 92860 - DNA, 80 bp, synthetic construct
  source 1..80: mol_type = other DNA
gtacactttctcagttaatgtgagcttccgtcagagtcttcgtttcagcagatttaagcagaaaaagtaatctagaaagt

SEQ ID NO: 92861 - DNA, 80 bp, synthetic construct
  source 1..80: mol_type = other DNA
tgggcagcctggccacatcccatgctggatacctgtcaacgccagatgacctgtcaccgcaaactgtcatcccgttgccc

SEQ ID NO: 92862 - DNA, 80 bp, synthetic construct; identical to SEQ ID NO: 17210
  source 1..80: mol_type = other DNA

SEQ ID NO: 92863 - DNA, 80 bp, synthetic construct
  source 1..80: mol_type = other DNA
tctttatatcgggacctctgtgcagctctgtcctgacaacgtcacttattgctcacgattggcataccattaggggattg

SEQ ID NO: 92864 - DNA, 80 bp, synthetic construct
  source 1..80: mol_type = other DNA
tttgtttgtcctttgcaaaatatttgctgggaaacaaagaccttcagtagaagcacaagattttaaagagaggaatgaaa

SEQ ID NO: 92865 - DNA, 80 bp, synthetic construct
  source 1..80: mol_type = other DNA
ctagttcagagcctggctgcacatagtaggccctcaatgagaggtgatgatgatggtggtggtgacggcagagcgaggac

SEQ ID NO: 92866 - DNA, 80 bp, synthetic construct; identical to SEQ ID NO: 17211
  source 1..80: mol_type = other DNA

SEQ ID NO: 92867 - DNA, 80 bp, synthetic construct
  source 1..80: mol_type = other DNA
cagacaatagtggcatagagccaagtgatgacgttcccacgttatagctacatggctgtgataacaagtggagttatacg

SEQ ID NO: 92868 - DNA, 80 bp, synthetic construct
  source 1..80: mol_type = other DNA
ttaaatcgtggcccaacacgcttgccactgcagctagatgctgacacaggtgatggtaacaaggccctagaactctaacg

SEQ ID NO: 92869 - DNA, 80 bp, synthetic construct
  source 1..80: mol_type = other DNA
cttggggagatttcacaaattactgatgcttgagacccgagattctaatttaatttgaggtggttacagggtcagaggtc

SEQ ID NO: 92870 - DNA, 80 bp, synthetic construct; identical to SEQ ID NO: 17212
  source 1..80: mol_type = other DNA

SEQ ID NO: 92871 - DNA, 80 bp, synthetic construct
  source 1..80: mol_type = other DNA
tgaggtttgataccagaaggctggagaaggggtgctggcacagaaaagatgcaacgaaggagactccccaggtagtcctg

SEQ ID NO: 92872 - DNA, 80 bp, synthetic construct
  source 1..80: mol_type = other DNA
ggggttgacataccactcaaatcaaaggcagaaccaaaagaagtaagtactccaaaggaaaggacatggactgaagggct

SEQ ID NO: 92873 - DNA, 80 bp, synthetic construct
  source 1..80: mol_type = other DNA
ttatggcagaataactctttatgtctgcaaggcctgctttggaattgtggatctactttcctggaggctcagcaacaaga

SEQ ID NO: 92874 - DNA, 80 bp, synthetic construct; identical to SEQ ID NO: 17213
  source 1..80: mol_type = other DNA

SEQ ID NO: 92875 - DNA, 80 bp, synthetic construct
  source 1..80: mol_type = other DNA
tgtttttctaaaatgttttgtttgaccaaagtagttggcatgaaaaaaaaaacttttgttgtgccagtctctccccatgc

SEQ ID NO: 92876 - DNA, 80 bp, synthetic construct
  source 1..80: mol_type = other DNA
tctaggctgcataaatgccgaaacagtggtggatctagcacatgaagagttgagagcctgggaactaggggaggtgtccc

SEQ ID NO: 92877 - DNA, 80 bp, synthetic construct
  source 1..80: mol_type = other DNA
ccctgcatactttggtgttattcctgttgcaaaagtcccgatacttttctccgtcactgatgttttgttttgagacaggg

SEQ ID NO: 92878 - DNA, 80 bp, synthetic construct
  source 1..80: mol_type = other DNA
tccatcatgcctggctaacatatttatattctgtttgtttgtttgttttttagagacagggtctcactctattgcccagg

SEQ ID NO: 92879 - DNA, 80 bp, synthetic construct; identical to SEQ ID NO: 17214
  source 1..80: mol_type = other DNA

SEQ ID NO: 92880 - DNA, 80 bp, synthetic construct
  source 1..80: mol_type = other DNA
ggaggaagaccttcattaccaccccagcccacccataccccatcccagggtgaatggaggctggagctggtttcttcttc

SEQ ID NO: 92881 - DNA, 80 bp, synthetic construct
  source 1..80: mol_type = other DNA
aggcaaagattcactaagtgggatccagcaactcagccacacccagaggcttccatggctcctatattccacagggctgc

SEQ ID NO: 92882 - DNA, 80 bp, synthetic construct; identical to SEQ ID NO: 17215
  source 1..80: mol_type = other DNA

SEQ ID NO: 92883 - DNA, 80 bp, synthetic construct
  source 1..80: mol_type = other DNA
tgtgcacatgtgcacatttctttcttctctgctttcaaacagcagagtttgagaaatggaaaccaaggaactgctttggt

SEQ ID NO: 92884 - DNA, 80 bp, synthetic construct
  source 1..80: mol_type = other DNA
aggcaacttagaggaaagtaaatgacttggggaaagatggatgagcctaagaagagtaggtgacagccagtgacaaagtc

SEQ ID NO: 92885 - DNA, 80 bp, synthetic construct
  source 1..80: mol_type = other DNA
gcatctgctgtctcccacgtgcccttggttgcaagcaatcaacataccaaagtggcatattttggggtggcatttccttt

SEQ ID NO: 92886 - DNA, 80 bp, synthetic construct
  source 1..80: mol_type = other DNA
tcagaggggatccggtcagagagacctagtgccgagaggagcagagagccccgagggaaggctccagggcccaggcaaag

SEQ ID NO: 92887 - DNA, 80 bp, synthetic construct; identical to SEQ ID NO: 17216
  source 1..80: mol_type = other DNA

SEQ ID NO: 92888 - DNA, 80 bp, synthetic construct
  source 1..80: mol_type = other DNA
ctgtcccccaggctggagtgcagtggtgggatctcagctcactgtaatctccacctcctgcctccacctctaattcttgt

SEQ ID NO: 92889 - DNA, 80 bp, synthetic construct
  source 1..80: mol_type = other DNA
tcatttgattgtacagggttctgtccagcaaggcatgcctctagatttggggtgggggtaaatgttcagtggatccaaga

SEQ ID NO: 92890 - DNA, 80 bp, synthetic construct; identical to SEQ ID NO: 17217
  source 1..80: mol_type = other DNA

SEQ ID NO: 92891 - DNA, 80 bp, synthetic construct
  source 1..80: mol_type = other DNA
ttttttcctgtggctctaactttgccgttgtggcctgacacagaaatgtttcatcttgaaggtctagaaaaagcaatgtt

SEQ ID NO: 92892 - DNA, 80 bp, synthetic construct
  source 1..80: mol_type = other DNA
tagccctagacacactctgcttgtgtctaattaaattcaagtacctttttcatcaggtttgacttcccagttagctaaac

SEQ ID NO: 92893 - DNA, 80 bp, synthetic construct
  source 1..80: mol_type = other DNA
ttattaggttgagtacttagaaaagctgacctgtaaaagggttaaggtttttacatccatgtaactttctgtattgtttt

SEQ ID NO: 92894 - DNA, 80 bp, synthetic construct
  source 1..80: mol_type = other DNA
ggcattttcaagttaggcccctggaaatcttcaaagaatgtatctctcatcctgtagagatattaaatgattagacttat

SEQ ID NO: 92895 - DNA, 80 bp, synthetic construct; identical to SEQ ID NO: 17218
  source 1..80: mol_type = other DNA

SEQ ID NO: 92896 - DNA, 80 bp, synthetic construct
  source 1..80: mol_type = other DNA
tgtgatatggtcagtcataattctggttgttatcttaaaatgctgcacataatagaaataattaaatttctttgtcagtt

SEQ ID NO: 92897 - DNA, 80 bp, synthetic construct
  source 1..80: mol_type = other DNA
gcacaatctcggctcactgaagcctctgccttctagattcaagagattcttgtgcctcagcctcccgcgtagctaggatt

SEQ ID NO: 92898 - DNA, 80 bp, synthetic construct
  source 1..80: mol_type = other DNA
gcctgtcattcatgctattgttttaaattcttctctaaaagcatttgcagtgatctatagtcctaaattgattttcatga

SEQ ID NO: 92899 - DNA, 80 bp, synthetic construct
  source 1..80: mol_type = other DNA
agaccagcctggccaacatggtgaaaccctgccttactaaaagaaatacaaaaaaaattagccaggtgtggtggcacgca

SEQ ID NO: 92900 - DNA, 80 bp, synthetic construct; identical to SEQ ID NO: 17219
  source 1..80: mol_type = other DNA

SEQ ID NO: 92901 - DNA, 80 bp, synthetic construct
  source 1..80: mol_type = other DNA
atccactcagatggtctttggagacattcagacagctgctagagtctcctcagtaattgcctaaaatttagtccacagcc

SEQ ID NO: 92902 - DNA, 80 bp, synthetic construct
  source 1..80: mol_type = other DNA
aagaaggtgggggaggggagaaagctatttagaaaccaactggcatttttaaaaatttcaagtctttaccacaagtagta

SEQ ID NO: 92903 - DNA, 80 bp, synthetic construct; identical to SEQ ID NO: 17220
  source 1..80: mol_type = other DNA

SEQ ID NO: 92904 - DNA, 80 bp, synthetic construct; identical to SEQ ID NO: 17221
  source 1..80: mol_type = other DNA

SEQ ID NO: 92905 - DNA, 80 bp, synthetic construct
  source 1..80: mol_type = other DNA
ccaagtagctgggactacaggcacccaccaccacgcccagctaattttttttttttttgtattttttagtagagatgggg

SEQ ID NO: 92906 - DNA, 80 bp, synthetic construct
  source 1..80: mol_type = other DNA
ttaggccgttcttttgtttgaaagaattcaactaaggatccactctgcctgcctgaccggtttcttcctttcttctctct

SEQ ID NO: 92907 - DNA, 80 bp, synthetic construct; identical to SEQ ID NO: 17222
  source 1..80: mol_type = other DNA

SEQ ID NO: 92908 - DNA, 80 bp, synthetic construct
  source 1..80: mol_type = other DNA
ccacctttgcaaaaattctaacagtgagaagattatgacagtgaaagagatctgacctaaccaaccccatcttgcctcta

SEQ ID NO: 92909 - DNA, 80 bp, synthetic construct
  source 1..80: mol_type = other DNA
tgagagactaccaggttaggaggatgtgagcaggctgaattctaaggtgtaaacataaacaattaccagccattatgctg

SEQ ID NO: 92910 - DNA, 80 bp, synthetic construct
  source 1..80: mol_type = other DNA
gttgcccaggctggagtgcaatggtgcgatctcggctcaccacaacctccgccttccaggttcaagtcattttcctgcct

SEQ ID NO: 92911 - DNA, 80 bp, synthetic construct; identical to SEQ ID NO: 17223
  source 1..80: mol_type = other DNA

SEQ ID NO: 92912 - DNA, 80 bp, synthetic construct
  source 1..80: mol_type = other DNA
gagattgatttgagtaataattcagtcttccacgtggcgtggccagccttgtatctattaaactctttctttattgcaat

SEQ ID NO: 92913 - DNA, 80 bp, synthetic construct
  source 1..80: mol_type = other DNA
tagccagcggccaagagacggctaacgctcaaagttctttagaccccaaagaaggagctaaattttcttttatactttgg

SEQ ID NO: 92914 - DNA, 80 bp, synthetic construct; identical to SEQ ID NO: 17224
  source 1..80: mol_type = other DNA

SEQ ID NO: 92915 - DNA, 80 bp, synthetic construct
  source 1..80: mol_type = other DNA
aaggctaggtgattaaaggaaagggagagtctaaaaacagggttagtaaaaacaaggttaggcattacaaaactgccttt

SEQ ID NO: 92916 - DNA, 80 bp, synthetic construct
  source 1..80: mol_type = other DNA
ttgacaatagcactttctggaaaaaaacccttgcttgcgtggagaccagtctgtctttgtaggactaactttcatgcacg

SEQ ID NO: 92917 - DNA, 80 bp, synthetic construct
  source 1..80: mol_type = other DNA
ctggcgggctggagtgggggtcacaaggtactcagtgggggggcttttgagccaggatgagccaggagaaggaatttcac

SEQ ID NO: 92918 - DNA, 80 bp, synthetic construct; identical to SEQ ID NO: 17225
  source 1..80: mol_type = other DNA

SEQ ID NO: 92919 - DNA, 80 bp, synthetic construct
  source 1..80: mol_type = other DNA
taattttatcttcaatccgaccaatcaacactccctacttcctgagcccatacctgccaaataatccttaaaaacgctga

SEQ ID NO: 92920 - DNA, 80 bp, synthetic construct
  source 1..80: mol_type = other DNA
agactctcagttaatctttcctagattcagagaagggaaggctttagaggaaagagaaaatgcagagaaaaatggctgca

SEQ ID NO: 92921 - DNA, 80 bp, synthetic construct
  source 1..80: mol_type = other DNA
gcccagagaaaatgtgtaactctccaagaggtagcttagaattcaggcttatattgcatcttcagctaaaaatcaaagga

SEQ ID NO: 92922 - DNA, 80 bp, synthetic construct
  source 1..80: mol_type = other DNA
cttacaaatggagattttctttatagatgtaaatttcccttacaaaagggtaacttctactctgtttttagagcttctcc

SEQ ID NO: 92923 - DNA, 80 bp, synthetic construct; identical to SEQ ID NO: 17226
  source 1..80: mol_type = other DNA

SEQ ID NO: 92924 - DNA, 80 bp, synthetic construct
  source 1..80: mol_type = other DNA
aggaaccagcaaaatggtaaggctagttcaaagagaattaaagagagtgaagcctttatagcggctaaaggaaagaatgt

SEQ ID NO: 92925 - DNA, 80 bp, synthetic construct
  source 1..80: mol_type = other DNA
gcctcctgggttcaagcgattctcctgcatcaacctcccaagtagctgagattacaggcacccactaccatgcccagctg

SEQ ID NO: 92926 - DNA, 80 bp, synthetic construct; identical to SEQ ID NO: 17227
  source 1..80: mol_type = other DNA

SEQ ID NO: 92927 - DNA, 80 bp, synthetic construct
  source 1..80: mol_type = other DNA
agtagcaccctgagaagaaaggtagtaatcccttttccctatttccaagttttggaaatctttccttaatgtgcttttgg

SEQ ID NO: 92928 - DNA, 80 bp, synthetic construct
  source 1..80: mol_type = other DNA
cctgtaatcctagttatttgggaagctgaggcaggaggataacttgagcccaggagtttgagaccagactgaacaataga

SEQ ID NO: 92929 - DNA, 80 bp, synthetic construct
  source 1..80: mol_type = other DNA
cctccgctttctgggttccatgcccggctaatttttttgtatttttttttttttagtagagatagggtttcaccaggttg

SEQ ID NO: 92930 - DNA, 80 bp, synthetic construct; identical to SEQ ID NO: 17228
  source 1..80: mol_type = other DNA

SEQ ID NO: 92931 - DNA, 80 bp, synthetic construct
  source 1..80: mol_type = other DNA
tggtgaaaccccgtctctactaaaaatacaaaaaattagccgggcgtggtggtgggcgtctataggcccagctattctgg

SEQ ID NO: 92932 - DNA, 80 bp, synthetic construct
  source 1..80: mol_type = other DNA
cagtttatcctgctaaggcagctcatactgacttagacactgacttaagggatttactggcaaaacctcaaaagaaatgg

SEQ ID NO: 92933 - DNA, 80 bp, synthetic construct
  source 1..80: mol_type = other DNA
tcaggtgagatccttaagatagtaggggtaaacttaacttttgaaaacatggagctttcaaagcagcctattgggcttag

SEQ ID NO: 92934 - DNA, 80 bp, synthetic construct
  source 1..80: mol_type = other DNA
ccctcgtgaatggcatatatgccttctgaaaataatgcttctatccataagagtggctaatggtggggattttagatact

SEQ ID NO: 92935 - DNA, 80 bp, synthetic construct; identical to SEQ ID NO: 17229
  source 1..80: mol_type = other DNA

SEQ ID NO: 92936 - DNA, 80 bp, synthetic construct
  source 1..80: mol_type = other DNA
ctgtaccaggaagagaaagatgactaaatcacaggaaattcttattgtaactgaggagcttagtggcttagcctcaaact

SEQ ID NO: 92937 - DNA, 80 bp, synthetic construct
  source 1..80: mol_type = other DNA
ggcgcctgtagtgccagctacttctccagctactgaggcaggagaatcgcttgaacccaagaggcagaggttgcagtgag

SEQ ID NO: 92938 - DNA, 80 bp, synthetic construct
  source 1..80: mol_type = other DNA
ttttccagccaggcgtagtggcttatgcctgtaatctcagcactttgggaggccgaggtgggcagatcacttgaggtcag

SEQ ID NO: 92939 - DNA, 80 bp, synthetic construct; identical to SEQ ID NO: 17230
  source 1..80: mol_type = other DNA

SEQ ID NO: 92940 - DNA, 80 bp, synthetic construct
  source 1..80: mol_type = other DNA
aagtctcactctaacaaaagatgacttcaaggctggaacctattcctggctactagattgactgtgattaatttataacc

SEQ ID NO: 92941 - DNA, 80 bp, synthetic construct
  source 1..80: mol_type = other DNA
aagagtggaattttttttcacctgctcttcctcttgctggcacagatcataaagtcttgctctctttctatcacatctca

SEQ ID NO: 92942 - DNA, 80 bp, synthetic construct
  source 1..80: mol_type = other DNA
tcgagaccagcctggccaatgtggtaaaacctatctctactaaaaatacaaaaaattggccaggtgtggtggtgggggcc

SEQ ID NO: 92943 - DNA, 80 bp, synthetic construct; identical to SEQ ID NO: 17231
  source 1..80: mol_type = other DNA

SEQ ID NO: 92944 - DNA, 80 bp, synthetic construct
  source 1..80: mol_type = other DNA
ctccagctaaaaacttggaaagggtaaaggaaatatttttgtcctacattatgctgtccagtaagatagccactcaccac

SEQ ID NO: 92945 - DNA, 80 bp, synthetic construct
  source 1..80: mol_type = other DNA
aatatcattattttttatttttattttttttgagacggagttttactctgtctcccaggctggagtgcaatggtgcaatc

SEQ ID NO: 92946 - DNA, 80 bp, synthetic construct; identical to SEQ ID NO: 17232
  source 1..80: mol_type = other DNA

SEQ ID NO: 92947 - DNA, 80 bp, synthetic construct
  source 1..80: mol_type = other DNA
tgggtttggtggtgcgtgcctgtaatctcagctacttgggaggctaaggcaggagaattgcttgaatctgggagacagag

SEQ ID NO: 92948 - DNA, 80 bp, synthetic construct
  source 1..80: mol_type = other DNA
ttatcaatccgagtgctgttcagcacagcctggtgggtgaaatcatcaaatactctgagcagaagggattctacctggtg

SEQ ID NO: 92949 - DNA, 80 bp, synthetic construct
  source 1..80: mol_type = other DNA
ttcccccttaggtctgagtgctcaagcagatcgtggcgtattcattagtgtatcccagtgcctggcacatattaggcgct

SEQ ID NO: 92950 - DNA, 80 bp, synthetic construct
  source 1..80: mol_type = other DNA
gaacgtcattggtggcagtgattcattacaaagtgctggcaaagaaatggcttaaagaagaagaactggttgactacaaa

SEQ ID NO: 92951 - DNA, 80 bp, synthetic construct; identical to SEQ ID NO: 17233
  source 1..80: mol_type = other DNA

SEQ ID NO: 92952 - DNA, 80 bp, synthetic construct
  source 1..80: mol_type = other DNA
ctcccacctgccttgacagcctcatctggcactcatttgtaggatggatgtctgttgtcccaggtagtggttactccatt

SEQ ID NO: 92953 - DNA, 80 bp, synthetic construct
  source 1..80: mol_type = other DNA
cactttaattatatagcctgagtgagaccaactccaatatcccttcctgctctagaggttctgtttttcccttttttttt

SEQ ID NO: 92954 - DNA, 80 bp, synthetic construct
  source 1..80: mol_type = other DNA
tttttgtatttgttgtaaagatggggtttcaccatgttgcccaggctagtcttgaactcctgagctcaagcaatgtgcct

SEQ ID NO: 92955 - DNA, 80 bp, synthetic construct
  source 1..80: mol_type = other DNA
ggctgaggcgggcatatcatctgaggtcaggagttcaagaccagcctggccaacatggtgaaatccgcctctactaaaaa

SEQ ID NO: 92956 - DNA, 80 bp, synthetic construct; identical to SEQ ID NO: 17234
  source 1..80: mol_type = other DNA

SEQ ID NO: 92957 - DNA, 80 bp, synthetic construct
  source 1..80: mol_type = other DNA
aaaattatgattgttatttggcgacctgtatcctttgtctagataagcaactggaggaggtacaccaggcctgtcttttt

SEQ ID NO: 92958 - DNA, 80 bp, synthetic construct
  source 1..80: mol_type = other DNA
atgaatacaccacgatctgcttgagcactcagacctgaggggcaaagacagtccatccacagacaaccgtaatgcaaggt

SEQ ID NO: 92959 - DNA, 80 bp, synthetic construct; identical to SEQ ID NO: 17235
  source 1..80: mol_type = other DNA

SEQ ID NO: 92960 - DNA, 80 bp, synthetic construct
  source 1..80: mol_type = other DNA
tttcctggtttaggaaagatacaaaattcttgtgtgcagcctcttttggactccagctcttgttctctcgctgaatccca

SEQ ID NO: 92961 - DNA, 80 bp, synthetic construct
  source 1..80: mol_type = other DNA
tcattgctttcctctggacttgtaagttattccaacaaaccccagctgctctgcagtgaaatgttccaaataattaatat

SEQ ID NO: 92962 - DNA, 80 bp, synthetic construct
  source 1..80: mol_type = other DNA
taaaagtacaaggaaattatgattccataatcataagtctactttcagcaatacacgtatcttcagagaatctcagcctc

SEQ ID NO: 92963 - DNA, 80 bp, synthetic construct; identical to SEQ ID NO: 17236
  source 1..80: mol_type = other DNA

SEQ ID NO: 92964 - DNA, 80 bp, synthetic construct
  source 1..80: mol_type = other DNA
atttaccttcagcttttttggttatattgtcattattattttctttgtccagtgggagagttaaggggcctgctatggac

SEQ ID NO: 92965 - DNA, 80 bp, synthetic construct
  source 1..80: mol_type = other DNA
tgcagtggctcaagcctataatcccagcactttgggaagctgaggcaggaggtacgcttgggcccaggagttcaagacca

SEQ ID NO: 92966 - DNA, 80 bp, synthetic construct
  source 1..80: mol_type = other DNA
ctccagcctgggtaacagagcaagaccctgtccctccccacaccaccccaactccccccaaaaaggaagagataccagag

SEQ ID NO: 92967 - DNA, 80 bp, synthetic construct; identical to SEQ ID NO: 17237
  source 1..80: mol_type = other DNA

SEQ ID NO: 92968 - DNA, 80 bp, synthetic construct
  source 1..80: mol_type = other DNA
ctaagtaaagatctgtcctcactaatgagattaggcatcatccaattcatagggagcctaaataagacaaaaagttggcg

SEQ ID NO: 92969 - DNA, 80 bp, synthetic construct
  source 1..80: mol_type = other DNA
aacagtgtggcatggactactctattccttgctttaacaattgagtttactgcagaggtgtaaaatattcatgctgagaa

SEQ ID NO: 92970 - DNA, 80 bp, synthetic construct; identical to SEQ ID NO: 17238
  source 1..80: mol_type = other DNA

SEQ ID NO: 92971 - DNA, 80 bp, synthetic construct
  source 1..80: mol_type = other DNA
acaacatgccaaggacagggccaggtgctggagatacaaccaagaataaaatgcagcacctgttctccacagttaagtta

SEQ ID NO: 92972 - DNA, 80 bp, synthetic construct
  source 1..80: mol_type = other DNA
attttatgatctgaaatgatgcacaagaaatatgaagtagaaaagcaatgggagcttccaggtagctgaattcctagagg

SEQ ID NO: 92973 - DNA, 80 bp, synthetic construct
  source 1..80: mol_type = other DNA
tttgggctggatactggtttcttcctattataataattattgctttataaattcaggtatataaggccgggcgcagtggt

SEQ ID NO: 92974 - DNA, 80 bp, synthetic construct
  source 1..80: mol_type = other DNA
aggttgcactaagttgagattgtgccacagcactccagcctgggcaacacagtgaaaccctgtctcaaaaaaaaaaaaaa

SEQ ID NO: 92975 - DNA, 80 bp, synthetic construct; identical to SEQ ID NO: 17239
  source 1..80: mol_type = other DNA

SEQ ID NO: 92976 - DNA, 80 bp, synthetic construct
  source 1..80: mol_type = other DNA
aaaagcaaagcataaaaacaatatacacaacagtttctaggatggaaaagttcactgggttgcccaggtcaaaacttatc

SEQ ID NO: 92977 - DNA, 80 bp, synthetic construct
  source 1..80: mol_type = other DNA
cctgtaatcccagctattggggaggctgaggcaggagaatggcttatacccaggaggtgggtgaaccaagatcgtgccac

SEQ ID NO: 92978 - DNA, 80 bp, synthetic construct
  source 1..80: mol_type = other DNA
tagcagcaggacatgtgatgcctaggttgcatggtatccatgttaggagggtcatggggaacaactatttggggtgcagg

SEQ ID NO: 92979 - DNA, 80 bp, synthetic construct; identical to SEQ ID NO: 17240
  source 1..80: mol_type = other DNA

SEQ ID NO: 92980 - DNA, 80 bp, synthetic construct
  source 1..80: mol_type = other DNA
agcactttgggaggccgaggcaggtgttcaagaggtcaggagttcaagaccagcctgaccaacatgatgaaaccccatct

SEQ ID NO: 92981 - DNA, 80 bp, synthetic construct
  source 1..80: mol_type = other DNA
caaaactccatctcaaaaaaaaaaaaaggttaaaaaaaatatatagccaggcataggggtgcatgcctgtagtcctagct

SEQ ID NO: 92982 - DNA, 80 bp, synthetic construct; identical to SEQ ID NO: 17241
  source 1..80: mol_type = other DNA

SEQ ID NO: 92983 - DNA, 80 bp, synthetic construct
  source 1..80: mol_type = other DNA
gcttaaaagatccagttcattatcacagaggcagattatgaaaggttgatttagcacttagacacaataaattgatacct

SEQ ID NO: 92984 - DNA, 80 bp, synthetic construct
  source 1..80: mol_type = other DNA
aaaaatacaaaaattagccaggcatggtggcgcgcacctgtagtcccagctacttgggaggctgaggcacaagaatcgct

SEQ ID NO: 92985 - DNA, 80 bp, synthetic construct
  source 1..80: mol_type = other DNA
tagcagagaaatgaaaactataaaaaaggaccaaagagagttaggtttctagatgggaatagttagttgatttttgacaa

SEQ ID NO: 92986 - DNA, 80 bp, synthetic construct
  source 1..80: mol_type = other DNA
ctagaataaaatataggagaatatcataatcttgggctagacaaatatttcttacactcagaaaggagtaaccaggccag

SEQ ID NO: 92987 - DNA, 80 bp, synthetic construct; identical to SEQ ID NO: 17242
  source 1..80: mol_type = other DNA

SEQ ID NO: 92988 - DNA, 80 bp, synthetic construct
  source 1..80: mol_type = other DNA
tggaatgcagtggcaagatgtcgactcaacacaacctctgcttcccgggttcaagcaattctcctgcctcagcctcccaa

SEQ ID NO: 92989 - DNA, 80 bp, synthetic construct
  source 1..80: mol_type = other DNA
cgtgcccagctgaaaattttttttaaattagccagcagtggtggtatgtgcctgtagttctagctacttgggaggctgag

SEQ ID NO: 92990 - DNA, 80 bp, synthetic construct; identical to SEQ ID NO: 17243
  source 1..80: mol_type = other DNA

SEQ ID NO: 92991 - DNA, 80 bp, synthetic construct
  source 1..80: mol_type = other DNA
gttcaagaccagcctgggcaacgtggtgaaaccttgtctctacaaaaaaatacaaaaattaggcaaagtggcacacacct

SEQ ID NO: 92992 - DNA, 80 bp, synthetic construct
  source 1..80: mol_type = other DNA
gggatatgcaaatgaccagtaagtgcatgaaaaggtatacgttactcctcagacaaataaacattaaaaccgcaatgaac

SEQ ID NO: 92993 - DNA, 80 bp, synthetic construct
  source 1..80: mol_type = other DNA
caaccactttggaaaacagtttggcaatttcttataaagttaggcagttaaacatacacctactctatgacctagcattt

SEQ ID NO: 92994 - DNA, 80 bp, synthetic construct; identical to SEQ ID NO: 17244
  source 1..80: mol_type = other DNA

SEQ ID NO: 92995 - DNA, 80 bp, synthetic construct
  source 1..80: mol_type = other DNA
taatcattagtttgtagcaattactctttattccaatattttaataatccttgctctataatcataacttaggaaaaacc

SEQ ID NO: 92996 - DNA, 80 bp, synthetic construct
  source 1..80: mol_type = other DNA
ctagcagtagcgtcagtgccaaggaaaaacacccactacttagcagaccaggaaagggagtctccctttccccgggggag

SEQ ID NO: 92997 - DNA, 80 bp, synthetic construct
  source 1..80: mol_type = other DNA
cttttagatagcagtagcaaaattagtgaaagtactaaaagtctctgatatgcagaaataatggtgtaagctgtctctcc

SEQ ID NO: 92998 - DNA, 80 bp, synthetic construct
  source 1..80: mol_type = other DNA
attcggggccactaccggtctctgcgtcttggtggtagtggtcccctgggcccagctgtcttgtcttttatctttttatc

SEQ ID NO: 92999 - DNA, 80 bp, synthetic construct; identical to SEQ ID NO: 17245
  source 1..80: mol_type = other DNA

SEQ ID NO: 93000 - DNA, 80 bp, synthetic construct
  source 1..80: mol_type = other DNA
ctgtctccaaagagaaaaaaaaccaactcattgagctatctagtttaaatatgcagtttattgtttgtaaattatatctg

SEQ ID NO: 93001 - DNA, 80 bp, synthetic construct
  source 1..80: mol_type = other DNA
caccaccatgcccagctaatttttaaattatctgtagagatgaggttgcactatgttgcccaggctgatctcaaactcct

SEQ ID NO: 93002 - DNA, 80 bp, synthetic construct; identical to SEQ ID NO: 17246
  source 1..80: mol_type = other DNA

SEQ ID NO: 93003 - DNA, 80 bp, synthetic construct
  source 1..80: mol_type = other DNA
ctctatttaatttaatgtatatatgaccgtcaggccatgccatagccccgctgagcctggcgaccttggatcttcaatct

SEQ ID NO: 93004 - DNA, 80 bp, synthetic construct
  source 1..80: mol_type = other DNA
gcctgggccaacatggtaaaaccccgtctctactaagaatacaaaaattagctggacatggtggcaggcgcctgtagtcc

SEQ ID NO: 93005 - DNA, 80 bp, synthetic construct
  source 1..80: mol_type = other DNA
aggtggcatgaaagaaaaaaatggttagagttggaggcattgacaggtaacttggaagacacagccttcggagggctcag

SEQ ID NO: 93006 - DNA, 80 bp, synthetic construct; identical to SEQ ID NO: 17247
  source 1..80: mol_type = other DNA

SEQ ID NO: 93007 - DNA, 80 bp, synthetic construct
  source 1..80: mol_type = other DNA
ccctttagtccacagtttcacttttaagaatttattcttatgagtgtgtttgcatatgtgtgcaacgacttcgatacaag

SEQ ID NO: 93008 - DNA, 80 bp, synthetic construct
  source 1..80: mol_type = other DNA
aatgtattacttagcctgggcaccatagggagactatgtctcattcatatatattagagactcctgtagtcccaacagct

SEQ ID NO: 93009 - DNA, 80 bp, synthetic construct
  source 1..80: mol_type = other DNA
tcttttctataaaaataaaaaacacatatacacttaggaactggtgtcactcctgaggcaggatagggaggagggacctt

SEQ ID NO: 93010 - DNA, 80 bp, synthetic construct; identical to SEQ ID NO: 17248
  source 1..80: mol_type = other DNA

SEQ ID NO: 93011 - DNA, 80 bp, synthetic construct
  source 1..80: mol_type = other DNA
tggagtgcagtggtgcaagcacgactcactgcagccttgacctcccagggttaagcaatcctcccaccccaccctcccag

SEQ ID NO: 93012 - DNA, 80 bp, synthetic construct
  source 1..80: mol_type = other DNA
agccactgcactctgcccagaacttttttttctactgactctgaagtgttaccatagatgatactgaaactcatacattt

SEQ ID NO: 93013 - DNA, 80 bp, synthetic construct
  source 1..80: mol_type = other DNA
tttttggaacttcctttatttcactaaaaggaagagccttctgggagtaaagttgccataaatctcctctccagaggagc

SEQ ID NO: 93014 - DNA, 80 bp, synthetic construct; identical to SEQ ID NO: 17249
  source 1..80: mol_type = other DNA

SEQ ID NO: 93015 - DNA, 80 bp, synthetic construct
  source 1..80: mol_type = other DNA
gtagctgggattataggcgcccgccaccacgcctggctaatttttttgtatttttagtagaggcggggtttcatcatgtt

SEQ ID NO: 93016 - DNA, 80 bp, synthetic construct
  source 1..80: mol_type = other DNA
gtggcacaatcatggctcgctgcagcctcaacctcctgggcttaagcaatccttctaccgcagcatcctgcatagctgac

SEQ ID NO: 93017 - DNA, 80 bp, synthetic construct
  source 1..80: mol_type = other DNA
tttgcctgtttatctgtctattgtcagttaatttgcgggcccctgatcattggacctaagtcctcagtagagaaaaagat

SEQ ID NO: 93018 - DNA, 80 bp, synthetic construct
  source 1..80: mol_type = other DNA
taaacaagtgaacaaaggtctctggttttcctaggcagaggaccctgcggccttccgcagtgtttgtgtccctgggtatt

SEQ ID NO: 93019 - DNA, 80 bp, synthetic construct; identical to SEQ ID NO: 17250
  source 1..80: mol_type = other DNA

SEQ ID NO: 93020 - DNA, 80 bp, synthetic construct
  source 1..80: mol_type = other DNA
tactaaaaatacaaaaattagctgggcatggtggtgcgtgcctgtaatcccagctactgaggaggctgatgtgcgagaat

SEQ ID NO: 93021 - DNA, 80 bp, synthetic construct
  source 1..80: mol_type = other DNA
aggagttcaagaccagcctgggcaacatagtgggacccccatctctacaaaaaaatgaaaaataaaaaaaaattagccag

SEQ ID NO: 93022 - DNA, 80 bp, synthetic construct; identical to SEQ ID NO: 17251
  source 1..80: mol_type = other DNA

SEQ ID NO: 93023 - DNA, 80 bp, synthetic construct
  source 1..80: mol_type = other DNA
ccatgatccttcaagctaacaagaaacaacaaacagctggggaatatgtctcttcaacctgcttctttgactttaacaga

SEQ ID NO: 93024 - DNA, 80 bp, synthetic construct
  source 1..80: mol_type = other DNA
ccaagggaccactcagtcctgctgactctatcctccgaagcttcttggatcagcccctcccaccaacccttctgctattt

SEQ ID NO: 93025 - DNA, 80 bp, synthetic construct
  source 1..80: mol_type = other DNA
cattcatggcccttcatggagctctcctggcctgcctgacctctcaccacctcctgccttgcacttcactgcgtacagtc

SEQ ID NO: 93026 - DNA, 80 bp, synthetic construct
  source 1..80: mol_type = other DNA
ctcggcctcctgagtagctaggactacaggcatgcaccatcacgcccggctaattttttattttttgtagagatggggtc

SEQ ID NO: 93027 - DNA, 80 bp, synthetic construct; identical to SEQ ID NO: 17252
  source 1..80: mol_type = other DNA

SEQ ID NO: 93028 - DNA, 80 bp, synthetic construct
  source 1..80: mol_type = other DNA
gaagacttattcgaatctccaggctggggcaagtgcttggttcctgtgttctaatagttccttgtgttaactaatctcta

SEQ ID NO: 93029 - DNA, 80 bp, synthetic construct
  source 1..80: mol_type = other DNA
gtgcatgaccatagaacagtacaagtttaattgtgtattagtaaagactcctatgtagagagaaacaacctcaactcaaa

SEQ ID NO: 93030 - DNA, 80 bp, synthetic construct
  source 1..80: mol_type = other DNA
aggcaagatgaccacgagtactgttggtccttagtatctccaatttagcaacctcagtgaagagagaaattctctctcaa

SEQ ID NO: 93031 - DNA, 80 bp, synthetic construct; identical to SEQ ID NO: 17253
  source 1..80: mol_type = other DNA

SEQ ID NO: 93032 - DNA, 80 bp, synthetic construct
  source 1..80: mol_type = other DNA
agatttcaagccaccaatcagcaggctgcaaaggatcttgaatttagaagattttgctggcccggaaatacatagtgatg

SEQ ID NO: 93033 - DNA, 80 bp, synthetic construct
  source 1..80: mol_type = other DNA
tgccctgtaacatccctctcaggcaagatgaacacgagtactgttggtccttagtatctccaatttagcaacctcaggag

SEQ ID NO: 93034 - DNA, 80 bp, synthetic construct
  source 1..80: mol_type = other DNA
ttgccagctctggtcaaggacctacaagctgttgtaaccttcctgtttttcatgcatttaaaaaattagctgggcatagt

SEQ ID NO: 93035 - DNA, 80 bp, synthetic construct; identical to SEQ ID NO: 17254
  source 1..80: mol_type = other DNA

SEQ ID NO: 93036 - DNA, 80 bp, synthetic construct
  source 1..80: mol_type = other DNA
cctcagccacagttccctgggcccagttatagccaaactttccccaggccctgtccctggcaactactgatctgttttct

SEQ ID NO: 93037 - DNA, 80 bp, synthetic construct
  source 1..80: mol_type = other DNA
gactacaggcttgtgccaccatgcccagctaatttaaaaaaacaaaaaacaaaacaaaaaaaaaacttttttgtagattg

SEQ ID NO: 93038 - DNA, 80 bp, synthetic construct
  source 1..80: mol_type = other DNA
cataaggtatgaaggttttgagtttagcttctttcatttagcataagacaattgatacatgtccatgatgctctatacat

SEQ ID NO: 93039 - DNA, 80 bp, synthetic construct
  source 1..80: mol_type = other DNA
gggacagggactggtctcactatgttgctcaggctgatccgaaactcctggactcaagcaattctcccacctcagcctcc

SEQ ID NO: 93040 - DNA, 80 bp, synthetic construct; identical to SEQ ID NO: 17255
  source 1..80: mol_type = other DNA

SEQ ID NO: 93041 - DNA, 80 bp, synthetic construct
  source 1..80: mol_type = other DNA
atttaagaccagcttgggcaacatagtgagaccccatctctcaaaaaaaattaaaaattaactgggcatggtggtatgca

SEQ ID NO: 93042 - DNA, 80 bp, synthetic construct
  source 1..80: mol_type = other DNA
tttgccatccatatatcatctttgtggaagtgtccattcaaatacattttttttttcagacaggttttcactctgttgcc

SEQ ID NO: 93043 - DNA, 80 bp, synthetic construct; identical to SEQ ID NO: 17256
  source 1..80: mol_type = other DNA

SEQ ID NO: 93044 - DNA, 80 bp, synthetic construct
  source 1..80: mol_type = other DNA
tctttactgcgacctgttttagcagcaaggtctttatcacctgtatcttgtgctgatctcctatcttatcctgtgactta

SEQ ID NO: 93045 - DNA, 80 bp, synthetic construct
  source 1..80: mol_type = other DNA
ctactgacagcagaatagatttgaaaagtcaagttttattagatagaaagtacactgcagaaaagtgcagccaggcgcat

SEQ ID NO: 93046 - DNA, 80 bp, synthetic construct
  source 1..80: mol_type = other DNA
gaaattctagttatttataaattttggggaaagaggcctggaaccagatgctgactttaggtaacagggaaggctaatta

SEQ ID NO: 93047 - DNA, 80 bp, synthetic construct; identical to SEQ ID NO: 17257
  source 1..80: mol_type = other DNA

SEQ ID NO: 93048 - DNA, 80 bp, synthetic construct
  source 1..80: mol_type = other DNA
aaaaaaaaaaaaaagcgtctctccatttgtggcttttctttttgttctttcaacagtgtcttttgaagagaagttcttca

SEQ ID NO: 93049 - DNA, 80 bp, synthetic construct
  source 1..80: mol_type = other DNA
aattaatttttatggggtgtgaagtatagattgagattcatttttttgcacctggatgtctaattgttccatctccattc

SEQ ID NO: 93050 - DNA, 80 bp, synthetic construct
  source 1..80: mol_type = other DNA
ataattccaaagcgccaaacaaggaaacaggaggaattctcaagcctcaaatccattttctctaggttttctgggcaaag

SEQ ID NO: 93051 - DNA, 80 bp, synthetic construct; identical to SEQ ID NO: 17258
  source 1..80: mol_type = other DNA

SEQ ID NO: 93052 - DNA, 80 bp, synthetic construct
  source 1..80: mol_type = other DNA
cgcatgcctatagatccagttactcaggaggctgaggcaggagaatcacttgaacccaggagcaggaggttgcagtgagc

SEQ ID NO: 93053 - DNA, 80 bp, synthetic construct
  source 1..80: mol_type = other DNA
gttgtatgcaaaacccaaaggagaaactccatgggaaacttagcatctcacaaggccttagatttcatctacagaatgga

SEQ ID NO: 93054 - DNA, 80 bp, synthetic construct
  source 1..80: mol_type = other DNA
ctagttgaattttttcctctcttaatcgattttataaagttttcctggggacagttgcatgcatggatctatttctgggc

SEQ ID NO: 93055 - DNA, 80 bp, synthetic construct; identical to SEQ ID NO: 17259
  source 1..80: mol_type = other DNA

SEQ ID NO: 93056 - DNA, 80 bp, synthetic construct
  source 1..80: mol_type = other DNA
cctcctgggtttaagcgattctcctgcctcagcctactgtgtaggtgggattacaggcatgcgccaccatgcccagctaa

SEQ ID NO: 93057 - DNA, 80 bp, synthetic construct
  source 1..80: mol_type = other DNA
tgtgcctggccttttttttttttttttttttttgaggcagagtctcactctgtcacccaagcaggaatgcagtggtgtgt

SEQ ID NO: 93058 - DNA, 80 bp, synthetic construct
  source 1..80: mol_type = other DNA
gcttgagctcaaactcatgagctcaagaaatccacccatcttggcctcgcaaaatgctgggattacaggtgtgagccacc

SEQ ID NO: 93059 - DNA, 80 bp, synthetic construct; identical to SEQ ID NO: 17260
  source 1..80: mol_type = other DNA

SEQ ID NO: 93060 - DNA, 80 bp, synthetic construct
  source 1..80: mol_type = other DNA
ggctggccaacctggtgaaatcccatctctactaaaaatacaaaaattagccaggcattatggcaggtgcctataatccc

SEQ ID NO: 93061 - DNA, 80 bp, synthetic construct
  source 1..80: mol_type = other DNA
agattagtggtaactggttttgctttgtttttagccccaaagttttttttcgctggctatgtgaaatacattcctggatt

SEQ ID NO: 93062 - DNA, 80 bp, synthetic construct
  source 1..80: mol_type = other DNA
ggcgctatcttggctcactacaacctctgcctcccaggttcatgcaattctcctgtctcagcctcccaagtagctgggat

SEQ ID NO: 93063 - DNA, 80 bp, synthetic construct; identical to SEQ ID NO: 17261
  source 1..80: mol_type = other DNA

SEQ ID NO: 93064 - DNA, 80 bp, synthetic construct
  source 1..80: mol_type = other DNA
tggggaaaatttgcatctgtagagaatctctactaatgcagccaggccttccttttctacaaattttccatatctaagag

SEQ ID NO: 93065 - DNA, 80 bp, synthetic construct
  source 1..80: mol_type = other DNA
atgcaaccacaaaaaaaacaagatcatgtcctttgcagggacatagatggagctggaagccattatcctcagcaaattct

SEQ ID NO: 93066 - DNA, 80 bp, synthetic construct
  source 1..80: mol_type = other DNA
agctgagtagctatgtgatgggttgatctgtgcagcaaaccacgatggcacacatttacctatgtaacaaacctgcacat

SEQ ID NO: 93067 - DNA, 80 bp, synthetic construct; identical to SEQ ID NO: 17262
  source 1..80: mol_type = other DNA

SEQ ID NO: 93068 - DNA, 80 bp, synthetic construct
  source 1..80: mol_type = other DNA
atgacccccacaagggtgatgggcaagtgcacgattctagaaccggactgctcagtctcaaatcctagctctaattctta

SEQ ID NO: 93069 - DNA, 80 bp, synthetic construct
  source 1..80: mol_type = other DNA
agaacagagcctggcatgtagtaagcccttgataagtgtcaactattatttgccttatctttacctatctcagtttttgt

SEQ ID NO: 93070 - DNA, 80 bp, synthetic construct
  source 1..80: mol_type = other DNA
tcatttaatagtcagcttaccacattgccatggccctcctggaagatccatatacagatggcctccaacttatgagggtt

SEQ ID NO: 93071 - DNA, 80 bp, synthetic construct; identical to SEQ ID NO: 17263
  source 1..80: mol_type = other DNA

SEQ ID NO: 93072 - DNA, 80 bp, synthetic construct
  source 1..80: mol_type = other DNA
gtgaaatgatcagccttggttaaatccactgtcatcacaaagaaaagaggtgagctgactgatgatatggaaaaattact

SEQ ID NO: 93073 - DNA, 80 bp, synthetic construct
  source 1..80: mol_type = other DNA
aaaagttgtcatcattttcataatgcagaggtcagcagtgaggccacaattgcagatactaaatgtgccaaagcttttaa

SEQ ID NO: 93074 - DNA, 80 bp, synthetic construct
  source 1..80: mol_type = other DNA
atgctgtttttgggtggaaatgttgcatggttcaaattctccacttggagaaccctagagcattcaagaatgtgaataag

SEQ ID NO: 93075 - DNA, 80 bp, synthetic construct; identical to SEQ ID NO: 17264
  source 1..80: mol_type = other DNA

SEQ ID NO: 93076 - DNA, 80 bp, synthetic construct
  source 1..80: mol_type = other DNA
ttgcttcagcttgggaagaagtcacacagcaatgcatgaacggcatttggaagaaagtttaaaagacatatgttgaacac

SEQ ID NO: 93077 - DNA, 80 bp, synthetic construct
  source 1..80: mol_type = other DNA
ggggaagaaataagtgaagaagctgaggcagaagaagaagaagttatacctgaggcaccaagaacattcacagcaaagaa

SEQ ID NO: 93078 - DNA, 80 bp, synthetic construct
  source 1..80: mol_type = other DNA
agaagaaacaaactttacagtcaaaacttagtatcttcctgaagaacaggatgcctgctaaaccaacaataagtgtccat

SEQ ID NO: 93079 - DNA, 80 bp, synthetic construct; identical to SEQ ID NO: 17265
  source 1..80: mol_type = other DNA

SEQ ID NO: 93080 - DNA, 80 bp, synthetic construct
  source 1..80: mol_type = other DNA
atggggaaaacctatctctactaaaaatacaaaaataagctgggcataatggtgtgttcctgtaatcccagctacttggg

SEQ ID NO: 93081 - DNA, 80 bp, synthetic construct
  source 1..80: mol_type = other DNA
aggctttgcatttcatgatattggccaactataggataatatctgagcacagttaaggcaagcaggctaagctatgatgt

SEQ ID NO: 93082 - DNA, 80 bp, synthetic construct
  source 1..80: mol_type = other DNA
aataattacatattacagaaaatctgctttgtgagttatacaatttggctggtagtgaaaggtgaccagctgagttctga

SEQ ID NO: 93083 - DNA, 80 bp, synthetic construct; identical to SEQ ID NO: 17266
  source 1..80: mol_type = other DNA

SEQ ID NO: 93084 - DNA, 80 bp, synthetic construct
  source 1..80: mol_type = other DNA
tggaatgggatcattgaagagtgggggctatgtctactccgaggctgaatactttttttctaaatactttaatattttta

SEQ ID NO: 93085 - DNA, 80 bp, synthetic construct
  source 1..80: mol_type = other DNA
aaagtttagggaaacttaacagaatttcaacatctttctgtttttgttttgttttgtttagaaacaccctgttgcccagg

SEQ ID NO: 93086 - DNA, 80 bp, synthetic construct
  source 1..80: mol_type = other DNA
attctattagccaagggggacttttccttttgggaaaggtattgttaacatcccacagtgaagatgtaaatcatggggta

SEQ ID NO: 93087 - DNA, 80 bp, synthetic construct; identical to SEQ ID NO: 17267
  source 1..80: mol_type = other DNA

SEQ ID NO: 93088 - DNA, 80 bp, synthetic construct
  source 1..80: mol_type = other DNA
cctgcctcagcctcctgagtagctgggattataggtgcccaccaacacacccagctaatttttgtatttttagtagagat

SEQ ID NO: 93089 - DNA, 80 bp, synthetic construct
  source 1..80: mol_type = other DNA
tgataattgaaagctatagtcatacataccaatggctgtagggtgatgtcgtgattggggccatgtaaagcatgcaggtt

SEQ ID NO: 93090 - DNA, 80 bp, synthetic construct
  source 1..80: mol_type = other DNA
gtgaagtaaacagcagatgcgaacaggctttctctgaagcccccttatccgaatttaggaaaggctgactcacaggaaaa

SEQ ID NO: 93091 - DNA, 80 bp, synthetic construct; identical to SEQ ID NO: 17268
  source 1..80: mol_type = other DNA

SEQ ID NO: 93092 - DNA, 80 bp, synthetic construct
  source 1..80: mol_type = other DNA
gaggtatcccagctaagaagttattaggattgagaaaataaattatattttttctccctttcaataccctgctgtaagct

SEQ ID NO: 93093 - DNA, 80 bp, synthetic construct
  source 1..80: mol_type = other DNA
ctgggattacagacatgcaccaccacgcctggctaatttttgtatttttagcagagacgaggtttcaccatgttggctgg

SEQ ID NO: 93094 - DNA, 80 bp, synthetic construct; identical to SEQ ID NO: 17269
  source 1..80: mol_type = other DNA

SEQ ID NO: 93095 - DNA, 80 bp, synthetic construct
  source 1..80: mol_type = other DNA
ttgaggtcaggagttcgagaccagcctggccaacatggtgagaccccgtctctattaaaaatacaaaagttagctgggca

SEQ ID NO: 93096 - DNA, 80 bp, synthetic construct
  source 1..80: mol_type = other DNA
taaataaataaataaatacctgagactgggtaatttttatatatataaaaaagaggtttaatttgctcatggttctgtag

SEQ ID NO: 93097 - DNA, 80 bp, synthetic construct
  source 1..80: mol_type = other DNA
ggtctcatgagaagtcactcactatcgtgaagacagcaccaagccatgagggatccacccccaagacccaaatgcctccc

SEQ ID NO: 93098 - DNA, 80 bp, synthetic construct
  source 1..80: mol_type = other DNA
tctctgaatttatctatgacttgtgagccacaggttcatgctctaccacctttctgaatcaaaccaatgcataacttaca

SEQ ID NO: 93099 - DNA, 80 bp, synthetic construct; identical to SEQ ID NO: 17270
  source 1..80: mol_type = other DNA

SEQ ID NO: 93100 - DNA, 80 bp, synthetic construct
  source 1..80: mol_type = other DNA
cgcccagctgaattttttcatttttagtagagagggggtttcaccaggttggccaggctggtctcgaactcctgacctca

SEQ ID NO: 93101 - DNA, 80 bp, synthetic construct
  source 1..80: mol_type = other DNA
agaatctgcattgatgccaccaggctgtttctgaagccctcccctatctggatctgggcaagattagaaagtctgacacc

SEQ ID NO: 93102 - DNA, 80 bp, synthetic construct
  source 1..80: mol_type = other DNA
ccccatgaaagggtgggagtaatcactctgtggttctccttgtgcacattaataaatctgtacgtcatttcttctgagaa

SEQ ID NO: 93103 - DNA, 80 bp, synthetic construct
  source 1..80: mol_type = other DNA
tgtccctggacaaagaacaatggatagccaatcaatagcttatgttatttaaatgtaaattcttggtaaagaatttagga

SEQ ID NO: 93104 - DNA, 80 bp, synthetic construct; identical to SEQ ID NO: 17271
  source 1..80: mol_type = other DNA

SEQ ID NO: 93105 - DNA, 80 bp, synthetic construct
  source 1..80: mol_type = other DNA
tcctgaattagaacctcccactctttgattgaaggtccaaacgttgtttgaactatttttcaaaccctctctgtcctggg

SEQ ID NO: 93106 - DNA, 80 bp, synthetic construct
  source 1..80: mol_type = other DNA
acacagcagaatttttgatcaaaagattgacagttaggtactggtggtttcattttgttggggctcagaaaccaataccc

SEQ ID NO: 93107 - DNA, 80 bp, synthetic construct; identical to SEQ ID NO: 17272
  source 1..80: mol_type = other DNA

SEQ ID NO: 93108 - DNA, 80 bp, synthetic construct
  source 1..80: mol_type = other DNA
atataaccttccatttgtggagagttcttagcatgagagagagagagaaaaataagatggtatctgagcttctgtactca

SEQ ID NO: 93109 - DNA, 80 bp, synthetic construct
  source 1..80: mol_type = other DNA
gaccaagggctttggcccccatagtttcatagagcatgcttttaagattgcagctcagccaggcacggtgcctcacatct

SEQ ID NO: 93110 - DNA, 80 bp, synthetic construct
  source 1..80: mol_type = other DNA
catcacttgaaaatgtggacttagcctttcatttgtgaccagttcctgttagttcctaactgaaacgtgtaccccctttt

SEQ ID NO: 93111 - DNA, 80 bp, synthetic construct
  source 1..80: mol_type = other DNA
gagacatgtcacactttgaccttaaacacattcccccattggccacttttgaaaagttcttaaattatgggaaatcagct

SEQ ID NO: 93112 - DNA, 80 bp, synthetic construct; identical to SEQ ID NO: 17273
  source 1..80: mol_type = other DNA

SEQ ID NO: 93113 - DNA, 80 bp, synthetic construct
  source 1..80: mol_type = other DNA
acaggtcgaggctgcaataagccgtgatcacaccactgcactcccgcctgggttgacagagtgagacctttcctcaaaaa

SEQ ID NO: 93114 - DNA, 80 bp, synthetic construct
  source 1..80: mol_type = other DNA
gtcatcttcactaaaagttgatatttagtactgggagcagtggttcactgctacaatcccaacacttggcgaagaattga

SEQ ID NO: 93115 - DNA, 80 bp, synthetic construct
  source 1..80: mol_type = other DNA
tttgatcctcaccgttcacctattttacatatcctacccttccctaattgttttttttacactgtcttccccacctttga

SEQ ID NO: 93116 - DNA, 80 bp, synthetic construct; identical to SEQ ID NO: 17274
  source 1..80: mol_type = other DNA

SEQ ID NO: 93117 - DNA, 80 bp, synthetic construct
  source 1..80: mol_type = other DNA
aaatgttaaaaaaaaaaaaaatatatatatatatatatatatatatatatatatatatatatatatatatatatatatat

SEQ ID NO: 93118 - DNA, 80 bp, synthetic construct
  source 1..80: mol_type = other DNA
tctgggtgacagagcaagaccttgtctcaaaaaaaaaaaaaaaaaaaaaaaaaaagctgatatttaggctataatttttt

SEQ ID NO: 93119 - DNA, 80 bp, synthetic construct; identical to SEQ ID NO: 17275
  source 1..80: mol_type = other DNA

SEQ ID NO: 93120 - DNA, 80 bp, synthetic construct
  source 1..80: mol_type = other DNA
agtctgaagtgttgtgggcaatttctttcaggtctaaagctctattcctttttgcattgtatcgcctaatctctttggtt

SEQ ID NO: 93121 - DNA, 80 bp, synthetic construct
  source 1..80: mol_type = other DNA
aatggttgctactgcaggcagggcacacttttctttgtgcatttagatgagaaaggcatcatttgaacacttcaaaggtg

SEQ ID NO: 93122 - DNA, 80 bp, synthetic construct
  source 1..80: mol_type = other DNA
ctgccttccagttgtgcctgcttttcacatttaaatatttgaccctgaagactacaaatgcttcccttgccctattcact

SEQ ID NO: 93123 - DNA, 80 bp, synthetic construct
  source 1..80: mol_type = other DNA
atttttaagagcatcgtcctacactcaagccacaagaaaacttttataatgggaaagatattgcttaaagtttacacaac

SEQ ID NO: 93124 - DNA, 80 bp, synthetic construct; identical to SEQ ID NO: 17276
  source 1..80: mol_type = other DNA

SEQ ID NO: 93125 - DNA, 80 bp, synthetic construct
  source 1..80: mol_type = other DNA
tgtaagtccaagagagccatgttaggcttatctggtatgttaaaagtgtacaggaaacactgtcaagtaagaaatatttg

SEQ ID NO: 93126 - DNA, 80 bp, synthetic construct
  source 1..80: mol_type = other DNA
ctattcctgtgatagtgagtgagttatcatcagatctggttgttaaaagtttgtagcaacccccacccttcctactccag

SEQ ID NO: 93127 - DNA, 80 bp, synthetic construct; identical to SEQ ID NO: 17277
  source 1..80: mol_type = other DNA

SEQ ID NO: 93128 - DNA, 80 bp, synthetic construct
  source 1..80: mol_type = other DNA
tggaaatgaggaactttttggtaactggagcaaaggtcacttttgttatgccttagcaaagaacttggaggcattgtgcc

SEQ ID NO: 93129 - DNA, 80 bp, synthetic construct
  source 1..80: mol_type = other DNA
tatattgaaaagggaagcaggatgggcacagtggctcatgcgtgtaatcctagaattttgggaggccaaggcagacagat

SEQ ID NO: 93130 - DNA, 80 bp, synthetic construct
  source 1..80: mol_type = other DNA
attgtgccactgcactctagcctgagtgacagagaccctgtctcaaaactaaataaataaaaagtaaaagggaagcaaag

SEQ ID NO: 93131 - DNA, 80 bp, synthetic construct
  source 1..80: mol_type = other DNA
accccgtctctactaaaaatacaaaaattagctgggtgtggtggcacatgcctataatcccagctcctcaagaggctgag

SEQ ID NO: 93132 - DNA, 80 bp, synthetic construct; identical to SEQ ID NO: 17278
  source 1..80: mol_type = other DNA

SEQ ID NO: 93133 - DNA, 80 bp, synthetic construct
  source 1..80: mol_type = other DNA
gtacagcgtgggttactacttcagagagtgcaagccagaagccttggtggtttccacagagtgttaagcatccaggtgtg

SEQ ID NO: 93134 - DNA, 80 bp, synthetic construct
  source 1..80: mol_type = other DNA
cacagagcccccattgggcacttccctgtagagctgtgagaagaggaccaatatcctccagaccccagaatggtagatcc

SEQ ID NO: 93135 - DNA, 80 bp, synthetic construct
  source 1..80: mol_type = other DNA
tattttggagctttaagatttaatgaccaccctgctggatttcaaacttgcatgaggcctgtagcccctttcttttgacc

SEQ ID NO: 93136 - DNA, 80 bp, synthetic construct; identical to SEQ ID NO: 17279
  source 1..80: mol_type = other DNA

SEQ ID NO: 93137 - DNA, 80 bp, synthetic construct
  source 1..80: mol_type = other DNA
cattggattaagttaaaactttcagaattctaataaactgatgcatcattcatgaatattgctaacccaacatcaagcag

SEQ ID NO: 93138 - DNA, 80 bp, synthetic construct
  source 1..80: mol_type = other DNA
atacatttattagcaaaatggaaacatttacctgtctctctctacctgatttctccaaagtttaaaaattattcatgagt

SEQ ID NO: 93139 - DNA, 80 bp, synthetic construct; identical to SEQ ID NO: 17280
  source 1..80: mol_type = other DNA

SEQ ID NO: 93140 - DNA, 80 bp, synthetic construct
  source 1..80: mol_type = other DNA
ctcccatcttaacctcccaagtacctgggactacaggcatgcaccaccatgcccaactaattaaaaaaaaaatttttttt

SEQ ID NO: 93141 - DNA, 80 bp, synthetic construct
  source 1..80: mol_type = other DNA
ttatggacacctggagaaaagaggaaatcacccaatttgtacatatattacaggttcagtctaatggtgaatccttggct

SEQ ID NO: 93142 - DNA, 80 bp, synthetic construct
  source 1..80: mol_type = other DNA
atggtaaaaccctgtctctacaaaaaatacaaaaattagctgggcatgttggtgcatgcctgtaatctcagctactcaga

SEQ ID NO: 93143 - DNA, 80 bp, synthetic construct; identical to SEQ ID NO: 17281
  source 1..80: mol_type = other DNA

SEQ ID NO: 93144 - DNA, 80 bp, synthetic construct
  source 1..80: mol_type = other DNA
aactcctgacctcagatgatctgcccaccttggcctcccaaaatgctgaaattacaggcatgagccacagaacctggtct

SEQ ID NO: 93145 - DNA, 80 bp, synthetic construct
  source 1..80: mol_type = other DNA
aacatacttgtaactgttgctaatcagagtgtatattcaaggcaacttgaatatatgttcccaggtttcaatccttaagc

SEQ ID NO: 93146 - DNA, 80 bp, synthetic construct
  source 1..80: mol_type = other DNA
actaaaaatacaaaaattagctgggcgtggtggcagctgcctgtaatcccagctactctggaagctgaggcaggagaatc

SEQ ID NO: 93147 - DNA, 80 bp, synthetic construct; identical to SEQ ID NO: 17282
  source 1..80: mol_type = other DNA

SEQ ID NO: 93148 - DNA, 80 bp, synthetic construct
  source 1..80: mol_type = other DNA
ttgagagatcagtgtgcagtttgaccttatggctaggggttttatacattggcacacttccagggtctcgttaattctcc

SEQ ID NO: 93149 - DNA, 80 bp, synthetic construct
  source 1..80: mol_type = other DNA
tgtgcttccctggcgctggctgtgaccaattattattttagagagacaggttgacaactgcctgaccatcacgatggtca

SEQ ID NO: 93150 - DNA, 80 bp, synthetic construct
  source 1..80: mol_type = other DNA
taaaaaatgaacctggaaattagcaatgtttcactattaacagcgctaacaatgagaaagaaaagagacaggagccagcc

SEQ ID NO: 93151 - DNA, 80 bp, synthetic construct; identical to SEQ ID NO: 17283
  source 1..80: mol_type = other DNA

SEQ ID NO: 93152 - DNA, 80 bp, synthetic construct
  source 1..80: mol_type = other DNA
caaaattagccgggtgtggtggctcatgcctgtaatcccagctactcgggagcctgaggcaggagaatcggttgaacccg

SEQ ID NO: 93153 - DNA, 80 bp, synthetic construct
  source 1..80: mol_type = other DNA
aggccgtggtgggaggatcacttgagcctggcaggtagaggctgcagtgagctgtgacagcctgagtgacagagtaagac

SEQ ID NO: 93154 - DNA, 80 bp, synthetic construct
  source 1..80: mol_type = other DNA
tgagaccctgtctctataaaaacaaaaaacataagatcacgccactgcactccagcctgggtgacagagcgagacttgtc

SEQ ID NO: 93155 - DNA, 80 bp, synthetic construct
  source 1..80: mol_type = other DNA
acaatctaggctcactgcaacctctgcctcccaggctcaagggatcctcccacctcagcctcccaagcagctgggaacac

SEQ ID NO: 93156 - DNA, 80 bp, synthetic construct; identical to SEQ ID NO: 17284
  source 1..80: mol_type = other DNA

SEQ ID NO: 93157 - DNA, 80 bp, synthetic construct
  source 1..80: mol_type = other DNA
aaccacagcagggctattgggaagctttctgtgtctctcagatctcaaacctttgtagaaacctgtttgtgcttaaaatg

SEQ ID NO: 93158 - DNA, 80 bp, synthetic construct
  source 1..80: mol_type = other DNA
aaactgctccaagaattattagtagagcaatgtctgccaataatgattgcttcaataatggagcccaaaatagaatggac

SEQ ID NO: 93159 - DNA, 80 bp, synthetic construct
  source 1..80: mol_type = other DNA
aaggctggacccagtggctcatatctgtaatcccagcactctgggaggctgaggcagaaggattgcctgagcccaggagt

SEQ ID NO: 93160 - DNA, 80 bp, synthetic construct; identical to SEQ ID NO: 17285
  source 1..80: mol_type = other DNA

SEQ ID NO: 93161 - DNA, 80 bp, synthetic construct
  source 1..80: mol_type = other DNA
caggttggagtgtagtggtgccatcacagttcactgcagcctcaacctcccaggctcaagcaatcttcccatttcagcct

SEQ ID NO: 93162 - DNA, 80 bp, synthetic construct
  source 1..80: mol_type = other DNA
tgaaccaccaagcccaacctgattttttaattttaatttttcttttcttttgcagaggtggggggggtgggggggcggtt

SEQ ID NO: 93163 - DNA, 80 bp, synthetic construct
  source 1..80: mol_type = other DNA
cattttattcttctgtgcccatggtcatttcagaaggaacttacggttccttgaagcagaaagtaaatttgcatttcata

SEQ ID NO: 93164 - DNA, 80 bp, synthetic construct; identical to SEQ ID NO: 17286
  source 1..80: mol_type = other DNA

SEQ ID NO: 93165 - DNA, 80 bp, synthetic construct
  source 1..80: mol_type = other DNA
aattagaggatgaatgagctgttagaaaaactcatttgctgtgtaacttgactgtctctatctctagaggtggcccccag

SEQ ID NO: 93166 - DNA, 80 bp, synthetic construct
  source 1..80: mol_type = other DNA
gagggtttgcaattaaagatatcagaaaaacttgtgagaatcaaagagctgcagtattgtggtgggattataggcaggga

SEQ ID NO: 93167 - DNA, 80 bp, synthetic construct; identical to SEQ ID NO: 17287
  source 1..80: mol_type = other DNA

SEQ ID NO: 93168 - DNA, 80 bp, synthetic construct
  source 1..80: mol_type = other DNA
ggagtgcagtggtgcgatcgcagctctctgtaacctctgtctccctggttcaagtgattcttctgcctcagcctcccaag

SEQ ID NO: 93169 - DNA, 80 bp, synthetic construct
  source 1..80: mol_type = other DNA
ccatcatgcccagcctgcctggctacttattttattctttttttttttttttttttttttttgagacagagtctcactct

SEQ ID NO: 93170 - DNA, 80 bp, synthetic construct
  source 1..80: mol_type = other DNA
caccatgttgaccaggctggtctcgaactcctgacctcaagtgatccacctgctttggccttccaaagtgctgggattac

SEQ ID NO: 93171 - DNA, 80 bp, synthetic construct
  source 1..80: mol_type = other DNA
cccaagtagctggaactacaggcgcccaccaccacacccagctagtttttgtatttttagtagagatggagtttcaccat

SEQ ID NO: 93172 - DNA, 80 bp, synthetic construct; identical to SEQ ID NO: 17288
  source 1..80: mol_type = other DNA

SEQ ID NO: 93173 - DNA, 80 bp, synthetic construct
  source 1..80: mol_type = other DNA
tcctggtcgggccactaattggaaagggtgaagggagccaagatatttccaaaaggtggaaaaagccttttttttggtaa

SEQ ID NO: 93174 - DNA, 80 bp, synthetic construct
  source 1..80: mol_type = other DNA
gggtttcaccatgttggccaggctggtctcaaattcctgacctcaagcaatccgcccaccaaggcctcccaaagtgctgg

SEQ ID NO: 93175 - DNA, 80 bp, synthetic construct
  source 1..80: mol_type = other DNA
aatcaaagctcacagatcagaagaactgggaagaaactcaaagaccatttaattaggggctctcaattcggttgctcatt

SEQ ID NO: 93176 - DNA, 80 bp, synthetic construct; identical to SEQ ID NO: 17289
  source 1..80: mol_type = other DNA

SEQ ID NO: 93177 - DNA, 80 bp, synthetic construct
  source 1..80: mol_type = other DNA
gcactttgggaggctgaggagggaggattgcttgagcccaagagttcaagaccagcctgggcaacatagtgggaccctgt

SEQ ID NO: 93178 - DNA, 80 bp, synthetic construct
  source 1..80: mol_type = other DNA
cgttctttgttgaagatgttatataagctggaattgaaagccacctctcggcatggtggctcaaacctataatcccagca

SEQ ID NO: 93179 - DNA, 80 bp, synthetic construct; identical to SEQ ID NO: 17290
  source 1..80: mol_type = other DNA

SEQ ID NO: 93180 - DNA, 80 bp, synthetic construct
  source 1..80: mol_type = other DNA
ctcacccctgtaatcccagcactttgagaggccaaggtgggcggatcacttgaggataggagttcgagaccagcctggcc

SEQ ID NO: 93181 - DNA, 80 bp, synthetic construct
  source 1..80: mol_type = other DNA
tgggcaacaagagcaagactccatctcaaaaaaaaaaaaaaaaacaaattagccgtgcttggttgtgggtgcctgtaatc

SEQ ID NO: 93182 - DNA, 80 bp, synthetic construct
  source 1..80: mol_type = other DNA
acaacaagataaggggaaaagactttgagtctccaggggttacaacttaggggaaggcaaataaatggcagataaagata

SEQ ID NO: 93183 - DNA, 80 bp, synthetic construct
  source 1..80: mol_type = other DNA
acacaaggagggcagagagttctcctgcatctgctactttcttgccttcagctcaacaatccttctgtgaaagaggcata

SEQ ID NO: 93184 - DNA, 80 bp, synthetic construct; identical to SEQ ID NO: 17291
  source 1..80: mol_type = other DNA

SEQ ID NO: 93185 - DNA, 80 bp, synthetic construct
  source 1..80: mol_type = other DNA
attctcctgcgtcagcctcccgagtagctgggattacaggcatgtgccaccacaccctactaattttgtatttttagtag

SEQ ID NO: 93186 - DNA, 80 bp, synthetic construct
  source 1..80: mol_type = other DNA
gtgtaaaagttttttttttttttgagatggagtctcgctctgttgcccaggctggagcgcagtggtgcaatctcggctca

SEQ ID NO: 93187 - DNA, 80 bp, synthetic construct; identical to SEQ ID NO: 17292
  source 1..80: mol_type = other DNA

SEQ ID NO: 93188 - DNA, 80 bp, synthetic construct
  source 1..80: mol_type = other DNA
gaggttaggagtttgagaccagtctggccaacacagtgaaaccccatctctactaaaaatacaaaaattagacaggcgtg

SEQ ID NO: 93189 - DNA, 80 bp, synthetic construct
  source 1..80: mol_type = other DNA
gaaagaaagaaagaattcggggcgagtccacagagtaaaatgaaagcaagtttattagagaagtaaagaaacaaaagaat

SEQ ID NO: 93190 - DNA, 80 bp, synthetic construct
  source 1..80: mol_type = other DNA
ttacaggtgtgcgccgccacaccagggctaatttttgtatttttagtagaggcagggtttcacattgttggccaggctgg

SEQ ID NO: 93191 - DNA, 80 bp, synthetic construct; identical to SEQ ID NO: 17293
  source 1..80: mol_type = other DNA

SEQ ID NO: 93192 - DNA, 80 bp, synthetic construct
  source 1..80: mol_type = other DNA
gggtcttggtgacctgtatcttatgacctcctgtcttatcctatgactaagaatgcctgacctccttccaatgcagcctg

SEQ ID NO: 93193 - DNA, 80 bp, synthetic construct
  source 1..80: mol_type = other DNA
gaaatcagatatgaaattgtacataagctatgatcctaagttagatgcacagacaaaaaggctaaaacacaccaaaatgt

SEQ ID NO: 93194 - DNA, 80 bp, synthetic construct
  source 1..80: mol_type = other DNA
gtttattaagtattaacttacatgatcacaagatcccataataggctgtctgcaagttgaggagcaaggatagctacgcc

SEQ ID NO: 93195 - DNA, 80 bp, synthetic construct
  source 1..80: mol_type = other DNA
agattaagggtgagtctgccttccccagcctactgactcaaatgttaatctcttttggcaacaccctcacagacacaccc

SEQ ID NO: 93196 - DNA, 80 bp, synthetic construct; identical to SEQ ID NO: 17294
  source 1..80: mol_type = other DNA

SEQ ID NO: 93197 - DNA, 80 bp, synthetic construct
  source 1..80: mol_type = other DNA
tttgtgaagggtctgctaatgggctatctggaaagtcagaacacaggtctcttgtttttgagtcttgatctgggtaggtc

SEQ ID NO: 93198 - DNA, 80 bp, synthetic construct
  source 1..80: mol_type = other DNA
cttccaacgaagtgatgcagggacgtgcctgtaggggatgggctccttgaaattatcaccaaaacaggctgggcgcagtg

SEQ ID NO: 93199 - DNA, 80 bp, synthetic construct
  source 1..80: mol_type = other DNA
tcgagaagctgatgtaggagaattgcttgaaccctggaggcagaggttgcagttagccgagatcacaccactgcactcca

SEQ ID NO: 93200 - DNA, 80 bp, synthetic construct; identical to SEQ ID NO: 17295
  source 1..80: mol_type = other DNA

SEQ ID NO: 93201 - DNA, 80 bp, synthetic construct
  source 1..80: mol_type = other DNA
aggtcaggagtttgagaccagcctggtcaacatggtgaaaccccgtctctactaaaaatacaaaaattagctgggcttgg

SEQ ID NO: 93202 - DNA, 80 bp, synthetic construct
  source 1..80: mol_type = other DNA
caaataatcgaacactttgatgttcatgtaaatcaggatttttccatctcagcccttttgatatttggggctaaataatt

SEQ ID NO: 93203 - DNA, 80 bp, synthetic construct; identical to SEQ ID NO: 17296
  source 1..80: mol_type = other DNA

SEQ ID NO: 93204 - DNA, 80 bp, synthetic construct
  source 1..80: mol_type = other DNA
aaaatcacattgataaaaacagtggaagagtaaagtaatgttgatacagactacaagcctggttggggaagatggtttag

SEQ ID NO: 93205 - DNA, 80 bp, synthetic construct
  source 1..80: mol_type = other DNA
tgtaatcccagcattttgggaggccgaggctggcggatcactcgaggtcaggagtttgagaccagcctggccaacatggc

SEQ ID NO: 93206 - DNA, 80 bp, synthetic construct
  source 1..80: mol_type = other DNA
tcagaaaaaaggaggaccactcctgccactcagtgaatgtattaaagaaaaaaatgcttcatgacactcgttgaagatag

SEQ ID NO: 93207 - DNA, 80 bp, synthetic construct; identical to SEQ ID NO: 17297
  source 1..80: mol_type = other DNA

SEQ ID NO: 93208 - DNA, 80 bp, synthetic construct
  source 1..80: mol_type = other DNA
ccttggatatgggctttgtttgatctttgtcacaagcaagtttttaaaggcaaaaacggaggctagggagcaggctgata

SEQ ID NO: 93209 - DNA, 80 bp, synthetic construct
  source 1..80: mol_type = other DNA
cccgtctctactaaaaatacaaaaattagctgggcgtgctggtgcgcacctgtagccccagctactcggggggcctgagg

SEQ ID NO: 93210 - DNA, 80 bp, synthetic construct
  source 1..80: mol_type = other DNA
aaaacccacaaagttgtttgtcaggaattcttctcattggttgacagaaatagcattgattaatgattggctatacattg

SEQ ID NO: 93211 - DNA, 80 bp, synthetic construct; identical to SEQ ID NO: 17298
  source 1..80: mol_type = other DNA

SEQ ID NO: 93212 - DNA, 80 bp, synthetic construct
  source 1..80: mol_type = other DNA
ctgtaatcccagctactcggaaggctgaggcaggagaatcacttgaacctggcaggcggaggttgcggtgagccgagatc

SEQ ID NO: 93213 - DNA, 80 bp, synthetic construct
  source 1..80: mol_type = other DNA
catggccaacatggtgaaattccatctctactaaaaaaaaaaaaaaaaaaaatacaaaaattagcctggaatggtggcgc

SEQ ID NO: 93214 - DNA, 80 bp, synthetic construct
  source 1..80: mol_type = other DNA
gggaattcttgctcaactgacttaggattcttgtaaaaattggatgatgcaagccgggcaccatggccaaagcagaagga

SEQ ID NO: 93215 - DNA, 80 bp, synthetic construct; identical to SEQ ID NO: 17299
  source 1..80: mol_type = other DNA

SEQ ID NO: 93216 - DNA, 80 bp, synthetic construct
  source 1..80: mol_type = other DNA
tatttgtttatctgaaattcaaatttaagtacatgtctcttttcaatactccttctctgaccttgcgtggtgcttgcctt

SEQ ID NO: 93217 - DNA, 80 bp, synthetic construct
  source 1..80: mol_type = other DNA
cacggcgccctgcacccgcaaccagcgcagcccaagcagtggggacccggcctctgaggcggacacctgttcttggttct

SEQ ID NO: 93218 - DNA, 80 bp, synthetic construct
  source 1..80: mol_type = other DNA
gcggctgatctgcaagatcctcatacccctgaattttcaaggcccgaaggagcaaacggctgatatctgctcttcctcaa

SEQ ID NO: 93219 - DNA, 80 bp, synthetic construct; identical to SEQ ID NO: 17300
  source 1..80: mol_type = other DNA

SEQ ID NO: 93220 - DNA, 80 bp, synthetic construct
  source 1..80: mol_type = other DNA
actaaaaatacgaaaattagcctggtgtgttggcatgcgcctgtagtcccagctacccgggaagctgaggcagaagaatc

SEQ ID NO: 93221 - DNA, 80 bp, synthetic construct
  source 1..80: mol_type = other DNA
agattaggaggagctcagctaggcctgtttgttcaaattcttttgtgtctctgtatgatattccttctctctaggtatgg

SEQ ID NO: 93222 - DNA, 80 bp, synthetic construct
  source 1..80: mol_type = other DNA
gagaaaacttattgcttctgcagccctctcaatctcctgaagctcaaaataccctgcattccaaggtgccatactttggg

SEQ ID NO: 93223 - DNA, 80 bp, synthetic construct
  source 1..80: mol_type = other DNA
cgtaagctcaggagttcaagaccagctttgggcaacatggcaaaaacccatctctacaaaaaatacaaaaattagttcgg

SEQ ID NO: 93224 - DNA, 80 bp, synthetic construct; identical to SEQ ID NO: 17301
  source 1..80: mol_type = other DNA

SEQ ID NO: 93225 - DNA, 80 bp, synthetic construct
  source 1..80: mol_type = other DNA
cccagggccctgtagaactctgaaggccccacacgtggtccctaggatgctcacctcccttctgccctcccatatccact

SEQ ID NO: 93226 - DNA, 80 bp, synthetic construct
  source 1..80: mol_type = other DNA
ctcactgcaagctctgcctcctgggttcatgccattctcctgcctcagcctcccgagtagctgggactacaggcgcccgc

SEQ ID NO: 93227 - DNA, 80 bp, synthetic construct; identical to SEQ ID NO: 17302
  source 1..80: mol_type = other DNA

SEQ ID NO: 93228 - DNA, 80 bp, synthetic construct
  source 1..80: mol_type = other DNA
aatatttattgttgtgcataattctgtaggttggctttacggttcctctggtctcaggttggtttgtttgtttttttgag

SEQ ID NO: 93229 - DNA, 80 bp, synthetic construct
  source 1..80: mol_type = other DNA
ttttttgatacagagtctcattctgtcacccaggctggagtgcagtggtgcaatctcagctcactgcaacctccgcctcc

SEQ ID NO: 93230 - DNA, 80 bp, synthetic construct
  source 1..80: mol_type = other DNA
ggtttcttatttatgtgtctcagctgcaggtcaggcagatggctctgctgatcttggttgggctccttcacacatctgag

SEQ ID NO: 93231 - DNA, 80 bp, synthetic construct
  source 1..80: mol_type = other DNA
gaaaaaacaagcccaattgtgtgggaaggcaagaggaagctcccatgtgcttttcaaacctctgctaacatcttattggc

SEQ ID NO: 93232 - DNA, 80 bp, synthetic construct; identical to SEQ ID NO: 17303
  source 1..80: mol_type = other DNA

SEQ ID NO: 93233 - DNA, 80 bp, synthetic construct
  source 1..80: mol_type = other DNA
atttgcagaccagcctggccaacatggtgaaaccccgtctctactacaaatagaaaaattagctgggcatagtggtgggt

SEQ ID NO: 93234 - DNA, 80 bp, synthetic construct
  source 1..80: mol_type = other DNA
caagggagacttactttagattgccgaagacgtgaaggatgagaaggagccagcaatgtaaagtcggggacagagagcac

SEQ ID NO: 93235 - DNA, 80 bp, synthetic construct; identical to SEQ ID NO: 17304
  source 1..80: mol_type = other DNA

SEQ ID NO: 93236 - DNA, 80 bp, synthetic construct
  source 1..80: mol_type = other DNA
agttcgagatcagcctgggcaacatagtgagaccctgcttctacaaagaatttaaaacctagccaggcatggtggcttgt

SEQ ID NO: 93237 - DNA, 80 bp, synthetic construct
  source 1..80: mol_type = other DNA
tgcctgtaatcccagcacttggggaggccgaagtgggtggatcacttaaggtcaggagttcgagaccatcctggtgaaac

SEQ ID NO: 93238 - DNA, 80 bp, synthetic construct
  source 1..80: mol_type = other DNA
tctcaagaggaaaaaaaaaaaaaggaaatggaggaatgttaggaagatgatagcaaaagcagagatccatattaggagga

SEQ ID NO: 93239 - DNA, 80 bp, synthetic construct
  source 1..80: mol_type = other DNA
ctacttgagcaactggatgaatagaggtgtgtcactccctaaaatggagaagatggtggaggacagattagaggagggga

SEQ ID NO: 93240 - DNA, 80 bp, synthetic construct; identical to SEQ ID NO: 17305
  source 1..80: mol_type = other DNA

SEQ ID NO: 93241 - DNA, 80 bp, synthetic construct
  source 1..80: mol_type = other DNA
aagagttcagcttagaatatgttaagtttgagatgccagagagataaccaggcattggatctaggggggtctggaactac

SEQ ID NO: 93242 - DNA, 80 bp, synthetic construct
  source 1..80: mol_type = other DNA
tcttgatgagctgttagtcttgataggtaaactgtttagttagtttacaaacttctctttcaggagcagatatttcctgg

SEQ ID NO: 93243 - DNA, 80 bp, synthetic construct
  source 1..80: mol_type = other DNA
ctgcaacctctgcctctggggttcaagcaattctcatgcctcagcctcctgagtagctgggattacaggtgcgcaccacc

SEQ ID NO: 93244 - DNA, 80 bp, synthetic construct; identical to SEQ ID NO: 17306
  source 1..80: mol_type = other DNA

SEQ ID NO: 93245 - DNA, 80 bp, synthetic construct
  source 1..80: mol_type = other DNA
gtgagatgagtactattatgtgcccaatgtcatagatgtgcctaagcacagacaggttaagtaatccactcaaggtcaca

SEQ ID NO: 93246 - DNA, 80 bp, synthetic construct
  source 1..80: mol_type = other DNA
agtactggatatttgcaaattgaagtgacaaaagacagatttgcaaatttgtttatgcatgcaatgcccatatgcacagg

SEQ ID NO: 93247 - DNA, 80 bp, synthetic construct; identical to SEQ ID NO: 17307
  source 1..80: mol_type = other DNA

SEQ ID NO: 93248 - DNA, 80 bp, synthetic construct
  source 1..80: mol_type = other DNA
ggccgaggcaggtggatcacttgaggccaggagtttgagaccagcctgaccaacatggcaaaattccatctctactaaaa

SEQ ID NO: 93249 - DNA, 80 bp, synthetic construct
  source 1..80: mol_type = other DNA
aataaacaaacaaacaaaaattagtctgcacctgtacctctggctattgggggtggaggtggggtgccgaagtgggagga

SEQ ID NO: 93250 - DNA, 80 bp, synthetic construct
  source 1..80: mol_type = other DNA
aatctcaaatgtcttcagcctaaaataatctttatacaccaaatcagggattctgagtggttccccacagggcttatcca

SEQ ID NO: 93251 - DNA, 80 bp, synthetic construct; identical to SEQ ID NO: 17308
  source 1..80: mol_type = other DNA

SEQ ID NO: 93252 - DNA, 80 bp, synthetic construct
  source 1..80: mol_type = other DNA
cagaggctgagaccatattagaaaagtacctggcaattccacctaggatggctttggagagctagagaaatactggtgct

SEQ ID NO: 93253 - DNA, 80 bp, synthetic construct
  source 1..80: mol_type = other DNA
acatagggagaccccatctctacaaaaaaaattttaaaaattagccaggcatggtagtagcatgcctgtagtcccagcta

SEQ ID NO: 93254 - DNA, 80 bp, synthetic construct
  source 1..80: mol_type = other DNA
gagtgcctccaggctatggaagccctcaggcccatctttcctctctccaagtggactctgggtctgtcttccccagccat

SEQ ID NO: 93255 - DNA, 80 bp, synthetic construct; identical to SEQ ID NO: 17309
  source 1..80: mol_type = other DNA

SEQ ID NO: 93256 - DNA, 80 bp, synthetic construct
  source 1..80: mol_type = other DNA
caatggtgcgatcacggttcactgcagcctcggcctcacgggttcaagtgattcttccacaacatcgccagtagttgaga

SEQ ID NO: 93257 - DNA, 80 bp, synthetic construct
  source 1..80: mol_type = other DNA
gtaagccacctccccttgccttgctgtttgaaattatatcagcaaaaatgaaacatcccactcttgcctggagcgtctta

SEQ ID NO: 93258 - DNA, 80 bp, synthetic construct
  source 1..80: mol_type = other DNA
ttgagctttcaaaacactgtttcaggtaaatttatcctaaactccaccctctccctcccttttgtagtttggtgagacac

SEQ ID NO: 93259 - DNA, 80 bp, synthetic construct; identical to SEQ ID NO: 17310
  source 1..80: mol_type = other DNA

SEQ ID NO: 93260 - DNA, 80 bp, synthetic construct
  source 1..80: mol_type = other DNA
ctgcaacctcaagctcctgggatcaagcaatcttcctgccttgagcctcccgagtagagagtagttaggactataggcac

SEQ ID NO: 93261 - DNA, 80 bp, synthetic construct
  source 1..80: mol_type = other DNA
gttggtgatttatttgtataactgtccaatttattgaatacgtatggcgtgccaagcactgggctgagggcttcataatg

SEQ ID NO: 93262 - DNA, 80 bp, synthetic construct
  source 1..80: mol_type = other DNA
acagagctcttaaccagtaggccagaggttcccaaacacctagtatatttactaccttagtactttcctgccacatctcc

SEQ ID NO: 93263 - DNA, 80 bp, synthetic construct
  source 1..80: mol_type = other DNA
tttagggccgggcacggtggctcaggcctgtaatcctagcactttgggaggccaagtagagagaagggcttgagcccaag

SEQ ID NO: 93264 - DNA, 80 bp, synthetic construct; identical to SEQ ID NO: 17311
  source 1..80: mol_type = other DNA

SEQ ID NO: 93265 - DNA, 80 bp, synthetic construct
  source 1..80: mol_type = other DNA
aaaagggagataagaatgtttgtttttgcaggtgcaagtggtctttgtctttttttctggccactaaaactcccctagag

SEQ ID NO: 93266 - DNA, 80 bp, synthetic construct
  source 1..80: mol_type = other DNA
tgtgttctcttgtcttttaatgaagtttgtgggaggcatctaactgtagcctccaaaatttggcccataggtactactgt

SEQ ID NO: 93267 - DNA, 80 bp, synthetic construct
  source 1..80: mol_type = other DNA
ccttatcaaagacgaggaaacaagttcagaaaagtattaattgctccgagttatctgcttggctagctaggatcagagct

SEQ ID NO: 93268 - DNA, 80 bp, synthetic construct
  source 1..80: mol_type = other DNA
gaggtcaggagtttgagaccagcctggccaacatggtgaaaccccatctctactaaaaatacaaaacttagctgggtgtg

SEQ ID NO: 93269 - DNA, 80 bp, synthetic construct; identical to SEQ ID NO: 17312
  source 1..80: mol_type = other DNA

SEQ ID NO: 93270 - DNA, 80 bp, synthetic construct
  source 1..80: mol_type = other DNA
cagctattcaggaggctgaggaaggagaattgcttgagcttgggaggtgaaagttgtggtgagctgagactgcactactg

SEQ ID NO: 93271 - DNA, 80 bp, synthetic construct
  source 1..80: mol_type = other DNA
gcactttgggaggctgaggcaggcgggtcacttgtggtcaggagtttgggatcaggcaggccaacatggtgaaaccgtgt

SEQ ID NO: 93272 - DNA, 80 bp, synthetic construct
  source 1..80: mol_type = other DNA
cctcaattaaaaaaaaaaaaaattagctgggcatggtgttgcgggcctgtggtcccaggtactcaggaggctgaggtgag

SEQ ID NO: 93273 - DNA, 80 bp, synthetic construct; identical to SEQ ID NO: 17313
  source 1..80: mol_type = other DNA

SEQ ID NO: 93274 - DNA, 80 bp, synthetic construct
  source 1..80: mol_type = other DNA
tgggggtaaactcatttggtagcaaattttgacctgaggctatttatagtctatattctgtattctttctacttagtatg

SEQ ID NO: 93275 - DNA, 80 bp, synthetic construct
  source 1..80: mol_type = other DNA
tggaatgacccctgcacagggatgaaatgcaaattcgtgaagcatactgtatttttcttagcacataccacctttggcaa

SEQ ID NO: 93276 - DNA, 80 bp, synthetic construct
  source 1..80: mol_type = other DNA
aggctaattttttgtatttttagtagaggcggggtttcactgtgttagccaggatggtctcgatctcctgacctcgtgat

SEQ ID NO: 93277 - DNA, 80 bp, synthetic construct; identical to SEQ ID NO: 17314
  source 1..80: mol_type = other DNA

SEQ ID NO: 93278 - DNA, 80 bp, synthetic construct
  source 1..80: mol_type = other DNA
cgctgcctcccaggttcaagttattctcctgcctcagcctcccaagtagctgggattacaggcgcatgccaccacgcccg

SEQ ID NO: 93279 - DNA, 80 bp, synthetic construct
  source 1..80: mol_type = other DNA
taaaatttgaaaaatcctgtaaagacacacctgggtcaaagggctcagataacggactgtggcccttaagtacttacgtc

SEQ ID NO: 93280 - DNA, 80 bp, synthetic construct; identical to SEQ ID NO: 17315
  source 1..80: mol_type = other DNA

SEQ ID NO: 93281 - DNA, 80 bp, synthetic construct
  source 1..80: mol_type = other DNA
agccccgcggccgcaactaaccccgggtcggagtgttccggcccggccagccccgcggcgtgagggaaggggagctcagc

SEQ ID NO: 93282 - DNA, 80 bp, synthetic construct
  source 1..80: mol_type = other DNA
gcctgttgattggccactggggcccgggttcctccggcggagcgcgcctccccccagatttcccgccagcaggagccgcg

SEQ ID NO: 93283 - DNA, 80 bp, synthetic construct
  source 1..80: mol_type = other DNA
cgtgccgccgctgcccccggggcctctccttccccaggcggggatgcggcctggagcgaggctgggcctgggcccaggcc

SEQ ID NO: 93284 - DNA, 80 bp, synthetic construct; identical to SEQ ID NO: 17316
  source 1..80: mol_type = other DNA

SEQ ID NO: 93285 - DNA, 80 bp, synthetic construct
  source 1..80: mol_type = other DNA
cgcgcagctccgggtggggagggggcctgggaggtgggagcactgggggtggggcgagaaggggaaggcgcccggcccac

SEQ ID NO: 93286 - DNA, 80 bp, synthetic construct
  source 1..80: mol_type = other DNA
gtagttaagagccgcggtcgccgagacgccttggggacggtgggccttcggcctaggtgaggggccgccgagggggtggg

SEQ ID NO: 93287 - DNA, 80 bp, synthetic construct
  source 1..80: mol_type = other DNA
tggaaattcgtgtcgagtggaaaatattttattttatgaaatagtgtaatttttatggggcaccactgggcttttagagg

SEQ ID NO: 93288 - DNA, 80 bp, synthetic construct
  source 1..80: mol_type = other DNA
tcagctcaccgcaatctccgcgtcccggcttcaagcgattccccagcttcagcctcccgagtagtcgggattacaggaat

SEQ ID NO: 93289 - DNA, 80 bp, synthetic construct; identical to SEQ ID NO: 17317
  source 1..80: mol_type = other DNA

SEQ ID NO: 93290 - DNA, 80 bp, synthetic construct
  source 1..80: mol_type = other DNA
agacgggtttcactatgttggccaggctggtatcgaactcctgacctcttgatcggcccgcattggcctaccaaagtgct

SEQ ID NO: 93291 - DNA, 80 bp, synthetic construct
  source 1..80: mol_type = other DNA
tggagtctcgctctgtcgcccaggctggagtgctgtggcgctttctcggctcactgcaacctctgcccgccgggttcaag

SEQ ID NO: 93292 - DNA, 80 bp, synthetic construct
  source 1..80: mol_type = other DNA
ttacaggtgtgagccaccgtgcccggccgctagttagtggttttgagtaatggatttcaaatccatttaaatccagttta

SEQ ID NO: 93293 - DNA, 80 bp, synthetic construct; identical to SEQ ID NO: 17318
  source 1..80: mol_type = other DNA

SEQ ID NO: 93294 - DNA, 80 bp, synthetic construct
  source 1..80: mol_type = other DNA
catttcacctcccgttatggagaggattccagggtattcaagaaagatgggcatttgatactaggtttctaaagaaactg

SEQ ID NO: 93295 - DNA, 80 bp, synthetic construct
  source 1..80: mol_type = other DNA
gaaggacaaataagcttagacagattatagtgagagtgggaagctggttcaggaagaggaaggtctgcaaattgtgggta

SEQ ID NO: 93296 - DNA, 80 bp, synthetic construct
  source 1..80: mol_type = other DNA
gagatccaatcatgaacagtctgatgagctacagagacattcggacttactccatgaatcatttaagccttaaaacatgt

SEQ ID NO: 93297 - DNA, 80 bp, synthetic construct
  source 1..80: mol_type = other DNA
acgcccagctaatttttgtgtttatagtagagacgggtttcaccatgttggtcaggccagtcgtgaactcctgacctcag

SEQ ID NO: 93298 - DNA, 80 bp, synthetic construct; identical to SEQ ID NO: 17319
  source 1..80: mol_type = other DNA

SEQ ID NO: 93299 - DNA, 80 bp, synthetic construct
  source 1..80: mol_type = other DNA
taatgtggaatttgtccttttattttctctgtggttagtgtttctataggttttatttaagaaatccacagggaggctgg

SEQ ID NO: 93300 - DNA, 80 bp, synthetic construct
  source 1..80: mol_type = other DNA
tcccagcttcttgggagactgagatgggaggatcgcttgagtccaggaggttgaggctgcagtaagccaagagatcatgc

SEQ ID NO: 93301 - DNA, 80 bp, synthetic construct
  source 1..80: mol_type = other DNA
ctaaagagaaagcaaaaataatgtgattttaaaccagaattcaaaagatctgtttagcgtatgtttagacaaagccatta

SEQ ID NO: 93302 - DNA, 80 bp, synthetic construct; identical to SEQ ID NO: 17320
  source 1..80: mol_type = other DNA

SEQ ID NO: 93303 - DNA, 80 bp, synthetic construct
  source 1..80: mol_type = other DNA
aggtctcactgtgtagcccagatggtctcgaattcctgggctcttaagagatcctcccaaagtgctgggatcataggtgt

SEQ ID NO: 93304 - DNA, 80 bp, synthetic construct; identical to SEQ ID NO: 17321
  source 1..80: mol_type = other DNA

SEQ ID NO: 93305 - DNA, 80 bp, synthetic construct
  source 1..80: mol_type = other DNA
tttttttttttttttttttttttgagatggagtctcgccctgtcacccaggctggagtgcagtggcacgatctcggctta

SEQ ID NO: 93306 - DNA, 80 bp, synthetic construct
  source 1..80: mol_type = other DNA
tgatcaacccgccttggcctttcaaagtgctgggattacaggcgtgagccaccgtgcccagcctttttctttttcttttt

SEQ ID NO: 93307 - DNA, 80 bp, synthetic construct
  source 1..80: mol_type = other DNA
cagctaatttttgtatttttttagtagagatggggtttcgccatgttggccaggctggtcttgaactcctgacctcaggt

SEQ ID NO: 93308 - DNA, 80 bp, synthetic construct
  source 1..80: mol_type = other DNA
ggctggaatgcagtggcgttttcttggctcactgcaacctctgctgcccgggttcaagtgattctcctgcttcaggctcc

SEQ ID NO: 93309 - DNA, 80 bp, synthetic construct; identical to SEQ ID NO: 17322
  source 1..80: mol_type = other DNA

SEQ ID NO: 93310 - DNA, 80 bp, synthetic construct
  source 1..80: mol_type = other DNA
tcaaaactgataatggttggatccagcttttcacacaaacttttttttcctagtgaggatgcacatttatcctgtaaaca

SEQ ID NO: 93311 - DNA, 80 bp, synthetic construct
  source 1..80: mol_type = other DNA
gacaaagttctaaggtaacagcccttttctaagactaaagttacagtcctccctttgtatctgagggggattggttgcag

SEQ ID NO: 93312 - DNA, 80 bp, synthetic construct
  source 1..80: mol_type = other DNA
ttaaattttgtattttttttcctttttttttgagacagagtcttgctctgttgcccaggctggagtacagtacagtgatc

SEQ ID NO: 93313 - DNA, 80 bp, synthetic construct
  source 1..80: mol_type = other DNA
tggaacccaaggatatgtttgttgagcatactgtatttactttggaatacaactagaatgcttaacttgtatgttaaaaa

SEQ ID NO: 93314 - DNA, 80 bp, synthetic construct; identical to SEQ ID NO: 17323
  source 1..80: mol_type = other DNA

SEQ ID NO: 93315 - DNA, 80 bp, synthetic construct
  source 1..80: mol_type = other DNA
accatattgtataggtgctactaatttggagagcatatacagtgagtccatgcctttttcctgccatcagcattatacca

SEQ ID NO: 93316 - DNA, 80 bp, synthetic construct
  source 1..80: mol_type = other DNA
aatttctgtgcttcaatattaatgccagaagacttggaattgtttatttgtaggtaactgcctttaaggaaacttgacca

SEQ ID NO: 93317 - DNA, 80 bp, synthetic construct; identical to SEQ ID NO: 17324
  source 1..80: mol_type = other DNA

SEQ ID NO: 93318 - DNA, 80 bp, synthetic construct
  source 1..80: mol_type = other DNA
gtaacatggtctttagctggtttgttttgtggaatggaatttttatttctgtcctttgagtgacttacagcaatattata

SEQ ID NO: 93319 - DNA, 80 bp, synthetic construct
  source 1..80: mol_type = other DNA
gttgagtttcacaccaaactcctggaaccataactttcttttcccagatctagtcttgtttatcacagacatcaacagcc

SEQ ID NO: 93320 - DNA, 80 bp, synthetic construct
  source 1..80: mol_type = other DNA
ctgggttcaagagtttcctacctcagcctcccgagtagcttgggattataggcacacgccacgttgcctggctatatata

SEQ ID NO: 93321 - DNA, 80 bp, synthetic construct
  source 1..80: mol_type = other DNA
ctaattttttatttctagtagagatggggtttcaccatgttggccaagctggtcttgaactgctgacctccagtaatcca

SEQ ID NO: 93322 - DNA, 80 bp, synthetic construct; identical to SEQ ID NO: 17325
  source 1..80: mol_type = other DNA

SEQ ID NO: 93323 - DNA, 80 bp, synthetic construct
  source 1..80: mol_type = other DNA
agcaaagtaacttgttttttcttttaatctttttaaaagaaatagagacacagttttgccatgttgcccaagctggtctc

SEQ ID NO: 93324 - DNA, 80 bp, synthetic construct
  source 1..80: mol_type = other DNA
gatcatagctcactggagccttgaactcctgggctcaagtgattcccccctgttttagcctcctcagtaaccgggactag

SEQ ID NO: 93325 - DNA, 80 bp, synthetic construct; identical to SEQ ID NO: 17326
  source 1..80: mol_type = other DNA

SEQ ID NO: 93326 - DNA, 80 bp, synthetic construct
  source 1..80: mol_type = other DNA
acttgggaggctgaggcaagagaatcgcttgaatctaggaggcggaggttgcagtgagtcaagatcatgccaccgcactc

SEQ ID NO: 93327 - DNA, 80 bp, synthetic construct
  source 1..80: mol_type = other DNA
aaacactgtctctactaaaaatacaaaaataagctgaaatcccagctactcgtgaagctgaggcagagaattgcttaaac

SEQ ID NO: 93328 - DNA, 80 bp, synthetic construct; identical to SEQ ID NO: 17327
  source 1..80: mol_type = other DNA

SEQ ID NO: 93329 - DNA, 80 bp, synthetic construct
  source 1..80: mol_type = other DNA
ccagctgatttttgtatttttcagtagagttgaggtttcaccacgttgtccaggctggtctcaaactcctgaccttaagt

SEQ ID NO: 93330 - DNA, 80 bp, synthetic construct
  source 1..80: mol_type = other DNA
caggagttgcagacaagcctggccaacatggtgaaaccctgtctctactaaaaatacaaaaattagccaggcatggtgac

SEQ ID NO: 93331 - DNA, 80 bp, synthetic construct
  source 1..80: mol_type = other DNA
caagtgatcctcctgcctcagtctccttagtagctgagactacaggtgtgcaccaccacacctggctaatttttgtattt

SEQ ID NO: 93332 - DNA, 80 bp, synthetic construct; identical to SEQ ID NO: 17328
  source 1..80: mol_type = other DNA

SEQ ID NO: 93333 - DNA, 80 bp, synthetic construct
  source 1..80: mol_type = other DNA
agtggtgcgatcttggctcactgcaacctctgcctcccgggttcaagtgattctccttcctcagcctcccgagtagctag

SEQ ID NO: 93334 - DNA, 80 bp, synthetic construct; identical to SEQ ID NO: 17329
  source 1..80: mol_type = other DNA

SEQ ID NO: 93335 - DNA, 80 bp, synthetic construct
  source 1..80: mol_type = other DNA
agtaatggggcataacaaattatacttgtcattcttgttcattagggcaaatgttgtaggttgagtcaagtgtccagcca

SEQ ID NO: 93336 - DNA, 80 bp, synthetic construct
  source 1..80: mol_type = other DNA
cgcacaccaccacccttggctaatttttgtattttttttttggtagagatggggtttcaccacattgcccaggctggtct

SEQ ID NO: 93337 - DNA, 80 bp, synthetic construct
  source 1..80: mol_type = other DNA
ctctgcacccggcccttattgtttataaatacatttctttctaggttcaaaatcaaaggaagcccagaagggaggtcatt

SEQ ID NO: 93338 - DNA, 80 bp, synthetic construct; identical to SEQ ID NO: 17330
  source 1..80: mol_type = other DNA

SEQ ID NO: 93339 - DNA, 80 bp, synthetic construct
  source 1..80: mol_type = other DNA
agggtaagcaagaggtagtaccattttggtaagaagtagagagctagggacagtaaagatggagtaatatatatatgagg

SEQ ID NO: 93340 - DNA, 80 bp, synthetic construct
  source 1..80: mol_type = other DNA
cagcacccagccccagctttatgcttttaattctaaaactttttttgttgtattttgcattcataagaatagatgttaaa

SEQ ID NO: 93341 - DNA, 80 bp, synthetic construct
  source 1..80: mol_type = other DNA
gcagttggatgtcctgaggacaggagttcaagaccagcctggccaacacagtgaaaccctgtttctataaaaaatacaaa

SEQ ID NO: 93342 - DNA, 80 bp, synthetic construct; identical to SEQ ID NO: 17331
  source 1..80: mol_type = other DNA

SEQ ID NO: 93343 - DNA, 80 bp, synthetic construct
  source 1..80: mol_type = other DNA
cattatcctctgatctatcatattaatgagctgcatcctaaaagacattcatctataactaagctcagtttcatgttttg

SEQ ID NO: 93344 - DNA, 80 bp, synthetic construct
  source 1..80: mol_type = other DNA
ataacattatcagaggtctagaactggatggcagctacagagatcatttagcctaatactggtttaacaaataatccggg

SEQ ID NO: 93345 - DNA, 80 bp, synthetic construct; identical to SEQ ID NO: 17332
  source 1..80: mol_type = other DNA

SEQ ID NO: 93346 - DNA, 80 bp, synthetic construct
  source 1..80: mol_type = other DNA
ttagaactggatcactttgcctgtctcttcttacctcctcccagttcaaaatgcttgcatctcttaatagctagcattcc

SEQ ID NO: 93347 - DNA, 80 bp, synthetic construct
  source 1..80: mol_type = other DNA
ctttgtggggttggtgtctgctacacttacagcaagtccagagattttttttccaccacgtttgcaggagaactattggc

SEQ ID NO: 93348 - DNA, 80 bp, synthetic construct
  source 1..80: mol_type = other DNA
tgatggggttacataaactaaaaacgtgtttaatacacctaccccaccgaatattgtagcttgggcgtagcctaacctat

SEQ ID NO: 93349 - DNA, 80 bp, synthetic construct
  source 1..80: mol_type = other DNA
aaaaatcataagttgaactgtcttacattatggttttccaaattttgatttgtttttaaatactctttccttgcctggca

SEQ ID NO: 93350 - DNA, 80 bp, synthetic construct; identical to SEQ ID NO: 17333
  source 1..80: mol_type = other DNA

SEQ ID NO: 93351 - DNA, 80 bp, synthetic construct
  source 1..80: mol_type = other DNA
ttcatcagaaaccaagaatactttgagagctttctctgcccctcaaaattctgaatcccaagcccacgttagtggaggtg

SEQ ID NO: 93352 - DNA, 80 bp, synthetic construct
  source 1..80: mol_type = other DNA
gatgaggaagtggtggcagattaagtctcagaactttgatcttgtcatctgttacaaggtggggaaattttatgagctgt

SEQ ID NO: 93353 - DNA, 80 bp, synthetic construct; identical to SEQ ID NO: 17334
  source 1..80: mol_type = other DNA

SEQ ID NO: 93354 - DNA, 80 bp, synthetic construct
  source 1..80: mol_type = other DNA
atggtgtgtgctttgttgatacttcactgggaaagtttttcataggtcagttttcagatgatcgccattgttcgagattt

SEQ ID NO: 93355 - DNA, 80 bp, synthetic construct
  source 1..80: mol_type = other DNA
ctctccttgaggaagaatattttagggaaaagctaagtgatggcattggggtgatgttaccccaggtgcttaaaggtatg

SEQ ID NO: 93356 - DNA, 80 bp, synthetic construct
  source 1..80: mol_type = other DNA
cagtcagcactacaagatctggtgctatcttcaccaaagcctatcaacgaatggtgctagatgcagtgacattaaacaac

SEQ ID NO: 93357 - DNA, 80 bp, synthetic construct; identical to SEQ ID NO: 17335
  source 1..80: mol_type = other DNA

SEQ ID NO: 93358 - DNA, 80 bp, synthetic construct
  source 1..80: mol_type = other DNA
aagaagttgctgatggttttaagtctaaaatccttaagcaggtcatctctctgcagacaaaaaatcctgaaggtcgtttt

SEQ ID NO: 93359 - DNA, 80 bp, synthetic construct
  source 1..80: mol_type = other DNA
gacataagagaaaatgaacagagcctcctggaatacctagagaaacagcgcaacagaattggctgtaggaccatagtcta

SEQ ID NO: 93360 - DNA, 80 bp, synthetic construct
  source 1..80: mol_type = other DNA
gaacggagggatgtatcattgaaggactgcatgcggcgactgttctataactttgataaaaattacaaggactggcagtc

SEQ ID NO: 93361 - DNA, 80 bp, synthetic construct; identical to SEQ ID NO: 17336
  source 1..80: mol_type = other DNA

SEQ ID NO: 93362 - DNA, 80 bp, synthetic construct
  source 1..80: mol_type = other DNA
gctaatatttaaatgtttgtagagagatggggtctcactgtgttgccaggactggtcttgaactcctgggctcaagtgat

SEQ ID NO: 93363 - DNA, 80 bp, synthetic construct
  source 1..80: mol_type = other DNA
taggatttacaggtaagcaccggcgtgccctgctttatttttttggtgggggaagggggaagggagttgaagcttcccta

SEQ ID NO: 93364 - DNA, 80 bp, synthetic construct
  source 1..80: mol_type = other DNA
aataaaaagttgagctttttattatttggtgaatactgtttcaaggtgctttgttacactatctgttgatccaacattta

SEQ ID NO: 93365 - DNA, 80 bp, synthetic construct; identical to SEQ ID NO: 17337
  source 1..80: mol_type = other DNA

SEQ ID NO: 93366 - DNA, 80 bp, synthetic construct
  source 1..80: mol_type = other DNA
ctggctaatttttgtatttttggtagagacagggtttttcccgtgttggccaggctgttcttgaattcctgacctcaaag

SEQ ID NO: 93367 - DNA, 80 bp, synthetic construct
  source 1..80: mol_type = other DNA
tggaacagaataatatacttccttttagtgtgctgcatttggttactgggtaatttaaaattcttcctcagcacaggtgt

SEQ ID NO: 93368 - DNA, 80 bp, synthetic construct
  source 1..80: mol_type = other DNA
ggtgcgatcttggctcattgcaacctctgcctcccaggttcaagtgattctcctgcctcagcctcctgcgtagctgggat

SEQ ID NO: 93369 - DNA, 80 bp, synthetic construct
  source 1..80: mol_type = other DNA
gcctggcctctgctctatcttttagctttcccttggcacttctatggtccagatgttagagggtaagtattttgatgggg

SEQ ID NO: 93370 - DNA, 80 bp, synthetic construct; identical to SEQ ID NO: 17338
  source 1..80: mol_type = other DNA

SEQ ID NO: 93371 - DNA, 80 bp, synthetic construct
  source 1..80: mol_type = other DNA
ccaaatatggggggcaagtctacgcttatgagacaggtaactgattcttaaagttttgttatcagaaagtcatttgtgac

SEQ ID NO: 93372 - DNA, 80 bp, synthetic construct
  source 1..80: mol_type = other DNA
agctgaaacatcgatgcttaatgttaaggggaatatatgttaaaaaggggaaggaggtcagtcattcaggtcatgaggcc

SEQ ID NO: 93373 - DNA, 80 bp, synthetic construct; identical to SEQ ID NO: 17339
  source 1..80: mol_type = other DNA

SEQ ID NO: 93374 - DNA, 80 bp, synthetic construct
  source 1..80: mol_type = other DNA
ggttgaccagccacagaacttgtaaagttttttatatttttaaaaggttgtaagaaatagtagtagttggctggtccccg

SEQ ID NO: 93375 - DNA, 80 bp, synthetic construct
  source 1..80: mol_type = other DNA
gacatggattcacttgattggaattgattctaggcatctcagtagttttaaagagctcctaggtgattctattctggcca

SEQ ID NO: 93376 - DNA, 80 bp, synthetic construct
  source 1..80: mol_type = other DNA
tcagaacagaaccaacgtacatgtgattgtgaaagttgttttagagtgcctagctcttacgtaagggttcataagaaaga

SEQ ID NO: 93377 - DNA, 80 bp, synthetic construct; identical to SEQ ID NO: 17340
  source 1..80: mol_type = other DNA

SEQ ID NO: 93378 - DNA, 80 bp, synthetic construct
  source 1..80: mol_type = other DNA
ccctcttgttgcccaagctggagtgcaatggcacgatcttggctcactgcaacctctgcttccaggttcaagtgattctc

SEQ ID NO: 93379 - DNA, 80 bp, synthetic construct
  source 1..80: mol_type = other DNA
ttacaggcgtgagccaccgtgcccggccaataattgcatagtctcttaatgagatttaatcttttataccaatatgtgta

SEQ ID NO: 93380 - DNA, 80 bp, synthetic construct
  source 1..80: mol_type = other DNA
actgccagcatactcatgcatgcaacagcacattctctggtgcttgtggatgaattaggtaagacattaaacttctcatt

SEQ ID NO: 93381 - DNA, 80 bp, synthetic construct
  source 1..80: mol_type = other DNA
aatgtttttagagcacgcactcaccattgtggcacagaccgatagttggagataaaaggtgatattgtgaaaggtttttg

SEQ ID NO: 93382 - DNA, 80 bp, synthetic construct; identical to SEQ ID NO: 17341
  source 1..80: mol_type = other DNA

SEQ ID NO: 93383 - DNA, 80 bp, synthetic construct
  source 1..80: mol_type = other DNA
ttttcaactcactaccattcattagtagaagattattctcaaaatgttgctgtgcgcctaggacatatggtatgtgcaaa

SEQ ID NO: 93384 - DNA, 80 bp, synthetic construct
  source 1..80: mol_type = other DNA
tgtcctaaaagctatggctttaatgcagcaaggcttgctaatctcccagaggaagttattcaaaagggacatagaaaagc

SEQ ID NO: 93385 - DNA, 80 bp, synthetic construct; identical to SEQ ID NO: 17342
  source 1..80: mol_type = other DNA

SEQ ID NO: 93386 - DNA, 80 bp, synthetic construct
  source 1..80: mol_type = other DNA
agatgttatggtacatgcatacactttcaggctgttttatacccactgtcaccaatacacataaatgggggaggaaaagc

SEQ ID NO: 93387 - DNA, 80 bp, synthetic construct
  source 1..80: mol_type = other DNA
acatagtagttttttacctttcacaaaactgagttacaagaatacttttgttttacagtgcatcccttcctaggaagtct

SEQ ID NO: 93388 - DNA, 80 bp, synthetic construct
  source 1..80: mol_type = other DNA
agtgttttctctttcatagaaagaacgtacatactgggacatgagtacagttacagcaagtctaggtgtgctaacaaaac

SEQ ID NO: 93389 - DNA, 80 bp, synthetic construct; identical to SEQ ID NO: 17343
  source 1..80: mol_type = other DNA

SEQ ID NO: 93390 - DNA, 80 bp, synthetic construct
  source 1..80: mol_type = other DNA
agatcctgagtcaatatattgccactttctttttggtagcttgagcttcatagtgtcaactgaccttgtgtatccatttt

SEQ ID NO: 93391 - DNA, 80 bp, synthetic construct
  source 1..80: mol_type = other DNA
caatgtattagattctataggtggagcagagtcatatagtgtatctgtatcatgtgtaggctcaccagctaatgtacaag

SEQ ID NO: 93392 - DNA, 80 bp, synthetic construct
  source 1..80: mol_type = other DNA
tatcatgtctaataaactctacatcatgtccctgatggcacttcttaatgcagttcacacatatggcatttcgatctgtg

SEQ ID NO: 93393 - DNA, 80 bp, synthetic construct
  source 1..80: mol_type = other DNA
aaacaaaattctttgtggctccagcccagattaattctgaaaaggaactttaatggagtaagtgattttcctgtcatctg

SEQ ID NO: 93394 - DNA, 80 bp, synthetic construct; identical to SEQ ID NO: 17344
  source 1..80: mol_type = other DNA

SEQ ID NO: 93395 - DNA, 80 bp, synthetic construct
  source 1..80: mol_type = other DNA
tacaggcataagccaccacgcctacccacagttacagtcttaaacacgatcttcaagtagattgatgataaaattttcag

SEQ ID NO: 93396 - DNA, 80 bp, synthetic construct
  source 1..80: mol_type = other DNA
tgcatgggatagctggtataacttgatattttatataaacattggcctctactaacagccttttctatggcatcttgatt

SEQ ID NO: 93397 - DNA, 80 bp, synthetic construct
  source 1..80: mol_type = other DNA
ctttaaatgaagctaaccaatgaagtaattgtaagaaatcagctaagaatagaattttccttgtataagatactccaacc

SEQ ID NO: 93398 - DNA, 80 bp, synthetic construct; identical to SEQ ID NO: 17345
  source 1..80: mol_type = other DNA

SEQ ID NO: 93399 - DNA, 80 bp, synthetic construct
  source 1..80: mol_type = other DNA
atttcaaccaccaacagtaacattcacttatcaatgactatggtcaaaactgcaattaactttcgcaccaacctaactgt

SEQ ID NO: 93400 - DNA, 80 bp, synthetic construct
  source 1..80: mol_type = other DNA
ccattttaacatctctttttctgttgcagatttaaactggtaaattcatctgaggaattgaatctatctgtattcctagt

SEQ ID NO: 93401 - DNA, 80 bp, synthetic construct; identical to SEQ ID NO: 17346
  source 1..80: mol_type = other DNA

SEQ ID NO: 93402 - DNA, 80 bp, synthetic construct
  source 1..80: mol_type = other DNA
ctttttccgactgcacggagaggacacctgggaccttttggaaccctgtgaaaaaatggaaggagggaggccttgtagtt

SEQ ID NO: 93403 - DNA, 80 bp, synthetic construct
  source 1..80: mol_type = other DNA
ctgcctcaagtatctgccccatcaatcaaccctccaaaaggctgcctgagggaatcgaattgtcctaaaaatgcaaatct

SEQ ID NO: 93404 - DNA, 80 bp, synthetic construct
  source 1..80: mol_type = other DNA
tactcttgggactggaaagaacatcgctacggttgattcccctcccaaacctgaagaaaaggattcatttctaggacgaa

SEQ ID NO: 93405 - DNA, 80 bp, synthetic construct
  source 1..80: mol_type = other DNA
gaccagcctagtcaacatggtgaaaccctgtctctactaaaaatacaaaaattagttgggtgtggtagcaggcacctgta

SEQ ID NO: 93406 - DNA, 80 bp, synthetic construct; identical to SEQ ID NO: 17347
  source 1..80: mol_type = other DNA

SEQ ID NO: 93407 - DNA, 80 bp, synthetic construct
  source 1..80: mol_type = other DNA
gtcaagaactattcctccctccagtgaagcctggagtggagaatgttcacccagacattcgttagttaactgactaaaaa

SEQ ID NO: 93408 - DNA, 80 bp, synthetic construct
  source 1..80: mol_type = other DNA
gagataaaccggtgttctgcccttaacttcatgtcccagtacttttgtttaaaatatgcttttttggccaggcatggtgg

SEQ ID NO: 93409 - DNA, 80 bp, synthetic construct
  source 1..80: mol_type = other DNA
tcacttgaggtcaagagttggagaccagcctggccagcatggtgaaacctcatctctactaaaaatacaaaaattagcca

SEQ ID NO: 93410 - DNA, 80 bp, synthetic construct; identical to SEQ ID NO: 17348
  source 1..80: mol_type = other DNA

SEQ ID NO: 93411 - DNA, 80 bp, synthetic construct
  source 1..80: mol_type = other DNA
agggtcaaggggttcaaataggcctgtggatatagcctcaaaagccaacatccttggctattccgctgctcacttacctc

SEQ ID NO: 93412 - DNA, 80 bp, synthetic construct
  source 1..80: mol_type = other DNA
gtcaggcctcagctgccgattccctccattctctcttgttactcatgccactgccctccacgcccagtatccaggtacct

SEQ ID NO: 93413 - DNA, 80 bp, synthetic construct
  source 1..80: mol_type = other DNA
acaggtggcactgtccagtgttgggagctgggaacggagatccccgaaccctactcaagccaagagggctttaggggcca

SEQ ID NO: 93414 - DNA, 80 bp, synthetic construct; identical to SEQ ID NO: 17349
  source 1..80: mol_type = other DNA

SEQ ID NO: 93415 - DNA, 80 bp, synthetic construct
  source 1..80: mol_type = other DNA
aaaagaagggaacactgctgtgaagcagagctcctttgcagacacccctgaagcacccttgttaccccaacatcctacca

SEQ ID NO: 93416 - DNA, 80 bp, synthetic construct
  source 1..80: mol_type = other DNA
gggggtgggctgtgagatcacctggccaaaggcgatagaggcaatggccccagctgtgtagcgccccacgccaggcagga

SEQ ID NO: 93417 - DNA, 80 bp, synthetic construct
  source 1..80: mol_type = other DNA
cagcccagagttgattcacctcctgtgggtaggatcagaggtcaaagagatcacccgtcagtccctctattgttcctatt

SEQ ID NO: 93418 - DNA, 80 bp, synthetic construct; identical to SEQ ID NO: 17350
  source 1..80: mol_type = other DNA

SEQ ID NO: 93419 - DNA, 80 bp, synthetic construct
  source 1..80: mol_type = other DNA
agatgtactgaccagcatatgcccgcctgtccaggtccatctcatcttctgcctgtcaatgcaaccccagatgaggagtt

SEQ ID NO: 93420 - DNA, 80 bp, synthetic construct
  source 1..80: mol_type = other DNA
tagatggtatgaggagacagaggcctgcaataccacctcttccggctgcctggccaggcctgctggggccccaggacact

SEQ ID NO: 93421 - DNA, 80 bp, synthetic construct
  source 1..80: mol_type = other DNA
ctaagtttctggccttaattttctcagggtggtactactggcttgtctctgagccataatgaaaacctaatagttttagc

SEQ ID NO: 93422 - DNA, 80 bp, synthetic construct; identical to SEQ ID NO: 17351
  source 1..80: mol_type = other DNA

SEQ ID NO: 93423 - DNA, 80 bp, synthetic construct
  source 1..80: mol_type = other DNA
ctggcccttagtaagtctcttaatgtcttgatacgtatcacaatcccttcccagcctgaatctgcctttcatggccaatg

SEQ ID NO: 93424 - DNA, 80 bp, synthetic construct
  source 1..80: mol_type = other DNA
aaagcagtcagtcacaatgaggccaaattttgaggccttccaagggtgatagctatctccctctcatccaccattcacat

SEQ ID NO: 93425 - DNA, 80 bp, synthetic construct
  source 1..80: mol_type = other DNA
ggtcaaggatgaaagcctcctgtttgggagcatttgtgtatctctgatgcttactgtgactgtgtgtgtggataggggtt

SEQ ID NO: 93426 - DNA, 80 bp, synthetic construct; identical to SEQ ID NO: 17352
  source 1..80: mol_type = other DNA

SEQ ID NO: 93427 - DNA, 80 bp, synthetic construct
  source 1..80: mol_type = other DNA
caatctcctggtgactctatgaggtatgtactagtatcacctccaccttagttataaggaaattgaggtttatggagatt

SEQ ID NO: 93428 - DNA, 80 bp, synthetic construct
  source 1..80: mol_type = other DNA
cttcagaaaaaaaaaaaccaacttcaaatctacctccatttgcactgtcttaccctcctcctcttcagggtcctgctcct

SEQ ID NO: 93429 - DNA, 80 bp, synthetic construct
  source 1..80: mol_type = other DNA
cccatctctactaaaaatccaaaaaaattagccagacgtgctcgcttgaacccaggaggcagagcttgcagtgagctgag

SEQ ID NO: 93430 - DNA, 80 bp, synthetic construct; identical to SEQ ID NO: 17353
  source 1..80: mol_type = other DNA

SEQ ID NO: 93431 - DNA, 80 bp, synthetic construct
  source 1..80: mol_type = other DNA
tattgcccttcaacagaatctccttctggccaaagttcggtttatttaaaaacaaatagagctggacatgctggctcagg

SEQ ID NO: 93432 - DNA, 80 bp, synthetic construct
  source 1..80: mol_type = other DNA
agctaagccatcatatcctcagtaacctgcacttatacatccagatggcctgaagcaactgaagatctacaaaagaagtg

SEQ ID NO: 93433 - DNA, 80 bp, synthetic construct
  source 1..80: mol_type = other DNA
ctgcccccaaaacattgctcttaactccaatgcctatcccaaaacctataagaactaatgataattccaccaccctttgc

SEQ ID NO: 93434 - DNA, 80 bp, synthetic construct; identical to SEQ ID NO: 17354
  source 1..80: mol_type = other DNA

SEQ ID NO: 93435 - DNA, 80 bp, synthetic construct
  source 1..80: mol_type = other DNA
tctacaatctattctccaaagagcaaaggaatcttttccagatcacgtcacttccttccttataaccttcaatggtttcc

SEQ ID NO: 93436 - DNA, 80 bp, synthetic construct
  source 1..80: mol_type = other DNA
caccaccaccacatccagctaatttttgtatttttgttagagacagggtttcaccatgttgcccaggctagtctccacct

SEQ ID NO: 93437 - DNA, 80 bp, synthetic construct
  source 1..80: mol_type = other DNA
tttttctttcttttttaaatactgtaggcctttactatgggtcattaaattcttgagcaagctggttgtggtggctcaac

SEQ ID NO: 93438 - DNA, 80 bp, synthetic construct; identical to SEQ ID NO: 17355
  source 1..80: mol_type = other DNA

SEQ ID NO: 93439 - DNA, 80 bp, synthetic construct
  source 1..80: mol_type = other DNA
aggggaaaaaaaagagtgccaaggtggggtttaatgttgcaattttaaagactgtggtcaaggtagacccaaagcattct

SEQ ID NO: 93440 - DNA, 80 bp, synthetic construct
  source 1..80: mol_type = other DNA
ggtcacaaagtaccttataggccattggagggatttggctgccacacccttgctcttagaaggcagtcctcttactacag

SEQ ID NO: 93441 - DNA, 80 bp, synthetic construct
  source 1..80: mol_type = other DNA
ggactcttttatgcttttacctaacaccttatcatttttcaagtcttgactgaaatgtccaaatcaggtcccctcatctt

SEQ ID NO: 93442 - DNA, 80 bp, synthetic construct; identical to SEQ ID NO: 17356
  source 1..80: mol_type = other DNA

SEQ ID NO: 93443 - DNA, 80 bp, synthetic construct
  source 1..80: mol_type = other DNA
tcaagccatcctctcacctcagcctcctgtagctgggactacaggtgcgcaccaccatgcccaactaatttttaattttc

SEQ ID NO: 93444 - DNA, 80 bp, synthetic construct
  source 1..80: mol_type = other DNA
gaagctgaagattaactataaacaatgagtaacaaaggagcactggaaggcagaggtggatgggaatcgtagtgtttacg

SEQ ID NO: 93445 - DNA, 80 bp, synthetic construct
  source 1..80: mol_type = other DNA
ctcccaagtagtgggattacaggcgcccgcaccatacccagctaattttttttgtacttttagtagagacggggtttcac

SEQ ID NO: 93446 - DNA, 80 bp, synthetic construct; identical to SEQ ID NO: 17357
  source 1..80: mol_type = other DNA

SEQ ID NO: 93447 - DNA, 80 bp, synthetic construct
  source 1..80: mol_type = other DNA
ctaactcctgggcgtgctttaagctcagctcaggcagcgtcaccttctctggaaagcccaaacccagccaccccactacc

SEQ ID NO: 93448 - DNA, 80 bp, synthetic construct
  source 1..80: mol_type = other DNA
ggcagcacaggccaataggcaattagcgcgcgccaggctgccttccccgcgccggacccgggacgtctgaacggaagttc

SEQ ID NO: 93449 - DNA, 80 bp, synthetic construct
  source 1..80: mol_type = other DNA
cagcttccgacggtgagcggcttcccagaggtagccttcaaagcctctgcgctctgggagaggggaaggcctcgggctca

SEQ ID NO: 93450 - DNA, 80 bp, synthetic construct; identical to SEQ ID NO: 17358
  source 1..80: mol_type = other DNA

SEQ ID NO: 93451 - DNA, 80 bp, synthetic construct
  source 1..80: mol_type = other DNA
ggaaaaaagaatcaaaggtcgtctagtccaactttctcctctacagattgtgaaagcgaggtgggaagtaatttacccag

SEQ ID NO: 93452 - DNA, 80 bp, synthetic construct; identical to SEQ ID NO: 17359
  source 1..80: mol_type = other DNA

SEQ ID NO: 93453 - DNA, 80 bp, synthetic construct
  source 1..80: mol_type = other DNA
ttccccaacttccctccaggctcctggcacggggctggcatccggttgtacctgcaacacaggttatcttacgagtgaat

SEQ ID NO: 93454 - DNA, 80 bp, synthetic construct
  source 1..80: mol_type = other DNA
tgtgtcctcccagccttctggaagctattgcccatctgggcgtggcagggtccgtgcccttgcagccagggcaggtgctt

SEQ ID NO: 93455 - DNA, 80 bp, synthetic construct
  source 1..80: mol_type = other DNA
tcaaaggggcagggctttctaatctccagagtcaacactccctgcttgctgaacatgcggaagcgggcgtcttctcccag

SEQ ID NO: 93456 - DNA, 80 bp, synthetic construct
  source 1..80: mol_type = other DNA
tggaaacaaacatggaaccaagagtgagtaccatggccctgcccagggggaggaacccggtccatacaccccaaggtgga

SEQ ID NO: 93457 - DNA, 80 bp, synthetic construct; identical to SEQ ID NO: 17360
  source 1..80: mol_type = other DNA

SEQ ID NO: 93458 - DNA, 80 bp, synthetic construct
  source 1..80: mol_type = other DNA
tgtcactaaagccaaccatattctggctgaagacgcggaagtagtagccattgccaatgatgagctctggcaccacgcag

SEQ ID NO: 93459 - DNA, 80 bp, synthetic construct
  source 1..80: mol_type = other DNA
ggtgaggggtccacggtgaggacagtgaagggtagctgcggcctgggtctgccgggcctaggcagggtgcacgtggggac

SEQ ID NO: 93460 - DNA, 80 bp, synthetic construct
  source 1..80: mol_type = other DNA
gcgggagacagacccagttgggtcaccacgcctcctgacagtgagcagggggtcactggctccagggaccaccccacccc

SEQ ID NO: 93461 - DNA, 80 bp, synthetic construct
  source 1..80: mol_type = other DNA
cgtggccttgtcctccatgttctcaatgcgcaccgtcacctggtaagtgcctgaatgcacgcggcgagcggcccggatga

SEQ ID NO: 93462 - DNA, 80 bp, synthetic construct; identical to SEQ ID NO: 17361
  source 1..80: mol_type = other DNA

SEQ ID NO: 93463 - DNA, 80 bp, synthetic construct
  source 1..80: mol_type = other DNA
tgaggggctccacagctccaacctcccttgagacaaggcccagagagctgcagctaagaaaaaagctgcctgctgggccc

SEQ ID NO: 93464 - DNA, 80 bp, synthetic construct
  source 1..80: mol_type = other DNA
ctttgacaccctatgccctgtgttgttaccacctgagtttgctgcctcgttccagctttgagaaccaatccttacaaaag

SEQ ID NO: 93465 - DNA, 80 bp, synthetic construct; identical to SEQ ID NO: 17362
  source 1..80: mol_type = other DNA

SEQ ID NO: 93466 - DNA, 80 bp, synthetic construct
  source 1..80: mol_type = other DNA
agagacagggtttcactatgttggccaggctggtctcaaactcctgacctcaagtgatctgcctgccttggcctcctaaa

SEQ ID NO: 93467 - DNA, 80 bp, synthetic construct
  source 1..80: mol_type = other DNA
accaagggcctggggtgtcaatggcgggtcttgtgactgcacaaaggggcactcacgcaggatctcctgcactgtcaccg

SEQ ID NO: 93468 - DNA, 80 bp, synthetic construct
  source 1..80: mol_type = other DNA
tgtcaccactgacaccccactcccactgcccactcctctgataggaatctccaggatttaaatatgtttttttaaatttt

SEQ ID NO: 93469 - DNA, 80 bp, synthetic construct
  source 1..80: mol_type = other DNA
caccaccacacccggctaattttgtatttttagtagagacggggtttctccacgttggtcagactggtctcgaactcccg

SEQ ID NO: 93470 - DNA, 80 bp, synthetic construct; identical to SEQ ID NO: 17363
  source 1..80: mol_type = other DNA

SEQ ID NO: 93471 - DNA, 80 bp, synthetic construct
  source 1..80: mol_type = other DNA
ccatccaggcctcctgctcccacgcgctctgggggccgccacttgagggagaccgtggtgtcagagacgtcctctactgc

SEQ ID NO: 93472 - DNA, 80 bp, synthetic construct
  source 1..80: mol_type = other DNA
actttaaggaatattttgtccctgttacaagacatgtctgtagattggcttaaaaacaaacagcaacagcagccaggcac

SEQ ID NO: 93473 - DNA, 80 bp, synthetic construct
  source 1..80: mol_type = other DNA
aaaatacaaaaattagctgggcatggtggtggatgcctgtaatcccagctactcagaaggctgaggtgggagaattgctt

SEQ ID NO: 93474 - DNA, 80 bp, synthetic construct; identical to SEQ ID NO: 17364
  source 1..80: mol_type = other DNA

SEQ ID NO: 93475 - DNA, 80 bp, synthetic construct
  source 1..80: mol_type = other DNA
ctcagaccccattatacagatgaggaagctgaggcttcagggagggatgactccagttggccccccggggaccatggagc

SEQ ID NO: 93476 - DNA, 80 bp, synthetic construct
  source 1..80: mol_type = other DNA
tagatgccagatggcctgcctggtcatcccatatcatcctaacagctctctgagataggcagtgtcattattcccatttt

SEQ ID NO: 93477 - DNA, 80 bp, synthetic construct; identical to SEQ ID NO: 17365
  source 1..80: mol_type = other DNA

SEQ ID NO: 93478 - DNA, 80 bp, synthetic construct
  source 1..80: mol_type = other DNA
cttcatgactcagctcctgaatcaggtcgaagttcagccgcatccaccggtagctcttcttcttcttgcgctccaggatg

SEQ ID NO: 93479 - DNA, 80 bp, synthetic construct
  source 1..80: mol_type = other DNA
cccactgtactgtgcaggagtcctctcccacgttgctgatcttgggggccgcaggtgcgtctggcacgtctggatggggt

SEQ ID NO: 93480 - DNA, 80 bp, synthetic construct
  source 1..80: mol_type = other DNA
actaaccgccacaggctgcccccaccacccccagatccaaagagatctttctagaatgcatttctttcttcttttccttt

SEQ ID NO: 93481 - DNA, 80 bp, synthetic construct; identical to SEQ ID NO: 17366
  source 1..80: mol_type = other DNA

SEQ ID NO: 93482 - DNA, 80 bp, synthetic construct
  source 1..80: mol_type = other DNA
tcatgtacagcagtgtcgcaggaaatctgctggatgcatctgcctccatctcccccagagcggggctccttttgggcaga

SEQ ID NO: 93483 - DNA, 80 bp, synthetic construct
  source 1..80: mol_type = other DNA
gaggttgacctggtcctcgcccacagggttcttcactgtgaccgtgtagacgccctcatcttccttctctgccccctcga

SEQ ID NO: 93484 - DNA, 80 bp, synthetic construct
  source 1..80: mol_type = other DNA
ccatggggggaacacagcctgtgggaagactgcatccacgtcagcatctagttcaaaatcatctctgtggcaccgactga

SEQ ID NO: 93485 - DNA, 80 bp, synthetic construct; identical to SEQ ID NO: 17367
  source 1..80: mol_type = other DNA

SEQ ID NO: 93486 - DNA, 80 bp, synthetic construct
  source 1..80: mol_type = other DNA
ccggccaagtgtggcacctccatggagacctcgccaagggctcggcaccacgtaggtagaaagtgatgaaagacaaacga

SEQ ID NO: 93487 - DNA, 80 bp, synthetic construct
  source 1..80: mol_type = other DNA
actcagcctggaagcgcccctctgctgcttcttccaccccctgacccacactgcccaccttgcctgccccctgaccagtc

SEQ ID NO: 93488 - DNA, 80 bp, synthetic construct
  source 1..80: mol_type = other DNA
acagtgggagcagggtccccagagatagggacgtccagacgtagcttatttccagctacaaccacaatggtgtctggtat

SEQ ID NO: 93489 - DNA, 80 bp, synthetic construct; identical to SEQ ID NO: 17368
  source 1..80: mol_type = other DNA

SEQ ID NO: 93490 - DNA, 80 bp, synthetic construct
  source 1..80: mol_type = other DNA
atattcaggtcaggtcacctagcatagcattttgaaaactgggggaacatcagtgtcttgccacacacatacacacacac

SEQ ID NO: 93491 - DNA, 80 bp, synthetic construct
  source 1..80: mol_type = other DNA
cgcacacatgcacacattaaaaaggttccctggccaaataaatcaggaatctgccctcagttaaacaaagcaaagcagtc

SEQ ID NO: 93492 - DNA, 80 bp, synthetic construct
  source 1..80: mol_type = other DNA
aattagctgggcatggtggcgggcgcctgtagtcccagctactcaggaggctgaggcaggagagtggtgtgaacctggga

SEQ ID NO: 93493 - DNA, 80 bp, synthetic construct; identical to SEQ ID NO: 17369
  source 1..80: mol_type = other DNA

SEQ ID NO: 93494 - DNA, 80 bp, synthetic construct
  source 1..80: mol_type = other DNA
ccaagactcaggggccccaagacttaccctgcctgggtacgaagtcaatcttgacctctgcaagagaaggaagagcaagt

SEQ ID NO: 93495 - DNA, 80 bp, synthetic construct
  source 1..80: mol_type = other DNA
tcggcaggtgtgacgtcgtcaatggtcagtttgtggaccctgcaggggagcagtggctcaggggaccccactgggccaca

SEQ ID NO: 93496 - DNA, 80 bp, synthetic construct
  source 1..80: mol_type = other DNA
gtaaaagtgatttctacatcaaagcatctccttggctgggcccttggagactgggcaggggctgggtctcattaatctct

SEQ ID NO: 93497 - DNA, 80 bp, synthetic construct; identical to SEQ ID NO: 17370
  source 1..80: mol_type = other DNA

SEQ ID NO: 93498 - DNA, 80 bp, synthetic construct
  source 1..80: mol_type = other DNA
catctcagtctccacctgtcccatccacctgccctgcacactcaccgcccgatgtgggacacctttatgcggctgtcggg

SEQ ID NO: 93499 - DNA, 80 bp, synthetic construct
  source 1..80: mol_type = other DNA
cattgagctcgggagggtgtgtgggtgtggcgtgaatccctgtggagggcgtgtgggcccatgggcgctggtgcgcacgt

SEQ ID NO: 93500 - DNA, 80 bp, synthetic construct
  source 1..80: mol_type = other DNA
tcacctcagcatcgtcattttagagatgagaaggatgaggtttaggctgtcaaaggcccaaggtcacagaggccttgagc

SEQ ID NO: 93501 - DNA, 80 bp, synthetic construct; identical to SEQ ID NO: 17371
  source 1..80: mol_type = other DNA

SEQ ID NO: 93502 - DNA, 80 bp, synthetic construct
  source 1..80: mol_type = other DNA
tcaaactccacccgctgccccaccatcaccagctggtcctccaaggggcgcgtgatgagcacagggggctctgtccaggc

SEQ ID NO: 93503 - DNA, 80 bp, synthetic construct
  source 1..80: mol_type = other DNA
ggtcagggtacgcttggcaccgatggactcaaagatgtacctgggtgggggccgcagggaagtggcaggaaagctgcgga

SEQ ID NO: 93504 - DNA, 80 bp, synthetic construct
  source 1..80: mol_type = other DNA
aggagcaaaaggatgggaaattaggcccagagagatggggctgagagccacaccgagtcagagatacgcatgtggagagg

SEQ ID NO: 93505 - DNA, 80 bp, synthetic construct; identical to SEQ ID NO: 17372
  source 1..80: mol_type = other DNA

SEQ ID NO: 93506 - DNA, 80 bp, synthetic construct
  source 1..80: mol_type = other DNA
tcttgctctgttggccaggctggagtgcaatggcgccatcttggctcactgcaacctctgcctcccaggttcaagtgatt

SEQ ID NO: 93507 - DNA, 80 bp, synthetic construct
  source 1..80: mol_type = other DNA
tgggattacaggcatggtgtcttcatttctttatctgtgtctatgtgtcaacccacctccttgtctctgtctgtctgacc

SEQ ID NO: 93508 - DNA, 80 bp, synthetic construct
  source 1..80: mol_type = other DNA
tcccaggcgctcccacctagcagccctctgtgcccagcactctcactcccatctcagcccccagggccagtgcggtggtc

SEQ ID NO: 93509 - DNA, 80 bp, synthetic construct
  source 1..80: mol_type = other DNA
ttgctgctgctgagcccagggaggaagtgggggctccatccaccgagcagagaaggacccctgagtcctcaaatactctg

SEQ ID NO: 93510 - DNA, 80 bp, synthetic construct; identical to SEQ ID NO: 17373
  source 1..80: mol_type = other DNA

SEQ ID NO: 93511 - DNA, 80 bp, synthetic construct
  source 1..80: mol_type = other DNA
ttttagtagagacggggtttcaccatgttggtcaggctggtcttgaacgcctaacctcaggtgatccacctgcctcggcc

SEQ ID NO: 93512 - DNA, 80 bp, synthetic construct
  source 1..80: mol_type = other DNA
cttggtgccctctgggctcagcagttcaggagttaacccagaggaacattggtggcattcaggggatccctggcttaaat

SEQ ID NO: 93513 - DNA, 80 bp, synthetic construct; identical to SEQ ID NO: 17374
  source 1..80: mol_type = other DNA

SEQ ID NO: 93514 - DNA, 80 bp, synthetic construct
  source 1..80: mol_type = other DNA
gggctctcctctttccatctgcctgggggtgagggtagttaacccaagccctcctgctttgtttgcctgagagaaagatt

SEQ ID NO: 93515 - DNA, 80 bp, synthetic construct
  source 1..80: mol_type = other DNA
gagggttaacctgagctctgtccttttccttgtggctgtcctggcctaacttttgctcttctcttctatctctgtggtaa

SEQ ID NO: 93516 - DNA, 80 bp, synthetic construct
  source 1..80: mol_type = other DNA
tgtggggaagggctaacctatgccctctcctctcctgtgtagggaagggctagcctgtgccctctcctctcccctctgag

SEQ ID NO: 93517 - DNA, 80 bp, synthetic construct
  source 1..80: mol_type = other DNA
tgctggtgcctccagcttcgagtccctgtgtcccgcagtctaggctgtggccgggggcaagactgcagccccctgggcgg

SEQ ID NO: 93518 - DNA, 80 bp, synthetic construct; identical to SEQ ID NO: 17375
  source 1..80: mol_type = other DNA

SEQ ID NO: 93519 - DNA, 80 bp, synthetic construct
  source 1..80: mol_type = other DNA
tggcaggacctcctgtgtgcattactttttcttatccctcctaagctctgacagataggtgggtggcaggagaagcccaa

SEQ ID NO: 93520 - DNA, 80 bp, synthetic construct
  source 1..80: mol_type = other DNA
cacagcagcagcagccataatggaggggccgggggagagggagagagagggcagagagaacataagtcagttgggccgac

SEQ ID NO: 93521 - DNA, 80 bp, synthetic construct; identical to SEQ ID NO: 17376
  source 1..80: mol_type = other DNA

SEQ ID NO: 93522 - DNA, 80 bp, synthetic construct
  source 1..80: mol_type = other DNA
tgcagtgagggactggaaagggattaggagcaggatgggagtggagtggggagggagaaagggacactagccagattggg

SEQ ID NO: 93523 - DNA, 80 bp, synthetic construct
  source 1..80: mol_type = other DNA
gacttcagctccgccccgcaaatcatccccagccctgacccccagtcgagaccctgaagggcctcagactccagcactgg

SEQ ID NO: 93524 - DNA, 80 bp, synthetic construct
  source 1..80: mol_type = other DNA
gagtattcacagacttgcccattcatgaccccatgaggctgggcatctgccccaggatctcaccttcccagcctttccca

SEQ ID NO: 93525 - DNA, 80 bp, synthetic construct
  source 1..80: mol_type = other DNA
cggactcagccctaagcccccacgcctaccctgcaagccttggggtttctctcacaccctgtgtgtgcagcactgggcac

SEQ ID NO: 93526 - DNA, 80 bp, synthetic construct; identical to SEQ ID NO: 17377
  source 1..80: mol_type = other DNA

SEQ ID NO: 93527 - DNA, 80 bp, synthetic construct
  source 1..80: mol_type = other DNA
ccagcctggccaacgtggtgaaattccgtctctactaaaaataacgaaaattagccaagtatggtggtgcacacctctag

SEQ ID NO: 93528 - DNA, 80 bp, synthetic construct
  source 1..80: mol_type = other DNA
gacaaatgctcatcgatcttcgcaccctcaggctttagttaacccatacagagtttttgtacagagaaaggggactatct

SEQ ID NO: 93529 - DNA, 80 bp, synthetic construct; identical to SEQ ID NO: 17378
  source 1..80: mol_type = other DNA

SEQ ID NO: 93530 - DNA, 80 bp, synthetic construct
  source 1..80: mol_type = other DNA
agctggtgcccccatgcttcacagtgtcctccaggcttcctgaccaccctgggcgaccccccacccccggccaaacctta

SEQ ID NO: 93531 - DNA, 80 bp, synthetic construct
  source 1..80: mol_type = other DNA
gcagctcgtgtgtgcctctgggtctcatggtgccctctgtgtgccttgtgccttctagggctctccatgtcccctctctc

SEQ ID NO: 93532 - DNA, 80 bp, synthetic construct
  source 1..80: mol_type = other DNA
gaaggtgatgctgccacctgcaaaggcaggggcgacaggcccggcttggggagtgtcctgctgcccccccttcccacccc

SEQ ID NO: 93533 - DNA, 80 bp, synthetic construct
  source 1..80: mol_type = other DNA
tggagtcttgctctgtcacccaggctggagtgcagaggcacaatctcggctcactgcaagctccgcctcccaggttcaca

SEQ ID NO: 93534 - DNA, 80 bp, synthetic construct; identical to SEQ ID NO: 17379
  source 1..80: mol_type = other DNA

SEQ ID NO: 93535 - DNA, 80 bp, synthetic construct
  source 1..80: mol_type = other DNA
tcagatgggagtcgtggtgcagccactaaccagagacccctccaccctctctctcctgagcattggacccatgagcccgc

SEQ ID NO: 93536 - DNA, 80 bp, synthetic construct
  source 1..80: mol_type = other DNA
ccatccctgctctgccccagccttagagcagcccctcagactgggctgcactcccctcatccacagctcctggggcttcc

SEQ ID NO: 93537 - DNA, 80 bp, synthetic construct; identical to SEQ ID NO: 17380
  source 1..80: mol_type = other DNA

SEQ ID NO: 93538 - DNA, 80 bp, synthetic construct
  source 1..80: mol_type = other DNA
gtgccctctgtggccaggccgtacttgttgctggcgctgatgtcactgcctccgcgctgccagcgcaccttcactcctgc

SEQ ID NO: 93539 - DNA, 80 bp, synthetic construct
  source 1..80: mol_type = other DNA
tgctagcactttctatgcatcccctcacgtaatactctaccagttctctgaggtagttgcagttattctgttcatttctc

SEQ ID NO: 93540 - DNA, 80 bp, synthetic construct
  source 1..80: mol_type = other DNA
agtctgcctacttggaatgtggccaaatttgtcctccaaggacctcaggctgggtatcagcaactgagataaagctggcc

SEQ ID NO: 93541 - DNA, 80 bp, synthetic construct; identical to SEQ ID NO: 17381
  source 1..80: mol_type = other DNA

SEQ ID NO: 93542 - DNA, 80 bp, synthetic construct
  source 1..80: mol_type = other DNA
cccctctctgcgtccctgaccttgggtttaccttcacctctcatcagagggatgggaaaaagaaaccgagaatcaaaaaa

SEQ ID NO: 93543 - DNA, 80 bp, synthetic construct
  source 1..80: mol_type = other DNA
aagctacctggcttcttccccggctcaggcatcctgagagacgtcacaccaggcacgaagcaggcacaggtcacccaaag

SEQ ID NO: 93544 - DNA, 80 bp, synthetic construct; identical to SEQ ID NO: 17382
  source 1..80: mol_type = other DNA

SEQ ID NO: 93545 - DNA, 80 bp, synthetic construct
  source 1..80: mol_type = other DNA
tcatgtaaacagaattgccagggaccggttaccgtggatatgtttttctaaaaactcagtgtctgcacaatccattgata

SEQ ID NO: 93546 - DNA, 80 bp, synthetic construct
  source 1..80: mol_type = other DNA
cagggtctctgttgcccaggctggagtgcaatgatgcaattatagctcattgcagcctcgaagtcctgggctggagcgtt

SEQ ID NO: 93547 - DNA, 80 bp, synthetic construct; identical to SEQ ID NO: 17383
  source 1..80: mol_type = other DNA

SEQ ID NO: 93548 - DNA, 80 bp, synthetic construct
  source 1..80: mol_type = other DNA
aaggaacgaaagaggtctcgtttcctcgcctgtgggttgtaagaaaacacattatttagcaaagaaatcttcatggttgg

SEQ ID NO: 93549 - DNA, 80 bp, synthetic construct
  source 1..80: mol_type = other DNA
acaaatcattgccagtcttaaggcatgagtgattgaatttaatcagctgaaattggttgcgggggtgggtggagaaggtt

SEQ ID NO: 93550 - DNA, 80 bp, synthetic construct; identical to SEQ ID NO: 17384
  source 1..80: mol_type = other DNA

SEQ ID NO: 93551 - DNA, 80 bp, synthetic construct
  source 1..80: mol_type = other DNA
accgcacatggcgtaaaacaggtgcccagtgaatattagaaaaggaaattatacgtgttaatccaaggtggattatttta

SEQ ID NO: 93552 - DNA, 80 bp, synthetic construct
  source 1..80: mol_type = other DNA
ggccttcaaggtggatttaaaaaagaaatttaagagtctctctcacccaggctggagtgcagtggcatgatcttggctca

SEQ ID NO: 93553 - DNA, 80 bp, synthetic construct
  source 1..80: mol_type = other DNA
caaacgatccacctgtcttagcctctcaaagtgttgggattacaggtgtgtgccagtgcacctggcctctgaggtggatt

SEQ ID NO: 93554 - DNA, 80 bp, synthetic construct; identical to SEQ ID NO: 17385
  source 1..80: mol_type = other DNA

SEQ ID NO: 93555 - DNA, 80 bp, synthetic construct
  source 1..80: mol_type = other DNA
tttgctccccacgcaagggttggataagaagccataaggatgaacacaactcagtgaccaattctttagtcaaaaggaac

SEQ ID NO: 93556 - DNA, 80 bp, synthetic construct
  source 1..80: mol_type = other DNA
actaaaaatacaaaaaattagccgggcgtgctggcgggtgcctgtagtcccagctactcgggagggaggctgaggcagga

SEQ ID NO: 93557 - DNA, 80 bp, synthetic construct
  source 1..80: mol_type = other DNA
agagattcatgatcactgagaagaggaattcgcaaatgacccttttgttgacagaggatgggagagaccccggctgggaa

SEQ ID NO: 93558 - DNA, 80 bp, synthetic construct; identical to SEQ ID NO: 17386
  source 1..80: mol_type = other DNA

SEQ ID NO: 93559 - DNA, 80 bp, synthetic construct
  source 1..80: mol_type = other DNA
gtcagttgttcgaggccatcctggccaatatggtgaaaccccgtctctactaaatatactaaattagccgtgcgtggtgg

SEQ ID NO: 93560 - DNA, 80 bp, synthetic construct
  source 1..80: mol_type = other DNA
tgggaagtagtccctaacctccacatcagtgctctaggcactctctttttggctcttggaagagtctatttgctaactgg

SEQ ID NO: 93561 - DNA, 80 bp, synthetic construct; identical to SEQ ID NO: 17387
  source 1..80: mol_type = other DNA

SEQ ID NO: 93562 - DNA, 80 bp, synthetic construct
  source 1..80: mol_type = other DNA
ttaggagagacggggttttaccatgttggccaggctggtcctgacctcaagttatctgcccgcctcggcctcccaaagtg

SEQ ID NO: 93563 - DNA, 80 bp, synthetic construct
  source 1..80: mol_type = other DNA
ccctggaatttggcttatcctatgatcccaatcagctggtaggagagctgcttgaagtgtcctagaaactcatctgctcc

SEQ ID NO: 93564 - DNA, 80 bp, synthetic construct
  source 1..80: mol_type = other DNA
tgaaaagttggtcatgcttgtaatcccagcatttggggaggccaaggcgcgcggatcacctgaagtcaggagtttgagac

SEQ ID NO: 93565 - DNA, 80 bp, synthetic construct
  source 1..80: mol_type = other DNA
gcactccagagcgagactccgtctcaaaaaaaaaaaaaaaaaaaagcaaaatcccagagcagcagagacctcttcatgct

SEQ ID NO: 93566 - DNA, 80 bp, synthetic construct; identical to SEQ ID NO: 17388
  source 1..80: mol_type = other DNA

SEQ ID NO: 93567 - DNA, 80 bp, synthetic construct
  source 1..80: mol_type = other DNA
cttcactggacaagggaggacagcactgctgagtgccctaaccacgtaagagtggcttttggcatgaaaggaagaaaaat

SEQ ID NO: 93568 - DNA, 80 bp, synthetic construct
  source 1..80: mol_type = other DNA
gtctatttgtcatcctgatcttggtttcaatgaaagctttgcacaaagatatccaagcctccagattttgcaagaatctc

SEQ ID NO: 93569 - DNA, 80 bp, synthetic construct; identical to SEQ ID NO: 17389
  source 1..80: mol_type = other DNA

SEQ ID NO: 93570 - DNA, 80 bp, synthetic construct
  source 1..80: mol_type = other DNA
gtctcagcctcccgagtagctgggattacaggcaggccccacgtgcttggctaatttttgtatttttagtacagatgggg

SEQ ID NO: 93571 - DNA, 80 bp, synthetic construct
  source 1..80: mol_type = other DNA
cacccttaagtcaacgttgcagtgaatcacctgacgccaagagcatttggtgaggctggtagatgaaaggataagcagtt

SEQ ID NO: 93572 - DNA, 80 bp, synthetic construct
  source 1..80: mol_type = other DNA
caggcatgcaccaccgtggctggctaattttcatatttttagtagagacggagtttcaccatgttggccatgctggtctc

SEQ ID NO: 93573 - DNA, 80 bp, synthetic construct; identical to SEQ ID NO: 17390
  source 1..80: mol_type = other DNA

SEQ ID NO: 93574 - DNA, 80 bp, synthetic construct
  source 1..80: mol_type = other DNA
gtagccagtggtaggtaagtgggtctggctttagagagggcttgtgtcgagatgcgtctggctgatagaacttggtgaaa

SEQ ID NO: 93575 - DNA, 80 bp, synthetic construct
  source 1..80: mol_type = other DNA
tccacctgcattatgtgtgtattcgtgtcggaactggcaaaaatggtctttttgttccactttgcccttggctgcccaag

SEQ ID NO: 93576 - DNA, 80 bp, synthetic construct
  source 1..80: mol_type = other DNA
gtatggtgaaaccttgccactactaaaaatacaaaaattagccaggtgtggtggcacgcacctgtaatctcagctacttg

SEQ ID NO: 93577 - DNA, 80 bp, synthetic construct; identical to SEQ ID NO: 17391
  source 1..80: mol_type = other DNA

SEQ ID NO: 93578 - DNA, 80 bp, synthetic construct
  source 1..80: mol_type = other DNA
ttacaggcatctgccaccacgcctagctgatttttgtgtttttagtagagatgaagtttcaccatgttggccaggctggt

SEQ ID NO: 93579 - DNA, 80 bp, synthetic construct
  source 1..80: mol_type = other DNA
actttgggagcctaggcctggtttctctcctatccatgggggaccaacaagcgctcaccatgcagcgagtggggcttttc

SEQ ID NO: 93580 - DNA, 80 bp, synthetic construct
  source 1..80: mol_type = other DNA
tcctttccaactctttttaaacaagtctaattatgatgtcagagagagtctatttggtgctaatggctgttgtcactccc

SEQ ID NO: 93581 - DNA, 80 bp, synthetic construct; identical to SEQ ID NO: 17392
  source 1..80: mol_type = other DNA

SEQ ID NO: 93582 - DNA, 80 bp, synthetic construct
  source 1..80: mol_type = other DNA
ctgtgtctcccaggttcaagcgattctcctgcctcagcctccctagtagctgggattacaggcacgccccaccatacccg

SEQ ID NO: 93583 - DNA, 80 bp, synthetic construct
  source 1..80: mol_type = other DNA
ttgaccagattctcccatagatgggatgtggggtataaaggagaccaaaacgttaagaaggaccacgaggtttgtgatgt

SEQ ID NO: 93584 - DNA, 80 bp, synthetic construct
  source 1..80: mol_type = other DNA
aagctagggcttctcagagatgaactgaggagtcattagatatacatggaattctaaagcgccaagattagttgagacct

SEQ ID NO: 93585 - DNA, 80 bp, synthetic construct; identical to SEQ ID NO: 17393
  source 1..80: mol_type = other DNA

SEQ ID NO: 93586 - DNA, 80 bp, synthetic construct
  source 1..80: mol_type = other DNA
cacccatgggaggcttctgggagagtgatgggtgggggcgaggggaaccagcaactcttcacatacagtttttttttttt

SEQ ID NO: 93587 - DNA, 80 bp, synthetic construct
  source 1..80: mol_type = other DNA
attcacatccagttttgtagtaagggtagcaaggtagacatggggctaagaggttattccatttgctgatggagcaaatg

SEQ ID NO: 93588 - DNA, 80 bp, synthetic construct
  source 1..80: mol_type = other DNA
tgaggcagtgggagcttgtgcacgtttcatgatcatttctgcttttgagttaagtaggaagtaaggtccccagctgagag

SEQ ID NO: 93589 - DNA, 80 bp, synthetic construct
  source 1..80: mol_type = other DNA
catccagggtaagtgcattggctagatcatggctcactgcagccttgacctctggggctccactgatcgtcccacctcag

SEQ ID NO: 93590 - DNA, 80 bp, synthetic construct; identical to SEQ ID NO: 17394
  source 1..80: mol_type = other DNA

SEQ ID NO: 93591 - DNA, 80 bp, synthetic construct
  source 1..80: mol_type = other DNA
tactggttggcccggtagaagcagcaggatcacccagagggtcaaggaaccgagaggctgcgtcgcccacctggatgttg

SEQ ID NO: 93592 - DNA, 80 bp, synthetic construct
  source 1..80: mol_type = other DNA
actccagtgacagcaggaattctcagcggggtggcagtcgtaccctcccatctctagaggacttctggcaacatctagag

SEQ ID NO: 93593 - DNA, 80 bp, synthetic construct
  source 1..80: mol_type = other DNA
cagtgctgagggggagaaaggaggagcagagcatgtcaggaaggaggtgaagtggcggggggtggtgttgcagcttcaat

SEQ ID NO: 93594 - DNA, 80 bp, synthetic construct; identical to SEQ ID NO: 17395
  source 1..80: mol_type = other DNA

SEQ ID NO: 93595 - DNA, 80 bp, synthetic construct
  source 1..80: mol_type = other DNA
agctcccgctgcagcttcctgcggttggcgttgatgcgctgggactcctcctctgcctcctccagctgcctcttgagctg

SEQ ID NO: 93596 - DNA, 80 bp, synthetic construct
  source 1..80: mol_type = other DNA
gatttccttcagcttcttgtctttctgcttcagcgacttggtggccgcctgtttctctctgcaaacagcaaggaaaacag

SEQ ID NO: 93597 - DNA, 80 bp, synthetic construct; identical to SEQ ID NO: 17396
  source 1..80: mol_type = other DNA

SEQ ID NO: 93598 - DNA, 80 bp, synthetic construct
  source 1..80: mol_type = other DNA
cctgctcttcaccctagttcatagttcactgcagccttgaactcctggctcaagcaatcctcccacctcagcctcccaag

SEQ ID NO: 93599 - DNA, 80 bp, synthetic construct
  source 1..80: mol_type = other DNA
ggccaacatggtgaaaccccatccctactaaaaaatacaattacaagctgggtacagtggtgtgcacctgtagtcccagc

SEQ ID NO: 93600 - DNA, 80 bp, synthetic construct
  source 1..80: mol_type = other DNA
cacctacctcagcctcccaaagtgccgggattatgggcatgaaataccacatatggcctggggtttctgtttgagccgat

SEQ ID NO: 93601 - DNA, 80 bp, synthetic construct; identical to SEQ ID NO: 17397
  source 1..80: mol_type = other DNA

SEQ ID NO: 93602 - DNA, 80 bp, synthetic construct
  source 1..80: mol_type = other DNA
acgttggagtgattctcctgcctcagtctcctgagtagctgagataataggcatgtgccaccacactcggctaatttttg

SEQ ID NO: 93603 - DNA, 80 bp, synthetic construct
  source 1..80: mol_type = other DNA
ggttggatttttgatctgtcagcatgctatccctgcagaggctgggaaaagtcatatgtactgctgggaaggcaggttaa

SEQ ID NO: 93604 - DNA, 80 bp, synthetic construct
  source 1..80: mol_type = other DNA
aggcatcacagagcttgcttcttacaagccagaactgatgctggaagaggttccctgacttcactatgactcctgctgtc

SEQ ID NO: 93605 - DNA, 80 bp, synthetic construct; identical to SEQ ID NO: 17398
  source 1..80: mol_type = other DNA

SEQ ID NO: 93606 - DNA, 80 bp, synthetic construct
  source 1..80: mol_type = other DNA
actcaagagcttcttccaggccgggcgtggtggcgcacgcctgtaatcccagcacttttggaagcagaggcaggtaaatc

SEQ ID NO: 93607 - DNA, 80 bp, synthetic construct
  source 1..80: mol_type = other DNA
gcagtgagccaagattgcgccactgcactccagcctgggccacagagagaccctgtctccaaaaaaaagaggtgcttcca

SEQ ID NO: 93608 - DNA, 80 bp, synthetic construct
  source 1..80: mol_type = other DNA
accaagggctcactggataaggtcagagcttcagctaggggaaaacgcaatgaaagagcatcccaaggcccggactccag

SEQ ID NO: 93609 - DNA, 80 bp, synthetic construct; identical to SEQ ID NO: 17399
  source 1..80: mol_type = other DNA

SEQ ID NO: 93610 - DNA, 80 bp, synthetic construct
  source 1..80: mol_type = other DNA
catggtgggggcctctaccctcccccgccttaaaagatgccccctccttggagtcatgcctcaggggtattgccctcatc

SEQ ID NO: 93611 - DNA, 80 bp, synthetic construct
  source 1..80: mol_type = other DNA
ttctccccacacagctacttattgggaatgaatgaaagcagccacacccccaaacaggcatgaaagcgctgacggaaaac

SEQ ID NO: 93612 - DNA, 80 bp, synthetic construct
  source 1..80: mol_type = other DNA
ctggccaacatggtgaaaccccacctctactaaaaatataaaaattagccaggcatggtggtacacacctgtagtctcag

SEQ ID NO: 93613 - DNA, 80 bp, synthetic construct; identical to SEQ ID NO: 17400
  source 1..80: mol_type = other DNA

SEQ ID NO: 93614 - DNA, 80 bp, synthetic construct
  source 1..80: mol_type = other DNA
gacaactcagccacccttgaaagtacatgttcttcctctgagctcaggggaggccccgtgaatacatagaggagggaagc

SEQ ID NO: 93615 - DNA, 80 bp, synthetic construct
  source 1..80: mol_type = other DNA
gaggctttacctcttgtagctgcatgaggtctgcttccaagctcttggctttcttctcattctctttggctgtggcaaag

SEQ ID NO: 93616 - DNA, 80 bp, synthetic construct
  source 1..80: mol_type = other DNA
agttcagctttgcacacccaccccttggattttctgcagttgaccacaaagaagttcccattgcacgagcatggctctca

SEQ ID NO: 93617 - DNA, 80 bp, synthetic construct
  source 1..80: mol_type = other DNA
ccagaaaaaccccagctgaacccacaccaatggcaggtgcaggcttgcttcctggagcccgctctgctgacttcggtggc

SEQ ID NO: 93618 - DNA, 80 bp, synthetic construct; identical to SEQ ID NO: 17401
  source 1..80: mol_type = other DNA

SEQ ID NO: 93619 - DNA, 80 bp, synthetic construct
  source 1..80: mol_type = other DNA
ccagcactttgggaggccaacaggagaatggatcacttgaggccaggagttcaagaccagcctggccaacatggtgaaac

SEQ ID NO: 93620 - DNA, 80 bp, synthetic construct
  source 1..80: mol_type = other DNA
aaaaaaataaagaaaacgaagtttccacaccaaccatgagagtggtgataggaatgaaaaaggccacccgacctccctct

SEQ ID NO: 93621 - DNA, 80 bp, synthetic construct; identical to SEQ ID NO: 17402
  source 1..80: mol_type = other DNA

SEQ ID NO: 93622 - DNA, 80 bp, synthetic construct
  source 1..80: mol_type = other DNA
cttatcctcggaccccccaactcagacccatcctcgactgccattctcagcccctcccagcccctgcaccagtccaaaaa

SEQ ID NO: 93623 - DNA, 80 bp, synthetic construct
  source 1..80: mol_type = other DNA
gtcttccatttcggctttgagcattttgttggtccgctcgagttcctctttggcttccaaggcctcttcaagggcccgag

SEQ ID NO: 93624 - DNA, 80 bp, synthetic construct
  source 1..80: mol_type = other DNA
taaataccgggggaagccctgtgtcctgctgaatgtattgaggtgcaggtgtaagcagtgtaggttagctatgggagtaa

SEQ ID NO: 93625 - DNA, 80 bp, synthetic construct
  source 1..80: mol_type = other DNA
gcaacctccgcctcgtgggttcaagcgattctcctgcctcagcctccagagtagttgggattacaggtgcccaccaccac

SEQ ID NO: 93626 - DNA, 80 bp, synthetic construct; identical to SEQ ID NO: 17403
  source 1..80: mol_type = other DNA

SEQ ID NO: 93627 - DNA, 80 bp, synthetic construct
  source 1..80: mol_type = other DNA
gaacagagcagattataaattgtaacatccaaaagccaaacttccagtattcagcaaagacagggacctctaaatggcac

SEQ ID NO: 93628 - DNA, 80 bp, synthetic construct
  source 1..80: mol_type = other DNA
ttatctagaatcctgacactaggaggtcagtcagggaggggtagggaacctgcaggcatctggcatttagcctcactgta

SEQ ID NO: 93629 - DNA, 80 bp, synthetic construct
  source 1..80: mol_type = other DNA
caccacgcccggctaattttggtatttttagtagagacaaagttgcacgatgttggccaggctggtctcaaacccctgac

SEQ ID NO: 93630 - DNA, 80 bp, synthetic construct; identical to SEQ ID NO: 17404
  source 1..80: mol_type = other DNA

SEQ ID NO: 93631 - DNA, 80 bp, synthetic construct
  source 1..80: mol_type = other DNA
ggcaggcagatcatgtgaggccaggagttggagaccagcctggacaacatggcaaaaccccatctctactaaaaatacaa

SEQ ID NO: 93632 - DNA, 80 bp, synthetic construct
  source 1..80: mol_type = other DNA
atctgataaagttcatataatacagtgtcaatgactgaatccaggtggtggccttaaaggtgttcaccgtacaattctgt

SEQ ID NO: 93633 - DNA, 80 bp, synthetic construct; identical to SEQ ID NO: 17405
  source 1..80: mol_type = other DNA

SEQ ID NO: 93634 - DNA, 80 bp, synthetic construct
  source 1..80: mol_type = other DNA
ctctgcagagctgattccccaacccagcgtccatggccagagtgggggacaccccacgccctctacctgatcaaatttcc

SEQ ID NO: 93635 - DNA, 80 bp, synthetic construct
  source 1..80: mol_type = other DNA
gaacctcttcttcccctcttccagagcttccacggtgctggcaaagtcctgcagcttcttcttcgagtcggagagctaca

SEQ ID NO: 93636 - DNA, 80 bp, synthetic construct
  source 1..80: mol_type = other DNA
ctgcctgcgggggatctcagcgcagagaagttgagaggacccatgaaggaagcaaggacacggggcaggcacctggatgt

SEQ ID NO: 93637 - DNA, 80 bp, synthetic construct
  source 1..80: mol_type = other DNA
aaagaggtcccagggacctgccccgaggaaggccaccccccaggtcccctggatgatgtggcaggacactcacctgggtg

SEQ ID NO: 93638 - DNA, 80 bp, synthetic construct; identical to SEQ ID NO: 17406
  source 1..80: mol_type = other DNA

SEQ ID NO: 93639 - DNA, 80 bp, synthetic construct
  source 1..80: mol_type = other DNA
gccccaatggtattgactgggacctgatcccactaaatggatcctagatccctgccaaggttggtagagacaaagcagca

SEQ ID NO: 93640 - DNA, 80 bp, synthetic construct
  source 1..80: mol_type = other DNA
aaaggtaaaaacgtcctctctgtattctctggcttttactccctagtgtctctgcataagtccctttgaggctgttagcc

SEQ ID NO: 93641 - DNA, 80 bp, synthetic construct; identical to SEQ ID NO: 17407
  source 1..80: mol_type = other DNA

SEQ ID NO: 93642 - DNA, 80 bp, synthetic construct
  source 1..80: mol_type = other DNA
ttcacattgcccagagtaaggatcaacatacatgtaataggttctcaaaagccctacatcatctgggtacaagctccccc

SEQ ID NO: 93643 - DNA, 80 bp, synthetic construct
  source 1..80: mol_type = other DNA
tatttacacttgggcatcatgtgccttccctttgctgcatcatttgacattcatttgtgtgattattcatgtctttccct

SEQ ID NO: 93644 - DNA, 80 bp, synthetic construct
  source 1..80: mol_type = other DNA
ttttttttttcctgagacagagttttgcccttttagcccaggctggagtacaatggtgcggtctccgcacactgcaacct

SEQ ID NO: 93645 - DNA, 80 bp, synthetic construct; identical to SEQ ID NO: 17408
  source 1..80: mol_type = other DNA

SEQ ID NO: 93646 - DNA, 80 bp, synthetic construct
  source 1..80: mol_type = other DNA
catcgctgcacttggactgcagctcctgcacctgcgcctccagcttcttcttcttatgttccacctcctgcttggcctgg

SEQ ID NO: 93647 - DNA, 80 bp, synthetic construct
  source 1..80: mol_type = other DNA
agagaggtccaggaaggcacacaacagggggcacacaatcaccagtaagagatttggggtttttttgttgttattttttt

SEQ ID NO: 93648 - DNA, 80 bp, synthetic construct
  source 1..80: mol_type = other DNA
atttttagtagagacgaggtttcaccatgttagccaggctgctctcgaactcctgacctcaagtgatccacccatcttgg

SEQ ID NO: 93649 - DNA, 80 bp, synthetic construct; identical to SEQ ID NO: 17409
  source 1..80: mol_type = other DNA

SEQ ID NO: 93650 - DNA, 80 bp, synthetic construct
  source 1..80: mol_type = other DNA
caggaattggaggctgcagtgagctatgatcacaccactgcactccagcctgggcaacaaagtgagaccctgtttcagaa

SEQ ID NO: 93651 - DNA, 80 bp, synthetic construct
  source 1..80: mol_type = other DNA
acaagtattgcttgaacctgggaggtggaggttgcagtgaaccaagatcatgccactgcattccagcctgggtaacagag

SEQ ID NO: 93652 - DNA, 80 bp, synthetic construct
  source 1..80: mol_type = other DNA
aaaaaccaacaacaacgaaagatctggaaacagagggtcttgctttccttcaaggcaacaatctgccacatctaagtagc

SEQ ID NO: 93653 - DNA, 80 bp, synthetic construct; identical to SEQ ID NO: 17410
  source 1..80: mol_type = other DNA

SEQ ID NO: 93654 - DNA, 80 bp, synthetic construct
  source 1..80: mol_type = other DNA
ctgtaatcccagctgctgaggaggctgaagcaggagaattgcctgaacccaggaggcgggggttgcagtgagccgagatc

SEQ ID NO: 93655 - DNA, 80 bp, synthetic construct
  source 1..80: mol_type = other DNA
cttcccatagtccctgggaggtgctggacgttgaccggtcagccctggatgcccgtcctccctccaagacatgactaaga

SEQ ID NO: 93656 - DNA, 80 bp, synthetic construct
  source 1..80: mol_type = other DNA
atgttaaacgtttcccccacaagcagatggaaccaggtctctacatcagaattcaagttgttagaggcaaaggcctctgt

SEQ ID NO: 93657 - DNA, 80 bp, synthetic construct; identical to SEQ ID NO: 17411
  source 1..80: mol_type = other DNA

SEQ ID NO: 93658 - DNA, 80 bp, synthetic construct
  source 1..80: mol_type = other DNA
attttcatgtctcagcctcccaagtagctgggattacaggcgaccgccaccacgtccagctaatttttgtatttttagta

SEQ ID NO: 93659 - DNA, 80 bp, synthetic construct
  source 1..80: mol_type = other DNA
tcaggctagtcttgaactcctgacttggtgatccgcctatctcagcctcccaaagtgctgggattataagcatgagccac

SEQ ID NO: 93660 - DNA, 80 bp, synthetic construct
  source 1..80: mol_type = other DNA
ccatgatggtaagtttcctgaggcctccccagaagcagaagctgctatgctttctgtacagcctgcagaaccgtgagcca

SEQ ID NO: 93661 - DNA, 80 bp, synthetic construct
  source 1..80: mol_type = other DNA
aaaaaaaaaaaaaaaaaattagccgggcatggtggtgtgtgcctgtagtcccagctacttgggaggctgaggcaggagaa

SEQ ID NO: 93662 - DNA, 80 bp, synthetic construct; identical to SEQ ID NO: 17412
  source 1..80: mol_type = other DNA

SEQ ID NO: 93663 - DNA, 80 bp, synthetic construct
  source 1..80: mol_type = other DNA
tccaacaacgggagagtgatttgacctagtcattctcaaattatgccggagagagctgttctgccattgaaatcaaataa

SEQ ID NO: 93664 - DNA, 80 bp, synthetic construct
  source 1..80: mol_type = other DNA
ctgcagagaaattaaagtggatagaatgatcccagttttaagtttcatttaaatctccccgaaagtgttgttacaccttt

SEQ ID NO: 93665 - DNA, 80 bp, synthetic construct; identical to SEQ ID NO: 17413
  source 1..80: mol_type = other DNA

SEQ ID NO: 93666 - DNA, 80 bp, synthetic construct
  source 1..80: mol_type = other DNA
ccgagtagctaagattacaggcacatgccaccacacccagctaattctttatatttttggtagagatggggtttcaccat

SEQ ID NO: 93667 - DNA, 80 bp, synthetic construct
  source 1..80: mol_type = other DNA
ggtctcactgtgtcgtccaggctagagtgcagtggcatgacagggctcactgcagcctcaacctcccaggctcaaacgat

SEQ ID NO: 93668 - DNA, 80 bp, synthetic construct
  source 1..80: mol_type = other DNA
gcaatggcatgatctctgctcactgcaacctctgcctcctgggttcaagtgattctcctgcctcagcctcccgagtagct

SEQ ID NO: 93669 - DNA, 80 bp, synthetic construct
  source 1..80: mol_type = other DNA
gcctggcctacttttttaaaattttagtagaaacaaggtctcactatgttgcccaggctggtctccaactcctgagctca

SEQ ID NO: 93670 - DNA, 80 bp, synthetic construct; identical to SEQ ID NO: 17414
  source 1..80: mol_type = other DNA

SEQ ID NO: 93671 - DNA, 80 bp, synthetic construct
  source 1..80: mol_type = other DNA
gctccctcttggcccttggtgggaggaacacagtgaatggcagttgggtggagacagagggtcatctcagtgccgtgcaa

SEQ ID NO: 93672 - DNA, 80 bp, synthetic construct
  source 1..80: mol_type = other DNA
gtggagcatatcacctgcctaggacatctgtaatgactggcaaacaaatacacaaagtaatagaattgaaaggatgtctg

SEQ ID NO: 93673 - DNA, 80 bp, synthetic construct; identical to SEQ ID NO: 17415
  source 1..80: mol_type = other DNA

SEQ ID NO: 93674 - DNA, 80 bp, synthetic construct
  source 1..80: mol_type = other DNA
aggtgcccaccaccacgcccggctaattttatatttttagtagagatggggtttcaacatgttggtcaggctggtttcga

SEQ ID NO: 93675 - DNA, 80 bp, synthetic construct
  source 1..80: mol_type = other DNA
tcactgcaacctctgcctcccaggttcaagggattctcctgcctcagtctcccaagtagctgggattaccgacgcccacc

SEQ ID NO: 93676 - DNA, 80 bp, synthetic construct
  source 1..80: mol_type = other DNA
tcttctgtatcaaaggccaagcggcaagggagcagaacgctgtgctctatgtgcatgtgacactgcacaaaacccaaagt

SEQ ID NO: 93677 - DNA, 80 bp, synthetic construct
  source 1..80: mol_type = other DNA
tcaatgacctagtttcactagagtcaggattcgtgatctggcaggcagtttgttattgtttgttcatttgaagtgaatct

SEQ ID NO: 93678 - DNA, 80 bp, synthetic construct; identical to SEQ ID NO: 17416
  source 1..80: mol_type = other DNA

SEQ ID NO: 93679 - DNA, 80 bp, synthetic construct
  source 1..80: mol_type = other DNA
cagcctcctgagtagctgggatttacaggcatgcgccaccacgcccaggtaatttttggatttatagtagagacagggtt

SEQ ID NO: 93680 - DNA, 80 bp, synthetic construct
  source 1..80: mol_type = other DNA
tctgcttttctatagttttcaaattgttctctgagtatatccaagcttaccaatgaggatggttttgaatgcagcctgac

SEQ ID NO: 93681 - DNA, 80 bp, synthetic construct; identical to SEQ ID NO: 17417
  source 1..80: mol_type = other DNA

SEQ ID NO: 93682 - DNA, 80 bp, synthetic construct
  source 1..80: mol_type = other DNA
cacaactgcactccagcctaggcaacaaagccagactgcctcaaaaaaaaaaaaaaaagaaagaaaaaaaagaaacagcc

SEQ ID NO: 93683 - DNA, 80 bp, synthetic construct
  source 1..80: mol_type = other DNA
tgctgagtggctgtgctgtccagtgtgtcttccagctctgtctttagggcctccagctcctcgccgaggtctcgcttctg

SEQ ID NO: 93684 - DNA, 80 bp, synthetic construct
  source 1..80: mol_type = other DNA
tcccttggtttcctctcttacaatgtggccaaaaacttttctgggaccagacagttatgttgcagagacatcaaacacct

SEQ ID NO: 93685 - DNA, 80 bp, synthetic construct; identical to SEQ ID NO: 17418
  source 1..80: mol_type = other DNA

SEQ ID NO: 93686 - DNA, 80 bp, synthetic construct
  source 1..80: mol_type = other DNA
aaatggcagaatgctgcaggagaggcaagcactttgattttactgtacttgtgaaagggcagcaacaagagagaaagtga

SEQ ID NO: 93687 - DNA, 80 bp, synthetic construct
  source 1..80: mol_type = other DNA
gtggcatgatcatagctcactttagcctcaacctcctgggctcaagtgatcctcccatctcagcctcctgagtagctggg

SEQ ID NO: 93688 - DNA, 80 bp, synthetic construct
  source 1..80: mol_type = other DNA
agccagcaaagttttgtgagcaggttcctgccccagagagatgctttcccttcatcaccgtagcactgtcaacatagcac

SEQ ID NO: 93689 - DNA, 80 bp, synthetic construct; identical to SEQ ID NO: 17419
  source 1..80: mol_type = other DNA

SEQ ID NO: 93690 - DNA, 80 bp, synthetic construct
  source 1..80: mol_type = other DNA
cagaatctgaaggttgctgcttgctgtgggtcggcagaaacaaaggaggagattggtgttcacaaaaaagagggccctta

SEQ ID NO: 93691 - DNA, 80 bp, synthetic construct
  source 1..80: mol_type = other DNA
gagatcaactgcaaagacatgatgtgtttgcagggaagagaagaaagtcgaaggtgaggatctgggggagtgaacagggt

SEQ ID NO: 93692 - DNA, 80 bp, synthetic construct
  source 1..80: mol_type = other DNA
agggccgcctgcagctcctcctccttcttggccagctgcatcttgagctctgcgatctgcgcctggaggtcagcgatctg

SEQ ID NO: 93693 - DNA, 80 bp, synthetic construct; identical to SEQ ID NO: 17420
  source 1..80: mol_type = other DNA

SEQ ID NO: 93694 - DNA, 80 bp, synthetic construct
  source 1..80: mol_type = other DNA
caattctcctgcctcagcctcccgagtagctgggattacaggcgcccgccaccacgcctggctaatttttgtattttgag

SEQ ID NO: 93695 - DNA, 80 bp, synthetic construct
  source 1..80: mol_type = other DNA
gtggcatagagttagttgtcactcatgggatgatctgccatcctcaaatttcctttctgattttcctgcttttaaaaata

SEQ ID NO: 93696 - DNA, 80 bp, synthetic construct
  source 1..80: mol_type = other DNA
tggtgatgcacgcctgtagtctcagctgctcaggaggctgaggcaggaggatcactggagcttaggagtttcgggctgca

SEQ ID NO: 93697 - DNA, 80 bp, synthetic construct; identical to SEQ ID NO: 17421
  source 1..80: mol_type = other DNA

SEQ ID NO: 93698 - DNA, 80 bp, synthetic construct
  source 1..80: mol_type = other DNA
agttttaaatggtaaagagaagtcccataacaatttccaaaaactggccatttctcatctcgtgccagtttgtccctcat

SEQ ID NO: 93699 - DNA, 80 bp, synthetic construct
  source 1..80: mol_type = other DNA
gggccaaccagctgagatgctcttctactcccctctaactgctccttcatctttaagtttctgcttaaatgtcacctcct

SEQ ID NO: 93700 - DNA, 80 bp, synthetic construct
  source 1..80: mol_type = other DNA
tcagcctcccgagtagctgggactacaggcgcccgccaacacacccaactaattttttgtatttttagtagagatggggt

SEQ ID NO: 93701 - DNA, 80 bp, synthetic construct
  source 1..80: mol_type = other DNA
aatatggtgaacgtttccttcagagccctgatcaccatggtaaatgacgattatttgccatctcactacagtataaaccc

SEQ ID NO: 93702 - DNA, 80 bp, synthetic construct; identical to SEQ ID NO: 17422
  source 1..80: mol_type = other DNA

SEQ ID NO: 93703 - DNA, 80 bp, synthetic construct
  source 1..80: mol_type = other DNA
ccacacctggctaatctttgtatttttagtagagatggagttttaccctgttggccaggctagtctcaaactcctggcct

SEQ ID NO: 93704 - DNA, 80 bp, synthetic construct
  source 1..80: mol_type = other DNA
tgttcttcaaggtcctttgttgtggagggaaaagagtaacagctttggttataacagatttactctcgtggtgatctggg

SEQ ID NO: 93705 - DNA, 80 bp, synthetic construct
  source 1..80: mol_type = other DNA
ctggccaacatggtgaaaccccgtctctactaaaaatacaaaaaaaattagccaggcatggtggtgggctcctgtaatcc

SEQ ID NO: 93706 - DNA, 80 bp, synthetic construct; identical to SEQ ID NO: 17423
  source 1..80: mol_type = other DNA

SEQ ID NO: 93707 - DNA, 80 bp, synthetic construct
  source 1..80: mol_type = other DNA
aaaggcattgcggcttcctttctcctctctcagatcactccttctgggggaactctgctgccatattggaaggacactca

SEQ ID NO: 93708 - DNA, 80 bp, synthetic construct
  source 1..80: mol_type = other DNA
agccagaaccactcacctaagccactctcaaattcctgactatgcaatactttttatttttagctgctgagtttggcatg

SEQ ID NO: 93709 - DNA, 80 bp, synthetic construct
  source 1..80: mol_type = other DNA
ttttgttatgtagcaatagctaacaaatacaattatcctccattcaggcttgctgttaggagaaaaggggttagcacatg

SEQ ID NO: 93710 - DNA, 80 bp, synthetic construct; identical to SEQ ID NO: 17424
  source 1..80: mol_type = other DNA

SEQ ID NO: 93711 - DNA, 80 bp, synthetic construct
  source 1..80: mol_type = other DNA
cttctcctcggtcagctgcacgcaggtggtggggaggaggcgggtgagccccacggggccaagtcctgttccccagcaac

SEQ ID NO: 93712 - DNA, 80 bp, synthetic construct
  source 1..80: mol_type = other DNA
cacacacacggttagcccatcatttgtttttgtggcaaagggatatgttgtcataataaattcgatcagtggttccgagc

SEQ ID NO: 93713 - DNA, 80 bp, synthetic construct
  source 1..80: mol_type = other DNA
attagtcaccccaaaatatcaacagtggcaagactgaggagctctaaatcagagcaccagaaaaggtacaaagtgaaagg

SEQ ID NO: 93714 - DNA, 80 bp, synthetic construct; identical to SEQ ID NO: 17425
  source 1..80: mol_type = other DNA

SEQ ID NO: 93715 - DNA, 80 bp, synthetic construct
  source 1..80: mol_type = other DNA
gggaccagcctgggcaacatcatgagaccccatctctacaaaaacaagtaaccaggcatggtggtgtgtgcctgtagtcc

SEQ ID NO: 93716 - DNA, 80 bp, synthetic construct
  source 1..80: mol_type = other DNA
atgctgttacatcattcttacaactttacatagccatcttttaagttaatttatttatttagcgatggtcttgttttgtc

SEQ ID NO: 93717 - DNA, 80 bp, synthetic construct
  source 1..80: mol_type = other DNA
ttagcagacctattcagtagccaaagccatcattttaatagctgaaaacattccattgatagatgaaccattattgaact

SEQ ID NO: 93718 - DNA, 80 bp, synthetic construct
  source 1..80: mol_type = other DNA
ctggagtgcagtggcacgatctcagctcactgaaacctctgcctcctcggttcaagtgattctcctgcctcaatctcctg

SEQ ID NO: 93719 - DNA, 80 bp, synthetic construct; identical to SEQ ID NO: 17426
  source 1..80: mol_type = other DNA

SEQ ID NO: 93720 - DNA, 80 bp, synthetic construct
  source 1..80: mol_type = other DNA
attatgtatctgtctctgtgattatctgtttattgtttactccccaccaattcggctagaatattcatggaggtcaggga

SEQ ID NO: 93721 - DNA, 80 bp, synthetic construct
  source 1..80: mol_type = other DNA
gtgccatggggacaatgcaaccagtgccactacaggaaccagttgagtcctctggaggccctgactctgccagaaataaa

SEQ ID NO: 93722 - DNA, 80 bp, synthetic construct; identical to SEQ ID NO: 17427
  source 1..80: mol_type = other DNA

SEQ ID NO: 93723 - DNA, 80 bp, synthetic construct
  source 1..80: mol_type = other DNA
agtagagacagggtttcaccatcttggccaggatggtcttgatttcttgactttgtgatccacccgcctcggcctcccaa

SEQ ID NO: 93724 - DNA, 80 bp, synthetic construct
  source 1..80: mol_type = other DNA
gccttagcctcctgagtatctgggattacaggtgcctgccaccatacccagctaatttttgtattttaagtagagacagg

SEQ ID NO: 93725 - DNA, 80 bp, synthetic construct
  source 1..80: mol_type = other DNA
gctacggaggaagtgggtgtggctataaatgggccacacgagggattccagtgcggatggaaatattaatactttgtgtt

SEQ ID NO: 93726 - DNA, 80 bp, synthetic construct
  source 1..80: mol_type = other DNA
gcccctgggaagggggctggggcagagcactcactttggtgaaaagcctccaccactgccagttccgcagcttgaggtag

SEQ ID NO: 93727 - DNA, 80 bp, synthetic construct; identical to SEQ ID NO: 17428
  source 1..80: mol_type = other DNA

SEQ ID NO: 93728 - DNA, 80 bp, synthetic construct
  source 1..80: mol_type = other DNA
tttctttcttttttttttttttttttttttgagatagagtttcgctcttgttgcccaggctggagtgcggtggcacgatc

SEQ ID NO: 93729 - DNA, 80 bp, synthetic construct
  source 1..80: mol_type = other DNA
gacctcaggtgatccacccaccttggcctcccaaagtgctgggattacaggtaggagccaccatgcccagcctacaccag

SEQ ID NO: 93730 - DNA, 80 bp, synthetic construct
  source 1..80: mol_type = other DNA
tacgggcacatgctaccatgcccagctaatttttaaagttttttttttttggtagagataggggtctcgccatgttgccc

SEQ ID NO: 93731 - DNA, 80 bp, synthetic construct; identical to SEQ ID NO: 17429
  source 1..80: mol_type = other DNA

SEQ ID NO: 93732 - DNA, 80 bp, synthetic construct
  source 1..80: mol_type = other DNA
ctggccttgaccatcttgggtccatgtgtcaatgaatgaacctgacacatcagggtcctactggtgagggtgtggtctct

SEQ ID NO: 93733 - DNA, 80 bp, synthetic construct
  source 1..80: mol_type = other DNA
actgggacacggggatctagacaccgtcaagtcctctttcctcaatggtttatccaattctaacatgtctaggctgggcg

SEQ ID NO: 93734 - DNA, 80 bp, synthetic construct
  source 1..80: mol_type = other DNA
ccactcgggaggctcagacacgagaattgcttgagtccaagaggcagaggttgcagtgagttgagactgcgccactgcac

SEQ ID NO: 93735 - DNA, 80 bp, synthetic construct; identical to SEQ ID NO: 17430
  source 1..80: mol_type = other DNA

SEQ ID NO: 93736 - DNA, 80 bp, synthetic construct
  source 1..80: mol_type = other DNA
ttcagtcaatgatgcatcttaaacaggtggcctcttagaatcagggaatcagaacagaaaggcccctgtttgtgattcgc

SEQ ID NO: 93737 - DNA, 80 bp, synthetic construct
  source 1..80: mol_type = other DNA
cctgtataagttggggtcaagttccagggctttgatctgcaaaaggaaggaaaggaagagctcctgatttccactgtgcc

SEQ ID NO: 93738 - DNA, 80 bp, synthetic construct; identical to SEQ ID NO: 17431
  source 1..80: mol_type = other DNA

SEQ ID NO: 93739 - DNA, 80 bp, synthetic construct
  source 1..80: mol_type = other DNA
aggtcaaagagggcagtggatccctggggccagaaaccatggcgcagcaaagccccaaacctcctacctggatgacccac

SEQ ID NO: 93740 - DNA, 80 bp, synthetic construct
  source 1..80: mol_type = other DNA
gaacctggggcttcctcctcatcacctcgtctccctcacttcctgtccatcagcagtttgattgcttctagctcccaaat

SEQ ID NO: 93741 - DNA, 80 bp, synthetic construct
  source 1..80: mol_type = other DNA
agccaggctggagtccagtggtgcgatcatggctcactgcagcctcaaactcctgggctcaagtgatcctcccaaatcag

SEQ ID NO: 93742 - DNA, 80 bp, synthetic construct
  source 1..80: mol_type = other DNA
aggcatgagctagcatatgcccagccccctcattcacttcctaaaatgtaaatctgaccatgatatagccctgctttaac

SEQ ID NO: 93743 - DNA, 80 bp, synthetic construct; identical to SEQ ID NO: 17432
  source 1..80: mol_type = other DNA

SEQ ID NO: 93744 - DNA, 80 bp, synthetic construct
  source 1..80: mol_type = other DNA
gtgagcaacacgcctggacactatctagcattttcttacctagttccttcacttctcacctccacactcttgcttagcct

SEQ ID NO: 93745 - DNA, 80 bp, synthetic construct
  source 1..80: mol_type = other DNA
aactgaccacattccatcaccatcatcagctgtatgtttacctctccccgtgtctcccataacctcagcactactggcat

SEQ ID NO: 93746 - DNA, 80 bp, synthetic construct; identical to SEQ ID NO: 17433
  source 1..80: mol_type = other DNA

SEQ ID NO: 93747 - DNA, 80 bp, synthetic construct
  source 1..80: mol_type = other DNA
acaactgaaaagtctctggatgcatcctcccttcctccttttcctccagggatggggaatgggtctgagattcagatagc

SEQ ID NO: 93748 - DNA, 80 bp, synthetic construct
  source 1..80: mol_type = other DNA
ttgggcgtggtgttgcgtagcgtggtcatcagcttgcccagctgctccttgtacagctgccccactgtgcggaacatgcc

SEQ ID NO: 93749 - DNA, 80 bp, synthetic construct
  source 1..80: mol_type = other DNA
caacctgcccactccaatctttccttccatcaccaacgcctccttcggcagtcagggtttccaagtattgtctattgggg

SEQ ID NO: 93750 - DNA, 80 bp, synthetic construct; identical to SEQ ID NO: 17434
  source 1..80: mol_type = other DNA

SEQ ID NO: 93751 - DNA, 80 bp, synthetic construct
  source 1..80: mol_type = other DNA
atcacagatgttaagtatggaatatcttgagtagtgaggtgtgcgtagaaaaataaaaatagggtaaagcggagagagag

SEQ ID NO: 93752 - DNA, 80 bp, synthetic construct
  source 1..80: mol_type = other DNA
cagaagatacagcacacactccgagatagcctggcacatcagtaagtgctcaacaaaaagtaggtattattattattatt

SEQ ID NO: 93753 - DNA, 80 bp, synthetic construct
  source 1..80: mol_type = other DNA
gattacaggcatgcgccaccacgcccggctcattttttttatatttttagtagagacagagtttctccatgttggtcagg

SEQ ID NO: 93754 - DNA, 80 bp, synthetic construct; identical to SEQ ID NO: 17435
  source 1..80: mol_type = other DNA

SEQ ID NO: 93755 - DNA, 80 bp, synthetic construct
  source 1..80: mol_type = other DNA
gctaattttgtttttattttttatttttagttttattttttcaagacagagtcttgctcttttgcccaggctggagtcca

SEQ ID NO: 93756 - DNA, 80 bp, synthetic construct
  source 1..80: mol_type = other DNA
ctcttgacctcaactgatcctcctgcctcagcctcccaaagtgctgagattacaggtgtgagccaccatgcgcagcctca

SEQ ID NO: 93757 - DNA, 80 bp, synthetic construct
  source 1..80: mol_type = other DNA
agctggcccctcctggagccctttttttagcatgcttaaaacaaggggagaccagtcctgtaagccccaggcccatgggc

SEQ ID NO: 93758 - DNA, 80 bp, synthetic construct; identical to SEQ ID NO: 17436
  source 1..80: mol_type = other DNA

SEQ ID NO: 93759 - DNA, 80 bp, synthetic construct
  source 1..80: mol_type = other DNA
caggtatggtggtgtgtgcctgtaatgctagctacttgggaggctgaggcaggaaaatcactggaacccagaaggtggag

SEQ ID NO: 93760 - DNA, 80 bp, synthetic construct
  source 1..80: mol_type = other DNA
cggcaactattattgcatctcctgttttactaatgaggacaatgaagcttaatgacatcaagtgactcatccaagaccac

SEQ ID NO: 93761 - DNA, 80 bp, synthetic construct
  source 1..80: mol_type = other DNA
gacccccactcaggaagaaattgtttcaacgagacatcaccagcccatgccaatgctcttccttcccctgcccccatgta

SEQ ID NO: 93762 - DNA, 80 bp, synthetic construct
  source 1..80: mol_type = other DNA
gtcattcagcgggtccatattcttggtcagccaggcactcgcattatagtccacctgccaaggacaccctgctggtcaga

SEQ ID NO: 93763 - DNA, 80 bp, synthetic construct; identical to SEQ ID NO: 17437
  source 1..80: mol_type = other DNA

SEQ ID NO: 93764 - DNA, 80 bp, synthetic construct
  source 1..80: mol_type = other DNA
agttatacactattaagagatttcatgacggcagatgccctcctgccgacatgcaaaactcccccctcatcatcttccca

SEQ ID NO: 93765 - DNA, 80 bp, synthetic construct
  source 1..80: mol_type = other DNA
aaaaaaaaaaaaattagccaggcatggtggtgcacacctgtaatgccagctactcgggaggctgaggcaggagaatcgct

SEQ ID NO: 93766 - DNA, 80 bp, synthetic construct
  source 1..80: mol_type = other DNA
gatcctgatatatggatatacagaaaaaggacatataggctttttacattcctgactcaaacaatgacaatgcccaaagc

SEQ ID NO: 93767 - DNA, 80 bp, synthetic construct; identical to SEQ ID NO: 17438
  source 1..80: mol_type = other DNA

SEQ ID NO: 93768 - DNA, 80 bp, synthetic construct
  source 1..80: mol_type = other DNA
tgcctcagcctcctgagtagctgaggttacagttgtgtgcctgtaatctcacagctggctaatttttaaattttttttat

SEQ ID NO: 93769 - DNA, 80 bp, synthetic construct
  source 1..80: mol_type = other DNA
caagtcatacagtctttgtcgcagctactcaactctagcactgtagtatacaaaagcagccagccatagacattatgcat

SEQ ID NO: 93770 - DNA, 80 bp, synthetic construct; identical to SEQ ID NO: 17439
  source 1..80: mol_type = other DNA

SEQ ID NO: 93771 - DNA, 80 bp, synthetic construct
  source 1..80: mol_type = other DNA
atgtattagtcaccccattccagttggccccgcctgttgggtataacttgtagcaggaaggatttagagtctatacaaga

SEQ ID NO: 93772 - DNA, 80 bp, synthetic construct
  source 1..80: mol_type = other DNA
aggcacggtggctcatgcctgtaatcctagcaccttgggaggccgaggcgggtggatcacctgaggtcaggagtttgaga

SEQ ID NO: 93773 - DNA, 80 bp, synthetic construct
  source 1..80: mol_type = other DNA
cactccagcctggatgacaagagcaaaattccatctcaaaaaggaaaaaagattttagctgggcatggtggtgtacacct

SEQ ID NO: 93774 - DNA, 80 bp, synthetic construct; identical to SEQ ID NO: 17440
  source 1..80: mol_type = other DNA

SEQ ID NO: 93775 - DNA, 80 bp, synthetic construct
  source 1..80: mol_type = other DNA
ttgtccttgagctgcttgggcttctggaacttggggtggctgccctgctccgtgcacagcttctccacgaaagacttgtc

SEQ ID NO: 93776 - DNA, 80 bp, synthetic construct
  source 1..80: mol_type = other DNA
atctgatactgtatttgcccacatataaagatgagtttatgacccccatgcttccaaatctaccttcaaattaccctgtg

SEQ ID NO: 93777 - DNA, 80 bp, synthetic construct
  source 1..80: mol_type = other DNA
gtggcgcgatctcgactcactgcaagctccgcttcctgggttcacgccattctcctgcctcagcctcccgagtagctggg

SEQ ID NO: 93778 - DNA, 80 bp, synthetic construct; identical to SEQ ID NO: 17441
  source 1..80: mol_type = other DNA

SEQ ID NO: 93779 - DNA, 80 bp, synthetic construct
  source 1..80: mol_type = other DNA
cacaggcgtgcaccaccaggcccggctaattagtagaaaccctgtctctactgaaaatacaaaagttaggtgggcgtggt

SEQ ID NO: 93780 - DNA, 80 bp, synthetic construct
  source 1..80: mol_type = other DNA
caatggcagagaaggaaagggaagggaaagagggtagggaagaaaaaaaggaagaaaaaagaggatggaaggaaggcaga

SEQ ID NO: 93781 - DNA, 80 bp, synthetic construct
  source 1..80: mol_type = other DNA
catggggagagtgtggggtccacgtcggctccacagaggccacacacgtgtacaaggtgtgacggagccccgcacgccca

SEQ ID NO: 93782 - DNA, 80 bp, synthetic construct
  source 1..80: mol_type = other DNA
gtggttgaagagctgctgcagcttctcgttggtgtagttgatgcacagctgctcgaaggagttcacctgagcacatggcg

SEQ ID NO: 93783 - DNA, 80 bp, synthetic construct; identical to SEQ ID NO: 17442
  source 1..80: mol_type = other DNA

SEQ ID NO: 93784 - DNA, 80 bp, synthetic construct
  source 1..80: mol_type = other DNA
aagtgactcggtagtacacttctttcgggacatctatcaatcttaaaacctcctggctgggtgtagtgctcatgattgta

SEQ ID NO: 93785 - DNA, 80 bp, synthetic construct
  source 1..80: mol_type = other DNA
tggtggatcatttgagatcaggagtttgagactagcctggccaacagggtgaaactctgtctctaccaaaaaaaaaaaaa

SEQ ID NO: 93786 - DNA, 80 bp, synthetic construct
  source 1..80: mol_type = other DNA
gggcaacagagcgagactctgtctaaaaaaaaaaaaaaaattagctgggcacagtggtacactcctgtagtcccagctac

SEQ ID NO: 93787 - DNA, 80 bp, synthetic construct; identical to SEQ ID NO: 17443
  source 1..80: mol_type = other DNA

SEQ ID NO: 93788 - DNA, 80 bp, synthetic construct
  source 1..80: mol_type = other DNA
ccatcttgcccccgtgaggggagagcctgcttgagaatggagccaatatggaggaaggcagagagagagagagaacgatg

SEQ ID NO: 93789 - DNA, 80 bp, synthetic construct
  source 1..80: mol_type = other DNA
ctccaaaatcatgactcctccaagaaaaagcccatctcagacaaccaagaccatggctcttaggatcccaccgagctgta

SEQ ID NO: 93790 - DNA, 80 bp, synthetic construct; identical to SEQ ID NO: 17444
  source 1..80: mol_type = other DNA

SEQ ID NO: 93791 - DNA, 80 bp, synthetic construct
  source 1..80: mol_type = other DNA
aaaaatacaaaaattagccaggcgttgtggtgcatgcctgtagtcccagctgcttgggggactgaggcaggagaatcgtt

SEQ ID NO: 93792 - DNA, 80 bp, synthetic construct
  source 1..80: mol_type = other DNA
gagatggatgggtggatgcatggacagatgaatgaatgaatgaatgaatggaatgacagctggatgggtgatggatggac

SEQ ID NO: 93793 - DNA, 80 bp, synthetic construct
  source 1..80: mol_type = other DNA
cagatgcagaggcagaccatgggtgaatggattaatgaatacatgaatgagtgaacaggtggatagatggatgaatggat

SEQ ID NO: 93794 - DNA, 80 bp, synthetic construct; identical to SEQ ID NO: 17445
  source 1..80: mol_type = other DNA

SEQ ID NO: 93795 - DNA, 80 bp, synthetic construct
  source 1..80: mol_type = other DNA
gggtttagggtcaggtagttctagtttcaagtccctgtcccttcacacttccaagtcatgtgactttggaaaagctcttt

SEQ ID NO: 93796 - DNA, 80 bp, synthetic construct
  source 1..80: mol_type = other DNA
cagctcttcggtaccttgttggtacccaggactaaataaggtaaagtatgtaaagtccctgagatagatagatttattta

SEQ ID NO: 93797 - DNA, 80 bp, synthetic construct
  source 1..80: mol_type = other DNA
attctcctgcctcagcctcccgagtagctggcattataggtgcctgccaccacacccagctaatttcttttgtattttag

SEQ ID NO: 93798 - DNA, 80 bp, synthetic construct
  source 1..80: mol_type = other DNA
tagtaacatttattgaacagttactgttcaataaatatttctttcacccttctaggatatgtgttgcagcattgtttgca

SEQ ID NO: 93799 - DNA, 80 bp, synthetic construct; identical to SEQ ID NO: 17446
  source 1..80: mol_type = other DNA

SEQ ID NO: 93800 - DNA, 80 bp, synthetic construct
  source 1..80: mol_type = other DNA
accttgcttctaacctccaagctccactgaaccatttgtgggtgtaagccgaattaacttggcaggaacttagtttatag

SEQ ID NO: 93801 - DNA, 80 bp, synthetic construct
  source 1..80: mol_type = other DNA
tggctaatttttgtatttttagtagagatggggtttcaccatgttggcgaggctggtcttgaactcctgacttcaagtga

SEQ ID NO: 93802 - DNA, 80 bp, synthetic construct
  source 1..80: mol_type = other DNA
aggtttgaaattatggtttaggagtcctgtaactggaggctacaagagtctgaccctccctaaattgctcctggggataa

SEQ ID NO: 93803 - DNA, 80 bp, synthetic construct; identical to SEQ ID NO: 17447
  source 1..80: mol_type = other DNA

SEQ ID NO: 93804 - DNA, 80 bp, synthetic construct
  source 1..80: mol_type = other DNA
caacaggtttgatcaaggtgggctctagggagcgggaaaaagcaacacaatatacagcctgggctgggaaataagaaacc

SEQ ID NO: 93805 - DNA, 80 bp, synthetic construct
  source 1..80: mol_type = other DNA
ttttggtataatcacggtccaaatgttacaagggacataattaaaatttaaaaaaaggtttgttgtttacctaaaattga

SEQ ID NO: 93806 - DNA, 80 bp, synthetic construct; identical to SEQ ID NO: 17448
  source 1..80: mol_type = other DNA

SEQ ID NO: 93807 - DNA, 80 bp, synthetic construct
  source 1..80: mol_type = other DNA
attaggtttgtttttttttaatccctgcgctctgattcaataactttccacatagggtcttgagcactgaaaagtttgaa

SEQ ID NO: 93808 - DNA, 80 bp, synthetic construct
  source 1..80: mol_type = other DNA
tcaggaaaaagtggcaagtacctgtgttatctggcatggacgcctggtctgtgtttctttccttcttgaagacgatattt

SEQ ID NO: 93809 - DNA, 80 bp, synthetic construct
  source 1..80: mol_type = other DNA
ttctgagctcaatattttcatatggttgcttaaaaccttgcattacaatggaatgccacgcagcagggactggcaaatta

SEQ ID NO: 93810 - DNA, 80 bp, synthetic construct; identical to SEQ ID NO: 17449
  source 1..80: mol_type = other DNA

SEQ ID NO: 93811 - DNA, 80 bp, synthetic construct
  source 1..80: mol_type = other DNA
cagatggaaacaagaacatactgtctaagtccatatatagaccgtccattcaagaagaggcaaaactaatcgatgctgtt

SEQ ID NO: 93812 - DNA, 80 bp, synthetic construct
  source 1..80: mol_type = other DNA
acaattttctccatgtaaatcatatgtcaataaaaggatttttgaaataaaaaccctgtgcttcttacatactcttctgg

SEQ ID NO: 93813 - DNA, 80 bp, synthetic construct
  source 1..80: mol_type = other DNA
tccccataagaccatgagtttctggagagtggagggcctgccctaatcatctttgaatttccaaagcctattccaaggtc

SEQ ID NO: 93814 - DNA, 80 bp, synthetic construct; identical to SEQ ID NO: 17450
  source 1..80: mol_type = other DNA

SEQ ID NO: 93815 - DNA, 80 bp, synthetic construct
  source 1..80: mol_type = other DNA
atggatggatgatgattaatgcaaattcttggcttagcttaactcaggtacaaatcacccagagttctggcttcaaatca

SEQ ID NO: 93816 - DNA, 80 bp, synthetic construct
  source 1..80: mol_type = other DNA
atgaagctgctgttgacagggcttggaaacacacttccttttaaccataacatctatgaaagagtctttgtaaactatga

SEQ ID NO: 93817 - DNA, 80 bp, synthetic construct
  source 1..80: mol_type = other DNA
atgggaagtttagtagcatccctggcctctaaccactagatgtcagtggtggttaccctgacagagttgtgacaaccaca

SEQ ID NO: 93818 - DNA, 80 bp, synthetic construct; identical to SEQ ID NO: 17451
  source 1..80: mol_type = other DNA

SEQ ID NO: 93819 - DNA, 80 bp, synthetic construct
  source 1..80: mol_type = other DNA
cagagtagctgggattacaggcgtgtgccaccacacccggctaatttttctatttttagtagagacggagtttcaccatg

SEQ ID NO: 93820 - DNA, 80 bp, synthetic construct
  source 1..80: mol_type = other DNA
gggctcaggaaccattggtttgcactttctggtatagttaaatgtaattccagaaatgacaaaagaatgccaccactccc

SEQ ID NO: 93821 - DNA, 80 bp, synthetic construct
  source 1..80: mol_type = other DNA
gctttgcttcttataaatctcattatctctgaatttccaaatcctagttccgggtccagatacacatggggagggaggga

SEQ ID NO: 93822 - DNA, 80 bp, synthetic construct
  source 1..80: mol_type = other DNA
atggaaggatgagtagaggatagatggatgatagaggatggattgatggatgaatcatggatgaatagaggatagagact

SEQ ID NO: 93823 - DNA, 80 bp, synthetic construct; identical to SEQ ID NO: 17452
  source 1..80: mol_type = other DNA

SEQ ID NO: 93824 - DNA, 80 bp, synthetic construct
  source 1..80: mol_type = other DNA
cccagcctgaacgtggcctattttggaaaaaatcggtcttcgcagatggaatcaagtacaagatctcaagatgagatcat

SEQ ID NO: 93825 - DNA, 80 bp, synthetic construct
  source 1..80: mol_type = other DNA
gacagaggcaaggaacagatctccctcagtgcctccaggaggaacaacccctgccaacatcttgtcttttaaaaaaaaaa

SEQ ID NO: 93826 - DNA, 80 bp, synthetic construct
  source 1..80: mol_type = other DNA
ggcatgagccattatgcccggctcctgccgacaccctgatttcagaaccctggcctccagaactgggagagaataaattc

SEQ ID NO: 93827 - DNA, 80 bp, synthetic construct; identical to SEQ ID NO: 17453
  source 1..80: mol_type = other DNA

SEQ ID NO: 93828 - DNA, 80 bp, synthetic construct
  source 1..80: mol_type = other DNA
ctcttggtttataaatggggttggtgtacatttaggactaagttggttcctatgagagttcgtcatttgcacgccatcgt

SEQ ID NO: 93829 - DNA, 80 bp, synthetic construct
  source 1..80: mol_type = other DNA
ataaatacaaggaaaacagtattaccaaattctagctagatgcttggggctgccgaaggtgctgggcctggagtctggtc

SEQ ID NO: 93830 - DNA, 80 bp, synthetic construct; identical to SEQ ID NO: 17454
  source 1..80: mol_type = other DNA

SEQ ID NO: 93831 - DNA, 80 bp, synthetic construct
  source 1..80: mol_type = other DNA
ctcagccaagagaattgcttgaacccaggaggcagaggttgcagtgagccgaggtcgtgccactgcactccagcctgggt

SEQ ID NO: 93832 - DNA, 80 bp, synthetic construct
  source 1..80: mol_type = other DNA
gcgccaccgtactccagcctaggtgacagagtggtgtgatctcggctcactgcagcttcgacctcctgggctcaagcaat

SEQ ID NO: 93833 - DNA, 80 bp, synthetic construct
  source 1..80: mol_type = other DNA
ggaattacaggcgtgagccaccatgcccagcaaaacaatttaaatggtctcattgttttctttcacaaggacagacaatg

SEQ ID NO: 93834 - DNA, 80 bp, synthetic construct; identical to SEQ ID NO: 17455
  source 1..80: mol_type = other DNA

SEQ ID NO: 93835 - DNA, 80 bp, synthetic construct
  source 1..80: mol_type = other DNA
agattctgatgtgggaccctggccaagacccacatacaccatccatttgtcaactgacccatacagcctaattttccaga

SEQ ID NO: 93836 - DNA, 80 bp, synthetic construct
  source 1..80: mol_type = other DNA
tgtcctggtgttcctgaaagagattaaccttcaacactgaggcacatctaacgcagaaggaaaatcgtttctggaaacac

SEQ ID NO: 93837 - DNA, 80 bp, synthetic construct
  source 1..80: mol_type = other DNA
ccctaaaccctgcccacatgttcctgatgaggccaacatctctaccttcagctccaagaatccattcttagggaccataa

SEQ ID NO: 93838 - DNA, 80 bp, synthetic construct; identical to SEQ ID NO: 17456
  source 1..80: mol_type = other DNA

SEQ ID NO: 93839 - DNA, 80 bp, synthetic construct
  source 1..80: mol_type = other DNA
agcaatcctcccacctcagcctcctgagtagctaggactacaagtgtgcaccaccagccctggctaattttttttttgta

SEQ ID NO: 93840 - DNA, 80 bp, synthetic construct
  source 1..80: mol_type = other DNA
taacctccctgaacttctcaacattctgagttagtcactttccctttggtttaagccagctcgggttacttgcaacccta

SEQ ID NO: 93841 - DNA, 80 bp, synthetic construct
  source 1..80: mol_type = other DNA
ccagagaagagttcttaacaggttccactggtatccaggcaagctaccctccagactcaaggtgtgaggcttacatagct

SEQ ID NO: 93842 - DNA, 80 bp, synthetic construct; identical to SEQ ID NO: 17457
  source 1..80: mol_type = other DNA

SEQ ID NO: 93843 - DNA, 80 bp, synthetic construct
  source 1..80: mol_type = other DNA
acgaagttacatttacctggaggaagggatgcctttacctcaattgtctagaggcaccctgccttcagccttcagagaca

SEQ ID NO: 93844 - DNA, 80 bp, synthetic construct
  source 1..80: mol_type = other DNA
ctgagtagctgggattacaggcgcccgccaccacgcccggctaaattttgtatttttagtagagatggggtttcaccatg

SEQ ID NO: 93845 - DNA, 80 bp, synthetic construct
  source 1..80: mol_type = other DNA
tactaccaaaggtttataatgaaaaatagcattctcctgtcacatcccttctccaactctaccttactccataatacctg

SEQ ID NO: 93846 - DNA, 80 bp, synthetic construct; identical to SEQ ID NO: 17458
  source 1..80: mol_type = other DNA

SEQ ID NO: 93847 - DNA, 80 bp, synthetic construct
  source 1..80: mol_type = other DNA
ctatcgtgagctgcacatgtgccctccttataacactctaatgcctgataatctgtcactgtcccccatcaccccccgat

SEQ ID NO: 93848 - DNA, 80 bp, synthetic construct
  source 1..80: mol_type = other DNA
aacttttcttccaggaaaccagtcctcagtgccaaaagtaacaggtgcttttggcctattggaagaccagaggcaaagca

SEQ ID NO: 93849 - DNA, 80 bp, synthetic construct
  source 1..80: mol_type = other DNA
tggagtgcagtggtgcgatattggctgctcactgcaacctctgcctcccggattcaagcaattctcctgcctctcgagta

SEQ ID NO: 93850 - DNA, 80 bp, synthetic construct; identical to SEQ ID NO: 17459
  source 1..80: mol_type = other DNA

SEQ ID NO: 93851 - DNA, 80 bp, synthetic construct
  source 1..80: mol_type = other DNA
cagtttgccaactccctttttatgacattaattagatattctgtgtcaaactgtatcctatgattacatttcctttgttg

SEQ ID NO: 93852 - DNA, 80 bp, synthetic construct
  source 1..80: mol_type = other DNA
tggattcggttatacttttggagagacgtcagcaagatatttttctttcaaaatcaaggtcttttatgggtcaagtcact

SEQ ID NO: 93853 - DNA, 80 bp, synthetic construct
  source 1..80: mol_type = other DNA
ttctaaaagcctaacatctttccagttctatcatctagaatacaaacggcccctgggaatttagttctgagccctatact

SEQ ID NO: 93854 - DNA, 80 bp, synthetic construct; identical to SEQ ID NO: 17460
  source 1..80: mol_type = other DNA

SEQ ID NO: 93855 - DNA, 80 bp, synthetic construct
  source 1..80: mol_type = other DNA
gccagccaccacacctggctaatttttgtatttttggggagacagggtttcactatcttggccgagctggtctcaaactc

SEQ ID NO: 93856 - DNA, 80 bp, synthetic construct
  source 1..80: mol_type = other DNA
gatccttttggtaactgtcttaaccaaaataactaaccttgggccacaaaagagatgggaagcaaagtctgtattgttcc

SEQ ID NO: 93857 - DNA, 80 bp, synthetic construct
  source 1..80: mol_type = other DNA
gtatacagtgtattatatttacataaaaaaacttttccctacaacagaggtcagcaaacttctgcacactgcctgttttt

SEQ ID NO: 93858 - DNA, 80 bp, synthetic construct; identical to SEQ ID NO: 17461
  source 1..80: mol_type = other DNA

SEQ ID NO: 93859 - DNA, 80 bp, synthetic construct
  source 1..80: mol_type = other DNA
ccagaatgcatcttttatatttgcaagttttataaattggcaagtaaggcaaatgtctttctccctttccttgaaggcgt

SEQ ID NO: 93860 - DNA, 80 bp, synthetic construct
  source 1..80: mol_type = other DNA
gaagaactgttcatatgtcactcacagacatggtcctttctggcaggatctgagactgttttaatagccaatcccttaac

SEQ ID NO: 93861 - DNA, 80 bp, synthetic construct
  source 1..80: mol_type = other DNA
acatgtcattgctagtcacttacttctcatcttctccttggctccagcaatcatgtagtaaaagatgtggaatgtcctct

SEQ ID NO: 93862 - DNA, 80 bp, synthetic construct; identical to SEQ ID NO: 17462
  source 1..80: mol_type = other DNA

SEQ ID NO: 93863 - DNA, 80 bp, synthetic construct
  source 1..80: mol_type = other DNA
agccatcaccagcaaatcttctttaaaatgagctgtcttcagacatgacagaatacaaataatgacaccatctatgatcc

SEQ ID NO: 93864 - DNA, 80 bp, synthetic construct
  source 1..80: mol_type = other DNA
aacaagtggcaaagctgtcttccatgccctctgttccaagagtggggtctgacgggatggaggcgagagagaccgtaaac

SEQ ID NO: 93865 - DNA, 80 bp, synthetic construct
  source 1..80: mol_type = other DNA
cagcactaagcatgatggtgcgggatgatggggctagatcagcagaccttgtcttcttcaagtcctaaagccagctagca

SEQ ID NO: 93866 - DNA, 80 bp, synthetic construct
  source 1..80: mol_type = other DNA
ggcagtgtgtgatcttggctcactgcaacctctgcctcccggatccaagcaattctcctgcctcagcctcctgagtagct

SEQ ID NO: 93867 - DNA, 80 bp, synthetic construct; identical to SEQ ID NO: 17463
  source 1..80: mol_type = other DNA

SEQ ID NO: 93868 - DNA, 80 bp, synthetic construct
  source 1..80: mol_type = other DNA
gaatcctggctggtttgggcagattaaagtagaaacgtagaaaacattgagttaacgcaatagccaccacctatgagatg

SEQ ID NO: 93869 - DNA, 80 bp, synthetic construct
  source 1..80: mol_type = other DNA
cagcttagacaagtacagtggagaggaagctactccacaacccaccctcttatccagggcacataacgtggaaaaatggg

SEQ ID NO: 93870 - DNA, 80 bp, synthetic construct
  source 1..80: mol_type = other DNA
ttcccccacgtccagaaatttctaacttggctccacttcaccgctcaggttcatgaaagagatgctctacttgttccttg

SEQ ID NO: 93871 - DNA, 80 bp, synthetic construct; identical to SEQ ID NO: 17464
  source 1..80: mol_type = other DNA

SEQ ID NO: 93872 - DNA, 80 bp, synthetic construct
  source 1..80: mol_type = other DNA
gtataaccactgcaccacaatgcctgctgttaaggggagatttgttctggaagaaacctaagaggctggaaagatagagg

SEQ ID NO: 93873 - DNA, 80 bp, synthetic construct
  source 1..80: mol_type = other DNA
acgtcgaagttgatgcggatgaatttgccctgccaacaggaaaacacagttcaggctttgctgcccaacttcagccgtta

SEQ ID NO: 93874 - DNA, 80 bp, synthetic construct; identical to SEQ ID NO: 17465
  source 1..80: mol_type = other DNA

SEQ ID NO: 93875 - DNA, 80 bp, synthetic construct
  source 1..80: mol_type = other DNA
caccctcccaagcagctaggactacaggcatgcaccaccatatctggctaatttttaaatttttttttgtagagatagga

SEQ ID NO: 93876 - DNA, 80 bp, synthetic construct
  source 1..80: mol_type = other DNA
ttaaagctgggaaaactaaggctaaaagagatcaagtgacttgtccaacgtgacgttgctcctgagaggtagggccctaa

SEQ ID NO: 93877 - DNA, 80 bp, synthetic construct
  source 1..80: mol_type = other DNA
gtcctttaggcaggaatggctcatgttcctggccctagaggctcaacaagtatctccaaagatggccctatctacctgcc

SEQ ID NO: 93878 - DNA, 80 bp, synthetic construct; identical to SEQ ID NO: 17466
  source 1..80: mol_type = other DNA

SEQ ID NO: 93879 - DNA, 80 bp, synthetic construct
  source 1..80: mol_type = other DNA
gtgcttccatttatgacaggctagaaacattgcacagaattggaacatgcaaacgcagtgcttctcagtggaggcggcac

SEQ ID NO: 93880 - DNA, 80 bp, synthetic construct
  source 1..80: mol_type = other DNA
atgactcttccaatgtctcacctgccactcatggaggtaaaaatctgtttgtaattagccaggcttagaacctaaccttt

SEQ ID NO: 93881 - DNA, 80 bp, synthetic construct
  source 1..80: mol_type = other DNA
tgggaatacaggcatgtgtcactgcgcccagctaatttttgtatttttagtagagacagggtttcaccatgttagccagg

SEQ ID NO: 93882 - DNA, 80 bp, synthetic construct; identical to SEQ ID NO: 17467
  source 1..80: mol_type = other DNA

SEQ ID NO: 93883 - DNA, 80 bp, synthetic construct
  source 1..80: mol_type = other DNA
tatgctgaaatgcactttatttatttatttttgtagagatggggtttccccatgttgcccaggctggtctcaaactcttg

SEQ ID NO: 93884 - DNA, 80 bp, synthetic construct
  source 1..80: mol_type = other DNA
acgtgtaggaggtgatactatctatgattctaatttcgggcgaggaaaggagacattatgtaattgtttgttactaaaat

SEQ ID NO: 93885 - DNA, 80 bp, synthetic construct
  source 1..80: mol_type = other DNA
actaaaatatctttctgaccctcctacggagacaaccgcttcttttgcacaataaaaccattgttgtctacctatcatca

SEQ ID NO: 93886 - DNA, 80 bp, synthetic construct; identical to SEQ ID NO: 17468
  source 1..80: mol_type = other DNA

SEQ ID NO: 93887 - DNA, 80 bp, synthetic construct
  source 1..80: mol_type = other DNA
tgttttgttacataaaatggtatcggatataagggtctagcccataccaggtgctcaatacctaattttttaaattttat

SEQ ID NO: 93888 - DNA, 80 bp, synthetic construct
  source 1..80: mol_type = other DNA
aatgaatgaatgagagagtgagaggcaggagcccttgcaagattgtgagatacagcccatctctccagggtcagatgccc

SEQ ID NO: 93889 - DNA, 80 bp, synthetic construct
  source 1..80: mol_type = other DNA
agaagctgcttttccagctctccctaaaattcattcacatctagttattggagaaagcaacctaggtcctgacagttcta

SEQ ID NO: 93890 - DNA, 80 bp, synthetic construct; identical to SEQ ID NO: 17469
  source 1..80: mol_type = other DNA

SEQ ID NO: 93891 - DNA, 80 bp, synthetic construct
  source 1..80: mol_type = other DNA
gtcgtgctgctgttcatgtttaacaagcagccttcttcaagttaaaccactacaagcctccttctaattattttagtgca

SEQ ID NO: 93892 - DNA, 80 bp, synthetic construct
  source 1..80: mol_type = other DNA
tttctgaagtcttctacagcagacaagtaaggaatgcacaaaacccaccaggaatcctcttagcggactgcggaataaag

SEQ ID NO: 93893 - DNA, 80 bp, synthetic construct
  source 1..80: mol_type = other DNA
aacgagctgctcttggcctagccctaaaacatggcggctgcagttgggccccgaggcctccaggccctggattctgggag

SEQ ID NO: 93894 - DNA, 80 bp, synthetic construct; identical to SEQ ID NO: 17470
  source 1..80: mol_type = other DNA

SEQ ID NO: 93895 - DNA, 80 bp, synthetic construct
  source 1..80: mol_type = other DNA
aaggaatcacttttgttcacataaacttggggtctccatgctctctgaaaaaggctccctttctagaatggggattctgg

SEQ ID NO: 93896 - DNA, 80 bp, synthetic construct
  source 1..80: mol_type = other DNA
acaaaagcagatcccaaataagaactgtaattctccttctgatctgcaacacagtcacccagggtctaactaagatggat

SEQ ID NO: 93897 - DNA, 80 bp, synthetic construct
  source 1..80: mol_type = other DNA
accaaagctagtgcatcgcgacctccaagactgtttctggaggcttgagtcaagcaaccagcatgcaagagacagacacg

SEQ ID NO: 93898 - DNA, 80 bp, synthetic construct
  source 1..80: mol_type = other DNA
catcgagccagggaagctttggggcctgacagtcctaaaacactcagccagatgggacagacatctctgtctaggttgtt

SEQ ID NO: 93899 - DNA, 80 bp, synthetic construct; identical to SEQ ID NO: 17471
  source 1..80: mol_type = other DNA

SEQ ID NO: 93900 - DNA, 80 bp, synthetic construct
  source 1..80: mol_type = other DNA
cagtataaaacaaatgtcagcgttatttccatcacatggacatcaggggctggagaatatatgactttgatccccccaaa

SEQ ID NO: 93901 - DNA, 80 bp, synthetic construct
  source 1..80: mol_type = other DNA
aggcatgcacaccaggcccagctaattctcttgatttttttttttttttttttttggtacagacagggtctcactatgtc

SEQ ID NO: 93902 - DNA, 80 bp, synthetic construct; identical to SEQ ID NO: 17472
  source 1..80: mol_type = other DNA

SEQ ID NO: 93903 - DNA, 80 bp, synthetic construct
  source 1..80: mol_type = other DNA
ccactcactatggctggaaaccaacttgccagagacaattctaggatgctgaatcttgagtttcctgcatttgtttggag

SEQ ID NO: 93904 - DNA, 80 bp, synthetic construct
  source 1..80: mol_type = other DNA
ggcgaacactggagacaccccatgccgtggtcagatctccatcctaccatcttcccacccacaaacctgcagacggaggc

SEQ ID NO: 93905 - DNA, 80 bp, synthetic construct
  source 1..80: mol_type = other DNA
ctgtttatttgagggattctttgacaactacatgctcttccacaggtctggaagctcagagaagagaataacagcatctc

SEQ ID NO: 93906 - DNA, 80 bp, synthetic construct; identical to SEQ ID NO: 17473
  source 1..80: mol_type = other DNA

SEQ ID NO: 93907 - DNA, 80 bp, synthetic construct
  source 1..80: mol_type = other DNA
tgccaccactgagaagccccgacgtggaggaagatctcgctatggaaggaaagggcttattctcatttcacaaaacgggc

SEQ ID NO: 93908 - DNA, 80 bp, synthetic construct
  source 1..80: mol_type = other DNA
gttcttgcaatgatgttctgtttgtatctcggttgggctgcaagctggagaccggttggctaaatcatggcctctgattg

SEQ ID NO: 93909 - DNA, 80 bp, synthetic construct
  source 1..80: mol_type = other DNA
gacctttccgcagttccatgagccaggcaggacaataatgatcatcaccaccatttcccagagggtgaaacagaggctcc

SEQ ID NO: 93910 - DNA, 80 bp, synthetic construct; identical to SEQ ID NO: 17474
  source 1..80: mol_type = other DNA

SEQ ID NO: 93911 - DNA, 80 bp, synthetic construct
  source 1..80: mol_type = other DNA
aaaattaaccaggcttggtggtgcatgcctgtagtcccagctactcaggaggctgaggtgggaggatggcttgagcccag

SEQ ID NO: 93912 - DNA, 80 bp, synthetic construct
  source 1..80: mol_type = other DNA
tttttttgagatggagtctcactctgtccccaggctggagtacagtggcacaatttcagctcactgcaagctccacctcc

SEQ ID NO: 93913 - DNA, 80 bp, synthetic construct
  source 1..80: mol_type = other DNA
attgctagaaatggaaagaccaggcacaaggcagccttcaagaaaggatgtaagtgcctctggagtaccaggacctaaag

SEQ ID NO: 93914 - DNA, 80 bp, synthetic construct
  source 1..80: mol_type = other DNA
gctgatgatctcagccaagtatctaagaataaacccagttgaagtaattcacactaaagtgtaaatgactgatatgttta

SEQ ID NO: 93915 - DNA, 80 bp, synthetic construct; identical to SEQ ID NO: 17475
  source 1..80: mol_type = other DNA

SEQ ID NO: 93916 - DNA, 80 bp, synthetic construct
  source 1..80: mol_type = other DNA
agtgccaccaaagctagtacagtctctgctcttcttcctaattaggaaataaagaaattaattttctctgccaaaggccc

SEQ ID NO: 93917 - DNA, 80 bp, synthetic construct
  source 1..80: mol_type = other DNA
ttgctgtgcctaatcctacaggtcccactgtccagaaatcaagtgtctgatggccaagaatgatgaaacatcttgcggtg

SEQ ID NO: 93918 - DNA, 80 bp, synthetic construct
  source 1..80: mol_type = other DNA
tgtgtgtgtgtgtgtgtgtgtgtgtgtaaaagaggagaactggccaggtgcagcagagaactggccacgtttataatagc

SEQ ID NO: 93919 - DNA, 80 bp, synthetic construct; identical to SEQ ID NO: 17476
  source 1..80: mol_type = other DNA

SEQ ID NO: 93920 - DNA, 80 bp, synthetic construct
  source 1..80: mol_type = other DNA
aaggggaattgatatttgttgaaggcctgcacagtactaggctttgggctcacagatcttttcatttactctacccagca

SEQ ID NO: 93921 - DNA, 80 bp, synthetic construct
  source 1..80: mol_type = other DNA
gaggagaagcaggatttgaacgtaggtccacttgacaccagggcccatgttctgcctcctacccttttattttaacaaat

SEQ ID NO: 93922 - DNA, 80 bp, synthetic construct; identical to SEQ ID NO: 17477
  source 1..80: mol_type = other DNA

SEQ ID NO: 93923 - DNA, 80 bp, synthetic construct
  source 1..80: mol_type = other DNA
tgctcacttctcctttcccacaatagttccttcctttccaccctggccttgaacctctctcacctcctcccttttacaac

SEQ ID NO: 93924 - DNA, 80 bp, synthetic construct
  source 1..80: mol_type = other DNA
ggtgcctgtagtcccagctacttggggagctgaggcaggagaatcccttgaacccaggaggcggagattacagtgagctg

SEQ ID NO: 93925 - DNA, 80 bp, synthetic construct
  source 1..80: mol_type = other DNA
acataaactctgggcatctaccccttcccatgttgctgctgggctccactgtttccaagttctgttgagaaaaataaatt

SEQ ID NO: 93926 - DNA, 80 bp, synthetic construct
  source 1..80: mol_type = other DNA
tctaggggtgaagatgccttcctggtctgagcaccctaaactcctttcttatttcttggggaatttggtactgagctccc

SEQ ID NO: 93927 - DNA, 80 bp, synthetic construct; identical to SEQ ID NO: 17478
  source 1..80: mol_type = other DNA

SEQ ID NO: 93928 - DNA, 80 bp, synthetic construct
  source 1..80: mol_type = other DNA
acaggtgcccgccactatgcctgggtaatttttatatttttagtagagatgggatttcaccatgttggcgaggctggcct

SEQ ID NO: 93929 - DNA, 80 bp, synthetic construct
  source 1..80: mol_type = other DNA
tgatgaacctcacagctattcagtccctggtctttatgtgactggcaaagcaccctggcattttgtactgtacaactcct

SEQ ID NO: 93930 - DNA, 80 bp, synthetic construct; identical to SEQ ID NO: 17479
  source 1..80: mol_type = other DNA

SEQ ID NO: 93931 - DNA, 80 bp, synthetic construct
  source 1..80: mol_type = other DNA
gtagagacaggggtctcgctatgttgctcaagctggtctcgaactcctggtctcaagtgatctctagcctcagcctccca

SEQ ID NO: 93932 - DNA, 80 bp, synthetic construct
  source 1..80: mol_type = other DNA
cttgctcaggccggagtgcagtggcacaatcttgactcactgcaatctcgaactcctgggttcaagtgaccctcccacct

SEQ ID NO: 93933 - DNA, 80 bp, synthetic construct
  source 1..80: mol_type = other DNA
gccactgtgcccacctattattacttttataaccactgcttccacagaagttatatattgtttgtataatgattttcagc

SEQ ID NO: 93934 - DNA, 80 bp, synthetic construct; identical to SEQ ID NO: 17480
  source 1..80: mol_type = other DNA

SEQ ID NO: 93935 - DNA, 80 bp, synthetic construct
  source 1..80: mol_type = other DNA
cccactggttaaactttgtccttccttggcttgagtcccttagcacgttctcatccatttcatttatttattttattgtt

SEQ ID NO: 93936 - DNA, 80 bp, synthetic construct
  source 1..80: mol_type = other DNA
gctcagctaatttttgtttttgtagagagggggtttggccatgttggccaggctggtcttgaactcctgagctcaagcga

SEQ ID NO: 93937 - DNA, 80 bp, synthetic construct
  source 1..80: mol_type = other DNA
tttagccccctgatcacacagctctatctccagccaggcccatggcctctaattaaactgattatactggatggattaca

SEQ ID NO: 93938 - DNA, 80 bp, synthetic construct; identical to SEQ ID NO: 17481
  source 1..80: mol_type = other DNA

SEQ ID NO: 93939 - DNA, 80 bp, synthetic construct
  source 1..80: mol_type = other DNA
cttttttttttttttttttttttgagacagagtctcgctctgtcacccaggctggagtgcactggcgtgatctcagctca

SEQ ID NO: 93940 - DNA, 80 bp, synthetic construct
  source 1..80: mol_type = other DNA
cctcgtgatccacccgcctcggcctcccaaagtgctgggattacaggcgtgagccacggtgcgtggccaattttcagttt

SEQ ID NO: 93941 - DNA, 80 bp, synthetic construct
  source 1..80: mol_type = other DNA
caccatgcccagctaatttttttgtatttttttagtagagatggggtttcaccgtgttagccaggatggtctcgaactcc

SEQ ID NO: 93942 - DNA, 80 bp, synthetic construct
  source 1..80: mol_type = other DNA
ttctcttaagcaccaactacgcgtaaaagctcagccctgctgtcaacttgtaggtccttcaagtcactttggctgaattt

SEQ ID NO: 93943 - DNA, 80 bp, synthetic construct; identical to SEQ ID NO: 17482
  source 1..80: mol_type = other DNA

SEQ ID NO: 93944 - DNA, 80 bp, synthetic construct
  source 1..80: mol_type = other DNA
ctgtgggaaggatggagggaagggtgggccaggcagggcaaacagtatggacagaggtccaagggagggaaatgctgggc

SEQ ID NO: 93945 - DNA, 80 bp, synthetic construct
  source 1..80: mol_type = other DNA
agttttattctcatgggtgcaggaaaccatttcacgaggggaacgggactttagaaccagtgtggggagaatcagaactg

SEQ ID NO: 93946 - DNA, 80 bp, synthetic construct
  source 1..80: mol_type = other DNA
gcataatactcgggaagctgaggcaggagaattgcttgaacccaggaggcgggggttgcagtgagccaagatcgcaccac

SEQ ID NO: 93947 - DNA, 80 bp, synthetic construct
  source 1..80: mol_type = other DNA
cagcctgaccaacatgacaaaaccctgtctctactaaaaatacaaaattagccaggcatggtggtacatgcctgttatcc

SEQ ID NO: 93948 - DNA, 80 bp, synthetic construct; identical to SEQ ID NO: 17483
  source 1..80: mol_type = other DNA

SEQ ID NO: 93949 - DNA, 80 bp, synthetic construct
  source 1..80: mol_type = other DNA
gatggggccagaattcaaacccaaggggttaggttctggaatccacactttatgacagcatgctaatgaatatttattca

SEQ ID NO: 93950 - DNA, 80 bp, synthetic construct
  source 1..80: mol_type = other DNA
gatgagaaatatttcagcatcataccgtccaaggcaggaaccgctatctaaattaactaaaatcttaaaaattcagttct

SEQ ID NO: 93951 - DNA, 80 bp, synthetic construct; identical to SEQ ID NO: 17484
  source 1..80: mol_type = other DNA

SEQ ID NO: 93952 - DNA, 80 bp, synthetic construct
  source 1..80: mol_type = other DNA
cctactctttcctgcacctctctgttaccacacttaattcattcactcaacagagggcagttgagctacactattttggt

SEQ ID NO: 93953 - DNA, 80 bp, synthetic construct
  source 1..80: mol_type = other DNA
taggtggggctaatataaccacaaaggtactgggccttataagagagaggtagggggaccagagaaagagatttgaagat

SEQ ID NO: 93954 - DNA, 80 bp, synthetic construct; identical to SEQ ID NO: 17485
  source 1..80: mol_type = other DNA

SEQ ID NO: 93955 - DNA, 80 bp, synthetic construct
  source 1..80: mol_type = other DNA
ctatatcaaccccaaacttattaattgtttcaatcttctctcaatacagttcattgccatcctaccatccatcaccatct

SEQ ID NO: 93956 - DNA, 80 bp, synthetic construct
  source 1..80: mol_type = other DNA
taaagagcgttctctctcagcataaatagatcagcctcactctttgtagtggctacctggaaatgctatattttatttaa

SEQ ID NO: 93957 - DNA, 80 bp, synthetic construct
  source 1..80: mol_type = other DNA
atggcacttttgtagtcatttgtgaacatgtgcagagtaaggaaaattcgattcccccaatgcacacgttcccagctcag

SEQ ID NO: 93958 - DNA, 80 bp, synthetic construct; identical to SEQ ID NO: 17486
  source 1..80: mol_type = other DNA

SEQ ID NO: 93959 - DNA, 80 bp, synthetic construct
  source 1..80: mol_type = other DNA
ctatcttctgcctatgtacctaggtcttcaaagaaacagtgataccaatcaccaaatatggcactgatgtgtttgtggct

SEQ ID NO: 93960 - DNA, 80 bp, synthetic construct
  source 1..80: mol_type = other DNA
atggaaccaaatgatagcaggtgtcattaagagtttaagtttgcctgcctccgcagaagaccatatatcacaaatgttta

SEQ ID NO: 93961 - DNA, 80 bp, synthetic construct
  source 1..80: mol_type = other DNA
cttacgtgcatagaatggactggtcctcccgatctgcaaacagaaagaagaaaaaagagccatgaattaaaatgagctct

SEQ ID NO: 93962 - DNA, 80 bp, synthetic construct
  source 1..80: mol_type = other DNA
gaccaaagccaaaagggcagccccaaagtcccagaggcagccccagaaagatgctggagcctgactgatccaggagtcat

SEQ ID NO: 93963 - DNA, 80 bp, synthetic construct; identical to SEQ ID NO: 17487
  source 1..80: mol_type = other DNA

SEQ ID NO: 93964 - DNA, 80 bp, synthetic construct
  source 1..80: mol_type = other DNA
ttcaacaaagaggtaagaatgtgttccaggctgcattggtcagactctctggcctaaaactccaagctcagtcaaggaca

SEQ ID NO: 93965 - DNA, 80 bp, synthetic construct
  source 1..80: mol_type = other DNA
tgacagagtcagtctctcttgtttaccaccagagaaacccaaaagatacagaggtcatcaaagaactagatgtgattaag

SEQ ID NO: 93966 - DNA, 80 bp, synthetic construct; identical to SEQ ID NO: 17488
  source 1..80: mol_type = other DNA

SEQ ID NO: 93967 - DNA, 80 bp, synthetic construct
  source 1..80: mol_type = other DNA
gatgggaagatgagtggacggaaggaaggaagaaaggaaggaagggtagatgggtgaatggaagggtgggtagatgggta

SEQ ID NO: 93968 - DNA, 80 bp, synthetic construct
  source 1..80: mol_type = other DNA
ggcaagtgagtggaaggaaggaagaaaggaaagaaggaaggaagaaaggatgggtggatggaagaatggatggataggta

SEQ ID NO: 93969 - DNA, 80 bp, synthetic construct
  source 1..80: mol_type = other DNA
gatggatagataggaagaaagaaagaagaaaggagggaagggtgtgtagatgggtagatgggtgggtatatagctggttg

SEQ ID NO: 93970 - DNA, 80 bp, synthetic construct
  source 1..80: mol_type = other DNA
gggaggatggatgggactgaagaaggcaaggtgaaagagatgactctttcttccatctgtaatcttaagagagaactgat

SEQ ID NO: 93971 - DNA, 80 bp, synthetic construct; identical to SEQ ID NO: 17489
  source 1..80: mol_type = other DNA

SEQ ID NO: 93972 - DNA, 80 bp, synthetic construct
  source 1..80: mol_type = other DNA
aattagttgggtgtcatggcacacgcttgtaatcccagctactcagaaggctgaggcaggaaaattgcttgaactcagga

SEQ ID NO: 93973 - DNA, 80 bp, synthetic construct
  source 1..80: mol_type = other DNA
ccaaaatatattaagctaaaaataaaagatgaggtagcatagtgttataccttttgtgttttaaaaagacagatatatag

SEQ ID NO: 93974 - DNA, 80 bp, synthetic construct; identical to SEQ ID NO: 17490
  source 1..80: mol_type = other DNA

SEQ ID NO: 93975 - DNA, 80 bp, synthetic construct
  source 1..80: mol_type = other DNA
ggtgaaacgctgtctctactaaaaatacaaaaattagctgggcatggtagcatgcacctgtaatccaaggtactccggag

SEQ ID NO: 93976 - DNA, 80 bp, synthetic construct
  source 1..80: mol_type = other DNA
agggacaggaggaagacctactttcacccattctacttctatcctggttatgtttgtgctatgaacacatacaatctttt

SEQ ID NO: 93977 - DNA, 80 bp, synthetic construct
  source 1..80: mol_type = other DNA
atgctgaacttctgtgttgaagtgacccactgaattctctcagcagctcctggggtgggcactggcattgcctccatttt

SEQ ID NO: 93978 - DNA, 80 bp, synthetic construct
  source 1..80: mol_type = other DNA
tgggtgtacagtggcgtgatctcagctcactgcaacctcaacctcccaggctcaagcaatcctccctcttcggcctcccc

SEQ ID NO: 93979 - DNA, 80 bp, synthetic construct; identical to SEQ ID NO: 17491
  source 1..80: mol_type = other DNA

SEQ ID NO: 93980 - DNA, 80 bp, synthetic construct
  source 1..80: mol_type = other DNA
aaaatacaaaaaattagccaggcatggcggcaggcacctgtagtcccagctactcgggaggctaaggcaggagaatcact

SEQ ID NO: 93981 - DNA, 80 bp, synthetic construct
  source 1..80: mol_type = other DNA
ctttagcttccacccagggggagaaattcactcgaggacagagcaaaatgggaaaccagtttaattttttttttttttct

SEQ ID NO: 93982 - DNA, 80 bp, synthetic construct; identical to SEQ ID NO: 17492
  source 1..80: mol_type = other DNA

SEQ ID NO: 93983 - DNA, 80 bp, synthetic construct
  source 1..80: mol_type = other DNA
gctcagatgctcacagggcccccaggagagggagcgggctccaggagaaggcctgggagctgccagcgcggctccgagct

SEQ ID NO: 93984 - DNA, 80 bp, synthetic construct
  source 1..80: mol_type = other DNA
tttatctgattccttccccaagcctgagcttgtgttggactcaaaagcagtgttctccaccgtacaaagcagtttcactc

SEQ ID NO: 93985 - DNA, 80 bp, synthetic construct
  source 1..80: mol_type = other DNA
aacacggcaaaaccccgtctctaccaaaaatacaaaaattagctgggcgcggtggtgcacacctgtaatcccagctactc

SEQ ID NO: 93986 - DNA, 80 bp, synthetic construct; identical to SEQ ID NO: 17493
  source 1..80: mol_type = other DNA

SEQ ID NO: 93987 - DNA, 80 bp, synthetic construct
  source 1..80: mol_type = other DNA
catgttgtagcaggtcccagactttatgcctatttgtggctgagtcatatcacattgtacggatggatcatattttgttt

SEQ ID NO: 93988 - DNA, 80 bp, synthetic construct
  source 1..80: mol_type = other DNA
ataccctaatctgtatctgaaacatcgtcttgggagtcaactcttctatgataccttctctaactctgcacttttctaga

SEQ ID NO: 93989 - DNA, 80 bp, synthetic construct; identical to SEQ ID NO: 17494
  source 1..80: mol_type = other DNA

SEQ ID NO: 93990 - DNA, 80 bp, synthetic construct
  source 1..80: mol_type = other DNA
aaaaattatggactttattcataatatccaaaaaatagaaacaaccaaatgttcatcaatgggtagatggataaacaaaa

SEQ ID NO: 93991 - DNA, 80 bp, synthetic construct
  source 1..80: mol_type = other DNA
aaccctatctctacaaaaaaaaatgcaaacattagctgggcatagtggcacaatccctgtggtctcagctactcaagagg

SEQ ID NO: 93992 - DNA, 80 bp, synthetic construct
  source 1..80: mol_type = other DNA
tgaatccatgatacaacgtggatgaaccttgacaacattatactaagtgaaagaagctagccggctgggcacggtggctc

SEQ ID NO: 93993 - DNA, 80 bp, synthetic construct
  source 1..80: mol_type = other DNA
gctgaggcaggagaatcacttgaacccaggaggcagagtttgtggtgagccgagaccacatcactgcactccagcccggg

SEQ ID NO: 93994 - DNA, 80 bp, synthetic construct; identical to SEQ ID NO: 17495
  source 1..80: mol_type = other DNA

SEQ ID NO: 93995 - DNA, 80 bp, synthetic construct
  source 1..80: mol_type = other DNA
cctctgaatgattataaatctgacttcttccacttcatgcagctctattaggtttccaacaattacaaaattgttcattt

SEQ ID NO: 93996 - DNA, 80 bp, synthetic construct
  source 1..80: mol_type = other DNA
aaggtagaagcaatggaaaatgcatattcacgtgttcacatattcattcaacaaacgagtcctgagccaggtaccgaaag

SEQ ID NO: 93997 - DNA, 80 bp, synthetic construct; identical to SEQ ID NO: 17496
  source 1..80: mol_type = other DNA

SEQ ID NO: 93998 - DNA, 80 bp, synthetic construct
  source 1..80: mol_type = other DNA
atgacttgcttatccttgcttttgagaagttcatgacccagggtgggagtcagatgggcaaagaaatgaccgtaagagat

SEQ ID NO: 93999 - DNA, 80 bp, synthetic construct
  source 1..80: mol_type = other DNA
cgaggcagagcatcccaagcagagggcctgggacagaagctccaaagtgggcggggacacagtaccgagcctccgtggag

SEQ ID NO: 94000 - DNA, 80 bp, synthetic construct
  source 1..80: mol_type = other DNA
tgtaaggccccaggcacgtttcctgagaagataaagggcttcagcggttcctcccccgctgtgggcctgaggactcccag

SEQ ID NO: 94001 - DNA, 80 bp, synthetic construct
  source 1..80: mol_type = other DNA
ctggtaacaggctgctgggggatccagtgagaggtaatcaaaacccgtctctgcagggccatcaatacccctgggctagt

SEQ ID NO: 94002 - DNA, 80 bp, synthetic construct; identical to SEQ ID NO: 17497
  source 1..80: mol_type = other DNA

SEQ ID NO: 94003 - DNA, 80 bp, synthetic construct
  source 1..80: mol_type = other DNA
ccggcagagttggttaggatgacatgctgagtaagaagagatactttgagagcctttgctgcaacccaacaggtgttttc

SEQ ID NO: 94004 - DNA, 80 bp, synthetic construct
  source 1..80: mol_type = other DNA
gagactcaaagcgagacccctatctctatgaaaaaaaaattttttttaattagctgtggacagaggtgtgtgcctgtagc

SEQ ID NO: 94005 - DNA, 80 bp, synthetic construct; identical to SEQ ID NO: 17498
  source 1..80: mol_type = other DNA

SEQ ID NO: 94006 - DNA, 80 bp, synthetic construct
  source 1..80: mol_type = other DNA
gattcaattcgtatttacacatacgcacagtaggctgtgtctagggcaacatctaataatcaatattgttagaatgaccg

SEQ ID NO: 94007 - DNA, 80 bp, synthetic construct
  source 1..80: mol_type = other DNA
ccagctacttgggaggctgagaggggaggatcacttgagcccaggagttggaggctggagtgagctatgagtgtgccact

SEQ ID NO: 94008 - DNA, 80 bp, synthetic construct
  source 1..80: mol_type = other DNA
ggtggattgcttgggctcaggagttcaaggccagcctgaacaacatagcaaaacctcatctctacaaaaaatacaaaaat

SEQ ID NO: 94009 - DNA, 80 bp, synthetic construct; identical to SEQ ID NO: 17499
  source 1..80: mol_type = other DNA

SEQ ID NO: 94010 - DNA, 80 bp, synthetic construct
  source 1..80: mol_type = other DNA
agtcgcccaccaccatgcctggctaattttttgtatttttagtagagatggggtttcactacattggccaggctggtctc

SEQ ID NO: 94011 - DNA, 80 bp, synthetic construct
  source 1..80: mol_type = other DNA
ataaaataaagataaaaacgtgaacttttcatgattagtcagagcaccaaacagacactcctagcacctctgtaaagact

SEQ ID NO: 94012 - DNA, 80 bp, synthetic construct
  source 1..80: mol_type = other DNA
ccccttcctggagatgtgtttgtagcagcactgcctctgcagagaaacagctgggaattacttcttggctccaccctatc

SEQ ID NO: 94013 - DNA, 80 bp, synthetic construct; identical to SEQ ID NO: 17500
  source 1..80: mol_type = other DNA

SEQ ID NO: 94014 - DNA, 80 bp, synthetic construct
  source 1..80: mol_type = other DNA
gggggagagacccagagagctagcaggtcccttccaccatgtgagacacagcgagaaggcagcactaggccctcaccaga

SEQ ID NO: 94015 - DNA, 80 bp, synthetic construct
  source 1..80: mol_type = other DNA
tatgctagtcccttagccttctgggggcctcagtttcctcttccgttatatggggacaagaatactacactatctatacc

SEQ ID NO: 94016 - DNA, 80 bp, synthetic construct
  source 1..80: mol_type = other DNA
tgtgggattgatggagcagtgaacccaggtcctgacctattgcaggggccctgaggacatcagtgcccttcctctctctg

SEQ ID NO: 94017 - DNA, 80 bp, synthetic construct; identical to SEQ ID NO: 17501
  source 1..80: mol_type = other DNA

SEQ ID NO: 94018 - DNA, 80 bp, synthetic construct
  source 1..80: mol_type = other DNA
ctcctattcatcacgttcatttattgaacttagctccagcctcctaagctttgagctgtcaacactctgagatgaagaca

SEQ ID NO: 94019 - DNA, 80 bp, synthetic construct
  source 1..80: mol_type = other DNA
ttcccagctgtaaaagggagctaataatagctcttgcggctagcgttggatcacccaataaaccttgtaagcatatgctg

SEQ ID NO: 94020 - DNA, 80 bp, synthetic construct
  source 1..80: mol_type = other DNA
tcacttgaggccaggaatgagagaccagcctgggcaacacagtaagatcttatctctaaaaaaaaaaaaaaaaaaaaaaa

SEQ ID NO: 94021 - DNA, 80 bp, synthetic construct; identical to SEQ ID NO: 17502
  source 1..80: mol_type = other DNA

SEQ ID NO: 94022 - DNA, 80 bp, synthetic construct
  source 1..80: mol_type = other DNA
tggtcaacacggtgaaacaccatctctactaaaagtacaaaaattagctgggcatggtggcatgtgcctgtaatcccagc

SEQ ID NO: 94023 - DNA, 80 bp, synthetic construct
  source 1..80: mol_type = other DNA
tggtggtacatctctgtagtctcagctacttgggaagctgaggcaggattgctgaacccaggagtttgaggctgcagtga

SEQ ID NO: 94024 - DNA, 80 bp, synthetic construct
  source 1..80: mol_type = other DNA
aaaattcctaatctggtcctgtccaccttgtaggtttgtggtaaagattaactgagaatatttctgtaaagccctgagct

SEQ ID NO: 94025 - DNA, 80 bp, synthetic construct; identical to SEQ ID NO: 17503
  source 1..80: mol_type = other DNA

SEQ ID NO: 94026 - DNA, 80 bp, synthetic construct
  source 1..80: mol_type = other DNA
acctgaggtcaggagctcgagacgagcctggccaacccgtctctactaaaaatacagaaattagctgggcatggtggcat

SEQ ID NO: 94027 - DNA, 80 bp, synthetic construct
  source 1..80: mol_type = other DNA
acatgaggcagtttaaaaagaactagagaggggagaacagcaaagccatcttggaagacagaaaatgggataagcgttga

SEQ ID NO: 94028 - DNA, 80 bp, synthetic construct
  source 1..80: mol_type = other DNA
aggcaggagaatcacttgaacccgggaggtggaggttgcagtgagccaagatcatgccattgcactccagcctggacaac

SEQ ID NO: 94029 - DNA, 80 bp, synthetic construct; identical to SEQ ID NO: 17504
  source 1..80: mol_type = other DNA

SEQ ID NO: 94030 - DNA, 80 bp, synthetic construct
  source 1..80: mol_type = other DNA
acattttgaaaccctcagcttcttttcaactagaccctcaaaatgatgctagacaaatctttaacctccaggcagaagat

SEQ ID NO: 94031 - DNA, 80 bp, synthetic construct
  source 1..80: mol_type = other DNA
tatcctgtgtactaaagcatccaagatgaatggatagccaagaatcccaagacatctgaagaaatccactaatatgacag

SEQ ID NO: 94032 - DNA, 80 bp, synthetic construct
  source 1..80: mol_type = other DNA
accagaaatttaaaacgcaatggaagggttagggaaaaaagttgaggtaagtgcccagaaaataccattaaaaacattaa

SEQ ID NO: 94033 - DNA, 80 bp, synthetic construct; identical to SEQ ID NO: 17505
  source 1..80: mol_type = other DNA

SEQ ID NO: 94034 - DNA, 80 bp, synthetic construct
  source 1..80: mol_type = other DNA
tcacaaacatacacacatacgaatcagattgggtttcatcttctcaaaactgaaactagaaggcaacaacacaaatgcct

SEQ ID NO: 94035 - DNA, 80 bp, synthetic construct
  source 1..80: mol_type = other DNA
gggaagctactggacaaagtgcttgatttaagcaggagagtaaagcaagaaagaggaagacatgaaaactgggaaacaag

SEQ ID NO: 94036 - DNA, 80 bp, synthetic construct
  source 1..80: mol_type = other DNA
atattaaaaggagattaacacatttagaaagagattttggggcagaattggtggttaaatacatggaaaacaagattggg

SEQ ID NO: 94037 - DNA, 80 bp, synthetic construct; identical to SEQ ID NO: 17506
  source 1..80: mol_type = other DNA

SEQ ID NO: 94038 - DNA, 80 bp, synthetic construct
  source 1..80: mol_type = other DNA
aaggagttgagaagtagcagaggatggctatttttcttaataagccttcaaaaattacttgactctaagccgtctgcatg

SEQ ID NO: 94039 - DNA, 80 bp, synthetic construct
  source 1..80: mol_type = other DNA
gcttatacttgcaaaaatatctctaggagaaaacctcatacactagaaaccataattgtctcttgggagggaagctaagg

SEQ ID NO: 94040 - DNA, 80 bp, synthetic construct
  source 1..80: mol_type = other DNA
cagcctggccaacatggcaaaaccccatctctactaaaaatacaaaaattagccaggcatggtggtgtgtgcctgtagtc

SEQ ID NO: 94041 - DNA, 80 bp, synthetic construct; identical to SEQ ID NO: 17507
  source 1..80: mol_type = other DNA

SEQ ID NO: 94042 - DNA, 80 bp, synthetic construct
  source 1..80: mol_type = other DNA
tattattcttggctagaaagccatccctgcccccttctctcaccttagcaaaccattcttcgaggcttataaagccccac

SEQ ID NO: 94043 - DNA, 80 bp, synthetic construct
  source 1..80: mol_type = other DNA
gtttataggtcctcaggaacttactgtctatgtgacacaactgcaatgcttcatcttatattcagtgcatgtgtgttacc

SEQ ID NO: 94044 - DNA, 80 bp, synthetic construct; identical to SEQ ID NO: 17508
  source 1..80: mol_type = other DNA

SEQ ID NO: 94045 - DNA, 80 bp, synthetic construct
  source 1..80: mol_type = other DNA
ccattctcctgcctcagcaccccctgagtagctgggactacaggcgcctgccactgtgcctggctagttttttttgtatt

SEQ ID NO: 94046 - DNA, 80 bp, synthetic construct
  source 1..80: mol_type = other DNA
aagcaccaggtcatgccaaaatagacgagggcatagcaggtgttggttaacatttaaattaagtaaagagtttatctttt

SEQ ID NO: 94047 - DNA, 80 bp, synthetic construct
  source 1..80: mol_type = other DNA
gactacagactcacgcactgtggccagctaattatttttttgtagagacaagagctcactatgttggccaggctggtctc

SEQ ID NO: 94048 - DNA, 80 bp, synthetic construct; identical to SEQ ID NO: 17509
  source 1..80: mol_type = other DNA

SEQ ID NO: 94049 - DNA, 80 bp, synthetic construct
  source 1..80: mol_type = other DNA
gaaccaccaaccctactgtgaactgcacataagagggatccaggctgtgtgctccttatgagaatctaatgcctgatgat

SEQ ID NO: 94050 - DNA, 80 bp, synthetic construct
  source 1..80: mol_type = other DNA
gaatcatcccgaaccatctctcccctgcggtccatggaaaaactgacttctatgaaactggtccctggtgtcaaaaaggt

SEQ ID NO: 94051 - DNA, 80 bp, synthetic construct
  source 1..80: mol_type = other DNA
cacaaaacaaagtggcagttctggaaaacaaggtgcagtgactggcaaagtcagtggccttggaaaggccaaaaaaaaga

SEQ ID NO: 94052 - DNA, 80 bp, synthetic construct
  source 1..80: mol_type = other DNA
gcctgtaatcccagcactatgggaggctgaggcgggcagatcacaatgtcaggagatcgagaccatcctgggtaacatgg

SEQ ID NO: 94053 - DNA, 80 bp, synthetic construct; identical to SEQ ID NO: 17510
  source 1..80: mol_type = other DNA

SEQ ID NO: 94054 - DNA, 80 bp, synthetic construct
  source 1..80: mol_type = other DNA
gttttatgctcacatgatttcatccctcagcccagaaaaagttacagaaaaaaaccccacacccactcttaattcatttt

SEQ ID NO: 94055 - DNA, 80 bp, synthetic construct
  source 1..80: mol_type = other DNA
tgatctcggctcactgcaacctccacttcctggtctcaagcgatcctcccacctcagcctcccaagaagtgggactacag

SEQ ID NO: 94056 - DNA, 80 bp, synthetic construct; identical to SEQ ID NO: 17511
  source 1..80: mol_type = other DNA

SEQ ID NO: 94057 - DNA, 80 bp, synthetic construct
  source 1..80: mol_type = other DNA
gttcagttagtgtaatgaaaggtcacgtaacaaaatgttaatggtgatgagttttggatgatagaatcataggtgccagc

SEQ ID NO: 94058 - DNA, 80 bp, synthetic construct
  source 1..80: mol_type = other DNA
tttttggtatttagattaaaatgtgcttagtgggacctcagctccagaaaagaaccaggaattgctgggtatggtggctt

SEQ ID NO: 94059 - DNA, 80 bp, synthetic construct
  source 1..80: mol_type = other DNA
ggctgaggcaggagaatggcgtgaacccgggaagcggagcttgcagtgagccgagattgcgccactgcagtccgcagtcc

SEQ ID NO: 94060 - DNA, 80 bp, synthetic construct
  source 1..80: mol_type = other DNA
gggccaagattctggtcctacctgtggagtctggctcactgtcagaaagttggggcacttatacctgagtccctctatct

SEQ ID NO: 94061 - DNA, 80 bp, synthetic construct; identical to SEQ ID NO: 17512
  source 1..80: mol_type = other DNA

SEQ ID NO: 94062 - DNA, 80 bp, synthetic construct
  source 1..80: mol_type = other DNA
aaacaaaacaaaaaaacccacctttttaaaattagcttgacatgacagtccacacctatagtcccagctacttgggaggc

SEQ ID NO: 94063 - DNA, 80 bp, synthetic construct
  source 1..80: mol_type = other DNA
tcttaagtttggaaaaaccagcattaacaatcttcacaagaagctacaagatagagactatcaccccttttgacaaatga

SEQ ID NO: 94064 - DNA, 80 bp, synthetic construct; identical to SEQ ID NO: 17513
  source 1..80: mol_type = other DNA

SEQ ID NO: 94065 - DNA, 80 bp, synthetic construct
  source 1..80: mol_type = other DNA
cttgaagcatgctccggtaggccgtgtctgcgatggcgtagatgtgaggcggcatctcgtgcctcttcttgcccttgtac

SEQ ID NO: 94066 - DNA, 80 bp, synthetic construct
  source 1..80: mol_type = other DNA
agatggggaaactggagcttggagtcttagtggaaaccctgggcctcactgatattccaggtacgtgggaagaggagaaa

SEQ ID NO: 94067 - DNA, 80 bp, synthetic construct
  source 1..80: mol_type = other DNA
cctacctcagcctcctgagtagccaggactacaggcgggcgccaccaggcctggctgatgtttatattttctgtagagac

SEQ ID NO: 94068 - DNA, 80 bp, synthetic construct
  source 1..80: mol_type = other DNA
ctccgacctgccactttacctccccggacctcactggcttaaataacagccaccgttcattgagcacttactatgtgttg

SEQ ID NO: 94069 - DNA, 80 bp, synthetic construct; identical to SEQ ID NO: 17514
  source 1..80: mol_type = other DNA

SEQ ID NO: 94070 - DNA, 80 bp, synthetic construct
  source 1..80: mol_type = other DNA
gttttttgtagagacagggtttcaccatattgcccaggctggtctcgaactcctgagctgaggtgatgcgccagtctcag

SEQ ID NO: 94071 - DNA, 80 bp, synthetic construct
  source 1..80: mol_type = other DNA
tccaggagggagggaggaaaaggtaataatcctccaagctctctctcctcccaccaccctctgatctctttctgggacct

SEQ ID NO: 94072 - DNA, 80 bp, synthetic construct
  source 1..80: mol_type = other DNA
tacacagctggagggaagttgggaactagaactcctgtttaccccacagcgcctgctcctgatcattaataccttcccca

SEQ ID NO: 94073 - DNA, 80 bp, synthetic construct; identical to SEQ ID NO: 17515
  source 1..80: mol_type = other DNA

SEQ ID NO: 94074 - DNA, 80 bp, synthetic construct
  source 1..80: mol_type = other DNA
gccatggtggtgatcacctgtagtcccagctacttgggaggctgagtcaggaggattgcttgatcccaggagctcaaggt

SEQ ID NO: 94075 - DNA, 80 bp, synthetic construct
  source 1..80: mol_type = other DNA
atttaaaaaatagcagtcctctcctactgggtgaataggagcatctgaaaataatcagatcagggacggaggagtcaagg

SEQ ID NO: 94076 - DNA, 80 bp, synthetic construct
  source 1..80: mol_type = other DNA
gcaagtgacttagggagaaccacagatccatctctcagttacagctagggtgaaccaagcaacagagggttaagtgactt

SEQ ID NO: 94077 - DNA, 80 bp, synthetic construct; identical to SEQ ID NO: 17516
  source 1..80: mol_type = other DNA

SEQ ID NO: 94078 - DNA, 80 bp, synthetic construct
  source 1..80: mol_type = other DNA
cccatctctataagaaatttaaaaattagctgggcatggtggcattcacctgtagtcccagccacttgggaggctgaggt

SEQ ID NO: 94079 - DNA, 80 bp, synthetic construct
  source 1..80: mol_type = other DNA
atggtatgtaatgtctgggggtgctgcagaggaatattctttgaaggtacaggattgttgggcgcagtggttcacaccta

SEQ ID NO: 94080 - DNA, 80 bp, synthetic construct
  source 1..80: mol_type = other DNA
tgtagtgagccaaggtggtgccattgcactccagcctgggtgacagagggagaacccatctcaaaaaaaaaaaaaaaaaa

SEQ ID NO: 94081 - DNA, 80 bp, synthetic construct; identical to SEQ ID NO: 17517
  source 1..80: mol_type = other DNA

SEQ ID NO: 94082 - DNA, 80 bp, synthetic construct
  source 1..80: mol_type = other DNA
gggtgaactataagcagcttggtataagcggctccatcggaccgaaatggagaagcaaagcaagggttagaggtaagcgg

SEQ ID NO: 94083 - DNA, 80 bp, synthetic construct
  source 1..80: mol_type = other DNA
ccagcacaggccttggtatagaataggtgctaactaaatgcttgctaaatgcatgccaggggaataaattaatgatacag

SEQ ID NO: 94084 - DNA, 80 bp, synthetic construct
  source 1..80: mol_type = other DNA
gtcccctgtccccaggacaagcctcccaaagagaagagcccagtctgtggtcacctgaacaaaggtcaatcaagccccac

SEQ ID NO: 94085 - DNA, 80 bp, synthetic construct; identical to SEQ ID NO: 17518
  source 1..80: mol_type = other DNA

SEQ ID NO: 94086 - DNA, 80 bp, synthetic construct
  source 1..80: mol_type = other DNA
gttatttagtgactcttactatgctcccttcatttcacgagagggaagtcttgccaccttagagccttcaatatgctgtt

SEQ ID NO: 94087 - DNA, 80 bp, synthetic construct
  source 1..80: mol_type = other DNA
gtaatcccagcacttcgggtggccaaggaggtcagatcacttgaggtcaggagttcgagaccagcctggccaacatggca

SEQ ID NO: 94088 - DNA, 80 bp, synthetic construct; identical to SEQ ID NO: 17519
  source 1..80: mol_type = other DNA

SEQ ID NO: 94089 - DNA, 80 bp, synthetic construct
  source 1..80: mol_type = other DNA
ggagtttgagaacagcctggctaacatggcaaaaccccgtctttactaaaaatacaaaaattagctgggtgtggtggcgc

SEQ ID NO: 94090 - DNA, 80 bp, synthetic construct
  source 1..80: mol_type = other DNA
aaaaagaaggaaggaccacactgccttttcaactccatcactagcttctgaaagaggaatatgacttccatcctctttgt

SEQ ID NO: 94091 - DNA, 80 bp, synthetic construct
  source 1..80: mol_type = other DNA
cagggtcgtggggcttcagcatcgggctcttcctcccacattattcagccacttctccttcacctcgacccagcccaacc

SEQ ID NO: 94092 - DNA, 80 bp, synthetic construct; identical to SEQ ID NO: 17520
  source 1..80: mol_type = other DNA

SEQ ID NO: 94093 - DNA, 80 bp, synthetic construct
  source 1..80: mol_type = other DNA
gaggccaaggtgggtggatcacctgaggtcaagagttcgagaccagcccggccaacacagtgaaacctcatctctactaa

SEQ ID NO: 94094 - DNA, 80 bp, synthetic construct
  source 1..80: mol_type = other DNA
aaaaaaaaaaagacacacaggcctgggcagagtgttggctttgccttatcacctgcctgacttgtgcatacagacctacc

SEQ ID NO: 94095 - DNA, 80 bp, synthetic construct
  source 1..80: mol_type = other DNA
tgctgcagccttgcttttaagagcaaaaagactagaaacaacctaaatacctgtcaatagcagacaggcttaatcattat

SEQ ID NO: 94096 - DNA, 80 bp, synthetic construct; identical to SEQ ID NO: 17521
  source 1..80: mol_type = other DNA

SEQ ID NO: 94097 - DNA, 80 bp, synthetic construct
  source 1..80: mol_type = other DNA
ggctggggcgggatgatcgcttgaatccagaaggcataggttgcaggagccgagatcgcaccattgcactccagcctggg

SEQ ID NO: 94098 - DNA, 80 bp, synthetic construct
  source 1..80: mol_type = other DNA
tacaaaaatcagctgggtgtggtagtacacgcctgtagtctcagctacttgggaggctgagggaggagaattgcttgaac

SEQ ID NO: 94099 - DNA, 80 bp, synthetic construct
  source 1..80: mol_type = other DNA
tggaagggcgagaaataggaacgaagggggaagttctatattcccttatacactattttatttcatatttgcatgtctta

SEQ ID NO: 94100 - DNA, 80 bp, synthetic construct; identical to SEQ ID NO: 17522
  source 1..80: mol_type = other DNA

SEQ ID NO: 94101 - DNA, 80 bp, synthetic construct
  source 1..80: mol_type = other DNA
tcaagaccaacctggccaacatggtgaaaccacttctctactaaaaatacaaaaattagctgggcgtggtggcatgtgcc

SEQ ID NO: 94102 - DNA, 80 bp, synthetic construct
  source 1..80: mol_type = other DNA
gttaaaaaaaaaaaaagatcagaagggctaatgcttggggcttgacaaagggcagcttccagttacagtgtctttctacc

SEQ ID NO: 94103 - DNA, 80 bp, synthetic construct
  source 1..80: mol_type = other DNA
gcttctcctgaccccctgggcattccagaagcagaaccagaactggaaaaatgtcctttggggttcatggttcagggact

SEQ ID NO: 94104 - DNA, 80 bp, synthetic construct
  source 1..80: mol_type = other DNA
gaggtgccacggtcaatggttaccatggcctgggagacgacagggagtggtgaggtctgcggaaaagcagagcaaaaagc

SEQ ID NO: 94105 - DNA, 80 bp, synthetic construct; identical to SEQ ID NO: 17523
  source 1..80: mol_type = other DNA

SEQ ID NO: 94106 - DNA, 80 bp, synthetic construct
  source 1..80: mol_type = other DNA
caccttccagtggtgggactaagcacatctgagcttcagcaacctcatcttttttttttttttttttttttttttttttt

SEQ ID NO: 94107 - DNA, 80 bp, synthetic construct
  source 1..80: mol_type = other DNA
aaaaacacaaaaaaattagctgggcatcgtgctacatgcctgtagtcccagctactaaggagactgagataggatccctt

SEQ ID NO: 94108 - DNA, 80 bp, synthetic construct
  source 1..80: mol_type = other DNA
gggagggagggaggaaggaaggaaggaaggaaggaagggaggaacgaactaactaactcgaggcagacgaactcagccaa

SEQ ID NO: 94109 - DNA, 80 bp, synthetic construct; identical to SEQ ID NO: 17524
  source 1..80: mol_type = other DNA

SEQ ID NO: 94110 - DNA, 80 bp, synthetic construct
  source 1..80: mol_type = other DNA
cctttccttctttatcttctccgtcatggacgacggtttctattaagcaattaaactgaccagaaaggaacaagagaaga

SEQ ID NO: 94111 - DNA, 80 bp, synthetic construct
  source 1..80: mol_type = other DNA
gaggacagcaggtgagatgaatacacaggcctgtcctgaaactccctagatggtgatgatacgtcttagatgaaagacct

SEQ ID NO: 94112 - DNA, 80 bp, synthetic construct
  source 1..80: mol_type = other DNA
tagccaacatggtgaaacccgtctctactaaaaatacaaaaatcagccaggcatggtggcacatccctgcaatcccagct

SEQ ID NO: 94113 - DNA, 80 bp, synthetic construct; identical to SEQ ID NO: 17525
  source 1..80: mol_type = other DNA

SEQ ID NO: 94114 - DNA, 80 bp, synthetic construct
  source 1..80: mol_type = other DNA
cattttgcaacactgcacctcagcttccttccctaaaaggggcaaacatttttaactcaggggatgctgtgttaaataaa

SEQ ID NO: 94115 - DNA, 80 bp, synthetic construct
  source 1..80: mol_type = other DNA
cccagtctctacagaagtttttttttttttttttaattagccaggtgtggtggtgcacacctgtggtccacagctactca

SEQ ID NO: 94116 - DNA, 80 bp, synthetic construct
  source 1..80: mol_type = other DNA
tctttaaaaagccactctaactccttctgaaatatctataagaacagtggaaaaatggcctatccccatgacagattcta

SEQ ID NO: 94117 - DNA, 80 bp, synthetic construct; identical to SEQ ID NO: 17526
  source 1..80: mol_type = other DNA

SEQ ID NO: 94118 - DNA, 80 bp, synthetic construct
  source 1..80: mol_type = other DNA
aaaagtgatcatgaccacagcaaaaaccaatctagtaacacttaacattttcagtgcctgcacttaacatgtagcaggaa

SEQ ID NO: 94119 - DNA, 80 bp, synthetic construct
  source 1..80: mol_type = other DNA
gtgatcctcctgcctcagcctccctgagtagctgggattatgagtacgcaccactgcacctggctaatttatttttgcag

SEQ ID NO: 94120 - DNA, 80 bp, synthetic construct; identical to SEQ ID NO: 17527
  source 1..80: mol_type = other DNA

SEQ ID NO: 94121 - DNA, 80 bp, synthetic construct
  source 1..80: mol_type = other DNA
attgactacttgacctagggccaacacaacaaaagaaataaatttgttattttttattgtcttttacttatgtatttatt

SEQ ID NO: 94122 - DNA, 80 bp, synthetic construct
  source 1..80: mol_type = other DNA
tttttagtagagacggggttttaccatgttggccaggcttgtctagaactcctgacctcaggtgatccacccaccttggc

SEQ ID NO: 94123 - DNA, 80 bp, synthetic construct
  source 1..80: mol_type = other DNA
cccgggttcaagcaattctcctgcctcagcctctcaagtagctgggattacagatgtgcactaccatgcctggctaattt

SEQ ID NO: 94124 - DNA, 80 bp, synthetic construct
  source 1..80: mol_type = other DNA
atttagttagccacgagtggccagtggctaccatattgtgccatctctagtccactctgttctgcaagtctacctaaaat

SEQ ID NO: 94125 - DNA, 80 bp, synthetic construct; identical to SEQ ID NO: 17528
  source 1..80: mol_type = other DNA

SEQ ID NO: 94126 - DNA, 80 bp, synthetic construct
  source 1..80: mol_type = other DNA
ttcctttttttttttttttgagacagagtcttattctgtcacccaggctggagtgcagtggtacagtcttggctcactgc

SEQ ID NO: 94127 - DNA, 80 bp, synthetic construct
  source 1..80: mol_type = other DNA
tctgcccacctcggcctcccaaagtgctgggagtacaggcatgagccactgtgcccagccctcccaacacatttctaatg

SEQ ID NO: 94128 - DNA, 80 bp, synthetic construct
  source 1..80: mol_type = other DNA
tcatcttctggatgtcatctttcccaaccgtgaccttcttgccattctccaccagctccacaaccacctcatcccccttc

SEQ ID NO: 94129 - DNA, 80 bp, synthetic construct; identical to SEQ ID NO: 17529
  source 1..80: mol_type = other DNA

SEQ ID NO: 94130 - DNA, 80 bp, synthetic construct
  source 1..80: mol_type = other DNA
tgtcatcgcctaaaataccaaaagtcagacaacccaaatgtccaccaacatacagctggatacataagccatgctatttc

SEQ ID NO: 94131 - DNA, 80 bp, synthetic construct
  source 1..80: mol_type = other DNA
ttcaagaccagcctggccaacatggtgaaaccccgtctctactgaaaatacaaaaattagccaggtgtgatggtgtgcac

SEQ ID NO: 94132 - DNA, 80 bp, synthetic construct; identical to SEQ ID NO: 17530
  source 1..80: mol_type = other DNA

SEQ ID NO: 94133 - DNA, 80 bp, synthetic construct
  source 1..80: mol_type = other DNA
agctacttgggaggctgaggtgggagaatcacctgagcctgggaggtcaagattgcagtgagccaagatcaagccactgc

SEQ ID NO: 94134 - DNA, 80 bp, synthetic construct
  source 1..80: mol_type = other DNA
gcatcatgctcagtgaaacaaatcagaaaggccacacgctctattactccttcaatacgaaaaactattaggctggtgca

SEQ ID NO: 94135 - DNA, 80 bp, synthetic construct
  source 1..80: mol_type = other DNA
aatacaaatattaatggagtgtggtggcacacacctgtagtcccagctactcaggaggctgaggcaagaggattgcttga

SEQ ID NO: 94136 - DNA, 80 bp, synthetic construct
  source 1..80: mol_type = other DNA
caaggcaggggggatcacttgaggtcaggagtttgaaaccagcctgcccaatgtggtaaaaccccatctctactaaaaat

SEQ ID NO: 94137 - DNA, 80 bp, synthetic construct; identical to SEQ ID NO: 17531
  source 1..80: mol_type = other DNA

SEQ ID NO: 94138 - DNA, 80 bp, synthetic construct
  source 1..80: mol_type = other DNA
cattgaatgttcccaacacaaagagatgataaatgtcattatataggaagtagcaaaataaaagtaatggcaaatgcttg

SEQ ID NO: 94139 - DNA, 80 bp, synthetic construct
  source 1..80: mol_type = other DNA
caacctgggcaacataagaagcccctgtctctgtaaaaaaattaaaaattagcctggcacggtggtgcatgcctacggtt

SEQ ID NO: 94140 - DNA, 80 bp, synthetic construct
  source 1..80: mol_type = other DNA
atgaacatgtatgattatttgtcaattaagaaataaattttttaagttgaaaaaactcactcaagctgtacacttaaaaa

SEQ ID NO: 94141 - DNA, 80 bp, synthetic construct; identical to SEQ ID NO: 17532
  source 1..80: mol_type = other DNA

SEQ ID NO: 94142 - DNA, 80 bp, synthetic construct
  source 1..80: mol_type = other DNA
agcttcccgagtaactaggattacaggcgtgcaccatcacacccagctaatttttgtatttttagtagagacggggcttc

SEQ ID NO: 94143 - DNA, 80 bp, synthetic construct
  source 1..80: mol_type = other DNA
gattctgcgttttctatacaaattgttccttagggtaactaaattaagaaggggaagtctctcttgatggaagattaggt

SEQ ID NO: 94144 - DNA, 80 bp, synthetic construct
  source 1..80: mol_type = other DNA
ctggaaacactggcttacagccccttctacctcttgctgctgggctccaaagaactgagttgctggctaagtgaggacat

SEQ ID NO: 94145 - DNA, 80 bp, synthetic construct; identical to SEQ ID NO: 17533
  source 1..80: mol_type = other DNA

SEQ ID NO: 94146 - DNA, 80 bp, synthetic construct
  source 1..80: mol_type = other DNA
tcaggagttcgagaccagcctggccaacatgtgaaaccccatctctactaaaaatacgaaaagttgctgggcgtggtagc

SEQ ID NO: 94147 - DNA, 80 bp, synthetic construct
  source 1..80: mol_type = other DNA
agttgatttgctcagagattttctgctgggagacctgatatcgtagctgatgaaaaaaaagtggcggctaggtgcggtgg

SEQ ID NO: 94148 - DNA, 80 bp, synthetic construct
  source 1..80: mol_type = other DNA
tcgggaggctgaggcacgagaattgcttgaacccaggaagcagaggttgcagtgagctgagatggtgccactgcactctg

SEQ ID NO: 94149 - DNA, 80 bp, synthetic construct; identical to SEQ ID NO: 17534
  source 1..80: mol_type = other DNA

SEQ ID NO: 94150 - DNA, 80 bp, synthetic construct
  source 1..80: mol_type = other DNA
aagaattccagcgaatacatgcagaacaataaaactaggatgtaactgtttataaagctaatagtgggtctcaagctggg

SEQ ID NO: 94151 - DNA, 80 bp, synthetic construct
  source 1..80: mol_type = other DNA
cagctactcaggaggctgaggcaggagaattacttgaactccaaaggtggaggttgcaatgagccgagatcatgccactg

SEQ ID NO: 94152 - DNA, 80 bp, synthetic construct
  source 1..80: mol_type = other DNA
cctggctaacacggcaaaaccctgtctctactaaaaaaaaaaaaaaaaattagccgggcgtggtggcggccgcgtgtagt

SEQ ID NO: 94153 - DNA, 80 bp, synthetic construct
  source 1..80: mol_type = other DNA
gtcttggcaagttggcaagttctaccagtaattgctaaaaccattaggccaatggggctcacatttcctggtgcattagc

SEQ ID NO: 94154 - DNA, 80 bp, synthetic construct; identical to SEQ ID NO: 17535
  source 1..80: mol_type = other DNA

SEQ ID NO: 94155 - DNA, 80 bp, synthetic construct
  source 1..80: mol_type = other DNA
atgaagcctccagatctgacgcctgtctatggaaaatgcaaggcacaggagagcatgctaaacaatgcagtaaactccca

SEQ ID NO: 94156 - DNA, 80 bp, synthetic construct
  source 1..80: mol_type = other DNA
ttacaggtgcatgccaccacgcctggctgatttttgtatttttagtagagacggggtttcaccatattgtccaggctggt

SEQ ID NO: 94157 - DNA, 80 bp, synthetic construct; identical to SEQ ID NO: 17536
  source 1..80: mol_type = other DNA

SEQ ID NO: 94158 - DNA, 80 bp, synthetic construct
  source 1..80: mol_type = other DNA
aggagtttgaggctgcagtgagctatgattacatcactgcactccagcctgggtgtcagggtgagaccctgtctcaaaaa

SEQ ID NO: 94159 - DNA, 80 bp, synthetic construct
  source 1..80: mol_type = other DNA
gcctcctcttgagaggtaagataacctgtagtcatgtaaagacacccagactttgcaatcagatgctaattcaaacgtga

SEQ ID NO: 94160 - DNA, 80 bp, synthetic construct
  source 1..80: mol_type = other DNA
gctgcatggggcccaggacggctttgaatgtggcccgatacaaattcataaactttcttaaaacagtatgatattttttc

SEQ ID NO: 94161 - DNA, 80 bp, synthetic construct
  source 1..80: mol_type = other DNA
tcacttccggtgactctaagccacttcgctcattcctaaccaatagcatttactactgttggatgttttaattatgttta

SEQ ID NO: 94162 - DNA, 80 bp, synthetic construct; identical to SEQ ID NO: 17537
  source 1..80: mol_type = other DNA

SEQ ID NO: 94163 - DNA, 80 bp, synthetic construct
  source 1..80: mol_type = other DNA
gctgaggtgggaggataacttgaggtcaggagtttgagaccagcttggccaacattgtgaaaccctgtctctactaaaaa

SEQ ID NO: 94164 - DNA, 80 bp, synthetic construct
  source 1..80: mol_type = other DNA
tctcaaaaaaaaagaagtgtcagagctgggacccaaacctgggtctcattctggagtctatttggttctgcctttcacat

SEQ ID NO: 94165 - DNA, 80 bp, synthetic construct
  source 1..80: mol_type = other DNA
tccacaccacaaaaaaggacatctcacaacacatccttgagcaaaagaaggtggtcacaaaaagcacaggttctgtgact

SEQ ID NO: 94166 - DNA, 80 bp, synthetic construct; identical to SEQ ID NO: 17538
  source 1..80: mol_type = other DNA

SEQ ID NO: 94167 - DNA, 80 bp, synthetic construct
  source 1..80: mol_type = other DNA
cctgagcccaggaggctgagaccggcctggtcaacatggtgaaaccttgtctctagcaaacatacaaaaattaaccggtt

SEQ ID NO: 94168 - DNA, 80 bp, synthetic construct
  source 1..80: mol_type = other DNA
aaattcatcaagctgcacacttttttgcacatcaagcgtacttttttggttgtaaagtacacttcattttccttccctct

SEQ ID NO: 94169 - DNA, 80 bp, synthetic construct; identical to SEQ ID NO: 17539
  source 1..80: mol_type = other DNA

SEQ ID NO: 94170 - DNA, 80 bp, synthetic construct
  source 1..80: mol_type = other DNA
caaatagttgggaccacaggcacctgccaccatgcccagctattttcctgtattctttgtagagacggggtttcaccatg

SEQ ID NO: 94171 - DNA, 80 bp, synthetic construct
  source 1..80: mol_type = other DNA
gccatgtggatgagttgccttaaaagtcagaaaaaatagcaaaagctacaacagaaaaataaaaggacacgcacgcctcc

SEQ ID NO: 94172 - DNA, 80 bp, synthetic construct
  source 1..80: mol_type = other DNA
agacagcaagatgggggatgagaagcttcgactcatgctagaatggtgttttccatagcatgccccttggaaccctaatt

SEQ ID NO: 94173 - DNA, 80 bp, synthetic construct; identical to SEQ ID NO: 17540
  source 1..80: mol_type = other DNA

SEQ ID NO: 94174 - DNA, 80 bp, synthetic construct
  source 1..80: mol_type = other DNA
caatctcagctcactgcaacctccacgtttctgggttcaagtgattctcgtgcctcagcctcccaagtagctgggactac

SEQ ID NO: 94175 - DNA, 80 bp, synthetic construct
  source 1..80: mol_type = other DNA
caaactctgcactgtgactcttgggctgcgtcattctgtgtcgtgaggggagctcttccgtgcattgtgggatgttccgc

SEQ ID NO: 94176 - DNA, 80 bp, synthetic construct
  source 1..80: mol_type = other DNA
gaaccacagctttagaataaaaacaagggctgtcttgggaaaggcagttaaagctgagagcagctctcacttagtcaaac

SEQ ID NO: 94177 - DNA, 80 bp, synthetic construct; identical to SEQ ID NO: 17541
  source 1..80: mol_type = other DNA

SEQ ID NO: 94178 - DNA, 80 bp, synthetic construct
  source 1..80: mol_type = other DNA
acctcaggtgtgggccactatgcccggcttattttttgtagagatgggggtcttgctattttgcctaggctggtctcaaa

SEQ ID NO: 94179 - DNA, 80 bp, synthetic construct
  source 1..80: mol_type = other DNA
gcattagcgatgtttgacacatctgagtgtgtcagccttgtttacagtcctgtcctgaccaacaactgcttcattctttt

SEQ ID NO: 94180 - DNA, 80 bp, synthetic construct
  source 1..80: mol_type = other DNA
gggatcacaggcacgcaccagaacacccagctaattttttaattcttgcatttttttgtagagacaggggtctcactttg

SEQ ID NO: 94181 - DNA, 80 bp, synthetic construct
  source 1..80: mol_type = other DNA
aagctaatcattagcctctggaagaccttaggatgtcaagtaacgagtctcagctttgccccaaacctgctgggtgactc

SEQ ID NO: 94182 - DNA, 80 bp, synthetic construct; identical to SEQ ID NO: 17542
  source 1..80: mol_type = other DNA

SEQ ID NO: 94183 - DNA, 80 bp, synthetic construct
  source 1..80: mol_type = other DNA
ggcgcctgtaataccagctactcaggaggctgaggaaggagaatcgcttgaacccaggaggtggagggtgcagtgagctg

SEQ ID NO: 94184 - DNA, 80 bp, synthetic construct
  source 1..80: mol_type = other DNA
cattggctaaagattttggaccagagacaaaaacccaaatgtttttggagatcaggtaagtaatacagagtgacccagac

SEQ ID NO: 94185 - DNA, 80 bp, synthetic construct
  source 1..80: mol_type = other DNA
aaatacaaaaattagccaggcatggcagcacatgccggtagtcccagctactcgggaggctgaggtgggaagatcgcttg

SEQ ID NO: 94186 - DNA, 80 bp, synthetic construct; identical to SEQ ID NO: 17543
  source 1..80: mol_type = other DNA

SEQ ID NO: 94187 - DNA, 80 bp, synthetic construct
  source 1..80: mol_type = other DNA
caggtccccagtagtaccaaaaaggcagtttagatctattattcataacagccactgtatttattgggccccttgtattc

SEQ ID NO: 94188 - DNA, 80 bp, synthetic construct
  source 1..80: mol_type = other DNA
taaatgcaagacccccacttgtaaaatttggagtcaggagtacaatccagaatctaatcctagttttctgctaagagtaa

SEQ ID NO: 94189 - DNA, 80 bp, synthetic construct; identical to SEQ ID NO: 17544
  source 1..80: mol_type = other DNA

SEQ ID NO: 94190 - DNA, 80 bp, synthetic construct
  source 1..80: mol_type = other DNA
ccacagcttaaaataaatgtatagtctcctatgtcaggggtccccaacccttgtgctgcagtatcagtcaatggcctgtt

SEQ ID NO: 94191 - DNA, 80 bp, synthetic construct
  source 1..80: mol_type = other DNA
tctaaccaatgcctgatgatgaggtgggacagtttcatcccaaaaccatcctccccactccaccctggaaaatattgtct

SEQ ID NO: 94192 - DNA, 80 bp, synthetic construct
  source 1..80: mol_type = other DNA
ctctgcctctgaggctcaagcgattctcgtgcctcagcctcccgagtagctgggattacaggtgcccacgaccatgccca

SEQ ID NO: 94193 - DNA, 80 bp, synthetic construct
  source 1..80: mol_type = other DNA
agtcatttgcaatatctattaattttagatacgcatgccctttaactcagcaagcgcatttctgggaatttatcctacag

SEQ ID NO: 94194 - DNA, 80 bp, synthetic construct; identical to SEQ ID NO: 17545
  source 1..80: mol_type = other DNA

SEQ ID NO: 94195 - DNA, 80 bp, synthetic construct
  source 1..80: mol_type = other DNA
cttgccctctctgggccttgtatttttcagcctggtacagtaaagttctatgcccctcaccttttttttgagacagagtc

SEQ ID NO: 94196 - DNA, 80 bp, synthetic construct
  source 1..80: mol_type = other DNA
agagatggtgcctcgctatgttgcccactctggtctcaaactcctgacttcaagccatccccccacctcagcctcccaaa

SEQ ID NO: 94197 - DNA, 80 bp, synthetic construct; identical to SEQ ID NO: 17546
  source 1..80: mol_type = other DNA

SEQ ID NO: 94198 - DNA, 80 bp, synthetic construct
  source 1..80: mol_type = other DNA
taaaagttgaaaggtcaggagtggaaggagaagacctagagagcaaaaaggccatcccttaaagtatgccatcaagaccc

SEQ ID NO: 94199 - DNA, 80 bp, synthetic construct
  source 1..80: mol_type = other DNA
gcgcctataaacccagctactctctactcaggaggctgaggctggagaagtgcctgaacctaggaggcggaggttgcagt

SEQ ID NO: 94200 - DNA, 80 bp, synthetic construct
  source 1..80: mol_type = other DNA
tttcagcccaaatagaaacgaggtttatgagatcaaagggaagaaaattaagagaagcttctcctttaacggccacatag

SEQ ID NO: 94201 - DNA, 80 bp, synthetic construct
  source 1..80: mol_type = other DNA
gagggtaatctgtgaaactctggagttagaaagacctagatttgtagaatcttcttttccttactggttagctgagctat

SEQ ID NO: 94202 - DNA, 80 bp, synthetic construct; identical to SEQ ID NO: 17547
  source 1..80: mol_type = other DNA

SEQ ID NO: 94203 - DNA, 80 bp, synthetic construct
  source 1..80: mol_type = other DNA
cctctgaataagagggggtaggaaaaaagaatcccactttcctcccaaatctcttctccttagggtttctccactagttc

SEQ ID NO: 94204 - DNA, 80 bp, synthetic construct
  source 1..80: mol_type = other DNA
acacatctatttcggacatgataataaaaaaacatggtgtttacaaggcaagcctggcggcttctcggaaaagacccagc

SEQ ID NO: 94205 - DNA, 80 bp, synthetic construct; identical to SEQ ID NO: 17548
  source 1..80: mol_type = other DNA

SEQ ID NO: 94206 - DNA, 80 bp, synthetic construct
  source 1..80: mol_type = other DNA
ttaaatgttgcaacagcatgtggcactgaagtgttccatcaacggtagctatctcaaagggaaaacatcaatttccttca

SEQ ID NO: 94207 - DNA, 80 bp, synthetic construct
  source 1..80: mol_type = other DNA
atgcaaagcagtttattaatagcctgcattctttttgccaaaccccggacggacagttcaccatttaatctctcagttct

SEQ ID NO: 94208 - DNA, 80 bp, synthetic construct
  source 1..80: mol_type = other DNA
gttttacccatttggttgggcacgagagtggcattgacacaggtggctctgcgggaaattctagtgtaatcttacctaac

SEQ ID NO: 94209 - DNA, 80 bp, synthetic construct
  source 1..80: mol_type = other DNA
aggggttctcaacatagaagaacctcccctaaactgattaaaaaaaaaaaacaacaacactcctttctgctaagcctatg

SEQ ID NO: 94210 - DNA, 80 bp, synthetic construct; identical to SEQ ID NO: 17549
  source 1..80: mol_type = other DNA

SEQ ID NO: 94211 - DNA, 80 bp, synthetic construct
  source 1..80: mol_type = other DNA
aataagcacccccaaaatggtacttctcactggcaatcttaagaaatgctgtttggggaaagtctaggataatctaagac

SEQ ID NO: 94212 - DNA, 80 bp, synthetic construct
  source 1..80: mol_type = other DNA
acttacagatctccaactggggggactagtggagaggaaactggatggcgagctcggatctgacgcacctcccaggccgg

SEQ ID NO: 94213 - DNA, 80 bp, synthetic construct; identical to SEQ ID NO: 17550
  source 1..80: mol_type = other DNA

SEQ ID NO: 94214 - DNA, 80 bp, synthetic construct
  source 1..80: mol_type = other DNA
ccgggttctctgggatgtccattttaggtttgagttacaagattgcaggacaaaattaggtggaagggaactggaaacta

SEQ ID NO: 94215 - DNA, 80 bp, synthetic construct
  source 1..80: mol_type = other DNA
aggctgaggcgagtggatcacaaggtcaggagttcaagaccagcctggccaacatggtgaaaccgcatctctactaaaat

SEQ ID NO: 94216 - DNA, 80 bp, synthetic construct
  source 1..80: mol_type = other DNA
aaaaaaaaaaaaaaaagttagagctggaagaatccttgaaatcacagagaactgcattaccttggcctctggggccatgt

SEQ ID NO: 94217 - DNA, 80 bp, synthetic construct
  source 1..80: mol_type = other DNA
ggcgatgtccgcccgctcctctgcctcatccagctcgtgctgcaccttgcggaacttggacaggttggtgttggcttgct

SEQ ID NO: 94218 - DNA, 80 bp, synthetic construct; identical to SEQ ID NO: 17551
  source 1..80: mol_type = other DNA

SEQ ID NO: 94219 - DNA, 80 bp, synthetic construct
  source 1..80: mol_type = other DNA
ttaaatgatctgtaccaggaaagagtccaaagaactagtgggactcctgaaattatgcacaaaattgtgtgtgtgcagtg

SEQ ID NO: 94220 - DNA, 80 bp, synthetic construct
  source 1..80: mol_type = other DNA
aggacaaagtgtgcttagagagatagtgacatcctggattggaaaagaaacaaattctaattcagagtctgattctagaa

SEQ ID NO: 94221 - DNA, 80 bp, synthetic construct; identical to SEQ ID NO: 17552
  source 1..80: mol_type = other DNA

SEQ ID NO: 94222 - DNA, 80 bp, synthetic construct
  source 1..80: mol_type = other DNA
cgcacctggtaggtgagctccttgatgcgccgctcgctcttcctcatgcccttcaccgactctgcgttgcgcttctgctc

SEQ ID NO: 94223 - DNA, 80 bp, synthetic construct
  source 1..80: mol_type = other DNA
gtgtcctgctccttcttcagctcctctgccatcatggcggcctgtgtgcaggagagaggtggcacatggtctggtcaagt

SEQ ID NO: 94224 - DNA, 80 bp, synthetic construct
  source 1..80: mol_type = other DNA
catccatcttcttcttctggttgatgaggctggtgttctgggttgggggagggttgggcagagcaggaaaagcattgagc

SEQ ID NO: 94225 - DNA, 80 bp, synthetic construct
  source 1..80: mol_type = other DNA
ctgtctgctccaccacggcacgcaactcctccagctcagcctgcagcaggttgttgcgccgctccacgatggcgatgttc

SEQ ID NO: 94226 - DNA, 80 bp, synthetic construct; identical to SEQ ID NO: 17553
  source 1..80: mol_type = other DNA

SEQ ID NO: 94227 - DNA, 80 bp, synthetic construct
  source 1..80: mol_type = other DNA
ggtctgcagcgagtccaccacccgcaggtggttgcgcttggcctgttccatctcctcgtccttctctgccagcttccgct

SEQ ID NO: 94228 - DNA, 80 bp, synthetic construct
  source 1..80: mol_type = other DNA
ggatacgaagtgacttcaagagtggtgtaagtggttcaaagaagcagaaggtggaggaaaagagaatctaagagaaaata

SEQ ID NO: 94229 - DNA, 80 bp, synthetic construct; identical to SEQ ID NO: 17554
  source 1..80: mol_type = other DNA

SEQ ID NO: 94230 - DNA, 80 bp, synthetic construct
  source 1..80: mol_type = other DNA
acacacacctcggcctcctccagggctgactgcagctccatcttctcggcctccagctgctttcggaccttctccagctc

SEQ ID NO: 94231 - DNA, 80 bp, synthetic construct
  source 1..80: mol_type = other DNA
gtggcaccatatgggaacactgccagtgcagcccctccccagcctcttgggcccccagcacaccctgcaggtttttgttc

SEQ ID NO: 94232 - DNA, 80 bp, synthetic construct
  source 1..80: mol_type = other DNA
ctgcgactcctcatacttctgcttccactcggccaggatctgcccggggacaaggctcactcttcagccccccagcctca

SEQ ID NO: 94233 - DNA, 80 bp, synthetic construct
  source 1..80: mol_type = other DNA
aagttcctctgcttcttgtccagggctgcagcagcagcattggagcgctctacgtccaccatcaagtcctcgatctcatt

SEQ ID NO: 94234 - DNA, 80 bp, synthetic construct; identical to SEQ ID NO: 17555
  source 1..80: mol_type = other DNA

SEQ ID NO: 94235 - DNA, 80 bp, synthetic construct
  source 1..80: mol_type = other DNA
aagcactctgccctcagacaaaccttttgttcgtcttatattcggatcagaaacataattcgagcaaaaagcttccctga

SEQ ID NO: 94236 - DNA, 80 bp, synthetic construct
  source 1..80: mol_type = other DNA
cgagctcctcagtccgctgaatggcgtccgtctcatacttggtcctccactgggccacctccgagttggccttggaaagg

SEQ ID NO: 94237 - DNA, 80 bp, synthetic construct; identical to SEQ ID NO: 17556
  source 1..80: mol_type = other DNA

SEQ ID NO: 94238 - DNA, 80 bp, synthetic construct
  source 1..80: mol_type = other DNA
atgaaccctggagttttttaaaaatcatgttctttctcctttttcatgagtccagcaaagtgctaggaataggctccagt

SEQ ID NO: 94239 - DNA, 80 bp, synthetic construct
  source 1..80: mol_type = other DNA
agaagcagagggcctcagcctggggagtagatggcatgtggcagggtttgggctgtgatttctttttagaattcttggag

SEQ ID NO: 94240 - DNA, 80 bp, synthetic construct
  source 1..80: mol_type = other DNA
tgggtgtaggtgagcttgcctcgggtcagctgggagatcagtgcctccttctcatccagctgccgggacagctcacctgg

SEQ ID NO: 94241 - DNA, 80 bp, synthetic construct
  source 1..80: mol_type = other DNA
gtgggaaccatggagcccctgctctaggctcaccattctcggtttgcaacttggcccgctggctggtgaggtcgttgaca

SEQ ID NO: 94242 - DNA, 80 bp, synthetic construct; identical to SEQ ID NO: 17557
  source 1..80: mol_type = other DNA

SEQ ID NO: 94243 - DNA, 80 bp, synthetic construct
  source 1..80: mol_type = other DNA
cagcttctgcttcacccgctgcaggttgtcgatctgctcgcccagctcggccacgctgtcggcgtgcttcttgcgcaggg

SEQ ID NO: 94244 - DNA, 80 bp, synthetic construct
  source 1..80: mol_type = other DNA
gagacaggtctgagcgcagcttctccaccttagccctggcggtgcgctcggcctccagctcctcctccagctcctcgatg

SEQ ID NO: 94245 - DNA, 80 bp, synthetic construct; identical to SEQ ID NO: 17558
  source 1..80: mol_type = other DNA

SEQ ID NO: 94246 - DNA, 80 bp, synthetic construct
  source 1..80: mol_type = other DNA
aagtcatgccatcagagtcgaaggactcttaaaaacctccatgtaacaggggagggcatggagacccagagatctggagt

SEQ ID NO: 94247 - DNA, 80 bp, synthetic construct
  source 1..80: mol_type = other DNA
acataatcagttcctgtaatgctgtgaacaggacaccctagaggagggggcaggggaaacagaaccagcccagggactca

SEQ ID NO: 94248 - DNA, 80 bp, synthetic construct
  source 1..80: mol_type = other DNA
ggcctcaggagggtccaccagtggttgaaaatggtaatgatacaggtaaagagtaggatttcattagaaaaacagcttct

SEQ ID NO: 94249 - DNA, 80 bp, synthetic construct; identical to SEQ ID NO: 17559
  source 1..80: mol_type = other DNA

SEQ ID NO: 94250 - DNA, 80 bp, synthetic construct
  source 1..80: mol_type = other DNA
tgtgcaaacacaaacttgatgaggatgtagattatgatgattctcaaagcctttcaaagtcctgagcctgaaacaccata

SEQ ID NO: 94251 - DNA, 80 bp, synthetic construct
  source 1..80: mol_type = other DNA
cactaagaattggaaccacaagttaagcaaaacaaagaaatggccctgatcccctgacttctttaatgtgagggcatttc

SEQ ID NO: 94252 - DNA, 80 bp, synthetic construct
  source 1..80: mol_type = other DNA
taacaagaagaaaggactcatgggatacaatggactttttgccagggaggaccatctaactaaccctgatatctgggact

SEQ ID NO: 94253 - DNA, 80 bp, synthetic construct
  source 1..80: mol_type = other DNA
gacacagtactttttcagccgctcatccagctgctgcttgtcattctccaggtccatgatgctctcctgggtcagcttca

SEQ ID NO: 94254 - DNA, 80 bp, synthetic construct; identical to SEQ ID NO: 17560
  source 1..80: mol_type = other DNA

SEQ ID NO: 94255 - DNA, 80 bp, synthetic construct
  source 1..80: mol_type = other DNA
tttttttttttttatggagtctcactctgtcgccaggctggagtgcagtggcgcgatctcggctcactgcaacctccgcc

SEQ ID NO: 94256 - DNA, 80 bp, synthetic construct
  source 1..80: mol_type = other DNA
ccacccgccttggcctcccaaagtgctgggattacaggtgtgagccaccgcggctggccgccgtattcattctttcagca

SEQ ID NO: 94257 - DNA, 80 bp, synthetic construct
  source 1..80: mol_type = other DNA
acagacatatgtgcatcagagggaacaatgatcagattctgccttaaatattggaatttcaaaaattctacttggggagc

SEQ ID NO: 94258 - DNA, 80 bp, synthetic construct; identical to SEQ ID NO: 17561
  source 1..80: mol_type = other DNA

SEQ ID NO: 94259 - DNA, 80 bp, synthetic construct
  source 1..80: mol_type = other DNA
tgctccagcttgactttggccttagtcagggtgttgaccttgtcctcctcggcctgaaggtcatccagagcctgttggtg

SEQ ID NO: 94260 - DNA, 80 bp, synthetic construct
  source 1..80: mol_type = other DNA
ctccatgtcaaggtccatgctgctctctggatgccgagtggctagcctgggtcaaggtcagtatggtctgagagtcctga

SEQ ID NO: 94261 - DNA, 80 bp, synthetic construct
  source 1..80: mol_type = other DNA
attcatctcctcctcatcctccagcctctcgttcatctccttcaccttggcctccagctgaatcttgtttttgatcagct

SEQ ID NO: 94262 - DNA, 80 bp, synthetic construct; identical to SEQ ID NO: 17562
  source 1..80: mol_type = other DNA

SEQ ID NO: 94263 - DNA, 80 bp, synthetic construct
  source 1..80: mol_type = other DNA
aggaaattgaggctcaaagatgatgcatggtctgcccaaggtcacaaaataattaagctgtgtatctaggttgaacccaa

SEQ ID NO: 94264 - DNA, 80 bp, synthetic construct
  source 1..80: mol_type = other DNA
gtgaaggcagagcagggtggaagagccaacagtagcccaggagcctcaccgcctgcacttggagctgcaggtcattcttc

SEQ ID NO: 94265 - DNA, 80 bp, synthetic construct
  source 1..80: mol_type = other DNA
tagagcttcatccagggccaattcttgacccccatgaaggcccgaatgttccactggattaccagcagggagtctctgca

SEQ ID NO: 94266 - DNA, 80 bp, synthetic construct; identical to SEQ ID NO: 17563
  source 1..80: mol_type = other DNA

SEQ ID NO: 94267 - DNA, 80 bp, synthetic construct
  source 1..80: mol_type = other DNA
tgcaggcaaggtgtgtgttggccatgactagggaggggtacgagggaaagagatggtggggattaccttaggaagggtaa

SEQ ID NO: 94268 - DNA, 80 bp, synthetic construct
  source 1..80: mol_type = other DNA
ggaaaagagatgtcttcctttaattaattagtctcctttcctcaccttggtgtggccaaacttgtactggttgtgatcaa

SEQ ID NO: 94269 - DNA, 80 bp, synthetic construct
  source 1..80: mol_type = other DNA
tccagggtcacctgcagatcccattcccatcagggcagcctggctccccctgttctatgagctctggtgcaccctcatac

SEQ ID NO: 94270 - DNA, 80 bp, synthetic construct; identical to SEQ ID NO: 17564
  source 1..80: mol_type = other DNA

SEQ ID NO: 94271 - DNA, 80 bp, synthetic construct
  source 1..80: mol_type = other DNA
gatcaagaacagagccaggtcttgaacccaggtccctgagcctctgtctcctaattagccaaaaatggattaacaatttg

SEQ ID NO: 94272 - DNA, 80 bp, synthetic construct
  source 1..80: mol_type = other DNA
actgcaagtgcaaggtagcgctgagagggaggtaccctgggaggcctcatgcgggatgggaggagaagaatgtggtttgg

SEQ ID NO: 94273 - DNA, 80 bp, synthetic construct; identical to SEQ ID NO: 17565
  source 1..80: mol_type = other DNA

SEQ ID NO: 94274 - DNA, 80 bp, synthetic construct
  source 1..80: mol_type = other DNA
aagtaaataagtgaagaggccaggagatgacgggaagagaagacagagtgaaaatggtcccgaatgcaccaaggagacag

SEQ ID NO: 94275 - DNA, 80 bp, synthetic construct
  source 1..80: mol_type = other DNA
ctttgcccttctcaatagctgcaggaaggagagtcaacaaaagaagcatcagtgtggggaggtagggtgtgagtaaagaa

SEQ ID NO: 94276 - DNA, 80 bp, synthetic construct
  source 1..80: mol_type = other DNA
tgtaaaccttggggtacaacctgacattgaagtggtggggtgtagcaattgacctggctcagaaccttggcagaatccct

SEQ ID NO: 94277 - DNA, 80 bp, synthetic construct
  source 1..80: mol_type = other DNA
aatgatgttgtagtccacgatgccggcatagtggatcagggagaagtgggcttcaggcttccccttgatattgcgtggct

SEQ ID NO: 94278 - DNA, 80 bp, synthetic construct; identical to SEQ ID NO: 17566
  source 1..80: mol_type = other DNA

SEQ ID NO: 94279 - DNA, 80 bp, synthetic construct
  source 1..80: mol_type = other DNA
ataggtgcactcttatgatcccctacaccaccctcacacttcctgatccttggatgcataaaccaggcccaataaacatg

SEQ ID NO: 94280 - DNA, 80 bp, synthetic construct
  source 1..80: mol_type = other DNA
tatttttatattccccagaagggagaggggctgctattttgtctatggtgttcttgttgggtgtgcagggagaattcagg

SEQ ID NO: 94281 - DNA, 80 bp, synthetic construct; identical to SEQ ID NO: 17567
  source 1..80: mol_type = other DNA

SEQ ID NO: 94282 - DNA, 80 bp, synthetic construct
  source 1..80: mol_type = other DNA
cccatgtctggtccacagctggctctaagcaaatagctgttgaatgtgggagcgagtgagtgattgttctcccactccca

SEQ ID NO: 94283 - DNA, 80 bp, synthetic construct
  source 1..80: mol_type = other DNA
agtggcatatatcacctgcaaggtggaggagagacccatattgagcagggttgttgggaagagtgaacttgaaaactctc

SEQ ID NO: 94284 - DNA, 80 bp, synthetic construct
  source 1..80: mol_type = other DNA
aggcagacttgtcagcctctggaaggaaaaggcaagtagcaaagttggtaaagagatgactgctggccaggtgtggtggt

SEQ ID NO: 94285 - DNA, 80 bp, synthetic construct
  source 1..80: mol_type = other DNA
ggaggctgaggcaggagaatcacttgaacccaggatgtggaggtggcagtgagccaagatcgtgccactgcgctccagcc

SEQ ID NO: 94286 - DNA, 80 bp, synthetic construct; identical to SEQ ID NO: 17568
  source 1..80: mol_type = other DNA

SEQ ID NO: 94287 - DNA, 80 bp, synthetic construct
  source 1..80: mol_type = other DNA
caaaacaaaggatgtaagatgcagggaactccaaaacaaaggatgtaagatgcaagagcagagcagacgtcagttggccg

SEQ ID NO: 94288 - DNA, 80 bp, synthetic construct
  source 1..80: mol_type = other DNA
atgcttgtttcttggcttgtgtgtctctctgtctcatggctttcagctcttcctggtttgatagaacaccagatactggc

SEQ ID NO: 94289 - DNA, 80 bp, synthetic construct; identical to SEQ ID NO: 17569
  source 1..80: mol_type = other DNA

SEQ ID NO: 94290 - DNA, 80 bp, synthetic construct
  source 1..80: mol_type = other DNA
ggccccacatcccactgaattgaatccagcagtgccatgaaacccagggcatgccagctgagtccagccacaagcagagg

SEQ ID NO: 94291 - DNA, 80 bp, synthetic construct
  source 1..80: mol_type = other DNA
ctgtgaacaggtggggagaagaaggagagaaagaaaagttagggtttgggcacaaggaaaattaatgataaatgtagcaa

SEQ ID NO: 94292 - DNA, 80 bp, synthetic construct
  source 1..80: mol_type = other DNA
atggagaaagatgcagaggaagtctcagagagagacagatatgtagacctgaagacagagacacctacagacagagactt

SEQ ID NO: 94293 - DNA, 80 bp, synthetic construct; identical to SEQ ID NO: 17570
  source 1..80: mol_type = other DNA

SEQ ID NO: 94294 - DNA, 80 bp, synthetic construct
  source 1..80: mol_type = other DNA
aggtgagagctcttctccctccctttctgcggtacaggaccttggagggcagcaggcctaccttgcccgggctctggtcc

SEQ ID NO: 94295 - DNA, 80 bp, synthetic construct
  source 1..80: mol_type = other DNA
aatgcctgggcctacccgagagtaggagccctgggcaagaagctgccaggttatctacacccaaaatccacaactgtctt

SEQ ID NO: 94296 - DNA, 80 bp, synthetic construct
  source 1..80: mol_type = other DNA
gaaatgtttctgaagggaaagaaaatgcagaggtgaagacatggcgataatgagcttctggataaacgcgtgatgagttg

SEQ ID NO: 94297 - DNA, 80 bp, synthetic construct; identical to SEQ ID NO: 17571
  source 1..80: mol_type = other DNA

SEQ ID NO: 94298 - DNA, 80 bp, synthetic construct
  source 1..80: mol_type = other DNA
tgtcagcatgtactgataggcgttgtcggagatggagaagatgtggggcggggcctcgctcctcttcttgccccggtagg

SEQ ID NO: 94299 - DNA, 80 bp, synthetic construct
  source 1..80: mol_type = other DNA
agaaagaagagaaaggaaaacctctgcatgcactcaatctgagtaatgccagtccccagagtgttggaattgaaccaagg

SEQ ID NO: 94300 - DNA, 80 bp, synthetic construct
  source 1..80: mol_type = other DNA
gtagagcaccgcgggctcatgcaggaaggtcagcatggccatgtcctcgattttgtcgaacttgggtgggttctgctgca

SEQ ID NO: 94301 - DNA, 80 bp, synthetic construct
  source 1..80: mol_type = other DNA
gggaagacagaagggatattgggaaggagagggctctttggagggtctggattcttccccaaagggaaggagaatgggac

SEQ ID NO: 94302 - DNA, 80 bp, synthetic construct; identical to SEQ ID NO: 17572
  source 1..80: mol_type = other DNA

SEQ ID NO: 94303 - DNA, 80 bp, synthetic construct
  source 1..80: mol_type = other DNA
ttgaggttaccccttaaccagaggagcagcctagcaaacctgccagggtaaaaggaacaactaactattgttcaagctgg

SEQ ID NO: 94304 - DNA, 80 bp, synthetic construct
  source 1..80: mol_type = other DNA
aaactagagttccataggctggctttggggctctaatgcccagtcttactagattttcaacactctagcttcagcttttc

SEQ ID NO: 94305 - DNA, 80 bp, synthetic construct
  source 1..80: mol_type = other DNA
ttccaaaacaaggtggaaagggtggtcagcttctctggtcccatccttcttgtttttcaaaccctattccctttttcctc

SEQ ID NO: 94306 - DNA, 80 bp, synthetic construct; identical to SEQ ID NO: 17573
  source 1..80: mol_type = other DNA

SEQ ID NO: 94307 - DNA, 80 bp, synthetic construct
  source 1..80: mol_type = other DNA
gactctaaagagacttcttttccatcctgtccccattttgttgtcagactttgtggacattctcagagagaagacactgt

SEQ ID NO: 94308 - DNA, 80 bp, synthetic construct
  source 1..80: mol_type = other DNA
atatatgcctcaacagcaaatgtgcacatttcaggatgtgtgccacgtaagtagatcacatcactgcgtgttcttcagta

SEQ ID NO: 94309 - DNA, 80 bp, synthetic construct; identical to SEQ ID NO: 17574
  source 1..80: mol_type = other DNA

SEQ ID NO: 94310 - DNA, 80 bp, synthetic construct
  source 1..80: mol_type = other DNA
acacacacaccctgtaatgcatattggtcccatatgctcagatgcagatatcttcccctaggaactcctgtggcacatac

SEQ ID NO: 94311 - DNA, 80 bp, synthetic construct
  source 1..80: mol_type = other DNA
ccccttatcccagagtaaagcctccagctcccgctcctacctgagagcagcagggaaagacacagagcaggacagagctg

SEQ ID NO: 94312 - DNA, 80 bp, synthetic construct; identical to SEQ ID NO: 17575
  source 1..80: mol_type = other DNA

SEQ ID NO: 94313 - DNA, 80 bp, synthetic construct
  source 1..80: mol_type = other DNA
agcccagggcgcagcagcgagccccctcctagtccttctcttctccgtgggtgatgatgtgcaccaggttcttgtagtcc

SEQ ID NO: 94314 - DNA, 80 bp, synthetic construct
  source 1..80: mol_type = other DNA
ggggatgggaacatgggccactcagagggtcctccggggaaggacttccccagctgctgcagggccccctcgcccaaggt

SEQ ID NO: 94315 - DNA, 80 bp, synthetic construct
  source 1..80: mol_type = other DNA
aatcttggctcaacttcttccttcatgcacttttccttccttgcccttccctgttcttcctttcttgcccttccctgttc

SEQ ID NO: 94316 - DNA, 80 bp, synthetic construct; identical to SEQ ID NO: 17576
  source 1..80: mol_type = other DNA

SEQ ID NO: 94317 - DNA, 80 bp, synthetic construct
  source 1..80: mol_type = other DNA
cttgccacaagttcacactttccccacattaacatgtcgaatcctcgcaatctcctatgaggtagcttctattattattc

SEQ ID NO: 94318 - DNA, 80 bp, synthetic construct
  source 1..80: mol_type = other DNA
tgtggaacttgatggaaacaggcctgtgaggctatgaggggagcatttaaaatcgactcattaaggttcactaataaggt

SEQ ID NO: 94319 - DNA, 80 bp, synthetic construct
  source 1..80: mol_type = other DNA
atacacagtctgatgacttttatgaaactgacatttagaagaattgttcagtgcacaactcacatgacagtatgtggcgg

SEQ ID NO: 94320 - DNA, 80 bp, synthetic construct
  source 1..80: mol_type = other DNA
ttgctctgttgcccagactggagtgcagtggcatgatcttggctcattgcaacctctgcctcccgggttcaagcgattct

SEQ ID NO: 94321 - DNA, 80 bp, synthetic construct; identical to SEQ ID NO: 17577
  source 1..80: mol_type = other DNA

SEQ ID NO: 94322 - DNA, 80 bp, synthetic construct
  source 1..80: mol_type = other DNA
agctgggttagagggagtgcttgaaggaccccattacctcctccttggaaaacctctccgcctgcgtggtcagcatttcc

SEQ ID NO: 94323 - DNA, 80 bp, synthetic construct
  source 1..80: mol_type = other DNA
cactcactaatcagccttcagcacccctttgccttcagggtcaaacactttgaatgcgttgagaatggtttcctcagggt

SEQ ID NO: 94324 - DNA, 80 bp, synthetic construct
  source 1..80: mol_type = other DNA
ctctgtatttcgaagagagggctgagaacccaaggtcaaacatcatctagatttgaaagcctgggattcaaatcttaacc

SEQ ID NO: 94325 - DNA, 80 bp, synthetic construct; identical to SEQ ID NO: 17578
  source 1..80: mol_type = other DNA

SEQ ID NO: 94326 - DNA, 80 bp, synthetic construct
  source 1..80: mol_type = other DNA
atttttttgtgtgtttttagtacagatggggtttcaccatgttggccaggttggtcttgaactcctgacctcaagtgatc

SEQ ID NO: 94327 - DNA, 80 bp, synthetic construct
  source 1..80: mol_type = other DNA
gacacacacacacacacacgaccttacccttaagtttctccccaaacattgtgaggaacacagtaaagttaattggaccc

SEQ ID NO: 94328 - DNA, 80 bp, synthetic construct
  source 1..80: mol_type = other DNA
atcagagatggggtggatggaggcaaagatcttttctgagaagatgttcttgacagtgttatttataataaccaaatgac

SEQ ID NO: 94329 - DNA, 80 bp, synthetic construct
  source 1..80: mol_type = other DNA
gtgcctcagcctcccaagtagctgggattgcaggtgcatgccaccatgcctggctaatttttgtagttttttggacagac

SEQ ID NO: 94330 - DNA, 80 bp, synthetic construct; identical to SEQ ID NO: 17579
  source 1..80: mol_type = other DNA

SEQ ID NO: 94331 - DNA, 80 bp, synthetic construct
  source 1..80: mol_type = other DNA
tgttttaagtataaaaagctacactcactacaaatgtgaatacttccctgtagaattgtgcagtgcgcagtctgcacagc

SEQ ID NO: 94332 - DNA, 80 bp, synthetic construct
  source 1..80: mol_type = other DNA
aaaaaactaaaacccaaacctaacagacatgtctagaaagacttagaggagggactggaatgttcacagtggaatatgac

SEQ ID NO: 94333 - DNA, 80 bp, synthetic construct; identical to SEQ ID NO: 17580
  source 1..80: mol_type = other DNA

SEQ ID NO: 94334 - DNA, 80 bp, synthetic construct
  source 1..80: mol_type = other DNA
aaggacttggcaggagtggattctgggatcttcaaagatcattgtaggacctcagattaaaagtcaacaattgaagataa

SEQ ID NO: 94335 - DNA, 80 bp, synthetic construct
  source 1..80: mol_type = other DNA
gtgggttacttgaggtcaggaattcaagaccagcctggccaacatggtgaaactccgtctctattaaaaatacaaaaatt

SEQ ID NO: 94336 - DNA, 80 bp, synthetic construct
  source 1..80: mol_type = other DNA
aaaaacaaaaaaacctgaacacaaatgtgtatagcagcatcgttcacagtagcccaaaactgaaaataacctacatgtcc

SEQ ID NO: 94337 - DNA, 80 bp, synthetic construct; identical to SEQ ID NO: 17581
  source 1..80: mol_type = other DNA

SEQ ID NO: 94338 - DNA, 80 bp, synthetic construct
  source 1..80: mol_type = other DNA
ctctataaagctatttatttatttatttatttatttttgagaaagagtcttgctatgtcacccaggccgcagtgcagtgg

SEQ ID NO: 94339 - DNA, 80 bp, synthetic construct
  source 1..80: mol_type = other DNA
gattcctcatttgtaaaacacttgggcatttataaagttctgagaatctccctgactgtcagctgagatagattactggt

SEQ ID NO: 94340 - DNA, 80 bp, synthetic construct
  source 1..80: mol_type = other DNA
tttgagaccagccgggccaacacagtgaaaccctgtctctagtaaaaatacaaaaaaattagccaggcatggtggtgagt

SEQ ID NO: 94341 - DNA, 80 bp, synthetic construct; identical to SEQ ID NO: 17582
  source 1..80: mol_type = other DNA

SEQ ID NO: 94342 - DNA, 80 bp, synthetic construct
  source 1..80: mol_type = other DNA
caaggcaggagaattgctcgagcccaggagtttgagaccagcctgggcaacacagggggactcaatctttacaaaaatca

SEQ ID NO: 94343 - DNA, 80 bp, synthetic construct
  source 1..80: mol_type = other DNA
tcacacgcacaaaaaaagaaagcagtctggtctctttagcatcattttagcatagttccctctggaaagccaggtgggaa

SEQ ID NO: 94344 - DNA, 80 bp, synthetic construct
  source 1..80: mol_type = other DNA
caaatggggctagtggttaataatcaaagactgtaaaatgtaaaacccagaagatactgcttttcacctctcagactggc

SEQ ID NO: 94345 - DNA, 80 bp, synthetic construct; identical to SEQ ID NO: 17583
  source 1..80: mol_type = other DNA

SEQ ID NO: 94346 - DNA, 80 bp, synthetic construct
  source 1..80: mol_type = other DNA
agataacaaaaatggtttgaagggtatatactaaaatgtgaactgattatctctgggtaatagaattgtaggtagttttt

SEQ ID NO: 94347 - DNA, 80 bp, synthetic construct
  source 1..80: mol_type = other DNA
tagtttcttttaaaaattcacacatccgttcaggccgaatttgggattgtttggaggatagaggcatctaatgaaaggtc

SEQ ID NO: 94348 - DNA, 80 bp, synthetic construct; identical to SEQ ID NO: 17584
  source 1..80: mol_type = other DNA

SEQ ID NO: 94349 - DNA, 80 bp, synthetic construct
  source 1..80: mol_type = other DNA
atgctggagggagcaaaggacatgacatgaagtttctccagagccctctggtaccagtggatcataagcgtttgtgcatc

SEQ ID NO: 94350 - DNA, 80 bp, synthetic construct
  source 1..80: mol_type = other DNA
ggagggaaagaaaaagtcaggctcactaagccatgatgaatgccaagatgaaatgacagttcttcaaggtgttaaaaccc

SEQ ID NO: 94351 - DNA, 80 bp, synthetic construct
  source 1..80: mol_type = other DNA
agcaaatgattcggtactctacatatgtattatttaattctcataaccactctgtcaagtggatactattattatcatcc

SEQ ID NO: 94352 - DNA, 80 bp, synthetic construct
  source 1..80: mol_type = other DNA
tgtgctgaccctgatttggggactgcccacttcaggagggggacacctaacccaacagcacagaaagaaaggttttaaat

SEQ ID NO: 94353 - DNA, 80 bp, synthetic construct; identical to SEQ ID NO: 17585
  source 1..80: mol_type = other DNA

SEQ ID NO: 94354 - DNA, 80 bp, synthetic construct
  source 1..80: mol_type = other DNA
cagctctctgcagcccaggaacaataaatacttcctccccatgtttaaaaataaccccatgaccgcttttggcagtcata

SEQ ID NO: 94355 - DNA, 80 bp, synthetic construct
  source 1..80: mol_type = other DNA
gacacttgtgcttgtcaattttgagaaaaaaaatggcagggagaggagactgctaaaatgctctgttttatcagcctgga

SEQ ID NO: 94356 - DNA, 80 bp, synthetic construct; identical to SEQ ID NO: 17586
  source 1..80: mol_type = other DNA

SEQ ID NO: 94357 - DNA, 80 bp, synthetic construct
  source 1..80: mol_type = other DNA
tcaaaacaaacaaataacacagccacgcacctcctgcgctccgatctcccttctttgtttctctgcacagcgtgaggcag

SEQ ID NO: 94358 - DNA, 80 bp, synthetic construct
  source 1..80: mol_type = other DNA
gagagagacagacagctgggcccagggtaccactaccaccaagacgcggagaccggtagtggccctgaatgcctggacac

SEQ ID NO: 94359 - DNA, 80 bp, synthetic construct
  source 1..80: mol_type = other DNA
tcacgtgtccacccgacaggtagccgagggagagaggaaaggcagcatacatcagcatttcttctatgcacttatcagaa

SEQ ID NO: 94360 - DNA, 80 bp, synthetic construct
  source 1..80: mol_type = other DNA
ggcaggcctggcctcccacaagagctggtggagcagagtgttctctaactcttccagagaaagggagactccctttccca

SEQ ID NO: 94361 - DNA, 80 bp, synthetic construct
  source 1..80: mol_type = other DNA
ctagtcatctctcacagtgtcccttcagctcctaattctgtatggcctggttttttctaggttataattataaaacagag

SEQ ID NO: 94362 - DNA, 80 bp, synthetic construct
  source 1..80: mol_type = other DNA
tgccgcccacaaacaaggaatttctgacatatcacacttggtagtcaagtgtgggccaccactgagttcaggtttaaaac

SEQ ID NO: 94363 - DNA, 80 bp, synthetic construct; identical to SEQ ID NO: 17587
  source 1..80: mol_type = other DNA

SEQ ID NO: 94364 - DNA, 80 bp, synthetic construct
  source 1..80: mol_type = other DNA
aatatgttaacacttatgatagctgatgagctttaaaaaaaatcacaaaaaattaatgtcttaataaagtttataagttt

SEQ ID NO: 94365 - DNA, 80 bp, synthetic construct
  source 1..80: mol_type = other DNA
tttaggcccaagcctctctaatcaagagtctgtagaatccagtcctgtacatatctcccatgttctttcccatgaaagtt

SEQ ID NO: 94366 - DNA, 80 bp, synthetic construct
  source 1..80: mol_type = other DNA
gacctactagaggtaggtatggaactggcatgcccttaccatgtaacttcctcagttgaagtcaatacagtagctctagg

SEQ ID NO: 94367 - DNA, 80 bp, synthetic construct; identical to SEQ ID NO: 17588
  source 1..80: mol_type = other DNA

SEQ ID NO: 94368 - DNA, 80 bp, synthetic construct
  source 1..80: mol_type = other DNA
tcaatattgccatttgccttctttaaaattttcgtgtagtaataagtaaccagtcctccccacagtccttatatctttca

SEQ ID NO: 94369 - DNA, 80 bp, synthetic construct
  source 1..80: mol_type = other DNA
tcaagagaaagattagaggaagggcaagagaccaaagaaagccttgcccgcagtgcagtctttggggaggtgagcaaaag

SEQ ID NO: 94370 - DNA, 80 bp, synthetic construct
  source 1..80: mol_type = other DNA
acttccagggcacaggtaaaagcctgttatagctgggtgaagataacattaaataccctctatttctcggggaagagtag

SEQ ID NO: 94371 - DNA, 80 bp, synthetic construct
  source 1..80: mol_type = other DNA
gtccaggaacaagtaacagcagtctactgctggaagagtgagggtaaaagcacagaaagatatcctctcttagacgtagg

SEQ ID NO: 94372 - DNA, 80 bp, synthetic construct; identical to SEQ ID NO: 17589
  source 1..80: mol_type = other DNA

SEQ ID NO: 94373 - DNA, 80 bp, synthetic construct
  source 1..80: mol_type = other DNA
cggggagttgaaaacactatgatggatatatctgtagactctagttcataggtcaacaaacgttttctgcaaagggccag

SEQ ID NO: 94374 - DNA, 80 bp, synthetic construct
  source 1..80: mol_type = other DNA
gttttgaggggagtataacattttacttattggggttcaagttagtgttctctattgtcaaaatcaattgcacattttct

SEQ ID NO: 94375 - DNA, 80 bp, synthetic construct; identical to SEQ ID NO: 17590
  source 1..80: mol_type = other DNA

SEQ ID NO: 94376 - DNA, 80 bp, synthetic construct
  source 1..80: mol_type = other DNA
cctgggcttgctacagtatatcatctaagatgtcttcttcgaaatggaaaaattacagaacaggcaaagaaacaggaaag

SEQ ID NO: 94377 - DNA, 80 bp, synthetic construct
  source 1..80: mol_type = other DNA
tttggtcacttcacaggagaaaaaagcaaggtaatagaaattatctttgaagggccccctatctttggcatagtagacaa

SEQ ID NO: 94378 - DNA, 80 bp, synthetic construct
  source 1..80: mol_type = other DNA
atgagatggcctcaacagtggatttgatttggatcagtaaacttgaagataagtcatcagagattttacaatatgaagaa

SEQ ID NO: 94379 - DNA, 80 bp, synthetic construct
  source 1..80: mol_type = other DNA
caagcctgggcaacatagcaataccttatcttttaaaaaaaaaaaattttttttttttttagacggagtctcgctctgtt

SEQ ID NO: 94380 - DNA, 80 bp, synthetic construct
  source 1..80: mol_type = other DNA
ccagctaatttttttgtatttttagtagagacggggtttcactgtgttagccaggatggtctcaatctcctgacctcgtg

SEQ ID NO: 94381 - DNA, 80 bp, synthetic construct; identical to SEQ ID NO: 17591
  source 1..80: mol_type = other DNA

SEQ ID NO: 94382 - DNA, 80 bp, synthetic construct
  source 1..80: mol_type = other DNA
aaacataatggcagtaccagaaggagagagaaaggaacagaaaaatatttgaagaaataatggctagaaacttcccagat

SEQ ID NO: 94383 - DNA, 80 bp, synthetic construct
  source 1..80: mol_type = other DNA
aagggaaccataataagattatacctgagtttttaccagaataaaatggagggctgaagatagtgtgacaacttacttga

SEQ ID NO: 94384 - DNA, 80 bp, synthetic construct
  source 1..80: mol_type = other DNA
taaaagaaatggacgaattcctagaaatacacaatctaccaagattgaaccttgaaaaaatagaaaatctgagtagacct

SEQ ID NO: 94385 - DNA, 80 bp, synthetic construct; identical to SEQ ID NO: 17592
  source 1..80: mol_type = other DNA

SEQ ID NO: 94386 - DNA, 80 bp, synthetic construct
  source 1..80: mol_type = other DNA
tcaagtgatcctcctgccttggcctcccaaagtgctggggttgcaggcatgggccaccatgcccagctaatcaagtggaa

SEQ ID NO: 94387 - DNA, 80 bp, synthetic construct
  source 1..80: mol_type = other DNA
aactaggaatagaaggaaacttctccaatgtaataaagaccacatacgaaaaaccaccatctaacatcatgctcaatgat

SEQ ID NO: 94388 - DNA, 80 bp, synthetic construct; identical to SEQ ID NO: 17593
  source 1..80: mol_type = other DNA

SEQ ID NO: 94389 - DNA, 80 bp, synthetic construct
  source 1..80: mol_type = other DNA
aaaaagaataaaacacttgggaataaatttaaccaaagatgtgaaatacctgcatactgaaaactgtacaacactgcttg

SEQ ID NO: 94390 - DNA, 80 bp, synthetic construct
  source 1..80: mol_type = other DNA
cccaatgactttttttggcagatatagaaaaaccgtcctaaaattcatttggaatctgaagcaccccaaatagctaaaac

SEQ ID NO: 94391 - DNA, 80 bp, synthetic construct
  source 1..80: mol_type = other DNA
atgattttcaacaaggatgccaagagcattcaatggagaaaggacagtctttccaaaaaatagttctgggaaaaatggat

SEQ ID NO: 94392 - DNA, 80 bp, synthetic construct; identical to SEQ ID NO: 17594
  source 1..80: mol_type = other DNA

SEQ ID NO: 94393 - DNA, 80 bp, synthetic construct
  source 1..80: mol_type = other DNA
taaataaacctcttctccaaagaatataaataatggccagtaagcacatgaaaagatgctcaacattgagacactcaatc

SEQ ID NO: 94394 - DNA, 80 bp, synthetic construct
  source 1..80: mol_type = other DNA
gtgactgtggaaaacagtatgacaattcctcaaaaagttaaacatagaattaccatatcatccagtaattctgcttctag

SEQ ID NO: 94395 - DNA, 80 bp, synthetic construct
  source 1..80: mol_type = other DNA
gcccagtctaatcacatgagtacccaaaagtggagaatgtttcacagggagataggactaccaaagggtcagagagatgt

SEQ ID NO: 94396 - DNA, 80 bp, synthetic construct
  source 1..80: mol_type = other DNA
tttatttatttatttatttaatttttgtagaggtggggttttgctatgttgcccaggctgatctcgaactcctaggctca

SEQ ID NO: 94397 - DNA, 80 bp, synthetic construct; identical to SEQ ID NO: 17595
  source 1..80: mol_type = other DNA

SEQ ID NO: 94398 - DNA, 80 bp, synthetic construct
  source 1..80: mol_type = other DNA
tgtgggcagatttttttgtctgtcttgcttattgctgtattcccagcacctgaaacatgtctggcactcgataaacatct

SEQ ID NO: 94399 - DNA, 80 bp, synthetic construct
  source 1..80: mol_type = other DNA
tgctcaataaatattagtcacccttattccttattgtagttatagttgttaccttcacgaggagcctcaagcatctgaaa

SEQ ID NO: 94400 - DNA, 80 bp, synthetic construct; identical to SEQ ID NO: 17596
  source 1..80: mol_type = other DNA

SEQ ID NO: 94401 - DNA, 80 bp, synthetic construct
  source 1..80: mol_type = other DNA
cctttgctgacaccctccccaaccttttggtgcccacagcctccccccgaccccccaccgtgctgatcccttacgaagca

SEQ ID NO: 94402 - DNA, 80 bp, synthetic construct
  source 1..80: mol_type = other DNA
tcctggaatccaccgaccctccccacagtgttccctctctaatccccacaacagtctcaaccctacagtggaggaaatga

SEQ ID NO: 94403 - DNA, 80 bp, synthetic construct
  source 1..80: mol_type = other DNA
caacacagcagtcaaacagatagacagagttttggatgagccaacggctgagatgggacgagaagccagcgcctcctccc

SEQ ID NO: 94404 - DNA, 80 bp, synthetic construct; identical to SEQ ID NO: 17597
  source 1..80: mol_type = other DNA

SEQ ID NO: 94405 - DNA, 80 bp, synthetic construct
  source 1..80: mol_type = other DNA
ggcccgggaggggatggtcccacaacacctcgaggctgcgccgaccagggaggggttgtggactgtgacctccacagctg

SEQ ID NO: 94406 - DNA, 80 bp, synthetic construct
  source 1..80: mol_type = other DNA
gcctcccctgcagggggcgcgagtgggccatgcctcccccggccccggcccaggccccggcccaccccgccactctccgc

SEQ ID NO: 94407 - DNA, 80 bp, synthetic construct
  source 1..80: mol_type = other DNA
aggagcggccgctcctcccgggatgtgggtgggagtgggagaggcgggagtgtgtatcactggcgcgtcgccgagggagg

SEQ ID NO: 94408 - DNA, 80 bp, synthetic construct
  source 1..80: mol_type = other DNA
agaggacaaggagggctggccagtgcacaaactggggcttggctcccacccggggcctgtgtccctgagtggatgcagaa

SEQ ID NO: 94409 - DNA, 80 bp, synthetic construct; identical to SEQ ID NO: 17598
  source 1..80: mol_type = other DNA

SEQ ID NO: 94410 - DNA, 80 bp, synthetic construct
  source 1..80: mol_type = other DNA
ccccagcaccttgtgatgggccctgagggtaccgccctgtgtgaagggcctcagaaccccagcactcccaaggaccggag

SEQ ID NO: 94411 - DNA, 80 bp, synthetic construct
  source 1..80: mol_type = other DNA
gtagatgtcacccagctgcactgggaactatgggaggtagcccaggccatgcagcacctgccagccttcccgcctgggct

SEQ ID NO: 94412 - DNA, 80 bp, synthetic construct
  source 1..80: mol_type = other DNA
gggctgaacttgccaggagcttgggtcctccatgtccccacctgtgagatagagaggacaccctatcctgaccactccac

SEQ ID NO: 94413 - DNA, 80 bp, synthetic construct; identical to SEQ ID NO: 17599
  source 1..80: mol_type = other DNA

SEQ ID NO: 94414 - DNA, 80 bp, synthetic construct
  source 1..80: mol_type = other DNA
ttcgctgatggctcagttacttacctactattccctgggccactctgggaaggggaggtcttttttttttttttggagat

SEQ ID NO: 94415 - DNA, 80 bp, synthetic construct
  source 1..80: mol_type = other DNA
tagtagagacagggttttgcattgttggccaggctggtcttgaactcctgacctcaagtgatctgcctgcctcggcctcc

SEQ ID NO: 94416 - DNA, 80 bp, synthetic construct
  source 1..80: mol_type = other DNA
caagccccagggagattggggcagggaggctgagctggtgccaaggacagaagggtgggaagggaggatgacctcacatg

SEQ ID NO: 94417 - DNA, 80 bp, synthetic construct; identical to SEQ ID NO: 17600
  source 1..80: mol_type = other DNA

SEQ ID NO: 94418 - DNA, 80 bp, synthetic construct
  source 1..80: mol_type = other DNA
aaggtggaggggaagcttctggggagtgagggcatccccaggggtcgggtcagatgcccagaacccccagctcccggcag

SEQ ID NO: 94419 - DNA, 80 bp, synthetic construct
  source 1..80: mol_type = other DNA
gcagggttttttttttcccctgagctcagacattcctcactttattattctccacatttcaaagcagctgtcgcctcccc

SEQ ID NO: 94420 - DNA, 80 bp, synthetic construct; identical to SEQ ID NO: 17601
  source 1..80: mol_type = other DNA

SEQ ID NO: 94421 - DNA, 80 bp, synthetic construct
  source 1..80: mol_type = other DNA
ggcaaactgagccctcactgagtcagtggccttacagagggcaaggcccatccctagaaaatagcagggccagggtcagc

SEQ ID NO: 94422 - DNA, 80 bp, synthetic construct
  source 1..80: mol_type = other DNA
ccttagcaagggctaagatccctgttgcatttaagcaagcagcagcttagtcagacttgccctggaaaagaggttggagg

SEQ ID NO: 94423 - DNA, 80 bp, synthetic construct
  source 1..80: mol_type = other DNA
tgatggtagcattctcgagtgcccaggagggtaaaggtgactctgtaatgtggccctggagggttcttggagtccactgc

SEQ ID NO: 94424 - DNA, 80 bp, synthetic construct
  source 1..80: mol_type = other DNA
cctagagcttgggatccggccatgtcaccctcccagagctcccagcccagggccccccactgagcctgggccatacagag

SEQ ID NO: 94425 - DNA, 80 bp, synthetic construct; identical to SEQ ID NO: 17602
  source 1..80: mol_type = other DNA

SEQ ID NO: 94426 - DNA, 80 bp, synthetic construct
  source 1..80: mol_type = other DNA
ctccatcccagtggcaaggctgggcctctgttacttatcacaggtcggcacagttagcacctgaaaattacatgatggat

SEQ ID NO: 94427 - DNA, 80 bp, synthetic construct
  source 1..80: mol_type = other DNA
ctctatccaggggttttgggaaatgctgactacaacaaaccgtgaaatttcttcaaaacttaaaaactgacttgtaaggt

SEQ ID NO: 94428 - DNA, 80 bp, synthetic construct; identical to SEQ ID NO: 17603
  source 1..80: mol_type = other DNA

SEQ ID NO: 94429 - DNA, 80 bp, synthetic construct
  source 1..80: mol_type = other DNA
gatggcagaggtgttgaggggagggaagaccaaggcttccagccccagggcataggtgtggtaaggtaaagggcatactc

SEQ ID NO: 94430 - DNA, 80 bp, synthetic construct
  source 1..80: mol_type = other DNA
ccttggtagatatgtgaggtacccaagcccatagaccagaggtggaggtggagaatggaaaaaaatggtggaacctcagg

SEQ ID NO: 94431 - DNA, 80 bp, synthetic construct
  source 1..80: mol_type = other DNA
cacacatgccacattccagttgtgctctgtcagcgtttgggcaaaccaggattgtgtggctttgggagggcagggaacaa

SEQ ID NO: 94432 - DNA, 80 bp, synthetic construct; identical to SEQ ID NO: 17604
  source 1..80: mol_type = other DNA

SEQ ID NO: 94433 - DNA, 80 bp, synthetic construct
  source 1..80: mol_type = other DNA
tttcccacagctgcactgatttccttccttcttgtggcctggcaaaattttcatccaatgcctgacttcttcaagatccc

SEQ ID NO: 94434 - DNA, 80 bp, synthetic construct
  source 1..80: mol_type = other DNA
atgcaggaacatccgagcagcggagggacgctttgttctgggaccatcgcgggcccagctccgataatcctctgtccctt

SEQ ID NO: 94435 - DNA, 80 bp, synthetic construct
  source 1..80: mol_type = other DNA
cctggactaccccactgaccctctgattcagcatggactgagaatgtagtggtggctcctcctgccaccttgaggagacc

SEQ ID NO: 94436 - DNA, 80 bp, synthetic construct
  source 1..80: mol_type = other DNA
ccacagggccataggctggaccaccctgcttgagggggaagctgggaccagtgtttatgccactgtagggaggccacagc

SEQ ID NO: 94437 - DNA, 80 bp, synthetic construct; identical to SEQ ID NO: 17605
  source 1..80: mol_type = other DNA

SEQ ID NO: 94438 - DNA, 80 bp, synthetic construct
  source 1..80: mol_type = other DNA
tctgatgtctgcacccacagccagtgaaccaaacccaggaacatgtggtcagcagagccacatatgagaggtaaatggcc

SEQ ID NO: 94439 - DNA, 80 bp, synthetic construct
  source 1..80: mol_type = other DNA
agaagaataggggctgggaattgcaagatgctcccttctaccaccaagccaaaccaagtgggacagtagctcccagggac

SEQ ID NO: 94440 - DNA, 80 bp, synthetic construct; identical to SEQ ID NO: 17606
  source 1..80: mol_type = other DNA

SEQ ID NO: 94441 - DNA, 80 bp, synthetic construct
  source 1..80: mol_type = other DNA
ggatctgctcccctctgtgtgggtcctcagtcactcatgggccaggaaggctggccagagcccgccaagatcacacacac

SEQ ID NO: 94442 - DNA, 80 bp, synthetic construct
  source 1..80: mol_type = other DNA
tggactgaaccagaaggccttgaaatctgtccttgatgttgctgaggatgttttcaaaacagccctggaatctgaccact

SEQ ID NO: 94443 - DNA, 80 bp, synthetic construct
  source 1..80: mol_type = other DNA
agggtggcactgagaaaacatctccccagggcgcatgctgcagccctccctgacctctctgactcaggacctgtccctct

SEQ ID NO: 94444 - DNA, 80 bp, synthetic construct
  source 1..80: mol_type = other DNA
aacctaggggccctgcccagccagtgacagatgggagtctgtagatagtctgccttcctcatccctcagtgagacaatac

SEQ ID NO: 94445 - DNA, 80 bp, synthetic construct; identical to SEQ ID NO: 17607
  source 1..80: mol_type = other DNA

SEQ ID NO: 94446 - DNA, 80 bp, synthetic construct
  source 1..80: mol_type = other DNA
cccgcattgttgcgtgtgtcggcatggccttgctttgtcaggctgagtaatactcccttgtggatagaccacatttgctt

SEQ ID NO: 94447 - DNA, 80 bp, synthetic construct
  source 1..80: mol_type = other DNA
acatgcccagaagtacaattgctggtcatctggtcattctattttgtgggaaaatgctatagcgttttccacagtggctg

SEQ ID NO: 94448 - DNA, 80 bp, synthetic construct; identical to SEQ ID NO: 17608
  source 1..80: mol_type = other DNA

SEQ ID NO: 94449 - DNA, 80 bp, synthetic construct
  source 1..80: mol_type = other DNA
tatttttgtagaggtggggtttcaccatgttggccaggctggtcttgaactcctggcctcatgtgatccacccgcctcag

SEQ ID NO: 94450 - DNA, 80 bp, synthetic construct
  source 1..80: mol_type = other DNA
tcttctctcctttaaatctttgctcaactatttcctgcccagataatccttgacctcattatttaacatgtcacccacct

SEQ ID NO: 94451 - DNA, 80 bp, synthetic construct
  source 1..80: mol_type = other DNA
gttcccagcacctagaacagagcctgacacacagtcggtgctcagtaaatgctgagagaatgaaaggaggatgcaacaga

SEQ ID NO: 94452 - DNA, 80 bp, synthetic construct
  source 1..80: mol_type = other DNA
agtctgatccacgcaggccttccaagttgctctcaccccaccacatcccccctgccacgcagacacgcgcatccacacga

SEQ ID NO: 94453 - DNA, 80 bp, synthetic construct; identical to SEQ ID NO: 17609
  source 1..80: mol_type = other DNA

SEQ ID NO: 94454 - DNA, 80 bp, synthetic construct
  source 1..80: mol_type = other DNA
ggctcagtttcaccatcggagtcagggcaaggggtcagctctgacagcctggggacaaagttagctcctgccctgccacc

SEQ ID NO: 94455 - DNA, 80 bp, synthetic construct
  source 1..80: mol_type = other DNA
cctgtgttagcggccccagcatggctgcctcctgcagaaggctaggtgaggggcaagcgcaacagagaagcactcggcct

SEQ ID NO: 94456 - DNA, 80 bp, synthetic construct; identical to SEQ ID NO: 17610
  source 1..80: mol_type = other DNA

SEQ ID NO: 94457 - DNA, 80 bp, synthetic construct
  source 1..80: mol_type = other DNA
aggaaggccggcaagaagccatttattcatgaggcccatggggtggggacagagctgctgtcacaggtaagcacagcctg

SEQ ID NO: 94458 - DNA, 80 bp, synthetic construct
  source 1..80: mol_type = other DNA
aaggcagtgcagattacagaggaggagggagacggaggcagcaggatgtcaagtgagcactgcagctggtggagtgtggg

SEQ ID NO: 94459 - DNA, 80 bp, synthetic construct
  source 1..80: mol_type = other DNA
ctcccagaagacccctgcccctgctgagcccaccttcatagttgatgcagccattggagtcctcttgcccagccatcaac

SEQ ID NO: 94460 - DNA, 80 bp, synthetic construct; identical to SEQ ID NO: 17611
  source 1..80: mol_type = other DNA

SEQ ID NO: 94461 - DNA, 80 bp, synthetic construct
  source 1..80: mol_type = other DNA
gctgctccccaagtctggtattctcctgcctccgtacttctgtgtgctgtgctggccccccttcaaaatgccagccgcag

SEQ ID NO: 94462 - DNA, 80 bp, synthetic construct
  source 1..80: mol_type = other DNA
gtataagtgggaggtacacagggctccacagaggtcaggatccccccaggcggcaggcacttgacctgcttgaccactta

SEQ ID NO: 94463 - DNA, 80 bp, synthetic construct
  source 1..80: mol_type = other DNA
tttactctcctcctaagtaacatttctgttgtctgccattgaggctccctaattatgtaactctctccatttcaccaatg

SEQ ID NO: 94464 - DNA, 80 bp, synthetic construct
  source 1..80: mol_type = other DNA
ctccacgaagtcctcataggtgcctgtgtccttgttcttggaaatgtgctggagcataggcaggaaagtttcaaagtcca

SEQ ID NO: 94465 - DNA, 80 bp, synthetic construct; identical to SEQ ID NO: 17612
  source 1..80: mol_type = other DNA

SEQ ID NO: 94466 - DNA, 80 bp, synthetic construct
  source 1..80: mol_type = other DNA
cttccctgggacttttgaacccttggtgggggcttgggcctcactcctttttttttttttagctttaaaattttattcat

SEQ ID NO: 94467 - DNA, 80 bp, synthetic construct
  source 1..80: mol_type = other DNA
ggtgcatgtcaccatgccaagctaaatttttaatttttgtagagatagaatctcactatgttacccaggctggtctcact

SEQ ID NO: 94468 - DNA, 80 bp, synthetic construct; identical to SEQ ID NO: 17613
  source 1..80: mol_type = other DNA

SEQ ID NO: 94469 - DNA, 80 bp, synthetic construct
  source 1..80: mol_type = other DNA
tctgcctgtgtggggttctggcccagcgcccgcaggacatccccacactgcccgtaggtgatcttcatctcacacttggg

SEQ ID NO: 94470 - DNA, 80 bp, synthetic construct
  source 1..80: mol_type = other DNA
cctgctcaccttcaatctgctcaggtgtgaactcaatctgaaaagagaccccaaagactcagatgcccggcttaaaaggt

SEQ ID NO: 94471 - DNA, 80 bp, synthetic construct
  source 1..80: mol_type = other DNA
ccttgaggctgtgtgcaccgaggccctgatgctcggtggaccctggcaggggtagcagtgaggagggaggccacatgccc

SEQ ID NO: 94472 - DNA, 80 bp, synthetic construct
  source 1..80: mol_type = other DNA
gcaatggtacaggccgagggctggtggctggaagcatcgagggtgagcacaagtgtgcatgtttgtgtgtgagcatgtgt

SEQ ID NO: 94473 - DNA, 80 bp, synthetic construct; identical to SEQ ID NO: 17614
  source 1..80: mol_type = other DNA

SEQ ID NO: 94474 - DNA, 80 bp, synthetic construct
  source 1..80: mol_type = other DNA
caatctccacagtgcatgccggcacagagggacaccctgttcagggccaccctaccatgactgtccctcctggcttctgg

SEQ ID NO: 94475 - DNA, 80 bp, synthetic construct
  source 1..80: mol_type = other DNA
cattgtccccacctctcagaaggaagtctgtgccaacctaaggcctggcgagaaaggacaatgccactatgggccgtggc

SEQ ID NO: 94476 - DNA, 80 bp, synthetic construct; identical to SEQ ID NO: 17615
  source 1..80: mol_type = other DNA

SEQ ID NO: 94477 - DNA, 80 bp, synthetic construct
  source 1..80: mol_type = other DNA
agggagcaggcaggacacagggtacgtgctgctatgcagataccacaggtgggagtcatggctccctccaagtttagact

SEQ ID NO: 94478 - DNA, 80 bp, synthetic construct
  source 1..80: mol_type = other DNA
ggtgatttgaacgagacccagcctggacaggggccctgcttcttcttactccctatctcatccacgctgggagcgtgtat

SEQ ID NO: 94479 - DNA, 80 bp, synthetic construct
  source 1..80: mol_type = other DNA
taaaaagacagtccagactcaaaccccagtctagactccaccttagttctcagcagcaccagaggagtcctgcagaacgt

SEQ ID NO: 94480 - DNA, 80 bp, synthetic construct; identical to SEQ ID NO: 17616
  source 1..80: mol_type = other DNA

SEQ ID NO: 94481 - DNA, 80 bp, synthetic construct
  source 1..80: mol_type = other DNA
atcctgcccggatacctcatgaccccagccccacccctgcagtgcacaatagggacagggccataaaaggatatggctag

SEQ ID NO: 94482 - DNA, 80 bp, synthetic construct
  source 1..80: mol_type = other DNA
actcatctgcacacccgcacatacccacacagggccctgctgcctctctgcaggtccgtaagttgaagaggtgaagaagg

SEQ ID NO: 94483 - DNA, 80 bp, synthetic construct
  source 1..80: mol_type = other DNA
gttgtctgtgtctgtgtcggggtgtctatgtgtctgtgggtctctctgtgtctgtgtttgtgtggaggggggtctgtgta

SEQ ID NO: 94484 - DNA, 80 bp, synthetic construct; identical to SEQ ID NO: 17617
  source 1..80: mol_type = other DNA

SEQ ID NO: 94485 - DNA, 80 bp, synthetic construct
  source 1..80: mol_type = other DNA
cctagattcctacttcccctctctacaggccccagggatgcacatttccctacacaccccaggcctggctccccactgca

SEQ ID NO: 94486 - DNA, 80 bp, synthetic construct
  source 1..80: mol_type = other DNA
gaaccccaagctgccaagcagggtctgccccagtgcagtgatgctcattccctgttcctaccactcagtgcccaccccca

SEQ ID NO: 94487 - DNA, 80 bp, synthetic construct
  source 1..80: mol_type = other DNA
atcttgtaaacacattgggctctgttccttgcccagcatctgtgcctggggggtgggaaggaggtgctcctggttacttt

SEQ ID NO: 94488 - DNA, 80 bp, synthetic construct; identical to SEQ ID NO: 17618
  source 1..80: mol_type = other DNA

SEQ ID NO: 94489 - DNA, 80 bp, synthetic construct
  source 1..80: mol_type = other DNA
ccagagggccacacagaggggccccggggaggccccaccacccaggcctgccgaccctcaggacaacgggctctggaagt

SEQ ID NO: 94490 - DNA, 80 bp, synthetic construct
  source 1..80: mol_type = other DNA
ccaacgttggcccaaatgggggtaagccagtgacaagagcatcctgggcctcagtgtccaggtctgtgatctgggatggg

SEQ ID NO: 94491 - DNA, 80 bp, synthetic construct
  source 1..80: mol_type = other DNA
acccagatgaaggctagggccaggatggtgactgcctgagctctgattctgggcatgtccctgctggcttgggaacaaca

SEQ ID NO: 94492 - DNA, 80 bp, synthetic construct
  source 1..80: mol_type = other DNA
ggtggagggagggagggtgggcagcagttggcggtaagaacaggccacaccatgcctggcacttccctctctctcccaca

SEQ ID NO: 94493 - DNA, 80 bp, synthetic construct; identical to SEQ ID NO: 17619
  source 1..80: mol_type = other DNA

SEQ ID NO: 94494 - DNA, 80 bp, synthetic construct
  source 1..80: mol_type = other DNA
ttcccaggacctggtacaccacaggcattcaataaatgctggatgaacaaatgttccaaatatctcagtttacccacctc

SEQ ID NO: 94495 - DNA, 80 bp, synthetic construct
  source 1..80: mol_type = other DNA
catgcccaccccaattcaggcgtgctcttcacagactaaagaggtgagggtgacccctgtggtacaggcagtgactggac

SEQ ID NO: 94496 - DNA, 80 bp, synthetic construct; identical to SEQ ID NO: 17620
  source 1..80: mol_type = other DNA

SEQ ID NO: 94497 - DNA, 80 bp, synthetic construct
  source 1..80: mol_type = other DNA
ctctaaacccagacttccaggactgcaaacccaaaccccagacccaggacccaggacaagggctgacggatttccagatc

SEQ ID NO: 94498 - DNA, 80 bp, synthetic construct
  source 1..80: mol_type = other DNA
atggttgccacgtggagggtgggcagaaggaggtaagggccagctgtcccctgggcctaagagccagaggcagggaaaca

SEQ ID NO: 94499 - DNA, 80 bp, synthetic construct
  source 1..80: mol_type = other DNA
acccagagccttagaagtaggtcaaatgttgccgcgcagcaggtcctggggaccctgtcctggtgtgggcaggcccgtag

SEQ ID NO: 94500 - DNA, 80 bp, synthetic construct; identical to SEQ ID NO: 17621
  source 1..80: mol_type = other DNA

SEQ ID NO: 94501 - DNA, 80 bp, synthetic construct
  source 1..80: mol_type = other DNA
acccgggctggtccctgctcctcttggcctcagtttccccacctgtaccatggccatgggtggggcactgtgattccagg

SEQ ID NO: 94502 - DNA, 80 bp, synthetic construct
  source 1..80: mol_type = other DNA
gggtgggggtggcagggcccagcgggctggcaggcaaaccctggttttggcccagggacctataatcagctcctgcccct

SEQ ID NO: 94503 - DNA, 80 bp, synthetic construct
  source 1..80: mol_type = other DNA
gccaggcttggtccattctggaagaagggcatggccctgacttctcaggggcctggactgggggacctcagccccactct

SEQ ID NO: 94504 - DNA, 80 bp, synthetic construct
  source 1..80: mol_type = other DNA
gggataccggggtctgggatgggaggagggggtgccaatgtgctaatcaaaggaactgagaaaacaaaggcctggggctt

SEQ ID NO: 94505 - DNA, 80 bp, synthetic construct; identical to SEQ ID NO: 17622
  source 1..80: mol_type = other DNA

SEQ ID NO: 94506 - DNA, 80 bp, synthetic construct
  source 1..80: mol_type = other DNA
actgcaaaggctgccctgggtgctgggctggggctctgcccagcgctgcaccctgggccacattcctccctccccttgcc

SEQ ID NO: 94507 - DNA, 80 bp, synthetic construct
  source 1..80: mol_type = other DNA
aggatgaggccacacgtgtgattgtgtgggagtgtgtcgtcttgcgtgcttccacgtgtcaccatgggcacgaggctgtg

SEQ ID NO: 94508 - DNA, 80 bp, synthetic construct; identical to SEQ ID NO: 17623
  source 1..80: mol_type = other DNA

SEQ ID NO: 94509 - DNA, 80 bp, synthetic construct
  source 1..80: mol_type = other DNA
gggggagagagggttggtaggagggtcagggacaaatgttgccccaggaaaggatgtaccttcctggagcctgcagacac

SEQ ID NO: 94510 - DNA, 80 bp, synthetic construct
  source 1..80: mol_type = other DNA
agagggacaggatgacagatgaagaaggcagtgccgaggacagggacaacagtgatggaggtgaagacaggagggtgaca

SEQ ID NO: 94511 - DNA, 80 bp, synthetic construct
  source 1..80: mol_type = other DNA
acaaaaatcctctgtggcccagggtgtggatgctgcaataaaaatggcccaagctcccagccaggaatagttagggtcaa

SEQ ID NO: 94512 - DNA, 80 bp, synthetic construct
  source 1..80: mol_type = other DNA
acctttgcctagtccctttccaccagtactgggacagcaggaatcacactgaaatgtgtgtgtgcacacgtagcttcctg

SEQ ID NO: 94513 - DNA, 80 bp, synthetic construct; identical to SEQ ID NO: 17624
  source 1..80: mol_type = other DNA

SEQ ID NO: 94514 - DNA, 80 bp, synthetic construct
  source 1..80: mol_type = other DNA
aacgtgtgtgtctggacatttgggagctttccactgcctcctctcaccccaccctaccctgttcacagaaggggaaacag

SEQ ID NO: 94515 - DNA, 80 bp, synthetic construct
  source 1..80: mol_type = other DNA
ctttcccagatcttggaccccagtgcaagcagagggaagacaaaagggaaggagagatggttgggagacaggcaagctcc

SEQ ID NO: 94516 - DNA, 80 bp, synthetic construct; identical to SEQ ID NO: 17625
  source 1..80: mol_type = other DNA

SEQ ID NO: 94517 - DNA, 80 bp, synthetic construct
  source 1..80: mol_type = other DNA
gttgggttggctggggagagagaactcagttctggtgctggccccttcactgactcctggaacctcttcccctctggaga

SEQ ID NO: 94518 - DNA, 80 bp, synthetic construct
  source 1..80: mol_type = other DNA
gcagagggctggagcttgaagccaagacaacaggggaacaattggctggaattctgcataaacagaggggctcatccaag

SEQ ID NO: 94519 - DNA, 80 bp, synthetic construct
  source 1..80: mol_type = other DNA
agggccccaagaccccccccctcagcccacccccaaccagcatgctcgtggcccctgccccacctagaatcattggagat

SEQ ID NO: 94520 - DNA, 80 bp, synthetic construct
  source 1..80: mol_type = other DNA
cagccaggctggtctgggatgggggtcgagggtgggtcctctctgccagctccaggttcagctgctgtctcagggttagg

SEQ ID NO: 94521 - DNA, 80 bp, synthetic construct; identical to SEQ ID NO: 17626
  source 1..80: mol_type = other DNA

SEQ ID NO: 94522 - DNA, 80 bp, synthetic construct
  source 1..80: mol_type = other DNA
tgaaaggtgcagatccaggaaggcttcagagaggagggggcctttggagggcatacaagagccacccaggcagagaaggg

SEQ ID NO: 94523 - DNA, 80 bp, synthetic construct
  source 1..80: mol_type = other DNA
caggcaggggccacggaaggcagggctgagcttgcagaacacattgttcctcctcctcctcttcttcctcctcctctgtt

SEQ ID NO: 94524 - DNA, 80 bp, synthetic construct; identical to SEQ ID NO: 17627
  source 1..80: mol_type = other DNA

SEQ ID NO: 94525 - DNA, 80 bp, synthetic construct
  source 1..80: mol_type = other DNA
tgggcagaggcctgacctcactgggccagaccagctgccagtgtcccctccagcttcagggaggcatctgagttatgcct

SEQ ID NO: 94526 - DNA, 80 bp, synthetic construct
  source 1..80: mol_type = other DNA
attgcccttctctggatgtcgctttcccatacacggttttataaacttccctgagtgcttcccctctccagccagttcag

SEQ ID NO: 94527 - DNA, 80 bp, synthetic construct
  source 1..80: mol_type = other DNA
aggcccagagatttggcaaggcacgacaaaggaccacccacatagagggttcctccaggcctaacagggcaggagtgtca

SEQ ID NO: 94528 - DNA, 80 bp, synthetic construct; identical to SEQ ID NO: 17628
  source 1..80: mol_type = other DNA

SEQ ID NO: 94529 - DNA, 80 bp, synthetic construct
  source 1..80: mol_type = other DNA
cccgctttggacccccaaccagtgtccccagtggctggccaggttgcccgggcatgtgggggcactgatgaaaggggatc

SEQ ID NO: 94530 - DNA, 80 bp, synthetic construct
  source 1..80: mol_type = other DNA
attgttaccaggtcatgggaaagctggacaagatttggacccccaagccacagttcttcccattgaacactgttgctgcc

SEQ ID NO: 94531 - DNA, 80 bp, synthetic construct
  source 1..80: mol_type = other DNA
tcccttccatttccagggaccacgggacggtgctctaactcacccaaagaaagcacagagatgggcacaaaggtaacaac

SEQ ID NO: 94532 - DNA, 80 bp, synthetic construct
  source 1..80: mol_type = other DNA
tggactgtcaacaacccaaggccaggtatgcagcctcagcaaggacatcagctccgctttggacacagcagtctcagcct

SEQ ID NO: 94533 - DNA, 80 bp, synthetic construct; identical to SEQ ID NO: 17629
  source 1..80: mol_type = other DNA

SEQ ID NO: 94534 - DNA, 80 bp, synthetic construct
  source 1..80: mol_type = other DNA
gggcccgagtaaacatggctgggtctgagctgccattctccccctacctcttccccagaacccaggaccaaaatacaact

SEQ ID NO: 94535 - DNA, 80 bp, synthetic construct
  source 1..80: mol_type = other DNA
ctttacagatcccctttgagcctgaaactgcccaactgttaacaacagatcaggaaactgaggccatgagcaggaaggcg

SEQ ID NO: 94536 - DNA, 80 bp, synthetic construct
  source 1..80: mol_type = other DNA
agagcacaggggaactctccctcctttgggcacaactgcccactgacctccgctggcctggtcacagaatagcctacgtg

SEQ ID NO: 94537 - DNA, 80 bp, synthetic construct; identical to SEQ ID NO: 17630
  source 1..80: mol_type = other DNA

SEQ ID NO: 94538 - DNA, 80 bp, synthetic construct
  source 1..80: mol_type = other DNA
tcagactgggctcaggcagaagggcagcctccagccgggtcacagggcctgggggtgaggtttctgggatcttgcagggt

SEQ ID NO: 94539 - DNA, 80 bp, synthetic construct
  source 1..80: mol_type = other DNA
ggaggcagatagggagggcttcctggctgactcctcaccaggagcccacattccagtgggcaaggagtcagatatgaggt

SEQ ID NO: 94540 - DNA, 80 bp, synthetic construct; identical to SEQ ID NO: 17631
  source 1..80: mol_type = other DNA

SEQ ID NO: 94541 - DNA, 80 bp, synthetic construct
  source 1..80: mol_type = other DNA
ggcccagccctgggcatctgaacaccggcacacttggatctgcctctgttgcctcctactcctgactaggagcctgggac

SEQ ID NO: 94542 - DNA, 80 bp, synthetic construct
  source 1..80: mol_type = other DNA
cttgagtctgctctgcagctttaggcccgacttggaaggcccatgggctgcaggtgagtgggggccaggggagcctaggg

SEQ ID NO: 94543 - DNA, 80 bp, synthetic construct
  source 1..80: mol_type = other DNA
ggacagaaagcccatacctctagctccttgggagccttaggagtgctccctggttgggacagagcctgctggccccaggt

SEQ ID NO: 94544 - DNA, 80 bp, synthetic construct
  source 1..80: mol_type = other DNA
aagtggcacctcgcttcacttatggcctagccatcccctcccctactgggctcttgcctcaaaaagtttccagaggggcc

SEQ ID NO: 94545 - DNA, 80 bp, synthetic construct; identical to SEQ ID NO: 17632
  source 1..80: mol_type = other DNA

SEQ ID NO: 94546 - DNA, 80 bp, synthetic construct
  source 1..80: mol_type = other DNA
gctgcagcagaggcctgtcagcctggggctgccacaccagcaggggtggggccagagtctggcccctactgcagttctga

SEQ ID NO: 94547 - DNA, 80 bp, synthetic construct
  source 1..80: mol_type = other DNA
tgcttgtcaaaaagggcaagctgactctgccaggtgcttgggtgctaccagttaatgtgtgacacccccaccctcatggt

SEQ ID NO: 94548 - DNA, 80 bp, synthetic construct
  source 1..80: mol_type = other DNA
ctccacagcccaccctcatcctcccaagtacaagtagtatgtttccaaatctcaagttttccctggtgtcagatctgaaa

SEQ ID NO: 94549 - DNA, 80 bp, synthetic construct; identical to SEQ ID NO: 17633
  source 1..80: mol_type = other DNA

SEQ ID NO: 94550 - DNA, 80 bp, synthetic construct
  source 1..80: mol_type = other DNA
tttttaattacccaggtgtggtagctcatgcctgtggtgccagctacatgagaggctgaggtgagaggattgcttgagcc

SEQ ID NO: 94551 - DNA, 80 bp, synthetic construct
  source 1..80: mol_type = other DNA
gagtttgaaaccagcctggccaacatggagaaaccccatctccactacaaatgcaaaaattagccaggcgtggtggtgca

SEQ ID NO: 94552 - DNA, 80 bp, synthetic construct
  source 1..80: mol_type = other DNA
attaaaatataacactgaagaaccacaagtgttctttaggtgcccattctggcacctgggcctccgtcccaaggaggcta

SEQ ID NO: 94553 - DNA, 80 bp, synthetic construct; identical to SEQ ID NO: 17634
  source 1..80: mol_type = other DNA

SEQ ID NO: 94554 - DNA, 80 bp, synthetic construct
  source 1..80: mol_type = other DNA
tcaacatggtgaaaccccgtctctaccaagaaatgcaaaaattagccaggttggtggtacacacctgtagtcccagctac

SEQ ID NO: 94555 - DNA, 80 bp, synthetic construct
  source 1..80: mol_type = other DNA
gaagaaagaagaagaaagtagcagcagaagaaatacatggggaatgcacctgggagtgcagtctggaagctggatgggct

SEQ ID NO: 94556 - DNA, 80 bp, synthetic construct; identical to SEQ ID NO: 17635
  source 1..80: mol_type = other DNA

SEQ ID NO: 94557 - DNA, 80 bp, synthetic construct
  source 1..80: mol_type = other DNA
ccctctgcctcagtttccccacttggtaccgggaggtggtaggtttggggtcgaagggcccctcctcttagagctccagc

SEQ ID NO: 94558 - DNA, 80 bp, synthetic construct
  source 1..80: mol_type = other DNA
tttgggagtgggggtgggaacgggggagggaggtgaagcctgagagtgggtgtctggattgagccccaggtctggcagcc

SEQ ID NO: 94559 - DNA, 80 bp, synthetic construct
  source 1..80: mol_type = other DNA
aggaacgacaggcctgggatgggactgagggcaggggacgaggcgagggtggggctggacgtgggggagggcggcagcag

SEQ ID NO: 94560 - DNA, 80 bp, synthetic construct; identical to SEQ ID NO: 17636
  source 1..80: mol_type = other DNA

SEQ ID NO: 94561 - DNA, 80 bp, synthetic construct
  source 1..80: mol_type = other DNA
cacatcccgccgccgtaagactccgggcctcggcctctagcgcaatgtcccggggcggggggcggaaggctcctctcggc

SEQ ID NO: 94562 - DNA, 80 bp, synthetic construct; identical to SEQ ID NO: 17637
  source 1..80: mol_type = other DNA

SEQ ID NO: 94563 - DNA, 80 bp, synthetic construct
  source 1..80: mol_type = other DNA
ccgtcccccaactcccctttccgctcaggcagggtcctcgcggcccatgctggccgctggggacccgcgcagcccagacc

SEQ ID NO: 94564 - DNA, 80 bp, synthetic construct
  source 1..80: mol_type = other DNA
ctctcaagaggaagcaacccaagacgttcaccgtgaggatcgtcaccatggacgccgagatggagttcaattgcgaggta

SEQ ID NO: 94565 - DNA, 80 bp, synthetic construct
  source 1..80: mol_type = other DNA
acttttgggttttggcatttcctgaaggttattttcattcattgttattggaagaagctggatgctcctgtgatagaaaa

SEQ ID NO: 94566 - DNA, 80 bp, synthetic construct; identical to SEQ ID NO: 17638
  source 1..80: mol_type = other DNA

SEQ ID NO: 94567 - DNA, 80 bp, synthetic construct
  source 1..80: mol_type = other DNA
aggtggggttttgaaccaagctcacagcccgtacagtactgcttctcaagtaatttaagttcttgctgctaaaagtgtgg

SEQ ID NO: 94568 - DNA, 80 bp, synthetic construct
  source 1..80: mol_type = other DNA
aagatcagcttccagcatgacagcttaaggaacccattcctctgtaaaactggtgaaaattcttttttgttttgtttcgt

SEQ ID NO: 94569 - DNA, 80 bp, synthetic construct
  source 1..80: mol_type = other DNA
ttttttttttttttttttgagacggagtctcgctctgtcacccagagtgcaccgggctagagtgcaatggcgcgatcttg

SEQ ID NO: 94570 - DNA, 80 bp, synthetic construct; identical to SEQ ID NO: 17639
  source 1..80: mol_type = other DNA

SEQ ID NO: 94571 - DNA, 80 bp, synthetic construct
  source 1..80: mol_type = other DNA
tttaaaccctccggcaatggtcctgagggcaaacaacaaatgaaaaaacacctattcaagaaaatctacaaattcggtaa

SEQ ID NO: 94572 - DNA, 80 bp, synthetic construct
  source 1..80: mol_type = other DNA
catcagcatttctcatcctacctagagctacttgttgctgaggttaaaacctgtgtgagtgcaattgaaagttggagctc

SEQ ID NO: 94573 - DNA, 80 bp, synthetic construct
  source 1..80: mol_type = other DNA
ggctaattttgtatttttagtagaggcagggtttctccatgttggtcaggctggtcttgaactccctacctcaggtgatc

SEQ ID NO: 94574 - DNA, 80 bp, synthetic construct; identical to SEQ ID NO: 17640
  source 1..80: mol_type = other DNA

SEQ ID NO: 94575 - DNA, 80 bp, synthetic construct
  source 1..80: mol_type = other DNA
cagtgacttcatttgcaacacagtgtggagaaattcatgcctaagggcaatctggagatgtgaaggttttggtaagaggc

SEQ ID NO: 94576 - DNA, 80 bp, synthetic construct
  source 1..80: mol_type = other DNA
agcactttgggaggctgaggcaggcagatcatctgaggtcgggagtttgagaccagcttgaccaatatggtgaaccccat

SEQ ID NO: 94577 - DNA, 80 bp, synthetic construct
  source 1..80: mol_type = other DNA
tgtcctgtcacaaaacaaaacattgaccacagacctctgaggtggtggatgtccctcctgtcctggttgtatcattatac

SEQ ID NO: 94578 - DNA, 80 bp, synthetic construct; identical to SEQ ID NO: 17641
  source 1..80: mol_type = other DNA

SEQ ID NO: 94579 - DNA, 80 bp, synthetic construct
  source 1..80: mol_type = other DNA
gaaatggatttcactcaaataatccagccagtcgctaaacaaataaataacaattggccctggagagggggtaccaatcc

SEQ ID NO: 94580 - DNA, 80 bp, synthetic construct
  source 1..80: mol_type = other DNA
tggcctatatatatattcacagtactatatatattcacaatactaaaggaaaatatgatgacaaagaagtaaaggatggt

SEQ ID NO: 94581 - DNA, 80 bp, synthetic construct
  source 1..80: mol_type = other DNA
tgaggtcgggagttcgagaccagcctgaccaacatggtaaaaccccgtctctgctaaaaatacaaaaattagccaggcgt

SEQ ID NO: 94582 - DNA, 80 bp, synthetic construct; identical to SEQ ID NO: 17642
  source 1..80: mol_type = other DNA

SEQ ID NO: 94583 - DNA, 80 bp, synthetic construct
  source 1..80: mol_type = other DNA
aggtgggtggatcacctgaggtcaggagttcaagaccagcctggccaacatggtgaaaccccatctctacaaaaatacaa

SEQ ID NO: 94584 - DNA, 80 bp, synthetic construct; identical to SEQ ID NO: 17643
  source 1..80: mol_type = other DNA

SEQ ID NO: 94585 - DNA, 80 bp, synthetic construct
  source 1..80: mol_type = other DNA
atctccaccggaatgtaatggatgaacatgcatgtgatggtgtccaagccagaacagtgggtaaagccaatggctataag

SEQ ID NO: 94586 - DNA, 80 bp, synthetic construct
  source 1..80: mol_type = other DNA
gttatgacagtggaaccagggtttggagggcataaattcatggaagatatgatgttaaaggttcactggttgaggatcca

SEQ ID NO: 94587 - DNA, 80 bp, synthetic construct
  source 1..80: mol_type = other DNA
agatctgtgatcagcctgttaagaaacatttgctcagaagctgctcagaaagattctcttgattgatgaaaccttaagga

SEQ ID NO: 94588 - DNA, 80 bp, synthetic construct; identical to SEQ ID NO: 17644
  source 1..80: mol_type = other DNA

SEQ ID NO: 94589 - DNA, 80 bp, synthetic construct
  source 1..80: mol_type = other DNA
gtgtcttaatgtctaaggagggcatattagctacactataaaaacaatttttttctgtatttctgaaaagaattttgttg

SEQ ID NO: 94590 - DNA, 80 bp, synthetic construct
  source 1..80: mol_type = other DNA
agagagagagagagagagagacctgggcacagtggctgttgcctgtaatctcagcactttgggaggtcaaggcaggagga

SEQ ID NO: 94591 - DNA, 80 bp, synthetic construct
  source 1..80: mol_type = other DNA
gttgaggaggcagtgagctatgattgtgccacagtgcttcagccagggtgacagagtgagaccctgtctcttaaaaaaaa

SEQ ID NO: 94592 - DNA, 80 bp, synthetic construct
  source 1..80: mol_type = other DNA
gcctgtagtcccagctactcgagaggctgaggcaggagaatcgcttgaacccgggaagttggaggttgcagtgagctgag

SEQ ID NO: 94593 - DNA, 80 bp, synthetic construct; identical to SEQ ID NO: 17645
  source 1..80: mol_type = other DNA

SEQ ID NO: 94594 - DNA, 80 bp, synthetic construct
  source 1..80: mol_type = other DNA
gagtgcaaggttggtttaacatccaaaaatgaattagtgtaaataatgtaatgcattatatcaatagaataaaaaacaaa

SEQ ID NO: 94595 - DNA, 80 bp, synthetic construct
  source 1..80: mol_type = other DNA
ctgaggccaggcacagtggctcacgcctgtaatcctaacactttaggaggccaaggttggagggatcacttgaggtcagg

SEQ ID NO: 94596 - DNA, 80 bp, synthetic construct; identical to SEQ ID NO: 17646
  source 1..80: mol_type = other DNA

SEQ ID NO: 94597 - DNA, 80 bp, synthetic construct
  source 1..80: mol_type = other DNA
atgatcttgcatatagaccctgaggaatccactaccaaagtattggaactaataaattattagtttagtaaggttatagg

SEQ ID NO: 94598 - DNA, 80 bp, synthetic construct
  source 1..80: mol_type = other DNA
gaaagtataaaacttatactctaaaagctgtaaaacatttttggttttgttttttaaattaattttttttgaaacggagt

SEQ ID NO: 94599 - DNA, 80 bp, synthetic construct
  source 1..80: mol_type = other DNA
gggggtttcaccatgttggccaggctggtctcgaactcctgacctcaggtgatccacccgcctcagcctctgaaagtcct

SEQ ID NO: 94600 - DNA, 80 bp, synthetic construct; identical to SEQ ID NO: 17647
  source 1..80: mol_type = other DNA

SEQ ID NO: 94601 - DNA, 80 bp, synthetic construct
  source 1..80: mol_type = other DNA
aataaatagaaaatagctcttgttcatggatcataagacataacgttgtcaaattggcagtattttggaaattgatctac

SEQ ID NO: 94602 - DNA, 80 bp, synthetic construct
  source 1..80: mol_type = other DNA
agaaaccctgtctctactaaaactacaaaattagccgggtgtggtggcacatacctgtaatcccaggtactcgggaggct

SEQ ID NO: 94603 - DNA, 80 bp, synthetic construct; identical to SEQ ID NO: 17648
  source 1..80: mol_type = other DNA

SEQ ID NO: 94604 - DNA, 80 bp, synthetic construct
  source 1..80: mol_type = other DNA
cacaagaatcccttgaacccaggaggtggaggttgcagtgagtcgagatcgtgctattgcactccagcctgggggacaga

SEQ ID NO: 94605 - DNA, 80 bp, synthetic construct
  source 1..80: mol_type = other DNA
accattcagtgggggagaactgtcttgtcttgtcttttcttgctacatgccacagactgtgagaaggaatagtcctttct

SEQ ID NO: 94606 - DNA, 80 bp, synthetic construct
  source 1..80: mol_type = other DNA
gcccggctaatttttgtatttttagtagagatagggttccactatgttggccaggctagtctcgaactcctgacctcgtg

SEQ ID NO: 94607 - DNA, 80 bp, synthetic construct; identical to SEQ ID NO: 17649
  source 1..80: mol_type = other DNA

SEQ ID NO: 94608 - DNA, 80 bp, synthetic construct
  source 1..80: mol_type = other DNA
ctcacgaggtcaggagatcaagaccatcctggctaacatggtgaaaccctgtctgtactaaaaatacaaaaacaaaatta

SEQ ID NO: 94609 - DNA, 80 bp, synthetic construct
  source 1..80: mol_type = other DNA
aattagctgggcatggtggcgggcacctgtaatcacagctacttgggaggctgaggcaggagaatcgcttgaacccaggg

SEQ ID NO: 94610 - DNA, 80 bp, synthetic construct
  source 1..80: mol_type = other DNA
ccaggagtttgagaccagtctggccaacatggtgaaaccctgtctatattaaaaatacagaaattaggctgggtgtggtg

SEQ ID NO: 94611 - DNA, 80 bp, synthetic construct; identical to SEQ ID NO: 17650
  source 1..80: mol_type = other DNA

SEQ ID NO: 94612 - DNA, 80 bp, synthetic construct
  source 1..80: mol_type = other DNA
taattcctgcactttgggagaccaaggtgggaggatcacttgaagccagaattttgagaccagcctgggcaacagagtga

SEQ ID NO: 94613 - DNA, 80 bp, synthetic construct
  source 1..80: mol_type = other DNA
cgagaccctgtctcaaaaaaaggaagacaattagctgggtgtggtagcgttcctctgtagtcacagctacttgagaggcc

SEQ ID NO: 94614 - DNA, 80 bp, synthetic construct
  source 1..80: mol_type = other DNA
tataaccccacaattcaacttacagatgtcttctcaagagaaatgaaaacatagctttacgagaaaaacttatatgtgaa

SEQ ID NO: 94615 - DNA, 80 bp, synthetic construct
  source 1..80: mol_type = other DNA
atgtggtctatccttactatggaattacttggcaataaaatagaatgaagtaccagcacgtgcttcaacatggatggacc

SEQ ID NO: 94616 - DNA, 80 bp, synthetic construct; identical to SEQ ID NO: 17651
  source 1..80: mol_type = other DNA

SEQ ID NO: 94617 - DNA, 80 bp, synthetic construct
  source 1..80: mol_type = other DNA
tttatggacacagaaatttgaatttcacataattttcacaagaaaataaacattaaaaaatgtaacatgctgggcactgt

SEQ ID NO: 94618 - DNA, 80 bp, synthetic construct
  source 1..80: mol_type = other DNA
ggaggctgaggcaggagaatcacttgaacctggaaggcggaggttgtggtgagctgagatcacgccgttgcactccagcc

SEQ ID NO: 94619 - DNA, 80 bp, synthetic construct
  source 1..80: mol_type = other DNA
atgttgtgagagggtaagagagactagcctataaggaaagggattttagttttttgggggtttttttttttgagacggag

SEQ ID NO: 94620 - DNA, 80 bp, synthetic construct
  source 1..80: mol_type = other DNA
atgggctttcaccatgttggccaggctgatcttgaactcctgacttcaggtgatccgccctccttggtctcccaaagtgc

SEQ ID NO: 94621 - DNA, 80 bp, synthetic construct; identical to SEQ ID NO: 17652
  source 1..80: mol_type = other DNA

SEQ ID NO: 94622 - DNA, 80 bp, synthetic construct
  source 1..80: mol_type = other DNA
agaaccactgatctatagaaaaggataatagtagtgacattcagagaggcaggatggtatagtgcaaagcttgccaaact

SEQ ID NO: 94623 - DNA, 80 bp, synthetic construct
  source 1..80: mol_type = other DNA
agaaagtgcatcggctttgaaagaagacagacctgggcttgaattctagctaaaatacttctactttggacaagttacat

SEQ ID NO: 94624 - DNA, 80 bp, synthetic construct; identical to SEQ ID NO: 17653
  source 1..80: mol_type = other DNA

SEQ ID NO: 94625 - DNA, 80 bp, synthetic construct
  source 1..80: mol_type = other DNA
gagagtacttgtagaattcttgactttattgaggtcaaatgtaggtggcttttcaagaaggactcaatttcagaaccggt

SEQ ID NO: 94626 - DNA, 80 bp, synthetic construct
  source 1..80: mol_type = other DNA
tcattttgagaaagtgggtgctgagtgtaatttgccaggaggctaaacggctatgttatttcttatctaggctggaattt

SEQ ID NO: 94627 - DNA, 80 bp, synthetic construct
  source 1..80: mol_type = other DNA
cattgcagatcattccagcatacaagtggacgtaagttgtccataacagaaggaactttctaaaggggaagacagataga

SEQ ID NO: 94628 - DNA, 80 bp, synthetic construct; identical to SEQ ID NO: 17654
  source 1..80: mol_type = other DNA

SEQ ID NO: 94629 - DNA, 80 bp, synthetic construct
  source 1..80: mol_type = other DNA
caacacgccctgctaatttttagatttttagtaaagacagggtttctccatgttggtcatgctggtctcgaactcctgac

SEQ ID NO: 94630 - DNA, 80 bp, synthetic construct
  source 1..80: mol_type = other DNA
gcccaggctggagtgcagtggcgtgatctcagctcacttcaacctctgtctcctgggttcaagcaattctcctgcctcaa

SEQ ID NO: 94631 - DNA, 80 bp, synthetic construct
  source 1..80: mol_type = other DNA
tgagccaccgtgcccgacctctcccatgggttttaagtagtgcctatggatggcatgggtgccactactcaggtctagga

SEQ ID NO: 94632 - DNA, 80 bp, synthetic construct; identical to SEQ ID NO: 17655
  source 1..80: mol_type = other DNA

SEQ ID NO: 94633 - DNA, 80 bp, synthetic construct
  source 1..80: mol_type = other DNA
ggttgaggcaggagaattgcttgaacctgggaggtgagggttgcagtgagctgagatcgcgtcactgcactccagcctgg

SEQ ID NO: 94634 - DNA, 80 bp, synthetic construct
  source 1..80: mol_type = other DNA
ggtgacagagtgagactctgtctcttttatttatttgttttttaaataatagagacagggttggccgggcatggtggctc

SEQ ID NO: 94635 - DNA, 80 bp, synthetic construct
  source 1..80: mol_type = other DNA
ggctgaggcaggataattgcctgaggtggaggttgcctgagattgagccactgcactccagcctggatgacagggagaga

SEQ ID NO: 94636 - DNA, 80 bp, synthetic construct
  source 1..80: mol_type = other DNA
ccacgttgaccaggcagggaacacctcctagcagtgatcaaggactactttggacctaggttctgtaactgacttcatct

SEQ ID NO: 94637 - DNA, 80 bp, synthetic construct; identical to SEQ ID NO: 17656
  source 1..80: mol_type = other DNA

SEQ ID NO: 94638 - DNA, 80 bp, synthetic construct
  source 1..80: mol_type = other DNA
tcttcctgcatagtgttacaagaattaaatttgagtaattactggtaaagtacgtagaatagtacctaacacaagataag

SEQ ID NO: 94639 - DNA, 80 bp, synthetic construct
  source 1..80: mol_type = other DNA
ggtcgaggttgccataagcttcctgattgcaccactgcactccagcctgggtgacagagtgagaccttgtctcaaaaaat

SEQ ID NO: 94640 - DNA, 80 bp, synthetic construct; identical to SEQ ID NO: 17657
  source 1..80: mol_type = other DNA

SEQ ID NO: 94641 - DNA, 80 bp, synthetic construct
  source 1..80: mol_type = other DNA
cctggagagaacttaggtatttggtaaacaggaaaaagaaagtggaaagaagagatcatttgaaggacttcctcaactta

SEQ ID NO: 94642 - DNA, 80 bp, synthetic construct
  source 1..80: mol_type = other DNA
aagtggacattttctgtaagtgaatcattttcacttgctcatgatataatgagaattccttacctttggcttaaaatgag

SEQ ID NO: 94643 - DNA, 80 bp, synthetic construct
  source 1..80: mol_type = other DNA
aaagttagttaactgttcagacgacattgtttctttgacttttacaatccgcttccctctcactgacagttcagttttgg

SEQ ID NO: 94644 - DNA, 80 bp, synthetic construct
  source 1..80: mol_type = other DNA
tgggtgtgcaccaccacacatggctaatttttgtatttttagtagagacgaagtttcaccatgttggccaggacggtctc

SEQ ID NO: 94645 - DNA, 80 bp, synthetic construct; identical to SEQ ID NO: 17658
  source 1..80: mol_type = other DNA

SEQ ID NO: 94646 - DNA, 80 bp, synthetic construct
  source 1..80: mol_type = other DNA
agatattggaggctcatgaagcccaggttaaagaggcttgtattcatcagatgcgatgaagagctttgaagtttttacta

SEQ ID NO: 94647 - DNA, 80 bp, synthetic construct
  source 1..80: mol_type = other DNA
gacaaaactaggcagatgtaagcatctagtgaatctagagattagggtgttctgtgaccaagaatgagcagaagacctgc

SEQ ID NO: 94648 - DNA, 80 bp, synthetic construct; identical to SEQ ID NO: 17659
  source 1..80: mol_type = other DNA

SEQ ID NO: 94649 - DNA, 80 bp, synthetic construct
  source 1..80: mol_type = other DNA
ttcatatttcctgctttggtaggaagtcatctcaagacttgagtgtataggcatgaggaagtctgctagaggacaggaag

SEQ ID NO: 94650 - DNA, 80 bp, synthetic construct
  source 1..80: mol_type = other DNA
aatattgcttaaagaataagagctacagccctgatggaaggggtaaattggcctgggaaaagccctgcctctgctacctg

SEQ ID NO: 94651 - DNA, 80 bp, synthetic construct
  source 1..80: mol_type = other DNA
cggctcactgcaacctttgcctcccgggttcaagcgattctcgtgcctcagcctcctgagtagctgggattataggagtg

SEQ ID NO: 94652 - DNA, 80 bp, synthetic construct; identical to SEQ ID NO: 17660
  source 1..80: mol_type = other DNA

SEQ ID NO: 94653 - DNA, 80 bp, synthetic construct
  source 1..80: mol_type = other DNA
gcctttgtaattgtagaccctctaaactataattagtccaaataaaatggactcaccttatgccatgttcttgttgaagg

SEQ ID NO: 94654 - DNA, 80 bp, synthetic construct
  source 1..80: mol_type = other DNA
tcttttcttgctctattgccaggctggagtgcagtggtgagatctcggctcactgcaacctccgcctctgcctcccaggt

SEQ ID NO: 94655 - DNA, 80 bp, synthetic construct
  source 1..80: mol_type = other DNA
tttttgtaacatgctaagtaatacaatctctatttagcttgatgtccacggtgatagcaggattcttttcggatttctgc

SEQ ID NO: 94656 - DNA, 80 bp, synthetic construct; identical to SEQ ID NO: 17661
  source 1..80: mol_type = other DNA

SEQ ID NO: 94657 - DNA, 80 bp, synthetic construct
  source 1..80: mol_type = other DNA
cttcagggaaaaatttttaatggaatctttagtcactcatgttgacacaaggtgcttgtcctagtgcaggaatctgtgtg

SEQ ID NO: 94658 - DNA, 80 bp, synthetic construct
  source 1..80: mol_type = other DNA
atataaactttctcttagtgagttatgttgcttatagcttttccctccaccttgcctgttttagtcttcttgtttcaata

SEQ ID NO: 94659 - DNA, 80 bp, synthetic construct
  source 1..80: mol_type = other DNA
catattgattttgagattaaatcagtctcataaatatgttagtcttcagcccacggtagttctcatccatctgcagactt

SEQ ID NO: 94660 - DNA, 80 bp, synthetic construct
  source 1..80: mol_type = other DNA
gctaatttttgtatttttagtagagacagggtttcaccatgttggccaggatggtctcgatctcttgatctcgtgatcca

SEQ ID NO: 94661 - DNA, 80 bp, synthetic construct; identical to SEQ ID NO: 17662
  source 1..80: mol_type = other DNA

SEQ ID NO: 94662 - DNA, 80 bp, synthetic construct
  source 1..80: mol_type = other DNA
catttgaaatttaaccttgtgccttatttgtgctgaatttactattgtttcctatttgtagtgctctgcaaaattattct

SEQ ID NO: 94663 - DNA, 80 bp, synthetic construct
  source 1..80: mol_type = other DNA
gtaatagcagaccctgaatgagggaaaagaatgtgaaaccacacataaactaaaggtgaagtcatttacatccctgaaaa

SEQ ID NO: 94664 - DNA, 80 bp, synthetic construct; identical to SEQ ID NO: 17663
  source 1..80: mol_type = other DNA

SEQ ID NO: 94665 - DNA, 80 bp, synthetic construct
  source 1..80: mol_type = other DNA
gaatcttctttgtttacagcatagtaaaatatggtgattgcatggctcataagagatttacaaatgaagaaactgaggcc

SEQ ID NO: 94666 - DNA, 80 bp, synthetic construct
  source 1..80: mol_type = other DNA
cctaaaaaactgtaattcatttggttttgaaagacttaccagagtttaaaagctccattttgtggcttcccaaggtgctg

SEQ ID NO: 94667 - DNA, 80 bp, synthetic construct
  source 1..80: mol_type = other DNA
tttttaataacgagtgtcataaattcttgcttcattgcaatcattaattggaagactgttctgctcagaagcctcatcta

SEQ ID NO: 94668 - DNA, 80 bp, synthetic construct; identical to SEQ ID NO: 17664
  source 1..80: mol_type = other DNA

SEQ ID NO: 94669 - DNA, 80 bp, synthetic construct
  source 1..80: mol_type = other DNA
tctagttacaaataaatggaagcacataagtttgctgacatgggaggacataggctgggttgtaataaggtagggtaatt

SEQ ID NO: 94670 - DNA, 80 bp, synthetic construct
  source 1..80: mol_type = other DNA
ggcagaaactgacagggcaagagattacagttgggattttttgcaaagaggagctttcaagtttgtgacatctttttttt

SEQ ID NO: 94671 - DNA, 80 bp, synthetic construct
  source 1..80: mol_type = other DNA
aagtagctgggactacaggtatgcgccaccacgcccaactagtttttgtatttttagtagagacggggtttcaccatgtt

SEQ ID NO: 94672 - DNA, 80 bp, synthetic construct; identical to SEQ ID NO: 17665
  source 1..80: mol_type = other DNA

SEQ ID NO: 94673 - DNA, 80 bp, synthetic construct
  source 1..80: mol_type = other DNA
tgagacacaagaacagcttttgttgtgtggtgataccataccctgaattgagattatcagtgtcagacatatattactgc

SEQ ID NO: 94674 - DNA, 80 bp, synthetic construct
  source 1..80: mol_type = other DNA
taggtttggatctggtatattagcatcttaaattctcaagtctcctataaacctgttctcttaggccagctatggctgca

SEQ ID NO: 94675 - DNA, 80 bp, synthetic construct
  source 1..80: mol_type = other DNA
tgctctatctgtatgggagctaaccttttgacaatttttatggcaaatgctagggcagcttgtgagctaattagaagaaa

SEQ ID NO: 94676 - DNA, 80 bp, synthetic construct; identical to SEQ ID NO: 17666
  source 1..80: mol_type = other DNA

SEQ ID NO: 94677 - DNA, 80 bp, synthetic construct
  source 1..80: mol_type = other DNA
gtactaggatttgattgctgatgactgtatgtcccaaagaaaacagtgggagaaatgcagctgtcaaagcaaaaaacaaa

SEQ ID NO: 94678 - DNA, 80 bp, synthetic construct
  source 1..80: mol_type = other DNA
ttgcttcctataacagaaaagtactgcattccagctacgttcctgctgtggaacataagtgcttagtgctatttacttaa

SEQ ID NO: 94679 - DNA, 80 bp, synthetic construct
  source 1..80: mol_type = other DNA
tatccatgatataggcacaagtatatatctatgaaatagcactgcagcctgttaaagtaatgggtgagcacagccacaaa

SEQ ID NO: 94680 - DNA, 80 bp, synthetic construct
  source 1..80: mol_type = other DNA
cacctctctctttccttctgcaaaatgagcatctgcctcttagcctccctcttcgtcactaggctgagatgaggcaggga

SEQ ID NO: 94681 - DNA, 80 bp, synthetic construct; identical to SEQ ID NO: 17667
  source 1..80: mol_type = other DNA

SEQ ID NO: 94682 - DNA, 80 bp, synthetic construct
  source 1..80: mol_type = other DNA
agataggataattatgctgtttgtcagatactagaaaagtgcaaagaacattccttcactttgcaacagcttggacccaa

SEQ ID NO: 94683 - DNA, 80 bp, synthetic construct
  source 1..80: mol_type = other DNA
gtgatccatttacctgtcttccctgtcagacatgaacagggacagtgtcttgtcctcaattcatcatttttctcctgttt

SEQ ID NO: 94684 - DNA, 80 bp, synthetic construct; identical to SEQ ID NO: 17668
  source 1..80: mol_type = other DNA

SEQ ID NO: 94685 - DNA, 80 bp, synthetic construct
  source 1..80: mol_type = other DNA
acttatctatattccttttagactagttcctggaaagattaagccctcatgtcctgaggcatccatcttaggtaacaatt

SEQ ID NO: 94686 - DNA, 80 bp, synthetic construct
  source 1..80: mol_type = other DNA
ttttgttcttgattttagatggtagtttcggtccttttggaaacatagcattatcctccagccagactgaactatcctac

SEQ ID NO: 94687 - DNA, 80 bp, synthetic construct
  source 1..80: mol_type = other DNA
ttacctgcttgctcctctttccccaagcccagtcttcacttggttcctcttttctaccatgagccagtttagatgtcatt

SEQ ID NO: 94688 - DNA, 80 bp, synthetic construct; identical to SEQ ID NO: 17669
  source 1..80: mol_type = other DNA

SEQ ID NO: 94689 - DNA, 80 bp, synthetic construct
  source 1..80: mol_type = other DNA
tgtatgtacacacttgcctgggcactgtggggagcagaaagaggactaatactgcccttgtgctgaggcacctacagtct

SEQ ID NO: 94690 - DNA, 80 bp, synthetic construct
  source 1..80: mol_type = other DNA
aaccacccagagcaactgtgaccaatggcgcttgtttttaaagaagtagaaacccaaattaggaagactgagcaaacctc

SEQ ID NO: 94691 - DNA, 80 bp, synthetic construct
  source 1..80: mol_type = other DNA
ttacttggtttcctcaggcaccttcactcatcttgtctaaaacttaattgctggtctatccctgccagatttgctgcttc

SEQ ID NO: 94692 - DNA, 80 bp, synthetic construct
  source 1..80: mol_type = other DNA
tccttatgtcaggggttggcctactttctggccttcttgatccagggcttcttttgttcaactcatactccaccctgttg

SEQ ID NO: 94693 - DNA, 80 bp, synthetic construct; identical to SEQ ID NO: 17670
  source 1..80: mol_type = other DNA

SEQ ID NO: 94694 - DNA, 80 bp, synthetic construct
  source 1..80: mol_type = other DNA
tgtaaacgagcaatatctgactcttctgagaatggattttgtttcaaacactggttacttactggaaaaggtgtctgggg

SEQ ID NO: 94695 - DNA, 80 bp, synthetic construct
  source 1..80: mol_type = other DNA
gtatgagtctacattaggtaattactcatgctcatttccaactcttgacagtctacgatcctttgtgtcaaagttaaaaa

SEQ ID NO: 94696 - DNA, 80 bp, synthetic construct; identical to SEQ ID NO: 17671
  source 1..80: mol_type = other DNA

SEQ ID NO: 94697 - DNA, 80 bp, synthetic construct
  source 1..80: mol_type = other DNA
accttgatcttctcaacccttgggtgtttaccttttccaagttaatgcctgttctttaatgttacattatcttgtagcaa

SEQ ID NO: 94698 - DNA, 80 bp, synthetic construct
  source 1..80: mol_type = other DNA
gtcagactgggaaatggatgtgcccattactcagccttaaaaacgaggaaggagatcatctgttaaaaataaaactcatc

SEQ ID NO: 94699 - DNA, 80 bp, synthetic construct
  source 1..80: mol_type = other DNA
ccctgctaaaagataaaagccagtatgcatctcagctacttgtctgctgtggtcctgatattcttccatctaggttgctg

SEQ ID NO: 94700 - DNA, 80 bp, synthetic construct; identical to SEQ ID NO: 17672
  source 1..80: mol_type = other DNA

SEQ ID NO: 94701 - DNA, 80 bp, synthetic construct
  source 1..80: mol_type = other DNA
gcgctaccacacctggctaattttttagtattttactagagacagggtttcaccatgttggccaggatggtctcgatctc

SEQ ID NO: 94702 - DNA, 80 bp, synthetic construct
  source 1..80: mol_type = other DNA
gacggatgcttctgcaattgagtggtctcatttttcccatgtctgtcgaaagattactctttcatgaccaccatttctat

SEQ ID NO: 94703 - DNA, 80 bp, synthetic construct
  source 1..80: mol_type = other DNA
aagttgccagccattctcttcccttaagacattgaacttgcttttccacatagcagatggaatagctgagaaaagagatt

SEQ ID NO: 94704 - DNA, 80 bp, synthetic construct
  source 1..80: mol_type = other DNA
aggacagacctgtgattggactgtctggtctctcatggttctttttctccatgatttatgactttgattatgatttcttt

SEQ ID NO: 94705 - DNA, 80 bp, synthetic construct; identical to SEQ ID NO: 17673
  source 1..80: mol_type = other DNA

SEQ ID NO: 94706 - DNA, 80 bp, synthetic construct
  source 1..80: mol_type = other DNA
gtggagagtgcagagaaaaggttttattaatgatttttgctcacagtgtccttccccattggtttgttattgcagatgaa

SEQ ID NO: 94707 - DNA, 80 bp, synthetic construct
  source 1..80: mol_type = other DNA
agctttccagtttttccctgagcaggcgcctagctcatcactggggcgctgtagctgtatagtagagaagggggcacatt

SEQ ID NO: 94708 - DNA, 80 bp, synthetic construct
  source 1..80: mol_type = other DNA
acccattgttaccagcctgattgcttctggctttatgcctttcagtttatgaataaaaacttcatgaataaaaattactg

SEQ ID NO: 94709 - DNA, 80 bp, synthetic construct; identical to SEQ ID NO: 17674
  source 1..80: mol_type = other DNA

SEQ ID NO: 94710 - DNA, 80 bp, synthetic construct
  source 1..80: mol_type = other DNA
agcaggaccatatgcttttgtcagtaactcctaaaagacacctgaacttcaaagtaagtcaatgtctaattcttacccca

SEQ ID NO: 94711 - DNA, 80 bp, synthetic construct
  source 1..80: mol_type = other DNA
agtaatctaaataatcacatgggaatccctgctggttgtaagttcaatggtaattcccaatgatcatgagcatctaagtg

SEQ ID NO: 94712 - DNA, 80 bp, synthetic construct
  source 1..80: mol_type = other DNA
gtatgtttttcatgattcttagcaaagtgaattttaatgatagctgagtgtaggccaaatggatattagactgggggcat

SEQ ID NO: 94713 - DNA, 80 bp, synthetic construct; identical to SEQ ID NO: 17675
  source 1..80: mol_type = other DNA

SEQ ID NO: 94714 - DNA, 80 bp, synthetic construct
  source 1..80: mol_type = other DNA
gctgcagtacaatgacgcagtctcggctcactgcaacctctacctcctgggttcaagagattctcctgcctcagcctccc

SEQ ID NO: 94715 - DNA, 80 bp, synthetic construct
  source 1..80: mol_type = other DNA
gccaccacgcccagcgctctaagccgtattctatcacggacctaaatattggcagtaggcaccaagaaaaaagaaataaa

SEQ ID NO: 94716 - DNA, 80 bp, synthetic construct
  source 1..80: mol_type = other DNA
tgccttaatcctagctctgctcacttcttggggctattgattaatttgtttcagaaacaccataggaagtgaatattacc

SEQ ID NO: 94717 - DNA, 80 bp, synthetic construct; identical to SEQ ID NO: 17676
  source 1..80: mol_type = other DNA

SEQ ID NO: 94718 - DNA, 80 bp, synthetic construct
  source 1..80: mol_type = other DNA
attctacctctggaaggtcagcccctttggttctgtaatggaaaaaaggcttcagaacagaactatacttgagtgatgaa

SEQ ID NO: 94719 - DNA, 80 bp, synthetic construct
  source 1..80: mol_type = other DNA
atagtttcaaaggaaggctaaagagagagtcttataaagcagtagttcttccaaaagtttaaaatctgctctcattaaga

SEQ ID NO: 94720 - DNA, 80 bp, synthetic construct
  source 1..80: mol_type = other DNA
cctgtagtcccagctactcgggaggctgaggcaggagaatcacttgaacctggaagatggaggttgcagtgagccaagat

SEQ ID NO: 94721 - DNA, 80 bp, synthetic construct
  source 1..80: mol_type = other DNA
accagcctgaccaacatggtgaaactccatgtctactaaaaatacaaaaattagccaggcatggtgatgcatgcctgtaa

SEQ ID NO: 94722 - DNA, 80 bp, synthetic construct; identical to SEQ ID NO: 17677
  source 1..80: mol_type = other DNA

SEQ ID NO: 94723 - DNA, 80 bp, synthetic construct
  source 1..80: mol_type = other DNA
gaggatgaaaaccttatcagtttcacttatgttcttactgcaggtcagagtggctccccagtttcatggccagttgcagt

SEQ ID NO: 94724 - DNA, 80 bp, synthetic construct; identical to SEQ ID NO: 17678
  source 1..80: mol_type = other DNA

SEQ ID NO: 94725 - DNA, 80 bp, synthetic construct
  source 1..80: mol_type = other DNA
aaaccccgtccctactaaaaatacaaaattagccgggcatggtggcacatgcctgtaatcccagctacttgggagactga

SEQ ID NO: 94726 - DNA, 80 bp, synthetic construct
  source 1..80: mol_type = other DNA
aatgaaaccaagggattagaaagttgcactgcttgagaaacatctcaggtttcattttctctctaagaatgtaaaatcac

SEQ ID NO: 94727 - DNA, 80 bp, synthetic construct
  source 1..80: mol_type = other DNA
taaggcatttttatgactgagcaaggcaaaatttactgcttttatgaatccggtgactgttgacatctgtgagaggagag

SEQ ID NO: 94728 - DNA, 80 bp, synthetic construct; identical to SEQ ID NO: 17679
  source 1..80: mol_type = other DNA

SEQ ID NO: 94729 - DNA, 80 bp, synthetic construct
  source 1..80: mol_type = other DNA
acacagcctctgttgtaactacagagaccgtttttactcttcagcattgatcatgaagagaagagataaggggtttttat

SEQ ID NO: 94730 - DNA, 80 bp, synthetic construct
  source 1..80: mol_type = other DNA
cacttccactcacagagtatcatgtctcccttgttgctcctttcaggtaaagaagcagattttagatgaaaagatctact

SEQ ID NO: 94731 - DNA, 80 bp, synthetic construct
  source 1..80: mol_type = other DNA
gaaagtgagatgttatgggacttgtggacttgaagaaccactgtcactgttccagtgtttgtataatcttgtgtgtgtat

SEQ ID NO: 94732 - DNA, 80 bp, synthetic construct; identical to SEQ ID NO: 17680
  source 1..80: mol_type = other DNA

SEQ ID NO: 94733 - DNA, 80 bp, synthetic construct
  source 1..80: mol_type = other DNA
ctggttagctgaaaatcgttcacttccgttaaatcactatagaccttttttttttttttacaagaccgatgagagggtta

SEQ ID NO: 94734 - DNA, 80 bp, synthetic construct; identical to SEQ ID NO: 17681
  source 1..80: mol_type = other DNA

SEQ ID NO: 94735 - DNA, 80 bp, synthetic construct
  source 1..80: mol_type = other DNA
tgaacaaaggtctctggttttcctaggcagaggaccctgcggacttccgcagcgtttgtgtccctgggtacttgagatta

SEQ ID NO: 94736 - DNA, 80 bp, synthetic construct
  source 1..80: mol_type = other DNA
gcagaagaatttttcttagtacagaacaaaatgaaaagtctcccgtgtctacttctttctacacagacacggcaaccatc

SEQ ID NO: 94737 - DNA, 80 bp, synthetic construct
  source 1..80: mol_type = other DNA
ggcgcccctcacctcccggatggggcggctggccgggcggggggctgaccccccaacctccctcccggacggggcggctg

SEQ ID NO: 94738 - DNA, 80 bp, synthetic construct; identical to SEQ ID NO: 17682
  source 1..80: mol_type = other DNA

SEQ ID NO: 94739 - DNA, 80 bp, synthetic construct
  source 1..80: mol_type = other DNA
atgtgatggcggccgggaagaggcgctcctcacttcccagatgggatggcggctgggcagagacgctcctcactttccag

SEQ ID NO: 94740 - DNA, 80 bp, synthetic construct
  source 1..80: mol_type = other DNA
ccgagatcacgccactgcactccagcctgggcaccattgagcactgagtgaacgagactccgtctgcaatcccggcacct

SEQ ID NO: 94741 - DNA, 80 bp, synthetic construct
  source 1..80: mol_type = other DNA
aggcagggaggttgcagtgagccgagatggcagcagtatagtccagctttggctcggcatgagagggagaccgtggaaag

SEQ ID NO: 94742 - DNA, 80 bp, synthetic construct; identical to SEQ ID NO: 17683
  source 1..80: mol_type = other DNA

SEQ ID NO: 94743 - DNA, 80 bp, synthetic construct
  source 1..80: mol_type = other DNA
tcagtgatttgcccaagatcattcagacaatcttgggcaaagctaagagcagaagggtagaattcatggctttgagattg

SEQ ID NO: 94744 - DNA, 80 bp, synthetic construct; identical to SEQ ID NO: 17684
  source 1..80: mol_type = other DNA

SEQ ID NO: 94745 - DNA, 80 bp, synthetic construct
  source 1..80: mol_type = other DNA
aaaaaattacttttcagtgaaccagcagatgtttgcttaaacaggtttcactgtaggaaagccctgctaatttggatcgt

SEQ ID NO: 94746 - DNA, 80 bp, synthetic construct
  source 1..80: mol_type = other DNA
acttccagtttctaggactgctggttaatagttaaaggatatctgattataatattaataagatcttacatgcccatagt

SEQ ID NO: 94747 - DNA, 80 bp, synthetic construct
  source 1..80: mol_type = other DNA
atgttaagcctatttttatgaaatttttagcccacttctcgatggagaggatttcaggccaaatagaatgagtggagctg

SEQ ID NO: 94748 - DNA, 80 bp, synthetic construct
  source 1..80: mol_type = other DNA
tggttccttccattatattcagcttgttttcttccacaacctttctgaaacagaaaggaactttagaagtgtggaaggga

SEQ ID NO: 94749 - DNA, 80 bp, synthetic construct; identical to SEQ ID NO: 17685
  source 1..80: mol_type = other DNA

SEQ ID NO: 94750 - DNA, 80 bp, synthetic construct
  source 1..80: mol_type = other DNA
aacctgggaggtggaggttacagtgagctgagattgagccattgcactccagcctgggtgacaaagtgagactccatctc

SEQ ID NO: 94751 - DNA, 80 bp, synthetic construct
  source 1..80: mol_type = other DNA
atttatgaatctcatgttgctgtgtgcagactcctagtgatcagaagagagaaaagaattgtgggaagggaagcttagtt

SEQ ID NO: 94752 - DNA, 80 bp, synthetic construct; identical to SEQ ID NO: 17686
  source 1..80: mol_type = other DNA

SEQ ID NO: 94753 - DNA, 80 bp, synthetic construct
  source 1..80: mol_type = other DNA
tccttttacagaatggtatttttcttcccactcagcatctactttgagatgtatccatgttgtgtgtatagatgtagctc

SEQ ID NO: 94754 - DNA, 80 bp, synthetic construct
  source 1..80: mol_type = other DNA
caaatgaagatccttttatgtgattccttatgtacatgtgcaaatgctttttccccttaaggtaggtgcctacgaaaata

SEQ ID NO: 94755 - DNA, 80 bp, synthetic construct
  source 1..80: mol_type = other DNA
gtgagactccatctcaaaataaataaataaataaataaataaataaataaagtaaaaaaattaaaaaaggtaggtgtcta

SEQ ID NO: 94756 - DNA, 80 bp, synthetic construct
  source 1..80: mol_type = other DNA
ggtaatcaagaaaaagaaaaaacaacaataaggcaacatttcaaacccataagattggcagggattactagattgggtaa

SEQ ID NO: 94757 - DNA, 80 bp, synthetic construct; identical to SEQ ID NO: 17687
  source 1..80: mol_type = other DNA

SEQ ID NO: 94758 - DNA, 80 bp, synthetic construct
  source 1..80: mol_type = other DNA
atttttgtgttttttgtagagacagggtttccccttgttgcccaggcaggtcccaaactccagggcacaaactctatacc

SEQ ID NO: 94759 - DNA, 80 bp, synthetic construct
  source 1..80: mol_type = other DNA
ttgtttttctattggtgaaacagatgcaatggacatccttgaatatgcatctttgggcatatatggataatatctctcta

SEQ ID NO: 94760 - DNA, 80 bp, synthetic construct; identical to SEQ ID NO: 17688
  source 1..80: mol_type = other DNA

SEQ ID NO: 94761 - DNA, 80 bp, synthetic construct
  source 1..80: mol_type = other DNA
aggatagcttgagcccaggagttcgagacctgcctgggcaatatagcgagacccctttctccagaaaaaggcaaaaacaa

SEQ ID NO: 94762 - DNA, 80 bp, synthetic construct
  source 1..80: mol_type = other DNA
tggggtgacagagtgagactctgtctgaaaaataaaataaaaataaaaaaggagccactggtacaaaaaaaaaaaagaaa

SEQ ID NO: 94763 - DNA, 80 bp, synthetic construct
  source 1..80: mol_type = other DNA
cacattgcacaccgtatcaaaacatctcaggtaccacacaaatatatatatacctactatgtacccacaaacattaaaaa

SEQ ID NO: 94764 - DNA, 80 bp, synthetic construct
  source 1..80: mol_type = other DNA
taatgtaaattttatgtatataaattttatctcaataaaaaatttaaatagatatagccaaatcaccctccaaaactgat

SEQ ID NO: 94765 - DNA, 80 bp, synthetic construct; identical to SEQ ID NO: 17689
  source 1..80: mol_type = other DNA

SEQ ID NO: 94766 - DNA, 80 bp, synthetic construct
  source 1..80: mol_type = other DNA
tcttcctttcttcctttcccaggttcaagtgatccatccgcctcagcctccagaggagccgggactataggcatgcgcca

SEQ ID NO: 94767 - DNA, 80 bp, synthetic construct
  source 1..80: mol_type = other DNA
ccgattgatttgtagatgctccatgtattatgagttatcaaccttttgtctattttacgtataggactggtcaatctttt

SEQ ID NO: 94768 - DNA, 80 bp, synthetic construct
  source 1..80: mol_type = other DNA
actggtgtgtgggtatagtagggagggggtctgtcttttttctatatatgtagtaatctaacctttatgtttttgtgaaa

SEQ ID NO: 94769 - DNA, 80 bp, synthetic construct
  source 1..80: mol_type = other DNA
caggttttctgggtctgaattttaataatttaggggattgtctttaatgcaagagtaccaaattaggtacaggcatatga

SEQ ID NO: 94770 - DNA, 80 bp, synthetic construct; identical to SEQ ID NO: 17690
  source 1..80: mol_type = other DNA

SEQ ID NO: 94771 - DNA, 80 bp, synthetic construct
  source 1..80: mol_type = other DNA
cttgcatgcctttggaacctgaatttacagctttaactttgcatatctgcttgcttttgcattagagcttggtcagcact

SEQ ID NO: 94772 - DNA, 80 bp, synthetic construct
  source 1..80: mol_type = other DNA
taatacctgactttcaccataagccatgtgctgtgcgaaatgcttacctgtattgttttacttcatcctcatcatcccct

SEQ ID NO: 94773 - DNA, 80 bp, synthetic construct; identical to SEQ ID NO: 17691
  source 1..80: mol_type = other DNA

SEQ ID NO: 94774 - DNA, 80 bp, synthetic construct
  source 1..80: mol_type = other DNA
ccgggttcaagcgattctcctgcctcagcctcccgaatagctgggattacaggcatgtaccaccacgcctggctgatttt

SEQ ID NO: 94775 - DNA, 80 bp, synthetic construct
  source 1..80: mol_type = other DNA
cccagccaagcatagttttaaaaactttgctggtcttatttaattaaatccctgtaagagtcctgcaagataaatactat

SEQ ID NO: 94776 - DNA, 80 bp, synthetic construct
  source 1..80: mol_type = other DNA
cttagtacagttacgacttactgcatcacatctctgagcctcccagaaatagagagataccaaggcctttcatttataat

SEQ ID NO: 94777 - DNA, 80 bp, synthetic construct; identical to SEQ ID NO: 17692
  source 1..80: mol_type = other DNA

SEQ ID NO: 94778 - DNA, 80 bp, synthetic construct
  source 1..80: mol_type = other DNA
cacctgtaatcccagttgctcaggatactgaggcaggagaattgcttgaacctgggaggtggaggttgcggtgagctgag

SEQ ID NO: 94779 - DNA, 80 bp, synthetic construct
  source 1..80: mol_type = other DNA
ttcatggggcttttacagttaaggtgatatgggaatgagacatgatttaaagttaatgatgaatatcttctttcactcct

SEQ ID NO: 94780 - DNA, 80 bp, synthetic construct
  source 1..80: mol_type = other DNA
cttgtgcctgacctttgttttttcactgttggtggctaaaagaataaatgtttatagattatactgaagtactgagcttt

SEQ ID NO: 94781 - DNA, 80 bp, synthetic construct
  source 1..80: mol_type = other DNA
tttttaatcagagaataaatttccaagtcattgtccccggagggataaattaaaatgcagggcctatttccaaccgcatt

SEQ ID NO: 94782 - DNA, 80 bp, synthetic construct; identical to SEQ ID NO: 17693
  source 1..80: mol_type = other DNA

SEQ ID NO: 94783 - DNA, 80 bp, synthetic construct
  source 1..80: mol_type = other DNA
acccatccatctcttacaggattatgcaactcagttcatagatataatcagctttgtattttcattcaaggataacaaac

SEQ ID NO: 94784 - DNA, 80 bp, synthetic construct
  source 1..80: mol_type = other DNA
gtgttcacaagcggggatttttggcccaagaggaattgcttccaaaaagggtaagagattaaattcccttttcaggaaga

SEQ ID NO: 94785 - DNA, 80 bp, synthetic construct; identical to SEQ ID NO: 17694
  source 1..80: mol_type = other DNA

SEQ ID NO: 94786 - DNA, 80 bp, synthetic construct
  source 1..80: mol_type = other DNA
tcccttttgctcctgccgattttacagccctcactcatctgtcactgggtaataaaggcccgtttctcacctctcactct

SEQ ID NO: 94787 - DNA, 80 bp, synthetic construct
  source 1..80: mol_type = other DNA
atgcagctttctgagttgctcctccaatagaatggtgccttatttacacgccctctctctgtgtgactatctccctgggt

SEQ ID NO: 94788 - DNA, 80 bp, synthetic construct
  source 1..80: mol_type = other DNA
catgtgtaggttttttattttgctctattttttggtaggtaataaatctgtatcagatgactccggaaatgtgggaggag

SEQ ID NO: 94789 - DNA, 80 bp, synthetic construct; identical to SEQ ID NO: 17695
  source 1..80: mol_type = other DNA

SEQ ID NO: 94790 - DNA, 80 bp, synthetic construct
  source 1..80: mol_type = other DNA
tggcgccatctcagctcactgcagccttgacctcctgggttcaagcaaacctcctgcctcagcacccccagtagctggca

SEQ ID NO: 94791 - DNA, 80 bp, synthetic construct
  source 1..80: mol_type = other DNA
tgcctagcctgaattttaagaattctattgtatggctatcccattgcttttgcatccatccctttattgatggcatttga

SEQ ID NO: 94792 - DNA, 80 bp, synthetic construct
  source 1..80: mol_type = other DNA
gatctcggctcactgcatctccgcctcccaggttcacgccattctcctgcctcagcctcccgagtagctgggactacagg

SEQ ID NO: 94793 - DNA, 80 bp, synthetic construct
  source 1..80: mol_type = other DNA
tattctttaaaacaagagttgttgggacaaaggatgtgagcattttgcattttgccaggtaccaccaaattgttctccaa

SEQ ID NO: 94794 - DNA, 80 bp, synthetic construct; identical to SEQ ID NO: 17696
  source 1..80: mol_type = other DNA

SEQ ID NO: 94795 - DNA, 80 bp, synthetic construct
  source 1..80: mol_type = other DNA
atacaacttgatcaattattgtaaggtgaaaacaccagaggaagaaataacctgtgtctccctacccccaattccccttt

SEQ ID NO: 94796 - DNA, 80 bp, synthetic construct
  source 1..80: mol_type = other DNA
gtatagacttccactgtattagtatattaaaaattatttattcattctactaatgatggacagttaggttgttgggttgt

SEQ ID NO: 94797 - DNA, 80 bp, synthetic construct; identical to SEQ ID NO: 17697
  source 1..80: mol_type = other DNA

SEQ ID NO: 94798 - DNA, 80 bp, synthetic construct
  source 1..80: mol_type = other DNA
cagagagagctgtttcatttccagaaccttccaggtaaagaaagtacacaaaggaaaagcaagaacttaaataaaattcc

SEQ ID NO: 94799 - DNA, 80 bp, synthetic construct
  source 1..80: mol_type = other DNA
tgagtctgttctctgactatcttttgatggggatgggaaattctgcttgacctcagtgtgtttaatagactcagggccgg

SEQ ID NO: 94800 - DNA, 80 bp, synthetic construct
  source 1..80: mol_type = other DNA
gctgaaatggaatatctgaagatagctcaggacctggagatgtacggtgtgaactactttgcaatccgggtgtgttgaaa

SEQ ID NO: 94801 - DNA, 80 bp, synthetic construct; identical to SEQ ID NO: 17698
  source 1..80: mol_type = other DNA

SEQ ID NO: 94802 - DNA, 80 bp, synthetic construct
  source 1..80: mol_type = other DNA
gattactgatttgtttgggattctcactatgaggctaattggttttctattcagactattaatagtctgctgtctgctgg

SEQ ID NO: 94803 - DNA, 80 bp, synthetic construct
  source 1..80: mol_type = other DNA
ctgcagatgagtagatgttaaaacaatgaggcgggtccacctttattttcatagtcatgctttgctttcccttattgggt

SEQ ID NO: 94804 - DNA, 80 bp, synthetic construct
  source 1..80: mol_type = other DNA
ttgctaattgcttggtttctttaaggtcaaactaatgtaacacatttctgtggttttgtcaactcaactcctcttgcccc

SEQ ID NO: 94805 - DNA, 80 bp, synthetic construct; identical to SEQ ID NO: 17699
  source 1..80: mol_type = other DNA

SEQ ID NO: 94806 - DNA, 80 bp, synthetic construct
  source 1..80: mol_type = other DNA
aaatctcaccattaactaaggaagatgtatgcttaaaacagtttaaaaggggctgcttgagtcctcacctctctctctgt

SEQ ID NO: 94807 - DNA, 80 bp, synthetic construct
  source 1..80: mol_type = other DNA
cattttccaaaatgtactgcagatgtaaaagtacaaagcctcacttctattaatgcagtagctttcatggctttgctgac

SEQ ID NO: 94808 - DNA, 80 bp, synthetic construct
  source 1..80: mol_type = other DNA
cttcacagtcccagtaccttctcagtttgcagacctgtttttctgcccttgagtcttggttcagtttccattatcgtcaa

SEQ ID NO: 94809 - DNA, 80 bp, synthetic construct
  source 1..80: mol_type = other DNA
tctgactgctggccaggaccgctgtcaggggcagagcataagtacggcttttagacaactttgttgatgaatagaattct

SEQ ID NO: 94810 - DNA, 80 bp, synthetic construct; identical to SEQ ID NO: 17700
  source 1..80: mol_type = other DNA

SEQ ID NO: 94811 - DNA, 80 bp, synthetic construct
  source 1..80: mol_type = other DNA
gctcagcctcctgagtagctgggattacaggcgcgtgccaccatgcccggctaatttttttgtgtgtatttttagtagag

SEQ ID NO: 94812 - DNA, 80 bp, synthetic construct
  source 1..80: mol_type = other DNA
gggctttaattctatacctatgatagcctgcttatttaaccagagggaacaacacttatgttactcttcctttagccatc

SEQ ID NO: 94813 - DNA, 80 bp, synthetic construct; identical to SEQ ID NO: 17701
  source 1..80: mol_type = other DNA

SEQ ID NO: 94814 - DNA, 80 bp, synthetic construct
  source 1..80: mol_type = other DNA
actgacccccaagatctccttcccgtggaatgaaatccgaaacatctcgtacagtgacaaggaggtaggacatgtgtgta

SEQ ID NO: 94815 - DNA, 80 bp, synthetic construct
  source 1..80: mol_type = other DNA
accccactatgactaataggaaactgggaagctcaactggccagggagaaaccccaaagaatagtgaacaaaaacagtaa

SEQ ID NO: 94816 - DNA, 80 bp, synthetic construct
  source 1..80: mol_type = other DNA
gtgtgcgccacagcacctggcttaaattctcttcgtattttaagtgtggtctttattgagctttctttctgtgtccggtg

SEQ ID NO: 94817 - DNA, 80 bp, synthetic construct; identical to SEQ ID NO: 17702
  source 1..80: mol_type = other DNA

SEQ ID NO: 94818 - DNA, 80 bp, synthetic construct
  source 1..80: mol_type = other DNA
gtgatcctctcacctcagcctcccaggtaacagactacaggcgtgtgccaccacatctggctaattttttgtagagatgg

SEQ ID NO: 94819 - DNA, 80 bp, synthetic construct
  source 1..80: mol_type = other DNA
atttcatgggggaaacaaagatgtagaaaatccagtcttagcattcaaggaagtcaagtaactactcacctgctataata

SEQ ID NO: 94820 - DNA, 80 bp, synthetic construct
  source 1..80: mol_type = other DNA
ttgtcaatatctctgtgtcacatcaggaagcagagacacagaaggatcaagtgacctgtgtctgagtgaagtagcagaga

SEQ ID NO: 94821 - DNA, 80 bp, synthetic construct; identical to SEQ ID NO: 17703
  source 1..80: mol_type = other DNA

SEQ ID NO: 94822 - DNA, 80 bp, synthetic construct
  source 1..80: mol_type = other DNA
attgaaagttccacatgacataaagctgtatgtgtgccaccgtatggtagtttttcatctcccaatttcataaagtctgt

SEQ ID NO: 94823 - DNA, 80 bp, synthetic construct
  source 1..80: mol_type = other DNA
catgcagtaagcagaccccaagctgacttgacataaaagaagtagtcttggtagttatgcatgacagccatgctgtcaaa

SEQ ID NO: 94824 - DNA, 80 bp, synthetic construct
  source 1..80: mol_type = other DNA
gcaaagccaaaaataagctcacaaaattcatgaatagcagcctacacaagagcaacactgcttctaagttaacttggctg

SEQ ID NO: 94825 - DNA, 80 bp, synthetic construct
  source 1..80: mol_type = other DNA
aatggatatccattttgtaagtgcatcttggaaatctaggatctgtttggtcttatcgggagtggttgagagcagcagcc

SEQ ID NO: 94826 - DNA, 80 bp, synthetic construct; identical to SEQ ID NO: 17704
  source 1..80: mol_type = other DNA

SEQ ID NO: 94827 - DNA, 80 bp, synthetic construct
  source 1..80: mol_type = other DNA
tctgacttttattctcactgccagcccctacacccaccccttcctccctctcaggctaaacctattatatcatcttagtc

SEQ ID NO: 94828 - DNA, 80 bp, synthetic construct
  source 1..80: mol_type = other DNA
ctctcttgcttatggtggatctactctgaacctccacatatttgtgatttgtaccacccagtgaagcactaatatttgat

SEQ ID NO: 94829 - DNA, 80 bp, synthetic construct; identical to SEQ ID NO: 17705
  source 1..80: mol_type = other DNA

SEQ ID NO: 94830 - DNA, 80 bp, synthetic construct
  source 1..80: mol_type = other DNA
atttgtggaatttccaattgctggtaacattccaggctgtcggactgaaactgtgttctgcttcattcttccagtttact

SEQ ID NO: 94831 - DNA, 80 bp, synthetic construct
  source 1..80: mol_type = other DNA
ttgaatacttctttttaaaggatatcagagtgacatcttgtgaagtatagaatggtatctcacttggcgcatactttctg

SEQ ID NO: 94832 - DNA, 80 bp, synthetic construct
  source 1..80: mol_type = other DNA
ggctcagcctcccaagtagctgggattacaggcatgagacaccatgcccagctaatttttgtattttcagtagagacggg

SEQ ID NO: 94833 - DNA, 80 bp, synthetic construct
  source 1..80: mol_type = other DNA
ggataagtgtaacatatgaattataaagaataacaaaagtgaatagctgtgtacccacaaccccactttaagaaatagca

SEQ ID NO: 94834 - DNA, 80 bp, synthetic construct; identical to SEQ ID NO: 17706
  source 1..80: mol_type = other DNA

SEQ ID NO: 94835 - DNA, 80 bp, synthetic construct
  source 1..80: mol_type = other DNA
ctgttcattctcacctctgtagcactctgttatatatttttctgattcttctgttaatggataattaagtgctttttact

SEQ ID NO: 94836 - DNA, 80 bp, synthetic construct; identical to SEQ ID NO: 17707
  source 1..80: mol_type = other DNA

SEQ ID NO: 94837 - DNA, 80 bp, synthetic construct
  source 1..80: mol_type = other DNA
ttaaataataaaaaagagggccaggcacagtggctcaactcctgtaatcccagcactttgggaggctgaggcaggcggat

SEQ ID NO: 94838 - DNA, 80 bp, synthetic construct
  source 1..80: mol_type = other DNA
cagtgagccgagatcatgccattgcactccagcctgggcaacaagagtaaaacttcgtctccaaaaaaaaaataaataca

SEQ ID NO: 94839 - DNA, 80 bp, synthetic construct
  source 1..80: mol_type = other DNA
tacagacccaacagtagtgggtgaagtttgttttttgctatccttaatacttgtattatcagccttttaaaatttttgcc

SEQ ID NO: 94840 - DNA, 80 bp, synthetic construct; identical to SEQ ID NO: 17708
  source 1..80: mol_type = other DNA

SEQ ID NO: 94841 - DNA, 80 bp, synthetic construct
  source 1..80: mol_type = other DNA
aggctggtcttgaactcctgggctcaaggatcctctcaccttggcctccgaaagtgctgggattacaggtgtgagctact

SEQ ID NO: 94842 - DNA, 80 bp, synthetic construct
  source 1..80: mol_type = other DNA
atgatcataaagatattcttctatattgtcttctaaaagtttcaagggcttaatctttgcatttaagtatttaatccttc

SEQ ID NO: 94843 - DNA, 80 bp, synthetic construct
  source 1..80: mol_type = other DNA
catggtgaagtgtcctccagtcctctcttgatttatgatttttacctcctggcatatctgaggcgccttcattttgcatg

SEQ ID NO: 94844 - DNA, 80 bp, synthetic construct
  source 1..80: mol_type = other DNA
tgcttctgtggccacagattctccagctatgtatcgggaaccatgatctatttatgaggagaaggaaagccgattctttg

SEQ ID NO: 94845 - DNA, 80 bp, synthetic construct; identical to SEQ ID NO: 17709
  source 1..80: mol_type = other DNA

SEQ ID NO: 94846 - DNA, 80 bp, synthetic construct
  source 1..80: mol_type = other DNA
agccttctccttttctaattagatggtgatagaatgccaggtggcatttcagtgcttgcggctggaatgctaatttgact

SEQ ID NO: 94847 - DNA, 80 bp, synthetic construct
  source 1..80: mol_type = other DNA
tgctgagaatatcaattgtgtttttggataaactactagatagagtagcagcagctgcagttggctgcccgcaggacttg

SEQ ID NO: 94848 - DNA, 80 bp, synthetic construct; identical to SEQ ID NO: 17710
  source 1..80: mol_type = other DNA

SEQ ID NO: 94849 - DNA, 80 bp, synthetic construct
  source 1..80: mol_type = other DNA
taaataagaaggaggaggagagctttctttgacctttttcttagcagagcaaagcttagaagtaagaaatctgaaagtgt

SEQ ID NO: 94850 - DNA, 80 bp, synthetic construct
  source 1..80: mol_type = other DNA
gacactgaccttggagccagatctgaaatttagaatgtgagtaagtcaatgacttaccttccagaccttagttttctcat

SEQ ID NO: 94851 - DNA, 80 bp, synthetic construct
  source 1..80: mol_type = other DNA
agaggtctcagggaaagtacagggccaggaactgaaggagattacctggcttttttttttaataaaagggtcttgttctg

SEQ ID NO: 94852 - DNA, 80 bp, synthetic construct
  source 1..80: mol_type = other DNA
ctatgttacccaggctgatctcaaactcctgggctcaaacattcctcctacttcagccccccaaagtgctagggttacag

SEQ ID NO: 94853 - DNA, 80 bp, synthetic construct; identical to SEQ ID NO: 17711
  source 1..80: mol_type = other DNA

SEQ ID NO: 94854 - DNA, 80 bp, synthetic construct
  source 1..80: mol_type = other DNA
ttctgctttttgaactcagttagtaccctgggatcacagaggaatggcactgtcttgtgcttgttccccttattaagctc

SEQ ID NO: 94855 - DNA, 80 bp, synthetic construct
  source 1..80: mol_type = other DNA
ctgtggctgttgcagctcccccctgtgaaatacaatgtgtgaactattgatgcatcacgtagaatgattccatcttctct

SEQ ID NO: 94856 - DNA, 80 bp, synthetic construct; identical to SEQ ID NO: 17712
  source 1..80: mol_type = other DNA

SEQ ID NO: 94857 - DNA, 80 bp, synthetic construct
  source 1..80: mol_type = other DNA
atcccagcactttgggaggccaaggtgggtggatcataaggtcaggagttcaagaccagcctggccaatatggtgaaacc

SEQ ID NO: 94858 - DNA, 80 bp, synthetic construct
  source 1..80: mol_type = other DNA
aaaactctgtcccctccaccaaaaaaaaagaatgcctttttctatccgggtcaagactcaacaggtttttattgtttgtt

SEQ ID NO: 94859 - DNA, 80 bp, synthetic construct
  source 1..80: mol_type = other DNA
tttgggcccttgtggcaccctaggtctcgagccctgtgattcaatgactgtttttcttcacccctcgcagatggagcggc

SEQ ID NO: 94860 - DNA, 80 bp, synthetic construct
  source 1..80: mol_type = other DNA
ttggcttttctggagcttggtctcctgaaaaccatgagttagcagcgtttgctttgaaatacttaatttcagctttgaaa

SEQ ID NO: 94861 - DNA, 80 bp, synthetic construct; identical to SEQ ID NO: 17713
  source 1..80: mol_type = other DNA

SEQ ID NO: 94862 - DNA, 80 bp, synthetic construct
  source 1..80: mol_type = other DNA
gctaatttttgtatttttagtagagatggggtttccccatgttggtcaggctggtttcgaactcctgacctcgtgatctg

SEQ ID NO: 94863 - DNA, 80 bp, synthetic construct
  source 1..80: mol_type = other DNA
agcgattctcctgcctcagcctcccaagtagctgggattacaggtgcgcgccaacacatccagcttttttttttttgtat

SEQ ID NO: 94864 - DNA, 80 bp, synthetic construct; identical to SEQ ID NO: 17714
  source 1..80: mol_type = other DNA

SEQ ID NO: 94865 - DNA, 80 bp, synthetic construct
  source 1..80: mol_type = other DNA
cagtgttcaaggcagatctgggcgggagaacagcacatgatcccacttcagctaagagcactgtgccctccagatgcggt

SEQ ID NO: 94866 - DNA, 80 bp, synthetic construct
  source 1..80: mol_type = other DNA
ttcgcacggaggaggagaagcgcctgatggagcagaaggtgctggaagccgaggtgctggcactgaagatggctgaggag

SEQ ID NO: 94867 - DNA, 80 bp, synthetic construct
  source 1..80: mol_type = other DNA
tggtgctttatccattttggggctggcgctactggttgggcacaggaactcagttccccctccaggggggcctctctggt

SEQ ID NO: 94868 - DNA, 80 bp, synthetic construct
  source 1..80: mol_type = other DNA
taaaaaaagtgtggttcttttctgctttcattcagtggggctgcaggagaacagcagctgcctacctttaaagggaagct

SEQ ID NO: 94869 - DNA, 80 bp, synthetic construct; identical to SEQ ID NO: 17715
  source 1..80: mol_type = other DNA

SEQ ID NO: 94870 - DNA, 80 bp, synthetic construct
  source 1..80: mol_type = other DNA
ccactggtgttttatccgggggctgtgaagacgcagttcttgcacattctgccctttgcgatccaatataagaactttga

SEQ ID NO: 94871 - DNA, 80 bp, synthetic construct; identical to SEQ ID NO: 17716
  source 1..80: mol_type = other DNA

SEQ ID NO: 94872 - DNA, 80 bp, synthetic construct
  source 1..80: mol_type = other DNA
agattgccaccaagcccacgtacccggtgagcctgggggccaccagctggggctgccttagtcctggtgatgttctcttt

SEQ ID NO: 94873 - DNA, 80 bp, synthetic construct
  source 1..80: mol_type = other DNA
ggataacaggcaacagggccttttccagctctggaatgtttttctttttctaagtaatatagtcccaaattatcctcaag

SEQ ID NO: 94874 - DNA, 80 bp, synthetic construct
  source 1..80: mol_type = other DNA
gagagtcagacttccattaaatggggtcacaaaatgaatagaagcctctttccttcctttcttctgtgcattcagtttgg

SEQ ID NO: 94875 - DNA, 80 bp, synthetic construct; identical to SEQ ID NO: 17717
  source 1..80: mol_type = other DNA

SEQ ID NO: 94876 - DNA, 80 bp, synthetic construct
  source 1..80: mol_type = other DNA
cacaaagggcaccagaggcacaagctgcccagggtttgaggtggggaaaatgtaagcagtttgctgttgccgtatatccc

SEQ ID NO: 94877 - DNA, 80 bp, synthetic construct
  source 1..80: mol_type = other DNA
tcacagtcagatggtagctgggactggagtcgtctgagcagtcaactgggctgaacacctgagatgtgttatgtttttat

SEQ ID NO: 94878 - DNA, 80 bp, synthetic construct
  source 1..80: mol_type = other DNA
gacatgcaccaccacgcccagctaatttttttttttatttggtagggacagggttttgccatgttgccacagctggtctc

SEQ ID NO: 94879 - DNA, 80 bp, synthetic construct
  source 1..80: mol_type = other DNA
ctgaaggagatcatccatatcagctttttaatcatgttttgttgtgtggatggattgtaatttatttaaccagtccctca

SEQ ID NO: 94880 - DNA, 80 bp, synthetic construct; identical to SEQ ID NO: 17718
  source 1..80: mol_type = other DNA

SEQ ID NO: 94881 - DNA, 80 bp, synthetic construct
  source 1..80: mol_type = other DNA
gaatgtctcaaatgaatgttccaagcctctgctctttcccagacactgtcctagactcaatacgggatccaaggatgaaa

SEQ ID NO: 94882 - DNA, 80 bp, synthetic construct
  source 1..80: mol_type = other DNA
tagaaaggctttggtgagagatcgtggtgtttgagaagggccttgaaagagggatggagcatagggaggagaaatgggat

SEQ ID NO: 94883 - DNA, 80 bp, synthetic construct; identical to SEQ ID NO: 17719
  source 1..80: mol_type = other DNA

SEQ ID NO: 94884 - DNA, 80 bp, synthetic construct
  source 1..80: mol_type = other DNA
gccttggatcccagcaaaagcagcatctcttctagcctctgttcgctccctggctacagtgtttaccttttttaacagtg

SEQ ID NO: 94885 - DNA, 80 bp, synthetic construct
  source 1..80: mol_type = other DNA
gaacggttagagatttgagggatgattttcctggatttgtagtctttgatattgtttacctggcagtggcaaatgtggag

SEQ ID NO: 94886 - DNA, 80 bp, synthetic construct
  source 1..80: mol_type = other DNA
cccatgaacccaattccagcaccgttgcctcctgacataccaagcttcaacctcattggtgacagcctgtctttcgactt

SEQ ID NO: 94887 - DNA, 80 bp, synthetic construct; identical to SEQ ID NO: 17720
  source 1..80: mol_type = other DNA

SEQ ID NO: 94888 - DNA, 80 bp, synthetic construct
  source 1..80: mol_type = other DNA
tgagtcagttcaactgctgttatactactggactgtagtcacctcctagttgtgttctccagcaactgggatctgtggtg

SEQ ID NO: 94889 - DNA, 80 bp, synthetic construct
  source 1..80: mol_type = other DNA
ccctttattgtgggtagaagtggatcagagatggaaaggaaaggatccccactgcagaggaaatctaagcgagggcccct

SEQ ID NO: 94890 - DNA, 80 bp, synthetic construct
  source 1..80: mol_type = other DNA
tttcatgttcccattttataagtgagaactcagatttagagagtttagtgaactccaccagcatcccacagctgatgcag

SEQ ID NO: 94891 - DNA, 80 bp, synthetic construct; identical to SEQ ID NO: 17721
  source 1..80: mol_type = other DNA

SEQ ID NO: 94892 - DNA, 80 bp, synthetic construct
  source 1..80: mol_type = other DNA
agcttataaacaacagaaatttatttcttggccaggcacagtggctcatgcctgtaattccagcactttgggagtccaag

SEQ ID NO: 94893 - DNA, 80 bp, synthetic construct
  source 1..80: mol_type = other DNA
gcagaggttgcagtgagcccagattgcaccactgcactccagcctgggcaacagagagacaccctgtctcaaaaaaaaaa

SEQ ID NO: 94894 - DNA, 80 bp, synthetic construct
  source 1..80: mol_type = other DNA
tgctgcatgctcacccagtggaagggatgaggggtctctctggagtctcttttataagggcactaatcccattcatgagg

SEQ ID NO: 94895 - DNA, 80 bp, synthetic construct
  source 1..80: mol_type = other DNA
tgagtagctgggattacaggcgcatgctatcacgcccagctaacttttgtatttttagtagagatggggtttcaccatgt

SEQ ID NO: 94896 - DNA, 80 bp, synthetic construct; identical to SEQ ID NO: 17722
  source 1..80: mol_type = other DNA

SEQ ID NO: 94897 - DNA, 80 bp, synthetic construct
  source 1..80: mol_type = other DNA
ggtgagcttctgagtgagcttctgtcatctttagatgaagtctcagaacaagtgggaatgtggatgtggcctatcaaaag

SEQ ID NO: 94898 - DNA, 80 bp, synthetic construct
  source 1..80: mol_type = other DNA
ctgggttcccaggaagcttgtttcacgtatgttttttttttgtacagaacgaaaagctgtccatgagagctggtatttgt

SEQ ID NO: 94899 - DNA, 80 bp, synthetic construct
  source 1..80: mol_type = other DNA
actgttttatttaatcctaaccacggccctgtgatcattatcccaattttaatgatgaggaaacattcatagcatttaag

SEQ ID NO: 94900 - DNA, 80 bp, synthetic construct; identical to SEQ ID NO: 17723
  source 1..80: mol_type = other DNA

SEQ ID NO: 94901 - DNA, 80 bp, synthetic construct
  source 1..80: mol_type = other DNA
cctcagtagccaagtcactagactattggcatcttttgtatgtacttagttgaggaaattttttaacttatgccagaaag

SEQ ID NO: 94902 - DNA, 80 bp, synthetic construct
  source 1..80: mol_type = other DNA
ggagctgccttactttatgagaaagcagaatgaaatggaggctattgagaatggactttccctctagtcttgtggtgtct

SEQ ID NO: 94903 - DNA, 80 bp, synthetic construct
  source 1..80: mol_type = other DNA
gtcgagattcagaagctaaattccatactaattatcagcccaagagcatacctctctcatttgggccaagcagaagggtc

SEQ ID NO: 94904 - DNA, 80 bp, synthetic construct; identical to SEQ ID NO: 17724
  source 1..80: mol_type = other DNA

SEQ ID NO: 94905 - DNA, 80 bp, synthetic construct
  source 1..80: mol_type = other DNA
aaacaaaattattaaacagtaaaggggagttcaagggaggcctcggtcattaaggaaagaggtaaaacgatggctgagcc

SEQ ID NO: 94906 - DNA, 80 bp, synthetic construct
  source 1..80: mol_type = other DNA
agaccccgttccaagccattaaaacaaacaaaatcactcatcacgatttcaggcctatccaagcattttgcagatggcac

SEQ ID NO: 94907 - DNA, 80 bp, synthetic construct
  source 1..80: mol_type = other DNA
tactaacccgtgcatgagcttgcctgtctctgtcctcgggccacactgagcccttacgagggcaggtggtgcctgggtac

SEQ ID NO: 94908 - DNA, 80 bp, synthetic construct; identical to SEQ ID NO: 17725
  source 1..80: mol_type = other DNA

SEQ ID NO: 94909 - DNA, 80 bp, synthetic construct
  source 1..80: mol_type = other DNA
tcccttttcttttcaaataaagcaaacccagagcacagggtctgatatgtgagtccacggggagtggactgtctgttcat

SEQ ID NO: 94910 - DNA, 80 bp, synthetic construct
  source 1..80: mol_type = other DNA
acagttcattattcctccagcatgcctaggcagtggagagaatgtattttgcccaataataaaatgacatcctgcctcta

SEQ ID NO: 94911 - DNA, 80 bp, synthetic construct; identical to SEQ ID NO: 17726
  source 1..80: mol_type = other DNA

SEQ ID NO: 94912 - DNA, 80 bp, synthetic construct
  source 1..80: mol_type = other DNA
tcacgggcaggccagctcatggcacccagagcagccaggtggacccaccttggtttactgaactttttgtaaccatgggg

SEQ ID NO: 94913 - DNA, 80 bp, synthetic construct
  source 1..80: mol_type = other DNA
gagcttttactgcagacaaaagaagtttcatttttagttaaatttgcactgctcctgggacatacatggatgcatttatt

SEQ ID NO: 94914 - DNA, 80 bp, synthetic construct
  source 1..80: mol_type = other DNA
tattaaattttgctgcacatgaagttcagtgcatgttccattttctagactttggcagtgcctgtggtcagtgaccggga

SEQ ID NO: 94915 - DNA, 80 bp, synthetic construct; identical to SEQ ID NO: 17727
  source 1..80: mol_type = other DNA

SEQ ID NO: 94916 - DNA, 80 bp, synthetic construct
  source 1..80: mol_type = other DNA
ttttgtattttttatagagatggggtttcgccatgttgcccaggctggtctcgaactcctgagctcaaccaatctgcccg

SEQ ID NO: 94917 - DNA, 80 bp, synthetic construct
  source 1..80: mol_type = other DNA
tgccaccatgcctgactgatttttttatttttatttttgtaaagatgggtttcgccatgtttccaggctggtctcgaact

SEQ ID NO: 94918 - DNA, 80 bp, synthetic construct
  source 1..80: mol_type = other DNA
ggctgtgtaacattgaagctgattcaaggagtttgcccttaggttaccaggggttaccgcattccctgaggaatgctgag

SEQ ID NO: 94919 - DNA, 80 bp, synthetic construct; identical to SEQ ID NO: 17728
  source 1..80: mol_type = other DNA

SEQ ID NO: 94920 - DNA, 80 bp, synthetic construct
  source 1..80: mol_type = other DNA
tacactgcttgtgctgggcatattcattcattgtattaattgctacgtggctgaaagtaaaaacttttaaaaagccataa

SEQ ID NO: 94921 - DNA, 80 bp, synthetic construct
  source 1..80: mol_type = other DNA
gtaaacccagctacttgggaggctgaggcaggagaattgcttgaacctgggaggtgggggttgcagtgagccaagatcgt

SEQ ID NO: 94922 - DNA, 80 bp, synthetic construct
  source 1..80: mol_type = other DNA
ttttcccaattgatgatcagtacaactagtttgccatttgcatctgagtcagagcagtgctagcgatcaaaagccgccct

SEQ ID NO: 94923 - DNA, 80 bp, synthetic construct
  source 1..80: mol_type = other DNA
gggagtggtggcttggtgtggcgtaactgtaccaccataccttgatggtagaatgcagtcctggaatatatacattcagg

SEQ ID NO: 94924 - DNA, 80 bp, synthetic construct; identical to SEQ ID NO: 17729
  source 1..80: mol_type = other DNA

SEQ ID NO: 94925 - DNA, 80 bp, synthetic construct
  source 1..80: mol_type = other DNA
gtgaagtagaacagttaaaaaaacacccggggaagtgataaatcacagagagagattgcatatgcgggaaaggtgtctcc

SEQ ID NO: 94926 - DNA, 80 bp, synthetic construct
  source 1..80: mol_type = other DNA
tggtctgcattgccagccctgaagatggctcctaaattacttaagtttaataggtagttaatatagccaaccctccttat

SEQ ID NO: 94927 - DNA, 80 bp, synthetic construct
  source 1..80: mol_type = other DNA
tggggagtggggtggggagcaaggattaacagggagcagtagcagcaccagatgtgggcatagcacactgggaagaaatt

SEQ ID NO: 94928 - DNA, 80 bp, synthetic construct; identical to SEQ ID NO: 17730
  source 1..80: mol_type = other DNA

SEQ ID NO: 94929 - DNA, 80 bp, synthetic construct
  source 1..80: mol_type = other DNA
tacaaacctgccttgcctgcctaggtactttaccaccatttggagatgcctgaggatattaccaggccttatttgaggca

SEQ ID NO: 94930 - DNA, 80 bp, synthetic construct
  source 1..80: mol_type = other DNA
tttgatgttggcaattttaaaatgacatcagtctatctggacctttttcctaaggctcttgctcagaccactcagtagat

SEQ ID NO: 94931 - DNA, 80 bp, synthetic construct
  source 1..80: mol_type = other DNA
ggattaatacacaaaaagggccccttgggtattcagtggcagatttctcttgagagcagataaagtcgctaataacaaat

SEQ ID NO: 94932 - DNA, 80 bp, synthetic construct
  source 1..80: mol_type = other DNA
ggatcacgaagtcaagagattgagaccatcctggccaacatggtgaaaccctgtctctactaaaaatacaaaaattagct

SEQ ID NO: 94933 - DNA, 80 bp, synthetic construct; identical to SEQ ID NO: 17731
  source 1..80: mol_type = other DNA

SEQ ID NO: 94934 - DNA, 80 bp, synthetic construct
  source 1..80: mol_type = other DNA
ccttcgttttcaatatgtagtagtggagaggaagtgtaacatgattttagggctcacatttcaattccactgcattttta

SEQ ID NO: 94935 - DNA, 80 bp, synthetic construct
  source 1..80: mol_type = other DNA
gtatctaaaatgggttcagtactgtgagtcttattgtttaaaatgaatgagatggtcccctcctaccttcttttctcctc

SEQ ID NO: 94936 - DNA, 80 bp, synthetic construct; identical to SEQ ID NO: 17732
  source 1..80: mol_type = other DNA

SEQ ID NO: 94937 - DNA, 80 bp, synthetic construct
  source 1..80: mol_type = other DNA
tggcggaggctttgtagctggaagccgtctgctgctggcagggcagcaggagaatgtttgtcacaggtgccttccaggct

SEQ ID NO: 94938 - DNA, 80 bp, synthetic construct
  source 1..80: mol_type = other DNA
tttttaagtagacagatgtgtctcctgaatctgaacttgtttagattgggtggatgtgtctgtttttgtcacaccacaca

SEQ ID NO: 94939 - DNA, 80 bp, synthetic construct
  source 1..80: mol_type = other DNA
ggcaggaagtaaaagccaggacccaacaagtggatcagaggggggatgtgaagatgaacagtcagatagcaataaagcct

SEQ ID NO: 94940 - DNA, 80 bp, synthetic construct; identical to SEQ ID NO: 17733
  source 1..80: mol_type = other DNA

SEQ ID NO: 94941 - DNA, 80 bp, synthetic construct
  source 1..80: mol_type = other DNA
accttgtctagattcagtgaaagttttgaaggacagtgcatgacagacgtcactggtcaggttcaccagagcttggctca

SEQ ID NO: 94942 - DNA, 80 bp, synthetic construct
  source 1..80: mol_type = other DNA
ggttgtacaccctgaggtgcttctgcttcattacctgctgaaatttggagacctcttcttcctggataaccttcaagata

SEQ ID NO: 94943 - DNA, 80 bp, synthetic construct
  source 1..80: mol_type = other DNA
agtgctcaactcacagtgcaacataggacaaggtgaaggccttcttgggaggcctcttctggctctagcaagcaggtgtt

SEQ ID NO: 94944 - DNA, 80 bp, synthetic construct; identical to SEQ ID NO: 17734
  source 1..80: mol_type = other DNA

SEQ ID NO: 94945 - DNA, 80 bp, synthetic construct
  source 1..80: mol_type = other DNA
gtagaaaaactgcctgagggcaaatggctccactgagctgctacctgcaggaaagaagctcaagggctctcctcgtctca

SEQ ID NO: 94946 - DNA, 80 bp, synthetic construct
  source 1..80: mol_type = other DNA
taggaattgcacaatgagggtaaaggatggggcggcagcagccaggtctgtctaaggggcgagcagcagtggccgaaggc

SEQ ID NO: 94947 - DNA, 80 bp, synthetic construct
  source 1..80: mol_type = other DNA
tgggcagactgatttccctctctacctttacttgtggctgaggcgaagctcctgctcttgcaagataagaggtggggctg

SEQ ID NO: 94948 - DNA, 80 bp, synthetic construct
  source 1..80: mol_type = other DNA
cgggtggaggatccaggaattcttggagccaacattgcacaaatgggcaggagcctctcaaggcccccacagcctgggct

SEQ ID NO: 94949 - DNA, 80 bp, synthetic construct; identical to SEQ ID NO: 17735
  source 1..80: mol_type = other DNA

SEQ ID NO: 94950 - DNA, 80 bp, synthetic construct
  source 1..80: mol_type = other DNA
ctgactgtgcctgtatctgactcaaagtggctgttcttttcagaaacctgagcggagatactgggctcacatgctttcat

SEQ ID NO: 94951 - DNA, 80 bp, synthetic construct
  source 1..80: mol_type = other DNA
cccttctagagggagttccatttaggcaaaaaagcgctctccattcccatcagaaccgggctttccaaagggctctgaaa

SEQ ID NO: 94952 - DNA, 80 bp, synthetic construct
  source 1..80: mol_type = other DNA
gtttggagtctccctcccctgccctttatggagccgccgatagtaccgaggactcttcacatgcagactcgaggggtcca

SEQ ID NO: 94953 - DNA, 80 bp, synthetic construct; identical to SEQ ID NO: 17736
  source 1..80: mol_type = other DNA

SEQ ID NO: 94954 - DNA, 80 bp, synthetic construct
  source 1..80: mol_type = other DNA
tctatccagggagatgctgggaagtggcccagagtcaagggcttaggaggttgcaaacctcactatgccaagagctcggt

SEQ ID NO: 94955 - DNA, 80 bp, synthetic construct
  source 1..80: mol_type = other DNA
acgtcatgagcaagtttgcttcgggaccacctgggaaaccaggagtagaaggggtaaactcttcctcatctgccacaggc

SEQ ID NO: 94956 - DNA, 80 bp, synthetic construct
  source 1..80: mol_type = other DNA
atgtgagaatctattaaaataggcagggatctccggtcctctgtcaagaggcaatgctgacggctttttcctgctggcgt

SEQ ID NO: 94957 - DNA, 80 bp, synthetic construct; identical to SEQ ID NO: 17737
  source 1..80: mol_type = other DNA

SEQ ID NO: 94958 - DNA, 80 bp, synthetic construct
  source 1..80: mol_type = other DNA
ccttgcagagcgccaagtcccgagtggccttctttgaagagctctagcaggtgacccagccaccccaggacctgccactt

SEQ ID NO: 94959 - DNA, 80 bp, synthetic construct
  source 1..80: mol_type = other DNA
tctctcatggcgttctagttctctgacctgagtctttgttttaagaagtatttgtcttcctttgtctaatgtgggattcc

SEQ ID NO: 94960 - DNA, 80 bp, synthetic construct
  source 1..80: mol_type = other DNA
ccccaccggtgaggacctggcatgcagcgaagcagcccagcccggcggatcccaggccagcacgcctgccggcttctcat

SEQ ID NO: 94961 - DNA, 80 bp, synthetic construct; identical to SEQ ID NO: 17738
  source 1..80: mol_type = other DNA

SEQ ID NO: 94962 - DNA, 80 bp, synthetic construct
  source 1..80: mol_type = other DNA
ttctcactggcccagactctgagctccaccggcccagtctgcacggcccatctgcttcaccttccctcccagccacgtgc

SEQ ID NO: 94963 - DNA, 80 bp, synthetic construct
  source 1..80: mol_type = other DNA
gtggcgctcacctaggctgtcacaggacccacctccatgccaggcaacagagggccacagaaccacccccacggctcact

SEQ ID NO: 94964 - DNA, 80 bp, synthetic construct
  source 1..80: mol_type = other DNA
cccaagtagctgggactacaggcatgcaccaccacacttggccaatgttctgtatttttaatagggacggggttttgcca

SEQ ID NO: 94965 - DNA, 80 bp, synthetic construct; identical to SEQ ID NO: 17739
  source 1..80: mol_type = other DNA

SEQ ID NO: 94966 - DNA, 80 bp, synthetic construct
  source 1..80: mol_type = other DNA
tgggactccagacctagagcgtaagtatggatgttgtggccctgtgtcttcctagtgtgacccagccaggagcggaagct

SEQ ID NO: 94967 - DNA, 80 bp, synthetic construct
  source 1..80: mol_type = other DNA
aagagattctcctgcctcagcctcccgagtagctgggactacaggcgtgtgccaccatgcctggctaatttttgtatttt

SEQ ID NO: 94968 - DNA, 80 bp, synthetic construct; identical to SEQ ID NO: 17740
  source 1..80: mol_type = other DNA

SEQ ID NO: 94969 - DNA, 80 bp, synthetic construct
  source 1..80: mol_type = other DNA
ggagcacttccccctccttgaggcaggaatactgaggtgcctccccacagatggagaaggtggagaggaggatgggcctc

SEQ ID NO: 94970 - DNA, 80 bp, synthetic construct
  source 1..80: mol_type = other DNA
ggctcaccgcaacctccgcctcccggattcaagcaattctcctgcctcagcctcccgagtagctgggattacaggcacgc

SEQ ID NO: 94971 - DNA, 80 bp, synthetic construct
  source 1..80: mol_type = other DNA
ctttttaagcgaacattttagggcctgggagtttgtcaagtaaggaagtctcaagcccaaagagcagcgtcctgaccatg

SEQ ID NO: 94972 - DNA, 80 bp, synthetic construct
  source 1..80: mol_type = other DNA
gtgtgcagctgtgtggcacagatggcttcgttcatcctgatcaaggccccacctcagccacagcagtccccccaacctgt

SEQ ID NO: 94973 - DNA, 80 bp, synthetic construct; identical to SEQ ID NO: 17741
  source 1..80: mol_type = other DNA

SEQ ID NO: 94974 - DNA, 80 bp, synthetic construct
  source 1..80: mol_type = other DNA
ccagatcatagaaggctattttctattctggggaacgattataacttaaatgattgttttaataaaaattctaagctgga

SEQ ID NO: 94975 - DNA, 80 bp, synthetic construct; identical to SEQ ID NO: 17742
  source 1..80: mol_type = other DNA

SEQ ID NO: 94976 - DNA, 80 bp, synthetic construct
  source 1..80: mol_type = other DNA
cagagacttgggtttgatttaggaatcatggtgatgcataaaactatattctgcagtaaggcctctttctgcagaatgta

SEQ ID NO: 94977 - DNA, 80 bp, synthetic construct
  source 1..80: mol_type = other DNA
aggtataacagactaaacgttcttgacatctttcgtttgtgtacattctaaacgagcaagtggctgaaggaaattagggg

SEQ ID NO: 94978 - DNA, 80 bp, synthetic construct
  source 1..80: mol_type = other DNA
gggataacgacatttttaaataaaatacaagtttgaaaaccatccctgaaattcttgctggcatgtgcaaagcaggctgt

SEQ ID NO: 94979 - DNA, 80 bp, synthetic construct; identical to SEQ ID NO: 17743
  source 1..80: mol_type = other DNA

SEQ ID NO: 94980 - DNA, 80 bp, synthetic construct
  source 1..80: mol_type = other DNA
ctctggactccaccattagcactacttctttagtgaatataaggctctcagaagtcagaatgataccgtaaataatattg

SEQ ID NO: 94981 - DNA, 80 bp, synthetic construct
  source 1..80: mol_type = other DNA
aaaagcccagaatgactgtggggtttaccaattagtgccagagttagatcagataacaacctggagaaaagtttaaagaa

SEQ ID NO: 94982 - DNA, 80 bp, synthetic construct; identical to SEQ ID NO: 17744
  source 1..80: mol_type = other DNA

SEQ ID NO: 94983 - DNA, 80 bp, synthetic construct
  source 1..80: mol_type = other DNA
catcactgagttgaaaacacccaactgaatgaataatcaaagcctggaacttaaacttatactgttctttgaaaactaca

SEQ ID NO: 94984 - DNA, 80 bp, synthetic construct
  source 1..80: mol_type = other DNA
gtgaatgggggctggcacaaaagtatggctaaatcggcccaaatccaaactttctatttgaaagtgtgaaagcctcgagt

SEQ ID NO: 94985 - DNA, 80 bp, synthetic construct
  source 1..80: mol_type = other DNA
agttgcactacctgtcagctagataaattcagaatttctggtctccaataagacttacaacctttgacaaagccctcaac

SEQ ID NO: 94986 - DNA, 80 bp, synthetic construct; identical to SEQ ID NO: 17745
  source 1..80: mol_type = other DNA

SEQ ID NO: 94987 - DNA, 80 bp, synthetic construct
  source 1..80: mol_type = other DNA
gaaaacacccaattcacaggctttccatgtcataaacaaggctctaaagccttgctgtgtttggataatagagaatatcc

SEQ ID NO: 94988 - DNA, 80 bp, synthetic construct
  source 1..80: mol_type = other DNA
tagaaatttcttcagagaatattgagctaagctactcaattctgtggaggttatggattggagccagaggtgactagttt

SEQ ID NO: 94989 - DNA, 80 bp, synthetic construct; identical to SEQ ID NO: 17746
  source 1..80: mol_type = other DNA

SEQ ID NO: 94990 - DNA, 80 bp, synthetic construct
  source 1..80: mol_type = other DNA
caggagttccagaccagtttggccagcatggcaaaaccctgtccctgttaaaaatacaaaaaaagaaaaagaattagctg

SEQ ID NO: 94991 - DNA, 80 bp, synthetic construct
  source 1..80: mol_type = other DNA
aaaaaaaaaatcacttcacttcagaaaaccatacaagagatgggaccaaaagttgaatggggtcatgatgttttccttgg

SEQ ID NO: 94992 - DNA, 80 bp, synthetic construct
  source 1..80: mol_type = other DNA
tttcacaattttagaatattaatgatctaaggtatcttagaaactactagtcactcagtgctcaataataatgttgtaga

SEQ ID NO: 94993 - DNA, 80 bp, synthetic construct
  source 1..80: mol_type = other DNA
accacacaggaacaggagaggcctagctcctccccactccaaaaggtgcagtgcgaacttccccaaggccccaccctgtc

SEQ ID NO: 94994 - DNA, 80 bp, synthetic construct; identical to SEQ ID NO: 17747
  source 1..80: mol_type = other DNA

SEQ ID NO: 94995 - DNA, 80 bp, synthetic construct
  source 1..80: mol_type = other DNA
ggatagaattaaagttaggccactgaaaattcatgtggctccagtttacaaacttcatgagtgtgggggaagacatagac

SEQ ID NO: 94996 - DNA, 80 bp, synthetic construct
  source 1..80: mol_type = other DNA
tgcttgtattactttgatcccttccaattgatcaagctggccaatctacctttgcctaatatccttttttaggtacagcc

SEQ ID NO: 94997 - DNA, 80 bp, synthetic construct; identical to SEQ ID NO: 17748
  source 1..80: mol_type = other DNA

SEQ ID NO: 94998 - DNA, 80 bp, synthetic construct
  source 1..80: mol_type = other DNA
agcaaatactcttccattttgtagctaggaagatatttgggtaaagttaatacaaggatctcttattaccttggcttagc

SEQ ID NO: 94999 - DNA, 80 bp, synthetic construct
  source 1..80: mol_type = other DNA
ttcccacaacattgtatcctccctcttatgtgcagcctgaataataataatgtggtttgtgtctggtgtaccaaggagat

SEQ ID NO: 95000 - DNA, 80 bp, synthetic construct
  source 1..80: mol_type = other DNA
ccattgatgccagcagtcttacctggctaattcaagcgtggctttatcacccaaaagcaagaaaatgcttgctacagacc

SEQ ID NO: 95001 - DNA, 80 bp, synthetic construct; identical to SEQ ID NO: 17749
  source 1..80: mol_type = other DNA

SEQ ID NO: 95002 - DNA, 80 bp, synthetic construct
  source 1..80: mol_type = other DNA
ggctggagtgcaacggcgcgatctcagctcaccacaacctctgcttccagagttcaagtgattctcctgcctcagcctcc

SEQ ID NO: 95003 - DNA, 80 bp, synthetic construct
  source 1..80: mol_type = other DNA
gccaccgcacccggccagctgtggtgcaattttaaaagaaattctagttaatcactcaagccctcagatgctggtatgac

SEQ ID NO: 95004 - DNA, 80 bp, synthetic construct
  source 1..80: mol_type = other DNA
tacttccatttcagccttcatggtggtatgagcaaacattggccctataaggtatacttgccagttttccaggttttggc

SEQ ID NO: 95005 - DNA, 80 bp, synthetic construct; identical to SEQ ID NO: 17750
  source 1..80: mol_type = other DNA

SEQ ID NO: 95006 - DNA, 80 bp, synthetic construct
  source 1..80: mol_type = other DNA
attttttgtatttttagtagagacggggtttcatcatattggtcaggctggtctcgaactcctgacgtcaggtgatctgc

SEQ ID NO: 95007 - DNA, 80 bp, synthetic construct
  source 1..80: mol_type = other DNA
tcagaacttggtcaggatgttgaaaatccatcatgacaaatctttcaatattcatcccagaaatctgctgggaattaatt

SEQ ID NO: 95008 - DNA, 80 bp, synthetic construct
  source 1..80: mol_type = other DNA
gcctgccaccacgcccggctaatttttatatttttagtagagacggggtttcaccatgttggccaggctggtctagaact

SEQ ID NO: 95009 - DNA, 80 bp, synthetic construct
  source 1..80: mol_type = other DNA
tgactactacattccaagcactgtactaagcaccgggtatatattagtgaataaaataggaaaggtccctgctatttgtg

SEQ ID NO: 95010 - DNA, 80 bp, synthetic construct; identical to SEQ ID NO: 17751
  source 1..80: mol_type = other DNA

SEQ ID NO: 95011 - DNA, 80 bp, synthetic construct
  source 1..80: mol_type = other DNA
ctttgcgatatcccaatgtgcacaaatttcaattaccacagtttagttaataacactaggccactacgaacacagttcaa

SEQ ID NO: 95012 - DNA, 80 bp, synthetic construct
  source 1..80: mol_type = other DNA
actgtgcatctgtcattcagtttgcatacagacagcaaagagtatatagctgtgctgcctccttttctcccagtgataaa

SEQ ID NO: 95013 - DNA, 80 bp, synthetic construct
  source 1..80: mol_type = other DNA
aacacaaaaattagccaggcgtggtggcagacgcttgtaatcccagctactcaggaggcttaggcaggagaatcgcttga

SEQ ID NO: 95014 - DNA, 80 bp, synthetic construct; identical to SEQ ID NO: 17752
  source 1..80: mol_type = other DNA

SEQ ID NO: 95015 - DNA, 80 bp, synthetic construct
  source 1..80: mol_type = other DNA
taccaaaacatagaaaagatgcttgctctatatcataggttctaagatgagaaagcaagcactgttcaaattactcttga

SEQ ID NO: 95016 - DNA, 80 bp, synthetic construct
  source 1..80: mol_type = other DNA
cacagaacgattacaattttcccactaaatattaaggttactttacatggcttcagatttaatggctattcacagtccca

SEQ ID NO: 95017 - DNA, 80 bp, synthetic construct
  source 1..80: mol_type = other DNA
agacaatactggttgtcagaagttgggagtgggggaaaaggggagtttttctatggatctaaactttcgattattctaga

SEQ ID NO: 95018 - DNA, 80 bp, synthetic construct; identical to SEQ ID NO: 17753
  source 1..80: mol_type = other DNA

SEQ ID NO: 95019 - DNA, 80 bp, synthetic construct
  source 1..80: mol_type = other DNA
aaggaaagcttcaagcaggatgtttgtgtgttctttctacctttatattcaaatcttctgtcagtggagaaatagaaaca

SEQ ID NO: 95020 - DNA, 80 bp, synthetic construct
  source 1..80: mol_type = other DNA
ataagaactggaagctggagcttttggagtagtaaaaggtaaggtattgttggtcctcctctttcctgtttccttttatg

SEQ ID NO: 95021 - DNA, 80 bp, synthetic construct; identical to SEQ ID NO: 17754
  source 1..80: mol_type = other DNA

SEQ ID NO: 95022 - DNA, 80 bp, synthetic construct
  source 1..80: mol_type = other DNA
ttgatggatgtgagttcaacagctatagtgatgtttctcaaattccttgaaacagagggagtggggttttccagcaaagt

SEQ ID NO: 95023 - DNA, 80 bp, synthetic construct
  source 1..80: mol_type = other DNA
attgagaaagattaagctgccgtgccttcatttcaggccacatatgcaaatctgttttataatccccagaagaagatttc

SEQ ID NO: 95024 - DNA, 80 bp, synthetic construct
  source 1..80: mol_type = other DNA
gccttgcttccaaagttatcaaattgctgactatgatggagatattgggcacagttgtgtaagcattttactaggatttc

SEQ ID NO: 95025 - DNA, 80 bp, synthetic construct
  source 1..80: mol_type = other DNA
acctcaggtcaggagttcaagaccagcctggccaacatggtgaaaccctgtctctaccaaaaatacaaaaattagctggg

SEQ ID NO: 95026 - DNA, 80 bp, synthetic construct; identical to SEQ ID NO: 17755
  source 1..80: mol_type = other DNA

SEQ ID NO: 95027 - DNA, 80 bp, synthetic construct
  source 1..80: mol_type = other DNA
atttggagagcccatgactcacatatttttaaaagtcaaagacaataatacatctttgaaatagcaatgttaactaaaat

SEQ ID NO: 95028 - DNA, 80 bp, synthetic construct
  source 1..80: mol_type = other DNA
gttcgagatcagcatggccaacatgatgaaaccccgtctctactaaaaatacaaaaattagccaggtgtggtggcaggtg

SEQ ID NO: 95029 - DNA, 80 bp, synthetic construct
  source 1..80: mol_type = other DNA
caaccaactgacaaactcttaatccttatggaaattctcttccctactaactagacctctgaagggctcagtctcacaaa

SEQ ID NO: 95030 - DNA, 80 bp, synthetic construct; identical to SEQ ID NO: 17756
  source 1..80: mol_type = other DNA

SEQ ID NO: 95031 - DNA, 80 bp, synthetic construct
  source 1..80: mol_type = other DNA
taccaattattgttaaacacagataacactaggaatgatgagagaaagatgatgtccattttatagaatgattaccgcaa

SEQ ID NO: 95032 - DNA, 80 bp, synthetic construct
  source 1..80: mol_type = other DNA
ggaatcccttagttaccaccttcagcttataaaatgtgttgcagaaaccaagagaggggttggaaattagaagataattt

SEQ ID NO: 95033 - DNA, 80 bp, synthetic construct
  source 1..80: mol_type = other DNA
atacctgagaaatttaaagtaggaaagacaggctagttagctgttctgatagcagaacaagatggagtctataccaggat

SEQ ID NO: 95034 - DNA, 80 bp, synthetic construct; identical to SEQ ID NO: 17757
  source 1..80: mol_type = other DNA

SEQ ID NO: 95035 - DNA, 80 bp, synthetic construct
  source 1..80: mol_type = other DNA
acttagaggaactgaaagtaaggaaacgaggaaatagcacattggcccctctttccccatagaggaggccagctttaatc

SEQ ID NO: 95036 - DNA, 80 bp, synthetic construct
  source 1..80: mol_type = other DNA
gtagaaaagttacagcgtccattgtattttcatccagggataaaaagaacaagctccaagaacagatttgaagggcagta

SEQ ID NO: 95037 - DNA, 80 bp, synthetic construct
  source 1..80: mol_type = other DNA
taagattattatagtaattttctaggtgtgaaatttagaagcagagagtgggtaaataaactgccctaggttgtgtgact

SEQ ID NO: 95038 - DNA, 80 bp, synthetic construct; identical to SEQ ID NO: 17758
  source 1..80: mol_type = other DNA

SEQ ID NO: 95039 - DNA, 80 bp, synthetic construct
  source 1..80: mol_type = other DNA
aggcagaggctgcagtgaactgagattgtgccacactccagcctgggccacagagtgagaacctgtctcaaaaaaaaaaa

SEQ ID NO: 95040 - DNA, 80 bp, synthetic construct
  source 1..80: mol_type = other DNA
acaaaataaagtgcagctgaagggccgtgaccttctcactctaaaaaactttaccggagaagaaattaaatatatgctat

SEQ ID NO: 95041 - DNA, 80 bp, synthetic construct; identical to SEQ ID NO: 17759
  source 1..80: mol_type = other DNA

SEQ ID NO: 95042 - DNA, 80 bp, synthetic construct
  source 1..80: mol_type = other DNA
tggctcactgcaacttctgcctcccaggttcaaggaattctcccgcctcagcctcccaagtagctgggattacaggtgca

SEQ ID NO: 95043 - DNA, 80 bp, synthetic construct
  source 1..80: mol_type = other DNA
atttttataccccttttcttttctctgtgtattttctatcaagtcaaaaatgaaggccaggcgcagtggctcatgcctgt

SEQ ID NO: 95044 - DNA, 80 bp, synthetic construct
  source 1..80: mol_type = other DNA
aggagaattgcttgaacccaggaggcggaggttgcagtgagccaagatcgtgccattgctgtccagcctgggcaataaga

SEQ ID NO: 95045 - DNA, 80 bp, synthetic construct
  source 1..80: mol_type = other DNA
taatggtatccaggtaggagaagagatgggatatggttcttagctataagcataattctgcattttgagcaatttatctt

SEQ ID NO: 95046 - DNA, 80 bp, synthetic construct; identical to SEQ ID NO: 17760
  source 1..80: mol_type = other DNA

SEQ ID NO: 95047 - DNA, 80 bp, synthetic construct
  source 1..80: mol_type = other DNA
acttccagaagcaaagtctttgtattcccatgaggatgcatgatgaatgtgtagctaaaacactagggcttcatcattga

SEQ ID NO: 95048 - DNA, 80 bp, synthetic construct
  source 1..80: mol_type = other DNA
ttggaaaaaattcacatgttgaacccagaacaattaatactgctttctaattacatgtcaataagctgtgggagttactg

SEQ ID NO: 95049 - DNA, 80 bp, synthetic construct; identical to SEQ ID NO: 17761
  source 1..80: mol_type = other DNA

SEQ ID NO: 95050 - DNA, 80 bp, synthetic construct
  source 1..80: mol_type = other DNA
ttattacttattttctaataaagaatatgttttaaaacataatttatatataagatatattttaattctattcttgtcct

SEQ ID NO: 95051 - DNA, 80 bp, synthetic construct
  source 1..80: mol_type = other DNA
acccagtgcggggatttgtctgcctctagcaaccacaaagaaaaaatcatttttactgggagcagcaatgcaagcctgtg

SEQ ID NO: 95052 - DNA, 80 bp, synthetic construct
  source 1..80: mol_type = other DNA
gtgggcacacattttcaggccttgaactcacgtgggtaagaaatatgtctatttttctagcatgcaaagaacatttcctt

SEQ ID NO: 95053 - DNA, 80 bp, synthetic construct; identical to SEQ ID NO: 17762
  source 1..80: mol_type = other DNA

SEQ ID NO: 95054 - DNA, 80 bp, synthetic construct
  source 1..80: mol_type = other DNA
ccatttgcgcggggaagagctggcctctcctgttccgaggtggaaactgggattcaatctgagaggcgggaagacaacta

SEQ ID NO: 95055 - DNA, 80 bp, synthetic construct
  source 1..80: mol_type = other DNA
caacctcttagcagctctccaagacacattaggcacagaggtactacaaggctgcctctactctattgttccttcctcat

SEQ ID NO: 95056 - DNA, 80 bp, synthetic construct
  source 1..80: mol_type = other DNA
cagtatcaaaggtccatcagtttttatttctgttgcttctcctctcttgcttctcttcttcccctttcagttcccagtat

SEQ ID NO: 95057 - DNA, 80 bp, synthetic construct; identical to SEQ ID NO: 17763
  source 1..80: mol_type = other DNA

SEQ ID NO: 95058 - DNA, 80 bp, synthetic construct
  source 1..80: mol_type = other DNA
aatagatatcaaaaagaaagttcagggggattaagcgacttgccaaattcactcaattaatacagatagcaccaagattc

SEQ ID NO: 95059 - DNA, 80 bp, synthetic construct
  source 1..80: mol_type = other DNA
tgatatctgacagatggtagggaaaaaatgaataaaccagtcagcaattctcaaattctgctccctttcaacactagtat

SEQ ID NO: 95060 - DNA, 80 bp, synthetic construct
  source 1..80: mol_type = other DNA
ttttgctgagttcatggcatttctatgacttttccctgttcaaatgttatgtttgaaaccagaatatttctgaataaatg

SEQ ID NO: 95061 - DNA, 80 bp, synthetic construct; identical to SEQ ID NO: 17764
  source 1..80: mol_type = other DNA

SEQ ID NO: 95062 - DNA, 80 bp, synthetic construct
  source 1..80: mol_type = other DNA
ccttagaaacctgccccaaatcgtaaataataacaacaaataaatgaagcaaggagagtatgactgttaaaacttatagt

SEQ ID NO: 95063 - DNA, 80 bp, synthetic construct
  source 1..80: mol_type = other DNA
ctgttactttggtgcttagaattaaaataggtgtaattataactgttactgccccaaatctgtgccagcccctgacatga

SEQ ID NO: 95064 - DNA, 80 bp, synthetic construct
  source 1..80: mol_type = other DNA
aaaagtgcacaaatcattaagcgtatagatcgatgaattcttacagtgagcaaaccattgtaactaacacccagatagag

SEQ ID NO: 95065 - DNA, 80 bp, synthetic construct; identical to SEQ ID NO: 17765
  source 1..80: mol_type = other DNA

SEQ ID NO: 95066 - DNA, 80 bp, synthetic construct
  source 1..80: mol_type = other DNA
tctaagagatggttcttttcattatttaacattggtatttcactttcaaggtgaaatagaaactggtgttttaacggctg

SEQ ID NO: 95067 - DNA, 80 bp, synthetic construct
  source 1..80: mol_type = other DNA
gatcccttatatttccaaggaatgaattctatttatactctttttaccaaagcaggcagggatctatggggaagtaaaag

SEQ ID NO: 95068 - DNA, 80 bp, synthetic construct
  source 1..80: mol_type = other DNA
aaccccatctctactaaaaatacaaaaaattagccagacgtggtggcgggcgcctgtagtcccagccaatcgggaggctg

SEQ ID NO: 95069 - DNA, 80 bp, synthetic construct; identical to SEQ ID NO: 17766
  source 1..80: mol_type = other DNA

SEQ ID NO: 95070 - DNA, 80 bp, synthetic construct
  source 1..80: mol_type = other DNA
gcttttgggctgggatctgaggcttctttttgatctgtgacaaaaattgcaaaggcaatttcttctcagaggtagtattt

SEQ ID NO: 95071 - DNA, 80 bp, synthetic construct
  source 1..80: mol_type = other DNA
atagcacaaacagggaagtagaaggacagcagattaatcctgagttgctatagcaaaatgacttatcatcaaagaaagag

SEQ ID NO: 95072 - DNA, 80 bp, synthetic construct
  source 1..80: mol_type = other DNA
attttttgacgaatgtgcggtatttatgtgtatttaggtgacgttgcatgtttataaagaaattaagtactcaagagtga

SEQ ID NO: 95073 - DNA, 80 bp, synthetic construct
  source 1..80: mol_type = other DNA
taagcacttactatttgccaggttttattctaggtgctcgggagtgatacctcagtagacaaaacagatgaaaatccatg

SEQ ID NO: 95074 - DNA, 80 bp, synthetic construct; identical to SEQ ID NO: 17767
  source 1..80: mol_type = other DNA

SEQ ID NO: 95075 - DNA, 80 bp, synthetic construct
  source 1..80: mol_type = other DNA
gagacaacaagattactgatgtattgggtaagagagagatgtcaaggatgactttaagatttctgcctgagcaaatgtga

SEQ ID NO: 95076 - DNA, 80 bp, synthetic construct
  source 1..80: mol_type = other DNA
gtgtcaccagcatatagatgatatttaaggccatgggactggatacaattataaagagagtaagtgtagattgaaggatg

SEQ ID NO: 95077 - DNA, 80 bp, synthetic construct; identical to SEQ ID NO: 17768
  source 1..80: mol_type = other DNA

SEQ ID NO: 95078 - DNA, 80 bp, synthetic construct
  source 1..80: mol_type = other DNA
tttgctgcaaaggggagcaaacaattaaaggaatacttgtcagggaaattaggacaaagagaaatctgtatctgttttta

SEQ ID NO: 95079 - DNA, 80 bp, synthetic construct
  source 1..80: mol_type = other DNA
atagaaaggaaagcagagtatatgagtacagatgctgactagtcgggaaatggagtagagtctggaagttctcctcttat

SEQ ID NO: 95080 - DNA, 80 bp, synthetic construct
  source 1..80: mol_type = other DNA
aaatagatttcaagacaaaaactggataaaaagacaaggccattatgtaatgataaaggggccaattcagcaagagaata

SEQ ID NO: 95081 - DNA, 80 bp, synthetic construct
  source 1..80: mol_type = other DNA
caaagaaacattagacttaatctgcactgtagaccaagtggacataatagatatttacagaacatttcacccaacaggtg

SEQ ID NO: 95082 - DNA, 80 bp, synthetic construct; identical to SEQ ID NO: 17769
  source 1..80: mol_type = other DNA

SEQ ID NO: 95083 - DNA, 80 bp, synthetic construct
  source 1..80: mol_type = other DNA
acccaaaatttgtagaagaaaagaaataatacagatcaaaacagaaatatacaaaacagagactaaaaaaaataaaagat

SEQ ID NO: 95084 - DNA, 80 bp, synthetic construct
  source 1..80: mol_type = other DNA
cctgctacagatgtccaattaaaatgtaagtcaaatcatgtccctcctctgctccaagccttaaaaggcttcccatttta

SEQ ID NO: 95085 - DNA, 80 bp, synthetic construct
  source 1..80: mol_type = other DNA
ggctcactgcaaccttcacctcccgagttcaagtgatcctcctgcctcagcctcccgagtagctgggattacaggcgccc

SEQ ID NO: 95086 - DNA, 80 bp, synthetic construct; identical to SEQ ID NO: 17770
  source 1..80: mol_type = other DNA

SEQ ID NO: 95087 - DNA, 80 bp, synthetic construct
  source 1..80: mol_type = other DNA
atttaatttactcattcagtttgtactctgtctctccccatttgaaagacaaaaactggaaaaaaaagacaaggccatta

SEQ ID NO: 95088 - DNA, 80 bp, synthetic construct
  source 1..80: mol_type = other DNA
cagcaccaggcacatattttcagaatgaatgaatttcagaatcatacagtgaggccaggacttgttgtgttgtgtagtta

SEQ ID NO: 95089 - DNA, 80 bp, synthetic construct
  source 1..80: mol_type = other DNA
gggatagtaggtctggtttccaagcaggtctgaaagtagccccagagagcagagaaacgatatggagttctagtgtgatt

SEQ ID NO: 95090 - DNA, 80 bp, synthetic construct; identical to SEQ ID NO: 17771
  source 1..80: mol_type = other DNA

SEQ ID NO: 95091 - DNA, 80 bp, synthetic construct
  source 1..80: mol_type = other DNA
tgagctgactcaatagctggcttccctatggcaaggcctagggctgtggagacttaaaaacaatcttgcgcaatttttta

SEQ ID NO: 95092 - DNA, 80 bp, synthetic construct
  source 1..80: mol_type = other DNA
gaagagtcattgctagggtcagaacatggtggtctctagttaaagaccatttggtctaggcatatttaagagaacacttt

SEQ ID NO: 95093 - DNA, 80 bp, synthetic construct
  source 1..80: mol_type = other DNA
tgcaagctctgcctcccaggttcatgccatcctcctgcctcagcctcccgagtagctgggactacaggcgcccaccacca

SEQ ID NO: 95094 - DNA, 80 bp, synthetic construct; identical to SEQ ID NO: 17772
  source 1..80: mol_type = other DNA

SEQ ID NO: 95095 - DNA, 80 bp, synthetic construct
  source 1..80: mol_type = other DNA
taaggcttcagtaggatgtttcatgagattttgagtcaaattctcctttgtggatctgaaactcctcattccccaattca

SEQ ID NO: 95096 - DNA, 80 bp, synthetic construct
  source 1..80: mol_type = other DNA
tgtgtatttgcctttatgtattggagaaattctgagcattaaaccagtctcaaatgagacagtaaagttctgattggatg

SEQ ID NO: 95097 - DNA, 80 bp, synthetic construct; identical to SEQ ID NO: 17773
  source 1..80: mol_type = other DNA

SEQ ID NO: 95098 - DNA, 80 bp, synthetic construct
  source 1..80: mol_type = other DNA
ttacaggcgcctgccaccacgtccggctaatttttgtatttttagtagagacagggttttgccatgttggccaggctggt

SEQ ID NO: 95099 - DNA, 80 bp, synthetic construct
  source 1..80: mol_type = other DNA
aataagagggtggagaaatgggcacacatgtgaaggagagttaattacttgagcacaaaattttatctacttccctcaat

SEQ ID NO: 95100 - DNA, 80 bp, synthetic construct
  source 1..80: mol_type = other DNA
tgcacttctgggaggacatccttgttttcttaccacacaagatattcatttgggtgtgaatgaaagtctcacggacacgg

SEQ ID NO: 95101 - DNA, 80 bp, synthetic construct; identical to SEQ ID NO: 17774
  source 1..80: mol_type = other DNA

SEQ ID NO: 95102 - DNA, 80 bp, synthetic construct
  source 1..80: mol_type = other DNA
taacagttgaggaggaaatgaaggtccagggaaactgacattcagtggctcataactagttactatcagactaggtaata

SEQ ID NO: 95103 - DNA, 80 bp, synthetic construct
  source 1..80: mol_type = other DNA
tgctaacatagtgcagatgttcctgattggtaaaagggaagaacaggttattaatttatgtgggttattcagggacactg

SEQ ID NO: 95104 - DNA, 80 bp, synthetic construct
  source 1..80: mol_type = other DNA
aggaagtactagtagctcactcccatctagatgaagggagagacggggaaaggctcttccccactatattataatgaaac

SEQ ID NO: 95105 - DNA, 80 bp, synthetic construct; identical to SEQ ID NO: 17775
  source 1..80: mol_type = other DNA

SEQ ID NO: 95106 - DNA, 80 bp, synthetic construct
  source 1..80: mol_type = other DNA
tctgcttccacaaaagtgaaaatatactttattcaaaagcaaatattacaagctgatcaagggatgaagccagagacata

SEQ ID NO: 95107 - DNA, 80 bp, synthetic construct
  source 1..80: mol_type = other DNA
aggatccagaaatcagtgcagtgggcaggatcccaagatcaagagacaaacagccaagcatgggctgaaaattgaggatg

SEQ ID NO: 95108 - DNA, 80 bp, synthetic construct
  source 1..80: mol_type = other DNA
tacaagttccaaaatgattgggacattttgagtccatataattattatagttccattgctacatgaatacatgggtccat

SEQ ID NO: 95109 - DNA, 80 bp, synthetic construct; identical to SEQ ID NO: 17776
  source 1..80: mol_type = other DNA

SEQ ID NO: 95110 - DNA, 80 bp, synthetic construct
  source 1..80: mol_type = other DNA
ttgggagtttgagaccagcctgaccaacatggagaaaccccgtctctactaaaaatacaaaaattagccgggcgtggtgg

SEQ ID NO: 95111 - DNA, 80 bp, synthetic construct
  source 1..80: mol_type = other DNA
aaaagaaaagaaaacattgacaacattgacttgcacgtcaagaggtccccaggacaacccagaggtttgatgattcacta

SEQ ID NO: 95112 - DNA, 80 bp, synthetic construct
  source 1..80: mol_type = other DNA
gcattaaagtttgaacctctgagtgcaaatgttcacaagtcattggagataaagaccttgagtgaagttgagagctgaag

SEQ ID NO: 95113 - DNA, 80 bp, synthetic construct; identical to SEQ ID NO: 17777
  source 1..80: mol_type = other DNA

SEQ ID NO: 95114 - DNA, 80 bp, synthetic construct
  source 1..80: mol_type = other DNA
tgcaccttgtaaccctcagcaatcgcttcctttgctttttgtagaagtttaacattttaaggtgcaaagggattggagga

SEQ ID NO: 95115 - DNA, 80 bp, synthetic construct
  source 1..80: mol_type = other DNA
aaaccgggccagtctcttgaaagctgttaaatgcaatttccatagtgccacttatttgttcaaatgatttaattgttcat

SEQ ID NO: 95116 - DNA, 80 bp, synthetic construct
  source 1..80: mol_type = other DNA
tcaggaccagcctggccaacatggcgaaaccccatctctactaaaaatacaaaaattagctgggtgtggtggcgggcacc

SEQ ID NO: 95117 - DNA, 80 bp, synthetic construct
  source 1..80: mol_type = other DNA
acaagtttcttgttagagtggaaattgcattctggagcgaggaggcttttgctaaacaaatgaacaaagcatgaatagaa

SEQ ID NO: 95118 - DNA, 80 bp, synthetic construct; identical to SEQ ID NO: 17778
  source 1..80: mol_type = other DNA

SEQ ID NO: 95119 - DNA, 80 bp, synthetic construct
  source 1..80: mol_type = other DNA
ctcacccaccaaagaaaggaaagataaaatcagaacaaggaataaaaatcctaaatacacattcaaaatccaatgtattg

SEQ ID NO: 95120 - DNA, 80 bp, synthetic construct
  source 1..80: mol_type = other DNA
aaaaaattccgcacacctgtagtcccagctactagggaggctgaggcaggagaattgcttgagcccaggaggcagaggtt

SEQ ID NO: 95121 - DNA, 80 bp, synthetic construct
  source 1..80: mol_type = other DNA
aacatggtgaaatcccgtctctactaaaaatacaaaaattagccaggcgtggtggcgtgtgcctgtaatcccagctactc

SEQ ID NO: 95122 - DNA, 80 bp, synthetic construct; identical to SEQ ID NO: 17779
  source 1..80: mol_type = other DNA

SEQ ID NO: 95123 - DNA, 80 bp, synthetic construct
  source 1..80: mol_type = other DNA
gtgaatatgtaccacattttctttatccattcatctgttgatgaatacttaggttgtttccacttattggctattgtgaa

SEQ ID NO: 95124 - DNA, 80 bp, synthetic construct
  source 1..80: mol_type = other DNA
atcaccaccaatggtgtggaagaattccaattttccacatccttgtcaacacttgttatcttttgtcattttgataatag

SEQ ID NO: 95125 - DNA, 80 bp, synthetic construct; identical to SEQ ID NO: 17780
  source 1..80: mol_type = other DNA

SEQ ID NO: 95126 - DNA, 80 bp, synthetic construct
  source 1..80: mol_type = other DNA
ttcttttcttccttgttacaataataaaacctattcactatacagaatattgtggctgaaatctcgttagcttggtctga

SEQ ID NO: 95127 - DNA, 80 bp, synthetic construct
  source 1..80: mol_type = other DNA
tggctaagatttatcacaacaaaagaaacaaagcaacatcagccaagaaaaaaggtgcatgaggtaaagtctaggggaga

SEQ ID NO: 95128 - DNA, 80 bp, synthetic construct
  source 1..80: mol_type = other DNA
gttcagcataaaacatagtgcatatccaaacagtttgggcacagtggaccacccttctcatttctgggaatggtgggaac

SEQ ID NO: 95129 - DNA, 80 bp, synthetic construct; identical to SEQ ID NO: 17781
  source 1..80: mol_type = other DNA

SEQ ID NO: 95130 - DNA, 80 bp, synthetic construct
  source 1..80: mol_type = other DNA
catagatattcagttaagtttacttcagatgtgagggtattttcagattttgtcatttaccaggtgctctactggggtta

SEQ ID NO: 95131 - DNA, 80 bp, synthetic construct
  source 1..80: mol_type = other DNA
ttcaaggctttctgtttcttctgtaatgacagcttttcatgcctaatgctcagcgtactactgaaaagtgcataatagct

SEQ ID NO: 95132 - DNA, 80 bp, synthetic construct
  source 1..80: mol_type = other DNA
cagctaatttgtaaaaccagtagaaaagaaaatgaatgtagaccactatattagtttcctatggccaccacaacaaatta

SEQ ID NO: 95133 - DNA, 80 bp, synthetic construct; identical to SEQ ID NO: 17782
  source 1..80: mol_type = other DNA

SEQ ID NO: 95134 - DNA, 80 bp, synthetic construct
  source 1..80: mol_type = other DNA
ttgctattctcaaataatgaaagttatagagggatttgtggatgaggcccaatcctcaagaggagtgaaccattgtcata

SEQ ID NO: 95135 - DNA, 80 bp, synthetic construct
  source 1..80: mol_type = other DNA
aaattggtacctaatgggaaatatgatacttccatgaatctttacagagaacaccaagaacccagcaggtatgaaaattc

SEQ ID NO: 95136 - DNA, 80 bp, synthetic construct
  source 1..80: mol_type = other DNA
aaaatggagatacttatacttatcttaatgcattatatgagggtaaatgagatcgtgcttgtaaaggacacacgcacaga

SEQ ID NO: 95137 - DNA, 80 bp, synthetic construct; identical to SEQ ID NO: 17783
  source 1..80: mol_type = other DNA

SEQ ID NO: 95138 - DNA, 80 bp, synthetic construct
  source 1..80: mol_type = other DNA
tgccagagggctagaatattctgtttcccagagggagattcagagagtttatctcataatcaatttacattggggataga

SEQ ID NO: 95139 - DNA, 80 bp, synthetic construct
  source 1..80: mol_type = other DNA
agttgtcagtgaaagaaactggagtttagagggcatgcagtctgattcaaacaaggcaggatggagacaaaagagaaaat

SEQ ID NO: 95140 - DNA, 80 bp, synthetic construct
  source 1..80: mol_type = other DNA
atccatgtttgatctggcccagcacactacttgttttttattttttagtgtttgttcacccaaccacactaactctgcac

SEQ ID NO: 95141 - DNA, 80 bp, synthetic construct; identical to SEQ ID NO: 17784
  source 1..80: mol_type = other DNA

SEQ ID NO: 95142 - DNA, 80 bp, synthetic construct
  source 1..80: mol_type = other DNA
gatagtattaggagatatacctaatgttaaatgacgagttgatgggtgcagcacaccaacatggcacatgtatacatatg

SEQ ID NO: 95143 - DNA, 80 bp, synthetic construct
  source 1..80: mol_type = other DNA
tgaaattgagttagaattggtcttgctatgattcttctcattgttctcccattttattagtatctttataaactcattgg

SEQ ID NO: 95144 - DNA, 80 bp, synthetic construct
  source 1..80: mol_type = other DNA
gttccaggctcatcttgtacatttctttattaagaccaagaattagccattgctctaagaagacttggggcattttcaat

SEQ ID NO: 95145 - DNA, 80 bp, synthetic construct
  source 1..80: mol_type = other DNA
ctctggaaccatctttccacttaaagtttcatgccgtgcctttcctttttctaaacagtaggaaaagagatgatgaatga

SEQ ID NO: 95146 - DNA, 80 bp, synthetic construct; identical to SEQ ID NO: 17785
  source 1..80: mol_type = other DNA

SEQ ID NO: 95147 - DNA, 80 bp, synthetic construct
  source 1..80: mol_type = other DNA
gggttttagattgatggagagctctataaatcccagattactattaatgtgcttgtagtccagctctagttacagggttg

SEQ ID NO: 95148 - DNA, 80 bp, synthetic construct
  source 1..80: mol_type = other DNA
aataatatgaactaattgtctagttaagtgtctttaatatctttgttcccctaagtgagtccaacatgaaagcaacctag

SEQ ID NO: 95149 - DNA, 80 bp, synthetic construct; identical to SEQ ID NO: 17786
  source 1..80: mol_type = other DNA

SEQ ID NO: 95150 - DNA, 80 bp, synthetic construct
  source 1..80: mol_type = other DNA
tggctgtattttaccaagtcctcctggtaattctgatgcatattcaaattttcattgctttaaatattcacacactactt

SEQ ID NO: 95151 - DNA, 80 bp, synthetic construct
  source 1..80: mol_type = other DNA
tttcagatttccctgcattaaacatcttacaaaggaaaaaatacacgtaaaataccacgttgtttacatagccgattatt

SEQ ID NO: 95152 - DNA, 80 bp, synthetic construct
  source 1..80: mol_type = other DNA
tttctcagggtttatgtaatttttccagactggaaagaacaaacatatcacctcgggaagtcagggatacaggttaagtg

SEQ ID NO: 95153 - DNA, 80 bp, synthetic construct
  source 1..80: mol_type = other DNA
attaccacatacttagtggcttaaaacaatacaaatatattatcttacagttctggagggcagaagtctaacatgagtgt

SEQ ID NO: 95154 - DNA, 80 bp, synthetic construct; identical to SEQ ID NO: 17787
  source 1..80: mol_type = other DNA

SEQ ID NO: 95155 - DNA, 80 bp, synthetic construct
  source 1..80: mol_type = other DNA
atttttactgtgcatacacatatacacaatgtattttttaattaggctttacaatatataattttattgcccggtttaca

SEQ ID NO: 95156 - DNA, 80 bp, synthetic construct
  source 1..80: mol_type = other DNA
gagtctgtcttatataactttctatagatgatggaaacttgcccttcaatttagccttttaacttgcttctctacatcca

SEQ ID NO: 95157 - DNA, 80 bp, synthetic construct
  source 1..80: mol_type = other DNA
ctttctgatccttccctccatggcctccctttaatgaggctttctttcattttaaagagaccattttaattgattttgat

SEQ ID NO: 95158 - DNA, 80 bp, synthetic construct; identical to SEQ ID NO: 17788
  source 1..80: mol_type = other DNA

SEQ ID NO: 95159 - DNA, 80 bp, synthetic construct
  source 1..80: mol_type = other DNA
gagactacagtcgcatgccaccacaaccggctaatttttgtatttttagtagagacggggtttcactatgttggccaggc

SEQ ID NO: 95160 - DNA, 80 bp, synthetic construct
  source 1..80: mol_type = other DNA
tggaaataggtaaatgtcagttcatagtaactttgtatggaaaggcatgtgccagctagcataaaagtggtacatgcaga

SEQ ID NO: 95161 - DNA, 80 bp, synthetic construct
  source 1..80: mol_type = other DNA
agttctctctgcacacaacatgctcacagttccatccataggaggaagggaagacacaaaagcaccccagcgtgcaggtt

SEQ ID NO: 95162 - DNA, 80 bp, synthetic construct; identical to SEQ ID NO: 17789
  source 1..80: mol_type = other DNA

SEQ ID NO: 95163 - DNA, 80 bp, synthetic construct
  source 1..80: mol_type = other DNA
cctcagcctcctgagtagctgggattataggcacatgccaccacgcccggctaattttttttttttttgtatttttagta

SEQ ID NO: 95164 - DNA, 80 bp, synthetic construct
  source 1..80: mol_type = other DNA
ttgtttttaatctctggcagcacatgactcattgcaatatttaataatatattaacctggcctggtttcaatatttaaaa

SEQ ID NO: 95165 - DNA, 80 bp, synthetic construct
  source 1..80: mol_type = other DNA
ggtgatcacctgaggtcaggagtttgaaaccagccaggccaacatggtgaaacctcgtctttactaataacacaaaaatt

SEQ ID NO: 95166 - DNA, 80 bp, synthetic construct; identical to SEQ ID NO: 17790
  source 1..80: mol_type = other DNA

SEQ ID NO: 95167 - DNA, 80 bp, synthetic construct
  source 1..80: mol_type = other DNA
acttaacaaaaacccacaaatatctatctatagttatatataaacactttcctacttatgtaagtaaataaatttacatg

SEQ ID NO: 95168 - DNA, 80 bp, synthetic construct
  source 1..80: mol_type = other DNA
cctttaagctgactgtttttctttcagcagtgcctctgccatttaaaaaacaaatcactcttgtttcctggcaagaacaa

SEQ ID NO: 95169 - DNA, 80 bp, synthetic construct; identical to SEQ ID NO: 17791
  source 1..80: mol_type = other DNA

SEQ ID NO: 95170 - DNA, 80 bp, synthetic construct
  source 1..80: mol_type = other DNA
acaatggttctcagcctagtcttcatactggattagcttggggagctttaaaaatgttgatatgggtctcactatcatag

SEQ ID NO: 95171 - DNA, 80 bp, synthetic construct
  source 1..80: mol_type = other DNA
aataaagccaaccaggcatactcccatgaaattacaccacagaggttccagggataccagcttgacattataaacagaaa

SEQ ID NO: 95172 - DNA, 80 bp, synthetic construct
  source 1..80: mol_type = other DNA
ctttcagtctcatcttcctcactccttcctaaccttgctctaattacttcaaggttttaaaaggccttgatttcttcatc

SEQ ID NO: 95173 - DNA, 80 bp, synthetic construct; identical to SEQ ID NO: 17792
  source 1..80: mol_type = other DNA

SEQ ID NO: 95174 - DNA, 80 bp, synthetic construct
  source 1..80: mol_type = other DNA
ttagtaagaggacaaaggcctaggacctactctatttctgtgtaatctattagtattagttcttcacttagttccgatac

SEQ ID NO: 95175 - DNA, 80 bp, synthetic construct
  source 1..80: mol_type = other DNA
acagagtcttctgtttttgtgggctgccatctcagaagctttgtctagtcttgatatattgcctggttaggattttaaga

SEQ ID NO: 95176 - DNA, 80 bp, synthetic construct; identical to SEQ ID NO: 17793
  source 1..80: mol_type = other DNA

SEQ ID NO: 95177 - DNA, 80 bp, synthetic construct
  source 1..80: mol_type = other DNA
tggggggccgaggtgggcggatcacctgaggtcaggagtttgagaccagcctggccaacatgacaaaaccctgtctctac

SEQ ID NO: 95178 - DNA, 80 bp, synthetic construct
  source 1..80: mol_type = other DNA
caaaaaaaacaaacaaacattctccaagtgactttcatgtgcagcaaaatttgaaaaccccttgtcttagtccaccatca

SEQ ID NO: 95179 - DNA, 80 bp, synthetic construct
  source 1..80: mol_type = other DNA
ctggtgtggagaagcttccatcagaagtggtagaataagaaaaataaggataagaattatatagtaaatttcataaagct

SEQ ID NO: 95180 - DNA, 80 bp, synthetic construct
  source 1..80: mol_type = other DNA
tgatctccacatatttttggaaatcttgctggttcatgaaatttgaaaatctgggagccatgggcatgataaatccatta

SEQ ID NO: 95181 - DNA, 80 bp, synthetic construct; identical to SEQ ID NO: 17794
  source 1..80: mol_type = other DNA

SEQ ID NO: 95182 - DNA, 80 bp, synthetic construct
  source 1..80: mol_type = other DNA
gccccagagcacagactgtctatcagagaggtccctgtcacgcaggaatggcccagcgctattctccccactgtgttctg

SEQ ID NO: 95183 - DNA, 80 bp, synthetic construct
  source 1..80: mol_type = other DNA
gcgatctgtgtgtgcacttccatggctgccacactgggacttgcaattccacagtgaaaatgtatcttttttctgttgga

SEQ ID NO: 95184 - DNA, 80 bp, synthetic construct
  source 1..80: mol_type = other DNA
gtcactggataagtcgtgggaggtagaacatctggcttatgtaatgaatacatgtttaatattaccttttaaacctgtaa

SEQ ID NO: 95185 - DNA, 80 bp, synthetic construct; identical to SEQ ID NO: 17795
  source 1..80: mol_type = other DNA

SEQ ID NO: 95186 - DNA, 80 bp, synthetic construct
  source 1..80: mol_type = other DNA
caaagaattacagcttgtgtgtgcattttctggggaaaacaggacattgttaaaaacagactctaagatcgctctgcact

SEQ ID NO: 95187 - DNA, 80 bp, synthetic construct
  source 1..80: mol_type = other DNA
gacaagccatatgtgattctatagacatcaggtctgtggcttgggagtgaagactggtggagtgtgctttgaatattcaa

SEQ ID NO: 95188 - DNA, 80 bp, synthetic construct; identical to SEQ ID NO: 17796
  source 1..80: mol_type = other DNA

SEQ ID NO: 95189 - DNA, 80 bp, synthetic construct
  source 1..80: mol_type = other DNA
atgagatccatgcagagaagatgatataattatgtcagataccaaagtggctgtctgtgggtgtggctttacatatacac

SEQ ID NO: 95190 - DNA, 80 bp, synthetic construct
  source 1..80: mol_type = other DNA
agcttgttaagagcatggaatctaaatcagatggatctggaattaaattctagcttagccaactagtagttctgtgatct

SEQ ID NO: 95191 - DNA, 80 bp, synthetic construct
  source 1..80: mol_type = other DNA
ataaaacattaaagatagagttgaagcccaccatgtaactctgcctaatcttattttcttcctttccacaaatatgttat

SEQ ID NO: 95192 - DNA, 80 bp, synthetic construct
  source 1..80: mol_type = other DNA
ccgggttcaagcgattcttgtgcctcagcctccggagtagctgggattacaagtgtgtgccacgcctggctaatttttgt

SEQ ID NO: 95193 - DNA, 80 bp, synthetic construct; identical to SEQ ID NO: 17797
  source 1..80: mol_type = other DNA

SEQ ID NO: 95194 - DNA, 80 bp, synthetic construct
  source 1..80: mol_type = other DNA
gatgttaatggtgctcatttgtatccaatgagtgaatacaactaagactcagatttgaaatgtatgaaactcttagtctc

SEQ ID NO: 95195 - DNA, 80 bp, synthetic construct
  source 1..80: mol_type = other DNA
ttaaccttagtaattgctacacataagcgaatttacgcctggatttcatctccttcatcccgtgccttttaggaacacta

SEQ ID NO: 95196 - DNA, 80 bp, synthetic construct
  source 1..80: mol_type = other DNA
cctcagatgcaattacccagtgacaaaaaaagctctcttccatttaagtatagcacaggtgaggccacagaatttaggtt

SEQ ID NO: 95197 - DNA, 80 bp, synthetic construct; identical to SEQ ID NO: 17798
  source 1..80: mol_type = other DNA

SEQ ID NO: 95198 - DNA, 80 bp, synthetic construct
  source 1..80: mol_type = other DNA
tgacccctgcatacttcctaccttgctgctctctcacagcatgtatggaatacatgacttctttcataggcccaatgtaa

SEQ ID NO: 95199 - DNA, 80 bp, synthetic construct
  source 1..80: mol_type = other DNA
tgttgttgtgggaacatcataccgtgtacttacacaaacgtagatggtatatatttttatttatatatattctttcacat

SEQ ID NO: 95200 - DNA, 80 bp, synthetic construct; identical to SEQ ID NO: 17799
  source 1..80: mol_type = other DNA

SEQ ID NO: 95201 - DNA, 80 bp, synthetic construct
  source 1..80: mol_type = other DNA
tgtaagttatgccctaaagttatcccagcattggtcaagggcagcagaagaggtggagtggtaaatcccctggcactttt

SEQ ID NO: 95202 - DNA, 80 bp, synthetic construct
  source 1..80: mol_type = other DNA
ccaaaacaaaactaaccaccaccaaatgcttcaccaggtgtttttatcttgctgtcttggattcttagggctgccataac

SEQ ID NO: 95203 - DNA, 80 bp, synthetic construct
  source 1..80: mol_type = other DNA
attcccattttccctctgtgtctgtgtctctctgtacaaatccccctcttcttatagggacaccagacatattaaattta

SEQ ID NO: 95204 - DNA, 80 bp, synthetic construct; identical to SEQ ID NO: 17800
  source 1..80: mol_type = other DNA

SEQ ID NO: 95205 - DNA, 80 bp, synthetic construct
  source 1..80: mol_type = other DNA
aactcttattgcatttggttcccacagatgaaacatacattaacaataattgctccctgctatgaagatcttttggaagg

SEQ ID NO: 95206 - DNA, 80 bp, synthetic construct
  source 1..80: mol_type = other DNA
accttggtgggagtaagagttttgcaaagtcttctggaaagtctgatagtgcaaaagtcattccatcaatttgtaagtct

SEQ ID NO: 95207 - DNA, 80 bp, synthetic construct
  source 1..80: mol_type = other DNA
ggagatttattgtaaattttagaaacactgaaacgtttccaaggccatgattaatctatttccccattctttaaccaaga

SEQ ID NO: 95208 - DNA, 80 bp, synthetic construct
  source 1..80: mol_type = other DNA
ctagtgagtgatttagtattgaaagctgagatgtgagtaaagaattcctctctgtattctaagtcatgcctcagtgcatg

SEQ ID NO: 95209 - DNA, 80 bp, synthetic construct; identical to SEQ ID NO: 17801
  source 1..80: mol_type = other DNA

SEQ ID NO: 95210 - DNA, 80 bp, synthetic construct
  source 1..80: mol_type = other DNA
gaagaagaaactatggtagacaatcatgtgcaaataaacacaatttcacaaataaacctagacatgcctgtcacaggttg

SEQ ID NO: 95211 - DNA, 80 bp, synthetic construct
  source 1..80: mol_type = other DNA
tcttatggaaagttctggatctgagatgtccattcatctgtctggagttgggcagaggagggtcaggttttcataccctc

SEQ ID NO: 95212 - DNA, 80 bp, synthetic construct; identical to SEQ ID NO: 17802
  source 1..80: mol_type = other DNA

SEQ ID NO: 95213 - DNA, 80 bp, synthetic construct
  source 1..80: mol_type = other DNA
acaagagaggaggtgttcaagggtgaaaggctgtgatggcagaaaagggcaagatgtgtacagggatgacaataagattg

SEQ ID NO: 95214 - DNA, 80 bp, synthetic construct
  source 1..80: mol_type = other DNA
tcagctttgacttaagaaacaagtagtaaacatcagaggcttcagagaaaacagttcttgctgctgtgtacagaataggt

SEQ ID NO: 95215 - DNA, 80 bp, synthetic construct
  source 1..80: mol_type = other DNA
gtgtgtttctttacattttttctagcgcctccttaaatgttttgccctaggcacctcgcttgcctctccagagtctgact

SEQ ID NO: 95216 - DNA, 80 bp, synthetic construct; identical to SEQ ID NO: 17803
  source 1..80: mol_type = other DNA

SEQ ID NO: 95217 - DNA, 80 bp, synthetic construct
  source 1..80: mol_type = other DNA
tatgattaaagaagtcggagatagtgaaagctggggcaattggttgtctctttaaattccaaaaggcactattgagtttt

SEQ ID NO: 95218 - DNA, 80 bp, synthetic construct
  source 1..80: mol_type = other DNA
atgagccggatgctagtgtaaccaagttggcagagcagtatgccaaagaggtatgctctttacatgtaaagctattattg

SEQ ID NO: 95219 - DNA, 80 bp, synthetic construct
  source 1..80: mol_type = other DNA
gcggctccaggctttccaaggttaccaggttacaatgaaggtacaaattgatgcctctctgaaggttcattaattccatt

SEQ ID NO: 95220 - DNA, 80 bp, synthetic construct; identical to SEQ ID NO: 17804
  source 1..80: mol_type = other DNA

SEQ ID NO: 95221 - DNA, 80 bp, synthetic construct
  source 1..80: mol_type = other DNA
aggggactcatctgtttggctgtcttccagtaagatctggaacaatgcttctcagtcttgagcaggtattagcatcacca

SEQ ID NO: 95222 - DNA, 80 bp, synthetic construct
  source 1..80: mol_type = other DNA
accctgaaagccaaatgcacaggggttttgtcagcaaagcaacaaatctactttggtggagaaagggattaagcaagtac

SEQ ID NO: 95223 - DNA, 80 bp, synthetic construct
  source 1..80: mol_type = other DNA
gactattcctagaggtagcctctgtttaataatttgatgtgtctctttgcagaccttttctgtgcatttacatatgtatg

SEQ ID NO: 95224 - DNA, 80 bp, synthetic construct
  source 1..80: mol_type = other DNA
aaaggataagtggaaccataatttacttaaaatgtttcctattgataaattaggctatttctgagaatgccgattacaaa

SEQ ID NO: 95225 - DNA, 80 bp, synthetic construct; identical to SEQ ID NO: 17805
  source 1..80: mol_type = other DNA

SEQ ID NO: 95226 - DNA, 80 bp, synthetic construct
  source 1..80: mol_type = other DNA
ttgcccattttctatttttttgccttttctattattggttataggagctctttatatattatggctaatcccttatcatg

SEQ ID NO: 95227 - DNA, 80 bp, synthetic construct
  source 1..80: mol_type = other DNA
aattttgctggtattttagaaactcaaaatgtcctgaacctagagcttgggtgggaggtaaaacaaaattgtagtacaaa

SEQ ID NO: 95228 - DNA, 80 bp, synthetic construct
  source 1..80: mol_type = other DNA
ctagtacatttgcattaagaatgaaaaatctaatgcatagtgcttataatcctgtttaattcacccctacctcattacct

SEQ ID NO: 95229 - DNA, 80 bp, synthetic construct; identical to SEQ ID NO: 17806
  source 1..80: mol_type = other DNA

SEQ ID NO: 95230 - DNA, 80 bp, synthetic construct
  source 1..80: mol_type = other DNA
aaatacaaaaattcactgggcatggtggcacatgcctgtagtcccagctactcaggaagctgaggcaggagaattgcttg

SEQ ID NO: 95231 - DNA, 80 bp, synthetic construct
  source 1..80: mol_type = other DNA
ctctccctttgcattgatgtctgactactggccatgtgtgtttttagatactgaagaaaacaaatatgactgccacatat

SEQ ID NO: 95232 - DNA, 80 bp, synthetic construct; identical to SEQ ID NO: 17807
  source 1..80: mol_type = other DNA

SEQ ID NO: 95233 - DNA, 80 bp, synthetic construct
  source 1..80: mol_type = other DNA
accaaaattcttaccacccttgatccgcctgagcaccagccaccagtttgccaaccattataagtcatataattcttatt

SEQ ID NO: 95234 - DNA, 80 bp, synthetic construct
  source 1..80: mol_type = other DNA
gggatatatgtgtttttaggtatagaacatttccaaatttcatggcaaaacttatcttaaaaattaatggttcctttcag

SEQ ID NO: 95235 - DNA, 80 bp, synthetic construct
  source 1..80: mol_type = other DNA
attactgtatcagccaggatcttacttgcaaacgggagtccactctaggtagataaatggaaagtaatgtattaagagac

SEQ ID NO: 95236 - DNA, 80 bp, synthetic construct; identical to SEQ ID NO: 17808
  source 1..80: mol_type = other DNA

SEQ ID NO: 95237 - DNA, 80 bp, synthetic construct
  source 1..80: mol_type = other DNA
ctttcagcctctggagtagagaaaagcaagctggaaaggactagcttctaattatttatctaatctataaattggaatag

SEQ ID NO: 95238 - DNA, 80 bp, synthetic construct
  source 1..80: mol_type = other DNA
actatggctgcttggcagccaaccgtgactcccttttcaatagaagtttgtatattaggcctaaatttgtcatatctaat

SEQ ID NO: 95239 - DNA, 80 bp, synthetic construct
  source 1..80: mol_type = other DNA
taaattacctagggggtcttgttaaggtgcagatttgaattctgtaggtctaagatggagcttgagatttggcacatcta

SEQ ID NO: 95240 - DNA, 80 bp, synthetic construct
  source 1..80: mol_type = other DNA
cagcctcacaagtagctgggattacaggcaggtgacaccatgcatagctaatttttgtatttttagtggcgggtaggggg

SEQ ID NO: 95241 - DNA, 80 bp, synthetic construct; identical to SEQ ID NO: 17809
  source 1..80: mol_type = other DNA

SEQ ID NO: 95242 - DNA, 80 bp, synthetic construct
  source 1..80: mol_type = other DNA
ccaaaacatcaattatggagatgctctgaacttcttatcttttaaagagcttattaaacaacgtctttaaaaccaattta

SEQ ID NO: 95243 - DNA, 80 bp, synthetic construct
  source 1..80: mol_type = other DNA
ccaagagacagaatcgtgttaaaatgaaagtagagagtctaaagtagaaagaatgctcacctgggagtgatgagacttga

SEQ ID NO: 95244 - DNA, 80 bp, synthetic construct
  source 1..80: mol_type = other DNA
aggaattctgttgagaaggattttgagcctgcctatggtgtgagacagaaagagtggcataactgattagcgtgccttac

SEQ ID NO: 95245 - DNA, 80 bp, synthetic construct; identical to SEQ ID NO: 17810
  source 1..80: mol_type = other DNA

SEQ ID NO: 95246 - DNA, 80 bp, synthetic construct
  source 1..80: mol_type = other DNA
ctcctgcctcagcctcccaagtagctgggattacaggtgcccgccactgtgcccggctaatttttgtatttttagtagag

SEQ ID NO: 95247 - DNA, 80 bp, synthetic construct
  source 1..80: mol_type = other DNA
cagcactgccgtgatacatttttctaagatgttctaatacttgtcttcctccagactaccctatccaatacagtagccag

SEQ ID NO: 95248 - DNA, 80 bp, synthetic construct
  source 1..80: mol_type = other DNA
aacatggtaaaactctgtctctactaaaaatacaaaaatattagcctggcatggtggcgcacatctgtaatcccagctac

SEQ ID NO: 95249 - DNA, 80 bp, synthetic construct; identical to SEQ ID NO: 17811
  source 1..80: mol_type = other DNA

SEQ ID NO: 95250 - DNA, 80 bp, synthetic construct
  source 1..80: mol_type = other DNA
tacactaaaataggatgaagggctttttctttaatggtgtagcattttttaaagcagaagtgtcctctttcagcactcag

SEQ ID NO: 95251 - DNA, 80 bp, synthetic construct
  source 1..80: mol_type = other DNA
ttcagtgattaataaggcagtaggactcacaaaaagtagatagatgttttccctctgcctataaattttacactggagct

SEQ ID NO: 95252 - DNA, 80 bp, synthetic construct
  source 1..80: mol_type = other DNA
gaggacacccagttaaatttgaattttggataaacaatgaataatttttagtctaagtatgtctcatgtactatttagaa

SEQ ID NO: 95253 - DNA, 80 bp, synthetic construct; identical to SEQ ID NO: 17812
  source 1..80: mol_type = other DNA

SEQ ID NO: 95254 - DNA, 80 bp, synthetic construct
  source 1..80: mol_type = other DNA
ttttgtctgtttgttgcctgtccccctactataatgaaaacttctttatgaaggcagtaaacctgtctgtaacgttcttt

SEQ ID NO: 95255 - DNA, 80 bp, synthetic construct
  source 1..80: mol_type = other DNA
ctggctctctctgtgatcttgggctcctaatcaacttaggcaagtaccttaacttcactaagaccagtttattcatatga

SEQ ID NO: 95256 - DNA, 80 bp, synthetic construct
  source 1..80: mol_type = other DNA
tcaccactcaggaaacttcctacatctcagtttctcgatctgtattttacatctcttaccatctcatacagtaggaaagg

SEQ ID NO: 95257 - DNA, 80 bp, synthetic construct; identical to SEQ ID NO: 17813
  source 1..80: mol_type = other DNA

SEQ ID NO: 95258 - DNA, 80 bp, synthetic construct
  source 1..80: mol_type = other DNA
atggaagtgcagatatccctgcaccagattggtttcagttcctttggatacatactaggaaatgggactgctggatcata

SEQ ID NO: 95259 - DNA, 80 bp, synthetic construct
  source 1..80: mol_type = other DNA
aatgcacaggagatccccccctctctgcattcctgtcaacacttatctttcatttttttaaaaataaaagccactctaat

SEQ ID NO: 95260 - DNA, 80 bp, synthetic construct; identical to SEQ ID NO: 17814
  source 1..80: mol_type = other DNA

SEQ ID NO: 95261 - DNA, 80 bp, synthetic construct
  source 1..80: mol_type = other DNA
ccacccaaatctcatattggattgtagctcccataattcccacatgttgtgggagggactggtgggagataattgaatca

SEQ ID NO: 95262 - DNA, 80 bp, synthetic construct
  source 1..80: mol_type = other DNA
ccctagccattggaactgtgagtccattaaacctctttttctttataaatttcccagtctcgggtatgtctttatcagca

SEQ ID NO: 95263 - DNA, 80 bp, synthetic construct
  source 1..80: mol_type = other DNA
ttctcaacaccatttgctgaagagactgtcctttccccattatgtgttcttggcacctctgtcaaaaagcaattgaccat

SEQ ID NO: 95264 - DNA, 80 bp, synthetic construct; identical to SEQ ID NO: 17815
  source 1..80: mol_type = other DNA

SEQ ID NO: 95265 - DNA, 80 bp, synthetic construct
  source 1..80: mol_type = other DNA
accttcttgatacaatttatacctaagtaattttttgttgctgttgcaaatgtgattattttcttaattttcttttcaga

SEQ ID NO: 95266 - DNA, 80 bp, synthetic construct
  source 1..80: mol_type = other DNA
acttatatgtggactctaaaaaagttgaactcatagaagtagagagtagaatgatgattaccagaggatgggggatggga

SEQ ID NO: 95267 - DNA, 80 bp, synthetic construct
  source 1..80: mol_type = other DNA
agataggtaagtaaggtgatggatatgttcattagcttgatttaatcattgcacattgtatacatatatcaaaacatcat

SEQ ID NO: 95268 - DNA, 80 bp, synthetic construct
  source 1..80: mol_type = other DNA
ccttagaattttgttgtattaaatgagataatgcatgaacattttcctctagctcaccaaagctcctggcacagtgcttg

SEQ ID NO: 95269 - DNA, 80 bp, synthetic construct; identical to SEQ ID NO: 17816
  source 1..80: mol_type = other DNA

SEQ ID NO: 95270 - DNA, 80 bp, synthetic construct
  source 1..80: mol_type = other DNA
atctcatttcaactctgtgacccactagtcctggaatgaggcctaattatgcagtgtttgtgtgtctagatcagtctgat

SEQ ID NO: 95271 - DNA, 80 bp, synthetic construct
  source 1..80: mol_type = other DNA
aattcaccttctctaggtccctaagcagactgtcgctaatgtttatccatttctttctttctttgttgtgtcatcaggct

SEQ ID NO: 95272 - DNA, 80 bp, synthetic construct; identical to SEQ ID NO: 17817
  source 1..80: mol_type = other DNA

SEQ ID NO: 95273 - DNA, 80 bp, synthetic construct
  source 1..80: mol_type = other DNA
acatttacttcaacataaaatactgtgttcataatgtataatgtctaagccattaagtgtaatctatgcttattacctaa

SEQ ID NO: 95274 - DNA, 80 bp, synthetic construct; identical to SEQ ID NO: 17818
  source 1..80: mol_type = other DNA

SEQ ID NO: 95275 - DNA, 80 bp, synthetic construct
  source 1..80: mol_type = other DNA
tatatttccatctttttgtccagccagcaaatgagagtctgtacccgaccatttcacaaaagaccaatgttggtcagaga

SEQ ID NO: 95276 - DNA, 80 bp, synthetic construct
  source 1..80: mol_type = other DNA
ttaaaaaaaaaaaaaaggtcaaaaccatgttcccaaaaccagcaacaggaacaaaaatccctgtaactatgaatgcctac

SEQ ID NO: 95277 - DNA, 80 bp, synthetic construct
  source 1..80: mol_type = other DNA
ttccttccactctccatcactctggccaaactcagtcccaactcagtgtcactgctcttgccattctttctccctgacag

SEQ ID NO: 95278 - DNA, 80 bp, synthetic construct; identical to SEQ ID NO: 17819
  source 1..80: mol_type = other DNA

SEQ ID NO: 95279 - DNA, 80 bp, synthetic construct
  source 1..80: mol_type = other DNA
atagggatgattttaagagcacatacttgacaggactgtggtgaggttaaatgaaacagttcctataaaaggcttagcgc

SEQ ID NO: 95280 - DNA, 80 bp, synthetic construct
  source 1..80: mol_type = other DNA
ctactaaaaatacaaaattagccaggcgtggtggcacatgcctgtaatcccagctactcgggaggctgaagcacaagaat

SEQ ID NO: 95281 - DNA, 80 bp, synthetic construct
  source 1..80: mol_type = other DNA
aaggcaggcagatcacctgaggtaaggagttcacgactagcctggccaacatggtgaaaccccgtctctactaaaaatac

SEQ ID NO: 95282 - DNA, 80 bp, synthetic construct
  source 1..80: mol_type = other DNA
aaaattagctattattattattcactgctgtatcactggtgcctgaggcatggccagctctccaaagagtattatatgaa

SEQ ID NO: 95283 - DNA, 80 bp, synthetic construct; identical to SEQ ID NO: 17820
  source 1..80: mol_type = other DNA

SEQ ID NO: 95284 - DNA, 80 bp, synthetic construct
  source 1..80: mol_type = other DNA
tgtctcagcctccccaatagctgggattactggtgcacaccatcgcacccagctcatttttgtatttttagtggagacag

SEQ ID NO: 95285 - DNA, 80 bp, synthetic construct
  source 1..80: mol_type = other DNA
aatctgttgaaacctaatcaccaatgtgatggtattaggaggtggggcttttgagaagtgattggtggttttgtaaaaca

SEQ ID NO: 95286 - DNA, 80 bp, synthetic construct; identical to SEQ ID NO: 17821
  source 1..80: mol_type = other DNA

SEQ ID NO: 95287 - DNA, 80 bp, synthetic construct
  source 1..80: mol_type = other DNA
tcgttctctcttcaaatccaaggaagcaagttttatatgaaagcacatactgcagatgatagttctgaggttcttaggtt

SEQ ID NO: 95288 - DNA, 80 bp, synthetic construct
  source 1..80: mol_type = other DNA
gcagaagtgtcacagctagctaagtgcatagggatagagaatgtcttttagaacatgcacttatcaaataaactttgcat

SEQ ID NO: 95289 - DNA, 80 bp, synthetic construct
  source 1..80: mol_type = other DNA
ctcagcctcctgagtagctgggattacaggcacgcactaccatgcccagctaatttttgtatgttagtagagacggggtt

SEQ ID NO: 95290 - DNA, 80 bp, synthetic construct
  source 1..80: mol_type = other DNA
ggcacgatctcggctcactgcaacctctgcctcccaggttcaagtgaccccagcctcccgagtagctgggattataggtg

SEQ ID NO: 95291 - DNA, 80 bp, synthetic construct; identical to SEQ ID NO: 17822
  source 1..80: mol_type = other DNA

SEQ ID NO: 95292 - DNA, 80 bp, synthetic construct
  source 1..80: mol_type = other DNA
ctcactgcagcctccacctcccaggttcaagccatcctcccacctcagcctcccgagtagctggaagtacagatgcatgc

SEQ ID NO: 95293 - DNA, 80 bp, synthetic construct
  source 1..80: mol_type = other DNA
tatttaccttaggggaaaaaacagggcttgaataaacactattaaaaacctatataaccccatactagtagagatcagga

SEQ ID NO: 95294 - DNA, 80 bp, synthetic construct
  source 1..80: mol_type = other DNA
catgttttccattcttctaagtgacacaaaaatatctagtttttgtgtttgcacagtgcctttcagaatgtcccacccat

SEQ ID NO: 95295 - DNA, 80 bp, synthetic construct; identical to SEQ ID NO: 17823
  source 1..80: mol_type = other DNA

SEQ ID NO: 95296 - DNA, 80 bp, synthetic construct
  source 1..80: mol_type = other DNA
tggacttctggcttcttgttcttcttctttttttttttagagacaaggccttcctgtgttacccaggctgttgttgaaca

SEQ ID NO: 95297 - DNA, 80 bp, synthetic construct
  source 1..80: mol_type = other DNA
tccttccccttagatagtactacatttcatgccattcatttggggaaatattggcaaagagagaatgaggacacacatgt

SEQ ID NO: 95298 - DNA, 80 bp, synthetic construct; identical to SEQ ID NO: 17824
  source 1..80: mol_type = other DNA

SEQ ID NO: 95299 - DNA, 80 bp, synthetic construct
  source 1..80: mol_type = other DNA
tgggattacaggtatgcgccaccatgcctggctaatttttgtatttttagtagagacagggtttcaccacgttgaccagg

SEQ ID NO: 95300 - DNA, 80 bp, synthetic construct; identical to SEQ ID NO: 17825
  source 1..80: mol_type = other DNA

SEQ ID NO: 95301 - DNA, 80 bp, synthetic construct
  source 1..80: mol_type = other DNA
ctgaggatttaaaaatgttaaatgctatacagttaagaagaggctgacaaactatggcccaccaggtaaatctaacccaa

SEQ ID NO: 95302 - DNA, 80 bp, synthetic construct
  source 1..80: mol_type = other DNA
gctaattttttgtacttttagtagagcggggtttcactgtgttagccaggatggtctcgatctcctgacctcatgatccg

SEQ ID NO: 95303 - DNA, 80 bp, synthetic construct; identical to SEQ ID NO: 17826
  source 1..80: mol_type = other DNA

SEQ ID NO: 95304 - DNA, 80 bp, synthetic construct
  source 1..80: mol_type = other DNA
cagagattgtaaggccagcacagctgaaagtatttgccgtctggtcatatatggaaaaagtttatcaatccctgcactaa

SEQ ID NO: 95305 - DNA, 80 bp, synthetic construct
  source 1..80: mol_type = other DNA
ctgggactacaggtgcgcaccaccatgcccagctaatttttgtatttttaggagagacggagtttcaccatgttggccag

SEQ ID NO: 95306 - DNA, 80 bp, synthetic construct; identical to SEQ ID NO: 17827
  source 1..80: mol_type = other DNA

SEQ ID NO: 95307 - DNA, 80 bp, synthetic construct
  source 1..80: mol_type = other DNA
atcccagctacttgggaggctgaggcacagaattgcttgaacctggcaggcggaggttgcagtgagccgacatcacacca

SEQ ID NO: 95308 - DNA, 80 bp, synthetic construct
  source 1..80: mol_type = other DNA
tttgagacagagtcttcctctgtcgcccaggctagagtgcaatggcacgatcttggctcactgcaacctccacctccagg

SEQ ID NO: 95309 - DNA, 80 bp, synthetic construct
  source 1..80: mol_type = other DNA
cctcccaaagtgctgggattacaggcgtgagccaccatgcccagcctagttattattattattattatttttttttgaga

SEQ ID NO: 95310 - DNA, 80 bp, synthetic construct
  source 1..80: mol_type = other DNA
tagagacagggtttcaccatgttggccaggctggtcttgaattcccgacctcaggtgatccacccgccttggcctctcaa

SEQ ID NO: 95311 - DNA, 80 bp, synthetic construct; identical to SEQ ID NO: 17828
  source 1..80: mol_type = other DNA

SEQ ID NO: 95312 - DNA, 80 bp, synthetic construct
  source 1..80: mol_type = other DNA
gtctctgctcatggcttcaacagtgaatactcaagtagttattcattactcctagacaactactttcccactgtaactag

SEQ ID NO: 95313 - DNA, 80 bp, synthetic construct
  source 1..80: mol_type = other DNA
aggtgcctgacatgacatctggctaatttttgtagttttagtagagacggggttttaccatgttggccaggctggtctcg

SEQ ID NO: 95314 - DNA, 80 bp, synthetic construct; identical to SEQ ID NO: 17829
  source 1..80: mol_type = other DNA

SEQ ID NO: 95315 - DNA, 80 bp, synthetic construct
  source 1..80: mol_type = other DNA
cctcctgggttcaagcaattctctttcctcagtctcccaagtagctgggattacaggcatgcgccaccacgcccacctaa

SEQ ID NO: 95316 - DNA, 80 bp, synthetic construct
  source 1..80: mol_type = other DNA
gtgcacaaagtatataatgatcaaggcggggtatttggggtacccatcacctcgagaatctatcatttctatgtattggg

SEQ ID NO: 95317 - DNA, 80 bp, synthetic construct
  source 1..80: mol_type = other DNA
tagccaagactattagtgcaagagctgagtaactgtatttatttctgtgtgagaagactgaagcctaagagtaaagcatg

SEQ ID NO: 95318 - DNA, 80 bp, synthetic construct
  source 1..80: mol_type = other DNA
tgtaatcccagctacttggaagactgaggcaggacaattaattgaacctagaaggcagaggttgcagtgagctgagatcg

SEQ ID NO: 95319 - DNA, 80 bp, synthetic construct; identical to SEQ ID NO: 17830
  source 1..80: mol_type = other DNA

SEQ ID NO: 95320 - DNA, 80 bp, synthetic construct
  source 1..80: mol_type = other DNA
ttaccatttcagaataggctttgtgacagactgaagcttggtaagaatcatcaatgtgcatctttttcaggagttgacca

SEQ ID NO: 95321 - DNA, 80 bp, synthetic construct
  source 1..80: mol_type = other DNA
tgatagttcagccttagattaaatctacaatgcccctagggataaatctctccaaattccatgaggaaggttccatcatc

SEQ ID NO: 95322 - DNA, 80 bp, synthetic construct; identical to SEQ ID NO: 17831
  source 1..80: mol_type = other DNA

SEQ ID NO: 95323 - DNA, 80 bp, synthetic construct
  source 1..80: mol_type = other DNA
cctgcctcagcctcccgagtagctgggactacaggcgcccgccactacgcccggctaattttttgtatttttagtagaga

SEQ ID NO: 95324 - DNA, 80 bp, synthetic construct
  source 1..80: mol_type = other DNA
gtgcagtggtgccatcttggctcactgcaatctgcacctcccaggttccagcaattcttccacctcagccttccaagtag

SEQ ID NO: 95325 - DNA, 80 bp, synthetic construct; identical to SEQ ID NO: 17832
  source 1..80: mol_type = other DNA

SEQ ID NO: 95326 - DNA, 80 bp, synthetic construct
  source 1..80: mol_type = other DNA
ttttttgtagagacagggtttcactatattgcccaggctggtcttgaactcctgggctcaagcaatcctcccacctcagc

SEQ ID NO: 95327 - DNA, 80 bp, synthetic construct
  source 1..80: mol_type = other DNA
aatggcacagcctcggctcactgcaacctctgcctcccaggttcaagcaattctcctgcctcagcctcctgagtagcagg

SEQ ID NO: 95328 - DNA, 80 bp, synthetic construct; identical to SEQ ID NO: 17833
  source 1..80: mol_type = other DNA

SEQ ID NO: 95329 - DNA, 80 bp, synthetic construct
  source 1..80: mol_type = other DNA
cccctccaagctgcatgaactcacttgagactacagcagtccacagtcatctcctctcctttaattttgtccatatacct

SEQ ID NO: 95330 - DNA, 80 bp, synthetic construct
  source 1..80: mol_type = other DNA
gtgtcctacagagtttcatacatggtctgtatttagtaattgttctttcctcaaatcccaaatcactttgaccttatgtg

SEQ ID NO: 95331 - DNA, 80 bp, synthetic construct; identical to SEQ ID NO: 17834
  source 1..80: mol_type = other DNA

SEQ ID NO: 95332 - DNA, 80 bp, synthetic construct
  source 1..80: mol_type = other DNA
ctcctgcctcagcctcccgagtagctgggactacaggcacccaccaccacgcctggcgaattttttgtatttttagtaga

SEQ ID NO: 95333 - DNA, 80 bp, synthetic construct
  source 1..80: mol_type = other DNA
taagaaatatttagaccttcagcatagtttccaaaaaaagccacttgacacttgagtataacatgaatcacttgagacat

SEQ ID NO: 95334 - DNA, 80 bp, synthetic construct
  source 1..80: mol_type = other DNA
gagacatggtacctgtcttcaaaaacgagagaggataaataacacaaagcagcaaatactaaattaaaaatcaaggcagg

SEQ ID NO: 95335 - DNA, 80 bp, synthetic construct
  source 1..80: mol_type = other DNA
tcaaggctggtggcatgcatctgtagtcctgctactcaggaggctgaggtgggaggactgcttgagcctgagaggttgag

SEQ ID NO: 95336 - DNA, 80 bp, synthetic construct; identical to SEQ ID NO: 17835
  source 1..80: mol_type = other DNA

SEQ ID NO: 95337 - DNA, 80 bp, synthetic construct
  source 1..80: mol_type = other DNA
cttgtgccaaggagttcaagaccagcctgagtaacataccaagttctcatctctacaaaaaatttaaaaattagcagggc

SEQ ID NO: 95338 - DNA, 80 bp, synthetic construct
  source 1..80: mol_type = other DNA
atcccttcccaatctcaaattcctttgtgacctcttatatacgaaatgccaaaggactacttatagaaaaagggtacaac

SEQ ID NO: 95339 - DNA, 80 bp, synthetic construct
  source 1..80: mol_type = other DNA
tttcttttgagggatgagggtagagttgaagaaagagtatttacaatgtagtcgaataaaaaatgacctgcgtttgagcc

SEQ ID NO: 95340 - DNA, 80 bp, synthetic construct; identical to SEQ ID NO: 17836
  source 1..80: mol_type = other DNA

SEQ ID NO: 95341 - DNA, 80 bp, synthetic construct
  source 1..80: mol_type = other DNA
tttctggtgggaagggcacaacgtttctctcaagggccatacttttctagtttattcctagaaggttagggttgtaagtc

SEQ ID NO: 95342 - DNA, 80 bp, synthetic construct
  source 1..80: mol_type = other DNA
caatctattttcctaatacaaattaaacttgcaagtaagtgcctgtggctgggtatggttctccctatagtcagaaaaga

SEQ ID NO: 95343 - DNA, 80 bp, synthetic construct
  source 1..80: mol_type = other DNA
gatggctggggactcctgtgatggtttccctatcacaaatctgttaatttggttcctgtgatcacacttttttcttttct

SEQ ID NO: 95344 - DNA, 80 bp, synthetic construct; identical to SEQ ID NO: 17837
  source 1..80: mol_type = other DNA

SEQ ID NO: 95345 - DNA, 80 bp, synthetic construct
  source 1..80: mol_type = other DNA
caattctattgacttttaaaaaattattatttttttttgagacagaatcttgctctgtcgcccaggctggagtgcagtgg

SEQ ID NO: 95346 - DNA, 80 bp, synthetic construct
  source 1..80: mol_type = other DNA
cctgatttttttggttgtaagtttgtctgtcctagtaaacagttaacttggctgaacttgaactccaaatgccgaaactg

SEQ ID NO: 95347 - DNA, 80 bp, synthetic construct
  source 1..80: mol_type = other DNA
atttagggttcttttttttattttttgctctctcctttttaggacttttcccctccctttctagcagctgcgatcaccct

SEQ ID NO: 95348 - DNA, 80 bp, synthetic construct; identical to SEQ ID NO: 17838
  source 1..80: mol_type = other DNA

SEQ ID NO: 95349 - DNA, 80 bp, synthetic construct
  source 1..80: mol_type = other DNA
ggttatgtctcaattaatatgatgttgttggtaagtcaagtatatagtatctgacaaaaaaaccacaatcaggccgggcg

SEQ ID NO: 95350 - DNA, 80 bp, synthetic construct
  source 1..80: mol_type = other DNA
ctctactaaaaaatacaaaaattagctgggtgtggtggcacatgcctataatcccagctactcgggaggctgaggcagga

SEQ ID NO: 95351 - DNA, 80 bp, synthetic construct; identical to SEQ ID NO: 17839
  source 1..80: mol_type = other DNA

SEQ ID NO: 95352 - DNA, 80 bp, synthetic construct
  source 1..80: mol_type = other DNA
tgtaattaaaacagtatgaaaagtcagtactttgcactaaagcagtctctaggtagcccttctccgcattgttgaactgc

SEQ ID NO: 95353 - DNA, 80 bp, synthetic construct
  source 1..80: mol_type = other DNA
tctataaaccttttgtttctttctgcattcctatctcaatgaattgcatcaccatctaatgtccaagtttcagggttggt

SEQ ID NO: 95354 - DNA, 80 bp, synthetic construct
  source 1..80: mol_type = other DNA
ctctcagaaatctgtctgcttcttcccatctccactaacatacccctaatttaagcaaacaattatcatctcttgcctag

SEQ ID NO: 95355 - DNA, 80 bp, synthetic construct; identical to SEQ ID NO: 17840
  source 1..80: mol_type = other DNA

SEQ ID NO: 95356 - DNA, 80 bp, synthetic construct
  source 1..80: mol_type = other DNA
gatggagtgtggtggcgtgatcacagctcactgcacccttgaactcctgagctcaagtgatccttccacctcagactccc

SEQ ID NO: 95357 - DNA, 80 bp, synthetic construct
  source 1..80: mol_type = other DNA
tgtgcccagcagaggtatttctaacatttaagggacacacagatttcaagaagactgaagaacaaactacatttgctgag

SEQ ID NO: 95358 - DNA, 80 bp, synthetic construct
  source 1..80: mol_type = other DNA
gatgcggtacatgcttatattacacccccagcacagaaaaacgagatcctagttacccaactttctctgaaacctgtgat

SEQ ID NO: 95359 - DNA, 80 bp, synthetic construct; identical to SEQ ID NO: 17841
  source 1..80: mol_type = other DNA

SEQ ID NO: 95360 - DNA, 80 bp, synthetic construct
  source 1..80: mol_type = other DNA
agcctcctgagtagctgggattataggtgcgcaccaccacacctggctaatttttctgtatttttgtagagacggggttt

SEQ ID NO: 95361 - DNA, 80 bp, synthetic construct
  source 1..80: mol_type = other DNA
gaatgcagtggtggcacgatcttagctcactgcaacctctgtttcccgggttcaggcaattctcctgcctcagcctcctg

SEQ ID NO: 95362 - DNA, 80 bp, synthetic construct
  source 1..80: mol_type = other DNA
tgagccactgcgcccagcctaggttcacattttaaatagaaacttcagtcagggatgtcattctattgatttttttttaa

SEQ ID NO: 95363 - DNA, 80 bp, synthetic construct; identical to SEQ ID NO: 17842
  source 1..80: mol_type = other DNA

SEQ ID NO: 95364 - DNA, 80 bp, synthetic construct
  source 1..80: mol_type = other DNA
tagtgcttactgagcatttacctaatgcaaggtataattctaacaataggggaataattgggtatattttggcatgtgaa

SEQ ID NO: 95365 - DNA, 80 bp, synthetic construct
  source 1..80: mol_type = other DNA
tttttttttttgagtcggagtttcactcttgttgcccagccttgagtgcaatggcacaatctcagctcattgcaacttcc

SEQ ID NO: 95366 - DNA, 80 bp, synthetic construct
  source 1..80: mol_type = other DNA
ctcgcctggccagaaaaatgtttatatgtatggtgagaaaagacagatctaaaaattttaagcacactaagattgcaagc

SEQ ID NO: 95367 - DNA, 80 bp, synthetic construct; identical to SEQ ID NO: 17843
  source 1..80: mol_type = other DNA

SEQ ID NO: 95368 - DNA, 80 bp, synthetic construct
  source 1..80: mol_type = other DNA
ccaagatcgccccactgcactccagcctgggcaacagagtatgactctctctccaaaaacaaacaaacaaacaaaaaacc

SEQ ID NO: 95369 - DNA, 80 bp, synthetic construct
  source 1..80: mol_type = other DNA
tgtggtagctcacacctgtaatcccagcactttgcgaggctgaggcaggcggattgcctgaggtcaggagttcaagaaca

SEQ ID NO: 95370 - DNA, 80 bp, synthetic construct
  source 1..80: mol_type = other DNA
tgcactccagcctgggtgacagagcaggactccatctcaataaaaagaagaagaaaaaaatacaataaaaaattagccag

SEQ ID NO: 95371 - DNA, 80 bp, synthetic construct
  source 1..80: mol_type = other DNA
tgtgataaagcgaacaaagcaggatgttaatggtagagtctagaatggtgggtatatgggtgctcactatacaacttttc

SEQ ID NO: 95372 - DNA, 80 bp, synthetic construct; identical to SEQ ID NO: 17844
  source 1..80: mol_type = other DNA

SEQ ID NO: 95373 - DNA, 80 bp, synthetic construct
  source 1..80: mol_type = other DNA
gacacaatggcaacagttctgttaaagtggcactcgagtgctgttttatgcaaagcataagtatgcaaagtgatgaatta

SEQ ID NO: 95374 - DNA, 80 bp, synthetic construct
  source 1..80: mol_type = other DNA
gggactgagtctcactttatcacccaggctggagtgcagtggtgcaatctcggcttactgcaaccttcgcctcccgggtt

SEQ ID NO: 95375 - DNA, 80 bp, synthetic construct
  source 1..80: mol_type = other DNA
caaagtgctggggttacaggcatgagccaccgtgcccggcccatgaaagattttaaaatgtatagtccagatggaataaa

SEQ ID NO: 95376 - DNA, 80 bp, synthetic construct; identical to SEQ ID NO: 17845
  source 1..80: mol_type = other DNA

SEQ ID NO: 95377 - DNA, 80 bp, synthetic construct
  source 1..80: mol_type = other DNA
gatcgagaccatcctggctaacaaggtgaaaccccgtctctactaaaaatacaaaaaattagctgggcgcggtggcgggc

SEQ ID NO: 95378 - DNA, 80 bp, synthetic construct
  source 1..80: mol_type = other DNA
ataatcacaaaggcatttttaagaaaacaagaaagattaaaatcaagtaagcatgcagctcaggaagtcagtacaagaac

SEQ ID NO: 95379 - DNA, 80 bp, synthetic construct; identical to SEQ ID NO: 17846
  source 1..80: mol_type = other DNA

SEQ ID NO: 95380 - DNA, 80 bp, synthetic construct
  source 1..80: mol_type = other DNA
atggcaaaaccccatttctactaaaaatacaaaaattagcaaggcgtggtggcgcacacttgtaatcccagctactatgg

SEQ ID NO: 95381 - DNA, 80 bp, synthetic construct
  source 1..80: mol_type = other DNA
agagcataggtattactatgcatcctttatagaaaaggaatctggggctcagaggttacacaatttgtccaaggtgacat

SEQ ID NO: 95382 - DNA, 80 bp, synthetic construct
  source 1..80: mol_type = other DNA
tagaactgctccccattttcttataaatcaccataagtgattcttccagaaacattacaccatttgagtaggagaggcat

SEQ ID NO: 95383 - DNA, 80 bp, synthetic construct
  source 1..80: mol_type = other DNA
agcagctgggattataggcgcccaccaccacgcccggctaatttttgtatttttagtagagatggggtttcatcatgttg

SEQ ID NO: 95384 - DNA, 80 bp, synthetic construct; identical to SEQ ID NO: 17847
  source 1..80: mol_type = other DNA

SEQ ID NO: 95385 - DNA, 80 bp, synthetic construct
  source 1..80: mol_type = other DNA
tcatatgtaagacacgagacactggaagagaatattcttctgacctttaactctgaaaccaattgtaggttgcctgggtt

SEQ ID NO: 95386 - DNA, 80 bp, synthetic construct
  source 1..80: mol_type = other DNA
atgtctgcctgcattacccactcatcaaaatgtctacttcgtattgtctttatttcctcttataacagcagcaaagctcc

SEQ ID NO: 95387 - DNA, 80 bp, synthetic construct
  source 1..80: mol_type = other DNA
cgcaagcaagtcatgctgtttacattcactaaggcatttcattccttcagagaaaatttcacagaggaaatggattgtac

SEQ ID NO: 95388 - DNA, 80 bp, synthetic construct; identical to SEQ ID NO: 17848
  source 1..80: mol_type = other DNA

SEQ ID NO: 95389 - DNA, 80 bp, synthetic construct
  source 1..80: mol_type = other DNA
taaagtaatatggatgaagaaaggcccgtctttgtatgctggctttgcgagtttggccttttgggatgtgattttcctgg

SEQ ID NO: 95390 - DNA, 80 bp, synthetic construct
  source 1..80: mol_type = other DNA
tcaagcttaagaggtccaaagtcttcatcaggtaactgaaagtctgtgatactgagaaaagacagtagttgctttaaact

SEQ ID NO: 95391 - DNA, 80 bp, synthetic construct
  source 1..80: mol_type = other DNA
acaatctgtttcactgatgacaaagagaataggatctcctagatttaaaagaaacattttaatgaaccttaatttcccca

SEQ ID NO: 95392 - DNA, 80 bp, synthetic construct; identical to SEQ ID NO: 17849
  source 1..80: mol_type = other DNA

SEQ ID NO: 95393 - DNA, 80 bp, synthetic construct
  source 1..80: mol_type = other DNA
acacttgtagtctcagcactttcagaggctgaggcaggcggatcacttgaggtcaggagttcaagaccagcctggccaac

SEQ ID NO: 95394 - DNA, 80 bp, synthetic construct
  source 1..80: mol_type = other DNA
actgcactccagcctgggcgacagagtgagactctgtctcaaaaaaaaaaaaaaaaaaaaaaaaaactaaactaaaaaaa

SEQ ID NO: 95395 - DNA, 80 bp, synthetic construct
  source 1..80: mol_type = other DNA
aaataaataaaaccaaaccaaacaaaacagtgtatggccaacagtataaataaataaatacataaataaataaaaccaaa

SEQ ID NO: 95396 - DNA, 80 bp, synthetic construct; identical to SEQ ID NO: 17850
  source 1..80: mol_type = other DNA

SEQ ID NO: 95397 - DNA, 80 bp, synthetic construct
  source 1..80: mol_type = other DNA
catcagcctcctgagtagcaatttaccgctcttattgcaaatggtatcccacatcattcaaaatgttgctatatcctcaa

SEQ ID NO: 95398 - DNA, 80 bp, synthetic construct
  source 1..80: mol_type = other DNA
ttgaggccagcctggacaacatggtgaaaccccgtctctactaaaaatacaaaaattacccaggcatggtggcaggcgcc

SEQ ID NO: 95399 - DNA, 80 bp, synthetic construct
  source 1..80: mol_type = other DNA
acaaaaggtcacatattgtatgattccatatatatgaaatacccagaacaggtaaatccatagagatagaatgcagattg

SEQ ID NO: 95400 - DNA, 80 bp, synthetic construct; identical to SEQ ID NO: 17851
  source 1..80: mol_type = other DNA

SEQ ID NO: 95401 - DNA, 80 bp, synthetic construct
  source 1..80: mol_type = other DNA
ggtgggcacctgtaatctcagctactcagggggctgaggtgggagaatcgcttgaacctgggaggcagaggttgcagtga

SEQ ID NO: 95402 - DNA, 80 bp, synthetic construct
  source 1..80: mol_type = other DNA
gtcacaattattatttttggattaattagtcacagcttatagaccaagtccatgtccaatggtacagagcagcctgctac

SEQ ID NO: 95403 - DNA, 80 bp, synthetic construct
  source 1..80: mol_type = other DNA
atctggcccattctagaaagtatgctgatccctagtttagagccacaatgaattacccagattttgtgcttagttcatca

SEQ ID NO: 95404 - DNA, 80 bp, synthetic construct; identical to SEQ ID NO: 17852
  source 1..80: mol_type = other DNA

SEQ ID NO: 95405 - DNA, 80 bp, synthetic construct
  source 1..80: mol_type = other DNA
atttttttttgtagagatggggtttcatcattttacccaagctggtctcaaactcctgggctcaagcaatcctcccacct

SEQ ID NO: 95406 - DNA, 80 bp, synthetic construct
  source 1..80: mol_type = other DNA
aacaaccaatacattttccttttcagtgttgaattgtttcagctctattagtgaactctggcaccataccgccaggtttg

SEQ ID NO: 95407 - DNA, 80 bp, synthetic construct
  source 1..80: mol_type = other DNA
gagaatgaaaatagattctacctcacataggactgctgtgatgattcaatgagttagtatctgtacaacatttagaaagt

SEQ ID NO: 95408 - DNA, 80 bp, synthetic construct
  source 1..80: mol_type = other DNA
tacatgccagtagtcccagctagttgggaggctgaggcaggaggaacatttgagcccaggagatagaggctgcaccacgg

SEQ ID NO: 95409 - DNA, 80 bp, synthetic construct; identical to SEQ ID NO: 17853
  source 1..80: mol_type = other DNA

SEQ ID NO: 95410 - DNA, 80 bp, synthetic construct
  source 1..80: mol_type = other DNA
atttttcgtgctgatatttgtgtgaggtgacttcttccttggacctgttaacaatcgacaggctagaagttggcaaaagt

SEQ ID NO: 95411 - DNA, 80 bp, synthetic construct
  source 1..80: mol_type = other DNA
ttgaacttggttgtcctgtgcatgtgccagacatcctaatttcactttggtcagtttcctcattggaaaggtttaaattt

SEQ ID NO: 95412 - DNA, 80 bp, synthetic construct; identical to SEQ ID NO: 17854
  source 1..80: mol_type = other DNA

SEQ ID NO: 95413 - DNA, 80 bp, synthetic construct
  source 1..80: mol_type = other DNA
gcagttggccacttttacttatagctttatttacaaggaggttatctgtagagacagtcatttttttgccttgtgcctcc

SEQ ID NO: 95414 - DNA, 80 bp, synthetic construct
  source 1..80: mol_type = other DNA
atgtatcaacacctttttctggttgggcagttggtggaattaatacactgtcttcattaatttctgtaactggttctgga

SEQ ID NO: 95415 - DNA, 80 bp, synthetic construct
  source 1..80: mol_type = other DNA
gatttcttcctgttcctttagtcttttcccagacaatctgagtgaatcagtgccaaagacacagtctctctcctgtgaaa

SEQ ID NO: 95416 - DNA, 80 bp, synthetic construct
  source 1..80: mol_type = other DNA
aacatcaagtgtgatagatgtcttttctccagtttcttcatcaagatgggttttgatgtgtaacttgtcataaacacata

SEQ ID NO: 95417 - DNA, 80 bp, synthetic construct; identical to SEQ ID NO: 17855
  source 1..80: mol_type = other DNA

SEQ ID NO: 95418 - DNA, 80 bp, synthetic construct
  source 1..80: mol_type = other DNA
aaacagcattgtgctaaaaatgttttttaaacgaacagagtattctttatcacacaatctcttctcttaacttctaaatc

SEQ ID NO: 95419 - DNA, 80 bp, synthetic construct
  source 1..80: mol_type = other DNA
aacatcagaattgatcattgtttttagaatattttcacctagaatttttctctgttcatatatacttacatttttaaaaa

SEQ ID NO: 95420 - DNA, 80 bp, synthetic construct
  source 1..80: mol_type = other DNA
cgcctgtagtcccaggtactcgggaggctgaggcaggagaattgcttgaacccaggaggtggaggctgcagtgagctgtg

SEQ ID NO: 95421 - DNA, 80 bp, synthetic construct; identical to SEQ ID NO: 17856
  source 1..80: mol_type = other DNA

SEQ ID NO: 95422 - DNA, 80 bp, synthetic construct
  source 1..80: mol_type = other DNA
gaggctgaggcacgagaatcacttgagcctgggagttggaggttgtagtgagccaagattgtgccactgcactccagcct

SEQ ID NO: 95423 - DNA, 80 bp, synthetic construct
  source 1..80: mol_type = other DNA
ctagatttacctgagtgttttagctgcggtgagagatcctgctgagacaaacaatcttgttcttctactgttttcttaat

SEQ ID NO: 95424 - DNA, 80 bp, synthetic construct
  source 1..80: mol_type = other DNA
gctagtgtcttgctgtattcccttttcaagaatgctaatttctcctttaactggaagaagaaaaacaccaacaatactgg

SEQ ID NO: 95425 - DNA, 80 bp, synthetic construct; identical to SEQ ID NO: 17857
  source 1..80: mol_type = other DNA

SEQ ID NO: 95426 - DNA, 80 bp, synthetic construct
  source 1..80: mol_type = other DNA
tttatccgttaatggtccaggtatctctagtacctggaataataattgatacccactatgtgtcaattagtgctccagat

SEQ ID NO: 95427 - DNA, 80 bp, synthetic construct
  source 1..80: mol_type = other DNA
gaggcatttttgactatcatttgagcctaagactgaatgaggaaggagctagttttgggaagatcagagggaacggtacc

SEQ ID NO: 95428 - DNA, 80 bp, synthetic construct; identical to SEQ ID NO: 17858
  source 1..80: mol_type = other DNA

SEQ ID NO: 95429 - DNA, 80 bp, synthetic construct
  source 1..80: mol_type = other DNA
cccaacacttggggaagctgaggtgggtggatcatttgaggtcaagagttcgagacccgcctggccaacatggtgaaatc

SEQ ID NO: 95430 - DNA, 80 bp, synthetic construct
  source 1..80: mol_type = other DNA
aaaaaaaaaaaaaaaaaaggccgggtgcagtggctcacacctgtaatcccagcactttggaaggccaaggcgggcagatt

SEQ ID NO: 95431 - DNA, 80 bp, synthetic construct
  source 1..80: mol_type = other DNA
atagagcggagagtctgtctcaaaaacaaacaaaacaaaacctatgtgcaaaacatgctactagacaagttgccaaccgt

SEQ ID NO: 95432 - DNA, 80 bp, synthetic construct; identical to SEQ ID NO: 17859
  source 1..80: mol_type = other DNA

SEQ ID NO: 95433 - DNA, 80 bp, synthetic construct
  source 1..80: mol_type = other DNA
ataacatcagcacaagctggaaacatcctaaaagtctatcagtaaagtacagtctaaagaagcaagggcacttccaaggc

SEQ ID NO: 95434 - DNA, 80 bp, synthetic construct
  source 1..80: mol_type = other DNA
agaaaaggaagaaaaaagaaacaaaacgagggcacttccaaactacaacatactgtctagaacttaaaaaagaaagcaag

SEQ ID NO: 95435 - DNA, 80 bp, synthetic construct
  source 1..80: mol_type = other DNA
gtagataaacatgtcctgacaggaaagctaaacggaacctgcagaaccattcagatcataccatttatgaacattccctt

SEQ ID NO: 95436 - DNA, 80 bp, synthetic construct; identical to SEQ ID NO: 17860
  source 1..80: mol_type = other DNA

SEQ ID NO: 95437 - DNA, 80 bp, synthetic construct
  source 1..80: mol_type = other DNA
aaagccaggcctaaaaccctgggaaagcggggtcagagtcctgcgtccgcccttcccgcacccccggcaccttttccttc

SEQ ID NO: 95438 - DNA, 80 bp, synthetic construct
  source 1..80: mol_type = other DNA
gaggcgccccaggaaggaatggggagcccgggatcgcaccctcagtgcgcgatcagctgacccacgcgggccaagcgcgc

SEQ ID NO: 95439 - DNA, 80 bp, synthetic construct; identical to SEQ ID NO: 17861
  source 1..80: mol_type = other DNA

SEQ ID NO: 95440 - DNA, 80 bp, synthetic construct
  source 1..80: mol_type = other DNA
ccaggattccgcgcgccccttcacgcgccctgctcctgaacttcagctcctgcacagtcctccccaccgcaaggctcaag

SEQ ID NO: 95441 - DNA, 80 bp, synthetic construct
  source 1..80: mol_type = other DNA
gcaggaggacgaggacggcgactacgaggagctggtgctagccttgcgttccgaggaggacggcctggccgaagcacccg

SEQ ID NO: 95442 - DNA, 80 bp, synthetic construct
  source 1..80: mol_type = other DNA
tcttcgcttggcacgatcttggggactgcaggcaaggcggcgggggaggacgggtagtggggagcacggtggagagcggg

SEQ ID NO: 95443 - DNA, 80 bp, synthetic construct; identical to SEQ ID NO: 17862
  source 1..80: mol_type = other DNA

SEQ ID NO: 95444 - DNA, 80 bp, synthetic construct
  source 1..80: mol_type = other DNA
aagaaaagaaccagctgaaggggcaggggagaaggggcggaggtattctcgaggcccattggcgtcctttaggactcagg

SEQ ID NO: 95445 - DNA, 80 bp, synthetic construct
  source 1..80: mol_type = other DNA
agcttcttcccggggcgagaccactagctttttctaagtattaccagcccaggacttggctgaggttctgtgtcccccag

SEQ ID NO: 95446 - DNA, 80 bp, synthetic construct; identical to SEQ ID NO: 17863
  source 1..80: mol_type = other DNA

SEQ ID NO: 95447 - DNA, 80 bp, synthetic construct
  source 1..80: mol_type = other DNA
tgactttctcgagggatgttgtggggttgtggccaggataagaaagggcatttcaagttaccactgctccaaaacaactg

SEQ ID NO: 95448 - DNA, 80 bp, synthetic construct
  source 1..80: mol_type = other DNA
gtttcttctctggtggaagtttggaacaggagcctcctcaagttcatttattcattcattcaatggttattttgtgggaa

SEQ ID NO: 95449 - DNA, 80 bp, synthetic construct; identical to SEQ ID NO: 17864
  source 1..80: mol_type = other DNA

SEQ ID NO: 95450 - DNA, 80 bp, synthetic construct
  source 1..80: mol_type = other DNA
tgcagtctcagctcactgcaacatctgtctcccgggttcaagtggttctcctgcctcagcctcccaagaagctgggatta

SEQ ID NO: 95451 - DNA, 80 bp, synthetic construct
  source 1..80: mol_type = other DNA
gccaccacgcctggcctccacagttctttatccaccgtctgaaatgtaaaatgttacgaaaaccaaaagttttttttgtg

SEQ ID NO: 95452 - DNA, 80 bp, synthetic construct; identical to SEQ ID NO: 17865
  source 1..80: mol_type = other DNA

SEQ ID NO: 95453 - DNA, 80 bp, synthetic construct
  source 1..80: mol_type = other DNA
gttcttaagcaggtatgtctgcctgagagcagttggagcagacaagagctaaaaaccaaacaaatcaccatagatagtgg

SEQ ID NO: 95454 - DNA, 80 bp, synthetic construct
  source 1..80: mol_type = other DNA
tcccttgaaggctgattattaaaaagagcttggcacctccctctcttctctcttgcttcttctcttgccatgtgattgat

SEQ ID NO: 95455 - DNA, 80 bp, synthetic construct
  source 1..80: mol_type = other DNA
cttttctctctctttaagaagtgttgcctttgctcacttagtcatcccttctgcctgcatttgtagagcatctggatggg

SEQ ID NO: 95456 - DNA, 80 bp, synthetic construct; identical to SEQ ID NO: 17866
  source 1..80: mol_type = other DNA

SEQ ID NO: 95457 - DNA, 80 bp, synthetic construct
  source 1..80: mol_type = other DNA
accatgtgaataataatagttggcctatatgagttctttaatttgctttttggtccgcatttggtaacttctttatcatc

SEQ ID NO: 95458 - DNA, 80 bp, synthetic construct
  source 1..80: mol_type = other DNA
ggagacccacctctcgcagtcagagcgcactgcccgccgcctgcaggcccaggctgcccgccggggatacctcaccaaga

SEQ ID NO: 95459 - DNA, 80 bp, synthetic construct
  source 1..80: mol_type = other DNA
atcagaaggggacagcaagtatgtattgagcacttatcgggtaccaagcacagtaactactggctttctgtatagaattc

SEQ ID NO: 95460 - DNA, 80 bp, synthetic construct
  source 1..80: mol_type = other DNA
cggaaacctgtagggacaaggccctgggatgttcagtggagcctgagtcattttataaaaaagcatgactctagggtcca

SEQ ID NO: 95461 - DNA, 80 bp, synthetic construct; identical to SEQ ID NO: 17867
  source 1..80: mol_type = other DNA

SEQ ID NO: 95462 - DNA, 80 bp, synthetic construct
  source 1..80: mol_type = other DNA
gtctcctagctgcactgcactgctgccccatgggttaatcagctcagcataccgtggctgaacagctacctcataccaag

SEQ ID NO: 95463 - DNA, 80 bp, synthetic construct
  source 1..80: mol_type = other DNA
tggaaacccgtagtctaagtagaggagactgacaagtcaatgccttccatcagtctgctcaacacacgtttaccaagtgc

SEQ ID NO: 95464 - DNA, 80 bp, synthetic construct
  source 1..80: mol_type = other DNA
tgacaggcacgagccccacaggccagggcagctgctcagaggagagtaggccaagcagaaggcaaacagaaggctgcagg

SEQ ID NO: 95465 - DNA, 80 bp, synthetic construct; identical to SEQ ID NO: 17868
  source 1..80: mol_type = other DNA

SEQ ID NO: 95466 - DNA, 80 bp, synthetic construct
  source 1..80: mol_type = other DNA
tgccatgcgcagggagtcaggaggtagggagggagtggggcagatgcacaccatttttttttttttttgagactctgttg

SEQ ID NO: 95467 - DNA, 80 bp, synthetic construct
  source 1..80: mol_type = other DNA
tttaatagagatggggtttcaccatgttggccaggctggtctcgaactctcgacctcaggtgatcccccacctcggcctc

SEQ ID NO: 95468 - DNA, 80 bp, synthetic construct; identical to SEQ ID NO: 17869
  source 1..80: mol_type = other DNA

SEQ ID NO: 95469 - DNA, 80 bp, synthetic construct
  source 1..80: mol_type = other DNA
cctagtctgtcctccggggcactagcagggacaaggtgggaggctgctgggctgggatgtggggacaggtttgatcaggt

SEQ ID NO: 95470 - DNA, 80 bp, synthetic construct
  source 1..80: mol_type = other DNA
acccctccacggtaccgggcggatgaataccagccccccggtaagacccccatctgtgccctgccccaccccatctgagc

SEQ ID NO: 95471 - DNA, 80 bp, synthetic construct
  source 1..80: mol_type = other DNA
agtcttgccttaaatgatcctcttttccttcttttctcttgttttccttttctcaccatttggaatggcccagcaggctg

SEQ ID NO: 95472 - DNA, 80 bp, synthetic construct
  source 1..80: mol_type = other DNA
ctgcctccagctccgtttggcttcctggggctccctgcctgggccactttgtgtcttccctctaggcctttctttccact

SEQ ID NO: 95473 - DNA, 80 bp, synthetic construct; identical to SEQ ID NO: 17870
  source 1..80: mol_type = other DNA

SEQ ID NO: 95474 - DNA, 80 bp, synthetic construct
  source 1..80: mol_type = other DNA
caatgagttgaaggatgtgcagatgcttttggaagtgaaaagttggggggctactgtgtgactttgcatacacccaaact

SEQ ID NO: 95475 - DNA, 80 bp, synthetic construct
  source 1..80: mol_type = other DNA
gcctgtggccagggagaggacagctcctctgtaggaagagcctgttcctttccaaccaggtgagacctcttcagtggagc

SEQ ID NO: 95476 - DNA, 80 bp, synthetic construct; identical to SEQ ID NO: 17871
  source 1..80: mol_type = other DNA

SEQ ID NO: 95477 - DNA, 80 bp, synthetic construct
  source 1..80: mol_type = other DNA
ttcattgtctcataaggacacttgtcattggatttagggcccactggatcctccaggatgatctcatgtggggaacctta

SEQ ID NO: 95478 - DNA, 80 bp, synthetic construct
  source 1..80: mol_type = other DNA
cccccttcccgcttcccccgagtgtctgtgggaggtggcaggaatggcaggcaggggtgtggaaccccttctggagtcat

SEQ ID NO: 95479 - DNA, 80 bp, synthetic construct
  source 1..80: mol_type = other DNA
gtgaccttgcatacgtcactcaccctctctgatcttcaggttcctctgcaaaagggaggtaatgataaccctcactctgg

SEQ ID NO: 95480 - DNA, 80 bp, synthetic construct
  source 1..80: mol_type = other DNA
ggggatacaaatgtgaatgaaatgaatgtggtctcttcccccaacagtgtatccagaagattaatccattccttaaacaa

SEQ ID NO: 95481 - DNA, 80 bp, synthetic construct; identical to SEQ ID NO: 17872
  source 1..80: mol_type = other DNA

SEQ ID NO: 95482 - DNA, 80 bp, synthetic construct
  source 1..80: mol_type = other DNA
gaggcaggagggagtgtggcctgtgcagaagggaccgaggctggtgagaccaggagggcctgggtggcctccaggtcaga

SEQ ID NO: 95483 - DNA, 80 bp, synthetic construct
  source 1..80: mol_type = other DNA
caaggcctctttgcccctgagagtggtggctcttcttgaggccaccttgccacgctgtcacagggaactagcagcccctg

SEQ ID NO: 95484 - DNA, 80 bp, synthetic construct
  source 1..80: mol_type = other DNA
ctcctgaccctgtcccagcaggacagtgggctggtgtgagcgggcaggaaccgcctgcacttagaaggtgtggggctgcc

SEQ ID NO: 95485 - DNA, 80 bp, synthetic construct; identical to SEQ ID NO: 17873
  source 1..80: mol_type = other DNA

SEQ ID NO: 95486 - DNA, 80 bp, synthetic construct
  source 1..80: mol_type = other DNA
gcagccagcccggggcctctgctaggagcagactgagcatggcttatgggcctggcaccatctggcctctgcccaccttg

SEQ ID NO: 95487 - DNA, 80 bp, synthetic construct
  source 1..80: mol_type = other DNA
tagatgcctattgatgagtgaaagctcctaacacactcagagagcaaggactccgcctcatcccacagcctgggaggaga

SEQ ID NO: 95488 - DNA, 80 bp, synthetic construct
  source 1..80: mol_type = other DNA
agcatagtgggtgggtgggaggatgcgggactgggggccgaccttgcctgaaattcatgtgggatctcagagcagccact

SEQ ID NO: 95489 - DNA, 80 bp, synthetic construct
  source 1..80: mol_type = other DNA
tgtgtctttatgagagaaaggcagagggagatttgacacacacaggaggggccacgtggagacagaggtggagattggag

SEQ ID NO: 95490 - DNA, 80 bp, synthetic construct; identical to SEQ ID NO: 17874
  source 1..80: mol_type = other DNA

SEQ ID NO: 95491 - DNA, 80 bp, synthetic construct
  source 1..80: mol_type = other DNA
gctggcgcaggactctgctagcagcaacctgcctgaagtcttcctttggcctggctgagagtttctgagacctgcgctgg

SEQ ID NO: 95492 - DNA, 80 bp, synthetic construct
  source 1..80: mol_type = other DNA
cccagtgcctgcttcttggagaatccaaactgatccagttagggatgataaagtgtagggtaggcgctcggtgactgttt

SEQ ID NO: 95493 - DNA, 80 bp, synthetic construct; identical to SEQ ID NO: 17875
  source 1..80: mol_type = other DNA

SEQ ID NO: 95494 - DNA, 80 bp, synthetic construct
  source 1..80: mol_type = other DNA
ccctttccttgtctatgaaatacattatagaataggatgtagtgtgtgaggattttttggaggttaaacgagtgaatata

SEQ ID NO: 95495 - DNA, 80 bp, synthetic construct
  source 1..80: mol_type = other DNA
tgaccaccgggaaatcgagggcagggtcatggtcaccgacttcgagaatgtgcccgaggaggacgggacccgcttccaca

SEQ ID NO: 95496 - DNA, 80 bp, synthetic construct
  source 1..80: mol_type = other DNA
cgttcatccatccagccacctgctgatttgttatagggtggagggggggtctttctcatgtggtccttgtgttcgtcgag

SEQ ID NO: 95497 - DNA, 80 bp, synthetic construct
  source 1..80: mol_type = other DNA
agacgctggtctctctccatctggacctggcctgggaggtggcttgggctgggcccagggagagctaatgtctcctaacc

SEQ ID NO: 95498 - DNA, 80 bp, synthetic construct; identical to SEQ ID NO: 17876
  source 1..80: mol_type = other DNA

SEQ ID NO: 95499 - DNA, 80 bp, synthetic construct
  source 1..80: mol_type = other DNA
gaactggcagaggactttttctagactgtgactacatttagtccacccagcggcccccctatgaagtccagttgagaact

SEQ ID NO: 95500 - DNA, 80 bp, synthetic construct
  source 1..80: mol_type = other DNA
gctgctaaatagttgacgaaaccagtccagagaggggaggtgactgccagggtcgcacagctcaagctggggaactcgct

SEQ ID NO: 95501 - DNA, 80 bp, synthetic construct; identical to SEQ ID NO: 17877
  source 1..80: mol_type = other DNA

SEQ ID NO: 95502 - DNA, 80 bp, synthetic construct
  source 1..80: mol_type = other DNA
gtcccagtcagtgtatgggaagcccttattgcatgacctggcacggggcaggggctcaacagtcactattgccttccttg

SEQ ID NO: 95503 - DNA, 80 bp, synthetic construct
  source 1..80: mol_type = other DNA
tgaggtcaggagttcgagaccagcctgttcaacatggtgaaaccccgtctctactaaaaatacaaaaattagccaggcat

SEQ ID NO: 95504 - DNA, 80 bp, synthetic construct
  source 1..80: mol_type = other DNA
cagctgtaaatgtggctgttgttcttcacctccacactcagtgccactccactccctccctccgtggtgtgaggggcctc

SEQ ID NO: 95505 - DNA, 80 bp, synthetic construct; identical to SEQ ID NO: 17878
  source 1..80: mol_type = other DNA

SEQ ID NO: 95506 - DNA, 80 bp, synthetic construct
  source 1..80: mol_type = other DNA
cccagctactcaggaggctgaggcaggagaatggcgtgaacccgggaggcggagcttgcagtgagccgagattgcgccac

SEQ ID NO: 95507 - DNA, 80 bp, synthetic construct
  source 1..80: mol_type = other DNA
ggagttatggtatggggggtcctaggcatggagtcttttaattctttagacaatcctgggagcaactgtccctgtttcac

SEQ ID NO: 95508 - DNA, 80 bp, synthetic construct
  source 1..80: mol_type = other DNA
gctcatcctcttggtgcctctctttcatggaaagggataataaggttattgtgaggatcccctgagttcgtatattcaga

SEQ ID NO: 95509 - DNA, 80 bp, synthetic construct
  source 1..80: mol_type = other DNA
ggctggcaagtctgaaatccgcagggcaggccaggcaggctggcaattcctgcagaatttgatgttgcaatactgagtcc

SEQ ID NO: 95510 - DNA, 80 bp, synthetic construct; identical to SEQ ID NO: 17879
  source 1..80: mol_type = other DNA

SEQ ID NO: 95511 - DNA, 80 bp, synthetic construct
  source 1..80: mol_type = other DNA
cgccgcctgccagcgcctggcgagggctggggtcgtgctggtcaccgctgccggcaacttccgggacgatgcctgcctct

SEQ ID NO: 95512 - DNA, 80 bp, synthetic construct
  source 1..80: mol_type = other DNA
ctttggaaggagtcgtcagagacccccgccatgcgggaggctggggaggaaggggctcgaaacctccatcatcgcagagt

SEQ ID NO: 95513 - DNA, 80 bp, synthetic construct
  source 1..80: mol_type = other DNA
gcctccctgttgtccagctctctccgcggctccatgactgacaacttgagcaaggctaatgtgaatgggagcggttgagg

SEQ ID NO: 95514 - DNA, 80 bp, synthetic construct; identical to SEQ ID NO: 17880
  source 1..80: mol_type = other DNA

SEQ ID NO: 95515 - DNA, 80 bp, synthetic construct
  source 1..80: mol_type = other DNA
acttgatacaccgaatagtttcctatctcccccactaggatgtaaactccacaggggcattgggaatgctgcctggctat

SEQ ID NO: 95516 - DNA, 80 bp, synthetic construct
  source 1..80: mol_type = other DNA
ctcttgggctcctttctctgccacccacctcctcacctttccaggtcatcacagttggggccaccaatgcccaagaccag

SEQ ID NO: 95517 - DNA, 80 bp, synthetic construct
  source 1..80: mol_type = other DNA
cccactgcctcggccaccgtgatgctaacagcccctttggcagtcagggtctgtgccgggacctccagtgccaggctctg

SEQ ID NO: 95518 - DNA, 80 bp, synthetic construct; identical to SEQ ID NO: 17881
  source 1..80: mol_type = other DNA

SEQ ID NO: 95519 - DNA, 80 bp, synthetic construct
  source 1..80: mol_type = other DNA
atgatgctgtctgccgagccggagctcaccctggccgagttgaggcagagactgatccacttctctgccaaagatgtcat

SEQ ID NO: 95520 - DNA, 80 bp, synthetic construct
  source 1..80: mol_type = other DNA
cccttgtctgtgtaaggaggatgacgccaccttaaataggattaaatgagaatggggctctgaaagggctgtgcaatatt

SEQ ID NO: 95521 - DNA, 80 bp, synthetic construct; identical to SEQ ID NO: 17882
  source 1..80: mol_type = other DNA

SEQ ID NO: 95522 - DNA, 80 bp, synthetic construct
  source 1..80: mol_type = other DNA
ctccagctcttctgtaagcttacagggctggccagaccaggagtggggcactcctcacttcacgcggctgggggctgctg

SEQ ID NO: 95523 - DNA, 80 bp, synthetic construct
  source 1..80: mol_type = other DNA
catggttctgggagctgagaaatctcaaaccagcaaaaaagtggaattgatgttgatgctacaggatagtgcacagatgc

SEQ ID NO: 95524 - DNA, 80 bp, synthetic construct
  source 1..80: mol_type = other DNA
tctctatctccattttgaaaccactctgtgtttggaagaacttttgagtattcagagctgcccactggcagaacagtctt

SEQ ID NO: 95525 - DNA, 80 bp, synthetic construct; identical to SEQ ID NO: 17883
  source 1..80: mol_type = other DNA

SEQ ID NO: 95526 - DNA, 80 bp, synthetic construct
  source 1..80: mol_type = other DNA
gggccacgtcctcacaggtaggaggctgggcttgccctggggtgaggaggggtctctttctccttatgcacccactgccc

SEQ ID NO: 95527 - DNA, 80 bp, synthetic construct
  source 1..80: mol_type = other DNA
ctcagcttcctcctccataagagggaaaaaggtattacctgcctcattgtgttgcaaggagatgggcagcatctagggca

SEQ ID NO: 95528 - DNA, 80 bp, synthetic construct
  source 1..80: mol_type = other DNA
ctctgtatgaggaaatgatgagtgctaagcacttagcttagtgccgggacaatataaattctagctatcgttactattgt

SEQ ID NO: 95529 - DNA, 80 bp, synthetic construct
  source 1..80: mol_type = other DNA
gtgccgggacaatataaattctagctatcgttactattgttttcatcacccgttgctttaaaatccagcctctggtatag

SEQ ID NO: 95530 - DNA, 80 bp, synthetic construct
  source 1..80: mol_type = other DNA
ctggaataagaggctcagagttgattctcgtctgagcacgtccaggggaaccactgagggtttgggaacaggagagtgag

SEQ ID NO: 95531 - DNA, 80 bp, synthetic construct; identical to SEQ ID NO: 17884
  source 1..80: mol_type = other DNA

SEQ ID NO: 95532 - DNA, 80 bp, synthetic construct
  source 1..80: mol_type = other DNA
ttcacagtgtccctgtgagtaggtgtggtttctctttccatcttacaaatgagtaaacagagcctcagtgtagctaagta

SEQ ID NO: 95533 - DNA, 80 bp, synthetic construct
  source 1..80: mol_type = other DNA
gggaggggctggggggagtttgagcatctcaggccatagagcccctgcctcactgtctccatctctgggtggaaagatgg

SEQ ID NO: 95534 - DNA, 80 bp, synthetic construct; identical to SEQ ID NO: 17885
  source 1..80: mol_type = other DNA

SEQ ID NO: 95535 - DNA, 80 bp, synthetic construct
  source 1..80: mol_type = other DNA
gagcatggaatcccggcccctcaggagcaggtgaagaggcccgtgaggccgggtgggtggggtgctgcgtgtctctcctg

SEQ ID NO: 95536 - DNA, 80 bp, synthetic construct
  source 1..80: mol_type = other DNA
aggtttgctacctgggtaccccactccacttggagtagaatgtgcataaatatggcataaagaaatgcaatatgcatgca

SEQ ID NO: 95537 - DNA, 80 bp, synthetic construct
  source 1..80: mol_type = other DNA
acctgctgggagggtctcagggtcaggagcagcactgggctctgaggacacagagctcactcagccgtgacccagagggg

SEQ ID NO: 95538 - DNA, 80 bp, synthetic construct; identical to SEQ ID NO: 17886
  source 1..80: mol_type = other DNA

SEQ ID NO: 95539 - DNA, 80 bp, synthetic construct
  source 1..80: mol_type = other DNA
aggaagacagaaaacaaaccattaatatagagtactgaaaagatgcgatggagaaaactatagcaaggaagggaatgggg

SEQ ID NO: 95540 - DNA, 80 bp, synthetic construct
  source 1..80: mol_type = other DNA
gaggggacagggccaagtcaggtgagacctgagggtcacagtcagcagtgagctggggccatgcaggggtctggcctcag

SEQ ID NO: 95541 - DNA, 80 bp, synthetic construct
  source 1..80: mol_type = other DNA
gcaggcctggtgggtggatgtgggtgggagagggggaggatggcaccaaggctcgggcccctggacagatggagttgcca

SEQ ID NO: 95542 - DNA, 80 bp, synthetic construct; identical to SEQ ID NO: 17887
  source 1..80: mol_type = other DNA

SEQ ID NO: 95543 - DNA, 80 bp, synthetic construct
  source 1..80: mol_type = other DNA
tacgccgtagacaacacgtgtgtagtcaggagccgggacgtcagcactacaggcagcaccagcgaaggggccgtgacagc

SEQ ID NO: 95544 - DNA, 80 bp, synthetic construct
  source 1..80: mol_type = other DNA
gaggggatggggatgcttccgcctttccggggctgctggcctggcccttgagtggggcagcctccttgcctggaactcac

SEQ ID NO: 95545 - DNA, 80 bp, synthetic construct
  source 1..80: mol_type = other DNA
tccgtgccaggcattcaatcctcaggtctccaccaaggaggcaggattcttcccatggataggggagggggcggtagggg

SEQ ID NO: 95546 - DNA, 80 bp, synthetic construct; identical to SEQ ID NO: 17888
  source 1..80: mol_type = other DNA

SEQ ID NO: 95547 - DNA, 80 bp, synthetic construct
  source 1..80: mol_type = other DNA
agccaagcctcttcttacttcacccggctgggctcctcatttttacgggtaacagtgaggctgggaaggggaacacagac

SEQ ID NO: 95548 - DNA, 80 bp, synthetic construct
  source 1..80: mol_type = other DNA
caagcagacatttatcttttgggtctgtcctctctgttgcctttttacagccaacttttctagacctgttttgcttttgt

SEQ ID NO: 95549 - DNA, 80 bp, synthetic construct; identical to SEQ ID NO: 17889
  source 1..80: mol_type = other DNA

SEQ ID NO: 95550 - DNA, 80 bp, synthetic construct
  source 1..80: mol_type = other DNA
caaaatttattttctgttacagttttcttgccaaaaggagttgaagaatttttttgcttatcttacttaggacaaatgtt

SEQ ID NO: 95551 - DNA, 80 bp, synthetic construct
  source 1..80: mol_type = other DNA
tggtcttgacacattcttacatcttcttcaacatgacttcttcacttttcttctctagagttttcttgagttaaaataat

SEQ ID NO: 95552 - DNA, 80 bp, synthetic construct; identical to SEQ ID NO: 17890
  source 1..80: mol_type = other DNA

SEQ ID NO: 95553 - DNA, 80 bp, synthetic construct
  source 1..80: mol_type = other DNA
taagttctgggaggaaaagacttctttaatttgctatgatcacttcctctcaatttctttttcttacagtcatgcatact

SEQ ID NO: 95554 - DNA, 80 bp, synthetic construct
  source 1..80: mol_type = other DNA
tgcagaacaatacactggaggcccaatggcgaagcaatgtgcacatgagtgacaaaacatgggaaccagaaaaggaatat

SEQ ID NO: 95555 - DNA, 80 bp, synthetic construct; identical to SEQ ID NO: 17891
  source 1..80: mol_type = other DNA

SEQ ID NO: 95556 - DNA, 80 bp, synthetic construct
  source 1..80: mol_type = other DNA
tgacaaaatctgtcttcttaaactgagcctttggaataagcaaacagaaacgtgaaaggtaacaaaactggcacacaaga

SEQ ID NO: 95557 - DNA, 80 bp, synthetic construct
  source 1..80: mol_type = other DNA
gctttacttgctttgttggaggcatagctgaaaagaaaaggacattctgagatcagggagaatgagtgaggcttctggat

SEQ ID NO: 95558 - DNA, 80 bp, synthetic construct; identical to SEQ ID NO: 17892
  source 1..80: mol_type = other DNA

SEQ ID NO: 95559 - DNA, 80 bp, synthetic construct
  source 1..80: mol_type = other DNA
gagccgagatcacgccactgcactccagcctggtgacaaagctagactccatctcaaaataataataataataataaaca

SEQ ID NO: 95560 - DNA, 80 bp, synthetic construct
  source 1..80: mol_type = other DNA
tacgattttgtgacatcatgaatgtaggagtaatttttcaagtcaataaaagaaattcttgtggcagcccttgttaaagc

SEQ ID NO: 95561 - DNA, 80 bp, synthetic construct
  source 1..80: mol_type = other DNA
ggctcactgcaacctccgtctcccaggttcaagcgattctcctgcctcagcctccgaagtagctgggactacaggcgcat

SEQ ID NO: 95562 - DNA, 80 bp, synthetic construct; identical to SEQ ID NO: 17893
  source 1..80: mol_type = other DNA

SEQ ID NO: 95563 - DNA, 80 bp, synthetic construct
  source 1..80: mol_type = other DNA
gcagggaggagcagtcaaatcagcacttattagtaacccctggacttttcagaatcacttggtaataactgaagggcaaa

SEQ ID NO: 95564 - DNA, 80 bp, synthetic construct
  source 1..80: mol_type = other DNA
attcaaagatgtaatgttataaatgataattagttcccaggctagtccacaaacggtaggtcagatatataacactctag

SEQ ID NO: 95565 - DNA, 80 bp, synthetic construct
  source 1..80: mol_type = other DNA
aagtggacactcggaaataaacaagtaacagagtagctcaccccttatcttgctaagctaccagaagtttccaaaagtaa

SEQ ID NO: 95566 - DNA, 80 bp, synthetic construct; identical to SEQ ID NO: 17894
  source 1..80: mol_type = other DNA

SEQ ID NO: 95567 - DNA, 80 bp, synthetic construct
  source 1..80: mol_type = other DNA
gccaagcacacatttcttcagtacaggtgaagtcatctgctttgtaactcattaaaactaggctatcatagccatttctt

SEQ ID NO: 95568 - DNA, 80 bp, synthetic construct
  source 1..80: mol_type = other DNA
tcctcctttttttttttaatagggaaaagttgaaaacaggaacacagatgtggaatgacatgcattggaccttctattat

SEQ ID NO: 95569 - DNA, 80 bp, synthetic construct
  source 1..80: mol_type = other DNA
caaaagggaataagatgcggaagagataagacagagaaaaaactgtgaaagcaagactttctcatcaggctaccccctga

SEQ ID NO: 95570 - DNA, 80 bp, synthetic construct
  source 1..80: mol_type = other DNA
caagtagctagaattacagacacgcaccaccacacccagctaatttttgtatttttactagagacagggttttgccatgt

SEQ ID NO: 95571 - DNA, 80 bp, synthetic construct; identical to SEQ ID NO: 17895
  source 1..80: mol_type = other DNA

SEQ ID NO: 95572 - DNA, 80 bp, synthetic construct
  source 1..80: mol_type = other DNA
ttacatcctgtttgctgccatgttgcacatgatggtcatgaccgcacattcacaaccggattatttacacacaggctggt

SEQ ID NO: 95573 - DNA, 80 bp, synthetic construct
  source 1..80: mol_type = other DNA
agtttcaatgagaaggtcagtactcgggactgtgtcaggaatgatggaaaccaaatcagggagagtttctttggctacaa

SEQ ID NO: 95574 - DNA, 80 bp, synthetic construct
  source 1..80: mol_type = other DNA
ctctgcctcccgggttcacgccattctcttgcctcagcctcccgagtagttgggactacaggcacccgccaccacgcctg

SEQ ID NO: 95575 - DNA, 80 bp, synthetic construct; identical to SEQ ID NO: 17896
  source 1..80: mol_type = other DNA

SEQ ID NO: 95576 - DNA, 80 bp, synthetic construct
  source 1..80: mol_type = other DNA
acagagatctttatgacagtactacatgtaactgaaaaactaaaaagcctgaatatccttataataggactatgattaac

SEQ ID NO: 95577 - DNA, 80 bp, synthetic construct
  source 1..80: mol_type = other DNA
atcccagcactttgggaggctgaggtgggtggatcacttaaggtcaggagttcaggaccagcctggccaacatggtgaaa

SEQ ID NO: 95578 - DNA, 80 bp, synthetic construct; identical to SEQ ID NO: 17897
  source 1..80: mol_type = other DNA

SEQ ID NO: 95579 - DNA, 80 bp, synthetic construct
  source 1..80: mol_type = other DNA
cctgcctcagcctcccgagtagctgggattacaggtgcccgccaccacgccgggctaatttttttgtatttttagtagag

SEQ ID NO: 95580 - DNA, 80 bp, synthetic construct
  source 1..80: mol_type = other DNA
ccagcactttagaaggccgagacaggaggatcacttgagcccaggagtttgagaccagtctggaaaatataatgagaccc

SEQ ID NO: 95581 - DNA, 80 bp, synthetic construct
  source 1..80: mol_type = other DNA
cacgatctcatctcactgcaacctccgcctcccaggttcaagcaattctcctgcctcagcctcccgagtagctaggatta

SEQ ID NO: 95582 - DNA, 80 bp, synthetic construct
  source 1..80: mol_type = other DNA
ctggcctactattttaaaaagagaaataaactattttaaatgtacttttctactatgtatataacttcttggttataagt

SEQ ID NO: 95583 - DNA, 80 bp, synthetic construct; identical to SEQ ID NO: 17898
  source 1..80: mol_type = other DNA

SEQ ID NO: 95584 - DNA, 80 bp, synthetic construct
  source 1..80: mol_type = other DNA
tcatgaccaagaacccaaaagcaaatgcaacaaaaccaaaaataagtaaatgggatccaattaaactaaaaagcttctgc

SEQ ID NO: 95585 - DNA, 80 bp, synthetic construct
  source 1..80: mol_type = other DNA
atgaatagacaattctcaaaagaagatatacaaatggcataagaaaaattttttgatacgcctcatacatatgaaaaaat

SEQ ID NO: 95586 - DNA, 80 bp, synthetic construct
  source 1..80: mol_type = other DNA
actagtacaaccactatggaaaacagtatagagattccttaaagaactaaaagtagaactaccatttgatccagcaatac

SEQ ID NO: 95587 - DNA, 80 bp, synthetic construct; identical to SEQ ID NO: 17899
  source 1..80: mol_type = other DNA

SEQ ID NO: 95588 - DNA, 80 bp, synthetic construct
  source 1..80: mol_type = other DNA
tacagtgtacactgctcaggtgacatgtgcaccaacatttcagaaataatcactaaataacttttgcatgtaactgaaca

SEQ ID NO: 95589 - DNA, 80 bp, synthetic construct
  source 1..80: mol_type = other DNA
ccactttagactcttcttaaaagatagagagcatgcatcttttgcttttgctgatccccacagcttctgaatacgtgttg

SEQ ID NO: 95590 - DNA, 80 bp, synthetic construct
  source 1..80: mol_type = other DNA
tctcaacttcagatgaggctgtgggttccttgaagccaattatcttacttatttctgtgtttacagcgttgatcattatt

SEQ ID NO: 95591 - DNA, 80 bp, synthetic construct; identical to SEQ ID NO: 17900
  source 1..80: mol_type = other DNA

SEQ ID NO: 95592 - DNA, 80 bp, synthetic construct
  source 1..80: mol_type = other DNA
cagtggatgctattatcagaagtctccctccttttagtaagttaaactacagaatgaaaggccttgactggcaaaatagc

SEQ ID NO: 95593 - DNA, 80 bp, synthetic construct
  source 1..80: mol_type = other DNA
taaaacataacaactttattgcaggtgagaacagggaaagttacctggcttagaaagctctcatgagaaacacaaagcat

SEQ ID NO: 95594 - DNA, 80 bp, synthetic construct
  source 1..80: mol_type = other DNA
acagaatcctctaatataaaccatgtggctacagctataccttcccgacatttaggggactgcagaacctgaggccaaca

SEQ ID NO: 95595 - DNA, 80 bp, synthetic construct; identical to SEQ ID NO: 17901
  source 1..80: mol_type = other DNA

SEQ ID NO: 95596 - DNA, 80 bp, synthetic construct
  source 1..80: mol_type = other DNA
ataatttttgtgaaatgtgaaaaaccgaatttgagttgttagaaacgaccgattacagagcattatgaagcatgtttaat

SEQ ID NO: 95597 - DNA, 80 bp, synthetic construct
  source 1..80: mol_type = other DNA
aatacagtcaaaggcaaaatatgtctcatcacagttactcaaaaaaaatccatgccaaatttgctatattcagtgactcc

SEQ ID NO: 95598 - DNA, 80 bp, synthetic construct
  source 1..80: mol_type = other DNA
gattagaaagacttcattggatggtgtgactgagggtgccacccagtgaaaaatatcaacaatattacttatcttgttaa

SEQ ID NO: 95599 - DNA, 80 bp, synthetic construct; identical to SEQ ID NO: 17902
  source 1..80: mol_type = other DNA

SEQ ID NO: 95600 - DNA, 80 bp, synthetic construct
  source 1..80: mol_type = other DNA
tgatgtcggcatctgttttgtgagacatatcctataagtgctattgtatttgatttcacgataacattaagttttctgta

SEQ ID NO: 95601 - DNA, 80 bp, synthetic construct
  source 1..80: mol_type = other DNA
actagctgggattacaggtgtgtgccaccacgcccagctaattttttggaattttagtagagatggtgtttcaccatgtt

SEQ ID NO: 95602 - DNA, 80 bp, synthetic construct
  source 1..80: mol_type = other DNA
aagttttcaagtcaattactagataaaaacctgtttattcagtacttttaaatgcaatcttggggccgggtgtggtggct

SEQ ID NO: 95603 - DNA, 80 bp, synthetic construct
  source 1..80: mol_type = other DNA
caagaggctggggcaggagaatcgcttgaacctgggagacagaggttgcagagagccaagatcatgccactgcgctcagc

SEQ ID NO: 95604 - DNA, 80 bp, synthetic construct; identical to SEQ ID NO: 17903
  source 1..80: mol_type = other DNA

SEQ ID NO: 95605 - DNA, 80 bp, synthetic construct
  source 1..80: mol_type = other DNA
ttcatttatctttcatatgcaccttacgctcatagcctagaggtcattttatccaatatttgtaataattctgtgcatga

SEQ ID NO: 95606 - DNA, 80 bp, synthetic construct
  source 1..80: mol_type = other DNA
gataagcaatcattttcttacacttacacatgtacttaacagttaaaaatatgatatgccattaatacagttaaaaaaaa

SEQ ID NO: 95607 - DNA, 80 bp, synthetic construct; identical to SEQ ID NO: 17904
  source 1..80: mol_type = other DNA

SEQ ID NO: 95608 - DNA, 80 bp, synthetic construct
  source 1..80: mol_type = other DNA
ctgcacagatcatccaatcacctaggtattaagcccagcgcccattagctattcttccagtgatgctctccctcatcccc

SEQ ID NO: 95609 - DNA, 80 bp, synthetic construct
  source 1..80: mol_type = other DNA
atgatctcgttcctttttatggctgcacagtattccatggtgtgtatgtatgacattttctttattcaatctatcactgg

SEQ ID NO: 95610 - DNA, 80 bp, synthetic construct; identical to SEQ ID NO: 17905
  source 1..80: mol_type = other DNA

SEQ ID NO: 95611 - DNA, 80 bp, synthetic construct
  source 1..80: mol_type = other DNA
agaagagtctgttcatgtcctttgtccactttttaatggggttgtttttttttttgtcttgtaaatttgtttaggttcct

SEQ ID NO: 95612 - DNA, 80 bp, synthetic construct
  source 1..80: mol_type = other DNA
tgcttttggtgtttttgtcatgaaatctttgccagtgcctatgtcctgaatggtattgcctagattttcttctagggttt

SEQ ID NO: 95613 - DNA, 80 bp, synthetic construct
  source 1..80: mol_type = other DNA
gtcaggtttgttgaagatcagattgttgtaggtgtgcagtcttaatttctgagttctctattcaattccattggtctatg

SEQ ID NO: 95614 - DNA, 80 bp, synthetic construct; identical to SEQ ID NO: 17906
  source 1..80: mol_type = other DNA

SEQ ID NO: 95615 - DNA, 80 bp, synthetic construct
  source 1..80: mol_type = other DNA
cttgatggtggtggataagctttttgatatgctgctagattcagtctgccagtattttactaaggatttttgtatctatg

SEQ ID NO: 95616 - DNA, 80 bp, synthetic construct
  source 1..80: mol_type = other DNA
tacctctggcagaattcagctgtaaatctgtctggtcctgggttttttgtggttggtaggctatttactactacctcaat

SEQ ID NO: 95617 - DNA, 80 bp, synthetic construct
  source 1..80: mol_type = other DNA
ggtattcatagtattctctgatggttgtatgtatttctgtggggtcagtggtgatatcccacttatcatttctgattgtg

SEQ ID NO: 95618 - DNA, 80 bp, synthetic construct; identical to SEQ ID NO: 17907
  source 1..80: mol_type = other DNA

SEQ ID NO: 95619 - DNA, 80 bp, synthetic construct
  source 1..80: mol_type = other DNA
gctgttcaatttctatgtacttgtgtggttttgagtgaatttcttaatcttgagttctaatttggttgcaccgttgtctg

SEQ ID NO: 95620 - DNA, 80 bp, synthetic construct; identical to SEQ ID NO: 17908
  source 1..80: mol_type = other DNA

SEQ ID NO: 95621 - DNA, 80 bp, synthetic construct
  source 1..80: mol_type = other DNA
ggttggctctttatccagtttgccattttgtgtctttcaattggtgcatttagcccgtttacatttaaggctagtattgt

SEQ ID NO: 95622 - DNA, 80 bp, synthetic construct
  source 1..80: mol_type = other DNA
ttttgcatggtaggcctggtattgacgaattccctcaacatttgcttgtctgaaaaggatcttatttctcttttgtttat

SEQ ID NO: 95623 - DNA, 80 bp, synthetic construct; identical to SEQ ID NO: 17909
  source 1..80: mol_type = other DNA

SEQ ID NO: 95624 - DNA, 80 bp, synthetic construct
  source 1..80: mol_type = other DNA
tacataatcccacatttcttggaggttttgttcattccttttcattcttttttctctattcttgtctgcctgtcttattt

SEQ ID NO: 95625 - DNA, 80 bp, synthetic construct
  source 1..80: mol_type = other DNA
tattgttttatcatgattcttagcttctttgcattgggttacgacatgctcctttatctcagcgaagtttgttatttccc

SEQ ID NO: 95626 - DNA, 80 bp, synthetic construct
  source 1..80: mol_type = other DNA
accttcgacctttgaggctgctgacttctgaaaaggtttctgtggggtcttttttgttgatgttgttgttgtttttttct

SEQ ID NO: 95627 - DNA, 80 bp, synthetic construct; identical to SEQ ID NO: 17910
  source 1..80: mol_type = other DNA

SEQ ID NO: 95628 - DNA, 80 bp, synthetic construct
  source 1..80: mol_type = other DNA
tggcagcctcccctccttctgggagctgcatcccagggagagatcagagctctctgtccatataagcccggctggagtga

SEQ ID NO: 95629 - DNA, 80 bp, synthetic construct
  source 1..80: mol_type = other DNA
atgtgcagttgaccaaaccacagaaatggtagccacccctcccacagggaactccatcctgtttcaggcagactcactgt

SEQ ID NO: 95630 - DNA, 80 bp, synthetic construct
  source 1..80: mol_type = other DNA
ggtacaaagggatctgtcaccttgctggaaattccggggccggagtatgtaaaactcttgtctctgtgtgtacctgtgct

SEQ ID NO: 95631 - DNA, 80 bp, synthetic construct
  source 1..80: mol_type = other DNA
ctttggctccgtgaggctcctgggtgggccactgacccactctgcttttctttattctctctggatcagggtgattgttt

SEQ ID NO: 95632 - DNA, 80 bp, synthetic construct; identical to SEQ ID NO: 17911
  source 1..80: mol_type = other DNA

SEQ ID NO: 95633 - DNA, 80 bp, synthetic construct
  source 1..80: mol_type = other DNA
caatgttagaaacttctttagtattcacttcttccagctaactgacagattgtgaaggtctatttttttgcaaaggtaag

SEQ ID NO: 95634 - DNA, 80 bp, synthetic construct
  source 1..80: mol_type = other DNA
taaactccttttgaacactttctcacacccacacctctgcacactgctggtagctagcatgctatttaagaaaagtgttt

SEQ ID NO: 95635 - DNA, 80 bp, synthetic construct
  source 1..80: mol_type = other DNA
gatctcggctcactgcaagctccgcctcccgggttcacgccattctcctgcctcagcctcccgagtagctgggactacag

SEQ ID NO: 95636 - DNA, 80 bp, synthetic construct; identical to SEQ ID NO: 17912
  source 1..80: mol_type = other DNA

SEQ ID NO: 95637 - DNA, 80 bp, synthetic construct
  source 1..80: mol_type = other DNA
agaaattcactccttgaaaacagtgaggacacaagtttttatctatcaccccacttatgtatgcctgatgcattagcaca

SEQ ID NO: 95638 - DNA, 80 bp, synthetic construct
  source 1..80: mol_type = other DNA
tgttttggcttcagattttcattagccatgactctggcaaactcaatgaatttcttcactgctttgtgatcagcagatgc

SEQ ID NO: 95639 - DNA, 80 bp, synthetic construct
  source 1..80: mol_type = other DNA
tttggctttatgcagttttctaatcttcactaacttctgtgaatcagtttcagcacagaacttcagcggtgtatccttct

SEQ ID NO: 95640 - DNA, 80 bp, synthetic construct
  source 1..80: mol_type = other DNA
ccacacagcaaagagagtaagcaaccaaacacagttgagtcatgcatgcaggtcttggctccatgtggggcattgtggga

SEQ ID NO: 95641 - DNA, 80 bp, synthetic construct; identical to SEQ ID NO: 17913
  source 1..80: mol_type = other DNA

SEQ ID NO: 95642 - DNA, 80 bp, synthetic construct
  source 1..80: mol_type = other DNA
aatctgtgttcacccagaaagctaactgagctgagaaaaaatcttaaagggagatgtctttcattatttcagtttattta

SEQ ID NO: 95643 - DNA, 80 bp, synthetic construct
  source 1..80: mol_type = other DNA
ctctgcctcctgggttcaagcaattctcctgcctcagtctcctgagtagctgggactacaggcgcccaccaccatgcctg

SEQ ID NO: 95644 - DNA, 80 bp, synthetic construct
  source 1..80: mol_type = other DNA
aaactcatcactatttccatacaaatgacttgccaattgactttctgtaacccacttataagtttggatgtatattcagt

SEQ ID NO: 95645 - DNA, 80 bp, synthetic construct; identical to SEQ ID NO: 17914
  source 1..80: mol_type = other DNA

SEQ ID NO: 95646 - DNA, 80 bp, synthetic construct
  source 1..80: mol_type = other DNA
aaatggactaagccataaggacctcttgtgaactctcatatggatgtctggattttaggaacaggattatcagatcagtg

SEQ ID NO: 95647 - DNA, 80 bp, synthetic construct
  source 1..80: mol_type = other DNA
atctttttttcaatattaaaaatagtaggaagaagctgggcctggtggctcatgcctgtaattccagcactttgggaggc

SEQ ID NO: 95648 - DNA, 80 bp, synthetic construct
  source 1..80: mol_type = other DNA
cctggtggtcaaggctgcagtgagccatgattataccactgcactccagcctgggtgacaaagcaagacctcatcttggg

SEQ ID NO: 95649 - DNA, 80 bp, synthetic construct; identical to SEQ ID NO: 17915
  source 1..80: mol_type = other DNA

SEQ ID NO: 95650 - DNA, 80 bp, synthetic construct
  source 1..80: mol_type = other DNA
cccccacagcattttctttgctatcacaaggcctattattctttcctcaacatttgctggaggctttggagcccagttca

SEQ ID NO: 95651 - DNA, 80 bp, synthetic construct
  source 1..80: mol_type = other DNA
cacagagcctgtgttcactcagagacatgttgcctctgaaaacataaactcagcaatgtcaggctctgaacatagtttcc

SEQ ID NO: 95652 - DNA, 80 bp, synthetic construct; identical to SEQ ID NO: 17916
  source 1..80: mol_type = other DNA

SEQ ID NO: 95653 - DNA, 80 bp, synthetic construct
  source 1..80: mol_type = other DNA
tgaggtaggagaatcacttgaacccaggaggcggaggttgcagtgagctgagatcgtgccactggactccaccctaggcg

SEQ ID NO: 95654 - DNA, 80 bp, synthetic construct
  source 1..80: mol_type = other DNA
gaacaatgcatttgcagaagaaccaatctgcaaattatggcctccaatctctacaaggaactcaatgttgctagtaaact

SEQ ID NO: 95655 - DNA, 80 bp, synthetic construct
  source 1..80: mol_type = other DNA
tccgaatgatgttcaaacatcttagtatggctcatacagtcctctgtagcctgacattttctttcatttccttccttacc

SEQ ID NO: 95656 - DNA, 80 bp, synthetic construct
  source 1..80: mol_type = other DNA
tgacctgaattgtacaaataatatgctatcaagtttccctgaagatttatcatctcagaaggtacttgaaaacaagatgg

SEQ ID NO: 95657 - DNA, 80 bp, synthetic construct; identical to SEQ ID NO: 17917
  source 1..80: mol_type = other DNA

SEQ ID NO: 95658 - DNA, 80 bp, synthetic construct
  source 1..80: mol_type = other DNA
ctgtattctagcttttgtaagtatgtgagaatgactgttaattctctggtcaactgtttgcaaataacacttctaattca

SEQ ID NO: 95659 - DNA, 80 bp, synthetic construct
  source 1..80: mol_type = other DNA
ggtagtaagcatagtacataatagttagtttttcatccctttccccctccttctctccctcttcttgtagtccccagtgt

SEQ ID NO: 95660 - DNA, 80 bp, synthetic construct
  source 1..80: mol_type = other DNA
ttttcatggctgcatatcattgcagggtgcatatgtaccacattttctttatccaatccaccacggatgggcaccctggt

SEQ ID NO: 95661 - DNA, 80 bp, synthetic construct; identical to SEQ ID NO: 17918
  source 1..80: mol_type = other DNA

SEQ ID NO: 95662 - DNA, 80 bp, synthetic construct
  source 1..80: mol_type = other DNA
catgtctttggctccctttttaaatggggttatttagtttttgcttgctgaattttttaagttccttacagattctggat

SEQ ID NO: 95663 - DNA, 80 bp, synthetic construct
  source 1..80: mol_type = other DNA
tggtctttgacaaagttgacaaaaataagcaatggggaaaggactccctattcaataaatggtgctgggataactggcta

SEQ ID NO: 95664 - DNA, 80 bp, synthetic construct
  source 1..80: mol_type = other DNA
actgttagctatttcaatgttatctttcgtctattaagtctcttgtccatttatttttctactgggctgtccatgtcttg

SEQ ID NO: 95665 - DNA, 80 bp, synthetic construct; identical to SEQ ID NO: 17919
  source 1..80: mol_type = other DNA

SEQ ID NO: 95666 - DNA, 80 bp, synthetic construct
  source 1..80: mol_type = other DNA
agcagtgagcgagtattattagtgcttgagctccacttcctgtcagatccgcagtgacattagattctcatgggggcgca

SEQ ID NO: 95667 - DNA, 80 bp, synthetic construct
  source 1..80: mol_type = other DNA
tgggggccgctgagggaatatgtttcatttttttccgatcgatattaaataaagggcttttaaaactgtttatttcaggc

SEQ ID NO: 95668 - DNA, 80 bp, synthetic construct
  source 1..80: mol_type = other DNA
caactactcaagaggctgaggcacgagaattacttgaacccaggagacagaggttgcagtgagccgagactgtgccactg

SEQ ID NO: 95669 - DNA, 80 bp, synthetic construct; identical to SEQ ID NO: 17920
  source 1..80: mol_type = other DNA

SEQ ID NO: 95670 - DNA, 80 bp, synthetic construct
  source 1..80: mol_type = other DNA
gtgtatgacctaattttcatgttttcctattcaatgattccttgtttgaaattataaagccagagatctttatcacagca

SEQ ID NO: 95671 - DNA, 80 bp, synthetic construct
  source 1..80: mol_type = other DNA
gtgaggagtttgagaccagcctggccaacatggtgaaacctcatctctactaaaaatacaaaaattagctgggcgtggtg

SEQ ID NO: 95672 - DNA, 80 bp, synthetic construct
  source 1..80: mol_type = other DNA
ataaaggggcttcatatttgtcccatgctgctaatgattttctcttataaatctccaatcaagtccaattctaacaacct

SEQ ID NO: 95673 - DNA, 80 bp, synthetic construct; identical to SEQ ID NO: 17921
  source 1..80: mol_type = other DNA

SEQ ID NO: 95674 - DNA, 80 bp, synthetic construct
  source 1..80: mol_type = other DNA
ttggaatggaagaggctaaaatccaagcttaaagggttagcttatattgaactagactcagaccacagcaagcttacaca

SEQ ID NO: 95675 - DNA, 80 bp, synthetic construct
  source 1..80: mol_type = other DNA
tgtgtcattaagggctccctggtagttcccagtttctttctcaatgtacattttgcagaaagccaaacagatgaaagttt

SEQ ID NO: 95676 - DNA, 80 bp, synthetic construct
  source 1..80: mol_type = other DNA
tttctctacagagataattggagactagacagacaatgagctatttggggggagtttattctaatcgtttcatgaccaag

SEQ ID NO: 95677 - DNA, 80 bp, synthetic construct; identical to SEQ ID NO: 17922
  source 1..80: mol_type = other DNA

SEQ ID NO: 95678 - DNA, 80 bp, synthetic construct
  source 1..80: mol_type = other DNA
gtttttgccttcccagcatttattcctccttcctttggtagtaacagtctcattttccattagggagcactcctttacca

SEQ ID NO: 95679 - DNA, 80 bp, synthetic construct
  source 1..80: mol_type = other DNA
ccgtgagacatattctccaacttcttaacaacactattgggaaaatggtagtttgtttcttgtgggggacacattgggct

SEQ ID NO: 95680 - DNA, 80 bp, synthetic construct
  source 1..80: mol_type = other DNA
ccctggagttttcagtgccataagccaaaaatttcctcttttttgcttaaaccagcttgaggcaggattctgagatctgt

SEQ ID NO: 95681 - DNA, 80 bp, synthetic construct; identical to SEQ ID NO: 17923
  source 1..80: mol_type = other DNA

SEQ ID NO: 95682 - DNA, 80 bp, synthetic construct
  source 1..80: mol_type = other DNA
aggaatccagaattaatgcatgtcaggtgatggctataatttcacactcaaaccaggagaccagaaatactgtctagaaa

SEQ ID NO: 95683 - DNA, 80 bp, synthetic construct
  source 1..80: mol_type = other DNA
ttaagcataggtcattctagaatggttttcaggctgctgttgagctaaaagctaaattagtcacaaccaccctgtagata

SEQ ID NO: 95684 - DNA, 80 bp, synthetic construct
  source 1..80: mol_type = other DNA
tccttcctatgaggtttgcttttagtatgtccaaagtttgtttttagaatacccaaggccaaatatcagggccgacttta

SEQ ID NO: 95685 - DNA, 80 bp, synthetic construct; identical to SEQ ID NO: 17924
  source 1..80: mol_type = other DNA

SEQ ID NO: 95686 - DNA, 80 bp, synthetic construct
  source 1..80: mol_type = other DNA
attctctccctttctcattctttcaaaaacttcccaatatacctcttttactttcctgcttcgactgccaaaacatccaa

SEQ ID NO: 95687 - DNA, 80 bp, synthetic construct
  source 1..80: mol_type = other DNA
ccgtggcctgagaaaacaggacaagaatattgatcgtatacatatagatatccttgcaggtgtgatatcacaggacacag

SEQ ID NO: 95688 - DNA, 80 bp, synthetic construct
  source 1..80: mol_type = other DNA
aatgctaagaagtagaggctgagtctttttagtttactttctaaagagtgtgtccagaacaactgtatagcttagatacg

SEQ ID NO: 95689 - DNA, 80 bp, synthetic construct; identical to SEQ ID NO: 17925
  source 1..80: mol_type = other DNA

SEQ ID NO: 95690 - DNA, 80 bp, synthetic construct
  source 1..80: mol_type = other DNA
aaattagctgggcatggtggcgtacacctgtaatcccagttatttgggaagctgaggcaggagaattgcttgaacccagg

SEQ ID NO: 95691 - DNA, 80 bp, synthetic construct
  source 1..80: mol_type = other DNA
accatgtagcatttgggctcctttcaaatatccacatagtgtggttagacagacagacattggagcctggaaaatagaaa

SEQ ID NO: 95692 - DNA, 80 bp, synthetic construct
  source 1..80: mol_type = other DNA
tgcccgccaccacgcccggctatattttttgtatttttagtagagacggggtttcaccatgttatccaggatggtctcaa

SEQ ID NO: 95693 - DNA, 80 bp, synthetic construct; identical to SEQ ID NO: 17926
  source 1..80: mol_type = other DNA

SEQ ID NO: 95694 - DNA, 80 bp, synthetic construct
  source 1..80: mol_type = other DNA
ttgaagttttacttgatgcttcttccaggtgtttggaaactggcaaatttgtaaaagtgtggcagacttgcccagtcaac

SEQ ID NO: 95695 - DNA, 80 bp, synthetic construct
  source 1..80: mol_type = other DNA
tgtttttgcaactagaacaagagcaaatggcacattagacattataatatactggatgccaagtcccaatttgccccatg

SEQ ID NO: 95696 - DNA, 80 bp, synthetic construct; identical to SEQ ID NO: 17927
  source 1..80: mol_type = other DNA

SEQ ID NO: 95697 - DNA, 80 bp, synthetic construct
  source 1..80: mol_type = other DNA
tttactgatagagaaatgaaacttatcaaatacaggaaagtaatgcatttggggattacagtgcagattcagatcatgtg

SEQ ID NO: 95698 - DNA, 80 bp, synthetic construct; identical to SEQ ID NO: 17928
  source 1..80: mol_type = other DNA

SEQ ID NO: 95699 - DNA, 80 bp, synthetic construct
  source 1..80: mol_type = other DNA
ttcaagcgattctcctgcctcagcctcccgagtagctgggactacaggcgtgcgtcactatgcccagctaatttttgtat

SEQ ID NO: 95700 - DNA, 80 bp, synthetic construct
  source 1..80: mol_type = other DNA
ctggcccagatcagtttcttttactggtaggtagaatatccagaatatgttcaggactttttctttataatgtgttagtg

SEQ ID NO: 95701 - DNA, 80 bp, synthetic construct
  source 1..80: mol_type = other DNA
ccagcctgggcaacatggctaaaccctgtctctatgaaaaaatacaaaaaattagctacgcatggtggcatgtgcctgta

SEQ ID NO: 95702 - DNA, 80 bp, synthetic construct; identical to SEQ ID NO: 17929
  source 1..80: mol_type = other DNA

SEQ ID NO: 95703 - DNA, 80 bp, synthetic construct
  source 1..80: mol_type = other DNA
taccaaacaaaattagccaggcatggtggtgggcgcctgtattcccagctactcgggaagctgaggcaggagaatggtgt

SEQ ID NO: 95704 - DNA, 80 bp, synthetic construct
  source 1..80: mol_type = other DNA
gaagatgcacaatattataccttgctttcacagagatcatatctataggttgaactctggaaactgacaaaacccgactg

SEQ ID NO: 95705 - DNA, 80 bp, synthetic construct
  source 1..80: mol_type = other DNA
acttccttattaatttttactgtacctgaaaaactcggacagtttgttcatttaaaaaaaaatgaatgggttcataagct

SEQ ID NO: 95706 - DNA, 80 bp, synthetic construct; identical to SEQ ID NO: 17930
  source 1..80: mol_type = other DNA

SEQ ID NO: 95707 - DNA, 80 bp, synthetic construct
  source 1..80: mol_type = other DNA
tgctttgacaaatcaaaaagtctttcttcctggctaagcccactacataccttgcagatggatgacttagctttgtttaa

SEQ ID NO: 95708 - DNA, 80 bp, synthetic construct
  source 1..80: mol_type = other DNA
aaagtgcatggaaccccattgctttagtatttgctcctgcatatcaaaaatagttcccaccttactcaactacacagaaa

SEQ ID NO: 95709 - DNA, 80 bp, synthetic construct; identical to SEQ ID NO: 17931
  source 1..80: mol_type = other DNA

SEQ ID NO: 95710 - DNA, 80 bp, synthetic construct
  source 1..80: mol_type = other DNA
agttaccaatagaatatattaaaaacgtgtaatttagtgcctgtcgtttgcatttgattaaacgatgggtttatttcctc

SEQ ID NO: 95711 - DNA, 80 bp, synthetic construct
  source 1..80: mol_type = other DNA
ggccttaggagaagtagagtgaggaaggagacaaattactcttcacataaaggcaggaattatttggagttcttcacctc

SEQ ID NO: 95712 - DNA, 80 bp, synthetic construct
  source 1..80: mol_type = other DNA
ctctgaaatggtcacggagcttcacatatttagggggattcaggtgttttatcagaaagcaaatctgtgacttttcactc

SEQ ID NO: 95713 - DNA, 80 bp, synthetic construct
  source 1..80: mol_type = other DNA
aatgacagtgtgagtaaatcttagattcatatggtaaaccaaagaatggacagtgacaaatggaaaaaaacagctgcaat

SEQ ID NO: 95714 - DNA, 80 bp, synthetic construct; identical to SEQ ID NO: 17932
  source 1..80: mol_type = other DNA

SEQ ID NO: 95715 - DNA, 80 bp, synthetic construct
  source 1..80: mol_type = other DNA
tctgagtgcatcttttcaagacacttcaccaccatacaaaataaataactttaggaggcagaaatttttttttgttttgt

SEQ ID NO: 95716 - DNA, 80 bp, synthetic construct
  source 1..80: mol_type = other DNA
tattttttgtacagacagagtctatgttgcccaggctggtcttgaactcttcgcctcatgtgatcctccagcctggcccc

SEQ ID NO: 95717 - DNA, 80 bp, synthetic construct
  source 1..80: mol_type = other DNA
cctcggctcaagggatcttcccacctcagcctcctgagtagctgggactacaggcgcatgtcaccatgctcagtggattt

SEQ ID NO: 95718 - DNA, 80 bp, synthetic construct; identical to SEQ ID NO: 17933
  source 1..80: mol_type = other DNA

SEQ ID NO: 95719 - DNA, 80 bp, synthetic construct
  source 1..80: mol_type = other DNA
taatttttgtatttttagtagagacagggtttcaccatgttggccaggctactctcgaactcctgacctcaggtgatccg

SEQ ID NO: 95720 - DNA, 80 bp, synthetic construct
  source 1..80: mol_type = other DNA
tgtgtaatgtaaattatatggtaagactctaagtggtaccagtcagataaacacttggtaggcaaagttagagtctattc

SEQ ID NO: 95721 - DNA, 80 bp, synthetic construct
  source 1..80: mol_type = other DNA
agcttgtggttgcacacaacaaaaggggagcctcatttgaactggcagaggaagaaaaactcgatgccaaaagaaggctt

SEQ ID NO: 95722 - DNA, 80 bp, synthetic construct; identical to SEQ ID NO: 17934
  source 1..80: mol_type = other DNA

SEQ ID NO: 95723 - DNA, 80 bp, synthetic construct
  source 1..80: mol_type = other DNA
aaaataaaaaaattagctgggtgtagtagcgcatgcctgtaatcccagctacttgggaggctgaggcaggagaatcactt

SEQ ID NO: 95724 - DNA, 80 bp, synthetic construct
  source 1..80: mol_type = other DNA
cagtaatcatctggctggtaggctacattaatttcctctcaattagctagaatatgttaggtaggacagaatcccaaatt

SEQ ID NO: 95725 - DNA, 80 bp, synthetic construct; identical to SEQ ID NO: 17935
  source 1..80: mol_type = other DNA

SEQ ID NO: 95726 - DNA, 80 bp, synthetic construct
  source 1..80: mol_type = other DNA
agatggtattaaaagtatctgagaaagacattcttgtgaattcttttttctgcccaagactcaactcataagctaaccga

SEQ ID NO: 95727 - DNA, 80 bp, synthetic construct
  source 1..80: mol_type = other DNA
aaagagaagtgttacataatttctgtaaagtacaacttttaatctggaccaatctggtaaagatatgaataggacagtgg

SEQ ID NO: 95728 - DNA, 80 bp, synthetic construct
  source 1..80: mol_type = other DNA
gtttgctttaacaacttaagaactgttgagagatttcaaaataatggcctaaaaccctgaagcttagttcataaaacaat

SEQ ID NO: 95729 - DNA, 80 bp, synthetic construct
  source 1..80: mol_type = other DNA
tggccaacatggtgaaaccccgtctctactaaaaatacaaaaaattagctgggcgtggtggtgcgcacctgtagtcccag

SEQ ID NO: 95730 - DNA, 80 bp, synthetic construct; identical to SEQ ID NO: 17936
  source 1..80: mol_type = other DNA

SEQ ID NO: 95731 - DNA, 80 bp, synthetic construct
  source 1..80: mol_type = other DNA
gggaaagccaatctctggggtgaactatctagatactttcatcaagtttccattttgtttgcactatctcatctagcatt

SEQ ID NO: 95732 - DNA, 80 bp, synthetic construct
  source 1..80: mol_type = other DNA
taattatctgggactatgcacaaggctagatcaaataagtcatgagtattcagaataagatatggatgagcaaaggtaac

SEQ ID NO: 95733 - DNA, 80 bp, synthetic construct
  source 1..80: mol_type = other DNA
aggtgccgtgcacctgtagtcccagctactcgggaggctgagacaggagaattgcttgaacctggcaggcagaggttgca

SEQ ID NO: 95734 - DNA, 80 bp, synthetic construct; identical to SEQ ID NO: 17937
  source 1..80: mol_type = other DNA

SEQ ID NO: 95735 - DNA, 80 bp, synthetic construct
  source 1..80: mol_type = other DNA
tggtttgcttcctctgacaactccccactccagctagatttccagtgtaagagacaatgaaaatttcttttaagaattta

SEQ ID NO: 95736 - DNA, 80 bp, synthetic construct
  source 1..80: mol_type = other DNA
aatgcattgagaaaaaagaatatgttttaaaatgtgtaatgacaaattctggggaggccttcacaaagcagactgcacct

SEQ ID NO: 95737 - DNA, 80 bp, synthetic construct
  source 1..80: mol_type = other DNA
atttaagaacgttggtgatgacctaatgatagaatgatgaactaaagactgagagggacatttaaacacctactcatcct

SEQ ID NO: 95738 - DNA, 80 bp, synthetic construct; identical to SEQ ID NO: 17938
  source 1..80: mol_type = other DNA

SEQ ID NO: 95739 - DNA, 80 bp, synthetic construct
  source 1..80: mol_type = other DNA
agctgtcattctcaaatttctgatagctggttctacaattgcggaagagtcttggggacttaatttcttcacctgaagaa

SEQ ID NO: 95740 - DNA, 80 bp, synthetic construct
  source 1..80: mol_type = other DNA
tacctgaactctgaggcattttaatttattacctctaaattgcttccagttcttgtcctttaagagaagaaagaagactg

SEQ ID NO: 95741 - DNA, 80 bp, synthetic construct; identical to SEQ ID NO: 17939
  source 1..80: mol_type = other DNA

SEQ ID NO: 95742 - DNA, 80 bp, synthetic construct
  source 1..80: mol_type = other DNA
gtgcagtggcgcgacttcggctcactgcaagctctgcctcccgggttcaagcgattctcctacctcagcctcccgagtag

SEQ ID NO: 95743 - DNA, 80 bp, synthetic construct
  source 1..80: mol_type = other DNA
gcccggcctacttttgggtagtttaaaattctaagcctattatataaatattttggaatttaaaatatttggaagagcaa

SEQ ID NO: 95744 - DNA, 80 bp, synthetic construct
  source 1..80: mol_type = other DNA
gaagaagaaaacatgctgaagtttccttatactgtccaagaaaacaaaggaattgtttcttctttgaaaaggaatgtttt

SEQ ID NO: 95745 - DNA, 80 bp, synthetic construct; identical to SEQ ID NO: 17940
  source 1..80: mol_type = other DNA

SEQ ID NO: 95746 - DNA, 80 bp, synthetic construct
  source 1..80: mol_type = other DNA
tgctgaaatgccaagaatcactctcacttgctggctccaacacactggagtgtacaatttattttcctctcctatcttgg

SEQ ID NO: 95747 - DNA, 80 bp, synthetic construct
  source 1..80: mol_type = other DNA
aaaagtatgtaattccaaagggacctaaagacagcactgatgcctgtggtaaatgctgttgtgggcacatgctcatccta

SEQ ID NO: 95748 - DNA, 80 bp, synthetic construct
  source 1..80: mol_type = other DNA
cattttatatgcagagcagatttactcagcaccattgccacatgcagaccagaaatgatctcaatgtcaagtctagtaaa

SEQ ID NO: 95749 - DNA, 80 bp, synthetic construct
  source 1..80: mol_type = other DNA
tctgaatacactctcggctctgaaaataacaccaatgaatttgtggcaattaagatattcggtaacattcatgattttta

SEQ ID NO: 95750 - DNA, 80 bp, synthetic construct; identical to SEQ ID NO: 17941
  source 1..80: mol_type = other DNA

SEQ ID NO: 95751 - DNA, 80 bp, synthetic construct
  source 1..80: mol_type = other DNA
tgtaaattggcaatatctgaccctgtgatgtcttgagactatgaagggcaggggctttatccacaaaatcacaatctgtg

SEQ ID NO: 95752 - DNA, 80 bp, synthetic construct
  source 1..80: mol_type = other DNA
ggaaaacctatcttgtagggagtgctactgagagtaaactgagaaaagcctcataaagcatttagagcagtttctagaac

SEQ ID NO: 95753 - DNA, 80 bp, synthetic construct; identical to SEQ ID NO: 17942
  source 1..80: mol_type = other DNA

SEQ ID NO: 95754 - DNA, 80 bp, synthetic construct
  source 1..80: mol_type = other DNA
ttcctgttaatactattattcttcttcttcccacaaaaattatcatatctctgtcctccatactagctaattttgcttac

SEQ ID NO: 95755 - DNA, 80 bp, synthetic construct
  source 1..80: mol_type = other DNA
aagacatggctaggttcccatcaataggggactggataaggagaatgtggtatacatacaccatggaatactacacagcc

SEQ ID NO: 95756 - DNA, 80 bp, synthetic construct
  source 1..80: mol_type = other DNA
ataaacactggggatttcaaaagcagggagggacagagcaggaaaaagggttgaaaatccatctattgggtactaagttc

SEQ ID NO: 95757 - DNA, 80 bp, synthetic construct
  source 1..80: mol_type = other DNA
atgtttccaatttctgtttgattactttctatcacaaactccatactcttatcagacttgattattcaccaatttcacca

SEQ ID NO: 95758 - DNA, 80 bp, synthetic construct; identical to SEQ ID NO: 17943
  source 1..80: mol_type = other DNA

SEQ ID NO: 95759 - DNA, 80 bp, synthetic construct
  source 1..80: mol_type = other DNA
tattgatatgaaagtactatgacatctaaggaaaagcaagcactttggtgggtgtgaagtatatctgtgggaaaaaaggt

SEQ ID NO: 95760 - DNA, 80 bp, synthetic construct
  source 1..80: mol_type = other DNA
cttggacaatccaggccaacagttgctcaaatgatgtgcccctttctgaatcaaggccaggaaaaaactttccctgtgat

SEQ ID NO: 95761 - DNA, 80 bp, synthetic construct; identical to SEQ ID NO: 17944
  source 1..80: mol_type = other DNA

SEQ ID NO: 95762 - DNA, 80 bp, synthetic construct
  source 1..80: mol_type = other DNA
gagctggagagaaactttaagacgtgaaatatgtttaagcaggtgagcgatggatcaaagtgcactagaaaagcagattc

SEQ ID NO: 95763 - DNA, 80 bp, synthetic construct
  source 1..80: mol_type = other DNA
ccagatgccatgaatggtcctttgttctgcattcccgcagcacttcacttgcacctttgacatcctagttcgcaaacttc

SEQ ID NO: 95764 - DNA, 80 bp, synthetic construct
  source 1..80: mol_type = other DNA
atttcattgtagctgtcttctagttcacttgcttatctgtgtcccctgctccactaaacatttcttacggatattcttgt

SEQ ID NO: 95765 - DNA, 80 bp, synthetic construct
  source 1..80: mol_type = other DNA
ttttttcatttttttgtggagacagggtcttgctatgttgcctaggctggtctcgaactcctgacctcaactgatccttc

SEQ ID NO: 95766 - DNA, 80 bp, synthetic construct; identical to SEQ ID NO: 17945
  source 1..80: mol_type = other DNA

SEQ ID NO: 95767 - DNA, 80 bp, synthetic construct
  source 1..80: mol_type = other DNA
aacaaaccatcaaacaaactgtgtaactagaaaagaaccaaaggcagaatatatcctgacttccttggggctacctaatt

SEQ ID NO: 95768 - DNA, 80 bp, synthetic construct
  source 1..80: mol_type = other DNA
cccagaaaaggggatgatgatattctccgtcagcgtaagcaatgcttctgttatcatgagattcttgagtttgtcattag

SEQ ID NO: 95769 - DNA, 80 bp, synthetic construct; identical to SEQ ID NO: 17946
  source 1..80: mol_type = other DNA

SEQ ID NO: 95770 - DNA, 80 bp, synthetic construct
  source 1..80: mol_type = other DNA
gtaactaaaacttcaacatttttaaagagtcatatttttttctcccttagatacacatgggaaaatatcttccctgcctc

SEQ ID NO: 95771 - DNA, 80 bp, synthetic construct
  source 1..80: mol_type = other DNA
aatttattctggctacctcatgtatccttattttatagtttggcagtgaaggagagacaacagcatcttccctattggcc

SEQ ID NO: 95772 - DNA, 80 bp, synthetic construct
  source 1..80: mol_type = other DNA
gacatacagactgaggctgagtactgagagaaaatagaaagtggcatatacgtttaggattttttttgtttttgaaattt

SEQ ID NO: 95773 - DNA, 80 bp, synthetic construct
  source 1..80: mol_type = other DNA
tgatctcggttcattgcaatctccacctcccaggttcaagcaatgctcctgcctcagcctcccaagtagctggaattaca

SEQ ID NO: 95774 - DNA, 80 bp, synthetic construct; identical to SEQ ID NO: 17947
  source 1..80: mol_type = other DNA

SEQ ID NO: 95775 - DNA, 80 bp, synthetic construct
  source 1..80: mol_type = other DNA
ctgcctcagcttcccgagtagctgggattacaggcacacaccaccatgcctggctaatttttgtattctcagtagagacg

SEQ ID NO: 95776 - DNA, 80 bp, synthetic construct
  source 1..80: mol_type = other DNA
gctggagtgtagtggcacaatcttggctcactgcaacttctgcctcccgggttcaagtgattctcctgcctcagtctcct

SEQ ID NO: 95777 - DNA, 80 bp, synthetic construct
  source 1..80: mol_type = other DNA
gccaccgcgcccggccagccattcctacttcttaaattgactgtatggtctgtacaaaggaaagaggaagcataggtact

SEQ ID NO: 95778 - DNA, 80 bp, synthetic construct; identical to SEQ ID NO: 17948
  source 1..80: mol_type = other DNA

SEQ ID NO: 95779 - DNA, 80 bp, synthetic construct
  source 1..80: mol_type = other DNA
tcctcctgcttctccttaagaggccctggaagagggacagataaaactcagaaggtggttgaaaacaatttaaagacaag

SEQ ID NO: 95780 - DNA, 80 bp, synthetic construct
  source 1..80: mol_type = other DNA
gccagaagcttaagaatgtgaagcataatgacatttcctccttttaaaaaggaccacacaggacactcaaagaaaaagta

SEQ ID NO: 95781 - DNA, 80 bp, synthetic construct; identical to SEQ ID NO: 17949
  source 1..80: mol_type = other DNA

SEQ ID NO: 95782 - DNA, 80 bp, synthetic construct
  source 1..80: mol_type = other DNA
aaggtacataacacaaaaccaactgatattaggagctaatgtacacaggaatccatgttctctagtaactaaagaaatac

SEQ ID NO: 95783 - DNA, 80 bp, synthetic construct
  source 1..80: mol_type = other DNA
tcactagagggaataaaaattagcttatctcttatcagaaagtagatgagggcttttaccctgaaattaaagtgttagac

SEQ ID NO: 95784 - DNA, 80 bp, synthetic construct
  source 1..80: mol_type = other DNA
tctgaatagatgtcccttcaatgatcagattctggattacctaatataatatttacggtttgggttttcatgtgtctcat

SEQ ID NO: 95785 - DNA, 80 bp, synthetic construct; identical to SEQ ID NO: 17950
  source 1..80: mol_type = other DNA

SEQ ID NO: 95786 - DNA, 80 bp, synthetic construct
  source 1..80: mol_type = other DNA
ctaaaaatacaaaaaaaattagccaggcgtggtggcgggtgcctgtagtcccatctacttgggaggctgaggcaggagaa

SEQ ID NO: 95787 - DNA, 80 bp, synthetic construct
  source 1..80: mol_type = other DNA
tgccttaacacataggcagcaaaacttacaagttttatgattaaataaatccctatcttcagtgaaaaagaatgaggagg

SEQ ID NO: 95788 - DNA, 80 bp, synthetic construct
  source 1..80: mol_type = other DNA
atcttaactggaatatcagattattgaaacggccacgtattccaagttatatataaacccagggtaccttgttacacatt

SEQ ID NO: 95789 - DNA, 80 bp, synthetic construct
  source 1..80: mol_type = other DNA
aattaccctgactctttcatatgtaatgaaagagggataagaacccctgctgcactcttatcatgacttgtccgttttaa

SEQ ID NO: 95790 - DNA, 80 bp, synthetic construct; identical to SEQ ID NO: 17951
  source 1..80: mol_type = other DNA

SEQ ID NO: 95791 - DNA, 80 bp, synthetic construct
  source 1..80: mol_type = other DNA
aaaatacaaaattagccaggcatagtggcgcatgcctgtaatcccagctacttgggaggctaaggcaggagaatcgcttg

SEQ ID NO: 95792 - DNA, 80 bp, synthetic construct
  source 1..80: mol_type = other DNA
gacaagccccttctcaaagactatacaaatgagtcatcacgtgcctcaaaagtaggtggggtgacagcaaaacactcaga

SEQ ID NO: 95793 - DNA, 80 bp, synthetic construct
  source 1..80: mol_type = other DNA
gccttagcttagtgaccaacacataataggggttcagaaaaaaaaaaggtcaaagaaatagaccagtaagattcacatat

SEQ ID NO: 95794 - DNA, 80 bp, synthetic construct; identical to SEQ ID NO: 17952
  source 1..80: mol_type = other DNA

SEQ ID NO: 95795 - DNA, 80 bp, synthetic construct
  source 1..80: mol_type = other DNA
cacgcaagcacacacacacttcccaagctttctaactaccaggcaccctaactccaaatcacgctattttccatgtctcc

SEQ ID NO: 95796 - DNA, 80 bp, synthetic construct
  source 1..80: mol_type = other DNA
gtccacaatgaaacataaccccttcaggaagtatttcctgactataaaactagtagatggagaaacaaaatccaacgcgg

SEQ ID NO: 95797 - DNA, 80 bp, synthetic construct; identical to SEQ ID NO: 17953
  source 1..80: mol_type = other DNA

SEQ ID NO: 95798 - DNA, 80 bp, synthetic construct
  source 1..80: mol_type = other DNA
ccagcctgatcaacgtggcgaaaccccgtctctactaaaaatacaaaaaattagctgggcgtggtggtgggcacctgtaa

SEQ ID NO: 95799 - DNA, 80 bp, synthetic construct
  source 1..80: mol_type = other DNA
aaaaagaaaaagagaatagagagagtagcatggtacctcacatagttttataacattaaaatatatcagaatttaaaatg

SEQ ID NO: 95800 - DNA, 80 bp, synthetic construct
  source 1..80: mol_type = other DNA
caagggttgaaaaactatctgttgggtactatgctgagtacctgggtgacaggaccattcgtatcccaaacctcagcatc

SEQ ID NO: 95801 - DNA, 80 bp, synthetic construct
  source 1..80: mol_type = other DNA
caggtagaagagcaaaatatattcaatttactttaaaacaatatttgtggagtatttccgttaaaagtatttaccagaac

SEQ ID NO: 95802 - DNA, 80 bp, synthetic construct; identical to SEQ ID NO: 17954
  source 1..80: mol_type = other DNA

SEQ ID NO: 95803 - DNA, 80 bp, synthetic construct
  source 1..80: mol_type = other DNA
tagctgagactacaggcacacaccactaacacacctggctaattctttatttttcatagagacagggtcccactatgttg

SEQ ID NO: 95804 - DNA, 80 bp, synthetic construct
  source 1..80: mol_type = other DNA
gtgcttattctggaacatcaacaaatcatcttctcttttatcatacgactgttcatttaaatgaaagtagccccttctct

SEQ ID NO: 95805 - DNA, 80 bp, synthetic construct
  source 1..80: mol_type = other DNA
ttcttctttaaggtttcagtgagctaaggaggtggtactgagaggagtccagataatggaaagattggaaaaaacagttt

SEQ ID NO: 95806 - DNA, 80 bp, synthetic construct; identical to SEQ ID NO: 17955
  source 1..80: mol_type = other DNA

SEQ ID NO: 95807 - DNA, 80 bp, synthetic construct
  source 1..80: mol_type = other DNA
agttcgagaccagcctggccaacatggtgaaactaaactttagtagaaacatcgtctctactaaaaatacaaaaattagc

SEQ ID NO: 95808 - DNA, 80 bp, synthetic construct
  source 1..80: mol_type = other DNA
tcgaatgtggctcaaatctggagtctaagccagcaggtaacaatgttcctttaaagccttctctagcataacaatgagcc

SEQ ID NO: 95809 - DNA, 80 bp, synthetic construct
  source 1..80: mol_type = other DNA
atgtaaggcatctggctggggtgcaaatgtgttaggttcttcaatgttcagtaagcactacctgttatttgttttttagt

SEQ ID NO: 95810 - DNA, 80 bp, synthetic construct; identical to SEQ ID NO: 17956
  source 1..80: mol_type = other DNA

SEQ ID NO: 95811 - DNA, 80 bp, synthetic construct
  source 1..80: mol_type = other DNA
agactgaaacctatgaaataattgaaggggaagattaagtgataaagggtgcataggtactagttaaacaaagttaagtg

SEQ ID NO: 95812 - DNA, 80 bp, synthetic construct
  source 1..80: mol_type = other DNA
catataaaatgaatagtatcactttcattaacagaaataaaaatgcatttaccatgtcagcctcagtagtaatgcaaact

SEQ ID NO: 95813 - DNA, 80 bp, synthetic construct
  source 1..80: mol_type = other DNA
cgcccagctaattttttgtatttttagtagagatggggtttcaccatgttagctgggatggtctcgatctcctgaccttg

SEQ ID NO: 95814 - DNA, 80 bp, synthetic construct; identical to SEQ ID NO: 17957
  source 1..80: mol_type = other DNA

SEQ ID NO: 95815 - DNA, 80 bp, synthetic construct
  source 1..80: mol_type = other DNA
cattaggttgtagactgaaggctttccttctcttaggcttccattcacatctgattttgaaacttttaagttgccaagag

SEQ ID NO: 95816 - DNA, 80 bp, synthetic construct
  source 1..80: mol_type = other DNA
ccaggggcagatttgcatattttctatgtaccaagttctagcctccctttcatagacaggtaaatggtatttaggacaca

SEQ ID NO: 95817 - DNA, 80 bp, synthetic construct
  source 1..80: mol_type = other DNA
ataataaagcaaaaattacaactcctctccctcctacttctaacattaagaagcgtcagtataatgttaggagttttaca

SEQ ID NO: 95818 - DNA, 80 bp, synthetic construct; identical to SEQ ID NO: 17958
  source 1..80: mol_type = other DNA

SEQ ID NO: 95819 - DNA, 80 bp, synthetic construct
  source 1..80: mol_type = other DNA
atggtggtgggtgcctgtaatcccagctacttgggaggctgaggcaggagatttgcttgaacccaggaggtggagcttgc

SEQ ID NO: 95820 - DNA, 80 bp, synthetic construct
  source 1..80: mol_type = other DNA
tgaaatctgaaatacttcaaaatctgaaactttttgaatgctaacataatgctccaagggagtaattcagatcttggatt

SEQ ID NO: 95821 - DNA, 80 bp, synthetic construct; identical to SEQ ID NO: 17959
  source 1..80: mol_type = other DNA

SEQ ID NO: 95822 - DNA, 80 bp, synthetic construct
  source 1..80: mol_type = other DNA
catgcccagctaatttttgtattcttagtggagatggggttttgccatgttggccaggctggtctcgaactcccaacctc

SEQ ID NO: 95823 - DNA, 80 bp, synthetic construct
  source 1..80: mol_type = other DNA
tctgttattctgctactgtggcacagtgcctgtttttaggtttttaagaaaatataagttcataatatacattcacactt

SEQ ID NO: 95824 - DNA, 80 bp, synthetic construct
  source 1..80: mol_type = other DNA
ggaaatggcttactggccatattgcatttcaagctgcaatgatagaattagtaagaagtggcatacggaagcctccccag

SEQ ID NO: 95825 - DNA, 80 bp, synthetic construct
  source 1..80: mol_type = other DNA
gctctacttactgtataacttgactccctagtgtctggcacttatcccaagcttaaaaatagattttagttactttcatc

SEQ ID NO: 95826 - DNA, 80 bp, synthetic construct; identical to SEQ ID NO: 17960
  source 1..80: mol_type = other DNA

SEQ ID NO: 95827 - DNA, 80 bp, synthetic construct
  source 1..80: mol_type = other DNA
cttccctgccaattataaaataagtaaatgacgaggacttctggttgcaaataagcatagggaacacacagcctctgctg

SEQ ID NO: 95828 - DNA, 80 bp, synthetic construct
  source 1..80: mol_type = other DNA
aatgtcacctcctctatgaaatgtcactcctttctctgctttccctcccattagaattaatcactccctgtaaactggca

SEQ ID NO: 95829 - DNA, 80 bp, synthetic construct
  source 1..80: mol_type = other DNA
tacatcttttgtaatagcagaaaataagaaaccattaacatccagcaatgggggaagactggttgatggttgtcacatac

SEQ ID NO: 95830 - DNA, 80 bp, synthetic construct; identical to SEQ ID NO: 17961
  source 1..80: mol_type = other DNA

SEQ ID NO: 95831 - DNA, 80 bp, synthetic construct
  source 1..80: mol_type = other DNA
gccaacatagtgaaaccccgtctctactaaaaatacaaaaaattagctgggtgtggtggcgcaagcctgtaatcccagct

SEQ ID NO: 95832 - DNA, 80 bp, synthetic construct
  source 1..80: mol_type = other DNA
taaacacaggcaaaaaggaaatgagattagggaatttgggagaagtggtaaatgtatgaatcataaataggatctgccat

SEQ ID NO: 95833 - DNA, 80 bp, synthetic construct
  source 1..80: mol_type = other DNA
gagattatgggtgcatttccttttttgttttttaatttctcaaatttcttatcaaaaacttgaatttgttttatagtaag

SEQ ID NO: 95834 - DNA, 80 bp, synthetic construct; identical to SEQ ID NO: 17962
  source 1..80: mol_type = other DNA

SEQ ID NO: 95835 - DNA, 80 bp, synthetic construct
  source 1..80: mol_type = other DNA
ctgaacaatgagaacacatggacacaggacggggaacatcacacactggggcctgtcatggggaagggggaaaggggagg

SEQ ID NO: 95836 - DNA, 80 bp, synthetic construct
  source 1..80: mol_type = other DNA
tcacgttttggtgtgaaattacctgggtgaaccaccctcctaccgttcactgacagggaacaatttgcccggagttattg

SEQ ID NO: 95837 - DNA, 80 bp, synthetic construct
  source 1..80: mol_type = other DNA
agggcacctatgtaattagggtgctgggattcaaactcagctagcagtgactcttcagagtccatgattaaaccaccaat

SEQ ID NO: 95838 - DNA, 80 bp, synthetic construct; identical to SEQ ID NO: 17963
  source 1..80: mol_type = other DNA

SEQ ID NO: 95839 - DNA, 80 bp, synthetic construct
  source 1..80: mol_type = other DNA
cgtcaaataccaagaatcctaatcaaacaaaatgaggactgaaaagctgctactggttttaaaagtattatgatttaaaa

SEQ ID NO: 95840 - DNA, 80 bp, synthetic construct
  source 1..80: mol_type = other DNA
attttcatgtttcatcattctcaaaaccagtctttgttctacctttatctctgagtgacagtcaagccagcaaacaactt

SEQ ID NO: 95841 - DNA, 80 bp, synthetic construct
  source 1..80: mol_type = other DNA
ggccctggtgtggtggctcacgcctataacgccagcactttgagaggctgaggtgagaagactgcttgagcccaggggtt

SEQ ID NO: 95842 - DNA, 80 bp, synthetic construct
  source 1..80: mol_type = other DNA
gtggtcccagctacttgggaggctccggtgggaggaatgacccccagaggtcaaggctgcagtgagccatgatcacacca

SEQ ID NO: 95843 - DNA, 80 bp, synthetic construct; identical to SEQ ID NO: 17964
  source 1..80: mol_type = other DNA

SEQ ID NO: 95844 - DNA, 80 bp, synthetic construct
  source 1..80: mol_type = other DNA
aaaaacaacaacaaaaataaagcaggagaaactatttgccacatatgtaacaacaaattaatatgtgtaataggtaaaga

SEQ ID NO: 95845 - DNA, 80 bp, synthetic construct
  source 1..80: mol_type = other DNA
aataattaatgaattcaagtgaaaaaaaaatcagcagaagctctgttgtgtgatccttacttgactgacctgcaaggcta

SEQ ID NO: 95846 - DNA, 80 bp, synthetic construct; identical to SEQ ID NO: 17965
  source 1..80: mol_type = other DNA

SEQ ID NO: 95847 - DNA, 80 bp, synthetic construct
  source 1..80: mol_type = other DNA
aaaggtgaaaagcttaagagagctctgtaattagtgatggatagaattaatgtaagagactaggatttgaactcagatga

SEQ ID NO: 95848 - DNA, 80 bp, synthetic construct
  source 1..80: mol_type = other DNA
gtgtgtgtgtgtgacagagtctctctctgttgcccaggctgaagtacactggcatgatcttggctcactgcaacctctgc

SEQ ID NO: 95849 - DNA, 80 bp, synthetic construct
  source 1..80: mol_type = other DNA
cttggcctcccaaagttctgggattacaggtatgagccactatacctggccctcaataactgtttgattggacaactatt

SEQ ID NO: 95850 - DNA, 80 bp, synthetic construct
  source 1..80: mol_type = other DNA
atttttgggaggacttattggggagttatttatcaaaattaaaaatgactcgatagtaactaacaactcaacttactgcc

SEQ ID NO: 95851 - DNA, 80 bp, synthetic construct; identical to SEQ ID NO: 17966
  source 1..80: mol_type = other DNA

SEQ ID NO: 95852 - DNA, 80 bp, synthetic construct
  source 1..80: mol_type = other DNA
tatcagccagccagaaaaatctcaaaaattcctgctacattagatagagttctcagaagtgtcttgccttaagaagcagg

SEQ ID NO: 95853 - DNA, 80 bp, synthetic construct
  source 1..80: mol_type = other DNA
acctagatgacaggttgatagatgcagcaaaccaccatggcacatgtatacctatataacaaatgcacactgcacatgta

SEQ ID NO: 95854 - DNA, 80 bp, synthetic construct
  source 1..80: mol_type = other DNA
taaaaatacaaaaattagccgggcatggtggcatgcgcctgtaatcccagctacttgggaggctgaggcaagagaatcac

SEQ ID NO: 95855 - DNA, 80 bp, synthetic construct; identical to SEQ ID NO: 17967
  source 1..80: mol_type = other DNA

SEQ ID NO: 95856 - DNA, 80 bp, synthetic construct
  source 1..80: mol_type = other DNA
aattttatctgtcttccatatgttcaaaaatcttgagcaaagatagaacatgttaaatagaaacatagaagacataaaaa

SEQ ID NO: 95857 - DNA, 80 bp, synthetic construct
  source 1..80: mol_type = other DNA
aacacagagaaagaagactaaaaaagaaagatctaaagaagcctaacgtgtatgtaattgtagttcccaaaggaggaata

SEQ ID NO: 95858 - DNA, 80 bp, synthetic construct; identical to SEQ ID NO: 17968
  source 1..80: mol_type = other DNA

SEQ ID NO: 95859 - DNA, 80 bp, synthetic construct
  source 1..80: mol_type = other DNA
cctcctgggttcaagcaattctcctgcctcagcctcctaagtagctgggattacaggcacccgccaccacacctggctaa

SEQ ID NO: 95860 - DNA, 80 bp, synthetic construct
  source 1..80: mol_type = other DNA
ccacgccgtggccaactttcagtactaatatttagaaactgttaacctggaattctaaagccagtgaaaatacctttcaa

SEQ ID NO: 95861 - DNA, 80 bp, synthetic construct
  source 1..80: mol_type = other DNA
tcacctgaagtcgggagtttgagaccagcctgaccaacatggagaaaccccatctctactaaaaatacaaattagccggg

SEQ ID NO: 95862 - DNA, 80 bp, synthetic construct; identical to SEQ ID NO: 17969
  source 1..80: mol_type = other DNA

SEQ ID NO: 95863 - DNA, 80 bp, synthetic construct
  source 1..80: mol_type = other DNA
aggagaattgcatgaacacgaaaggtggaggttgcagtgagctaagatcgcgccactgcattccagcctgggtgacagag

SEQ ID NO: 95864 - DNA, 80 bp, synthetic construct
  source 1..80: mol_type = other DNA
tataagtgcggtctccagaacaaaagggaacacatctcttcttaaaattaaaggtgtttatgcccgagatgaaacagaat

SEQ ID NO: 95865 - DNA, 80 bp, synthetic construct
  source 1..80: mol_type = other DNA
tagagctattggacacagagtccgagtgatgctgtacccctcaaggatttaaactaatgaaacaataataaataaaagtg

SEQ ID NO: 95866 - DNA, 80 bp, synthetic construct; identical to SEQ ID NO: 17970
  source 1..80: mol_type = other DNA

SEQ ID NO: 95867 - DNA, 80 bp, synthetic construct
  source 1..80: mol_type = other DNA
taaaagtacagatcatgtcttttacacagacgtaaaatttcttaacaagattttagcaaatctagtcataaaacctacaa

SEQ ID NO: 95868 - DNA, 80 bp, synthetic construct
  source 1..80: mol_type = other DNA
ttcaaaaactccattaaagcaggagtagaagggaagttcttcaacttgatatggtcatttataaaaaacctacaggtagc

SEQ ID NO: 95869 - DNA, 80 bp, synthetic construct
  source 1..80: mol_type = other DNA
ctgggatcagaaacaggataatatgcccacgctcaccacttcttttcaagattgtaggagaggttctagcaagtactata

SEQ ID NO: 95870 - DNA, 80 bp, synthetic construct; identical to SEQ ID NO: 17971
  source 1..80: mol_type = other DNA

SEQ ID NO: 95871 - DNA, 80 bp, synthetic construct
  source 1..80: mol_type = other DNA
atggactaacattacctacttttgagacttataaaacgatagtaatcaagactgtggaatttgaataagacagacaaata

SEQ ID NO: 95872 - DNA, 80 bp, synthetic construct
  source 1..80: mol_type = other DNA
ggttgacttgagtcatatttatttgcactaggacgtaagaatgtttcacatccccagttttccatggtatcctcaaaaaa

SEQ ID NO: 95873 - DNA, 80 bp, synthetic construct
  source 1..80: mol_type = other DNA
gccaacatggtgaaatcctgtctctaccaaaaatacaaaaattagccgggtgtggtggcagttgcctgtaatcccagctc

SEQ ID NO: 95874 - DNA, 80 bp, synthetic construct
  source 1..80: mol_type = other DNA
aatcccagcactttgggaggccaaggtgggcagatcacttgaggcaagaagttcaagaccagcctggccaacatgatgaa

SEQ ID NO: 95875 - DNA, 80 bp, synthetic construct; identical to SEQ ID NO: 17972
  source 1..80: mol_type = other DNA

SEQ ID NO: 95876 - DNA, 80 bp, synthetic construct
  source 1..80: mol_type = other DNA
agaacaactaaaatatataacatttacaaaacttctaggataaaatatagattatcttctaacttttgaatagagaaaca

SEQ ID NO: 95877 - DNA, 80 bp, synthetic construct
  source 1..80: mol_type = other DNA
atattaaaaaacttacaaaattcaataataagaaaacaaaacaaaacaaaatgggcaaaagaattgaatacacatttcac

SEQ ID NO: 95878 - DNA, 80 bp, synthetic construct
  source 1..80: mol_type = other DNA
tctacaaaaaatacaaaaattagcaaggtgtggtagtgcaccggtaggcccagctacttgggaggctgaggtgggaagat

SEQ ID NO: 95879 - DNA, 80 bp, synthetic construct; identical to SEQ ID NO: 17973
  source 1..80: mol_type = other DNA

SEQ ID NO: 95880 - DNA, 80 bp, synthetic construct
  source 1..80: mol_type = other DNA
tctgattaacacgaaatgggtgaatctcaaaagacttactctgagtaaaataattcaaaccaaaaaaatcttatattcta

SEQ ID NO: 95881 - DNA, 80 bp, synthetic construct
  source 1..80: mol_type = other DNA
agtgagacccccatctctacaaaaaatacaaaaattagctgggcatggttgtgtgcgcctatggtcccagctacccagga

SEQ ID NO: 95882 - DNA, 80 bp, synthetic construct; identical to SEQ ID NO: 17974
  source 1..80: mol_type = other DNA

SEQ ID NO: 95883 - DNA, 80 bp, synthetic construct
  source 1..80: mol_type = other DNA
acggtataaaaaaataaagtattataagtagtaagttatcatttatgatttcatgttttaaaaaggaaactcaatcaact

SEQ ID NO: 95884 - DNA, 80 bp, synthetic construct
  source 1..80: mol_type = other DNA
gagctgtgattcctcctccctcacaaatgtatcactttttaagacaaatataaaataacatattgattccatctctgagg

SEQ ID NO: 95885 - DNA, 80 bp, synthetic construct
  source 1..80: mol_type = other DNA
agagggaaatttgtgtagtgacttactttctacatttccgaattgcaggaaatatttttggtaatgagtggctgttttct

SEQ ID NO: 95886 - DNA, 80 bp, synthetic construct; identical to SEQ ID NO: 17975
  source 1..80: mol_type = other DNA

SEQ ID NO: 95887 - DNA, 80 bp, synthetic construct
  source 1..80: mol_type = other DNA
tgattctcctgcctcagcctctcgagtagctgggattacaggtacctgccactgcacccaactaatttttgtatttttag

SEQ ID NO: 95888 - DNA, 80 bp, synthetic construct
  source 1..80: mol_type = other DNA
aagtcaccataatagaagtgaaagtgtgttgcgctttgcaatggactgaagatgacactcaccctcttccgagcttcaga

SEQ ID NO: 95889 - DNA, 80 bp, synthetic construct; identical to SEQ ID NO: 17976
  source 1..80: mol_type = other DNA

SEQ ID NO: 95890 - DNA, 80 bp, synthetic construct
  source 1..80: mol_type = other DNA
gaccagcctggccaacatggtgaaaccctatctctactaaaaataaaaaaaattagctgggtgtggtggtatacacctgt

SEQ ID NO: 95891 - DNA, 80 bp, synthetic construct
  source 1..80: mol_type = other DNA
ataaatatgtatcctatgattcttacatcttataaaagcaactttaaaggcacaataagacttttaaaagaatccaaaag

SEQ ID NO: 95892 - DNA, 80 bp, synthetic construct
  source 1..80: mol_type = other DNA
aacagacaaacaaaatcagctgggtgtggtggcatgtgcctgtagacccagctacttggaaggctgaggtgggaggatcg

SEQ ID NO: 95893 - DNA, 80 bp, synthetic construct
  source 1..80: mol_type = other DNA
gttatacctgattcattccaggtaacattccagacacattcattccagacactggagacatcctgagaaggagttttcca

SEQ ID NO: 95894 - DNA, 80 bp, synthetic construct; identical to SEQ ID NO: 17977
  source 1..80: mol_type = other DNA

SEQ ID NO: 95895 - DNA, 80 bp, synthetic construct
  source 1..80: mol_type = other DNA
taatattagaggatattacaccttttaaaggagatgggaatattttacattcatggactgaggcctttacagagaagtca

SEQ ID NO: 95896 - DNA, 80 bp, synthetic construct
  source 1..80: mol_type = other DNA
aaaagattgagccattaatccatttcataagccatacatgactcaggaaagtttgaatttcccatctctaacacccacaa

SEQ ID NO: 95897 - DNA, 80 bp, synthetic construct
  source 1..80: mol_type = other DNA
gcgatttcactttatcactaaaaaaattcctaaactaagtgaagacttcctcagcaaggtttactacagctgtcaggggg

SEQ ID NO: 95898 - DNA, 80 bp, synthetic construct; identical to SEQ ID NO: 17978
  source 1..80: mol_type = other DNA

SEQ ID NO: 95899 - DNA, 80 bp, synthetic construct
  source 1..80: mol_type = other DNA
agctgggactacaggtgcacgccaccatacccggctaattttttttttttattttttttgagacggagtcttgctctgtc

SEQ ID NO: 95900 - DNA, 80 bp, synthetic construct
  source 1..80: mol_type = other DNA
ccggctaatttttctatttgtagtagagatggggtttcaccatgttggccaggctggtctcgaactcctgacctcgtgat

SEQ ID NO: 95901 - DNA, 80 bp, synthetic construct
  source 1..80: mol_type = other DNA
tcatttctgtgaaatcttttctgtaccccatcccctagaacagctagagctattctttcctctattctcctatagcattc

SEQ ID NO: 95902 - DNA, 80 bp, synthetic construct; identical to SEQ ID NO: 17979
  source 1..80: mol_type = other DNA

SEQ ID NO: 95903 - DNA, 80 bp, synthetic construct
  source 1..80: mol_type = other DNA
ggtgaagcacctgaggtcaggagtttaaggccagcctggccaacatggtgaaaccccgtctctactaaaaatacaaaaaa

SEQ ID NO: 95904 - DNA, 80 bp, synthetic construct
  source 1..80: mol_type = other DNA
aaaacaaaacaacccagtaacttgtgtgcgtgtgtaatctccccgtagccagcattcctgccaactaacaacacagccct

SEQ ID NO: 95905 - DNA, 80 bp, synthetic construct
  source 1..80: mol_type = other DNA
gatgactctggaatggatatgtgtttcttgaaagagagacagcgttgagggcactataaaaggttcagctgaggcaaaaa

SEQ ID NO: 95906 - DNA, 80 bp, synthetic construct; identical to SEQ ID NO: 17980
  source 1..80: mol_type = other DNA

SEQ ID NO: 95907 - DNA, 80 bp, synthetic construct
  source 1..80: mol_type = other DNA
gacctcccaggctcaagtgattctgttgcctcagcctcctgagtagttggggctacaggcatgcaccaccatgcccagct

SEQ ID NO: 95908 - DNA, 80 bp, synthetic construct
  source 1..80: mol_type = other DNA
accatgcccggccctgctcttgtgttctttaaatttctgtagacactaatatgtatcacacaacctagcacttgatgata

SEQ ID NO: 95909 - DNA, 80 bp, synthetic construct
  source 1..80: mol_type = other DNA
gttcaagcaattttcctgcctcagcctcctgagtagctgggataacaggcatccaccaccatgcctggctaacttttgta

SEQ ID NO: 95910 - DNA, 80 bp, synthetic construct; identical to SEQ ID NO: 17981
  source 1..80: mol_type = other DNA

SEQ ID NO: 95911 - DNA, 80 bp, synthetic construct
  source 1..80: mol_type = other DNA
gttaatattcaacatatatgaaagaatactcctttacatgtgggagtttcactaggcataaaaacttaaatcccccccaa

SEQ ID NO: 95912 - DNA, 80 bp, synthetic construct
  source 1..80: mol_type = other DNA
ctatcttcctcattacacaaaatacgtctggctccctctccttttcacagagagccaaattttcctttcataatcagaga

SEQ ID NO: 95913 - DNA, 80 bp, synthetic construct
  source 1..80: mol_type = other DNA
agcaacaaaagaacctagatggcaaaaagtaaaatttatatttcatttctccttcctttaattccttcactctttcacca

SEQ ID NO: 95914 - DNA, 80 bp, synthetic construct; identical to SEQ ID NO: 17982
  source 1..80: mol_type = other DNA

SEQ ID NO: 95915 - DNA, 80 bp, synthetic construct
  source 1..80: mol_type = other DNA
cagagggagaacagataagcaaatgaatagccacaatatatttttctgatagagacactcacacaaggctgctatctggg

SEQ ID NO: 95916 - DNA, 80 bp, synthetic construct
  source 1..80: mol_type = other DNA
tgcattaaggaaagtaaagaggttccaggtggtttgggtattggtatgtgggtatgtttggggatggtggtgatgaatgg

SEQ ID NO: 95917 - DNA, 80 bp, synthetic construct; identical to SEQ ID NO: 17983
  source 1..80: mol_type = other DNA

SEQ ID NO: 95918 - DNA, 80 bp, synthetic construct
  source 1..80: mol_type = other DNA
ggaggttgttacattttcatataggtccagaatttggcatcaaggatggaattgcagacaaaactttgagaaccataagg

SEQ ID NO: 95919 - DNA, 80 bp, synthetic construct
  source 1..80: mol_type = other DNA
cctgaaaaccaagggatgagagaatttcatggtgtctcaaacaccacccacaggttgagtaatataagcagtgcttatat

SEQ ID NO: 95920 - DNA, 80 bp, synthetic construct
  source 1..80: mol_type = other DNA
agatggagggagagaatgccagttgttggaggatgtcagataataattttgttactgttaaaatcattttgctaaaactg

SEQ ID NO: 95921 - DNA, 80 bp, synthetic construct
  source 1..80: mol_type = other DNA
gtggcacaaatcttggctcactgcaacctccatctcctgggctcaagtaatcctcccgcctcagcctctcgagtagttag

SEQ ID NO: 95922 - DNA, 80 bp, synthetic construct; identical to SEQ ID NO: 17984
  source 1..80: mol_type = other DNA

SEQ ID NO: 95923 - DNA, 80 bp, synthetic construct
  source 1..80: mol_type = other DNA
gatgttagatcattattgcaggagttactgatctaatcagccatccatttctcaatctttctcttagtaacgtgcacagt

SEQ ID NO: 95924 - DNA, 80 bp, synthetic construct
  source 1..80: mol_type = other DNA
acactagaaatctaaaaggtaccaagtaccaaaggaagaaaaaagacatctagaagtcagccatctttccttagctcttt

SEQ ID NO: 95925 - DNA, 80 bp, synthetic construct
  source 1..80: mol_type = other DNA
aagcattttttccttttatttcatgggatgatgaagaaaatacgcatgcaattctccaattcttggcctactttggagtt

SEQ ID NO: 95926 - DNA, 80 bp, synthetic construct; identical to SEQ ID NO: 17985
  source 1..80: mol_type = other DNA

SEQ ID NO: 95927 - DNA, 80 bp, synthetic construct
  source 1..80: mol_type = other DNA
gaatccacggcgacactgggcccagcttccctcagcgtgcgggtgctgtggaaggagctctgatgccaggaggacctgga

SEQ ID NO: 95928 - DNA, 80 bp, synthetic construct
  source 1..80: mol_type = other DNA
tcaaaaacggtgtcgctaacagagccatgctggtactgtctgtggtatgtgtcaaagtggcgctgcctgcttgtggtgcc

SEQ ID NO: 95929 - DNA, 80 bp, synthetic construct; identical to SEQ ID NO: 17986
  source 1..80: mol_type = other DNA

SEQ ID NO: 95930 - DNA, 80 bp, synthetic construct
  source 1..80: mol_type = other DNA
ttgcccctttctgggtaaaggctttttgaaaataagacttggttgacttgagtcatatttatttgcactaggatgtaaga

SEQ ID NO: 95931 - DNA, 80 bp, synthetic construct
  source 1..80: mol_type = other DNA
tctttgatatcctacctttagcatgtcataggttttaggaacaggggaacggcctccaacaaaatcattttcaaccaagt

SEQ ID NO: 95932 - DNA, 80 bp, synthetic construct
  source 1..80: mol_type = other DNA
aacaagtattaaacgtacgttaatgtttttaaatgctagtttcacaccaccctgggatatggcaagtgatcaaaggttat

SEQ ID NO: 95933 - DNA, 80 bp, synthetic construct
  source 1..80: mol_type = other DNA
caacatggcgaaacccatctctactaaacatacaaaaattagctgggcatagtggcgggcatctgtaatcccagctactc

SEQ ID NO: 95934 - DNA, 80 bp, synthetic construct; identical to SEQ ID NO: 17987
  source 1..80: mol_type = other DNA

SEQ ID NO: 95935 - DNA, 80 bp, synthetic construct
  source 1..80: mol_type = other DNA
tgcgccattgcactacagcctgagcaacaagagtgaaactctgtctcaaaaaaaaaaaaaaaaagttttcaaaatgaaag

SEQ ID NO: 95936 - DNA, 80 bp, synthetic construct
  source 1..80: mol_type = other DNA
gaattcggaagcttcttgtaataagcaggtgtaggcaataaatataatggtgactcagcactactagataagacagcttg

SEQ ID NO: 95937 - DNA, 80 bp, synthetic construct
  source 1..80: mol_type = other DNA
tggtgggcgcctgtaatcccagctactcgggaggctgaggcaggagaatcgcttgaacccgggaggcagaggttgcagtg

SEQ ID NO: 95938 - DNA, 80 bp, synthetic construct; identical to SEQ ID NO: 17988
  source 1..80: mol_type = other DNA

SEQ ID NO: 95939 - DNA, 80 bp, synthetic construct
  source 1..80: mol_type = other DNA
atgttgtgtccctcttctgcctcctttatccttctctcagctttttttgagttttctcttactgccttaaaaaaaggcta

SEQ ID NO: 95940 - DNA, 80 bp, synthetic construct
  source 1..80: mol_type = other DNA
cttctaggcttcagagactcatgaaagatgttgagaatacaacaacacagggtgctcctttccagtacaatgggaacaca

SEQ ID NO: 95941 - DNA, 80 bp, synthetic construct; identical to SEQ ID NO: 17989
  source 1..80: mol_type = other DNA

SEQ ID NO: 95942 - DNA, 80 bp, synthetic construct
  source 1..80: mol_type = other DNA
aaaggtcaggcagccacttaatttttaatctctatggcaaagaacggctggaacttggaccttaaataaagaaaaaaaat

SEQ ID NO: 95943 - DNA, 80 bp, synthetic construct
  source 1..80: mol_type = other DNA
tgacccgacagccaatttaagagagaaatcaaggacacattaacagttggatccttaaggacgctgacatttattattat

SEQ ID NO: 95944 - DNA, 80 bp, synthetic construct
  source 1..80: mol_type = other DNA
caccgtgtctggcctcatattattattttatgttggctgaggctcgcgcctaggctaaccctttatcctctactctgcac

SEQ ID NO: 95945 - DNA, 80 bp, synthetic construct
  source 1..80: mol_type = other DNA
gtacagggaacataaaaaggttctaatcctgaagagtccgggggccagagtaccctcagcactgggaatatgcagaaagg

SEQ ID NO: 95946 - DNA, 80 bp, synthetic construct; identical to SEQ ID NO: 17990
  source 1..80: mol_type = other DNA

SEQ ID NO: 95947 - DNA, 80 bp, synthetic construct
  source 1..80: mol_type = other DNA
ggagtaggtagatattcaggaacagttaatggcgtgcttcttccatctttaagctgagatccctgcaaaggttttctaaa

SEQ ID NO: 95948 - DNA, 80 bp, synthetic construct
  source 1..80: mol_type = other DNA
aagttgttgctgtgagttttaagcctttttaaagcaacttgtgtgaactccttacatttcaatgtgacttttcctttaag

SEQ ID NO: 95949 - DNA, 80 bp, synthetic construct; identical to SEQ ID NO: 17991
  source 1..80: mol_type = other DNA

SEQ ID NO: 95950 - DNA, 80 bp, synthetic construct
  source 1..80: mol_type = other DNA
gcttcttcagttttcagatgaatgaactgaggctgttttaatggttcgccaaataactacaaagtagttggaaacaggga

SEQ ID NO: 95951 - DNA, 80 bp, synthetic construct
  source 1..80: mol_type = other DNA
ccaatctcaaacaacaaatactgcagactaatttgcctaggcagtcatgagtttgagatcagtatgctggattaaagatg

SEQ ID NO: 95952 - DNA, 80 bp, synthetic construct
  source 1..80: mol_type = other DNA
ctcagccatgtccttttctgaaaatagaagaaagcaaacaaaaacatacacaaaggtgcatccagctttaaacaaatcca

SEQ ID NO: 95953 - DNA, 80 bp, synthetic construct
  source 1..80: mol_type = other DNA
ctggaacccctattctaccgctttgtatgtgtctggacaaatcagttagatgcctgtttcccgtaattccagctactaat

SEQ ID NO: 95954 - DNA, 80 bp, synthetic construct; identical to SEQ ID NO: 17992
  source 1..80: mol_type = other DNA

SEQ ID NO: 95955 - DNA, 80 bp, synthetic construct
  source 1..80: mol_type = other DNA
ccattagatcaggcccacctttgtctcatcagacttctgcatgactgtctataaaaatacagtcttctgccaggcaaggt

SEQ ID NO: 95956 - DNA, 80 bp, synthetic construct
  source 1..80: mol_type = other DNA
ttgggaagctgaggcaggagaattacttgaacccaggaggcagaagttgcagtgagtcaagatcacgccattgcactcca

SEQ ID NO: 95957 - DNA, 80 bp, synthetic construct
  source 1..80: mol_type = other DNA
gggtctcaggcataaacctggtgacgggtaagaaaagaaaacttttctcctctacacaagcaatatgcaaaaatgagata

SEQ ID NO: 95958 - DNA, 80 bp, synthetic construct; identical to SEQ ID NO: 17993
  source 1..80: mol_type = other DNA

SEQ ID NO: 95959 - DNA, 80 bp, synthetic construct
  source 1..80: mol_type = other DNA
tagttgcagagcaactttaaactccactcttctcaaataacaagcaattcaggtcaaaccaattgcgggggcgggtaatg

SEQ ID NO: 95960 - DNA, 80 bp, synthetic construct
  source 1..80: mol_type = other DNA
tgtttggtcaccaatacaaacattgctcgaaataatgaattattgtcagggttaaaatagtcaataaggccaggcatagt

SEQ ID NO: 95961 - DNA, 80 bp, synthetic construct
  source 1..80: mol_type = other DNA
tgggcacctgtaattccagctacttgggggccgggcttgaacccaggaggcagaggttgcggtgaggtgagactgtgcca

SEQ ID NO: 95962 - DNA, 80 bp, synthetic construct; identical to SEQ ID NO: 17994
  source 1..80: mol_type = other DNA

SEQ ID NO: 95963 - DNA, 80 bp, synthetic construct
  source 1..80: mol_type = other DNA
tacatgtagaggtgcccacaaaaacaggtgtggttaaatgtaaccacagaaatcagcaggtgttcgctattagtattgat

SEQ ID NO: 95964 - DNA, 80 bp, synthetic construct
  source 1..80: mol_type = other DNA
ttggtctttctacagtaatctctggcttgcaacagctctcgttctccacaaatcttaaaagatttaacttctcccattac

SEQ ID NO: 95965 - DNA, 80 bp, synthetic construct; identical to SEQ ID NO: 17995
  source 1..80: mol_type = other DNA

SEQ ID NO: 95966 - DNA, 80 bp, synthetic construct
  source 1..80: mol_type = other DNA
tattgatggaaatcacaacagcccaagtaagcatttgcttaggctggaaaataagtagaatttgttggtttagaaaacta

SEQ ID NO: 95967 - DNA, 80 bp, synthetic construct
  source 1..80: mol_type = other DNA
ggcatgggcctgtagtcccagctacttgggaagctgaggtgggtggattgcttgagccctggagacagaagttgcagtta

SEQ ID NO: 95968 - DNA, 80 bp, synthetic construct
  source 1..80: mol_type = other DNA
agtgctatattttgtgaccagttagctcacataatcaaccatgagaaacaacttggtgtatcaggtatatgctagaaagt

SEQ ID NO: 95969 - DNA, 80 bp, synthetic construct; identical to SEQ ID NO: 17996
  source 1..80: mol_type = other DNA

SEQ ID NO: 95970 - DNA, 80 bp, synthetic construct
  source 1..80: mol_type = other DNA
gtgcagcggtgcgatcttggctcactgaaacctcttcctctcaggatcaagcgattcttgtgcctcagccttccgagtag

SEQ ID NO: 95971 - DNA, 80 bp, synthetic construct
  source 1..80: mol_type = other DNA
ggctcccaaagtgccagcgctttaggcgtgagccattaaatggcccttttatatcacaggtgttcatgtcatattttgtt

SEQ ID NO: 95972 - DNA, 80 bp, synthetic construct
  source 1..80: mol_type = other DNA
caaggtgggcagatcacttgagtccaggaatttgagaccagcctgggcaaaaaggcaaaaccccatctgtacaaaaaaaa

SEQ ID NO: 95973 - DNA, 80 bp, synthetic construct
  source 1..80: mol_type = other DNA
atgaatacactgttcatttctgtaactgtgtctttactttggcattcctgccaattatttgctgagatatctcatgagac

SEQ ID NO: 95974 - DNA, 80 bp, synthetic construct; identical to SEQ ID NO: 17997
  source 1..80: mol_type = other DNA

SEQ ID NO: 95975 - DNA, 80 bp, synthetic construct
  source 1..80: mol_type = other DNA
gattacaggcatgcgccaccacgcccagcttattttttctgtacttttagtagagacagggtttctccatgttgatcagg

SEQ ID NO: 95976 - DNA, 80 bp, synthetic construct
  source 1..80: mol_type = other DNA
ctgttgcccaggctggcgtgcagtggtgcattcagagctcactgcagccttgaactcctggcctcaggcgattctcctgt

SEQ ID NO: 95977 - DNA, 80 bp, synthetic construct
  source 1..80: mol_type = other DNA
ttccctgtggaaatatctgtgactcacaattatcaaattctttaacttgcattcaagatcagaggagaggggtgaaggag

SEQ ID NO: 95978 - DNA, 80 bp, synthetic construct; identical to SEQ ID NO: 17998
  source 1..80: mol_type = other DNA

SEQ ID NO: 95979 - DNA, 80 bp, synthetic construct
  source 1..80: mol_type = other DNA
agaaagaactgtatcttacactaccacttctagcacagtcttgtatcagtacttgacaagttaattgttgattagtcaga

SEQ ID NO: 95980 - DNA, 80 bp, synthetic construct
  source 1..80: mol_type = other DNA
tttcgactgttctctgtcattctgggtatacggagaggaaggaaagttgcttccccagaatgtaggcagacttttattag

SEQ ID NO: 95981 - DNA, 80 bp, synthetic construct
  source 1..80: mol_type = other DNA
gagattgtgccaccgcactccagcctgggcatagagcgagactccatctcaaaaaaaaaaaaaaaaaaaaaaagaaaagc

SEQ ID NO: 95982 - DNA, 80 bp, synthetic construct; identical to SEQ ID NO: 17999
  source 1..80: mol_type = other DNA

SEQ ID NO: 95983 - DNA, 80 bp, synthetic construct
  source 1..80: mol_type = other DNA
tggcaggttgtgttttcaaatgcttaagtttctttttttccaactgtccatttttatttaaatctacatattgagctctc

SEQ ID NO: 95984 - DNA, 80 bp, synthetic construct
  source 1..80: mol_type = other DNA
ggtcaggagttcgagaccatcctggccaacatggtgaaaccctgtctctactaaaaatacaaaaaattagctgggcttgg

SEQ ID NO: 95985 - DNA, 80 bp, synthetic construct; identical to SEQ ID NO: 18000
  source 1..80: mol_type = other DNA

SEQ ID NO: 95986 - DNA, 80 bp, synthetic construct
  source 1..80: mol_type = other DNA
tctcagaattgtataatttaaacttgttgaatgtcatctgagatggaaataaatcatcttataggccatattaatcatct

SEQ ID NO: 95987 - DNA, 80 bp, synthetic construct
  source 1..80: mol_type = other DNA
aaaatgtgaagataaaataatgtaactatgtataggcttattttaataaatgagaaaaaactgtaaagttgctatctaaa

SEQ ID NO: 95988 - DNA, 80 bp, synthetic construct
  source 1..80: mol_type = other DNA
tcttatctgtcacatatagaacaatgtactttcataatcaaaccctgctactctgggtctacttgtggtttcttacagtt

SEQ ID NO: 95989 - DNA, 80 bp, synthetic construct; identical to SEQ ID NO: 18001
  source 1..80: mol_type = other DNA

SEQ ID NO: 95990 - DNA, 80 bp, synthetic construct
  source 1..80: mol_type = other DNA
gattagtcaccttgctccccagaattgcttcattcctgggattcctttttgtcaaaggaagaatttatgcagaatttgaa

SEQ ID NO: 95991 - DNA, 80 bp, synthetic construct
  source 1..80: mol_type = other DNA
tcactgaaacctctgactcccaggttcaagcaattctcctgcctcaggctccctagtagctgggattacaggtatgcacc

SEQ ID NO: 95992 - DNA, 80 bp, synthetic construct
  source 1..80: mol_type = other DNA
ctttgatcacagatattgaaaagcagcttcaccaaggaaatcacctaagataatagtgtgcctcaagttttgtggtggat

SEQ ID NO: 95993 - DNA, 80 bp, synthetic construct
  source 1..80: mol_type = other DNA
ggggggagaactgtgtagcaagtagtacttttaaggcaagtgtaataaataggatatggatgcttttaatttttcccttt

SEQ ID NO: 95994 - DNA, 80 bp, synthetic construct; identical to SEQ ID NO: 18002
  source 1..80: mol_type = other DNA

SEQ ID NO: 95995 - DNA, 80 bp, synthetic construct
  source 1..80: mol_type = other DNA
cttgtgttgatacaggattttttccagaccagcactgtttcaacaattgcttgtctgtttcaacttgagagacaggatag

SEQ ID NO: 95996 - DNA, 80 bp, synthetic construct
  source 1..80: mol_type = other DNA
aaagctgaggctttaaagtaagtaggtgttgtttgctgccttatctctctgtctgatttgtacttctgtgtaggctgcag

SEQ ID NO: 95997 - DNA, 80 bp, synthetic construct; identical to SEQ ID NO: 18003
  source 1..80: mol_type = other DNA

SEQ ID NO: 95998 - DNA, 80 bp, synthetic construct
  source 1..80: mol_type = other DNA
ttctcctgcctcagccttccgagtagctgagtagctgggattaccggcatgtgccaccacgcccggctaattttgtattt

SEQ ID NO: 95999 - DNA, 80 bp, synthetic construct
  source 1..80: mol_type = other DNA
ttttgggtcacttactactttttatttggtaatgtatttttctagcggttggcttccttcttcaaactttttgctttaaa

SEQ ID NO: 96000 - DNA, 80 bp, synthetic construct
  source 1..80: mol_type = other DNA
ttatgtgtggagttgggattaaatttccaaccattgctgacagacacatacttcatatgtgagatggattctcatatcta

SEQ ID NO: 96001 - DNA, 80 bp, synthetic construct; identical to SEQ ID NO: 18004
  source 1..80: mol_type = other DNA

SEQ ID NO: 96002 - DNA, 80 bp, synthetic construct
  source 1..80: mol_type = other DNA
cttcctcaattttatttaaagaaaaatgggagggggccacggagaggcttagcatctaacaaatcccactttgtattaat

SEQ ID NO: 96003 - DNA, 80 bp, synthetic construct
  source 1..80: mol_type = other DNA
ccacatcgcccaattcttggcacatagtatgcactcagttatattaactacgatcattgaacatcttctctttacctttc

SEQ ID NO: 96004 - DNA, 80 bp, synthetic construct
  source 1..80: mol_type = other DNA
tagaaactagaatgggttagcctacattcgccaatgcccaagttacttcatacagaaacaactgaacgttgcaggaaaca

SEQ ID NO: 96005 - DNA, 80 bp, synthetic construct; identical to SEQ ID NO: 18005
  source 1..80: mol_type = other DNA

SEQ ID NO: 96006 - DNA, 80 bp, synthetic construct
  source 1..80: mol_type = other DNA
gcagggccaaagtcccctacctcctcctcggcgtgtttgttccctggaccaaagcctcctaactacttttcttcactccc

SEQ ID NO: 96007 - DNA, 80 bp, synthetic construct
  source 1..80: mol_type = other DNA
tgaagggctccttctcccagaaaaagatcgtacacaccaaaaattctgcatagcatctcaaggtgtttatagactccctg

SEQ ID NO: 96008 - DNA, 80 bp, synthetic construct
  source 1..80: mol_type = other DNA
taggtacctatatgacaaagctgagtaataggttatggaaaagagtgctttccacaagcaagtcggtcataccgaagacg

SEQ ID NO: 96009 - DNA, 80 bp, synthetic construct; identical to SEQ ID NO: 18006
  source 1..80: mol_type = other DNA

SEQ ID NO: 96010 - DNA, 80 bp, synthetic construct
  source 1..80: mol_type = other DNA
tttagtggttcgaagcaacacaaatttattaccctacagtatgtaaattagtcccacagtgctggttccttccagaggct

SEQ ID NO: 96011 - DNA, 80 bp, synthetic construct
  source 1..80: mol_type = other DNA
actttatttctactattattacattgtaacatataattaaataattctacaactcaccatcacagagactcagtgggagc

SEQ ID NO: 96012 - DNA, 80 bp, synthetic construct
  source 1..80: mol_type = other DNA
ccgctgatgtgacaggaggcggagctcgggtggtaacgccagcgacggggagtggctataaatacagatgaagcttcgct

SEQ ID NO: 96013 - DNA, 80 bp, synthetic construct
  source 1..80: mol_type = other DNA
ctctggccagcagggaaaggtctccacctttgaaggactcacccaatggactgggcccacccagacaatccaggataatc

SEQ ID NO: 96014 - DNA, 80 bp, synthetic construct
  source 1..80: mol_type = other DNA
gccagtatggttctggacacctgtaatcccagctactcgggaggctgaggtgggagaatcacttgaacctgggaggcaga

SEQ ID NO: 96015 - DNA, 80 bp, synthetic construct; identical to SEQ ID NO: 18007
  source 1..80: mol_type = other DNA

SEQ ID NO: 96016 - DNA, 80 bp, synthetic construct
  source 1..80: mol_type = other DNA
cttccattttcagccaagttcaaacaggacaaggttccatgaaaactatttgaaaagacagacagggattcttatattcc

SEQ ID NO: 96017 - DNA, 80 bp, synthetic construct
  source 1..80: mol_type = other DNA
cacatcctgaggaaaccaaatcacagcatcaaattatgggaaatcaaactctttttgttcccctgcgaggacagcatttt

SEQ ID NO: 96018 - DNA, 80 bp, synthetic construct
  source 1..80: mol_type = other DNA
ttaaacaaagatgaatttaattatcattaagggttgaaagttatagactaaactatgtccagccagagcagaggcctgag

SEQ ID NO: 96019 - DNA, 80 bp, synthetic construct
  source 1..80: mol_type = other DNA
tcctgggtagcggggattacaggcatgcgccagcacacctggctaattttgtatttttagtagaggcagggtttctccat

SEQ ID NO: 96020 - DNA, 80 bp, synthetic construct; identical to SEQ ID NO: 18008
  source 1..80: mol_type = other DNA

SEQ ID NO: 96021 - DNA, 80 bp, synthetic construct
  source 1..80: mol_type = other DNA
cgataaaaccaattattccatacagtgactacggtcagttctgagaaatgacacccaggttggcgatgtgtctcatggtt

SEQ ID NO: 96022 - DNA, 80 bp, synthetic construct
  source 1..80: mol_type = other DNA
tcagaagcattcttctctaaaataaggctggacaagattacagctcaaaaactaccttccctgaaaaaccttcccccaga

SEQ ID NO: 96023 - DNA, 80 bp, synthetic construct; identical to SEQ ID NO: 18009
  source 1..80: mol_type = other DNA

SEQ ID NO: 96024 - DNA, 80 bp, synthetic construct
  source 1..80: mol_type = other DNA
accctctcccccaatgggtgcaggcgtcactccccctctgtcgagctccgacctgctgcccatagcactccagccctggc

SEQ ID NO: 96025 - DNA, 80 bp, synthetic construct
  source 1..80: mol_type = other DNA
caacaagtcaacagagaaccaagacaggtggcaccaggcgaggcggcctgctcaggtgtggggatggggtgaagggtgac

SEQ ID NO: 96026 - DNA, 80 bp, synthetic construct
  source 1..80: mol_type = other DNA
ggcaggcagtgacaacaccggagatggacgggtaggccagggcgagagggaaggagcagcctgtggttccccgggccact

SEQ ID NO: 96027 - DNA, 80 bp, synthetic construct
  source 1..80: mol_type = other DNA
tgcgatctcagctcactgcaactccgcctcccagattcaagcaattctcccgcttcagcctcccgagtagctgggattac

SEQ ID NO: 96028 - DNA, 80 bp, synthetic construct; identical to SEQ ID NO: 18010
  source 1..80: mol_type = other DNA

SEQ ID NO: 96029 - DNA, 80 bp, synthetic construct
  source 1..80: mol_type = other DNA
ccttccagtctgttctctctccagcagctgcaatcacgggactccttcccgtctgttctctccagtggctcgtgccacac

SEQ ID NO: 96030 - DNA, 80 bp, synthetic construct
  source 1..80: mol_type = other DNA
ctccattctaccttttttttttttttttttgagacaaggtcttactctgtcacccaggctggagtgcagttgcgtgatgt

SEQ ID NO: 96031 - DNA, 80 bp, synthetic construct; identical to SEQ ID NO: 18011
  source 1..80: mol_type = other DNA

SEQ ID NO: 96032 - DNA, 80 bp, synthetic construct
  source 1..80: mol_type = other DNA
ccaaggcgggcagatcatgaggtcaggagatcaacaccagcctgaccaacatggtgaaaccccatctctattaaaaatat

SEQ ID NO: 96033 - DNA, 80 bp, synthetic construct
  source 1..80: mol_type = other DNA
aaagaaaaatgctgtttgaatctcttgactgtgcttactggcatctaatgcgtgtcatttatttgtggtgatgcctattt

SEQ ID NO: 96034 - DNA, 80 bp, synthetic construct
  source 1..80: mol_type = other DNA
acacagtcacttttcttggacatcaggctaatccccactgcaggcagaaccactgctgccaccttcccacaccaaccgaa

SEQ ID NO: 96035 - DNA, 80 bp, synthetic construct; identical to SEQ ID NO: 18012
  source 1..80: mol_type = other DNA

SEQ ID NO: 96036 - DNA, 80 bp, synthetic construct
  source 1..80: mol_type = other DNA
ggagacagagagaggaggatcgcttcagcctggtacgtcaaggctgcagtgagctgtgattgtgccactgcactccagcc

SEQ ID NO: 96037 - DNA, 80 bp, synthetic construct
  source 1..80: mol_type = other DNA
ctgcctcagcctcccgagtagctgggactataggcgcccgacaccacgcccggctaatttttttgtatttttagtagaga

SEQ ID NO: 96038 - DNA, 80 bp, synthetic construct
  source 1..80: mol_type = other DNA
cttaacagaggtaacaaaagagcaataattatgagttcaaggtcacagagaacgcagacgacacagatgctcagctacga

SEQ ID NO: 96039 - DNA, 80 bp, synthetic construct
  source 1..80: mol_type = other DNA
acagccaggctttctttacttaccgacttccggcaggctctggaggcaaacatctgcttgactcgggaaggccggcacat

SEQ ID NO: 96040 - DNA, 80 bp, synthetic construct; identical to SEQ ID NO: 18013
  source 1..80: mol_type = other DNA

SEQ ID NO: 96041 - DNA, 80 bp, synthetic construct
  source 1..80: mol_type = other DNA
aaaaaattagctgggtgtggtggcaggcacctgtagtcccagctactcgggaggctgaggcaggagaatggtgtgaacct

SEQ ID NO: 96042 - DNA, 80 bp, synthetic construct
  source 1..80: mol_type = other DNA
aaaaaactggtctatatgacctgaaagattattcccagctctaaaaagacaagaatctatagttctgatttttttttttt

SEQ ID NO: 96043 - DNA, 80 bp, synthetic construct
  source 1..80: mol_type = other DNA
attttcagtagagatggggtttcaccatgttagccaggctggtctcaaactcctgacctcaggcgatctgcccgccttgg

SEQ ID NO: 96044 - DNA, 80 bp, synthetic construct; identical to SEQ ID NO: 18014
  source 1..80: mol_type = other DNA

SEQ ID NO: 96045 - DNA, 80 bp, synthetic construct
  source 1..80: mol_type = other DNA
tggctcacgcctgtaatctcagcactttaggagcccgaggcaggcagatctcttgaggccaggagtttgagaccggcctg

SEQ ID NO: 96046 - DNA, 80 bp, synthetic construct
  source 1..80: mol_type = other DNA
gtactccagcctgggcgacacaacaagactctgtctcaaaaaaaaaaaaaaaaaaaaaacacccataaaaacaaaaatta

SEQ ID NO: 96047 - DNA, 80 bp, synthetic construct
  source 1..80: mol_type = other DNA
agttcaagtagctacaaaagtagtttgctttttcctcagcctgccacgccaatgactcccactttttctgaatcctttcc

SEQ ID NO: 96048 - DNA, 80 bp, synthetic construct; identical to SEQ ID NO: 18015
  source 1..80: mol_type = other DNA

SEQ ID NO: 96049 - DNA, 80 bp, synthetic construct
  source 1..80: mol_type = other DNA
agcaaatactcaggcaagtcgattatgatgagaaacgacaggaaggtcaggaagaaaaagcagccagtgtcatagagaga

SEQ ID NO: 96050 - DNA, 80 bp, synthetic construct
  source 1..80: mol_type = other DNA
ccacacataaagatatccttcattctgcttagtggccacatagggattcatcaggcctgccaagggaaaaagaaagacag

SEQ ID NO: 96051 - DNA, 80 bp, synthetic construct; identical to SEQ ID NO: 18016
  source 1..80: mol_type = other DNA

SEQ ID NO: 96052 - DNA, 80 bp, synthetic construct
  source 1..80: mol_type = other DNA
caaaaattagccaggtgtggtggcgggtgcctgtaatcccagctactcgggaggctgaggcaggagaatcacttgaaccc

SEQ ID NO: 96053 - DNA, 80 bp, synthetic construct
  source 1..80: mol_type = other DNA
ctcctactgagaataaaaacaattcacgcattccacaggagagtactcagcaaactacacaggagagtactcagcaaact

SEQ ID NO: 96054 - DNA, 80 bp, synthetic construct
  source 1..80: mol_type = other DNA
tttgctgaagacaagactttggttttacatgatactatcacacctgacctttgtgaagtagtcagggtaaaacattccag

SEQ ID NO: 96055 - DNA, 80 bp, synthetic construct; identical to SEQ ID NO: 18017
  source 1..80: mol_type = other DNA

SEQ ID NO: 96056 - DNA, 80 bp, synthetic construct
  source 1..80: mol_type = other DNA
ctgattactctactgtcaatcaacactggcgcacaggctgtctgtctttctgaacacacacattccatacactatgcata

SEQ ID NO: 96057 - DNA, 80 bp, synthetic construct; identical to SEQ ID NO: 18018
  source 1..80: mol_type = other DNA

SEQ ID NO: 96058 - DNA, 80 bp, synthetic construct
  source 1..80: mol_type = other DNA
tcgctctgtcacccaggctggagtgcagtggtgcgatctcggctcactgcaacctctgtctcccaggttcaagcgattct

SEQ ID NO: 96059 - DNA, 80 bp, synthetic construct
  source 1..80: mol_type = other DNA
aaactccgcctcccgggttcaagcgattctcctgcctcagcctcccaagtagctgggactacaggcgcccgccaccacgc

SEQ ID NO: 96060 - DNA, 80 bp, synthetic construct
  source 1..80: mol_type = other DNA
cggggtttcaccacgttggccaggctggtctccaactcctgacctcaggtgatctgcctgcctcggcctcccaaagtgct

SEQ ID NO: 96061 - DNA, 80 bp, synthetic construct; identical to SEQ ID NO: 18019
  source 1..80: mol_type = other DNA

SEQ ID NO: 96062 - DNA, 80 bp, synthetic construct
  source 1..80: mol_type = other DNA
cagtttggttattataaatcccaggttaaactgaccaatgatttccatttctgcaaacatcgttttactgcaggtagaaa

SEQ ID NO: 96063 - DNA, 80 bp, synthetic construct
  source 1..80: mol_type = other DNA
tgcaatggcacaatcttggctcactgcaacctccacctcccgggttcgagtgattcttctgcctcagcctcctgagtagc

SEQ ID NO: 96064 - DNA, 80 bp, synthetic construct; identical to SEQ ID NO: 18020
  source 1..80: mol_type = other DNA

SEQ ID NO: 96065 - DNA, 80 bp, synthetic construct
  source 1..80: mol_type = other DNA
aatcttaattctccattctgtcatcacttaatgcatctgaaacaagttttcagacctgtacacatagatctacttcatta

SEQ ID NO: 96066 - DNA, 80 bp, synthetic construct
  source 1..80: mol_type = other DNA
ccaagcccggctaatttttttatttttagtagagacaaggtttcaccatgttggctaggctggtcttgaactcccgacct

SEQ ID NO: 96067 - DNA, 80 bp, synthetic construct
  source 1..80: mol_type = other DNA
tttccaatttcaatagcgcactcaaagctgcaacaaatacttctgtgcataaacctactcatctgtgggtgcatttccgt

SEQ ID NO: 96068 - DNA, 80 bp, synthetic construct; identical to SEQ ID NO: 18021
  source 1..80: mol_type = other DNA

SEQ ID NO: 96069 - DNA, 80 bp, synthetic construct
  source 1..80: mol_type = other DNA
atttgaggttgggagttcaagaccagcctggccaacatggtgaaaccccatctctactaaaaataaaaaaattagccagg

SEQ ID NO: 96070 - DNA, 80 bp, synthetic construct
  source 1..80: mol_type = other DNA
tgatattgttgtttctttctataagtgctccaggaagacccggtcccatgccaccatgctcgtcaccatcacaatcaacc

SEQ ID NO: 96071 - DNA, 80 bp, synthetic construct; identical to SEQ ID NO: 18022
  source 1..80: mol_type = other DNA

SEQ ID NO: 96072 - DNA, 80 bp, synthetic construct
  source 1..80: mol_type = other DNA
caaagtgctggaattacaaggtgtgcaccaccatgttaggcctgaggaggaaaaatgtataataaggcattacacaaact

SEQ ID NO: 96073 - DNA, 80 bp, synthetic construct
  source 1..80: mol_type = other DNA
gtgcaatggtgcaatctcggctcaccacaacctccacctcccgggttcaagcaattctcctgcctcagcctcccaagtag

SEQ ID NO: 96074 - DNA, 80 bp, synthetic construct
  source 1..80: mol_type = other DNA
gcccagcagaaaaggaactcttgtaagaggctcctacccactcaggctgagtttcagacctccttggagcaggagtggcc

SEQ ID NO: 96075 - DNA, 80 bp, synthetic construct; identical to SEQ ID NO: 18023
  source 1..80: mol_type = other DNA

SEQ ID NO: 96076 - DNA, 80 bp, synthetic construct
  source 1..80: mol_type = other DNA
ttggcttggcctcccaaagtactgggattacaggtgtgagccaccacacctagcctcaaaatactcttaagaaaaaactt

SEQ ID NO: 96077 - DNA, 80 bp, synthetic construct
  source 1..80: mol_type = other DNA
acctgtaatcccagctactcaggaggctgaggcaggagaaacgcttgaacccgggaggtggaggctgcagtgagccaaga

SEQ ID NO: 96078 - DNA, 80 bp, synthetic construct
  source 1..80: mol_type = other DNA
gacaaatctttgccctaaacttcctgtaattctgttccccttcactttgctgtgcttcatgatgtaactgctttattcgt

SEQ ID NO: 96079 - DNA, 80 bp, synthetic construct; identical to SEQ ID NO: 18024
  source 1..80: mol_type = other DNA

SEQ ID NO: 96080 - DNA, 80 bp, synthetic construct
  source 1..80: mol_type = other DNA
ctgaacccctcagaatccacggaagtgctgccgtgccccgagtccttctccacctccgctctgtccgtagggtcactggg

SEQ ID NO: 96081 - DNA, 80 bp, synthetic construct
  source 1..80: mol_type = other DNA
cgaagagaaaaggcctctcgcagtctggaaatggacacgtcttttttttcttctccagtccttaatgaaggggattgatc

SEQ ID NO: 96082 - DNA, 80 bp, synthetic construct; identical to SEQ ID NO: 18025
  source 1..80: mol_type = other DNA

SEQ ID NO: 96083 - DNA, 80 bp, synthetic construct
  source 1..80: mol_type = other DNA
aggagttcaggactggtctggacaacatggtaaaaccctgtttctactaaaaatacaaaaattagccgggtgtggtggca

SEQ ID NO: 96084 - DNA, 80 bp, synthetic construct
  source 1..80: mol_type = other DNA
cacaatgcaatatggccatatactcaccagaatggtaaaattaaaaaaacaacaaatgctcacaaagatcaggatcaaga

SEQ ID NO: 96085 - DNA, 80 bp, synthetic construct
  source 1..80: mol_type = other DNA
tcctagccctttgaggtcaggagttcaagaccagcctgaccaacatggtgaaacctcatctctactaaaaatacaaaaaa

SEQ ID NO: 96086 - DNA, 80 bp, synthetic construct
  source 1..80: mol_type = other DNA
aaaaaagaaagaagtgcctatctatgctcgtcaaaaagacgtggatgaggatgttcatgacagcattcttcattatagcc

SEQ ID NO: 96087 - DNA, 80 bp, synthetic construct; identical to SEQ ID NO: 18026
  source 1..80: mol_type = other DNA

SEQ ID NO: 96088 - DNA, 80 bp, synthetic construct
  source 1..80: mol_type = other DNA
gccaccacgcccggctaattttttgtatttttagtagagacagagtttcaccgtgttagatagtctcgatctcctgacct

SEQ ID NO: 96089 - DNA, 80 bp, synthetic construct
  source 1..80: mol_type = other DNA
tcatggagaaaccccatctctaatgacaatacaaacattagccaggtgtggtggtgggcgcctgtaatcccagctactca

SEQ ID NO: 96090 - DNA, 80 bp, synthetic construct; identical to SEQ ID NO: 18027
  source 1..80: mol_type = other DNA

SEQ ID NO: 96091 - DNA, 80 bp, synthetic construct
  source 1..80: mol_type = other DNA
agtttacttggaaaaaataaggaaacacattagctaaaagctttagaagctgtttgtacactgtatttttcttaccttca

SEQ ID NO: 96092 - DNA, 80 bp, synthetic construct
  source 1..80: mol_type = other DNA
tgccaacaaaagcttttcctcttgtagcaaaatttgccttttatctggagtaacattgatatcaacgcattctaaggcaa

SEQ ID NO: 96093 - DNA, 80 bp, synthetic construct
  source 1..80: mol_type = other DNA
cagcctccgaagtagctaggattacaggcaagtgccaccacactggctaatttttgtatttttagtagagatggggtttc

SEQ ID NO: 96094 - DNA, 80 bp, synthetic construct
  source 1..80: mol_type = other DNA
tcacaagtgctattaaaaacattacagtgtccaggttaagattcataagttatgaaatcagctttttcaaataaatgagc

SEQ ID NO: 96095 - DNA, 80 bp, synthetic construct; identical to SEQ ID NO: 18028
  source 1..80: mol_type = other DNA

SEQ ID NO: 96096 - DNA, 80 bp, synthetic construct
  source 1..80: mol_type = other DNA
ggagttcaagaccagcctggccaacatggcgaaaccccgtctctactaaaaacacaaaaaattagtcaggcatggtggca

SEQ ID NO: 96097 - DNA, 80 bp, synthetic construct
  source 1..80: mol_type = other DNA
actctgtctcaaaaaatatctaataataaagatgcagataatgatttaattataaggaaagtatttataatttccaaaaa

SEQ ID NO: 96098 - DNA, 80 bp, synthetic construct; identical to SEQ ID NO: 18029
  source 1..80: mol_type = other DNA

SEQ ID NO: 96099 - DNA, 80 bp, synthetic construct
  source 1..80: mol_type = other DNA
atctactttctcccttggttgacattaaaaaaaattacattttcctaacaatataattaacatagtctcaagtagaaagc

SEQ ID NO: 96100 - DNA, 80 bp, synthetic construct
  source 1..80: mol_type = other DNA
ctggctaacacggtgaaaccctgtctctactaaaaatacaaaaaattagccaggtgtggtggcacgcacctgtagtccca

SEQ ID NO: 96101 - DNA, 80 bp, synthetic construct
  source 1..80: mol_type = other DNA
tcattccagtcatagcagagctgtagaatttcattttattctttgaggcattagtcactagttgtactgaaatgccaatg

SEQ ID NO: 96102 - DNA, 80 bp, synthetic construct; identical to SEQ ID NO: 18030
  source 1..80: mol_type = other DNA

SEQ ID NO: 96103 - DNA, 80 bp, synthetic construct
  source 1..80: mol_type = other DNA
tctttttttttttcaacggagtctcgctcttgttacccagactggagtgtaatggcacgatcttggctcactgcaacctc

SEQ ID NO: 96104 - DNA, 80 bp, synthetic construct
  source 1..80: mol_type = other DNA
ccgcctcaacctcccaaagtgctgggattataggcgtaagccactacacctggcctaaggatacatttttttaacagctt

SEQ ID NO: 96105 - DNA, 80 bp, synthetic construct
  source 1..80: mol_type = other DNA
catcaccaaaagtttcctcacaatctcaaagtgatatttctctaatcatagattcctaaaactgaatatttttccaactt

SEQ ID NO: 96106 - DNA, 80 bp, synthetic construct; identical to SEQ ID NO: 18031
  source 1..80: mol_type = other DNA

SEQ ID NO: 96107 - DNA, 80 bp, synthetic construct
  source 1..80: mol_type = other DNA
tactcaaatacaaaaaattagccaggcatggcagcatgtgcctataatcccagctacttgagaggctgaggcaggagaat

SEQ ID NO: 96108 - DNA, 80 bp, synthetic construct
  source 1..80: mol_type = other DNA
caaactcaaaaaacccatgtcatcatatcaagatgatcaatttaaatctgaggcagaagtaatctgagcccttattttcc

SEQ ID NO: 96109 - DNA, 80 bp, synthetic construct
  source 1..80: mol_type = other DNA
gaggtcaggagttcgagaccagcctggccaatgtggtgaaaccccgtatctactaaaaatacaaaaattagccgggtgtg

SEQ ID NO: 96110 - DNA, 80 bp, synthetic construct; identical to SEQ ID NO: 18032
  source 1..80: mol_type = other DNA

SEQ ID NO: 96111 - DNA, 80 bp, synthetic construct
  source 1..80: mol_type = other DNA
gtaatcccagcacttcgggaggccaaggcaggcagatcacgaggtcaggatttcaagaccatcctggccacatggtgaaa

SEQ ID NO: 96112 - DNA, 80 bp, synthetic construct
  source 1..80: mol_type = other DNA
ggcgagactccatctcaaaaaaaaacccaaaaaacaacaacaaaaaaaactgtacacagatagatgcgctccttaactta

SEQ ID NO: 96113 - DNA, 80 bp, synthetic construct
  source 1..80: mol_type = other DNA
agatcaaaaccatcctggctaacaaggtgaaaccccgtctctactaaaaatacaaaaaaaaattaaccaggcgtggtggc

SEQ ID NO: 96114 - DNA, 80 bp, synthetic construct; identical to SEQ ID NO: 18033
  source 1..80: mol_type = other DNA

SEQ ID NO: 96115 - DNA, 80 bp, synthetic construct
  source 1..80: mol_type = other DNA
tatatttttttgaaacacagtctcgctctgtcacccaggctggagtgcagtggcataatctcggcttactgcaagctcca

SEQ ID NO: 96116 - DNA, 80 bp, synthetic construct
  source 1..80: mol_type = other DNA
cctcggcctcccaaagtgctgggattacaggcatgagccactgcgcccggacagaaaagtcttcagttgaaacatctgaa

SEQ ID NO: 96117 - DNA, 80 bp, synthetic construct
  source 1..80: mol_type = other DNA
tttaaatacctttgctgggtcacaaggccgccggttgataaagaaaaactgtctgtctgttgaactccttccaactccat

SEQ ID NO: 96118 - DNA, 80 bp, synthetic construct; identical to SEQ ID NO: 18034
  source 1..80: mol_type = other DNA

SEQ ID NO: 96119 - DNA, 80 bp, synthetic construct
  source 1..80: mol_type = other DNA
cacttgtgctcagaattttgcccacattccctcccctttcaaaacctcccgggtaggacgcttatatctcatgtcttggt

SEQ ID NO: 96120 - DNA, 80 bp, synthetic construct
  source 1..80: mol_type = other DNA
gctccatgtttaccatttcaggcataagccaaaagcaagtggaggaagagtaagaaatatagatctcaaggcaacaaaca

SEQ ID NO: 96121 - DNA, 80 bp, synthetic construct
  source 1..80: mol_type = other DNA
atcagccgggcatggtggtgaacacctgtagtcccagcttctcggaaggctgaggcaggagtatcgcttgaacctgggag

SEQ ID NO: 96122 - DNA, 80 bp, synthetic construct; identical to SEQ ID NO: 18035
  source 1..80: mol_type = other DNA

SEQ ID NO: 96123 - DNA, 80 bp, synthetic construct
  source 1..80: mol_type = other DNA
ccacctgaaatataccacttactcaaaacatggtttgaattaagcaactgactcctttgtataaatcatctttcttagcc

SEQ ID NO: 96124 - DNA, 80 bp, synthetic construct
  source 1..80: mol_type = other DNA
tctctactaaaaatacaaaattagccgggtgtggtggcacgtgcctgtaatcccagctactcaggaggctgaggcaggag

SEQ ID NO: 96125 - DNA, 80 bp, synthetic construct
  source 1..80: mol_type = other DNA
aaaatgttcaattgtagttctcttgccagcaatctacttactaaaaaagattatgcagagcatcggaacagctcaaaccg

SEQ ID NO: 96126 - DNA, 80 bp, synthetic construct; identical to SEQ ID NO: 18036
  source 1..80: mol_type = other DNA

SEQ ID NO: 96127 - DNA, 80 bp, synthetic construct
  source 1..80: mol_type = other DNA
actacaggtgcacaccaccacacctggctaattttttaatttttttgtagagatgggatcttgccgtgttatccaagctg

SEQ ID NO: 96128 - DNA, 80 bp, synthetic construct; identical to SEQ ID NO: 18037
  source 1..80: mol_type = other DNA

SEQ ID NO: 96129 - DNA, 80 bp, synthetic construct
  source 1..80: mol_type = other DNA
ttgatcaggctggtctcaaactcctgacctcgtgatccgcccacctcagcctcccaaagtgctgggattacagacgtgag

SEQ ID NO: 96130 - DNA, 80 bp, synthetic construct
  source 1..80: mol_type = other DNA
tctactaaaaatacaaaaaattagctgggcctggtggcatgtgcctgtaatcccagctactcaggaggctaaggtaggag

SEQ ID NO: 96131 - DNA, 80 bp, synthetic construct
  source 1..80: mol_type = other DNA
gtggatcacgaggtcaggaattcgagaccagcctggccaacacggtgaaaccccgtctctactaaagatacaaaaaatta

SEQ ID NO: 96132 - DNA, 80 bp, synthetic construct; identical to SEQ ID NO: 18038
  source 1..80: mol_type = other DNA

SEQ ID NO: 96133 - DNA, 80 bp, synthetic construct
  source 1..80: mol_type = other DNA
gtgcaacttacacggatgcctgctgaaatgatacagtatgcatgtaagacctggaccattttggcatactcctgtttaaa

SEQ ID NO: 96134 - DNA, 80 bp, synthetic construct
  source 1..80: mol_type = other DNA
gaacgcagagcttttggctcctggtcacagtcctctcacttcccaatgtgccatgcatcctggtaaaacaactaaaaagt

SEQ ID NO: 96135 - DNA, 80 bp, synthetic construct
  source 1..80: mol_type = other DNA
actgaggaggctgaggtgggaggatcgcttgagcctaggagttcaaggctgcagtgagccatgattgcaccactgcactc

SEQ ID NO: 96136 - DNA, 80 bp, synthetic construct
  source 1..80: mol_type = other DNA
gttcactgaaacaatctctatgaacaaacagaaacaacctaagcaagcatcattgaggagttgattaattatggtatagc

SEQ ID NO: 96137 - DNA, 80 bp, synthetic construct; identical to SEQ ID NO: 18039
  source 1..80: mol_type = other DNA

SEQ ID NO: 96138 - DNA, 80 bp, synthetic construct
  source 1..80: mol_type = other DNA
ctttcaaccacatacaattctgtattacttgcatgttgtacattctatattacttgctttcattatattaacttatgaat

SEQ ID NO: 96139 - DNA, 80 bp, synthetic construct
  source 1..80: mol_type = other DNA
agtaagttttctctactttagaaaatttaaatttgtgaaaaaatgtaataaagttaaaattagcagccaagtgcagtggc

SEQ ID NO: 96140 - DNA, 80 bp, synthetic construct
  source 1..80: mol_type = other DNA
gctgggcgtggtggcgcacacctataatcccagctactcgagaggctgaggcaggagaatcacttgaacccaggaggtgg

SEQ ID NO: 96141 - DNA, 80 bp, synthetic construct; identical to SEQ ID NO: 18040
  source 1..80: mol_type = other DNA

SEQ ID NO: 96142 - DNA, 80 bp, synthetic construct
  source 1..80: mol_type = other DNA
cgactatataacatttagctattttcatttgcattcaaattcataagggttctaatagctcatttctcagaaaaccaaga

SEQ ID NO: 96143 - DNA, 80 bp, synthetic construct
  source 1..80: mol_type = other DNA
catgcccagctaatttttgtatttttagtagagatggggtttcaccagtttggccaggatggctttgatctcttgacctc

SEQ ID NO: 96144 - DNA, 80 bp, synthetic construct
  source 1..80: mol_type = other DNA
cctgaggtcaggaattcgagaccagcctggccagcctggacaacatggtgaaaccccgtctctactaaaaatacaaaaat

SEQ ID NO: 96145 - DNA, 80 bp, synthetic construct
  source 1..80: mol_type = other DNA
aaataaaaaataaaaaatatatatatatgtatatatatttttccagacaggatcttattctgtctcccagtcttaagtgc

SEQ ID NO: 96146 - DNA, 80 bp, synthetic construct; identical to SEQ ID NO: 18041
  source 1..80: mol_type = other DNA

SEQ ID NO: 96147 - DNA, 80 bp, synthetic construct
  source 1..80: mol_type = other DNA
gcacaggtagtgtggaaaataactgctgcacgctgactgtggtccctctggggcgggggtagggggttttctggataatt

SEQ ID NO: 96148 - DNA, 80 bp, synthetic construct
  source 1..80: mol_type = other DNA
aaaattttcttaaaaagctgacgatccctctgagataatcaagatctaaatggttgaggagtcatcataaaatctaaggt

SEQ ID NO: 96149 - DNA, 80 bp, synthetic construct
  source 1..80: mol_type = other DNA
acaaacacagatttgttttgttattactcttcgaacaaattttttttaaagaatctaacaaatattataattaaaatgta

SEQ ID NO: 96150 - DNA, 80 bp, synthetic construct
  source 1..80: mol_type = other DNA
atgcctatagtaccagctcctcaggaggctcaggcacgagaatcacttgaacctggaaggcagagattgcagtgagccga

SEQ ID NO: 96151 - DNA, 80 bp, synthetic construct; identical to SEQ ID NO: 18042
  source 1..80: mol_type = other DNA

SEQ ID NO: 96152 - DNA, 80 bp, synthetic construct
  source 1..80: mol_type = other DNA
ggtttctctaaggggtcaagtgagtggataaaaatattgtatcacctcagtgcacaaagtgagctcagagcttccccccg

SEQ ID NO: 96153 - DNA, 80 bp, synthetic construct
  source 1..80: mol_type = other DNA
ttttgcatttcccaagacagtgttactcaaaattctgagacatgtgacccaattattttataataggattagaaaaagtc

SEQ ID NO: 96154 - DNA, 80 bp, synthetic construct
  source 1..80: mol_type = other DNA
attatttataacatatgcaaatttaagagtcataactatacctttagttaaacatactagtgtcattttgtatatttcat

SEQ ID NO: 96155 - DNA, 80 bp, synthetic construct; identical to SEQ ID NO: 18043
  source 1..80: mol_type = other DNA

SEQ ID NO: 96156 - DNA, 80 bp, synthetic construct
  source 1..80: mol_type = other DNA
ctcaggaagctgaggcaggagaatcacttgaacccaggaggtggaggttgcagtgagccgagatcgtgccattgcactat

SEQ ID NO: 96157 - DNA, 80 bp, synthetic construct
  source 1..80: mol_type = other DNA
aagttctatctcataaagttattctgcagattaataattctttggttttttttattttattattcttttcttttcttttg

SEQ ID NO: 96158 - DNA, 80 bp, synthetic construct
  source 1..80: mol_type = other DNA
agtagagacagggtttcatcatgttggttaggctggtctagaactcctgacctcaaatgatcagcccccctcagcctccc

SEQ ID NO: 96159 - DNA, 80 bp, synthetic construct
  source 1..80: mol_type = other DNA
gtcccaagtagctgggattacaggcttctgccaccaggtccagctaatttttgtatttttagtagagacagagtttcacc

SEQ ID NO: 96160 - DNA, 80 bp, synthetic construct; identical to SEQ ID NO: 18044
  source 1..80: mol_type = other DNA

SEQ ID NO: 96161 - DNA, 80 bp, synthetic construct
  source 1..80: mol_type = other DNA
gatagtcttatttcaataacaaatgtttcttaactacaacaacattcacagatcatttcttgtggcttaaaactctccca

SEQ ID NO: 96162 - DNA, 80 bp, synthetic construct
  source 1..80: mol_type = other DNA
ttacaagaaacaaatcaagtattcagctatatattttcatcctgattttaactgtgggaaatgactcaacactgtaaata

SEQ ID NO: 96163 - DNA, 80 bp, synthetic construct; identical to SEQ ID NO: 18045
  source 1..80: mol_type = other DNA

SEQ ID NO: 96164 - DNA, 80 bp, synthetic construct
  source 1..80: mol_type = other DNA
cacctgtaatcctagctactcaggaggctgaggcaggagaatcgcttaaatccaggaggcggaggttgcagtgagctgag

SEQ ID NO: 96165 - DNA, 80 bp, synthetic construct
  source 1..80: mol_type = other DNA
tatacacagttgcctttgataccccactccaaactgaagctgccagctgctgtcttagcaaagaccctcaaagctcttgc

SEQ ID NO: 96166 - DNA, 80 bp, synthetic construct
  source 1..80: mol_type = other DNA
gcttaaaaatttactagtgccccacttcctactatatgaaagttaaaatttagtcatcattggggccaaaactaccttct

SEQ ID NO: 96167 - DNA, 80 bp, synthetic construct
  source 1..80: mol_type = other DNA
tcccaggttcaagcgattctcctatctcagcctcccaagtagctgggattacaggcgcccaccatcacacccagctaatt

SEQ ID NO: 96168 - DNA, 80 bp, synthetic construct; identical to SEQ ID NO: 18046
  source 1..80: mol_type = other DNA

SEQ ID NO: 96169 - DNA, 80 bp, synthetic construct
  source 1..80: mol_type = other DNA
aaacccttctgaaataaacaaacctctttactcttcattccaccttgctaagaatctcacctaagtctgtctaccatgtg

SEQ ID NO: 96170 - DNA, 80 bp, synthetic construct
  source 1..80: mol_type = other DNA
tctcagctcactgcaacctccgcctcctgggttccagcgattctcctgcctcagcctccaaagtagctaggattacaggc

SEQ ID NO: 96171 - DNA, 80 bp, synthetic construct
  source 1..80: mol_type = other DNA
atatttattttgaggagggagcgcatttagacacagaccccaaatttatttaaatgtctcaatacatttaaatgtagtta

SEQ ID NO: 96172 - DNA, 80 bp, synthetic construct; identical to SEQ ID NO: 18047
  source 1..80: mol_type = other DNA

SEQ ID NO: 96173 - DNA, 80 bp, synthetic construct
  source 1..80: mol_type = other DNA
ggtagaaaggaaatgcattcagtctatggggatttcacgctcccgcttcaagtccacggccctgtgatgggatgtgggca

SEQ ID NO: 96174 - DNA, 80 bp, synthetic construct
  source 1..80: mol_type = other DNA
gcaacactgaggtcgccactccggggcctccagggggctgcctcgccacgcgcctcggccatgttccccccatttccagg

SEQ ID NO: 96175 - DNA, 80 bp, synthetic construct; identical to SEQ ID NO: 18048
  source 1..80: mol_type = other DNA

SEQ ID NO: 96176 - DNA, 80 bp, synthetic construct; identical to SEQ ID NO: 18049
  source 1..80: mol_type = other DNA

SEQ ID NO: 96177 - DNA, 80 bp, synthetic construct
  source 1..80: mol_type = other DNA
gtcataacaaacatcatgattttacatttcaatacacaagaaaaaaaatagacatcttcccggcacttggctcccgcctg

SEQ ID NO: 96178 - DNA, 80 bp, synthetic construct
  source 1..80: mol_type = other DNA
caccaaaagatgtgtaaaaaaattgcatgaaagtaaaaataaataaagctgttgtaaagcagcctcgttgacacggtagc

SEQ ID NO: 96179 - DNA, 80 bp, synthetic construct; identical to SEQ ID NO: 18050
  source 1..80: mol_type = other DNA

SEQ ID NO: 96180 - DNA, 80 bp, synthetic construct
  source 1..80: mol_type = other DNA
tacagcatttaaaatccttcagacaaaggtctgaaaacagtcttttaatgcaagcctgaatcttcaagcacataaaatct

SEQ ID NO: 96181 - DNA, 80 bp, synthetic construct; identical to SEQ ID NO: 18051
  source 1..80: mol_type = other DNA

SEQ ID NO: 96182 - DNA, 80 bp, synthetic construct
  source 1..80: mol_type = other DNA
aatatgtcagatttaacttggaaaacaaaaaaaaagaattccactcttaaaaaattttactaagaaatatgtaggtatgt

SEQ ID NO: 96183 - DNA, 80 bp, synthetic construct
  source 1..80: mol_type = other DNA
acatggtgaaaccctgtctctactaaaaatacaaaaattagctgggcgtagtggcgggcgcctgtaatcccagctacttg

SEQ ID NO: 96184 - DNA, 80 bp, synthetic construct
  source 1..80: mol_type = other DNA
ctgaaggataattgcacctaacaagtatctggctaggacattccacagtggattggcagggagagctactatttttctca

SEQ ID NO: 96185 - DNA, 80 bp, synthetic construct; identical to SEQ ID NO: 18052
  source 1..80: mol_type = other DNA

SEQ ID NO: 96186 - DNA, 80 bp, synthetic construct
  source 1..80: mol_type = other DNA
ctttcagctcttttcatagcaacataggagggagacgggcctgtatcagccggctccttctctactgaagaaattggggc

SEQ ID NO: 96187 - DNA, 80 bp, synthetic construct
  source 1..80: mol_type = other DNA
acacggaatgttttcctcaacaaatcgtgttgtatacactgtatcataaggaattccaacccagctacccccatcttcac

SEQ ID NO: 96188 - DNA, 80 bp, synthetic construct
  source 1..80: mol_type = other DNA
ggtttgagatatcaagaaacagagaggatgaatcgcttgacttgtttactctttttgtaatgcccaaagagacagacaag

SEQ ID NO: 96189 - DNA, 80 bp, synthetic construct
  source 1..80: mol_type = other DNA
gcctgcctggaaatttatatgaatttaatgatggtctggatgagcctggctccctctgttcaatgttgcctgtgagattc

SEQ ID NO: 96190 - DNA, 80 bp, synthetic construct; identical to SEQ ID NO: 18053
  source 1..80: mol_type = other DNA

SEQ ID NO: 96191 - DNA, 80 bp, synthetic construct
  source 1..80: mol_type = other DNA
tttctcttggtgttctcatttagcgaataagacatgtttcttgcaggtggtgaagattcctttagggtaggtatttttgg

SEQ ID NO: 96192 - DNA, 80 bp, synthetic construct
  source 1..80: mol_type = other DNA
tttaatattggattctgagagttcaaagggcatgctgtttgctcccacatcgggtccatgtggccctgacaaaggctggg

SEQ ID NO: 96193 - DNA, 80 bp, synthetic construct; identical to SEQ ID NO: 18054
  source 1..80: mol_type = other DNA

SEQ ID NO: 96194 - DNA, 80 bp, synthetic construct
  source 1..80: mol_type = other DNA
ctctcacaaagcacaattgaagaggtcttttcagtggaaaaggttatgatgaacatggcaatggctcccaagtcatttag

SEQ ID NO: 96195 - DNA, 80 bp, synthetic construct
  source 1..80: mol_type = other DNA
tggtttaaatgctgcacttcctgttctacctcccacccttcctagacgccgatggcaaaggtcagaaaccagcattttac

SEQ ID NO: 96196 - DNA, 80 bp, synthetic construct
  source 1..80: mol_type = other DNA
ataatgtcctgtcatgtttttatatgatcaacacatccctccagcctggggaatagcagtgagacatcatctctacaaaa

SEQ ID NO: 96197 - DNA, 80 bp, synthetic construct; identical to SEQ ID NO: 18055
  source 1..80: mol_type = other DNA

SEQ ID NO: 96198 - DNA, 80 bp, synthetic construct
  source 1..80: mol_type = other DNA
agggacacaggcatgagaaggaaagaggggaaagctatctatctcctgtctctaatgatactgatttgtctctaattcaa

SEQ ID NO: 96199 - DNA, 80 bp, synthetic construct
  source 1..80: mol_type = other DNA
atatcagtttctaataactatcaggtacttgtcttattaatacatgggagagaagtccagatgatgacagaaacgaagaa

SEQ ID NO: 96200 - DNA, 80 bp, synthetic construct; identical to SEQ ID NO: 18056
  source 1..80: mol_type = other DNA

SEQ ID NO: 96201 - DNA, 80 bp, synthetic construct
  source 1..80: mol_type = other DNA
ctctactaaaaatacaaaaattagccagaagtgctggtgggcacctgtagtcccagctactcaggaggctgagacaggag

SEQ ID NO: 96202 - DNA, 80 bp, synthetic construct
  source 1..80: mol_type = other DNA
tgggaggctgaggtgggcggatcacaagatcaagtgctcgagaccagcctgaccaacatggtgaaaccccgtctctacca

SEQ ID NO: 96203 - DNA, 80 bp, synthetic construct; identical to SEQ ID NO: 18057
  source 1..80: mol_type = other DNA

SEQ ID NO: 96204 - DNA, 80 bp, synthetic construct
  source 1..80: mol_type = other DNA
taatggcttggtcatctttcccgtggcagtcaacataaatttcttttaaatgtttctctaaaaaagctttcaggttcatc

SEQ ID NO: 96205 - DNA, 80 bp, synthetic construct
  source 1..80: mol_type = other DNA
ttgggaggccgaggcgggcagatcacgaggtcaggagatcgagaccatcctggctgacaaggtgaaaccccgtctctact

SEQ ID NO: 96206 - DNA, 80 bp, synthetic construct; identical to SEQ ID NO: 18058
  source 1..80: mol_type = other DNA

SEQ ID NO: 96207 - DNA, 80 bp, synthetic construct
  source 1..80: mol_type = other DNA
caaatggaatcatcactgatactgtacacccttctcctagctacattaaagctaaaaactgttatttttttggtccttct

SEQ ID NO: 96208 - DNA, 80 bp, synthetic construct
  source 1..80: mol_type = other DNA
gtgcaggaaactgggagttactagattatttgctatttatctaattgaggaaagagagatactggtgggaagagagaaaa

SEQ ID NO: 96209 - DNA, 80 bp, synthetic construct
  source 1..80: mol_type = other DNA
gggtcttgctctgctgtcgagactggagtgcagtggcaccgccacagctcactgaaatatcaagctcttggattcaaggg

SEQ ID NO: 96210 - DNA, 80 bp, synthetic construct; identical to SEQ ID NO: 18059
  source 1..80: mol_type = other DNA

SEQ ID NO: 96211 - DNA, 80 bp, synthetic construct
  source 1..80: mol_type = other DNA
tcttactattctgtccacgatggtctccagtatttccagcttattgcacttcacaacaccttcaaaatactgtgaacggt

SEQ ID NO: 96212 - DNA, 80 bp, synthetic construct
  source 1..80: mol_type = other DNA
atgcttatctgaatttagtacctgcatacatcagacgttctttctggcttacgacatgccattgctactgttattttgtc

SEQ ID NO: 96213 - DNA, 80 bp, synthetic construct
  source 1..80: mol_type = other DNA
gctgacatctgtaaagggtggtgagtgccacagggctagaaatgctgcagcaacggaccttctcaacaagctccctgggg

SEQ ID NO: 96214 - DNA, 80 bp, synthetic construct; identical to SEQ ID NO: 18060
  source 1..80: mol_type = other DNA

SEQ ID NO: 96215 - DNA, 80 bp, synthetic construct
  source 1..80: mol_type = other DNA
ggcctcctacgtggaaacaagaacatttaaaatatatacacatgctgtggcagtgcataaaatatgcatgtattgtaaag

SEQ ID NO: 96216 - DNA, 80 bp, synthetic construct
  source 1..80: mol_type = other DNA
acattacatgaatgtttaaaatgcattctaggtgacagattgaacaaaattaaaatacttacaattacatcaaatttgga

SEQ ID NO: 96217 - DNA, 80 bp, synthetic construct
  source 1..80: mol_type = other DNA
aaatcatattttaatggacatatgaaaataaaccaattaaactttttttacgatcctgcgtgccccttggtgctgaattt

SEQ ID NO: 96218 - DNA, 80 bp, synthetic construct; identical to SEQ ID NO: 18061
  source 1..80: mol_type = other DNA

SEQ ID NO: 96219 - DNA, 80 bp, synthetic construct
  source 1..80: mol_type = other DNA
ctacctggatgcctgaattaacatgagaaaattacaaaggactgtatcttttgtttgaaccagtttgtaggtctatgctt

SEQ ID NO: 96220 - DNA, 80 bp, synthetic construct
  source 1..80: mol_type = other DNA
gttcatgttaaattcctggtcctgctgtcaggattaagtaatatttattaagaacctatacatttccaaacccaaagcat

SEQ ID NO: 96221 - DNA, 80 bp, synthetic construct
  source 1..80: mol_type = other DNA
ttttaaaggaggagggatatggcaggagagaaaagtctaggatcatgtttgagtataacaaaataaggtctacggtttca

SEQ ID NO: 96222 - DNA, 80 bp, synthetic construct; identical to SEQ ID NO: 18062
  source 1..80: mol_type = other DNA

SEQ ID NO: 96223 - DNA, 80 bp, synthetic construct
  source 1..80: mol_type = other DNA
tattctggtagcatgattctaattaccatattggcccaaatatgaggcagtactgggcagaggcaacttcctctcctttt

SEQ ID NO: 96224 - DNA, 80 bp, synthetic construct
  source 1..80: mol_type = other DNA
tttgcaatctaccacttagtatccacatgactgggggcacgtttcccagccaggtgtcctgtgtatgcaaggtatgcaaa

SEQ ID NO: 96225 - DNA, 80 bp, synthetic construct
  source 1..80: mol_type = other DNA
agctgcatccctataaaataggattaataaaaatacctacctgatagggtagcagcgaggatgagattatgtcaagtgct

SEQ ID NO: 96226 - DNA, 80 bp, synthetic construct; identical to SEQ ID NO: 18063
  source 1..80: mol_type = other DNA

SEQ ID NO: 96227 - DNA, 80 bp, synthetic construct
  source 1..80: mol_type = other DNA
tatttatatatgtaaatgattaaaatacaagactgggttgattgacaaggtatttctctccatcactaagccctctgtgc

SEQ ID NO: 96228 - DNA, 80 bp, synthetic construct
  source 1..80: mol_type = other DNA
aaaaacaactcttcaaagtacctcttcagaacgattaagaccttctactggttctatttgactgattacttacaacctca

SEQ ID NO: 96229 - DNA, 80 bp, synthetic construct; identical to SEQ ID NO: 18064
  source 1..80: mol_type = other DNA

SEQ ID NO: 96230 - DNA, 80 bp, synthetic construct
  source 1..80: mol_type = other DNA
tgctctagatattagttcagtttatcttgtacaacagtcctcaattagacttgcagattgccttatttcccctcatatgc

SEQ ID NO: 96231 - DNA, 80 bp, synthetic construct
  source 1..80: mol_type = other DNA
cctcaaaactaacaatttcttctactgagggtaacaggagccaatttacttgaagtacattatttaataagtaaatgcaa

SEQ ID NO: 96232 - DNA, 80 bp, synthetic construct
  source 1..80: mol_type = other DNA
tgtgggagaagtcattaaagttgttaggaggctttcgagaaaaatcagaacactttggactacccctgccttaaagcact

SEQ ID NO: 96233 - DNA, 80 bp, synthetic construct
  source 1..80: mol_type = other DNA
ttgagacagggtcttgctctgttgcctgccgtcatggctcactgcagccttgacctcccgggctcaggtgatcctcccac

SEQ ID NO: 96234 - DNA, 80 bp, synthetic construct; identical to SEQ ID NO: 18065
  source 1..80: mol_type = other DNA

SEQ ID NO: 96235 - DNA, 80 bp, synthetic construct
  source 1..80: mol_type = other DNA
gggccaacatttctgttctacttggtccctctcctgggactgccagtaagaaggttgttatacctttttgttaggacttg

SEQ ID NO: 96236 - DNA, 80 bp, synthetic construct
  source 1..80: mol_type = other DNA
cacatctgaaccgacatctaacacacactgatgtttaaacgctagtgtggagcagaattgccaagggagttgtttaaatg

SEQ ID NO: 96237 - DNA, 80 bp, synthetic construct; identical to SEQ ID NO: 18066
  source 1..80: mol_type = other DNA

SEQ ID NO: 96238 - DNA, 80 bp, synthetic construct
  source 1..80: mol_type = other DNA
aatatgcagttagtaacacatttgctgtttgcagttataacacaaattcaaatacccttcagtttacggttaatagttag

SEQ ID NO: 96239 - DNA, 80 bp, synthetic construct
  source 1..80: mol_type = other DNA
atcaggaaaaacaaagaaatctgataaaagagcaataccagcagaggtcactagaatgctaccaggttcaccttactctc

SEQ ID NO: 96240 - DNA, 80 bp, synthetic construct
  source 1..80: mol_type = other DNA
aaaacctactgcattgtgggcatctttccagcacataaaaactgtttttttctgaagatatcaactgcaattaatttgct

SEQ ID NO: 96241 - DNA, 80 bp, synthetic construct
  source 1..80: mol_type = other DNA
caccctgctaattttttttgtatttttagtagagatggggtttcatgatgttggccaggctggtctcgcactcctgacct

SEQ ID NO: 96242 - DNA, 80 bp, synthetic construct; identical to SEQ ID NO: 18067
  source 1..80: mol_type = other DNA

SEQ ID NO: 96243 - DNA, 80 bp, synthetic construct
  source 1..80: mol_type = other DNA
tcaccatgttggtcaggctggtcttgaactcctgatctcaagtgatccacctgctttggcctcccaaagtgctgggatta

SEQ ID NO: 96244 - DNA, 80 bp, synthetic construct
  source 1..80: mol_type = other DNA
caagaagctggtgttacacaatcactgcacaacagactgtacagatcccatgccaaatttgtttagcttggtttgacaaa

SEQ ID NO: 96245 - DNA, 80 bp, synthetic construct; identical to SEQ ID NO: 18068
  source 1..80: mol_type = other DNA

SEQ ID NO: 96246 - DNA, 80 bp, synthetic construct
  source 1..80: mol_type = other DNA
gaaatggttctatggcagaaaagagtatcatgattttacagggtgaatgtcaatgtgacaatgaagagaatatggtcttc

SEQ ID NO: 96247 - DNA, 80 bp, synthetic construct
  source 1..80: mol_type = other DNA
ttcaagttaggcatgcctctgatgcatttcttaataccaaggcaaatctctgagggcttagacttagtagtgagcggtgg

SEQ ID NO: 96248 - DNA, 80 bp, synthetic construct
  source 1..80: mol_type = other DNA
aattaacagaaataaagagaatgttttatataacattttatggagcagagagaaaaggatctgcaaaatgaaaacatact

SEQ ID NO: 96249 - DNA, 80 bp, synthetic construct; identical to SEQ ID NO: 18069
  source 1..80: mol_type = other DNA

SEQ ID NO: 96250 - DNA, 80 bp, synthetic construct
  source 1..80: mol_type = other DNA
tcaggaggctgaggcaggagaattgcttgaacccaggaagcagaggttgcagtgagccgagatggtaccactgcattcca

SEQ ID NO: 96251 - DNA, 80 bp, synthetic construct
  source 1..80: mol_type = other DNA
acctcccaggcttaagtaatcctctcaactcagcctctgagtaacttggactacagatgtacaccaccatgcctggctaa

SEQ ID NO: 96252 - DNA, 80 bp, synthetic construct
  source 1..80: mol_type = other DNA
tctacagatattaagaaaaactttgggctgcatatttagacataactgcttttttgcaattttgatttcatattctactg

SEQ ID NO: 96253 - DNA, 80 bp, synthetic construct; identical to SEQ ID NO: 18070
  source 1..80: mol_type = other DNA

SEQ ID NO: 96254 - DNA, 80 bp, synthetic construct
  source 1..80: mol_type = other DNA
gcccgctgccacacccagctaatttttgtatttttagtagagacagggtttcactatgttggccaggctggtctccaact

SEQ ID NO: 96255 - DNA, 80 bp, synthetic construct
  source 1..80: mol_type = other DNA
aattgaattaacctacaccttttaagtaccccaaataggactagttaaataagagtatgcaatcctgtccttccccccac

SEQ ID NO: 96256 - DNA, 80 bp, synthetic construct
  source 1..80: mol_type = other DNA
tactagggaccagagagttctgctactaaaatcagccaggagctgtctcttcctaattagcaggaacatgtcaaaacgga

SEQ ID NO: 96257 - DNA, 80 bp, synthetic construct
  source 1..80: mol_type = other DNA
agaattctgctaagccaaggaattccgaaagctgaataaagaatctatttccttttatttttcctgagaattccttcttt

SEQ ID NO: 96258 - DNA, 80 bp, synthetic construct; identical to SEQ ID NO: 18071
  source 1..80: mol_type = other DNA

SEQ ID NO: 96259 - DNA, 80 bp, synthetic construct
  source 1..80: mol_type = other DNA
tattatttaaaactattgatgtgttaattgtgtataccaaactggatatacaaatttagctgaaattaaacctgacagta

SEQ ID NO: 96260 - DNA, 80 bp, synthetic construct
  source 1..80: mol_type = other DNA
ggattgtttcccaagaagcattctaaacacaatggttttaacagttgccatttattgagtgcttttgacgtgctagacac

SEQ ID NO: 96261 - DNA, 80 bp, synthetic construct; identical to SEQ ID NO: 18072
  source 1..80: mol_type = other DNA

SEQ ID NO: 96262 - DNA, 80 bp, synthetic construct
  source 1..80: mol_type = other DNA
ttcattgggctggtaaagacacataagctcttcagagagccaaaaagttgctaaattaaaagaaattcaacaacaacaac

SEQ ID NO: 96263 - DNA, 80 bp, synthetic construct
  source 1..80: mol_type = other DNA
cgatcatggccttgacctcctgggctcaagtgatcctcccacctcagcctcctgagtagctaatttttgcatgtttttgt

SEQ ID NO: 96264 - DNA, 80 bp, synthetic construct
  source 1..80: mol_type = other DNA
attccaaaccggcatctattaaaatactttaggctttctgctttcaaggtttccattttcgattttcctcaggcccacac

SEQ ID NO: 96265 - DNA, 80 bp, synthetic construct
  source 1..80: mol_type = other DNA
aaggtttcactctgttgcccaggctggagtgcagtggcaccatcttggctcacagcaacctctgcttcctgggctcaatt

SEQ ID NO: 96266 - DNA, 80 bp, synthetic construct; identical to SEQ ID NO: 18073
  source 1..80: mol_type = other DNA

SEQ ID NO: 96267 - DNA, 80 bp, synthetic construct
  source 1..80: mol_type = other DNA
tctgaagactcttgtctacatacatactttatgtaattaaaaccatacaaaagaattaaacttcagggtctaatatctcc

SEQ ID NO: 96268 - DNA, 80 bp, synthetic construct
  source 1..80: mol_type = other DNA
tttataccttccagacacaaatgggtcaggcactaacatatcatatctcacttaacactcataacaaatatcttttggga

SEQ ID NO: 96269 - DNA, 80 bp, synthetic construct; identical to SEQ ID NO: 18074
  source 1..80: mol_type = other DNA

SEQ ID NO: 96270 - DNA, 80 bp, synthetic construct
  source 1..80: mol_type = other DNA
tttaggagtgggattcctgaatcaacaatgttccatgtgacattacttctaatcttgaaaactgaaaaaaaaatccacct

SEQ ID NO: 96271 - DNA, 80 bp, synthetic construct
  source 1..80: mol_type = other DNA
taaatggaaacaatgagaaacaagcaaaaaaagattaaactgatacattaagaagctgggatagtaaaatgtttctttaa

SEQ ID NO: 96272 - DNA, 80 bp, synthetic construct
  source 1..80: mol_type = other DNA
cacctgaggccaggaattcgagaccagcctggctaacatggtaaaacctcgtctccactaaaaatacaaaaattagctgg

SEQ ID NO: 96273 - DNA, 80 bp, synthetic construct
  source 1..80: mol_type = other DNA
gaacaaacaaaacaaacaaaatccttgttaacttactaatgaaaacaactgcaggaacctagagcagatgactttaggac

SEQ ID NO: 96274 - DNA, 80 bp, synthetic construct; identical to SEQ ID NO: 18075
  source 1..80: mol_type = other DNA

SEQ ID NO: 96275 - DNA, 80 bp, synthetic construct
  source 1..80: mol_type = other DNA
aaaaaggcaccaaaatacactgcttttgtaactaaatggcatccaggaaaggtgtgcccatttgaatggtttgctatttg

SEQ ID NO: 96276 - DNA, 80 bp, synthetic construct
  source 1..80: mol_type = other DNA
aaacacactgaatatctggtaagtttgcttttctaaactggttggaatagaatgggaatgggggcaccttttatgtttta

SEQ ID NO: 96277 - DNA, 80 bp, synthetic construct; identical to SEQ ID NO: 18076
  source 1..80: mol_type = other DNA

SEQ ID NO: 96278 - DNA, 80 bp, synthetic construct
  source 1..80: mol_type = other DNA
ttcatgaggatcattcatgaaaccctaagtagccatagctattgaaaacctatgccagaaagttctgagtttggcataat

SEQ ID NO: 96279 - DNA, 80 bp, synthetic construct
  source 1..80: mol_type = other DNA
tatgcattgagcatcacattcattctggaatttttctgagggcatttcccacatcatctgcacataggtcaatttcaaca

SEQ ID NO: 96280 - DNA, 80 bp, synthetic construct
  source 1..80: mol_type = other DNA
agacaagatgctaaaaaccaaaggtaaagggaaaatcagctagagggggaaaagacacattggctttcaaaagggtaaca

SEQ ID NO: 96281 - DNA, 80 bp, synthetic construct; identical to SEQ ID NO: 18077
  source 1..80: mol_type = other DNA

SEQ ID NO: 96282 - DNA, 80 bp, synthetic construct
  source 1..80: mol_type = other DNA
gggtgtggtggtgcgcacctgtgatcccagctacttgggaggctgaggcaggagaatcacttgaacccaggaggtggagg

SEQ ID NO: 96283 - DNA, 80 bp, synthetic construct
  source 1..80: mol_type = other DNA
cagagatgtaggtgaacataaatcaatactgcataaagccagagtaatgatatcctgtgggattcataacttatatagaa

SEQ ID NO: 96284 - DNA, 80 bp, synthetic construct
  source 1..80: mol_type = other DNA
gctatgtaatctgtaagacagcctctgaaagatcaacaaaagaatgtataactaagttcacatgttctcatccatttgtg

SEQ ID NO: 96285 - DNA, 80 bp, synthetic construct
  source 1..80: mol_type = other DNA
ttgatggcacagcagggtgactacagtcaacaataatttattgtacatttaaaaataaccaataattgggatgtatgtaa

SEQ ID NO: 96286 - DNA, 80 bp, synthetic construct; identical to SEQ ID NO: 18078
  source 1..80: mol_type = other DNA

SEQ ID NO: 96287 - DNA, 80 bp, synthetic construct
  source 1..80: mol_type = other DNA
tcaatacagaaagtaaacgaaccttgtctatgacctaagtcctaggatcctatcaaggactgcctttctctaataagggc

SEQ ID NO: 96288 - DNA, 80 bp, synthetic construct
  source 1..80: mol_type = other DNA
tagaagcttctggcagagactattgtatccagcttcaagacataaatgactgagcacagtggacatctacacacaaaaat

SEQ ID NO: 96289 - DNA, 80 bp, synthetic construct
  source 1..80: mol_type = other DNA
gagcctcatcacacctcaggcttaaaagaatgataccaacaaaagcaggggtttaagtttaacactcaaatatgatgatt

SEQ ID NO: 96290 - DNA, 80 bp, synthetic construct; identical to SEQ ID NO: 18079
  source 1..80: mol_type = other DNA

SEQ ID NO: 96291 - DNA, 80 bp, synthetic construct
  source 1..80: mol_type = other DNA
cagtggcaggaacatggctcactgcagtctcaacctcctgggttcaagtgattctcccacctcagcctcctgagtagctg

SEQ ID NO: 96292 - DNA, 80 bp, synthetic construct
  source 1..80: mol_type = other DNA
ccccagcccaatggcaaggtttatagagagaaaagccccagtgaagcagcagttcaatggcaaagagaacgttaagaatt

SEQ ID NO: 96293 - DNA, 80 bp, synthetic construct; identical to SEQ ID NO: 18080
  source 1..80: mol_type = other DNA

SEQ ID NO: 96294 - DNA, 80 bp, synthetic construct
  source 1..80: mol_type = other DNA
aagatgttcagtatggtgctcagcactaacagccaagaagaacaaatgcttaaaatttccagtctatactgaccaaacca

SEQ ID NO: 96295 - DNA, 80 bp, synthetic construct
  source 1..80: mol_type = other DNA
gatccttatgcctcagcctcctgagtagctgggatcacaggcatatgccaccatgctcagctaatttttaaatctttttg

SEQ ID NO: 96296 - DNA, 80 bp, synthetic construct
  source 1..80: mol_type = other DNA
aattccatccttcagagatctcatataatattccaaacggacatgatactcgtacaatgcattaaagagcagtgtcctgg

SEQ ID NO: 96297 - DNA, 80 bp, synthetic construct; identical to SEQ ID NO: 18081
  source 1..80: mol_type = other DNA

SEQ ID NO: 96298 - DNA, 80 bp, synthetic construct
  source 1..80: mol_type = other DNA
tgataattagataagaaaagatgggaaataaaatgttcataggtaagtttttagaatagtgagcaggcccgagctgctct

SEQ ID NO: 96299 - DNA, 80 bp, synthetic construct
  source 1..80: mol_type = other DNA
actgtgaagcttttaaaattaacgctgatatctactgcgtcaagaagggtccagcttctgaaatacggtcgtcgagactc

SEQ ID NO: 96300 - DNA, 80 bp, synthetic construct
  source 1..80: mol_type = other DNA
ttgccatggaaggactgttttctggaggaaatgcactgctccagaaataaaacagacataggaacatggggcctccaatg

SEQ ID NO: 96301 - DNA, 80 bp, synthetic construct; identical to SEQ ID NO: 18082
  source 1..80: mol_type = other DNA

SEQ ID NO: 96302 - DNA, 80 bp, synthetic construct
  source 1..80: mol_type = other DNA
gagctgctcactgaagttccggagaaaagcaagcactgggaagaaaatgattgaggaaagaatgcaaggaaggctaggca

SEQ ID NO: 96303 - DNA, 80 bp, synthetic construct
  source 1..80: mol_type = other DNA
ggaggatcgcttgagcccaggaactgggggctgcagtgggctgtgactgcactaccatactccagcctgggtaacacagt

SEQ ID NO: 96304 - DNA, 80 bp, synthetic construct
  source 1..80: mol_type = other DNA
accaggtagaaagcgagagccacaaaagcttcagaggggaaaaataaaatcatatataaaggctggggattttaaaaaag

SEQ ID NO: 96305 - DNA, 80 bp, synthetic construct
  source 1..80: mol_type = other DNA
acgcatcttttcttgggaggttttatggactcagtgtgtttggttcaacggctcaacaggttgtttctgtggaatatgac

SEQ ID NO: 96306 - DNA, 80 bp, synthetic construct; identical to SEQ ID NO: 18083
  source 1..80: mol_type = other DNA

SEQ ID NO: 96307 - DNA, 80 bp, synthetic construct
  source 1..80: mol_type = other DNA
tcaagtcatctgtaaattagatgatgccatcaatgaaatcaatattcaagtcattgttccaaagctgaagagcgtggggc

SEQ ID NO: 96308 - DNA, 80 bp, synthetic construct
  source 1..80: mol_type = other DNA
agagcccactgatgctgatgccagtgggatcttcctaggactgcatgtagctgctagcttctatcctcccctggcggagg

SEQ ID NO: 96309 - DNA, 80 bp, synthetic construct; identical to SEQ ID NO: 18084
  source 1..80: mol_type = other DNA

SEQ ID NO: 96310 - DNA, 80 bp, synthetic construct
  source 1..80: mol_type = other DNA
cattcattcataaatctcagctgggattgatactacattccccagcctctgctttttgagaaatctatctgctctttcct

SEQ ID NO: 96311 - DNA, 80 bp, synthetic construct
  source 1..80: mol_type = other DNA
atgagatgtggttcatgctgacaggtgctctccgcaactattgtgggctttagtttcctcgaatcactattactttacct

SEQ ID NO: 96312 - DNA, 80 bp, synthetic construct
  source 1..80: mol_type = other DNA
tttgtgcctcttaattttaacactaaactaggattgtcctgggcagctccctcctattcaagctttccttttactttact

SEQ ID NO: 96313 - DNA, 80 bp, synthetic construct
  source 1..80: mol_type = other DNA
ctagcttctcgggaggctgaggtgggagaatcgcttcaagtgagccgagattgcgccactgaactccagcctgggcgaca

SEQ ID NO: 96314 - DNA, 80 bp, synthetic construct; identical to SEQ ID NO: 18085
  source 1..80: mol_type = other DNA

SEQ ID NO: 96315 - DNA, 80 bp, synthetic construct
  source 1..80: mol_type = other DNA
atggagagtggtaagtcacacaggcagtaagcaccctggagacggtatgatgaaaagggcactttacctctctctggtct

SEQ ID NO: 96316 - DNA, 80 bp, synthetic construct
  source 1..80: mol_type = other DNA
tgatgacgagacgtgatggggtaacctagatgggatcctccaacagaaaacggcattatgcaaaaactaaggaaatctga

SEQ ID NO: 96317 - DNA, 80 bp, synthetic construct; identical to SEQ ID NO: 18086
  source 1..80: mol_type = other DNA

SEQ ID NO: 96318 - DNA, 80 bp, synthetic construct
  source 1..80: mol_type = other DNA
gtgtgaggattccattatgaagttttatttatttttgggcctctcataattctcgaggtgtcatcttttggaatcactaa

SEQ ID NO: 96319 - DNA, 80 bp, synthetic construct
  source 1..80: mol_type = other DNA
gattttttttttttttaagacagattcttgctctgtcgcccaggctggtgtgcaagtggtgcaatcttggctcactgtaa

SEQ ID NO: 96320 - DNA, 80 bp, synthetic construct
  source 1..80: mol_type = other DNA
cctgcctcggcctcccaaagtgctgggattacaggcgtgagacaccgcacccagcgatctgatggttttataaagaggag

SEQ ID NO: 96321 - DNA, 80 bp, synthetic construct; identical to SEQ ID NO: 18087
  source 1..80: mol_type = other DNA

SEQ ID NO: 96322 - DNA, 80 bp, synthetic construct
  source 1..80: mol_type = other DNA
agggactcaaagccagagcaggaagaagggcttgctcctcccgtcagcggctagcagggctcctgtctgcctgcagctcc

SEQ ID NO: 96323 - DNA, 80 bp, synthetic construct
  source 1..80: mol_type = other DNA
gaccccctctcctccacgacactgtggagtacaccagactcacacagcatcatggtgaaacatgggtcactgagcctcat

SEQ ID NO: 96324 - DNA, 80 bp, synthetic construct
  source 1..80: mol_type = other DNA
aacatttgcttatgttctttttctgttcaaataactggtgtggcttctgtctcctgactgaaccttgactgatcaagaaa

SEQ ID NO: 96325 - DNA, 80 bp, synthetic construct
  source 1..80: mol_type = other DNA
gggtgcctgtaatcccagctactcaggtgggtgaggcacaagaattgcttgaacctgggaggcagaggttgcagtgagcc

SEQ ID NO: 96326 - DNA, 80 bp, synthetic construct; identical to SEQ ID NO: 18088
  source 1..80: mol_type = other DNA

SEQ ID NO: 96327 - DNA, 80 bp, synthetic construct
  source 1..80: mol_type = other DNA
aacaagcctctatggcagtccccagagagtctatttcttgtagctacagggctgtttccaaaatcaaacacaaagcataa

SEQ ID NO: 96328 - DNA, 80 bp, synthetic construct
  source 1..80: mol_type = other DNA
gcctcccatggcagtgggaacagctggctccccagtgtctgagaatcacctttctttactcgaaagcccagtgacaggct

SEQ ID NO: 96329 - DNA, 80 bp, synthetic construct; identical to SEQ ID NO: 18089
  source 1..80: mol_type = other DNA

SEQ ID NO: 96330 - DNA, 80 bp, synthetic construct
  source 1..80: mol_type = other DNA
gaggaatccacaggcttcgggagacaggggcattggcacggatttgtcatgtgccacctgcacattccatacccagagga

SEQ ID NO: 96331 - DNA, 80 bp, synthetic construct
  source 1..80: mol_type = other DNA
ctggacacatactccttttctctataccaatctacaaggacccctagacggagtctgctttacctggcaacaggatactt

SEQ ID NO: 96332 - DNA, 80 bp, synthetic construct
  source 1..80: mol_type = other DNA
gctggactagacaggcaggaagtagcagagctctaggtgcctctgtgagatatgtgccgggcagagcatgagggacagac

SEQ ID NO: 96333 - DNA, 80 bp, synthetic construct; identical to SEQ ID NO: 18090
  source 1..80: mol_type = other DNA

SEQ ID NO: 96334 - DNA, 80 bp, synthetic construct
  source 1..80: mol_type = other DNA
accatgccttctcctgcagataatgactctcccgctgggaaacagttcctggccgactgcaccaggcccttatagagacc

SEQ ID NO: 96335 - DNA, 80 bp, synthetic construct
  source 1..80: mol_type = other DNA
gcatgggtacatgatgcagctgctctgacaccggtgcctcccctacctcgatccacacccagactcgggggagctcctta

SEQ ID NO: 96336 - DNA, 80 bp, synthetic construct
  source 1..80: mol_type = other DNA
tcaggactgagatggccaggacatatctacatggatccccagggtgattccagtattaaaccgaggggaatctcatggaa

SEQ ID NO: 96337 - DNA, 80 bp, synthetic construct; identical to SEQ ID NO: 18091
  source 1..80: mol_type = other DNA

SEQ ID NO: 96338 - DNA, 80 bp, synthetic construct
  source 1..80: mol_type = other DNA
ttactgcagcctgtgtctagaaaatactcaaatcaccccttttcaaatacatctttttaccttgacttaaccaatgccaa

SEQ ID NO: 96339 - DNA, 80 bp, synthetic construct
  source 1..80: mol_type = other DNA
atttttcatgtattactcacttgactttctctagggtttagccaaaatgagtaatacatggaaagctgggtaaaagtcaa

SEQ ID NO: 96340 - DNA, 80 bp, synthetic construct
  source 1..80: mol_type = other DNA
actacaggtgacttctaccacactcggctaattttaatttttgtattcttaacagagacggggtttcaccatgttggcca

SEQ ID NO: 96341 - DNA, 80 bp, synthetic construct; identical to SEQ ID NO: 18092
  source 1..80: mol_type = other DNA

SEQ ID NO: 96342 - DNA, 80 bp, synthetic construct
  source 1..80: mol_type = other DNA
tcttagggttttaaaagtgactctgaaggttacctggtccaaagtgaactcagcaaagaacataaagccaatttgcaaaa

SEQ ID NO: 96343 - DNA, 80 bp, synthetic construct
  source 1..80: mol_type = other DNA
gtggggcatgggaacagaagcaggccacacctgggggtccctggggaggtctaaagggcctggtggagcaggaagagcct

SEQ ID NO: 96344 - DNA, 80 bp, synthetic construct
  source 1..80: mol_type = other DNA
ctgggagtgcatccttcataaacccatgaattcttggtttagcatttacttctgaggaactcgactgaggacaatcctac

SEQ ID NO: 96345 - DNA, 80 bp, synthetic construct
  source 1..80: mol_type = other DNA
tgcaatacgcataattttaataccaaaatgttaagattcaaattttctgggaaaagagatcggtaaggttcttctttcaa

SEQ ID NO: 96346 - DNA, 80 bp, synthetic construct; identical to SEQ ID NO: 18093
  source 1..80: mol_type = other DNA

SEQ ID NO: 96347 - DNA, 80 bp, synthetic construct
  source 1..80: mol_type = other DNA
aattttgtatttttagtacagatggtgtttcatcacgttggccaggctggtctccaactcccaacctcaggtaatctgcc

SEQ ID NO: 96348 - DNA, 80 bp, synthetic construct
  source 1..80: mol_type = other DNA
ttcagataaaacctcagcacagtgcccgatagtgcaaaggactcaataaacgtttgctggcattgctggttttaaattac

SEQ ID NO: 96349 - DNA, 80 bp, synthetic construct; identical to SEQ ID NO: 18094
  source 1..80: mol_type = other DNA

SEQ ID NO: 96350 - DNA, 80 bp, synthetic construct
  source 1..80: mol_type = other DNA
ttgaaaaggaaaaagcaaaactgtctttatgtgcacactgtatgattttctacataggaaataccaaagaatctagaaaa

SEQ ID NO: 96351 - DNA, 80 bp, synthetic construct
  source 1..80: mol_type = other DNA
ctctgggaggctgaggtggaagggtcacttgagcccaggagttcgagaccagcctgggtggcatagcaagacccagtttc

SEQ ID NO: 96352 - DNA, 80 bp, synthetic construct
  source 1..80: mol_type = other DNA
gaaacaaggaagttaaattgtccctgtttgcagatgacataatcttatatatggaaaaccctaatgactccatcaagaaa

SEQ ID NO: 96353 - DNA, 80 bp, synthetic construct; identical to SEQ ID NO: 18095
  source 1..80: mol_type = other DNA

SEQ ID NO: 96354 - DNA, 80 bp, synthetic construct
  source 1..80: mol_type = other DNA
gaggctgaggcacgagaattgcttgaacctgggaggcggaggttgtagtgggctgagattgcggcactgcactccagctt

SEQ ID NO: 96355 - DNA, 80 bp, synthetic construct
  source 1..80: mol_type = other DNA
atgcctatcaaaataccaattcttcgcaggacaagaaaaaaaaaatcctaacatttgtatagaaccacaaaggaccccaa

SEQ ID NO: 96356 - DNA, 80 bp, synthetic construct
  source 1..80: mol_type = other DNA
cattacagccaaatgatttttgacaaaggttccaagaatacacaccgggcaaagggtggtctcttccataaatggtgctg

SEQ ID NO: 96357 - DNA, 80 bp, synthetic construct; identical to SEQ ID NO: 18096
  source 1..80: mol_type = other DNA

SEQ ID NO: 96358 - DNA, 80 bp, synthetic construct
  source 1..80: mol_type = other DNA
caaacaactcaacagcaggaaaaaaaccccaaataatctgattaaaaaatgggcaaaagaactgaatacacatttctcaa

SEQ ID NO: 96359 - DNA, 80 bp, synthetic construct
  source 1..80: mol_type = other DNA
atgtggacaaaagggagcccccccccccgctcttttattgaactattggtgggaatgaaatataaattagtagagccatt

SEQ ID NO: 96360 - DNA, 80 bp, synthetic construct
  source 1..80: mol_type = other DNA
cactgccatgttgagtgcagcactattcacaacagccaagacatggaatccacctaagtgtcgccaaaagatgaatggat

SEQ ID NO: 96361 - DNA, 80 bp, synthetic construct; identical to SEQ ID NO: 18097
  source 1..80: mol_type = other DNA

SEQ ID NO: 96362 - DNA, 80 bp, synthetic construct
  source 1..80: mol_type = other DNA
gaatgttcctgccataaagaaatgatacgtgttttaggtgacagatatactaattatcctgattttatcagtacacaata

SEQ ID NO: 96363 - DNA, 80 bp, synthetic construct
  source 1..80: mol_type = other DNA
gaaatttaaaaaaattttaaaggtactatttacataaatgctgtatggaaatacggacttacacagggaacagagagcac

SEQ ID NO: 96364 - DNA, 80 bp, synthetic construct
  source 1..80: mol_type = other DNA
tcactgcaacctctgcctccaaggttcaagagattctcctgcctcagcctcccgagtagctgggattacaggtgcacacc

SEQ ID NO: 96365 - DNA, 80 bp, synthetic construct
  source 1..80: mol_type = other DNA
tttaaacaaaaataatgacaatgtattgtggggttgatagcacactgataaggaaaaggcaacaccgtccaaccaatcat

SEQ ID NO: 96366 - DNA, 80 bp, synthetic construct; identical to SEQ ID NO: 18098
  source 1..80: mol_type = other DNA

SEQ ID NO: 96367 - DNA, 80 bp, synthetic construct
  source 1..80: mol_type = other DNA
atccctcgtgggcacagttcaccatcgggtttggactcctatgagacactaaagctgtccctaatctgagaggatgcaca

SEQ ID NO: 96368 - DNA, 80 bp, synthetic construct
  source 1..80: mol_type = other DNA
attaaacactcctgctccgtattttctccaaccccctatttttttccagtcctccatcagtgctctgctgtctcttccat

SEQ ID NO: 96369 - DNA, 80 bp, synthetic construct; identical to SEQ ID NO: 18099
  source 1..80: mol_type = other DNA

SEQ ID NO: 96370 - DNA, 80 bp, synthetic construct
  source 1..80: mol_type = other DNA
ctggactacttgggaaatatctgagaagaaaaacatgtagtgtataagctaattagcaaaacaagtgttaaacaagtgat

SEQ ID NO: 96371 - DNA, 80 bp, synthetic construct
  source 1..80: mol_type = other DNA
atgcagagttttgtcactgcaactgcctcctggatatttctctctcaaatgtctccctcctgatgtggaataaattccag

SEQ ID NO: 96372 - DNA, 80 bp, synthetic construct
  source 1..80: mol_type = other DNA
tcctccttgacttttccttgttcaatttcaatccaacctcaacggacatcttttcccacaaaagaagtgaacgtctgagt

SEQ ID NO: 96373 - DNA, 80 bp, synthetic construct
  source 1..80: mol_type = other DNA
gggatttgaagctctgtcccaggctccagtagctccttattaaactcacttccctcactcaacggtgcgctcatctgagc

SEQ ID NO: 96374 - DNA, 80 bp, synthetic construct; identical to SEQ ID NO: 18100
  source 1..80: mol_type = other DNA

SEQ ID NO: 96375 - DNA, 80 bp, synthetic construct
  source 1..80: mol_type = other DNA
atattgtctagtgtgcattcctcccaaagctgatcctgagaccatggaaagttaggggaggaaaaattcaaaagaaaggg

SEQ ID NO: 96376 - DNA, 80 bp, synthetic construct
  source 1..80: mol_type = other DNA
acaagcccagttgccaaagaatgtcctggggcagagatgttgaaatatgagaacttggatgagacaggattctggtgagg

SEQ ID NO: 96377 - DNA, 80 bp, synthetic construct
  source 1..80: mol_type = other DNA
agcagcggctgtcagggagggaacggatggacagatgaagtttcagttggtgtgctcccatgtttctcaaaacactgata

SEQ ID NO: 96378 - DNA, 80 bp, synthetic construct; identical to SEQ ID NO: 18101
  source 1..80: mol_type = other DNA

SEQ ID NO: 96379 - DNA, 80 bp, synthetic construct
  source 1..80: mol_type = other DNA
atgttagtattactatatgaatatgtgaaataattgaaaataatatagggcaggaatgttcaaacttacagaatttttga

SEQ ID NO: 96380 - DNA, 80 bp, synthetic construct
  source 1..80: mol_type = other DNA
ttgcaaagctggaacagttcctatatactccatatcaggttcccccaagtttatcatcttacgttattgatatggtttgg

SEQ ID NO: 96381 - DNA, 80 bp, synthetic construct
  source 1..80: mol_type = other DNA
aggcagttttctctgccctcgctctctctgttgcctgctaccacgaaagacgtgcctcttcccgttcagccatgattgta

SEQ ID NO: 96382 - DNA, 80 bp, synthetic construct; identical to SEQ ID NO: 18102
  source 1..80: mol_type = other DNA

SEQ ID NO: 96383 - DNA, 80 bp, synthetic construct
  source 1..80: mol_type = other DNA
cgctccgtcctcaccgcacacggagggacacgctccgtcctcaccgcacacggagggacacgctccgtcctcaccgcaca

SEQ ID NO: 96384 - DNA, 80 bp, synthetic construct
  source 1..80: mol_type = other DNA
cgctccgtcctcaccgcacacggagggacacgctccgtcctcaccgcacacggaggcacccgctccgtcctcaccgcaca

SEQ ID NO: 96385 - DNA, 80 bp, synthetic construct; identical to SEQ ID NO: 18103
  source 1..80: mol_type = other DNA

SEQ ID NO: 96386 - DNA, 80 bp, synthetic construct
  source 1..80: mol_type = other DNA
ttttaagaaggtcactaggacccctcacttaatggcaaggagttatgccctacctccttgtttaaaataattatgtacag

SEQ ID NO: 96387 - DNA, 80 bp, synthetic construct
  source 1..80: mol_type = other DNA
tggagccctctcctagttaagacagtttccaagcctgccatggcttagactttctggcaggtcctccagcactgccttca

SEQ ID NO: 96388 - DNA, 80 bp, synthetic construct
  source 1..80: mol_type = other DNA
catcatcaacatcttgcattagcatggtgcagcggttatagttaagcagccaagaaaatcataatgaatgtgtctaggta

SEQ ID NO: 96389 - DNA, 80 bp, synthetic construct
  source 1..80: mol_type = other DNA
aaaaattagccaggtgtggtggtgcacacctatggccccagcctactcaggaggctgaggtgggagggtctcttgagcca

SEQ ID NO: 96390 - DNA, 80 bp, synthetic construct
  source 1..80: mol_type = other DNA
caaaagtctccacattattcagatttccttattttttccttaatgccctgtgtctgtctcacgatcccgtccaggattcc

SEQ ID NO: 96391 - DNA, 80 bp, synthetic construct; identical to SEQ ID NO: 18104
  source 1..80: mol_type = other DNA

SEQ ID NO: 96392 - DNA, 80 bp, synthetic construct
  source 1..80: mol_type = other DNA
gggaaaacaagcctggctaatccttgtatttttagtagagacggggtttcaccatgttggccaggctggtctcaaactcc

SEQ ID NO: 96393 - DNA, 80 bp, synthetic construct
  source 1..80: mol_type = other DNA
aaatttataataaaatttctttaaaaaatttttttaaattaaattttatggctgggtgcagtggctcacgcctgtaatcc

SEQ ID NO: 96394 - DNA, 80 bp, synthetic construct
  source 1..80: mol_type = other DNA
aatcccagcactttgggaggccgaggtgggtggatcacaaggtcatgagatcgagaccatcctagccaacatggtgaaac

SEQ ID NO: 96395 - DNA, 80 bp, synthetic construct; identical to SEQ ID NO: 18105
  source 1..80: mol_type = other DNA

SEQ ID NO: 96396 - DNA, 80 bp, synthetic construct
  source 1..80: mol_type = other DNA
ggattacaggcgtgagccacctacaaattataataaaatttctgttgagtgggaataaggacagattattactgatgtaa

SEQ ID NO: 96397 - DNA, 80 bp, synthetic construct
  source 1..80: mol_type = other DNA
gtggcaccatctgtgttagttacattatggtgaagtctcacattgtacttggaggaagaaataaattgaaacagagtgaa

SEQ ID NO: 96398 - DNA, 80 bp, synthetic construct
  source 1..80: mol_type = other DNA
gaggtcaggaattcgagaccagcctgggcaacatggtgaatccccatctctatgaaaaatacaaaaatcagccgggcgtg

SEQ ID NO: 96399 - DNA, 80 bp, synthetic construct; identical to SEQ ID NO: 18106
  source 1..80: mol_type = other DNA

SEQ ID NO: 96400 - DNA, 80 bp, synthetic construct
  source 1..80: mol_type = other DNA
agcataattacagagtatcacactgggacttgagttactgctctacaaaaggaagaaacctgtttgcagactgatgttaa

SEQ ID NO: 96401 - DNA, 80 bp, synthetic construct
  source 1..80: mol_type = other DNA
aacttttacaaatgcaacatctaagtttaaatgcaagcaattataaacactaaattgaaatattggaagtatttctccta

SEQ ID NO: 96402 - DNA, 80 bp, synthetic construct
  source 1..80: mol_type = other DNA
acagatgcctgccattacatctggctaacttttttattctgtatttttttttttgtagtgatggggtctcactatgttga

SEQ ID NO: 96403 - DNA, 80 bp, synthetic construct; identical to SEQ ID NO: 18107
  source 1..80: mol_type = other DNA

SEQ ID NO: 96404 - DNA, 80 bp, synthetic construct
  source 1..80: mol_type = other DNA
aagacaggtccactggaaacatcagaatgagaccttatttgcaataagggtctctgcagatgtaactaaggtgaggatct

SEQ ID NO: 96405 - DNA, 80 bp, synthetic construct
  source 1..80: mol_type = other DNA
ccggcaacagcaggagctgagggcagcgtggggcggattctccctcagcctccagaaggaaccacccctgctgaggactt

SEQ ID NO: 96406 - DNA, 80 bp, synthetic construct
  source 1..80: mol_type = other DNA
ttgagcccctcaggtcggaattaactgctccagttttgacatgcctgttaatgcttcgtgagtcacacacaccttgtact

SEQ ID NO: 96407 - DNA, 80 bp, synthetic construct; identical to SEQ ID NO: 18108
  source 1..80: mol_type = other DNA

SEQ ID NO: 96408 - DNA, 80 bp, synthetic construct
  source 1..80: mol_type = other DNA
gaaataatgcacctatgaaagtgcctcatgtgatttttttctctttctttctttcttttttgttcaagatggggtcgcac

SEQ ID NO: 96409 - DNA, 80 bp, synthetic construct
  source 1..80: mol_type = other DNA
ttttatattgaagctattttctaattctattagacaaaaaaatgcagttgaattgaataagattgcagaagaccttcaaa

SEQ ID NO: 96410 - DNA, 80 bp, synthetic construct
  source 1..80: mol_type = other DNA
gtaagacggtgtaattctttggtcttcttggccttaattctatgaaaatgaacaagacagactatcactaatcatttatt

SEQ ID NO: 96411 - DNA, 80 bp, synthetic construct; identical to SEQ ID NO: 18109
  source 1..80: mol_type = other DNA

SEQ ID NO: 96412 - DNA, 80 bp, synthetic construct
  source 1..80: mol_type = other DNA
aatggttactccaatttcagaaggggttggcctcaactagaaaaggaagcttctaacgtgagaagaaaagaagaccttct

SEQ ID NO: 96413 - DNA, 80 bp, synthetic construct; identical to SEQ ID NO: 18110
  source 1..80: mol_type = other DNA

SEQ ID NO: 96414 - DNA, 80 bp, synthetic construct
  source 1..80: mol_type = other DNA
ctgtagtcccagctacttgggagactgagacgggagaatggcgtcaacctgggaggcggagcttgcagcaagccgagatt

SEQ ID NO: 96415 - DNA, 80 bp, synthetic construct
  source 1..80: mol_type = other DNA
ctgaccaacatggtgaaaccctgtgtcaactgaaaatacaaaaattagctgggcgtggtggtgcgcacctgtagtctcag

SEQ ID NO: 96416 - DNA, 80 bp, synthetic construct
  source 1..80: mol_type = other DNA
aatattttttcttttctttttttttttttttttttgagatggagtcttgctctgtcacccaggctgcagtgcagtggtgc

SEQ ID NO: 96417 - DNA, 80 bp, synthetic construct; identical to SEQ ID NO: 18111
  source 1..80: mol_type = other DNA

SEQ ID NO: 96418 - DNA, 80 bp, synthetic construct
  source 1..80: mol_type = other DNA
gtattctatacccattatgcgaagattttgtccacagaaccaccttcgtttactaagcaatgcttgctgcggtttcaaag

SEQ ID NO: 96419 - DNA, 80 bp, synthetic construct
  source 1..80: mol_type = other DNA
aataaatcagtaagtgatgaggaaactgaaatatcaattaagtggtaaagagatggaggccaggttagtgagcacagact

SEQ ID NO: 96420 - DNA, 80 bp, synthetic construct
  source 1..80: mol_type = other DNA
gaaaagacgttggcgcacttacgtggggtggtccagatctcacactcatcatctcagacaacattaagatggtaaaaaag

SEQ ID NO: 96421 - DNA, 80 bp, synthetic construct
  source 1..80: mol_type = other DNA
aagatacaaaaattagctggacgtggtggtgcacacctgtggtcccagctactcgagagactgaggcttgagaatgtctt

SEQ ID NO: 96422 - DNA, 80 bp, synthetic construct; identical to SEQ ID NO: 18112
  source 1..80: mol_type = other DNA

SEQ ID NO: 96423 - DNA, 80 bp, synthetic construct
  source 1..80: mol_type = other DNA
tatctgtacttgtgaaatggaaggtttatgccttgctagagagcttttaggtataaggcttgtcaactctaaaatcacac

SEQ ID NO: 96424 - DNA, 80 bp, synthetic construct
  source 1..80: mol_type = other DNA
agcaggcgtaggggctgctgccatggtctggttctgccccccatcactccaactctgtgcactgcctggcggttgtcacc

SEQ ID NO: 96425 - DNA, 80 bp, synthetic construct; identical to SEQ ID NO: 18113
  source 1..80: mol_type = other DNA

SEQ ID NO: 96426 - DNA, 80 bp, synthetic construct
  source 1..80: mol_type = other DNA
gaccccagaatacgggagcccagccgatgtgtcccacactcagcctccctggtgagaaagacaggtgaggcagggtgaaa

SEQ ID NO: 96427 - DNA, 80 bp, synthetic construct
  source 1..80: mol_type = other DNA
ttttcagaaattattatttgtaatagcaataaaaggcatgaacatgttttccaaaaataacaacagtgatatacacaggt

SEQ ID NO: 96428 - DNA, 80 bp, synthetic construct
  source 1..80: mol_type = other DNA
aaaatctgaaaaaatactaaatctgaaacattcccagtcccgagcattttggtttttattttatatatgtttgagatgga

SEQ ID NO: 96429 - DNA, 80 bp, synthetic construct
  source 1..80: mol_type = other DNA
gatggggtttcgccacgttggtcaggctggtcttgaactcctgacctcaggtgatctgcccagcttggcctcccaaagtg

SEQ ID NO: 96430 - DNA, 80 bp, synthetic construct; identical to SEQ ID NO: 18114
  source 1..80: mol_type = other DNA

SEQ ID NO: 96431 - DNA, 80 bp, synthetic construct
  source 1..80: mol_type = other DNA
acggcctgtcaggggaggtgacgctgtctccagctgtgtcttgaaggcaggaaaagggattccaggcagaggcctgagcc

SEQ ID NO: 96432 - DNA, 80 bp, synthetic construct
  source 1..80: mol_type = other DNA
ccagaagccacacaggggctcacacaggaggctgaaaaaatcagggctgcgtggacgctcagtcagaggagaaaagaggc

SEQ ID NO: 96433 - DNA, 80 bp, synthetic construct; identical to SEQ ID NO: 18115
  source 1..80: mol_type = other DNA

SEQ ID NO: 96434 - DNA, 80 bp, synthetic construct
  source 1..80: mol_type = other DNA
caaaggggccatgtggatccagagggaacctcgagagaggagccgtgtggatctagagggaacctcgagagaggagccgt

SEQ ID NO: 96435 - DNA, 80 bp, synthetic construct
  source 1..80: mol_type = other DNA
aaggagctgttttttgttcctgcattagtttgctaaagacaatggcttccagctccacccatgttcctggaaagggcatg

SEQ ID NO: 96436 - DNA, 80 bp, synthetic construct
  source 1..80: mol_type = other DNA
acaatttatattcctttgggtatccacccggtaatgggattgctaggtcaaatggcaggattaaagacttaaatgtaaaa

SEQ ID NO: 96437 - DNA, 80 bp, synthetic construct
  source 1..80: mol_type = other DNA
aactatcaacagagtgaagagacaacctacagaatgggagaaaatatttacaaaggatgcatccaacaaaggtccaatat

SEQ ID NO: 96438 - DNA, 80 bp, synthetic construct; identical to SEQ ID NO: 18116
  source 1..80: mol_type = other DNA

SEQ ID NO: 96439 - DNA, 80 bp, synthetic construct
  source 1..80: mol_type = other DNA
ctggtcagagggttcattttaacagtgctgtgggtggtgggggcgtgaagcaaaggcggaatgcatgtgtgccttggagg

SEQ ID NO: 96440 - DNA, 80 bp, synthetic construct
  source 1..80: mol_type = other DNA
acactcatacacctgataccaagttaaacccctctctcttttatcacgaccactgactattatattttaaaacacatatt

SEQ ID NO: 96441 - DNA, 80 bp, synthetic construct
  source 1..80: mol_type = other DNA
ttgcttctgcaggacccaggagacacaccaaacactgccccgtggcaggctggtccccgccctgcaggagtgtttggact

SEQ ID NO: 96442 - DNA, 80 bp, synthetic construct; identical to SEQ ID NO: 18117
  source 1..80: mol_type = other DNA

SEQ ID NO: 96443 - DNA, 80 bp, synthetic construct
  source 1..80: mol_type = other DNA
gaggtcaagagtacaagaccagcctgaccaacgtggagaaaccctgtctctactaaaagaatacaaaattagccgggctt

SEQ ID NO: 96444 - DNA, 80 bp, synthetic construct
  source 1..80: mol_type = other DNA
gagggagggggggagggagggagggagagagggagggcacattgcttcgtgtagcaccaaggcgtcactagacccgggat

SEQ ID NO: 96445 - DNA, 80 bp, synthetic construct
  source 1..80: mol_type = other DNA
tctaccatttcatatgtttggaaattttcataatacaattttgaaacaaaaaatatcatcatcttatgcaaggacattct

SEQ ID NO: 96446 - DNA, 80 bp, synthetic construct; identical to SEQ ID NO: 18118
  source 1..80: mol_type = other DNA

SEQ ID NO: 96447 - DNA, 80 bp, synthetic construct
  source 1..80: mol_type = other DNA
tgagtaagaaataagcaaagaagaggaatgtgacagtcaaaagtatatggaagagaaaaaattaaactcataagttggct

SEQ ID NO: 96448 - DNA, 80 bp, synthetic construct
  source 1..80: mol_type = other DNA
acactttgggaggccgaggcaggcagatcacttgaggtcaggagttcgagatcagcctggccaacatggcgaaaccccat

SEQ ID NO: 96449 - DNA, 80 bp, synthetic construct
  source 1..80: mol_type = other DNA
actccgtctcaaaataaaataaaataaaataaaataggccgggtgtggtggtggctcatgcctgtaatcccagcactttg

SEQ ID NO: 96450 - DNA, 80 bp, synthetic construct; identical to SEQ ID NO: 18119
  source 1..80: mol_type = other DNA

SEQ ID NO: 96451 - DNA, 80 bp, synthetic construct
  source 1..80: mol_type = other DNA
tgcatttggttttgtgtgtgggggcaaatgtgtacacgggcgagaaaatgcacacactcttctaaataagggggcagtaa

SEQ ID NO: 96452 - DNA, 80 bp, synthetic construct
  source 1..80: mol_type = other DNA
atagaattctaggaactattaatacataattaaagcatctaccacagccaatgattcctttctcagggaagaaaacccag

SEQ ID NO: 96453 - DNA, 80 bp, synthetic construct; identical to SEQ ID NO: 18120
  source 1..80: mol_type = other DNA

SEQ ID NO: 96454 - DNA, 80 bp, synthetic construct
  source 1..80: mol_type = other DNA
atgaatttcgtgtttaaaattgagtcctcatccccaagatatctcattatgtatatgcaaatattccaaaatctgaaaaa

SEQ ID NO: 96455 - DNA, 80 bp, synthetic construct
  source 1..80: mol_type = other DNA
ggtggcgcatgcctgtaatcccagctactcgggaggctgaggcaggagaatcacttgaatccaggaggcagaggttgcag

SEQ ID NO: 96456 - DNA, 80 bp, synthetic construct
  source 1..80: mol_type = other DNA
atacagctgctgcccccgctggctgtcatgaggtatacttttagctacttaaagaagtttcctcatatccctggtttatt

SEQ ID NO: 96457 - DNA, 80 bp, synthetic construct
  source 1..80: mol_type = other DNA
taggatcacattatgttgcccagactggcctcaaactcctgggctcaagagatcctcctaccatggcctcccaagaagct

SEQ ID NO: 96458 - DNA, 80 bp, synthetic construct; identical to SEQ ID NO: 18121
  source 1..80: mol_type = other DNA

SEQ ID NO: 96459 - DNA, 80 bp, synthetic construct
  source 1..80: mol_type = other DNA
cccaggttggtctcgaactcctgggctcaagtgattcacccaccttggcttcccaaaggcctgggattacccgatccacc

SEQ ID NO: 96460 - DNA, 80 bp, synthetic construct
  source 1..80: mol_type = other DNA
tcggcttttaatcctgcatagctagtgtttgtttaggagctttggccacattttaaatgtaagactgatcgcttgttttc

SEQ ID NO: 96461 - DNA, 80 bp, synthetic construct; identical to SEQ ID NO: 18122
  source 1..80: mol_type = other DNA

SEQ ID NO: 96462 - DNA, 80 bp, synthetic construct
  source 1..80: mol_type = other DNA
accaacctgggtgacagagtgagaccctgtcacaaaacaaaacaaaacaaaacaaaaaaccaacaaaaatagtttgagat

SEQ ID NO: 96463 - DNA, 80 bp, synthetic construct
  source 1..80: mol_type = other DNA
tatctcagcctcccaagtagttgggaccacaggcgtgcaccaccacacccggatagtttttgtattttttttgttgagat

SEQ ID NO: 96464 - DNA, 80 bp, synthetic construct
  source 1..80: mol_type = other DNA
agaagcttctcttctttctaaagctttgcattttctcccattttttcctgaacagacttgacaaaggtttatccacttta

SEQ ID NO: 96465 - DNA, 80 bp, synthetic construct; identical to SEQ ID NO: 18123
  source 1..80: mol_type = other DNA

SEQ ID NO: 96466 - DNA, 80 bp, synthetic construct
  source 1..80: mol_type = other DNA
acagcactgacaagaattactactgcaaatcaaaacacaaaaaaaccattggcagagccattacaataagtcaccaatag

SEQ ID NO: 96467 - DNA, 80 bp, synthetic construct
  source 1..80: mol_type = other DNA
ctgaatttcttcatttgtaaaatggtgacacaccatctttcctgagagcatttctcaggaacagggataagcacaaacat

SEQ ID NO: 96468 - DNA, 80 bp, synthetic construct
  source 1..80: mol_type = other DNA
ctgtactacatcccaggccctctaatgcagcggtccccatactacatcccaggccctctaatgcagtggtccccaacctt

SEQ ID NO: 96469 - DNA, 80 bp, synthetic construct
  source 1..80: mol_type = other DNA
tgggaggctgaggcaggcagatcacgaggtcaggagtttgagaccagcctggccaacatggtaaaaccccgtctctacaa

SEQ ID NO: 96470 - DNA, 80 bp, synthetic construct; identical to SEQ ID NO: 18124
  source 1..80: mol_type = other DNA

SEQ ID NO: 96471 - DNA, 80 bp, synthetic construct
  source 1..80: mol_type = other DNA
catgcccatgttatttaatccacatataatcctcctggctaggtactattattatttccaagttacatatgaagaaacca

SEQ ID NO: 96472 - DNA, 80 bp, synthetic construct
  source 1..80: mol_type = other DNA
gggggttacatcgtatgtatgtataagcttcaaagctagagaagtcaacgtgaagactgagagccaaggaaagagggtaa

SEQ ID NO: 96473 - DNA, 80 bp, synthetic construct
  source 1..80: mol_type = other DNA
aaaatgaatcagttagcatgatgttcagaaacctcattgatgttatataaattcagatacatgggaaacagctccaagtg

SEQ ID NO: 96474 - DNA, 80 bp, synthetic construct; identical to SEQ ID NO: 18125
  source 1..80: mol_type = other DNA

SEQ ID NO: 96475 - DNA, 80 bp, synthetic construct
  source 1..80: mol_type = other DNA
aaaatcgctcttcccttttcatatcagagatgaacctggctctgttccccctaaccttagcacaagtgtaatcacggcca

SEQ ID NO: 96476 - DNA, 80 bp, synthetic construct
  source 1..80: mol_type = other DNA
tcactcagtcatttcacttcctccgttgctccgccctcactgctctttgattagcgcaccatcaacatggcaaatgcaat

SEQ ID NO: 96477 - DNA, 80 bp, synthetic construct; identical to SEQ ID NO: 18126
  source 1..80: mol_type = other DNA

SEQ ID NO: 96478 - DNA, 80 bp, synthetic construct
  source 1..80: mol_type = other DNA
cgagcaggtggccaaaggagaggaaggaatgattcaaggagcaggagctgtctgtgtaaagtctggcaggcctggaggag

SEQ ID NO: 96479 - DNA, 80 bp, synthetic construct
  source 1..80: mol_type = other DNA
agaaatgaaagcgatgggattagaaatatgtttgaaggaaatatctccaacagcagcatggcaaattaattggagggggc

SEQ ID NO: 96480 - DNA, 80 bp, synthetic construct
  source 1..80: mol_type = other DNA
gcgggcatttatggaatcaggctggttaaaaagaaagaaaacaaaccgaagaaggaaggggaaggaaggagatgggcaca

SEQ ID NO: 96481 - DNA, 80 bp, synthetic construct
  source 1..80: mol_type = other DNA
gtccgaagcatgggtaaggactcagcacagctggctgtggggttggagctgaacagctgtagggccaagaggccattctt

SEQ ID NO: 96482 - DNA, 80 bp, synthetic construct; identical to SEQ ID NO: 18127
  source 1..80: mol_type = other DNA

SEQ ID NO: 96483 - DNA, 80 bp, synthetic construct
  source 1..80: mol_type = other DNA
aactactcataatccagaaacaataagtctcttatctacgaggagtgtgtgaactcagcagggaagggtagagtttggaa

SEQ ID NO: 96484 - DNA, 80 bp, synthetic construct
  source 1..80: mol_type = other DNA
caagaaacctgcaagttgacgcttggctgtgagagtcaagggacaagggaataattcaatagatgaccacaaatacacag

SEQ ID NO: 96485 - DNA, 80 bp, synthetic construct; identical to SEQ ID NO: 18128
  source 1..80: mol_type = other DNA

SEQ ID NO: 96486 - DNA, 80 bp, synthetic construct
  source 1..80: mol_type = other DNA
gttgctttggggtctgatttttaagcgagagagaaaaagcaaaagatcaccaagtgccggccccctggttttatagagaa

SEQ ID NO: 96487 - DNA, 80 bp, synthetic construct
  source 1..80: mol_type = other DNA
acaatgctttctttccctcctacgaaaagtggcccctacttttacctattttgatcactgtaggtgaggctgaccagttt

SEQ ID NO: 96488 - DNA, 80 bp, synthetic construct
  source 1..80: mol_type = other DNA
ggcatgctggtgcatgcctgtaatcctagctactcaggaggctgaggcatgagaattacttgagcctgggaggcagaggt

SEQ ID NO: 96489 - DNA, 80 bp, synthetic construct
  source 1..80: mol_type = other DNA
ctccaggctgaagtacagtggtgcaaccacatgcgctcgggtgatcctcccacctcagcctcccaagtagccggaaccac

SEQ ID NO: 96490 - DNA, 80 bp, synthetic construct; identical to SEQ ID NO: 18129
  source 1..80: mol_type = other DNA

SEQ ID NO: 96491 - DNA, 80 bp, synthetic construct
  source 1..80: mol_type = other DNA
ggtaccagagtagagcaggtttattaatcacggataaaactgctgaataattacctacttcaaaaagcattcatgagttg

SEQ ID NO: 96492 - DNA, 80 bp, synthetic construct
  source 1..80: mol_type = other DNA
gttcatgcctgtaggtcccagtagttagggagactgcagccggcagatcacttgagcccaggagtttgagaccagcttgg

SEQ ID NO: 96493 - DNA, 80 bp, synthetic construct
  source 1..80: mol_type = other DNA
taagagtgagaccctgagggagggagggagggaaaaattgctatgggcaaggcttctcatacacaaaatcatttcctccc

SEQ ID NO: 96494 - DNA, 80 bp, synthetic construct; identical to SEQ ID NO: 18130
  source 1..80: mol_type = other DNA

SEQ ID NO: 96495 - DNA, 80 bp, synthetic construct
  source 1..80: mol_type = other DNA
tgtgttagctgctttctgctttcttgctacaagggcaaattgagtggttgtgacagaaactgagaccataacacccgcaa

SEQ ID NO: 96496 - DNA, 80 bp, synthetic construct
  source 1..80: mol_type = other DNA
cccagacctagagaactggaatctgcctttcaaaaagatctgtggctattcttatgcacagagagggaggggcactgagc

SEQ ID NO: 96497 - DNA, 80 bp, synthetic construct
  source 1..80: mol_type = other DNA
taacccaggccaaagacgacccaactaggcagggtagaactcaatctttcttcctaacctcaccagtgcttccaagatgt

SEQ ID NO: 96498 - DNA, 80 bp, synthetic construct; identical to SEQ ID NO: 18131
  source 1..80: mol_type = other DNA

SEQ ID NO: 96499 - DNA, 80 bp, synthetic construct
  source 1..80: mol_type = other DNA
tcactgtttaacattctgcctccttaagaatctagaaaagtttgacagggttattcgtgggattcggtgtgctttaaagg

SEQ ID NO: 96500 - DNA, 80 bp, synthetic construct
  source 1..80: mol_type = other DNA
ctcaagtaagaagaagaaaagggacaggacaccaaatctgtgttgagaagaatctctgtgttgggtttcattaataaaaa

SEQ ID NO: 96501 - DNA, 80 bp, synthetic construct
  source 1..80: mol_type = other DNA
tatgggtttacactgtttttaaatgccatgatacggattggctcatttaatcctcaaaacacctgatattagctctattt

SEQ ID NO: 96502 - DNA, 80 bp, synthetic construct; identical to SEQ ID NO: 18132
  source 1..80: mol_type = other DNA

SEQ ID NO: 96503 - DNA, 80 bp, synthetic construct
  source 1..80: mol_type = other DNA
taatgacaatgactatgaacgcgttctcttccagctaacatgtttgtgaaatgctgcagtgaatctcaaagataacaggc

SEQ ID NO: 96504 - DNA, 80 bp, synthetic construct
  source 1..80: mol_type = other DNA
actcctggaaaaaagagaagttgctaaataaataatggaagcacacaagacagtgtgaacgccttttcaagtcctcgaat

SEQ ID NO: 96505 - DNA, 80 bp, synthetic construct
  source 1..80: mol_type = other DNA
tcctggtgaaagctcgtcacattccattttaaatattaattttgccaaagaacgagctcatgcctttcaaatgttaacag

SEQ ID NO: 96506 - DNA, 80 bp, synthetic construct; identical to SEQ ID NO: 18133
  source 1..80: mol_type = other DNA

SEQ ID NO: 96507 - DNA, 80 bp, synthetic construct
  source 1..80: mol_type = other DNA
ccgcccgtccgtgtggatgccgggctcagggctgcgctctgggagcctggctcgcgtcccctccgcggacgcccggtacc

SEQ ID NO: 96508 - DNA, 80 bp, synthetic construct
  source 1..80: mol_type = other DNA
ccggcagcgggcggggcgcactcaccttcgtcctcgaactccagcttctccagcatgccggcttccgcgggtcccagggc

SEQ ID NO: 96509 - DNA, 80 bp, synthetic construct
  source 1..80: mol_type = other DNA
cgggggcggagcgggagcgctgcccccacccgcccgaggccgccgccgccgccgcaggtggcgcggccgcggcccgcgtg

SEQ ID NO: 96510 - DNA, 80 bp, synthetic construct; identical to SEQ ID NO: 18134
  source 1..80: mol_type = other DNA

SEQ ID NO: 96511 - DNA, 80 bp, synthetic construct
  source 1..80: mol_type = other DNA
gttccgtgggctacacgtattgtagatgcactttgtcgctatccatttttttttttccagcatggaactcttaattcgcg

SEQ ID NO: 96512 - DNA, 80 bp, synthetic construct
  source 1..80: mol_type = other DNA
gaagggcaggacaggccgagaggggactgaggtccctggccccacggcccatccctgcagagtgcacgggcgccgcgaat

SEQ ID NO: 96513 - DNA, 80 bp, synthetic construct; identical to SEQ ID NO: 18135
  source 1..80: mol_type = other DNA

SEQ ID NO: 96514 - DNA, 80 bp, synthetic construct
  source 1..80: mol_type = other DNA
ttatctacatacaaaatatcaaagaatctacaaaagaaagaaaaaactcacctggaattagtgagtttggtaaggtcata

SEQ ID NO: 96515 - DNA, 80 bp, synthetic construct
  source 1..80: mol_type = other DNA
aatcacaaactgtagatgaaagacgagctaataaatggagagacagtcctgagctggaagccccaacatagtaaaaatga

SEQ ID NO: 96516 - DNA, 80 bp, synthetic construct
  source 1..80: mol_type = other DNA
ctgtcacccaggctggagtgcagtggcgcaacctcggctcactgcaagctctgcttcctgggttcacgccattctcctgc

SEQ ID NO: 96517 - DNA, 80 bp, synthetic construct
  source 1..80: mol_type = other DNA
catgcaaacatggcaaaccaatttttgatggaggtgtaaaagcaatagaactggagtaattggatatcaaaaggtaaaaa

SEQ ID NO: 96518 - DNA, 80 bp, synthetic construct; identical to SEQ ID NO: 18136
  source 1..80: mol_type = other DNA

SEQ ID NO: 96519 - DNA, 80 bp, synthetic construct
  source 1..80: mol_type = other DNA
taaacactaccaatattaaacagaaaatggagaaaataatccaattagaacataggcaaatgacacagagctgtttcacc

SEQ ID NO: 96520 - DNA, 80 bp, synthetic construct
  source 1..80: mol_type = other DNA
agagacagacaggattacttctacactgctggtgggaatgcaaaatggaaccactgtttttttttttttttttctttttt

SEQ ID NO: 96521 - DNA, 80 bp, synthetic construct
  source 1..80: mol_type = other DNA
tatttttagtagagatgaggtttcaccatattggtcaggctggtcttgaactcccgacctcaggtgatctgcctgccttg

SEQ ID NO: 96522 - DNA, 80 bp, synthetic construct; identical to SEQ ID NO: 18137
  source 1..80: mol_type = other DNA

SEQ ID NO: 96523 - DNA, 80 bp, synthetic construct
  source 1..80: mol_type = other DNA
gtatgattccatttatattatagtcttgaaataaaatggtcgaaatggagaacagattagtggatgccggggatcagggg

SEQ ID NO: 96524 - DNA, 80 bp, synthetic construct
  source 1..80: mol_type = other DNA
cctgtatttttccctatgagtcaggccaagctgatttaattctgtggaggaaatgacaataaattttttttttttttttt

SEQ ID NO: 96525 - DNA, 80 bp, synthetic construct
  source 1..80: mol_type = other DNA
ggtttcaccgtgttagccaagatggtctcgatctcctgacctcgtgatccacccgcctcagactcccaaagtgctgggat

SEQ ID NO: 96526 - DNA, 80 bp, synthetic construct; identical to SEQ ID NO: 18138
  source 1..80: mol_type = other DNA

SEQ ID NO: 96527 - DNA, 80 bp, synthetic construct
  source 1..80: mol_type = other DNA
acacaccttgtttatcctttcgtcagctgatgggcactcaggtggtttccactttttggctgtggtgaaaatgctcctat

SEQ ID NO: 96528 - DNA, 80 bp, synthetic construct
  source 1..80: mol_type = other DNA
gcgcgatttcagctcactgcaacctctgcctcctgggttcaagtgattctcctgcctcagcctcccgagtagctgggact

SEQ ID NO: 96529 - DNA, 80 bp, synthetic construct; identical to SEQ ID NO: 18139
  source 1..80: mol_type = other DNA

SEQ ID NO: 96530 - DNA, 80 bp, synthetic construct
  source 1..80: mol_type = other DNA
ttttaaaaaaacttggagtgagccaaggtacacaggaagtatctctcgttctaagtctatgcttttgtctcttgcaataa

SEQ ID NO: 96531 - DNA, 80 bp, synthetic construct
  source 1..80: mol_type = other DNA
cactacagaagttggtagagagtagaaattctaacaattaatgttttatgcaactccacttgataatgaatgggtgtaca

SEQ ID NO: 96532 - DNA, 80 bp, synthetic construct
  source 1..80: mol_type = other DNA
ataacacactaagtcaatttcaggaatttgagggcttttacagtttaggtatgtacattaatgtgcacagggtcaaaaga

SEQ ID NO: 96533 - DNA, 80 bp, synthetic construct; identical to SEQ ID NO: 18140
  source 1..80: mol_type = other DNA

SEQ ID NO: 96534 - DNA, 80 bp, synthetic construct
  source 1..80: mol_type = other DNA
atgtttgatgtagcaaaaacagaccaaatccaccacccaaaccctcctgataatccagaccgatctccccagggagaaca

SEQ ID NO: 96535 - DNA, 80 bp, synthetic construct
  source 1..80: mol_type = other DNA
gagaatgcctgagaaacatggagccatcacaagtgtgacttcttggttggtaaaaaatgctaaattattatcccggcatg

SEQ ID NO: 96536 - DNA, 80 bp, synthetic construct
  source 1..80: mol_type = other DNA
attagccgggcatggttgcgcacacctgtagtcccagctactcgggaggctgaggcaggagaatcgcttgaacccaggag

SEQ ID NO: 96537 - DNA, 80 bp, synthetic construct
  source 1..80: mol_type = other DNA
aacttcagcctgaaaacttaatcataaaacaattgccaaaaaagcactcctttacgcacagaggtcggatatgagtttgc

SEQ ID NO: 96538 - DNA, 80 bp, synthetic construct; identical to SEQ ID NO: 18141
  source 1..80: mol_type = other DNA

SEQ ID NO: 96539 - DNA, 80 bp, synthetic construct
  source 1..80: mol_type = other DNA
ccaggtctcagtcccagcccagccctctcctgagctccacactgccatcatctccactggagttttctacaccaacgcag

SEQ ID NO: 96540 - DNA, 80 bp, synthetic construct
  source 1..80: mol_type = other DNA
cccgctttccagtctatttccttccgtgtagccagagtgcctatgatggttaaatttgaatccagtcatcttgactggat

SEQ ID NO: 96541 - DNA, 80 bp, synthetic construct
  source 1..80: mol_type = other DNA
ggtgacagaggatttccttgctctttctcctggagctgggacactttcctcttcctgctcttgggcatcagaactccagg

SEQ ID NO: 96542 - DNA, 80 bp, synthetic construct; identical to SEQ ID NO: 18142
  source 1..80: mol_type = other DNA

SEQ ID NO: 96543 - DNA, 80 bp, synthetic construct
  source 1..80: mol_type = other DNA
gtggatcacctgaggtcaggagttcaagaccagcctgggcaacatggtgaaacaatgtctctatgaaaaaaacaaaaatt

SEQ ID NO: 96544 - DNA, 80 bp, synthetic construct
  source 1..80: mol_type = other DNA
caaaacagacttattattcactaacttagaaccattcagtggctctcggcaatctttaggattttcttggcaaactcctg

SEQ ID NO: 96545 - DNA, 80 bp, synthetic construct; identical to SEQ ID NO: 18143
  source 1..80: mol_type = other DNA

SEQ ID NO: 96546 - DNA, 80 bp, synthetic construct
  source 1..80: mol_type = other DNA
cattgctctctgaagggaacgaatgactcatcatccttgtattgcctgtgtgtgacacatagtaggcattcaaaaaatat

SEQ ID NO: 96547 - DNA, 80 bp, synthetic construct; identical to SEQ ID NO: 18144
  source 1..80: mol_type = other DNA

SEQ ID NO: 96548 - DNA, 80 bp, synthetic construct
  source 1..80: mol_type = other DNA
tgcaatctccacctccctggttcaagtgattcccctgcctcagcctcccaagtagctgggactacaggcgcacaccacca

SEQ ID NO: 96549 - DNA, 80 bp, synthetic construct
  source 1..80: mol_type = other DNA
agagactgggtcttgctctgtcacctaggctggtgcagtggcacaatcatagctcactgtaaccttgaactcctgggctc

SEQ ID NO: 96550 - DNA, 80 bp, synthetic construct; identical to SEQ ID NO: 18145
  source 1..80: mol_type = other DNA

SEQ ID NO: 96551 - DNA, 80 bp, synthetic construct
  source 1..80: mol_type = other DNA
aaaaaaaaggggccaggcgtggtggctcacacctataatcccagcactttgggaggccgaggcgggtggatcacgaggtc

SEQ ID NO: 96552 - DNA, 80 bp, synthetic construct
  source 1..80: mol_type = other DNA
agtgagccaagatcgcgccactgcactccagcctgggcgacagagcgagactccatctcaaacaaacaaacaacaaacaa

SEQ ID NO: 96553 - DNA, 80 bp, synthetic construct
  source 1..80: mol_type = other DNA
cccactccccaaaaagaagtgtattaattctgctgattgcttttaatcaatatatttggagagaaggttttgttcatttt

SEQ ID NO: 96554 - DNA, 80 bp, synthetic construct; identical to SEQ ID NO: 18146
  source 1..80: mol_type = other DNA

SEQ ID NO: 96555 - DNA, 80 bp, synthetic construct
  source 1..80: mol_type = other DNA
attcagcaaatacttacttaatatgggctatgtgcccagaaccagggtagttggttaataaaatatctgttgaacgaaca

SEQ ID NO: 96556 - DNA, 80 bp, synthetic construct
  source 1..80: mol_type = other DNA
catctcttgcctttcacaaataaatccatttttttgccaatcaaaatattttattattagctttgtgtttaacatgagtt

SEQ ID NO: 96557 - DNA, 80 bp, synthetic construct; identical to SEQ ID NO: 18147
  source 1..80: mol_type = other DNA

SEQ ID NO: 96558 - DNA, 80 bp, synthetic construct
  source 1..80: mol_type = other DNA
caaaaggaagtacaatattccagctgaaattaaagggacccactaatgcctccaccacatcttctacattctggagactt

SEQ ID NO: 96559 - DNA, 80 bp, synthetic construct
  source 1..80: mol_type = other DNA
aatttaccaacaataaacgatttctattccaagtgtacaatttgatgagctaggatgaaatcatcagtacaattatacga

SEQ ID NO: 96560 - DNA, 80 bp, synthetic construct
  source 1..80: mol_type = other DNA
gcataagaatgatacaatagactgtggggacttggagggaagagcggaagcggggcaagggataaaagactacaaacatg

SEQ ID NO: 96561 - DNA, 80 bp, synthetic construct
  source 1..80: mol_type = other DNA
aaaaaataaaatatagagaaaatttttttatcactccaaaagtttgctcatgctcctttgtggttcaccccttcttcaag

SEQ ID NO: 96562 - DNA, 80 bp, synthetic construct; identical to SEQ ID NO: 18148
  source 1..80: mol_type = other DNA

SEQ ID NO: 96563 - DNA, 80 bp, synthetic construct
  source 1..80: mol_type = other DNA
gggatattttcactttttgaccattgggaataaagctgtgaacatgtgtggtcaagtctttgtaggaacatgctttcatt

SEQ ID NO: 96564 - DNA, 80 bp, synthetic construct
  source 1..80: mol_type = other DNA
tgagagttccagttgcttcatgtcctcatcaatgcttggtatggtctcttaacattttttatcattttagtcattctagt

SEQ ID NO: 96565 - DNA, 80 bp, synthetic construct
  source 1..80: mol_type = other DNA
tttatttattagagtttttgttcttattgagttgtatgaatatggcaagcagactctgagatggcccccaatgcatgatc

SEQ ID NO: 96566 - DNA, 80 bp, synthetic construct
  source 1..80: mol_type = other DNA
gcttctgtctatatacataagactgtggcttgtctttctagcagatcactatcttgctggctttggtgaagcaagctgcc

SEQ ID NO: 96567 - DNA, 80 bp, synthetic construct; identical to SEQ ID NO: 18149
  source 1..80: mol_type = other DNA

SEQ ID NO: 96568 - DNA, 80 bp, synthetic construct
  source 1..80: mol_type = other DNA
catgtctttcaaagagcaagtttttaattttgataagatcctatttattatattatgactcatgctttttctgtcctagc

SEQ ID NO: 96569 - DNA, 80 bp, synthetic construct
  source 1..80: mol_type = other DNA
tgaaatccaattgttccacattgcttgttgaaaagattttgctgcctcactggattcccttggtacctttatttaaaatc

SEQ ID NO: 96570 - DNA, 80 bp, synthetic construct; identical to SEQ ID NO: 18150
  source 1..80: mol_type = other DNA

SEQ ID NO: 96571 - DNA, 80 bp, synthetic construct
  source 1..80: mol_type = other DNA
ttgtagttttcaccatggaggtcttacatatcttttgttaaatttattcctaagtatttattttttgatgctctcataaa

SEQ ID NO: 96572 - DNA, 80 bp, synthetic construct
  source 1..80: mol_type = other DNA
aatcacatcatctactgcctcttaaattattttgcaattccccgatactgtataattttagctatgtgttcagtgtatta

SEQ ID NO: 96573 - DNA, 80 bp, synthetic construct
  source 1..80: mol_type = other DNA
cacatatatgtaatattacagattacctatgtcatattacacatggatagatggatatctgctgctttcagctcacgtgc

SEQ ID NO: 96574 - DNA, 80 bp, synthetic construct
  source 1..80: mol_type = other DNA
aagctctctcgagctaccctgggctaccagggaggactcagggttggagagagccagaccgcacatgcatgtgtgcacag

SEQ ID NO: 96575 - DNA, 80 bp, synthetic construct; identical to SEQ ID NO: 18151
  source 1..80: mol_type = other DNA

SEQ ID NO: 96576 - DNA, 80 bp, synthetic construct
  source 1..80: mol_type = other DNA
atagcgactgcattgtgggcacaaatgctaaggaaacctttgagaggaaggcttcctacagagatgtgcagaggcagatt

SEQ ID NO: 96577 - DNA, 80 bp, synthetic construct
  source 1..80: mol_type = other DNA
gaaagattggagaccactgggagtgaaaggaatggaattggatttcttaggattgcatgtaagaagtgaatgtagataat

SEQ ID NO: 96578 - DNA, 80 bp, synthetic construct; identical to SEQ ID NO: 18152
  source 1..80: mol_type = other DNA

SEQ ID NO: 96579 - DNA, 80 bp, synthetic construct
  source 1..80: mol_type = other DNA
tttttgattcatcagctatgcctcccaaactttggacaggtgtcattctatcatatccccatacaacctacacagttatt

SEQ ID NO: 96580 - DNA, 80 bp, synthetic construct
  source 1..80: mol_type = other DNA
ttgtaccgcctgaaagcatcttgcatcccaccgtggtcctcatgccccctgctttgggaaaactggtgtgtgagaacaag

SEQ ID NO: 96581 - DNA, 80 bp, synthetic construct
  source 1..80: mol_type = other DNA
accaggctttagggaatgaaaatctaaaccagtgtttttaaaactgtaaactgtgacccactcatgggtcatgaaatcaa

SEQ ID NO: 96582 - DNA, 80 bp, synthetic construct
  source 1..80: mol_type = other DNA
cccgtctctttaaaaaacagaaagaaaggggaaaaatcaggtatgtgagagaggaccaggattttttttttttccttttt

SEQ ID NO: 96583 - DNA, 80 bp, synthetic construct; identical to SEQ ID NO: 18153
  source 1..80: mol_type = other DNA

SEQ ID NO: 96584 - DNA, 80 bp, synthetic construct
  source 1..80: mol_type = other DNA
cctggctaagttgtgtatgtttagcagagatggagtttcaccatgttgtccaggctggtcttgaactcctgatctcaagt

SEQ ID NO: 96585 - DNA, 80 bp, synthetic construct
  source 1..80: mol_type = other DNA
gtcatgttggttgtgcttgatatggtttggatctgtgtccccacccaaatctcatgcccaattgtaatctccagtgttgg

SEQ ID NO: 96586 - DNA, 80 bp, synthetic construct
  source 1..80: mol_type = other DNA
gccacgtgaggtatgtgcggccccttcaccttctgccatgattataattttactgaagcctccagagaagccgagcggat

SEQ ID NO: 96587 - DNA, 80 bp, synthetic construct; identical to SEQ ID NO: 18154
  source 1..80: mol_type = other DNA

SEQ ID NO: 96588 - DNA, 80 bp, synthetic construct
  source 1..80: mol_type = other DNA
gagagcctgtctcaacaaaaaagtttaagagaaaaatggtaatggttgactattttcctgctgagaagtgggcctgggtg

SEQ ID NO: 96589 - DNA, 80 bp, synthetic construct
  source 1..80: mol_type = other DNA
aaatcctaccaaactcagcagttcctgtcgctgtgttcctaaagatctgtggatgacagtaatgcttgacaacagtgaca

SEQ ID NO: 96590 - DNA, 80 bp, synthetic construct; identical to SEQ ID NO: 18155
  source 1..80: mol_type = other DNA

SEQ ID NO: 96591 - DNA, 80 bp, synthetic construct
  source 1..80: mol_type = other DNA
ttttccgttgcaaattatgatgatgttcttgaggaaaacatgtgcaattgagctgcttttaaaaccctgaaaaattgtag

SEQ ID NO: 96592 - DNA, 80 bp, synthetic construct
  source 1..80: mol_type = other DNA
cttgacaatttccccatacttagagatttctctggggagattagtggtgttattaagaaatgctttttagttattgtgta

SEQ ID NO: 96593 - DNA, 80 bp, synthetic construct
  source 1..80: mol_type = other DNA
tgggaggccaaggtgggcagatcacttgaggtcagcagttcgagaccatcctggccaacatagtgaaaccccgtctctac

SEQ ID NO: 96594 - DNA, 80 bp, synthetic construct
  source 1..80: mol_type = other DNA
ctaaaaacaaacaaaaaaccaaaaatgcaagatagatggacagattctaacataatagactctaggtaagtaggctccga

SEQ ID NO: 96595 - DNA, 80 bp, synthetic construct; identical to SEQ ID NO: 18156
  source 1..80: mol_type = other DNA

SEQ ID NO: 96596 - DNA, 80 bp, synthetic construct
  source 1..80: mol_type = other DNA
aggctggccaaagtgtacaaagtttcagtttcatgggagaaataagttctgatgtatcgcacagcactgtgactacagtt

SEQ ID NO: 96597 - DNA, 80 bp, synthetic construct
  source 1..80: mol_type = other DNA
aggctatccacaattatctgaagaggtaaaccaatacactcctctctttttttccaaccgcctatctgtctgaggctcga

SEQ ID NO: 96598 - DNA, 80 bp, synthetic construct
  source 1..80: mol_type = other DNA
atgagtttattactgatcttttcagataaattaatatttaaaaagttttaatttataatatggtaaattctttttctttt

SEQ ID NO: 96599 - DNA, 80 bp, synthetic construct; identical to SEQ ID NO: 18157
  source 1..80: mol_type = other DNA

SEQ ID NO: 96600 - DNA, 80 bp, synthetic construct
  source 1..80: mol_type = other DNA
gggtctcaataattatgagtacacaggggtcctgagaccaactgatttgataactactgaactgccgtacagcaagacct

SEQ ID NO: 96601 - DNA, 80 bp, synthetic construct
  source 1..80: mol_type = other DNA
cttctataaaccaagaggtcctgttccctttatctcaaccacatcattagtagtgttttcagtgtgaaaaaattatcatt

SEQ ID NO: 96602 - DNA, 80 bp, synthetic construct
  source 1..80: mol_type = other DNA
aattaacaaaatgtacataatttagttattctcacccaccgatacgacaacctggataacctcaggctactagaatccaa

SEQ ID NO: 96603 - DNA, 80 bp, synthetic construct; identical to SEQ ID NO: 18158
  source 1..80: mol_type = other DNA

SEQ ID NO: 96604 - DNA, 80 bp, synthetic construct
  source 1..80: mol_type = other DNA
aacgaacaaaaatcttacagacttggtacacgtctcgctgcagataagcccaatcctttcatatactcataatgacagaa

SEQ ID NO: 96605 - DNA, 80 bp, synthetic construct
  source 1..80: mol_type = other DNA
tagatgctggggttttctttatctgtttttggacagacaaacccatccttttgaaatagtcatacagtgttcattggctg

SEQ ID NO: 96606 - DNA, 80 bp, synthetic construct
  source 1..80: mol_type = other DNA
aatcacagcattgctagcttcccctccttaactcatatggctcactgatgttagtcatttctattttttctctatgccta

SEQ ID NO: 96607 - DNA, 80 bp, synthetic construct; identical to SEQ ID NO: 18159
  source 1..80: mol_type = other DNA

SEQ ID NO: 96608 - DNA, 80 bp, synthetic construct
  source 1..80: mol_type = other DNA
tgccccagcttcccaagtagctggggctacaggcatgtgccaccacgcctggctaatttttgtatttttagtagcaacgg

SEQ ID NO: 96609 - DNA, 80 bp, synthetic construct
  source 1..80: mol_type = other DNA
ttgttgaattcactcttgaaaatgaaatattcccaaatttaacctgaggagagggactcaaatgacaagtattactcggg

SEQ ID NO: 96610 - DNA, 80 bp, synthetic construct
  source 1..80: mol_type = other DNA
gtatttggcccaaaagtactctgtgcggcattgctttttccattttcctcttcaaaatagcctattagatatgagctgat

SEQ ID NO: 96611 - DNA, 80 bp, synthetic construct
  source 1..80: mol_type = other DNA
tagtttagcaatggtaaggagtatggattctggacatactacctgggcttaaccctggcttgagcaatttattaaattgc

SEQ ID NO: 96612 - DNA, 80 bp, synthetic construct; identical to SEQ ID NO: 18160
  source 1..80: mol_type = other DNA

SEQ ID NO: 96613 - DNA, 80 bp, synthetic construct
  source 1..80: mol_type = other DNA
tacactttgagtcaggccatctcaaacatactacccaaatctggtgaaaattcatttagttatttctctgtgacatggta

SEQ ID NO: 96614 - DNA, 80 bp, synthetic construct
  source 1..80: mol_type = other DNA
attataagtacatattcatttatcatagccattgataactataaatttgttatctaatgaatgagtcacgaaaaactgga

SEQ ID NO: 96615 - DNA, 80 bp, synthetic construct
  source 1..80: mol_type = other DNA
tggccaacatggtgaaaccccatctctactaataatacaaacattagctgcacatggtggtgtgcacctgtaatcccagc

SEQ ID NO: 96616 - DNA, 80 bp, synthetic construct; identical to SEQ ID NO: 18161
  source 1..80: mol_type = other DNA

SEQ ID NO: 96617 - DNA, 80 bp, synthetic construct
  source 1..80: mol_type = other DNA
aaggtaacttgattgtattggatcagtagtttgattcaagtaacatcgtggaattcaaaagtgcaaaggtaaaacctcaa

SEQ ID NO: 96618 - DNA, 80 bp, synthetic construct
  source 1..80: mol_type = other DNA
ccatctctactaaaaatacaaaaattagctgggcatggtggcaggcgcctggaatcccagttactggggaggctgagaca

SEQ ID NO: 96619 - DNA, 80 bp, synthetic construct
  source 1..80: mol_type = other DNA
ttctcaaagtcaaattgtgtgaccatagtgtatataaaatgaagacagcaaacatcgcctatggaagaagacataggttg

SEQ ID NO: 96620 - DNA, 80 bp, synthetic construct; identical to SEQ ID NO: 18162
  source 1..80: mol_type = other DNA

SEQ ID NO: 96621 - DNA, 80 bp, synthetic construct
  source 1..80: mol_type = other DNA
caacaagtgggtttgaatccaagcccctaccttcatagtctagacaccaggcagaagagactaactgctttgggctgtga

SEQ ID NO: 96622 - DNA, 80 bp, synthetic construct
  source 1..80: mol_type = other DNA
aaggcgggtggatcacttgaggtcaggagtttgagaccagcctggctaacacagtgaaaccccatctctactaaaaatac

SEQ ID NO: 96623 - DNA, 80 bp, synthetic construct; identical to SEQ ID NO: 18163
  source 1..80: mol_type = other DNA

SEQ ID NO: 96624 - DNA, 80 bp, synthetic construct
  source 1..80: mol_type = other DNA
gaacctgggaggcaaaggttgcagtaagccaagatcacgccattgcactccagcctgggtgacagagcaagattgtcgca

SEQ ID NO: 96625 - DNA, 80 bp, synthetic construct
  source 1..80: mol_type = other DNA
ggtgcgaacacacgccgaaacagtacaaaaataggcttatcccaagcacattaatgaagaacatgttataagatgatttt

SEQ ID NO: 96626 - DNA, 80 bp, synthetic construct
  source 1..80: mol_type = other DNA
taattactgatgacaatgatctgctgagtcaagtcagaatgtgattcagtaagattggaggggaagggaatgcaatataa

SEQ ID NO: 96627 - DNA, 80 bp, synthetic construct
  source 1..80: mol_type = other DNA
cacccaagccactcaacaaaatatatttgtaaatacaattccatcttctgacattggatctaggcggtttatttaaaaag

SEQ ID NO: 96628 - DNA, 80 bp, synthetic construct; identical to SEQ ID NO: 18164
  source 1..80: mol_type = other DNA

SEQ ID NO: 96629 - DNA, 80 bp, synthetic construct
  source 1..80: mol_type = other DNA
agttaatgcctggtgggaaacagaattttcctttaattgcccatttgtaagattgaataagtaggcaggcagagtgtaaa

SEQ ID NO: 96630 - DNA, 80 bp, synthetic construct
  source 1..80: mol_type = other DNA
ttaagtatatattttcccactagctgtgtctgaacacatcactcacggctcatgcgaaattatttctctgccaggcgtgg

SEQ ID NO: 96631 - DNA, 80 bp, synthetic construct
  source 1..80: mol_type = other DNA
ttcctacattccggaaaagaataaaccatattaataccacatcccaatgctagtattattagatctgagtagtgaacaca

SEQ ID NO: 96632 - DNA, 80 bp, synthetic construct; identical to SEQ ID NO: 18165
  source 1..80: mol_type = other DNA

SEQ ID NO: 96633 - DNA, 80 bp, synthetic construct
  source 1..80: mol_type = other DNA
aaagcaatacttatactgtgtgtctactagattttatgaaaataagacttgaaaagatgacattcctccaacaatgaaac

SEQ ID NO: 96634 - DNA, 80 bp, synthetic construct
  source 1..80: mol_type = other DNA
aacaaaagttagacgaaaatgtgacaccggaatttatccatttgtctcaaagaggcgggattccaggaagttttaatttt

SEQ ID NO: 96635 - DNA, 80 bp, synthetic construct; identical to SEQ ID NO: 18166
  source 1..80: mol_type = other DNA

SEQ ID NO: 96636 - DNA, 80 bp, synthetic construct
  source 1..80: mol_type = other DNA
ggtgcaatcttggctcactgcaacttccgcctcaagcaattctcctgcctcagcctcctgaatagctgggactacaggca

SEQ ID NO: 96637 - DNA, 80 bp, synthetic construct
  source 1..80: mol_type = other DNA
agggcttttgattcagcacatgaagaggaaatcacgggcagagctgtagaaatcgtattagaatttcatctgtgtagttc

SEQ ID NO: 96638 - DNA, 80 bp, synthetic construct
  source 1..80: mol_type = other DNA
aataatgctttagagtcctgcacgaagcctccaaaagagtggaaaaaatacacaacccttcgaaacaggtttactcaagc

SEQ ID NO: 96639 - DNA, 80 bp, synthetic construct; identical to SEQ ID NO: 18167
  source 1..80: mol_type = other DNA

SEQ ID NO: 96640 - DNA, 80 bp, synthetic construct
  source 1..80: mol_type = other DNA
aagaagtatcccttattagaattaaacgacatttgctttcttccccgcaccggctgttacataggtagaaagtgttcaga

SEQ ID NO: 96641 - DNA, 80 bp, synthetic construct
  source 1..80: mol_type = other DNA
ggtttcatcccagctctacttctccgtccagtgtttttctaatttaatgacactgtcatccttcctttcatgccagaaac

SEQ ID NO: 96642 - DNA, 80 bp, synthetic construct
  source 1..80: mol_type = other DNA
cttttccgcataaattccagcctctagcctgttactagagtaatcattccataaaatgcaagtctgttgctgggcgtggt

SEQ ID NO: 96643 - DNA, 80 bp, synthetic construct; identical to SEQ ID NO: 18168
  source 1..80: mol_type = other DNA

SEQ ID NO: 96644 - DNA, 80 bp, synthetic construct
  source 1..80: mol_type = other DNA
acaaaacaaaaaaacgacacaaatctgaacaagtccctcctctggaaatcatggcaagggagggaagggcaagtttatgc

SEQ ID NO: 96645 - DNA, 80 bp, synthetic construct
  source 1..80: mol_type = other DNA
cagagtgtgtaattctataacgctctgaaggcaaggagtataatcttcaagtcctaactctgctggattatttaccactt

SEQ ID NO: 96646 - DNA, 80 bp, synthetic construct
  source 1..80: mol_type = other DNA
gctaattttttgtatttttaagagagatggggttttgccgtgttgaggctggtctcgaactcctgggctcaagtgatctg

SEQ ID NO: 96647 - DNA, 80 bp, synthetic construct
  source 1..80: mol_type = other DNA
aaagcactactgtttgtcccttgcctttctggggatgagactcaatctgcccctttgcattggatgttccaacaagcaac

SEQ ID NO: 96648 - DNA, 80 bp, synthetic construct; identical to SEQ ID NO: 18169
  source 1..80: mol_type = other DNA

SEQ ID NO: 96649 - DNA, 80 bp, synthetic construct
  source 1..80: mol_type = other DNA
gagcccagctgccttggttcaaatcttggctttagcgtttgctagccattgagcctttgggggagtaactttacacaatt

SEQ ID NO: 96650 - DNA, 80 bp, synthetic construct
  source 1..80: mol_type = other DNA
ggtccccctcctcctccagccaagccctcactcacatctcctcttcacaccaagcttcttgataaagctgtccacatcct

SEQ ID NO: 96651 - DNA, 80 bp, synthetic construct; identical to SEQ ID NO: 18170
  source 1..80: mol_type = other DNA

SEQ ID NO: 96652 - DNA, 80 bp, synthetic construct
  source 1..80: mol_type = other DNA
ctctaggatggaaaaattcaatatgaaccctaaagtggccatcgtcatggttaagggatgcagattttatcttgagaact

SEQ ID NO: 96653 - DNA, 80 bp, synthetic construct
  source 1..80: mol_type = other DNA
gtaggtatttcatctgttagttttgctgccccgtgagtgaagaggcaggatgcacccttcaatggctttagctccagagt

SEQ ID NO: 96654 - DNA, 80 bp, synthetic construct
  source 1..80: mol_type = other DNA
gaggcagggagtttatcacattaaaaagatccaacagcttttctttggagctcagctaccctggggaacagaatgagtaa

SEQ ID NO: 96655 - DNA, 80 bp, synthetic construct; identical to SEQ ID NO: 18171
  source 1..80: mol_type = other DNA

SEQ ID NO: 96656 - DNA, 80 bp, synthetic construct
  source 1..80: mol_type = other DNA
ggcagacagctttaacatcaagacctgatgaggttgtaagggtatttaaaatggcagtcaggaatataagagcaaagtgg

SEQ ID NO: 96657 - DNA, 80 bp, synthetic construct
  source 1..80: mol_type = other DNA
ctaggggtcttggagactgactgaatggcaaaagacagtccatttttaaaaacaacccaaagctcttgagtttattatcc

SEQ ID NO: 96658 - DNA, 80 bp, synthetic construct
  source 1..80: mol_type = other DNA
aaattcatatgctggatccctaacctccaatgtgactgtatttgcagacagagcctttaaagaggtaattaagtgaggcc

SEQ ID NO: 96659 - DNA, 80 bp, synthetic construct; identical to SEQ ID NO: 18172
  source 1..80: mol_type = other DNA

SEQ ID NO: 96660 - DNA, 80 bp, synthetic construct
  source 1..80: mol_type = other DNA
ttcctccctgcctgggcctaatgaaacttcttcattcagtcctaaccaaccatcctgcagccttccctttagtttagtta

SEQ ID NO: 96661 - DNA, 80 bp, synthetic construct
  source 1..80: mol_type = other DNA
gttgagaaccctgccaactgacaaccttcaactattagccgggattgcccttggctaaagagagctgccttgcccaaggt

SEQ ID NO: 96662 - DNA, 80 bp, synthetic construct
  source 1..80: mol_type = other DNA
aacttcaccctctgcccaatcttcctgccttcccttctcccacaggtgtcaatcctcagagcacttcatgataaacatcc

SEQ ID NO: 96663 - DNA, 80 bp, synthetic construct; identical to SEQ ID NO: 18173
  source 1..80: mol_type = other DNA

SEQ ID NO: 96664 - DNA, 80 bp, synthetic construct
  source 1..80: mol_type = other DNA
tctgtctctcttggaaccctgtcacaggcatttgaacgagctggggctagcctgctggaaaagagaccatgtggaattga

SEQ ID NO: 96665 - DNA, 80 bp, synthetic construct
  source 1..80: mol_type = other DNA
atgttaagttttggggaggttattgctatgcagcaatagaaaaactgatgtagtatcagctatggtttggatgtggtttg

SEQ ID NO: 96666 - DNA, 80 bp, synthetic construct
  source 1..80: mol_type = other DNA
gcaggttgttaaaaagtgcctgtcttcctcagtttctctctcttgccaggtgatctctttgcacatgtctgctccctttc

SEQ ID NO: 96667 - DNA, 80 bp, synthetic construct; identical to SEQ ID NO: 18174
  source 1..80: mol_type = other DNA

SEQ ID NO: 96668 - DNA, 80 bp, synthetic construct
  source 1..80: mol_type = other DNA
agggcacaaaatccagctgtcttgcctcaaggtagggcaaattctggggcaatttacagcaccaatctcctctgctgtca

SEQ ID NO: 96669 - DNA, 80 bp, synthetic construct
  source 1..80: mol_type = other DNA
gaattcctaggagaaaaagatggggagcatgggagtgactgctgtggaaggaaattggaaaagcgctgatcatcctaaca

SEQ ID NO: 96670 - DNA, 80 bp, synthetic construct
  source 1..80: mol_type = other DNA
tctttaatttctccctgcactcactctttccccagtagggtttgagtctattcctctttgtaggaagatgccatcacctc

SEQ ID NO: 96671 - DNA, 80 bp, synthetic construct
  source 1..80: mol_type = other DNA
accttatgttacacaactagttggctgcatttgatgtcactcaacactcttagtatgtgaaacacgattacacacattcc

SEQ ID NO: 96672 - DNA, 80 bp, synthetic construct; identical to SEQ ID NO: 18175
  source 1..80: mol_type = other DNA

SEQ ID NO: 96673 - DNA, 80 bp, synthetic construct
  source 1..80: mol_type = other DNA
ttgcacacacacacacctgtgcacctgcaggcacacacctgtgcacacacctgcatgcatacatacttgcacacacagtt

SEQ ID NO: 96674 - DNA, 80 bp, synthetic construct
  source 1..80: mol_type = other DNA
acacctgtgcacatacccgcatgcacactcacctgcatgcacacatacctgcatgcacatacacctgcatgcacacacac

SEQ ID NO: 96675 - DNA, 80 bp, synthetic construct
  source 1..80: mol_type = other DNA
cccctgatttgtctccttccccttcaattaatcaaccactaccttccaaattcctttcaattttaccttcaaaattgccc

SEQ ID NO: 96676 - DNA, 80 bp, synthetic construct; identical to SEQ ID NO: 18176
  source 1..80: mol_type = other DNA

SEQ ID NO: 96677 - DNA, 80 bp, synthetic construct
  source 1..80: mol_type = other DNA
taatgcacggagctgttaatcaaatggtaaataaaacaaacattggccttttcccattagcagggctcacatatttgtca

SEQ ID NO: 96678 - DNA, 80 bp, synthetic construct
  source 1..80: mol_type = other DNA
aagagttcaagaccagcctggccaacatggcaaaaccccgtctctactaaaaatataaaaattagctgggtgtggtggtg

SEQ ID NO: 96679 - DNA, 80 bp, synthetic construct
  source 1..80: mol_type = other DNA
gctgtcttctaaagactaattttctccattccattccctattttagaataaaattcatgggaacagattttataaaaatg

SEQ ID NO: 96680 - DNA, 80 bp, synthetic construct; identical to SEQ ID NO: 18177
  source 1..80: mol_type = other DNA

SEQ ID NO: 96681 - DNA, 80 bp, synthetic construct
  source 1..80: mol_type = other DNA
tacctgtgactgcaaccttatttggaagcagagtctttgctgagtaatcaggttaacctgctgccaggatgctgaaagca

SEQ ID NO: 96682 - DNA, 80 bp, synthetic construct
  source 1..80: mol_type = other DNA
tttcaaaatgtaagtggggagccttgggccatcagcctgattttcagaagctcaaatgacataaaaattggagtcttgac

SEQ ID NO: 96683 - DNA, 80 bp, synthetic construct
  source 1..80: mol_type = other DNA
aggagtctcgctctgtcgcccaggctggagtgcagtggcgccatctcggctcactgcaagctctgcctcctgcgttcaag

SEQ ID NO: 96684 - DNA, 80 bp, synthetic construct; identical to SEQ ID NO: 18178
  source 1..80: mol_type = other DNA

SEQ ID NO: 96685 - DNA, 80 bp, synthetic construct
  source 1..80: mol_type = other DNA
caccattctacattccgtctctatttggatgactctagggactcctataagtggcattatgcagtatgcgtccttttgtg

SEQ ID NO: 96686 - DNA, 80 bp, synthetic construct
  source 1..80: mol_type = other DNA
tatccattcacgacatttggattgttgttgaaatcccactcgactgcacactcctgctgccagccgcgtgctgggcacag

SEQ ID NO: 96687 - DNA, 80 bp, synthetic construct
  source 1..80: mol_type = other DNA
cagttgggttataaggagataagaacaccactttcctgttacactcgcggggaggaagctgacagcaaacccagagcact

SEQ ID NO: 96688 - DNA, 80 bp, synthetic construct; identical to SEQ ID NO: 18179
  source 1..80: mol_type = other DNA

SEQ ID NO: 96689 - DNA, 80 bp, synthetic construct
  source 1..80: mol_type = other DNA
ctttactgagctgttttgccccagtactgttcagttcccaatcagattgtaagctctagaaggcaggaacaataacttgc

SEQ ID NO: 96690 - DNA, 80 bp, synthetic construct
  source 1..80: mol_type = other DNA
gtatgttctcagcatggcaacgcatcttctcctaaaagataacaactgttacagattggaccgtatctcctaaaaagaga

SEQ ID NO: 96691 - DNA, 80 bp, synthetic construct
  source 1..80: mol_type = other DNA
cctctgcctctgggttcccacggttctcatgcctcagtctcctgactagttgggattacaggtgcccaccaccacgccaa

SEQ ID NO: 96692 - DNA, 80 bp, synthetic construct; identical to SEQ ID NO: 18180
  source 1..80: mol_type = other DNA

SEQ ID NO: 96693 - DNA, 80 bp, synthetic construct
  source 1..80: mol_type = other DNA
atgcgacactaatgtgacaactgaatggagtggttccagccatacaggtagacccagggatgtggctctcacagtgtcgc

SEQ ID NO: 96694 - DNA, 80 bp, synthetic construct
  source 1..80: mol_type = other DNA
gtctgtcgctccatcccactcctctatgaaatgctccccttccaaagagggcatcctaagtctgatgatgtcatcagact

SEQ ID NO: 96695 - DNA, 80 bp, synthetic construct; identical to SEQ ID NO: 18181
  source 1..80: mol_type = other DNA

SEQ ID NO: 96696 - DNA, 80 bp, synthetic construct
  source 1..80: mol_type = other DNA
ctaatttttgcagttttggtagagacagggttttgccatgttggccaggctggtctcgaactcctggcctcaagtgatct

SEQ ID NO: 96697 - DNA, 80 bp, synthetic construct
  source 1..80: mol_type = other DNA
cctcggctgcagatagactgctcagcttggggcaataactgctctgccctccctctgccacccggcagccccacccacag

SEQ ID NO: 96698 - DNA, 80 bp, synthetic construct
  source 1..80: mol_type = other DNA
ataggattccaggggaaacgtgtgctgcttggtcacttgggtgggtgttgacggagaggaggagaggccggaggctgcag

SEQ ID NO: 96699 - DNA, 80 bp, synthetic construct; identical to SEQ ID NO: 18182
  source 1..80: mol_type = other DNA

SEQ ID NO: 96700 - DNA, 80 bp, synthetic construct
  source 1..80: mol_type = other DNA
tttacacacaccctccagaggctattttcctccattcagccaaatatcatttgatctcctctccttctttccccagcatg

SEQ ID NO: 96701 - DNA, 80 bp, synthetic construct
  source 1..80: mol_type = other DNA
gatggatgtgttattcctaccaaaacgtgcaacatgaacatcaccactgtaagttcccagtagcaagacttcactgcgaa

SEQ ID NO: 96702 - DNA, 80 bp, synthetic construct
  source 1..80: mol_type = other DNA
gtggaggattgtaggaagactggagacatgaatcttctgggagttaaaggttctccactttgacttatttctaactaaca

SEQ ID NO: 96703 - DNA, 80 bp, synthetic construct; identical to SEQ ID NO: 18183
  source 1..80: mol_type = other DNA

SEQ ID NO: 96704 - DNA, 80 bp, synthetic construct
  source 1..80: mol_type = other DNA
gtgctggcagaggcagcgatcggagcaatgcagctgcagccaaggcgcgatggggattgctggcaaacccagaagccagg

SEQ ID NO: 96705 - DNA, 80 bp, synthetic construct
  source 1..80: mol_type = other DNA
caatgcatggattgtgttctaagagaagcagaatctggctttgggtctgatatctcaaatctctttttcttttttttttg

SEQ ID NO: 96706 - DNA, 80 bp, synthetic construct
  source 1..80: mol_type = other DNA
atatttttagtagacatggggtttcaccatgttgggcaagctgctttcgaactcctgacctcaagtgatctgcctgcccc

SEQ ID NO: 96707 - DNA, 80 bp, synthetic construct; identical to SEQ ID NO: 18184
  source 1..80: mol_type = other DNA

SEQ ID NO: 96708 - DNA, 80 bp, synthetic construct
  source 1..80: mol_type = other DNA
aactcctttaaacataattcggcagacgttttccttttatcaggtcctagagccaccagtcactgtttctggtctggaca

SEQ ID NO: 96709 - DNA, 80 bp, synthetic construct
  source 1..80: mol_type = other DNA
agccttttcactgtcctgtatgttaccacttaatgacaaactgtttaacgttcaaaccaaacataaaagtatgtaagtcc

SEQ ID NO: 96710 - DNA, 80 bp, synthetic construct
  source 1..80: mol_type = other DNA
tcagggtgaatctgttcctctctgtggagagtggggcgcatgttttgttttgtgtgtccgggggaggtttaggaagtcac

SEQ ID NO: 96711 - DNA, 80 bp, synthetic construct; identical to SEQ ID NO: 18185
  source 1..80: mol_type = other DNA

SEQ ID NO: 96712 - DNA, 80 bp, synthetic construct
  source 1..80: mol_type = other DNA
caaatattagctaggcgtagtggcgcgcgcctgtagtcccagccactccagaggctgaggcaggagaatcgcttgaaccc

SEQ ID NO: 96713 - DNA, 80 bp, synthetic construct
  source 1..80: mol_type = other DNA
ggaggaaggagagggaagaggaagagtgggaaggtcctgatgtggtttagcagctcttcagagatgggggtgtgtcagca

SEQ ID NO: 96714 - DNA, 80 bp, synthetic construct
  source 1..80: mol_type = other DNA
tattttgtgtgtagtgtggggcactgcctggggccttagaccccagagtcatatccttcagtggttcctgcagcaacaaa

SEQ ID NO: 96715 - DNA, 80 bp, synthetic construct; identical to SEQ ID NO: 18186
  source 1..80: mol_type = other DNA

SEQ ID NO: 96716 - DNA, 80 bp, synthetic construct
  source 1..80: mol_type = other DNA
catgatcaaaactagccctggccaggtgcggtggctcatgcctgtagccccggcactttgggaggctgagggagaaggat

SEQ ID NO: 96717 - DNA, 80 bp, synthetic construct
  source 1..80: mol_type = other DNA
actgcaccactgcactccagcctgggtgacacagcaagatcctatctcacaaaacacaacacaacaaaatgagcccaaac

SEQ ID NO: 96718 - DNA, 80 bp, synthetic construct
  source 1..80: mol_type = other DNA
ggggccatagacttatttgtgtaattgctaagtgtcgactgtactaagtgtcggcttattcattaccatggtgcttttaa

SEQ ID NO: 96719 - DNA, 80 bp, synthetic construct; identical to SEQ ID NO: 18187
  source 1..80: mol_type = other DNA

SEQ ID NO: 96720 - DNA, 80 bp, synthetic construct
  source 1..80: mol_type = other DNA
ttatccattcagaaaattacttcttttcagccactgctttgcttttgagccaagaggctggcgaaggccatatttaagca

SEQ ID NO: 96721 - DNA, 80 bp, synthetic construct
  source 1..80: mol_type = other DNA
gagaagtttttccacttccaacattcttcagggatgaagcttagtcactgttgtgcaagggatgttcacagcccatgaaa

SEQ ID NO: 96722 - DNA, 80 bp, synthetic construct
  source 1..80: mol_type = other DNA
acccccgtgtgagtactggaatgatcctaacccagtcccaaaggaggtgagagaggtggcgggatgcaggagtgaacctc

SEQ ID NO: 96723 - DNA, 80 bp, synthetic construct
  source 1..80: mol_type = other DNA
ctgtggggaaaacaggtggcactctggactacagagggggaagggaaacttttagaggaagggacaggtgaaatgctgag

SEQ ID NO: 96724 - DNA, 80 bp, synthetic construct; identical to SEQ ID NO: 18188
  source 1..80: mol_type = other DNA

SEQ ID NO: 96725 - DNA, 80 bp, synthetic construct
  source 1..80: mol_type = other DNA
gagaaagaacatgaagacttaaaattacattttagctgtatgaattactctcccagaagtggggcttcacggggccaaca

SEQ ID NO: 96726 - DNA, 80 bp, synthetic construct
  source 1..80: mol_type = other DNA
tcttccatgccagccaggaagggtagaccaacaaagaagtgacttctactcaggtttatgctattcaatcagtagagaaa

SEQ ID NO: 96727 - DNA, 80 bp, synthetic construct
  source 1..80: mol_type = other DNA
aggctggggtacaatggtatgatcacggctcactgcagcctcaaactcctgggctcaagtgatcctcccacctcagtctc

SEQ ID NO: 96728 - DNA, 80 bp, synthetic construct; identical to SEQ ID NO: 18189
  source 1..80: mol_type = other DNA

SEQ ID NO: 96729 - DNA, 80 bp, synthetic construct
  source 1..80: mol_type = other DNA
taaagtcgagaaccaggaaagcaggggggagctcagggaagaggagagggcctgagggtgggggtgggacggtggctcag

SEQ ID NO: 96730 - DNA, 80 bp, synthetic construct
  source 1..80: mol_type = other DNA
tgagaagacatctcctcctttttcctgctccttaaggactttgtttaggacgccgccagcctctgcagtgaacaatgcct

SEQ ID NO: 96731 - DNA, 80 bp, synthetic construct; identical to SEQ ID NO: 18190
  source 1..80: mol_type = other DNA

SEQ ID NO: 96732 - DNA, 80 bp, synthetic construct
  source 1..80: mol_type = other DNA
aggaagtaatgtattctgctgactgttgttacaagagccatgaagtgagaagagcaacatttccattgacactggaggga

SEQ ID NO: 96733 - DNA, 80 bp, synthetic construct
  source 1..80: mol_type = other DNA
tacctgtgctgagtagctgtagcacacagagggatgcaaccagcaggcaggcggagaccctgggcggcgcgagaccctgt

SEQ ID NO: 96734 - DNA, 80 bp, synthetic construct
  source 1..80: mol_type = other DNA
ttgcccgcaggttttaccttccacccctcattccagagccctaccctccagggccgctggagctgagtgcccagccctct

SEQ ID NO: 96735 - DNA, 80 bp, synthetic construct; identical to SEQ ID NO: 18191
  source 1..80: mol_type = other DNA

SEQ ID NO: 96736 - DNA, 80 bp, synthetic construct
  source 1..80: mol_type = other DNA
cgtgggctttgtgtgatgagtaagaggtaagaagcaaagcaccctaggacactgaatgataaggcccgtattcagtatgg

SEQ ID NO: 96737 - DNA, 80 bp, synthetic construct
  source 1..80: mol_type = other DNA
ccacacaggctcagtgtggaggtgagaaatcccagctgagccctctctgacaagttggggtctcctccaggcagtcctgg

SEQ ID NO: 96738 - DNA, 80 bp, synthetic construct
  source 1..80: mol_type = other DNA
agttcattgaacagcgcctggaccagggtgactttaggtatcagtaccacttaggcccaggagtccacttcctctataac

SEQ ID NO: 96739 - DNA, 80 bp, synthetic construct
  source 1..80: mol_type = other DNA
atcttcaagaccattctaccattctccaccctccgtgttggtggatgcattccagaatgatccattcaacctgaactatt

SEQ ID NO: 96740 - DNA, 80 bp, synthetic construct; identical to SEQ ID NO: 18192
  source 1..80: mol_type = other DNA

SEQ ID NO: 96741 - DNA, 80 bp, synthetic construct
  source 1..80: mol_type = other DNA
ttcaagatcagcctgggcaacatagtgagacccccatttctacaaaaaataaaaaattagctgggcatggtggcctgtgc

SEQ ID NO: 96742 - DNA, 80 bp, synthetic construct
  source 1..80: mol_type = other DNA
gattcatatgacccacagaaataaaagctccttgggatcctcatttttttaaaagtaacttctcagcaatctatattttt

SEQ ID NO: 96743 - DNA, 80 bp, synthetic construct
  source 1..80: mol_type = other DNA
ccactgagtctaacccgacatgctgagtagagcatctgagccacagagacagttaggatgcttctcaggcttcagttctc

SEQ ID NO: 96744 - DNA, 80 bp, synthetic construct; identical to SEQ ID NO: 18193
  source 1..80: mol_type = other DNA

SEQ ID NO: 96745 - DNA, 80 bp, synthetic construct
  source 1..80: mol_type = other DNA
accaggcgtttatgcagctgccggccaggccagctctcctgagctctgctgctcctttccagccagctgctttgagacct

SEQ ID NO: 96746 - DNA, 80 bp, synthetic construct
  source 1..80: mol_type = other DNA
ttcatatttcaatctggagtaaggtttcaggctgcagatttcggttctaggctctaagaatctgttttatgatcttttgt

SEQ ID NO: 96747 - DNA, 80 bp, synthetic construct
  source 1..80: mol_type = other DNA
cttatagggctttgtatacccaataacattctgcacctagttatgaaatagttggctctagcatatgggtatttacatgg

SEQ ID NO: 96748 - DNA, 80 bp, synthetic construct; identical to SEQ ID NO: 18194
  source 1..80: mol_type = other DNA

SEQ ID NO: 96749 - DNA, 80 bp, synthetic construct
  source 1..80: mol_type = other DNA
aatgaaagggaaatgttagcagcctcagtccctctaattatcagtatttgtggaatcacaaaagcaacaggcattgtttg

SEQ ID NO: 96750 - DNA, 80 bp, synthetic construct
  source 1..80: mol_type = other DNA
gaccttggacaaacatctcagaacctcattttcggtggaggaagtgcaggctctgagaggtgaagtgtgtggccgaggat

SEQ ID NO: 96751 - DNA, 80 bp, synthetic construct
  source 1..80: mol_type = other DNA
cgcaccaggcgaggtgggtgcctcaggtcagaggtgtatctgccttgggctgcctctccgtgtccaccctcctccccaac

SEQ ID NO: 96752 - DNA, 80 bp, synthetic construct; identical to SEQ ID NO: 18195
  source 1..80: mol_type = other DNA

SEQ ID NO: 96753 - DNA, 80 bp, synthetic construct
  source 1..80: mol_type = other DNA
ttaggtcaggactagagttcgagatttcagaaatgtcattctaaccttgatctcttcgagatgcctgtttataacacagc

SEQ ID NO: 96754 - DNA, 80 bp, synthetic construct
  source 1..80: mol_type = other DNA
gtccagtggctgcgaggccctggaagcatgcctctttcagggaggcctccatcatcagagcttccgtctgcaacgtccct

SEQ ID NO: 96755 - DNA, 80 bp, synthetic construct; identical to SEQ ID NO: 18196
  source 1..80: mol_type = other DNA

SEQ ID NO: 96756 - DNA, 80 bp, synthetic construct
  source 1..80: mol_type = other DNA
ttttgcaccctgaacctccaaactcagaagtctctgaggagccctgaataggagaaaatgtggctgaaaatgaagtggaa

SEQ ID NO: 96757 - DNA, 80 bp, synthetic construct
  source 1..80: mol_type = other DNA
aaatctgtaatagtacctggagttttttcctgtgctttctataattcagctctttgagtctgctctgaacccttggtggt

SEQ ID NO: 96758 - DNA, 80 bp, synthetic construct
  source 1..80: mol_type = other DNA
agggagggctttcagtcaccatcccctcctggaagtgtatcccaagccatttccaggtgtacagctctcaggggagacaa

SEQ ID NO: 96759 - DNA, 80 bp, synthetic construct
  source 1..80: mol_type = other DNA
tggcggctgcagccggtggcagacactcccttcctggggtgctggctgcagccggctgccatgggactccaaccagggct

SEQ ID NO: 96760 - DNA, 80 bp, synthetic construct; identical to SEQ ID NO: 18197
  source 1..80: mol_type = other DNA

SEQ ID NO: 96761 - DNA, 80 bp, synthetic construct
  source 1..80: mol_type = other DNA
tctgggagttcagggccatgataaaaaatgacagcatcacacctgaattgctgctagtgtttttaatagacaggtaacca

SEQ ID NO: 96762 - DNA, 80 bp, synthetic construct
  source 1..80: mol_type = other DNA
ccctgcccccttccagatacctcatctacttgacaaacttccaagatgccctgcctcccctttctacacattgctcttcc

SEQ ID NO: 96763 - DNA, 80 bp, synthetic construct; identical to SEQ ID NO: 18198
  source 1..80: mol_type = other DNA

SEQ ID NO: 96764 - DNA, 80 bp, synthetic construct
  source 1..80: mol_type = other DNA
cttagcacattccaatgttatcaaatgatagagtgctgggttgtttcctgatgcacctcgggtcttccactaagcgtgaa

SEQ ID NO: 96765 - DNA, 80 bp, synthetic construct
  source 1..80: mol_type = other DNA
agaaacatgacagagagaaaacacagctatccctctgtgtctgcagggaattgattccagaacccctctcaggcaccaaa

SEQ ID NO: 96766 - DNA, 80 bp, synthetic construct
  source 1..80: mol_type = other DNA
cctgaatatttttgatctgaattggttgaagctgaggaggtgaaacctgcagatatggagggctgaccgtattgcaaaac

SEQ ID NO: 96767 - DNA, 80 bp, synthetic construct
  source 1..80: mol_type = other DNA
atattcaccatcattaatctttagggctatatacattaaaactacaatgaaacatcactacacctactagaccagctaac

SEQ ID NO: 96768 - DNA, 80 bp, synthetic construct; identical to SEQ ID NO: 18199
  source 1..80: mol_type = other DNA

SEQ ID NO: 96769 - DNA, 80 bp, synthetic construct
  source 1..80: mol_type = other DNA
tgggtgcagtggcacactcctgttgtcccggctgcttgggaggctgaggtgtgaggattacttaagtctgggagttcaag

SEQ ID NO: 96770 - DNA, 80 bp, synthetic construct
  source 1..80: mol_type = other DNA
ttaatatatgcaacacaatgaattaatctcaaatgcatttttctaagtgaaggaagccaggtccaaatatatacatacta

SEQ ID NO: 96771 - DNA, 80 bp, synthetic construct; identical to SEQ ID NO: 18200
  source 1..80: mol_type = other DNA

SEQ ID NO: 96772 - DNA, 80 bp, synthetic construct
  source 1..80: mol_type = other DNA
ccgccttggggcccaagacctgctcacataaaaatagcagctgaattccctctccctctggcccaaaggtcatctcctga

SEQ ID NO: 96773 - DNA, 80 bp, synthetic construct
  source 1..80: mol_type = other DNA
ttgggagaaggggagggggcaggagagagctgaaaggttaggctgggagcagaaagggagatcccactccttcacccgcc

SEQ ID NO: 96774 - DNA, 80 bp, synthetic construct
  source 1..80: mol_type = other DNA
cccagggcaggcctgagacccgcagcacaggaggcccaaggcggccataaggagacccaaggccctccgaggggcgcacg

SEQ ID NO: 96775 - DNA, 80 bp, synthetic construct; identical to SEQ ID NO: 18201
  source 1..80: mol_type = other DNA

SEQ ID NO: 96776 - DNA, 80 bp, synthetic construct
  source 1..80: mol_type = other DNA
cttacaagagggaccgcagagagacccctcctccttccaccatgtgaggacgcagccaggaggagctgaagcaggtcctc

SEQ ID NO: 96777 - DNA, 80 bp, synthetic construct
  source 1..80: mol_type = other DNA
tgggttcaagcaattcttctgcctcagcctcctgagcagctgggattacagttgctcaccaccacacccagctaattttt

SEQ ID NO: 96778 - DNA, 80 bp, synthetic construct
  source 1..80: mol_type = other DNA
ctatggtatgattacggcagcctaaacagacgaagacgctgagttagctaatttgttgatccaaacagtccactcttttt

SEQ ID NO: 96779 - DNA, 80 bp, synthetic construct; identical to SEQ ID NO: 18202
  source 1..80: mol_type = other DNA

SEQ ID NO: 96780 - DNA, 80 bp, synthetic construct
  source 1..80: mol_type = other DNA
tgaatactattccaccacatctacacacagcacggagggctttctctcacaattccctcccggctttgccatcgctttgc

SEQ ID NO: 96781 - DNA, 80 bp, synthetic construct
  source 1..80: mol_type = other DNA
ccgagggccagagcaaggagtaaggacatccgatgcaaacaccgcacccacacgtttcctggggatgccccagtccctcc

SEQ ID NO: 96782 - DNA, 80 bp, synthetic construct
  source 1..80: mol_type = other DNA
tgccaagggtaatgtgacatttacatgatgcctggtggggctgcccagtgacataacaggggggttgggggtgtgtctct

SEQ ID NO: 96783 - DNA, 80 bp, synthetic construct
  source 1..80: mol_type = other DNA
tccttctgaataaagctacttgataaacacccatccacttcctgcagggggagaaggccaaatgccctcaggtgcattct

SEQ ID NO: 96784 - DNA, 80 bp, synthetic construct; identical to SEQ ID NO: 18203
  source 1..80: mol_type = other DNA

SEQ ID NO: 96785 - DNA, 80 bp, synthetic construct
  source 1..80: mol_type = other DNA
gccttgttcttagctgtccctggcctacagacctttgaactaatcactcttggtggtctgaattctctgtagacaggtgg

SEQ ID NO: 96786 - DNA, 80 bp, synthetic construct
  source 1..80: mol_type = other DNA
ctagaatcgccaacacatccccggaagcccagtggcttagcctcctatcagtgcctcctctgcagcccctgccagggctg

SEQ ID NO: 96787 - DNA, 80 bp, synthetic construct
  source 1..80: mol_type = other DNA
cagccatcgtgcagccgcctgggcagctcccagctccaatggcaactggtagcatcaggagagtatggggttccccagtg

SEQ ID NO: 96788 - DNA, 80 bp, synthetic construct; identical to SEQ ID NO: 18204
  source 1..80: mol_type = other DNA

SEQ ID NO: 96789 - DNA, 80 bp, synthetic construct
  source 1..80: mol_type = other DNA
cacaccagggaggagaggcctgaaaaggggcagctgaagggaaaaagagctggagagtggggagcagcccggagtgtctc

SEQ ID NO: 96790 - DNA, 80 bp, synthetic construct
  source 1..80: mol_type = other DNA
gagcgcaggcccagggagaggcaggcaggtggccagtctgagtcagcgggatggaggcgcctggcatggggaaggggtgt

SEQ ID NO: 96791 - DNA, 80 bp, synthetic construct; identical to SEQ ID NO: 18205
  source 1..80: mol_type = other DNA

SEQ ID NO: 96792 - DNA, 80 bp, synthetic construct
  source 1..80: mol_type = other DNA
cggagcccctggtccttggcttggagagctgggtacacaatgatgcccaaccctcataaggtccacacatgacagggtgc

SEQ ID NO: 96793 - DNA, 80 bp, synthetic construct
  source 1..80: mol_type = other DNA
gagcccagaaaatgccacagaaatcgagcctctctccaccctgccttccaacctcatccacccagtggctcaaggctgcc

SEQ ID NO: 96794 - DNA, 80 bp, synthetic construct
  source 1..80: mol_type = other DNA
tctgtgccagccccctgggaagcaggcactgttgatgccctgtccctaggtctcacttctgagttcgcctgcagctggga

SEQ ID NO: 96795 - DNA, 80 bp, synthetic construct; identical to SEQ ID NO: 18206
  source 1..80: mol_type = other DNA

SEQ ID NO: 96796 - DNA, 80 bp, synthetic construct
  source 1..80: mol_type = other DNA
ctgtcctcgtggtagtgaatgagttctcgctctatgagttcacacgaggcctggttgtttgaaggagacttgcacctcct

SEQ ID NO: 96797 - DNA, 80 bp, synthetic construct
  source 1..80: mol_type = other DNA
tttgcccaaactcagatatttatagtgacacaaatggactaacacaatctcccaaaccaactccctgacccttgtcacca

SEQ ID NO: 96798 - DNA, 80 bp, synthetic construct
  source 1..80: mol_type = other DNA
gcaagaaggtcctgaaatcaggtaacttctcgctacagtgtaaatgactgataggctcaaacgggccgtgggagggtttc

SEQ ID NO: 96799 - DNA, 80 bp, synthetic construct; identical to SEQ ID NO: 18207
  source 1..80: mol_type = other DNA

SEQ ID NO: 96800 - DNA, 80 bp, synthetic construct
  source 1..80: mol_type = other DNA
gagatcatctcggcgactttatcatgaaggccagcacaggaggcccctccttcctgttggagatgtttagttttatgatt

SEQ ID NO: 96801 - DNA, 80 bp, synthetic construct
  source 1..80: mol_type = other DNA
gaaagaaatgcatgagccattaagacagtgcaggaagcatctgatggaggacacgtcaatcttttcatcaatcattgaaa

SEQ ID NO: 96802 - DNA, 80 bp, synthetic construct
  source 1..80: mol_type = other DNA
ctcagaggaggcagtggggaggttcttgatataggctggtctttaagaaggactgggactaagataaactggggtacata

SEQ ID NO: 96803 - DNA, 80 bp, synthetic construct; identical to SEQ ID NO: 18208
  source 1..80: mol_type = other DNA

SEQ ID NO: 96804 - DNA, 80 bp, synthetic construct
  source 1..80: mol_type = other DNA
cctcgtggagctcaggtttgtagactctggctccttggagtatggtctgaggaccagcagcctgtttgttagacacgcag

SEQ ID NO: 96805 - DNA, 80 bp, synthetic construct
  source 1..80: mol_type = other DNA
tctgtggatttctgagccccaccctcagagattcagatttgggaactgggatggaggtccagaaattggcttttctgatg

SEQ ID NO: 96806 - DNA, 80 bp, synthetic construct
  source 1..80: mol_type = other DNA
ggccaggccatagttcccttaacctcccacacccatcccctccacacggggggagcctggccttgtgccgaaccccaaat

SEQ ID NO: 96807 - DNA, 80 bp, synthetic construct
  source 1..80: mol_type = other DNA
catgcaatgtgctgcacacacgagcacccagcagacgcctgtcctctcctcccctcagctgtcaggcacaagagtccacc

SEQ ID NO: 96808 - DNA, 80 bp, synthetic construct; identical to SEQ ID NO: 18209
  source 1..80: mol_type = other DNA

SEQ ID NO: 96809 - DNA, 80 bp, synthetic construct
  source 1..80: mol_type = other DNA
cgtggacacagatacacagggagatggaagctgagattggagcggtgcatctttttaagccaaagaataaggattgccgg

SEQ ID NO: 96810 - DNA, 80 bp, synthetic construct
  source 1..80: mol_type = other DNA
ccccagctactcgggaggctgaggcaggagaatggcgtgaacccgtgaagcgggggttgcagtgagccgagattgcgcca

SEQ ID NO: 96811 - DNA, 80 bp, synthetic construct
  source 1..80: mol_type = other DNA
cttctggccggcagaactgtgagagagtcagtttctgctgtttgaagccacccggtgtgtggtgctctgttgtgtatggt

SEQ ID NO: 96812 - DNA, 80 bp, synthetic construct; identical to SEQ ID NO: 18210
  source 1..80: mol_type = other DNA

SEQ ID NO: 96813 - DNA, 80 bp, synthetic construct
  source 1..80: mol_type = other DNA
gatcctgagagtcccacccacagagggagcccccacggcagtcttgccaggtccctgcccacccgcttgccttccttccc

SEQ ID NO: 96814 - DNA, 80 bp, synthetic construct
  source 1..80: mol_type = other DNA
tcaggagaaacaccaagtcctgttattggataataagactctagcatgaattaatgatcagagtgaaggcctggggggca

SEQ ID NO: 96815 - DNA, 80 bp, synthetic construct; identical to SEQ ID NO: 18211
  source 1..80: mol_type = other DNA

SEQ ID NO: 96816 - DNA, 80 bp, synthetic construct
  source 1..80: mol_type = other DNA
gaaagaggaaaagcgcaccttctccgtcacagtgaatggcaccctgcaaaggactgcgggtgctctaagaaaggaaatct

SEQ ID NO: 96817 - DNA, 80 bp, synthetic construct
  source 1..80: mol_type = other DNA
tgtcttactgatgagaacaactcaaggaacttctcccacatcatctggccacttgggctttaaaaaatgttttatggagc

SEQ ID NO: 96818 - DNA, 80 bp, synthetic construct
  source 1..80: mol_type = other DNA
ccttcaatctccctgccaggcaccacctgcctcctcagataatcatcatcattctttttctatttaaaaaaatttttttg

SEQ ID NO: 96819 - DNA, 80 bp, synthetic construct
  source 1..80: mol_type = other DNA
acacacacacacacacacacacacacaaattagctaggcatggtggcaggtgcctgtaatcccagctactcaggcggctg

SEQ ID NO: 96820 - DNA, 80 bp, synthetic construct; identical to SEQ ID NO: 18212
  source 1..80: mol_type = other DNA

SEQ ID NO: 96821 - DNA, 80 bp, synthetic construct
  source 1..80: mol_type = other DNA
cagagctgcacattttgtattcttttgcttcaggcttctcttgctcagtgttggttgtgagatgcagccacactgctgca

SEQ ID NO: 96822 - DNA, 80 bp, synthetic construct
  source 1..80: mol_type = other DNA
agaattgctgcttgcttttagttaatgtatttattcagcacagaagacattatagagagatgaggaaaggggaggggccc

SEQ ID NO: 96823 - DNA, 80 bp, synthetic construct
  source 1..80: mol_type = other DNA
gaggctgctcagcggtgcggcaggttttgaacccaagtgtaaccactacaaagcctatgatttagtggacagaccacgtc

SEQ ID NO: 96824 - DNA, 80 bp, synthetic construct; identical to SEQ ID NO: 18213
  source 1..80: mol_type = other DNA

SEQ ID NO: 96825 - DNA, 80 bp, synthetic construct
  source 1..80: mol_type = other DNA
gtgttttttctcttttctcaatcgggttgtaaaacacacacacagatgtacatggattggaaattaatccagccgggaaa

SEQ ID NO: 96826 - DNA, 80 bp, synthetic construct
  source 1..80: mol_type = other DNA
tacgtcttttcagagagaaagagacgtgagaggtaagcacagttttcccaaaggcccataaagaaagcaattctatttgt

SEQ ID NO: 96827 - DNA, 80 bp, synthetic construct
  source 1..80: mol_type = other DNA
ggtggcacttccttgtagaaatctcataagtggcccttcttagccgatctcatctcacccgctgcgttttatttgacatt

SEQ ID NO: 96828 - DNA, 80 bp, synthetic construct; identical to SEQ ID NO: 18214
  source 1..80: mol_type = other DNA

SEQ ID NO: 96829 - DNA, 80 bp, synthetic construct
  source 1..80: mol_type = other DNA
tctcctcctgcctctttgccctgtagcaccaaaggagaaattaatctttcctcctaggtggtaatgactagttgcaatca

SEQ ID NO: 96830 - DNA, 80 bp, synthetic construct
  source 1..80: mol_type = other DNA
gtcccaaaagggtcaggactatctccccacctgggacagtgccttgctgtaaagattaagtcccaggaagacaccgagat

SEQ ID NO: 96831 - DNA, 80 bp, synthetic construct; identical to SEQ ID NO: 18215
  source 1..80: mol_type = other DNA

SEQ ID NO: 96832 - DNA, 80 bp, synthetic construct
  source 1..80: mol_type = other DNA
tagatggagtagggcactcaaatacaccctccagaggcgtctaccatgagggaagagggtgcctctggcccaacccaacg

SEQ ID NO: 96833 - DNA, 80 bp, synthetic construct
  source 1..80: mol_type = other DNA
cagaggacaagtccaagcacctggatagcaactggaccatgtcatgaaacccagtcctcctccctccgacgctgcccaaa

SEQ ID NO: 96834 - DNA, 80 bp, synthetic construct
  source 1..80: mol_type = other DNA
tgcaaattcctagcaggtccctcctactaaacggtggtcggagaagctgctatataatgaccgtttagtgacattcctag

SEQ ID NO: 96835 - DNA, 80 bp, synthetic construct; identical to SEQ ID NO: 18216
  source 1..80: mol_type = other DNA

SEQ ID NO: 96836 - DNA, 80 bp, synthetic construct
  source 1..80: mol_type = other DNA
acatctacccagagaactctcggcccaacccagacggggcaggggaggacgcacagagaaaacatgctgactgtccacct

SEQ ID NO: 96837 - DNA, 80 bp, synthetic construct
  source 1..80: mol_type = other DNA
gcagccagctactgtgaggtattgtgaaaggaaagtcggatgaatcttattatttcttttttggcttactagactctgaa

SEQ ID NO: 96838 - DNA, 80 bp, synthetic construct
  source 1..80: mol_type = other DNA
taaatgtaccagtatcttctatgcagcgtaaagatggttttcactctacagccttctctgtttagcaaaggaatgcattt

SEQ ID NO: 96839 - DNA, 80 bp, synthetic construct; identical to SEQ ID NO: 18217
  source 1..80: mol_type = other DNA

SEQ ID NO: 96840 - DNA, 80 bp, synthetic construct
  source 1..80: mol_type = other DNA
ctgctctcgtcagagcccagcagaccagctacctagttctgtgagaataccagaagcagaggggccggaaaccatgacac

SEQ ID NO: 96841 - DNA, 80 bp, synthetic construct
  source 1..80: mol_type = other DNA
tgagtgacactgtgacaccgatgtatgaactgaatgacattgtgtgacacagtgttgtgacactgacattgtgtgaaatc

SEQ ID NO: 96842 - DNA, 80 bp, synthetic construct
  source 1..80: mol_type = other DNA
ttgatgtatactatatgacagtgacattgagtgatgtgatattgagtgctgtttgtgactgtgtgaccctgcatgacact

SEQ ID NO: 96843 - DNA, 80 bp, synthetic construct; identical to SEQ ID NO: 18218
  source 1..80: mol_type = other DNA

SEQ ID NO: 96844 - DNA, 80 bp, synthetic construct
  source 1..80: mol_type = other DNA
acattgagtgacagtgacgagtgacgtgagactgacattgagtgatgtgacagtgacagtgacatgtgatattgtgacac

SEQ ID NO: 96845 - DNA, 80 bp, synthetic construct
  source 1..80: mol_type = other DNA
agctcagttccaagtcggagcagccacctcagcagaagggccggcctttgggagccgcctctcccctgagctgaggcttg

SEQ ID NO: 96846 - DNA, 80 bp, synthetic construct
  source 1..80: mol_type = other DNA
aggcttcgctctcgccccccgccctgaggcagcacaccaagtggtcacccaccagtctccccaccacaaaagactcccct

SEQ ID NO: 96847 - DNA, 80 bp, synthetic construct
  source 1..80: mol_type = other DNA
ccgggagccctgccctctccctgctcttgcatctctcccagggcgcagccacccaaagtgaggcctccctaagcatacca

SEQ ID NO: 96848 - DNA, 80 bp, synthetic construct; identical to SEQ ID NO: 18219
  source 1..80: mol_type = other DNA

SEQ ID NO: 96849 - DNA, 80 bp, synthetic construct
  source 1..80: mol_type = other DNA
tactaacatgctagggttagagtactaagagtgctaggcttagagtactgagagtgctagacttagagtactaacagtgc

SEQ ID NO: 96850 - DNA, 80 bp, synthetic construct
  source 1..80: mol_type = other DNA
tagaggatcaacagtgctaggcttaaagtgctaagagtactaggctgagagtatgaagagtgctaggctgagagtactga

SEQ ID NO: 96851 - DNA, 80 bp, synthetic construct; identical to SEQ ID NO: 18220
  source 1..80: mol_type = other DNA

SEQ ID NO: 96852 - DNA, 80 bp, synthetic construct
  source 1..80: mol_type = other DNA
aagcaacctgtagatatttatcaaatgtgttgaaggaacgaggaagagaacaggctctccatcacagaagtgtttaaact

SEQ ID NO: 96853 - DNA, 80 bp, synthetic construct
  source 1..80: mol_type = other DNA
tggcctgccaccgactgggtttggcaccatcacccagaagccgccctcctctgggtttcccaggcgccccaggtggctgg

SEQ ID NO: 96854 - DNA, 80 bp, synthetic construct
  source 1..80: mol_type = other DNA
tggcccccaccctcacgtgccctcctggcacccagcctccgcccgaccctctgagagctctgaggagtgtgaacaatggg

SEQ ID NO: 96855 - DNA, 80 bp, synthetic construct
  source 1..80: mol_type = other DNA
tctacactcaggacccacgagactgctaatggtaaccacagggacagccctgcaggggccttgctctggcccactgtgaa

SEQ ID NO: 96856 - DNA, 80 bp, synthetic construct; identical to SEQ ID NO: 18221
  source 1..80: mol_type = other DNA

SEQ ID NO: 96857 - DNA, 80 bp, synthetic construct
  source 1..80: mol_type = other DNA
cgttttccatcactcattttgggtgcaggatattttcagcactttcccagcatgcaaagcaaagacaggattgtcatgga

SEQ ID NO: 96858 - DNA, 80 bp, synthetic construct
  source 1..80: mol_type = other DNA
tttctcctgtatggcactgtcaaatcgaggcagagggacgggaaatggtgaacagagaaggaagactcaagggcaaaact

SEQ ID NO: 96859 - DNA, 80 bp, synthetic construct; identical to SEQ ID NO: 18222
  source 1..80: mol_type = other DNA

SEQ ID NO: 96860 - DNA, 80 bp, synthetic construct
  source 1..80: mol_type = other DNA
cacatatgtaaaagtagacagaacagaataatgaactccattttttctagcatgccatttcaacaactattaactcatga

SEQ ID NO: 96861 - DNA, 80 bp, synthetic construct
  source 1..80: mol_type = other DNA
tgcaggccaccacacccagttaatttttaaatgtttcatagagaaggggtctatgttgcccaggctggccttgaacttct

SEQ ID NO: 96862 - DNA, 80 bp, synthetic construct
  source 1..80: mol_type = other DNA
agatcaaatatatcacaatttgggggttcaagtccaagaaccggcacatacccccaaaggattctcacagacagtcaagt

SEQ ID NO: 96863 - DNA, 80 bp, synthetic construct; identical to SEQ ID NO: 18223
  source 1..80: mol_type = other DNA

SEQ ID NO: 96864 - DNA, 80 bp, synthetic construct
  source 1..80: mol_type = other DNA
acccgccgtcctcccatccacatgccgccatcctcccatccacgcaccacgtcctcccatccacaccctgccacctctcc

SEQ ID NO: 96865 - DNA, 80 bp, synthetic construct
  source 1..80: mol_type = other DNA
tcatgtctgtaatcccagcactttgggaggctcgggcaagtggatcacctgaggttgggaggttgagaccagcctggaca

SEQ ID NO: 96866 - DNA, 80 bp, synthetic construct
  source 1..80: mol_type = other DNA
tgggcaacagagcgagactccatctcaaaaaaataataaataagaaaaaataaataagaatatgtgatgttaaattctac

SEQ ID NO: 96867 - DNA, 80 bp, synthetic construct
  source 1..80: mol_type = other DNA
tgccaccatgcccaactaacttttgtatttttagtagagacggggtttcgccgtgttggccaggctggtctcgaactcct

SEQ ID NO: 96868 - DNA, 80 bp, synthetic construct; identical to SEQ ID NO: 18224
  source 1..80: mol_type = other DNA

SEQ ID NO: 96869 - DNA, 80 bp, synthetic construct
  source 1..80: mol_type = other DNA
ccgtgcctggccaaaagcaaattttttaaaaattccaatttgagttgtgatctagaaagggaggatggagtggaagaaga

SEQ ID NO: 96870 - DNA, 80 bp, synthetic construct
  source 1..80: mol_type = other DNA
tcacagggcggcggtcccatctcacggcatcttaggcttccaggaaggattttcgagaggcacttttatatatttataga

SEQ ID NO: 96871 - DNA, 80 bp, synthetic construct
  source 1..80: mol_type = other DNA
agggcttcagtacgctcttttctctttgataagtgctggagatttgcctaatacaagtttaagaagtttaaacatttaca

SEQ ID NO: 96872 - DNA, 80 bp, synthetic construct; identical to SEQ ID NO: 18225
  source 1..80: mol_type = other DNA

SEQ ID NO: 96873 - DNA, 80 bp, synthetic construct
  source 1..80: mol_type = other DNA
acatacttgttcccatgcttgacacgcacagaaccccgcccagccttgcacttaacaggtgcataataatcccttaggaa

SEQ ID NO: 96874 - DNA, 80 bp, synthetic construct
  source 1..80: mol_type = other DNA
catataaactcattctgcaaagaacggggaccagtgaaattagcagtcagtgttttgaattcctgaaaggaaacagcgtc

SEQ ID NO: 96875 - DNA, 80 bp, synthetic construct; identical to SEQ ID NO: 18226
  source 1..80: mol_type = other DNA

SEQ ID NO: 96876 - DNA, 80 bp, synthetic construct
  source 1..80: mol_type = other DNA
ttaagcccgggaggtggaggttgcagtgagctgagatcgtgacattgcattccagcctgggcaacagaccgagaccccat

SEQ ID NO: 96877 - DNA, 80 bp, synthetic construct
  source 1..80: mol_type = other DNA
gactggggtcatttgcagggaggcaagaataatatttgacttgaatttcatatgcaggaactttctggagaaacgccagg

SEQ ID NO: 96878 - DNA, 80 bp, synthetic construct
  source 1..80: mol_type = other DNA
acgtatttgcctactatgcctgccaactgggatgaaaaagctttggatctggctaagtttctgtgaaccaggtaataaat

SEQ ID NO: 96879 - DNA, 80 bp, synthetic construct; identical to SEQ ID NO: 18227
  source 1..80: mol_type = other DNA

SEQ ID NO: 96880 - DNA, 80 bp, synthetic construct
  source 1..80: mol_type = other DNA
ttcttacggttctgggggctggaaagcccaaggtcacggtgccagccctgttggtttctggtgaggaccctcttcctggc

SEQ ID NO: 96881 - DNA, 80 bp, synthetic construct
  source 1..80: mol_type = other DNA
gggtcagggcttcaacgtatgaattcgggggacacgatctggtccacagcacggcacgagtcctccagctgcatgcaggt

SEQ ID NO: 96882 - DNA, 80 bp, synthetic construct
  source 1..80: mol_type = other DNA
aaacaaaaaaacccaggttttttttgcatcctggggactctgtgagctattcactgcttttaatacatttttgggatcca

SEQ ID NO: 96883 - DNA, 80 bp, synthetic construct; identical to SEQ ID NO: 18228
  source 1..80: mol_type = other DNA

SEQ ID NO: 96884 - DNA, 80 bp, synthetic construct
  source 1..80: mol_type = other DNA
cgttgctccgggagacgagatgtatcttgcaaccagctcagcggtggaagcagtggaagtgcagacagaaagccccatgg

SEQ ID NO: 96885 - DNA, 80 bp, synthetic construct
  source 1..80: mol_type = other DNA
ggagctgggctataacttccgcttcccccttcacacagagaccatgctcccaacccaccccaaacccgccagcaccctca

SEQ ID NO: 96886 - DNA, 80 bp, synthetic construct
  source 1..80: mol_type = other DNA
ccccagtgagtctggtgtgtgttgagtcctgtcctggcacctgcctctcaagggacctgcattcctgcctgggtcccgcc

SEQ ID NO: 96887 - DNA, 80 bp, synthetic construct
  source 1..80: mol_type = other DNA
ccttccctggcccctgtgcctactgaggtagttctgttatttcactgaggccgccacattcaatctgcaccttcccatgg

SEQ ID NO: 96888 - DNA, 80 bp, synthetic construct; identical to SEQ ID NO: 18229
  source 1..80: mol_type = other DNA

SEQ ID NO: 96889 - DNA, 80 bp, synthetic construct
  source 1..80: mol_type = other DNA
ttgttgttcaagccagttcgcgtttgagtttctgttacttccagccccaaaagcaccctagataggagagtctacctaat

SEQ ID NO: 96890 - DNA, 80 bp, synthetic construct
  source 1..80: mol_type = other DNA
aacaattttcttaaaatagatagaacagaccttgacaccctgaagtcaagcactgacagcctctgttttgaaaacaaagc

SEQ ID NO: 96891 - DNA, 80 bp, synthetic construct
  source 1..80: mol_type = other DNA
gaatggaggggatggagggggatgaagggggcagagggatggaaagggatggagggggacaggggattgaggggagagag

SEQ ID NO: 96892 - DNA, 80 bp, synthetic construct; identical to SEQ ID NO: 18230
  source 1..80: mol_type = other DNA

SEQ ID NO: 96893 - DNA, 80 bp, synthetic construct
  source 1..80: mol_type = other DNA
ctggggtcccatccctgcagccacccatcctgcatcctgaagcgggggtcctgtcccctctctgcatctcgaaaatgccc

SEQ ID NO: 96894 - DNA, 80 bp, synthetic construct
  source 1..80: mol_type = other DNA
ggtgcctgagggcctggctccccagagcacgtcctccctccaaggcctctcatgcagaaccgagggtgaccagccacctc

SEQ ID NO: 96895 - DNA, 80 bp, synthetic construct; identical to SEQ ID NO: 18231
  source 1..80: mol_type = other DNA

SEQ ID NO: 96896 - DNA, 80 bp, synthetic construct
  source 1..80: mol_type = other DNA
tggtgactctgtacaaacactacacatactccttgtcctagattctttccccttatctgcctatcccaaccctgctactc

SEQ ID NO: 96897 - DNA, 80 bp, synthetic construct
  source 1..80: mol_type = other DNA
aatcctcctggcatagctcctagtgcccacagcacagtgagcctgtaacccgtatttctcattagttggctctctcattt

SEQ ID NO: 96898 - DNA, 80 bp, synthetic construct
  source 1..80: mol_type = other DNA
atggcactgcctgccaacctcaccttaggaaaagggtaaataagtttacaaacattaggatgggtgaaagcagccatctt

SEQ ID NO: 96899 - DNA, 80 bp, synthetic construct
  source 1..80: mol_type = other DNA
tcatctctcactgaggaaagaagggctcggctttgataaaggaatgctagactttagcaggtgagtggcgggggtaggat

SEQ ID NO: 96900 - DNA, 80 bp, synthetic construct; identical to SEQ ID NO: 18232
  source 1..80: mol_type = other DNA

SEQ ID NO: 96901 - DNA, 80 bp, synthetic construct
  source 1..80: mol_type = other DNA
tgcagcctgcccactcctcccctccaccgcaggagaactggagaaattctatgctagtcaccatctctttctgtgtccac

SEQ ID NO: 96902 - DNA, 80 bp, synthetic construct
  source 1..80: mol_type = other DNA
aaagccataagtccctttggggaagaacgggagagaggttaatagtatacatttttggtagtgcagtggagtccttcttc

SEQ ID NO: 96903 - DNA, 80 bp, synthetic construct; identical to SEQ ID NO: 18233
  source 1..80: mol_type = other DNA

SEQ ID NO: 96904 - DNA, 80 bp, synthetic construct
  source 1..80: mol_type = other DNA
ccacagtcttggtgaaaggtgtgtgagtggcaggtgagttggtctcaactggcaaatcctctccagtctccctgagccat

SEQ ID NO: 96905 - DNA, 80 bp, synthetic construct
  source 1..80: mol_type = other DNA
ccagctgatctactgttctgtgtaagagcaagtacttgtcataaatcctgcccttacggcaaatcaaccttgataaactc

SEQ ID NO: 96906 - DNA, 80 bp, synthetic construct
  source 1..80: mol_type = other DNA
ttgcccaagactacacttctgcccgtaagttcccccaataaaatcaccctataacaacacactggatttgtctgtcttgt

SEQ ID NO: 96907 - DNA, 80 bp, synthetic construct; identical to SEQ ID NO: 18234
  source 1..80: mol_type = other DNA

SEQ ID NO: 96908 - DNA, 80 bp, synthetic construct
  source 1..80: mol_type = other DNA
cctcttttcaaaggaccctgtgctctcggaccctgcgcaggattccagagcttgcacactccctagccggagcagccgct

SEQ ID NO: 96909 - DNA, 80 bp, synthetic construct
  source 1..80: mol_type = other DNA
gtggggacccggggcgtggcggggctgctcagtgcgtcccagctcctcctcggtgcccaaggaggctgccactgtggccg

SEQ ID NO: 96910 - DNA, 80 bp, synthetic construct
  source 1..80: mol_type = other DNA
aggcgagaagcaacccacgtgtccatcgacgcatgaacaaaatggggtccacatgcacagcagaatattactcagcctta

SEQ ID NO: 96911 - DNA, 80 bp, synthetic construct
  source 1..80: mol_type = other DNA
cagtcacaaacaaatactgtctgattccgctgacgagaggtccctggagtcatcaatgcatagagacaggaagtagaagg

SEQ ID NO: 96912 - DNA, 80 bp, synthetic construct; identical to SEQ ID NO: 18235
  source 1..80: mol_type = other DNA

SEQ ID NO: 96913 - DNA, 80 bp, synthetic construct
  source 1..80: mol_type = other DNA
atacagacagttcataccagacaggagaagacagataagacttgaagtgtggggaagacctcagcacccggggcccccag

SEQ ID NO: 96914 - DNA, 80 bp, synthetic construct
  source 1..80: mol_type = other DNA
ggatgaaggtgatctatttttagtgtagaggctggtataaggagttgctatagcgacagctggtggttacaaaccaggtc

SEQ ID NO: 96915 - DNA, 80 bp, synthetic construct
  source 1..80: mol_type = other DNA
gacatggggcgctggggactgcccatcagaggaaccgagggcttcagcagaaatgcatgctgagcctcaactaccaggtg

SEQ ID NO: 96916 - DNA, 80 bp, synthetic construct; identical to SEQ ID NO: 18236
  source 1..80: mol_type = other DNA

SEQ ID NO: 96917 - DNA, 80 bp, synthetic construct
  source 1..80: mol_type = other DNA
gtgaaagaagccagaccaaaaaaaaatcgtgtaaattcaaaaccagacgatgccaatcttgaggggaagtagctgggaga

SEQ ID NO: 96918 - DNA, 80 bp, synthetic construct
  source 1..80: mol_type = other DNA
ctccatatgcttacactttagcaaactttgccttaaacatttttagaagttagcacagcattgttagtcaagtatcaaaa

SEQ ID NO: 96919 - DNA, 80 bp, synthetic construct
  source 1..80: mol_type = other DNA
atgcgcctgtaatcccacctactcaggaagctgaggtaggagaatctcttgaacccagcaggcggaggttacagtgagcc

SEQ ID NO: 96920 - DNA, 80 bp, synthetic construct; identical to SEQ ID NO: 18237
  source 1..80: mol_type = other DNA

SEQ ID NO: 96921 - DNA, 80 bp, synthetic construct
  source 1..80: mol_type = other DNA
ttgctccttttttctgtgctgccaactggacatccctcctcagggtcactggccacagctgctcagaggtcactccagac

SEQ ID NO: 96922 - DNA, 80 bp, synthetic construct
  source 1..80: mol_type = other DNA
tcattgatgaactcactagcattagctgatgtgtcatctcttccagccaaaagtggggcccagccaagcatcttagtgat

SEQ ID NO: 96923 - DNA, 80 bp, synthetic construct
  source 1..80: mol_type = other DNA
tccgtggatccctccaggcccagcagagtgtttgaccacgggcctgaccgggaggggagacgccacctcctggggacttg

SEQ ID NO: 96924 - DNA, 80 bp, synthetic construct; identical to SEQ ID NO: 18238
  source 1..80: mol_type = other DNA

SEQ ID NO: 96925 - DNA, 80 bp, synthetic construct
  source 1..80: mol_type = other DNA
ggcttctctgtcaccgtccagagtcactattttaaaaatacacccccttttgaatctcctttctccctgcttcattattt

SEQ ID NO: 96926 - DNA, 80 bp, synthetic construct
  source 1..80: mol_type = other DNA
gctgctcccagagccacgccactgtcacgacagctcacctctcacagccctgatgagcgcccctgggagagcacgcacct

SEQ ID NO: 96927 - DNA, 80 bp, synthetic construct
  source 1..80: mol_type = other DNA
gctgctttgctaccctgccaccctgtgaggtgacagccgcctggcctgctgagtgactccgggagtcctcggggagcagc

SEQ ID NO: 96928 - DNA, 80 bp, synthetic construct; identical to SEQ ID NO: 18239
  source 1..80: mol_type = other DNA

SEQ ID NO: 96929 - DNA, 80 bp, synthetic construct
  source 1..80: mol_type = other DNA
gggttgggggagggacagcctcagccccagctgtctggcacataataggctcttaatagtgggctcagccccagctctgt

SEQ ID NO: 96930 - DNA, 80 bp, synthetic construct
  source 1..80: mol_type = other DNA
gctgctgtgcccagcctcagcctcatctcctacctgccagagaccggctcctgtggctctgcctgctgccgtccagcccc

SEQ ID NO: 96931 - DNA, 80 bp, synthetic construct; identical to SEQ ID NO: 18240
  source 1..80: mol_type = other DNA

SEQ ID NO: 96932 - DNA, 80 bp, synthetic construct
  source 1..80: mol_type = other DNA
caggtggtaatgcctacacaataatgggaatgcatacgtgaaatggtgaagatggtaaatttgtattatgtacatctgac

SEQ ID NO: 96933 - DNA, 80 bp, synthetic construct
  source 1..80: mol_type = other DNA
tgaggatgcaggtgagaatgacagaacctgtcattgttaaccctggaagacagatgctgttatactgttctccctacttc

SEQ ID NO: 96934 - DNA, 80 bp, synthetic construct
  source 1..80: mol_type = other DNA
aaaataaaaagaaaatttctattggaaaaaggcaaacatatatattgggaaatttcagggcaaaaccaatagtgatacca

SEQ ID NO: 96935 - DNA, 80 bp, synthetic construct
  source 1..80: mol_type = other DNA
actcagccaagggcaggagagccatggcacgcagtattggggtgacctgaatgttcatgggccaggaaggatgctggcgt

SEQ ID NO: 96936 - DNA, 80 bp, synthetic construct; identical to SEQ ID NO: 18241
  source 1..80: mol_type = other DNA

SEQ ID NO: 96937 - DNA, 80 bp, synthetic construct
  source 1..80: mol_type = other DNA
tcacttgtctagcgcctggagcctgaaagctggagaggtggggagcttcccttctgtgccagacatggcctccctgcctg

SEQ ID NO: 96938 - DNA, 80 bp, synthetic construct
  source 1..80: mol_type = other DNA
ggctgcagggccttgatttgatggctgtggggagagctctgtgtgtgtgtgtgcgcacaggtacatgacatgtgtgtgcg

SEQ ID NO: 96939 - DNA, 80 bp, synthetic construct
  source 1..80: mol_type = other DNA
gacctgtgccaacagcctaggtgggcttcctgtggagaggagggaggagaagtcaatgacagggatttcatgaccctcac

SEQ ID NO: 96940 - DNA, 80 bp, synthetic construct; identical to SEQ ID NO: 18242
  source 1..80: mol_type = other DNA

SEQ ID NO: 96941 - DNA, 80 bp, synthetic construct
  source 1..80: mol_type = other DNA
cacggctcattgcagccttgacctccccaggcttaagcaatcctcccaactcagccttccaattagctgggactaccgac

SEQ ID NO: 96942 - DNA, 80 bp, synthetic construct
  source 1..80: mol_type = other DNA
attctatctccgggaataactgtatgaaggagagggcgttgctgagagggaatttaaaacacaaaaccctgaagcaatcc

SEQ ID NO: 96943 - DNA, 80 bp, synthetic construct; identical to SEQ ID NO: 18243
  source 1..80: mol_type = other DNA

SEQ ID NO: 96944 - DNA, 80 bp, synthetic construct
  source 1..80: mol_type = other DNA
ggtttcatcatgttgaccaggctggtctcaaactcctgacctcaggtgatccacctgcctcagcctcctgaagtgctggg

SEQ ID NO: 96945 - DNA, 80 bp, synthetic construct
  source 1..80: mol_type = other DNA
acgcccaacactgtctgtggggcacagggctcccgcctcccacccagcctagctcttggctcttctcactgacacactaa

SEQ ID NO: 96946 - DNA, 80 bp, synthetic construct
  source 1..80: mol_type = other DNA
ctgcatccaggctcttacaaaacttggttgagatgtaaacattgtttttgatgtcagaagcgtaggagacaggatgacag

SEQ ID NO: 96947 - DNA, 80 bp, synthetic construct; identical to SEQ ID NO: 18244
  source 1..80: mol_type = other DNA

SEQ ID NO: 96948 - DNA, 80 bp, synthetic construct
  source 1..80: mol_type = other DNA
tcccacttcagctttctgagtagctgggaccatgggtgtgcaccaccatgcctggctaattttttatttttttgtagaga

SEQ ID NO: 96949 - DNA, 80 bp, synthetic construct
  source 1..80: mol_type = other DNA
aactctactcgattagacgccgctctctagttctctttatggggctttcttcttcacaagattgaacactctctgggttc

SEQ ID NO: 96950 - DNA, 80 bp, synthetic construct
  source 1..80: mol_type = other DNA
gttcagacattttgccaaagtcacctccctgttacacataatgacaatatttttccacttaacacatcacattccggtca

SEQ ID NO: 96951 - DNA, 80 bp, synthetic construct; identical to SEQ ID NO: 18245
  source 1..80: mol_type = other DNA

SEQ ID NO: 96952 - DNA, 80 bp, synthetic construct
  source 1..80: mol_type = other DNA
atttttttgtagagagaaggtctcattatgttgcccaggcttgtctcaaactcctgggttcaagtgatccttcctccttg

SEQ ID NO: 96953 - DNA, 80 bp, synthetic construct
  source 1..80: mol_type = other DNA
cctgtcttagcctcccgagtagctgggactatatgcgcacgccaccacgcccagctaattttttgtatttttagtagaga

SEQ ID NO: 96954 - DNA, 80 bp, synthetic construct
  source 1..80: mol_type = other DNA
ttaataaatgaaatctgacatctaattttgagtgggcaggtcttaaccaggtgtggagctaagaaagctttggaatcgac

SEQ ID NO: 96955 - DNA, 80 bp, synthetic construct
  source 1..80: mol_type = other DNA
atgcaagcttctcctcatggggcacaaattaggcaggtgtttcccctcccacattagcccacgatctgtcagattactcc

SEQ ID NO: 96956 - DNA, 80 bp, synthetic construct; identical to SEQ ID NO: 18246
  source 1..80: mol_type = other DNA

SEQ ID NO: 96957 - DNA, 80 bp, synthetic construct
  source 1..80: mol_type = other DNA
tggaaacagctactgcttaggagggtgtgcacacacgccgtggggttccctcccaaggacagaccaccaggggctcggga

SEQ ID NO: 96958 - DNA, 80 bp, synthetic construct
  source 1..80: mol_type = other DNA
agaaccggtgtcagccccaggtggccgggagccagaggagcatcagcccgacaggcacagggcgccccaaaagctcagag

SEQ ID NO: 96959 - DNA, 80 bp, synthetic construct
  source 1..80: mol_type = other DNA
tgtccttaagtagcaagaagctgccggaagcgcaaacagaacttcgcaggggatttgttgatgtagttaaggtcagctgc

SEQ ID NO: 96960 - DNA, 80 bp, synthetic construct; identical to SEQ ID NO: 18247
  source 1..80: mol_type = other DNA

SEQ ID NO: 96961 - DNA, 80 bp, synthetic construct
  source 1..80: mol_type = other DNA
taacggaaggtcttcggcaaatgcgtaatttgagctctggacttgctgagaattgcagcatgacagagctggaagagatt

SEQ ID NO: 96962 - DNA, 80 bp, synthetic construct
  source 1..80: mol_type = other DNA
tgtcgccaatggtagaaccaggactggagttctaatctccttgactcctaagccaaaccgctgatcaagtaaaacctaaa

SEQ ID NO: 96963 - DNA, 80 bp, synthetic construct
  source 1..80: mol_type = other DNA
ccagctttgtgaccatcagaaagttacttcccatttctgaacctcagtttcccccttagtgaactaagacaagaccaggt

SEQ ID NO: 96964 - DNA, 80 bp, synthetic construct; identical to SEQ ID NO: 18248
  source 1..80: mol_type = other DNA

SEQ ID NO: 96965 - DNA, 80 bp, synthetic construct
  source 1..80: mol_type = other DNA
ccaaaactgcaacgccatcagtttcttcagcggaattgttattatctacggctcgtccgaaaacaaggggatggagtgtg

SEQ ID NO: 96966 - DNA, 80 bp, synthetic construct
  source 1..80: mol_type = other DNA
gatgcctgatgagataaagatggctccacactcgggcaacaggaaggagggcaagggaagtcttccattctatccccatg

SEQ ID NO: 96967 - DNA, 80 bp, synthetic construct; identical to SEQ ID NO: 18249
  source 1..80: mol_type = other DNA

SEQ ID NO: 96968 - DNA, 80 bp, synthetic construct
  source 1..80: mol_type = other DNA
catccacagaagccagagatgcccagatctgccattcccacggggcctccatccacagaagccagagatgcccagatctg

SEQ ID NO: 96969 - DNA, 80 bp, synthetic construct
  source 1..80: mol_type = other DNA
gccctaacgcacaagctggaaggttgtgggtttacggaaatgagggcaaggaacacctggcctgcccagggcggaaaacc

SEQ ID NO: 96970 - DNA, 80 bp, synthetic construct
  source 1..80: mol_type = other DNA
aatgctaattattggtttgctgttaataaatatgtgggtaaatctctgttggggctctcagctctgaaggctgtgagacc

SEQ ID NO: 96971 - DNA, 80 bp, synthetic construct
  source 1..80: mol_type = other DNA
atccccgtgagatgaaaccctggaagctcagctcccaccccagatctgccactcccatggggcctccatccacagaagcc

SEQ ID NO: 96972 - DNA, 80 bp, synthetic construct; identical to SEQ ID NO: 18250
  source 1..80: mol_type = other DNA

SEQ ID NO: 96973 - DNA, 80 bp, synthetic construct
  source 1..80: mol_type = other DNA
ttatttatttatttatttatttatttatctatttttatttattgagacagagttttgctcttgttgcccaggctggagtg

SEQ ID NO: 96974 - DNA, 80 bp, synthetic construct
  source 1..80: mol_type = other DNA
tggtctcgaactcctggcttcaagtgatccacccgccttggcctcccaacatgctgggattacaggtgtgagccaccaca

SEQ ID NO: 96975 - DNA, 80 bp, synthetic construct; identical to SEQ ID NO: 18251
  source 1..80: mol_type = other DNA

SEQ ID NO: 96976 - DNA, 80 bp, synthetic construct
  source 1..80: mol_type = other DNA
tacctggccaggctcctcctcccgggctgctggttagctgcagccaacagtgggcacagcagacgcccgaaggagggagg

SEQ ID NO: 96977 - DNA, 80 bp, synthetic construct
  source 1..80: mol_type = other DNA
agcagccctgctgatacgaacccgagttactgcaccagtcctagggggttcctggcagcctgcccacacctttgaaagta

SEQ ID NO: 96978 - DNA, 80 bp, synthetic construct
  source 1..80: mol_type = other DNA
tggagacaaagataaacaatgctaactgcatgaaaaagccgtgagtatgtgagccgtggctgcaagtgtcgtcagcacaa

SEQ ID NO: 96979 - DNA, 80 bp, synthetic construct; identical to SEQ ID NO: 18252
  source 1..80: mol_type = other DNA

SEQ ID NO: 96980 - DNA, 80 bp, synthetic construct
  source 1..80: mol_type = other DNA
gattgcttgagcccgggaggtccaggctctagtgagccatgatcctgccactgcacatcagcctgggcaactgagtgaga

SEQ ID NO: 96981 - DNA, 80 bp, synthetic construct
  source 1..80: mol_type = other DNA
tgaaaaggttttgtttcagccagtgtactattcttacactacataatacaacggacagaaagaacatttcaaggccgggc

SEQ ID NO: 96982 - DNA, 80 bp, synthetic construct
  source 1..80: mol_type = other DNA
attagggaggctgaggcaggagaatcgcttgaaccaggaggcagaggttgcgatgagccgagatcatgccattgcactcc

SEQ ID NO: 96983 - DNA, 80 bp, synthetic construct; identical to SEQ ID NO: 18253
  source 1..80: mol_type = other DNA

SEQ ID NO: 96984 - DNA, 80 bp, synthetic construct
  source 1..80: mol_type = other DNA
ccacacatgagcagggcaggtataattaacatttcattgaaattgaataactgagggtcagagaagtagtttgacctgga

SEQ ID NO: 96985 - DNA, 80 bp, synthetic construct
  source 1..80: mol_type = other DNA
gaccgctgtggactgaagggatttggaaaagaatttctctctacatcctgatttttcattttaggctgggaaatttaaag

SEQ ID NO: 96986 - DNA, 80 bp, synthetic construct
  source 1..80: mol_type = other DNA
tgaaaccccgtctctaccaaaaatacaaaaattagctgggcgtgatggtgcgcacctgtagtccccgctactcgagaggc

SEQ ID NO: 96987 - DNA, 80 bp, synthetic construct; identical to SEQ ID NO: 18254
  source 1..80: mol_type = other DNA

SEQ ID NO: 96988 - DNA, 80 bp, synthetic construct
  source 1..80: mol_type = other DNA
ctgtttgactcacacatgcctgaaattccttacatgagggacaaagctttggatcccacgattagagatgaacgctgatg

SEQ ID NO: 96989 - DNA, 80 bp, synthetic construct
  source 1..80: mol_type = other DNA
aaactccctgccacaactgtgaccctgctcagagttccttctaacagaatgcttttcacactcagaattcttttttaaag

SEQ ID NO: 96990 - DNA, 80 bp, synthetic construct
  source 1..80: mol_type = other DNA
ggcagatgcctttatctcttagcagtgccccgtgctgtgtggccaaggcttccaggtcaccattctgacactaggtttat

SEQ ID NO: 96991 - DNA, 80 bp, synthetic construct; identical to SEQ ID NO: 18255
  source 1..80: mol_type = other DNA

SEQ ID NO: 96992 - DNA, 80 bp, synthetic construct
  source 1..80: mol_type = other DNA
ctggagccagggaggctgtgctgactgctcctctgccctcggcagggctccaggcttggccagccagggctgggctgcgg

SEQ ID NO: 96993 - DNA, 80 bp, synthetic construct
  source 1..80: mol_type = other DNA
gcagatgggctcgaagatggagcacggtcacccctgcttcctgcacatgaggataagtggcgtgaaggcgaccacccttc

SEQ ID NO: 96994 - DNA, 80 bp, synthetic construct
  source 1..80: mol_type = other DNA
ggcacatgttgtcccactaacgtggtgctggtccaggctgcaggttggagccccaccccagccttatcgcctggtgaatg

SEQ ID NO: 96995 - DNA, 80 bp, synthetic construct; identical to SEQ ID NO: 18256
  source 1..80: mol_type = other DNA

SEQ ID NO: 96996 - DNA, 80 bp, synthetic construct
  source 1..80: mol_type = other DNA
ttcatgagactggcacttcccagggcagggctgctgaggcctgggagcaccgcgcaggcagaatcagcccggccgaccga

SEQ ID NO: 96997 - DNA, 80 bp, synthetic construct
  source 1..80: mol_type = other DNA
agggaggccagccatgactattcagttcaagaaataacatttttcaaaaacccagaagttcagaggtgctcagtgatttg

SEQ ID NO: 96998 - DNA, 80 bp, synthetic construct
  source 1..80: mol_type = other DNA
aggtgaggatgcactactcaaaaacttcccgctcatcctgaacctttgcggatcacgaggccatacctgcaaagcaccca

SEQ ID NO: 96999 - DNA, 80 bp, synthetic construct; identical to SEQ ID NO: 18257
  source 1..80: mol_type = other DNA

SEQ ID NO: 97000 - DNA, 80 bp, synthetic construct
  source 1..80: mol_type = other DNA
tctgagtgacaagagggtgatttttttggcagagacaaaccacctcagctcacacagctccactcacaccagcgatatct

SEQ ID NO: 97001 - DNA, 80 bp, synthetic construct
  source 1..80: mol_type = other DNA
gggcatcgcattcccccatggagggctcggtggggcccttttcagtcccttctcgtggtgcctggcaaccctgcagtcgc

SEQ ID NO: 97002 - DNA, 80 bp, synthetic construct
  source 1..80: mol_type = other DNA
agccatttgggttttctgtttaattctctttaagtgatttaattctcttacaagtgctgaagtgagctgggaatgcaccg

SEQ ID NO: 97003 - DNA, 80 bp, synthetic construct
  source 1..80: mol_type = other DNA
cctagcttagattatgagggctgagctgaagtttgcctcagatctctttcttcttatagtgaaatatatttcaaaacaag

SEQ ID NO: 97004 - DNA, 80 bp, synthetic construct; identical to SEQ ID NO: 18258
  source 1..80: mol_type = other DNA

SEQ ID NO: 97005 - DNA, 80 bp, synthetic construct
  source 1..80: mol_type = other DNA
gggagagagcgctgggctccacgattctggcctggccaggcagcgcttggacttgcaataggagctccacaccttggcag

SEQ ID NO: 97006 - DNA, 80 bp, synthetic construct
  source 1..80: mol_type = other DNA
taacaatttactctttttaaccacacatactaagaaaactttattcgcagcaaattgtgatggggcgggggagagggtag

SEQ ID NO: 97007 - DNA, 80 bp, synthetic construct; identical to SEQ ID NO: 18259
  source 1..80: mol_type = other DNA

SEQ ID NO: 97008 - DNA, 80 bp, synthetic construct
  source 1..80: mol_type = other DNA
ctggccaacatggtgaaactccgtctctactaaaaatacaaaaattagccgggcgtggtggcgggcgcctgtaatcccag

SEQ ID NO: 97009 - DNA, 80 bp, synthetic construct
  source 1..80: mol_type = other DNA
aatgcatctgacacttaaaaaagatgtatgctctggtactcgatggcttaagttccagatatctagaaagttagctcacg

SEQ ID NO: 97010 - DNA, 80 bp, synthetic construct
  source 1..80: mol_type = other DNA
tttctgtttatagcatcactctcagtggggctaagggggtgaaaatcacctcttggagggggcaaaaaaacttacttttt

SEQ ID NO: 97011 - DNA, 80 bp, synthetic construct
  source 1..80: mol_type = other DNA
ctaatttttgtagtttttgtagagatggggtttcaccatgttgcccagactggtctcaaactcttggactcaagtgatcc

SEQ ID NO: 97012 - DNA, 80 bp, synthetic construct; identical to SEQ ID NO: 18260
  source 1..80: mol_type = other DNA

SEQ ID NO: 97013 - DNA, 80 bp, synthetic construct
  source 1..80: mol_type = other DNA
ggcatatgatttttaaaggcttcttttggggtttggttgaggagggtgggaactactgcttttcaatataaattgttttg

SEQ ID NO: 97014 - DNA, 80 bp, synthetic construct
  source 1..80: mol_type = other DNA
atcagcaaggtacattctcaaaaactccctttggcaaaagctaaaataaaaataaaaaaggttgcaaaactccgtcatca

SEQ ID NO: 97015 - DNA, 80 bp, synthetic construct
  source 1..80: mol_type = other DNA
agtatttgctaatcattcgccaaaattttaaaacacagttttctgggctttaggcaacatggggctggcctgggtgtttt

SEQ ID NO: 97016 - DNA, 80 bp, synthetic construct; identical to SEQ ID NO: 18261
  source 1..80: mol_type = other DNA

SEQ ID NO: 97017 - DNA, 80 bp, synthetic construct
  source 1..80: mol_type = other DNA
atgaaggtgacgttggtcatcaaaactctgctgttatgaaacatttttgtgcatcagaggacaataataagagagtgaaa

SEQ ID NO: 97018 - DNA, 80 bp, synthetic construct; identical to SEQ ID NO: 18262
  source 1..80: mol_type = other DNA

SEQ ID NO: 97019 - DNA, 80 bp, synthetic construct
  source 1..80: mol_type = other DNA
gcacatgctcatagccccagctactcgggaggctgaggcaggagaattgcttgaacctgggaagcagaggttgtagtgag

SEQ ID NO: 97020 - DNA, 80 bp, synthetic construct
  source 1..80: mol_type = other DNA
ttcctcaacaagttaaacacaaaatgaccatatgacccagaacctgcagtcctaggtatatacccaagagaactgcaaac

SEQ ID NO: 97021 - DNA, 80 bp, synthetic construct
  source 1..80: mol_type = other DNA
tgccacaaagtagatcgactttcaaaacaatctgctaagtgatagaagccacatgcagaagcccgcaggtcatggggttc

SEQ ID NO: 97022 - DNA, 80 bp, synthetic construct; identical to SEQ ID NO: 18263
  source 1..80: mol_type = other DNA

SEQ ID NO: 97023 - DNA, 80 bp, synthetic construct
  source 1..80: mol_type = other DNA
gcattttaccacaaaaaaagttaaacctacaaatactaaaggaaaatatggattaattctacaatctggatttctaatga

SEQ ID NO: 97024 - DNA, 80 bp, synthetic construct
  source 1..80: mol_type = other DNA
ctcagctcactgcaagctctgcctcccaggttcatgctattctcctgcctcagcctcccaagtagctgggactacaggtg

SEQ ID NO: 97025 - DNA, 80 bp, synthetic construct
  source 1..80: mol_type = other DNA
accacgcccggcccaaagatgccatattttttttacagctacatggtactctgctatgtagctgtaacttctttatttca

SEQ ID NO: 97026 - DNA, 80 bp, synthetic construct
  source 1..80: mol_type = other DNA
gacaggcacatgtctccatgcccagctatttttgtttgtttgtttgtttgtttgtttgtttggtagagacagggtctcgc

SEQ ID NO: 97027 - DNA, 80 bp, synthetic construct; identical to SEQ ID NO: 18264
  source 1..80: mol_type = other DNA

SEQ ID NO: 97028 - DNA, 80 bp, synthetic construct
  source 1..80: mol_type = other DNA
cttgataatgaagacatggaatcaacctaaatgcccatcaatgacagaccagataaagaaaatgtagtacatatgtgctg

SEQ ID NO: 97029 - DNA, 80 bp, synthetic construct
  source 1..80: mol_type = other DNA
acacaaagaaagaaacgacaaacactgggggctacttaagaggcagagggtgggaggagggagaggaacggaaaagataa

SEQ ID NO: 97030 - DNA, 80 bp, synthetic construct
  source 1..80: mol_type = other DNA
atggcactgaataggatacaaatccatgagtccatagatacatacacacacagggagagaagaaaaacctgttctttaaa

SEQ ID NO: 97031 - DNA, 80 bp, synthetic construct; identical to SEQ ID NO: 18265
  source 1..80: mol_type = other DNA

SEQ ID NO: 97032 - DNA, 80 bp, synthetic construct
  source 1..80: mol_type = other DNA
ggaggctggctctgatggtgaggaaatgtcgaagggcaggtgacacaagaactggccgttgtcctcctgaaaagtgctca

SEQ ID NO: 97033 - DNA, 80 bp, synthetic construct
  source 1..80: mol_type = other DNA
caaggcacaaaatgtgaatgaagcctgcagcttagctgatagcatgatatttgtgctgatttcctgattttgacaattat

SEQ ID NO: 97034 - DNA, 80 bp, synthetic construct
  source 1..80: mol_type = other DNA
gagatcgtgagaaatgagatatgggcagatctggtgaaatgctaacatcgggcaatctgggtgaaaaggatatgagaact

SEQ ID NO: 97035 - DNA, 80 bp, synthetic construct; identical to SEQ ID NO: 18266
  source 1..80: mol_type = other DNA

SEQ ID NO: 97036 - DNA, 80 bp, synthetic construct
  source 1..80: mol_type = other DNA
attagccgggcatgatggtgcacacctgtagtcgcagctactcaggaggttggggtaggagaatcgcttgagttgcagtg

SEQ ID NO: 97037 - DNA, 80 bp, synthetic construct
  source 1..80: mol_type = other DNA
tgagagaactagaggactctaactcgctgagggcaaggagattcttccgggaatttttcgttggcttctcccaaataata

SEQ ID NO: 97038 - DNA, 80 bp, synthetic construct; identical to SEQ ID NO: 18267
  source 1..80: mol_type = other DNA

SEQ ID NO: 97039 - DNA, 80 bp, synthetic construct
  source 1..80: mol_type = other DNA
taggggcagacttgggcaagccagagtcaatcttttttgtcgggtacagggtaaagctcacagtaattctggatcatggc

SEQ ID NO: 97040 - DNA, 80 bp, synthetic construct
  source 1..80: mol_type = other DNA
ctcactctccagcacttcgagctgcacctcactccccagcacttctccaggccctaccttcgcggtcccctcagttcccc

SEQ ID NO: 97041 - DNA, 80 bp, synthetic construct
  source 1..80: mol_type = other DNA
gtgctcttgggcctgacaaaggggcgatggagaccccgtgaagccccgacagagagttctgaagcccggatgccccttca

SEQ ID NO: 97042 - DNA, 80 bp, synthetic construct
  source 1..80: mol_type = other DNA
cttgaaggaatcgggaatctgggaggcacggcacagcacagcctcaagggtgttctggctccagggtgttttctagcaga

SEQ ID NO: 97043 - DNA, 80 bp, synthetic construct; identical to SEQ ID NO: 18268
  source 1..80: mol_type = other DNA

SEQ ID NO: 97044 - DNA, 80 bp, synthetic construct
  source 1..80: mol_type = other DNA
caccattagtttatactttgtctatggcttcgtagttgcaaaagagaccacgtggccttcgaagtctaagacatttacca

SEQ ID NO: 97045 - DNA, 80 bp, synthetic construct
  source 1..80: mol_type = other DNA
cttcccagtttcaccccggtgcctaaagcaactcactttagcagttgctcgtgttctttggtattaatgatataaatcac

SEQ ID NO: 97046 - DNA, 80 bp, synthetic construct
  source 1..80: mol_type = other DNA
ctctccccctggaccaccagtgatgccggcagccacaggtccctctgcccccaaagcaggtctcgcctctgcaccatcgg

SEQ ID NO: 97047 - DNA, 80 bp, synthetic construct; identical to SEQ ID NO: 18269
  source 1..80: mol_type = other DNA

SEQ ID NO: 97048 - DNA, 80 bp, synthetic construct
  source 1..80: mol_type = other DNA
cccgctgggcaggagacagggagacaccttgggcaacatctgaccatagctacagcccctttggctcccgttcctgccag

SEQ ID NO: 97049 - DNA, 80 bp, synthetic construct
  source 1..80: mol_type = other DNA
acgcagccacataatcagaactgtgacgtccgtgtattaaactccatctgcttttagtacggagagtaaccctcttccag

SEQ ID NO: 97050 - DNA, 80 bp, synthetic construct
  source 1..80: mol_type = other DNA
tatatttagggacaatggccctattgatgctcactcgctgaaccactgcctggcgtttgttctgcggggcaagctggagt

SEQ ID NO: 97051 - DNA, 80 bp, synthetic construct; identical to SEQ ID NO: 18270
  source 1..80: mol_type = other DNA

SEQ ID NO: 97052 - DNA, 80 bp, synthetic construct
  source 1..80: mol_type = other DNA
aattccttttggatgttcaaaatacacatgacctcggtcataattgtgagctagtcttggaaacggacagggggaaaatc

SEQ ID NO: 97053 - DNA, 80 bp, synthetic construct
  source 1..80: mol_type = other DNA
gcccccgccaccccatcatgaaatcaaccgtgtgggtcagataaagcagctgaaacaatagaatcgaaaataaagtacct

SEQ ID NO: 97054 - DNA, 80 bp, synthetic construct; identical to SEQ ID NO: 18271
  source 1..80: mol_type = other DNA

SEQ ID NO: 97055 - DNA, 80 bp, synthetic construct
  source 1..80: mol_type = other DNA
agagtagccttcggtgtaatcaaagtaggtggctgtctaggccagtgattttcaactcttttttttttttctagtaggac

SEQ ID NO: 97056 - DNA, 80 bp, synthetic construct
  source 1..80: mol_type = other DNA
tttagggttctgggaagacagtcgcttccaaaaagagaatctgtggcatctggttttgatgctaggaattctttctttgt

SEQ ID NO: 97057 - DNA, 80 bp, synthetic construct
  source 1..80: mol_type = other DNA
tgttgagctctaggagctgggagcccacagaaaggaaaacagagcagggagatccaaggtccccagagacatggtgttct

SEQ ID NO: 97058 - DNA, 80 bp, synthetic construct; identical to SEQ ID NO: 18272
  source 1..80: mol_type = other DNA

SEQ ID NO: 97059 - DNA, 80 bp, synthetic construct
  source 1..80: mol_type = other DNA
ccagacatctctctgcattgcatccgatcgacatccgatggctttctgtatcgctcaattaaaacctggaatcctgacct

SEQ ID NO: 97060 - DNA, 80 bp, synthetic construct
  source 1..80: mol_type = other DNA
acctgtcctctccctggctccatctcaccactggccaaatgtctccatgtcagaggctattgctgacttgcccacataga

SEQ ID NO: 97061 - DNA, 80 bp, synthetic construct
  source 1..80: mol_type = other DNA
atccttgtccgctcctaacaccagctttcttctgtctgggaggcgcatttgaaggtgaaccgcactggaaaaaacccagg

SEQ ID NO: 97062 - DNA, 80 bp, synthetic construct; identical to SEQ ID NO: 18273
  source 1..80: mol_type = other DNA

SEQ ID NO: 97063 - DNA, 80 bp, synthetic construct
  source 1..80: mol_type = other DNA
gattatgtgggaatttatcaaagattagccttttctttttttaaaaaaggaagctgagatgggaggcaggccagagagaa

SEQ ID NO: 97064 - DNA, 80 bp, synthetic construct
  source 1..80: mol_type = other DNA
tagagtgcaatggcaggatctcggctcactgcaacctctgctgcccaagttcaagtgattctcctgtctcagcctcctga

SEQ ID NO: 97065 - DNA, 80 bp, synthetic construct; identical to SEQ ID NO: 18274
  source 1..80: mol_type = other DNA

SEQ ID NO: 97066 - DNA, 80 bp, synthetic construct
  source 1..80: mol_type = other DNA
cgctctgctttcctttccttgacaacgtgggggcagttaaagtctatctgtgctcccgtgccccatccctcctccagccc

SEQ ID NO: 97067 - DNA, 80 bp, synthetic construct
  source 1..80: mol_type = other DNA
gcttcgtggcatgaacagaaaaaaataactgaaaggaggctaagccacaaggatgcttatcacctacaataacgaacagt

SEQ ID NO: 97068 - DNA, 80 bp, synthetic construct
  source 1..80: mol_type = other DNA
aaatttagtttatagtttaaactacatacagtttaaagcaaggatgatactagcccttccccaaactaaaacaccattgc

SEQ ID NO: 97069 - DNA, 80 bp, synthetic construct
  source 1..80: mol_type = other DNA
tggccttttgagatgtctttccagacttctgcatttctggcaaccaatttgacctcacctggactcctgactcaccaccc

SEQ ID NO: 97070 - DNA, 80 bp, synthetic construct; identical to SEQ ID NO: 18275
  source 1..80: mol_type = other DNA

SEQ ID NO: 97071 - DNA, 80 bp, synthetic construct
  source 1..80: mol_type = other DNA
aaaggaagaaaaggaaatttatccccgtgtgtcttttttgttgttgttaggggacgcacgtttttcttaaatccctagcc

SEQ ID NO: 97072 - DNA, 80 bp, synthetic construct
  source 1..80: mol_type = other DNA
cctcagcgaggaacaaactgtgcacatggacaaatgtgatggacttagcgggagaaggggcccaggacaggtggggagaa

SEQ ID NO: 97073 - DNA, 80 bp, synthetic construct; identical to SEQ ID NO: 18276
  source 1..80: mol_type = other DNA

SEQ ID NO: 97074 - DNA, 80 bp, synthetic construct
  source 1..80: mol_type = other DNA
tgtttggggcagactagcccacgcacatcgaccagcacctctgagctgtgtgccgtagaacaagccacttgccttttgcc

SEQ ID NO: 97075 - DNA, 80 bp, synthetic construct
  source 1..80: mol_type = other DNA
gcccacagcgcggctccctgactgatggctggctgggataagggcaggtctgtgaggacaagcagcctcatcaagaccat

SEQ ID NO: 97076 - DNA, 80 bp, synthetic construct
  source 1..80: mol_type = other DNA
tacaaagaaccaactgaaaacgtccattaaactgaatccatcccctcgctaccagctcgccttaattgtcgggtgggctc

SEQ ID NO: 97077 - DNA, 80 bp, synthetic construct; identical to SEQ ID NO: 18277
  source 1..80: mol_type = other DNA

SEQ ID NO: 97078 - DNA, 80 bp, synthetic construct
  source 1..80: mol_type = other DNA
ttccttcccttcctggctactgaagctgctctcttggaaatcaccaatgacctgccaagtccaaagcctggccggacctc

SEQ ID NO: 97079 - DNA, 80 bp, synthetic construct
  source 1..80: mol_type = other DNA
tgtctgtctccagatgccgtgcctggtctggctgatgccgtccagggctatagctgctgcctgtgtcacctgacgagccc

SEQ ID NO: 97080 - DNA, 80 bp, synthetic construct
  source 1..80: mol_type = other DNA
ctacaggagttggtgtctaaaagggacaaaggcacactccaggtggagaggggcacaaatgaagttaaaaccaagttaga

SEQ ID NO: 97081 - DNA, 80 bp, synthetic construct; identical to SEQ ID NO: 18278
  source 1..80: mol_type = other DNA

SEQ ID NO: 97082 - DNA, 80 bp, synthetic construct
  source 1..80: mol_type = other DNA
acccagaggttggcgcccttccttggatgctttttcattttgctatttgtcctttaagctaacaaacactcaactccagc

SEQ ID NO: 97083 - DNA, 80 bp, synthetic construct
  source 1..80: mol_type = other DNA
cacgagtgctgtcaactccttagttcatgagtcctaccagaagcccggagacctcatgacctattcacactgtcctgcct

SEQ ID NO: 97084 - DNA, 80 bp, synthetic construct
  source 1..80: mol_type = other DNA
ctgtgaagcatggggaggctgcagtggggactccaaggtaacacacctgccctctgcctcactgaaaacaacagaagatc

SEQ ID NO: 97085 - DNA, 80 bp, synthetic construct; identical to SEQ ID NO: 18279
  source 1..80: mol_type = other DNA

SEQ ID NO: 97086 - DNA, 80 bp, synthetic construct
  source 1..80: mol_type = other DNA
caaccagatctcgtgagaactcattcactatcgccagaatagcaatgggaagtctgcccctacgattcaatcacctccca

SEQ ID NO: 97087 - DNA, 80 bp, synthetic construct
  source 1..80: mol_type = other DNA
gctccctgggtctccgtcatcactgggccttcttttaaggacaccagtcattctggactgagggcccacatgaatgacct

SEQ ID NO: 97088 - DNA, 80 bp, synthetic construct
  source 1..80: mol_type = other DNA
ctctatctaattgcacctgaaataaattcttcatcttgtctaattccccaattagccctggcctgataacttgattttca

SEQ ID NO: 97089 - DNA, 80 bp, synthetic construct
  source 1..80: mol_type = other DNA
caggaactgtaataaacagcaatttcagactcaattcatctcctttatctgtgacactgtgtgaatgggaacacaatgga

SEQ ID NO: 97090 - DNA, 80 bp, synthetic construct; identical to SEQ ID NO: 18280
  source 1..80: mol_type = other DNA

SEQ ID NO: 97091 - DNA, 80 bp, synthetic construct
  source 1..80: mol_type = other DNA
agtaacaacagacatgttcatctcactaaaaaggagaaaaccaaaggcgaggcgcccagatcgtggataagtcccaggag

SEQ ID NO: 97092 - DNA, 80 bp, synthetic construct
  source 1..80: mol_type = other DNA
tggggtctgctactgtgtgggaggctccctctcatttatccgtcaaggcccgctaaagtgtctccatttatcacaacacc

SEQ ID NO: 97093 - DNA, 80 bp, synthetic construct; identical to SEQ ID NO: 18281
  source 1..80: mol_type = other DNA

SEQ ID NO: 97094 - DNA, 80 bp, synthetic construct
  source 1..80: mol_type = other DNA
tgatgaccagcacagaccaggagaaagaacagacgcatggaacagaccccctcacagcctcagaaggagccggccctgcc

SEQ ID NO: 97095 - DNA, 80 bp, synthetic construct
  source 1..80: mol_type = other DNA
cctcagcctcccgagtaactgggattacaggcatctgccaccatgtgcggctagtttttgtatttttagtagagatgggg

SEQ ID NO: 97096 - DNA, 80 bp, synthetic construct
  source 1..80: mol_type = other DNA
aaatgaatacacctgtcatgatttgtagtcatccacactcgcttagatatcagtgcatgtgagtgaggctcaaagagtac

SEQ ID NO: 97097 - DNA, 80 bp, synthetic construct
  source 1..80: mol_type = other DNA
tggttcctcttattctgattatggagccagagttaagtgctgctgcccagagattctcatttctccacagcctccttttt

SEQ ID NO: 97098 - DNA, 80 bp, synthetic construct; identical to SEQ ID NO: 18282
  source 1..80: mol_type = other DNA

SEQ ID NO: 97099 - DNA, 80 bp, synthetic construct
  source 1..80: mol_type = other DNA
gtcatcattcatgaggccaaacttcctgcccaaattttaggatattcttgaggtaaggggaatacgcctgcaatgacccc

SEQ ID NO: 97100 - DNA, 80 bp, synthetic construct
  source 1..80: mol_type = other DNA
agcacgatcctggctcactgcagcctctgtctcctgagttcaagcgatcctcctgcctcagcctcccttagtagctcgga

SEQ ID NO: 97101 - DNA, 80 bp, synthetic construct; identical to SEQ ID NO: 18283
  source 1..80: mol_type = other DNA

SEQ ID NO: 97102 - DNA, 80 bp, synthetic construct
  source 1..80: mol_type = other DNA
taatccaatccccacttgcaagacctcaacagacttggagttctaatgcactgtggccttcctgtccccctgagatgctc

SEQ ID NO: 97103 - DNA, 80 bp, synthetic construct
  source 1..80: mol_type = other DNA
caaacctcagtcaagcaaagaagagaagacaagtgaaagtaaacatcaaagaaaatggcccaggaactttgaatgcagtt

SEQ ID NO: 97104 - DNA, 80 bp, synthetic construct
  source 1..80: mol_type = other DNA
tgactgctgtcactttaagaaaagaaaaagagacagacacacacagaggaaggccacaggatgatgaaggcagaggctga

SEQ ID NO: 97105 - DNA, 80 bp, synthetic construct
  source 1..80: mol_type = other DNA
atccgggcagcttaggccatgcagcctgtggtgcctgtgtgacagcccctgaaactaacctgtgggccatgaaggcacgg

SEQ ID NO: 97106 - DNA, 80 bp, synthetic construct; identical to SEQ ID NO: 18284
  source 1..80: mol_type = other DNA

SEQ ID NO: 97107 - DNA, 80 bp, synthetic construct
  source 1..80: mol_type = other DNA
ccaagggttaaatggaaacctgcccttttgaaagacttgctccattcctgagatcaaccagctgtctgatgctgcccctt

SEQ ID NO: 97108 - DNA, 80 bp, synthetic construct
  source 1..80: mol_type = other DNA
ttaagtctccaccccagcgtgaacatggatgcatgctgcacacaattagccaattatgcatgtctatgcttcctctttgt

SEQ ID NO: 97109 - DNA, 80 bp, synthetic construct; identical to SEQ ID NO: 18285
  source 1..80: mol_type = other DNA

SEQ ID NO: 97110 - DNA, 80 bp, synthetic construct
  source 1..80: mol_type = other DNA
tgagatagaaagtggcctccctcctggagaacccagtgaacaaaccaccatgccccacgccccatccccgactttagcat

SEQ ID NO: 97111 - DNA, 80 bp, synthetic construct
  source 1..80: mol_type = other DNA
attatctgcccacaatgtataggttgcttacaaaaataaccagccctcctctgttccttacttcaggctctaagatctgc

SEQ ID NO: 97112 - DNA, 80 bp, synthetic construct
  source 1..80: mol_type = other DNA
cttctatcagcaccacgtttcttgtctttccaagtctgctgatgctttcaaaatccccacgtcccaaactcagcaccatt

SEQ ID NO: 97113 - DNA, 80 bp, synthetic construct; identical to SEQ ID NO: 18286
  source 1..80: mol_type = other DNA

SEQ ID NO: 97114 - DNA, 80 bp, synthetic construct
  source 1..80: mol_type = other DNA
attcatcatctccttctggtctagcacgtgtttttcacgtttatattgttgttttgtttcattttctatttggagtggga

SEQ ID NO: 97115 - DNA, 80 bp, synthetic construct
  source 1..80: mol_type = other DNA
attgaaaaacaagttaagttgttggtgaattaatttcaaacaatttgctcagtgccttcaggcgccattctagaccctga

SEQ ID NO: 97116 - DNA, 80 bp, synthetic construct
  source 1..80: mol_type = other DNA
ctgcaaggagattgctactactttacccagggtgtcaaaggaaggcctttctactaaggtgagtcctttcaggaaatctg

SEQ ID NO: 97117 - DNA, 80 bp, synthetic construct; identical to SEQ ID NO: 18287
  source 1..80: mol_type = other DNA

SEQ ID NO: 97118 - DNA, 80 bp, synthetic construct
  source 1..80: mol_type = other DNA
gcctgacatcccaagatttagatattcaaatgttttggaggtacattacttaaaacacttaaagtttagttccacacgga

SEQ ID NO: 97119 - DNA, 80 bp, synthetic construct
  source 1..80: mol_type = other DNA
ggcatggtggtgtgcatctgcagttccacctattgcgggcaaagggcaggaggatcgcttgagcctgggaagttgaggct

SEQ ID NO: 97120 - DNA, 80 bp, synthetic construct
  source 1..80: mol_type = other DNA
agggagggagggaagggaagggaagggaagggaaggaaggaaaggaaggaaagaagggaagaaaggaaggaaggaaggga

SEQ ID NO: 97121 - DNA, 80 bp, synthetic construct; identical to SEQ ID NO: 18288
  source 1..80: mol_type = other DNA

SEQ ID NO: 97122 - DNA, 80 bp, synthetic construct
  source 1..80: mol_type = other DNA
acaatgcacttagaacacacacagacttttataaggagcaaaatttagcaacacgacattagatcattctggaggtcctg

SEQ ID NO: 97123 - DNA, 80 bp, synthetic construct
  source 1..80: mol_type = other DNA
aaaccaacttgcaaaatcttttgaagctaaagattcactgttctggaagctcctgcagccactcagccacgtaataattc

SEQ ID NO: 97124 - DNA, 80 bp, synthetic construct
  source 1..80: mol_type = other DNA
cgtgactgtgtctccatgacagctttgtttacaaaaagaggtggcacgccagattttgtcccggggctgattttgtcatt

SEQ ID NO: 97125 - DNA, 80 bp, synthetic construct
  source 1..80: mol_type = other DNA
agaacgccagccacactacgaatcctcacgctactgtacctctgaccagaggcaaatgttagtgaaagactacggcaact

SEQ ID NO: 97126 - DNA, 80 bp, synthetic construct; identical to SEQ ID NO: 18289
  source 1..80: mol_type = other DNA

SEQ ID NO: 97127 - DNA, 80 bp, synthetic construct
  source 1..80: mol_type = other DNA
tgagaccagcctggccaacatggcgaaaccctgtctctactaaaaatacaaaaattagccaggtgtggtggcgggcgcct

SEQ ID NO: 97128 - DNA, 80 bp, synthetic construct
  source 1..80: mol_type = other DNA
tcaagctctggtgtatatcagtattacctgaggagcctgtcaacactttagattctatgtttgtcatgtaggccataaat

SEQ ID NO: 97129 - DNA, 80 bp, synthetic construct
  source 1..80: mol_type = other DNA
ttgtatgtaggctcgttgggccacgtgtgatgagggcatccttgcgtgcatgcacacatgctggccaaggagggtgggat

SEQ ID NO: 97130 - DNA, 80 bp, synthetic construct; identical to SEQ ID NO: 18290
  source 1..80: mol_type = other DNA

SEQ ID NO: 97131 - DNA, 80 bp, synthetic construct
  source 1..80: mol_type = other DNA
agtcctgagggttcagctctttttggaattccgtaaatgcccccaaatccttccaacacattgtttgcttgttaaaaaag

SEQ ID NO: 97132 - DNA, 80 bp, synthetic construct
  source 1..80: mol_type = other DNA
ggaaatgcgctattacacgattaatgtctgctagagacaaaagcagtcccgttgatcagaagttcagctattcttggtac

SEQ ID NO: 97133 - DNA, 80 bp, synthetic construct; identical to SEQ ID NO: 18291
  source 1..80: mol_type = other DNA

SEQ ID NO: 97134 - DNA, 80 bp, synthetic construct
  source 1..80: mol_type = other DNA
gaaagccaaggagctggcctcactgattctcaagggcaccaacatgagcaattgccctggggaccaggcttgctctgttc

SEQ ID NO: 97135 - DNA, 80 bp, synthetic construct
  source 1..80: mol_type = other DNA
gccttctccatagtacctgacaagccagaagagtgaacctggggattttctaccaaggacattgaagggccttggaaata

SEQ ID NO: 97136 - DNA, 80 bp, synthetic construct
  source 1..80: mol_type = other DNA
cccaggtcccgctcccttcgcagctgtctgcacttctgccataggaaaaaagcaattcacaggctcactgagctcacaga

SEQ ID NO: 97137 - DNA, 80 bp, synthetic construct; identical to SEQ ID NO: 18292
  source 1..80: mol_type = other DNA

SEQ ID NO: 97138 - DNA, 80 bp, synthetic construct
  source 1..80: mol_type = other DNA
agatgggttgggggactcactctctgactccacctgcctgtctcggcccctggctttaaggaaagggtggaggggagtct

SEQ ID NO: 97139 - DNA, 80 bp, synthetic construct
  source 1..80: mol_type = other DNA
gtgtctgctgggacccgctgagatccagaggggctgggagtcttggatccacctctgatagaggttgagtgtttcttccc

SEQ ID NO: 97140 - DNA, 80 bp, synthetic construct
  source 1..80: mol_type = other DNA
cctctctcttgctcccttgcgtgtgagctctgcataccccggctttccttcgccttcctccatgagtggaagcagcctga

SEQ ID NO: 97141 - DNA, 80 bp, synthetic construct
  source 1..80: mol_type = other DNA
aagcaaggatgataatagtacctccctgaaaccaactgttccttgctcagggactgaaaaccagctttgtgagatgaatg

SEQ ID NO: 97142 - DNA, 80 bp, synthetic construct; identical to SEQ ID NO: 18293
  source 1..80: mol_type = other DNA

SEQ ID NO: 97143 - DNA, 80 bp, synthetic construct
  source 1..80: mol_type = other DNA
gatttgagtgatagctccatctcccatgtggctggcctcacattaaacattttactacaataccaagatctcggtgaatt

SEQ ID NO: 97144 - DNA, 80 bp, synthetic construct
  source 1..80: mol_type = other DNA
tgcaaaatggagcaacaccgcctcccatcctggacctccacactcagccatctgtaggttctccccatgccttctccaag

SEQ ID NO: 97145 - DNA, 80 bp, synthetic construct; identical to SEQ ID NO: 18294
  source 1..80: mol_type = other DNA

SEQ ID NO: 97146 - DNA, 80 bp, synthetic construct
  source 1..80: mol_type = other DNA
aaagcaacattttccttccacccatccactcctaattcttcacttagaagctaccactagcagtccaatgcatgtccttt

SEQ ID NO: 97147 - DNA, 80 bp, synthetic construct
  source 1..80: mol_type = other DNA
attatatgcatatgctttcttcccccataaatgctttccttacagtcccttctagctttgattatctgtctgtctgcaat

SEQ ID NO: 97148 - DNA, 80 bp, synthetic construct
  source 1..80: mol_type = other DNA
ttccagacccagtttctaaaagaacagctcatttcccaggctgaacagtggacagcaccaaacctcccaccaaatgctgt

SEQ ID NO: 97149 - DNA, 80 bp, synthetic construct
  source 1..80: mol_type = other DNA
tgcaggagaatgatgtagagggaggcggagggtgatggttcctgccagagcttcaagaccttcccatgggagccagctca

SEQ ID NO: 97150 - DNA, 80 bp, synthetic construct
  source 1..80: mol_type = other DNA
cttgaaggcaggaatcctgtcttttcatccaccaattccagcacattcaatctacacaacatcgcaagttccccaacaag

SEQ ID NO: 97151 - DNA, 80 bp, synthetic construct; identical to SEQ ID NO: 18295
  source 1..80: mol_type = other DNA

SEQ ID NO: 97152 - DNA, 80 bp, synthetic construct
  source 1..80: mol_type = other DNA
cccacaggcgggagcaccttcatttgttttatgtagaaagacgaagtgcaaaatctgtccaagagatagatctgctccac

SEQ ID NO: 97153 - DNA, 80 bp, synthetic construct
  source 1..80: mol_type = other DNA
cagatataaagcgttgctctaacacacagtattgccagtctttctgagtaaaagtcagcctggagagaaaggtgaactat

SEQ ID NO: 97154 - DNA, 80 bp, synthetic construct; identical to SEQ ID NO: 18296
  source 1..80: mol_type = other DNA

SEQ ID NO: 97155 - DNA, 80 bp, synthetic construct
  source 1..80: mol_type = other DNA
ggatttgccagaaacaggtgtagtcaaaccctcaaataccaaaccacagagagtggaagccatatcaggctgaccaaagc

SEQ ID NO: 97156 - DNA, 80 bp, synthetic construct
  source 1..80: mol_type = other DNA
gattacgctttgatagattagcatgggaagaaagtgacaggtggaaactgatgttctggagagagatttgtttaggggga

SEQ ID NO: 97157 - DNA, 80 bp, synthetic construct
  source 1..80: mol_type = other DNA
gggagaaaaacctgatgcccccgggcgaggtagcagggttggagttgggggaagactctttggaggaggagcggaagatc

SEQ ID NO: 97158 - DNA, 80 bp, synthetic construct
  source 1..80: mol_type = other DNA
ggctgcccgggccgaaggggctgtccacctgcagaaaaacagacgaatggatgcagtcactccacgctctggacacgctg

SEQ ID NO: 97159 - DNA, 80 bp, synthetic construct; identical to SEQ ID NO: 18297
  source 1..80: mol_type = other DNA

SEQ ID NO: 97160 - DNA, 80 bp, synthetic construct
  source 1..80: mol_type = other DNA
ctgagacctcagtcctaggtgatgatgaatttttcacctccaagctgcttcagcatttgaaagactgaggttgccaacag

SEQ ID NO: 97161 - DNA, 80 bp, synthetic construct
  source 1..80: mol_type = other DNA
caacatggtgaaaccccatctctactaaaaataaaaaaataaaaaaaaaattagctgggcatggtggcgggcgcctgtaa

SEQ ID NO: 97162 - DNA, 80 bp, synthetic construct
  source 1..80: mol_type = other DNA
ggaaggaaggaaggaaggagggagggagggagggagggagggagggagggaaggaaagaaggaaggaaggaaggaaggaa

SEQ ID NO: 97163 - DNA, 80 bp, synthetic construct; identical to SEQ ID NO: 18298
  source 1..80: mol_type = other DNA

SEQ ID NO: 97164 - DNA, 80 bp, synthetic construct
  source 1..80: mol_type = other DNA
ggtgcgtggtaaacagctcttgtcctaccacttgggaaacttgcaagcaacactgagtggaaaggacctcagagatgacc

SEQ ID NO: 97165 - DNA, 80 bp, synthetic construct
  source 1..80: mol_type = other DNA
tgtcccaccacggggtgcgctgtccggaccgcggcctggggacgttcttccgccactagagggcggcccaagccccgagc

SEQ ID NO: 97166 - DNA, 80 bp, synthetic construct
  source 1..80: mol_type = other DNA
ggtgctataggaccttgtaactcaagctaagttttgagtttttctttttttgtgtagttctgttttttgtttttgagaca

SEQ ID NO: 97167 - DNA, 80 bp, synthetic construct; identical to SEQ ID NO: 18299
  source 1..80: mol_type = other DNA

SEQ ID NO: 97168 - DNA, 80 bp, synthetic construct
  source 1..80: mol_type = other DNA
aacatggcaaaaccctgtctctacaaaaaatacagaaattagccaggtgtggtggcctgtagtcccagctactcaagcag

SEQ ID NO: 97169 - DNA, 80 bp, synthetic construct
  source 1..80: mol_type = other DNA
aaaaaaaaaaaaaaaagaggttcttcttcaagtggtgggtgctgtgtgtgcaggtctagggtgggatgggggctgagaga

SEQ ID NO: 97170 - DNA, 80 bp, synthetic construct
  source 1..80: mol_type = other DNA
gacagcagcctcgagggtgtgaaccggaagaggagccgaggccacatgggaggaccggagggaggggtgggattttggag

SEQ ID NO: 97171 - DNA, 80 bp, synthetic construct; identical to SEQ ID NO: 18300
  source 1..80: mol_type = other DNA

SEQ ID NO: 97172 - DNA, 80 bp, synthetic construct
  source 1..80: mol_type = other DNA
aaaggccagtttaaccatatttgatgagcaagggggaccccaggattatcctgaatggggttccattctgtattctgaat

SEQ ID NO: 97173 - DNA, 80 bp, synthetic construct
  source 1..80: mol_type = other DNA
gccaccagggacagggcctcaggccttgctcttgggcaagctatagccaaatgatatgttggtgaatgcaaccggatgat

SEQ ID NO: 97174 - DNA, 80 bp, synthetic construct; identical to SEQ ID NO: 18301
  source 1..80: mol_type = other DNA

SEQ ID NO: 97175 - DNA, 80 bp, synthetic construct
  source 1..80: mol_type = other DNA
gacaccaatttgattcagttgtgtgtaattcaaatgcttaaagaggagatttgctttttccagcatgggaactcctgcct

SEQ ID NO: 97176 - DNA, 80 bp, synthetic construct
  source 1..80: mol_type = other DNA
tgcaggagaaacctgcaagcagcctggacctctgcgccctgccacggccacctcgaccctcacctgatgctgtggctccc

SEQ ID NO: 97177 - DNA, 80 bp, synthetic construct; identical to SEQ ID NO: 18302
  source 1..80: mol_type = other DNA

SEQ ID NO: 97178 - DNA, 80 bp, synthetic construct
  source 1..80: mol_type = other DNA
aaggggtgaagcccaggaggctctctagtgggatagcccggccgatacgccaggcttggccatgcgaggtgagctgtcgc

SEQ ID NO: 97179 - DNA, 80 bp, synthetic construct
  source 1..80: mol_type = other DNA
gctttccggaaccctccaggtctccgtccaggagcggcatggcgaaggagctcaggtcctagggtggacagagagcacgt

SEQ ID NO: 97180 - DNA, 80 bp, synthetic construct
  source 1..80: mol_type = other DNA
cgcttccagaacgtgcagtcaaacttccaggagcagccatgacctcccaacaccccagggaaggaggaaagaagaaatgg

SEQ ID NO: 97181 - DNA, 80 bp, synthetic construct
  source 1..80: mol_type = other DNA
tgacactggggtggcggctgaggcaaaactattagcagagtctaatgacatcgtggccaaaacagagtctaaaatagatt

SEQ ID NO: 97182 - DNA, 80 bp, synthetic construct; identical to SEQ ID NO: 18303
  source 1..80: mol_type = other DNA

SEQ ID NO: 97183 - DNA, 80 bp, synthetic construct
  source 1..80: mol_type = other DNA
tcctatctctttgaatctgaccactctaggtacctcatataagtagcatcaggcagtatttgtgactgtctgactccact

SEQ ID NO: 97184 - DNA, 80 bp, synthetic construct
  source 1..80: mol_type = other DNA
aataacgctgctatgagtgttatggtatgaattgtgtctcccttcccaccaaaaaaaatctatatgttgaagtcctgccc

SEQ ID NO: 97185 - DNA, 80 bp, synthetic construct
  source 1..80: mol_type = other DNA
gacacagggagaagacagctaccaacccaaagagaggggccccagaaaaaccaaccctgctgatattttgatcttagact

SEQ ID NO: 97186 - DNA, 80 bp, synthetic construct; identical to SEQ ID NO: 18304
  source 1..80: mol_type = other DNA

SEQ ID NO: 97187 - DNA, 80 bp, synthetic construct
  source 1..80: mol_type = other DNA
aatatcttttcatctgcttatcggccacttgtctatcatctttggagaaatgtctattcaggccatttgtctgacttgtt

SEQ ID NO: 97188 - DNA, 80 bp, synthetic construct
  source 1..80: mol_type = other DNA
ttctgtgggttgcctttttactctgctgtgtcctttgatgtacagaagtctttgatttatctaatttgccttttgttgcc

SEQ ID NO: 97189 - DNA, 80 bp, synthetic construct; identical to SEQ ID NO: 18305
  source 1..80: mol_type = other DNA

SEQ ID NO: 97190 - DNA, 80 bp, synthetic construct
  source 1..80: mol_type = other DNA
gacctccaactttgttcttctttttttcaagactattttccctatttagggtcccttaagattccacatgaattttagga

SEQ ID NO: 97191 - DNA, 80 bp, synthetic construct
  source 1..80: mol_type = other DNA
atttccacctttcatttccttctgtagtgttctgtgcacttaacctttctttaacccattcccttctctccacgtccttg

SEQ ID NO: 97192 - DNA, 80 bp, synthetic construct
  source 1..80: mol_type = other DNA
taaggccccagccactcgtaccgtcacctcagcaatggcttccaggcctggctgactgagacacgccagtgagatctcag

SEQ ID NO: 97193 - DNA, 80 bp, synthetic construct
  source 1..80: mol_type = other DNA
gggcatttggaaattccaccacagaccagatggagagctgcgtgcctcccaaggaggagtctcaggagtctcagacacag

SEQ ID NO: 97194 - DNA, 80 bp, synthetic construct; identical to SEQ ID NO: 18306
  source 1..80: mol_type = other DNA

SEQ ID NO: 97195 - DNA, 80 bp, synthetic construct
  source 1..80: mol_type = other DNA
ttccttcctctgagctctctttccttcctcttgctcttcctgctccgtgtccccaaatcctggctcacagagtaaactcc

SEQ ID NO: 97196 - DNA, 80 bp, synthetic construct
  source 1..80: mol_type = other DNA
gtttatttctctaactagactttgaatccatccctggcaagaggaaagctacccacctctctattcttggcctcatactg

SEQ ID NO: 97197 - DNA, 80 bp, synthetic construct; identical to SEQ ID NO: 18307
  source 1..80: mol_type = other DNA

SEQ ID NO: 97198 - DNA, 80 bp, synthetic construct
  source 1..80: mol_type = other DNA
ctgctagctcaggctgcccgtggaccccaggcggctgcccggagtggtggaggcaggtcccacgcaggtgtctcgggctg

SEQ ID NO: 97199 - DNA, 80 bp, synthetic construct
  source 1..80: mol_type = other DNA
cccagcaagtcccagtattctaatcttggctctcatctccagagctcaccaggaaacatcacgcatcttggggccggtgt

SEQ ID NO: 97200 - DNA, 80 bp, synthetic construct
  source 1..80: mol_type = other DNA
tttctaaatttaaaactcctgccagagctttgggccttccccaccactggtctctactcccagtccagtccctcacttcc

SEQ ID NO: 97201 - DNA, 80 bp, synthetic construct
  source 1..80: mol_type = other DNA
gattttcatccgctgcacaaaatgtaagtcagaccttgaccacatgtgttggagataaaaaggtgaattttcaggatttg

SEQ ID NO: 97202 - DNA, 80 bp, synthetic construct; identical to SEQ ID NO: 18308
  source 1..80: mol_type = other DNA

SEQ ID NO: 97203 - DNA, 80 bp, synthetic construct
  source 1..80: mol_type = other DNA
actctttctatgaaactttaccacctccttggagtggttcagttccagtaatagaaaaacaatttggtatcagaggctat

SEQ ID NO: 97204 - DNA, 80 bp, synthetic construct
  source 1..80: mol_type = other DNA
tcaagctggtgttgcaaggaacaggaaagtctaaaaaatcccaccaccaaatgcaatcacttcacattcttgcactatcc

SEQ ID NO: 97205 - DNA, 80 bp, synthetic construct; identical to SEQ ID NO: 18309
  source 1..80: mol_type = other DNA

SEQ ID NO: 97206 - DNA, 80 bp, synthetic construct
  source 1..80: mol_type = other DNA
cagggtcacgatacaacattcctgtttgattccaaccgaggaagcaacacatcgagaatgatttgcattctccgctcctg

SEQ ID NO: 97207 - DNA, 80 bp, synthetic construct
  source 1..80: mol_type = other DNA
agctctgtgatctgcgatctggggaatcttggacatatccggacttcagtttttcatctgtcaaatgagagggttgaact

SEQ ID NO: 97208 - DNA, 80 bp, synthetic construct
  source 1..80: mol_type = other DNA
catgttctcatctcctatcttcatcatcaaaataatttcctcctactctcaaacgaccaaagactctccactgctctcag

SEQ ID NO: 97209 - DNA, 80 bp, synthetic construct; identical to SEQ ID NO: 18310
  source 1..80: mol_type = other DNA

SEQ ID NO: 97210 - DNA, 80 bp, synthetic construct
  source 1..80: mol_type = other DNA
ccccgtcctgcccaccttgcctgccctcagtcactgcccggggagtggctcataggttctgaccacggctgagtggtgac

SEQ ID NO: 97211 - DNA, 80 bp, synthetic construct
  source 1..80: mol_type = other DNA
attcttggtactgatgggcggcaggaggtgaccagagccaggtcaattggagcctttgaaaaacattcatgttatataac

SEQ ID NO: 97212 - DNA, 80 bp, synthetic construct
  source 1..80: mol_type = other DNA
tttccacagaggacaccgtagtttctcactacagcctaagcaacttcctgatgtcaaaagaaacatccaactgtttttca

SEQ ID NO: 97213 - DNA, 80 bp, synthetic construct; identical to SEQ ID NO: 18311
  source 1..80: mol_type = other DNA

SEQ ID NO: 97214 - DNA, 80 bp, synthetic construct
  source 1..80: mol_type = other DNA
ggtgggaaacgagaccagaggacgtcatcaaaggcccttcccgcggtgtgagcccccgtggcactgggcatggcgagggc

SEQ ID NO: 97215 - DNA, 80 bp, synthetic construct
  source 1..80: mol_type = other DNA
aagacactggctgtcccccttataattagagagctgtctttatcccgttcccaaggtgaaagccaagatgattcatgact

SEQ ID NO: 97216 - DNA, 80 bp, synthetic construct
  source 1..80: mol_type = other DNA
gagctccatggaagcttggagggaccccactggcctcctcacgttgtggtggaggatgctctgcaggggccaacagtgcc

SEQ ID NO: 97217 - DNA, 80 bp, synthetic construct; identical to SEQ ID NO: 18312
  source 1..80: mol_type = other DNA

SEQ ID NO: 97218 - DNA, 80 bp, synthetic construct
  source 1..80: mol_type = other DNA
ctcgaggaccagcagcaggcagcctcccagctcccttccaagggtgtggcctgggctgcaggttgccgcctccatccgga

SEQ ID NO: 97219 - DNA, 80 bp, synthetic construct
  source 1..80: mol_type = other DNA
gattcaatcaaataccaagcaggtggctgccgtgggcgtatttgcagacgtggatgacatctacagtcagtgacttgaag

SEQ ID NO: 97220 - DNA, 80 bp, synthetic construct
  source 1..80: mol_type = other DNA
cagttccgaccaacgcatgagtcaattctttcaaacaaatctcatatatatatatatatatatatatatatatatatata

SEQ ID NO: 97221 - DNA, 80 bp, synthetic construct; identical to SEQ ID NO: 18313
  source 1..80: mol_type = other DNA

SEQ ID NO: 97222 - DNA, 80 bp, synthetic construct
  source 1..80: mol_type = other DNA
aagggccgttgtcctggcagtgcttagagaacaacaggaaatggccaaatgtcctcctttgactgtcagggaacattcac

SEQ ID NO: 97223 - DNA, 80 bp, synthetic construct
  source 1..80: mol_type = other DNA
ctgagggcctgtctcctgccacacccagttggagctcggcaaggaccgcgtctttttcacccctgagtcaccggctcctc

SEQ ID NO: 97224 - DNA, 80 bp, synthetic construct; identical to SEQ ID NO: 18314
  source 1..80: mol_type = other DNA

SEQ ID NO: 97225 - DNA, 80 bp, synthetic construct
  source 1..80: mol_type = other DNA
ctccagtcatcggccacccagacttcagagaggaaaaaaccagccacgaggtgaaagtgagatggccccggcctgacctc

SEQ ID NO: 97226 - DNA, 80 bp, synthetic construct
  source 1..80: mol_type = other DNA
tttggttagtgcttgaagacaaactgcaggagggacaccatgaactacaataaaattgggcaccctggggacatttttgt

SEQ ID NO: 97227 - DNA, 80 bp, synthetic construct
  source 1..80: mol_type = other DNA
tgcaaaggctgccacctcagtgcttccagaatctcaactgtccatatttacagagccatacatcaaaagattcttcccca

SEQ ID NO: 97228 - DNA, 80 bp, synthetic construct; identical to SEQ ID NO: 18315
  source 1..80: mol_type = other DNA

SEQ ID NO: 97229 - DNA, 80 bp, synthetic construct
  source 1..80: mol_type = other DNA
tcaatttagtggattgcacaaccaccaaaaactgaattacaataagaatgtatctcatggttgcatgaagcctgtgtctc

SEQ ID NO: 97230 - DNA, 80 bp, synthetic construct
  source 1..80: mol_type = other DNA
cctctgagtagctgagattacaggcgcccgccaccacgcctggctaatttttgtatatttagtagagatggggtttcacc

SEQ ID NO: 97231 - DNA, 80 bp, synthetic construct
  source 1..80: mol_type = other DNA
gagtgtagtagcgcaatcttggctcacttcaacctccgcctcccgggttcaagcgattctcatgcctcagtctcccaagt

SEQ ID NO: 97232 - DNA, 80 bp, synthetic construct
  source 1..80: mol_type = other DNA
tgtacccagcctgaataaaatgtacttcctattgtgttgtgggtgaaaaagtctgaaaaattctgcattagataagcttt

SEQ ID NO: 97233 - DNA, 80 bp, synthetic construct; identical to SEQ ID NO: 18316
  source 1..80: mol_type = other DNA

SEQ ID NO: 97234 - DNA, 80 bp, synthetic construct
  source 1..80: mol_type = other DNA
agcggtgcctgtcagcttctgttcccaactggcccgggcctgctgcgggtgccctcacctctagcgcctaaacccagaga

SEQ ID NO: 97235 - DNA, 80 bp, synthetic construct
  source 1..80: mol_type = other DNA
ttctaaccaaggtcccttttgatcatgtcatgctcttatagctgcttctgactttctagcttgtgtttccactacataag

SEQ ID NO: 97236 - DNA, 80 bp, synthetic construct; identical to SEQ ID NO: 18317
  source 1..80: mol_type = other DNA

SEQ ID NO: 97237 - DNA, 80 bp, synthetic construct
  source 1..80: mol_type = other DNA
tagccagcagcgatgcataaagaccagccaggtcaggagaaggtgtctgctactccccattccaggccacaccgccaggg

SEQ ID NO: 97238 - DNA, 80 bp, synthetic construct
  source 1..80: mol_type = other DNA
ataagtttaattcttgtttaaaaagataaattgaacctctaccccctcagtgaggcaggcctggatctagatttctgcct

SEQ ID NO: 97239 - DNA, 80 bp, synthetic construct
  source 1..80: mol_type = other DNA
tggctaacatggtgaaaccctgtctctactaaaaaatacaaaaaattagccaggtgtggtggcgggcacctgtagtccaa

SEQ ID NO: 97240 - DNA, 80 bp, synthetic construct; identical to SEQ ID NO: 18318
  source 1..80: mol_type = other DNA

SEQ ID NO: 97241 - DNA, 80 bp, synthetic construct
  source 1..80: mol_type = other DNA
tgagcagttccaggacagaggcaggacaaccaccaaaggatgtgatggcagccagggcttgggtgagggagggagggaag

SEQ ID NO: 97242 - DNA, 80 bp, synthetic construct
  source 1..80: mol_type = other DNA
taacaataaggtatcaacagaagctcaatggtaacagaggtgccacagtaatgccagacgcagacaacaggggagattgg

SEQ ID NO: 97243 - DNA, 80 bp, synthetic construct
  source 1..80: mol_type = other DNA
tcagagatgctggaggtcataggttccccaggaaatgggaactggagaggtcaattcttcctgtatccacggctccaggt

SEQ ID NO: 97244 - DNA, 80 bp, synthetic construct; identical to SEQ ID NO: 18319
  source 1..80: mol_type = other DNA

SEQ ID NO: 97245 - DNA, 80 bp, synthetic construct
  source 1..80: mol_type = other DNA
aggctgcaaaccacggcgctaatgaacctaaacaagggaatttgctaggttttcttatttttggtgttttgttgccaaca

SEQ ID NO: 97246 - DNA, 80 bp, synthetic construct
  source 1..80: mol_type = other DNA
tttttcaaacaagaaaaagcaaaaagcctgcatcgcatgtcctaggaatggggttaaaagtcgtcgtctcttgggacaga

SEQ ID NO: 97247 - DNA, 80 bp, synthetic construct
  source 1..80: mol_type = other DNA
tcacctacacctgtcagaagggtttgggatctttctttctcatggagaaagtgcagaagattctgggtcaggccctgtgg

SEQ ID NO: 97248 - DNA, 80 bp, synthetic construct
  source 1..80: mol_type = other DNA
tgcttgtgcaacacgaggctgccacgtctcaggtcttcgtgcccaaagtgagtggactctgaccttccaggatggccgag

SEQ ID NO: 97249 - DNA, 80 bp, synthetic construct; identical to SEQ ID NO: 18320
  source 1..80: mol_type = other DNA

SEQ ID NO: 97250 - DNA, 80 bp, synthetic construct
  source 1..80: mol_type = other DNA
agccacctgacctacacgctgtcctgggacaccctctactcctctttaatccccccgtgccagcattcctcaaaaaaggg

SEQ ID NO: 97251 - DNA, 80 bp, synthetic construct
  source 1..80: mol_type = other DNA
acctcctgggttcaagtgattctcctgcctcagcctccagagtagctgggattacaggtatgtaccaccatgcccagcta

SEQ ID NO: 97252 - DNA, 80 bp, synthetic construct; identical to SEQ ID NO: 18321
  source 1..80: mol_type = other DNA

SEQ ID NO: 97253 - DNA, 80 bp, synthetic construct
  source 1..80: mol_type = other DNA
tcacaccattccttcctacctcgagtgtcctgaccctttttctctcacccatttatatcctactcattcttcaaaaacta

SEQ ID NO: 97254 - DNA, 80 bp, synthetic construct
  source 1..80: mol_type = other DNA
gagagcaacggctatattatccagcttgtttttttttttttaagaagtaaattcatccagcttggccaacatggtgaaat

SEQ ID NO: 97255 - DNA, 80 bp, synthetic construct
  source 1..80: mol_type = other DNA
aataggattcaaaagtcaaaacataacaacctgtaattgaagagtcatacccttggcccagccatgccatgtccccagag

SEQ ID NO: 97256 - DNA, 80 bp, synthetic construct; identical to SEQ ID NO: 18322
  source 1..80: mol_type = other DNA

SEQ ID NO: 97257 - DNA, 80 bp, synthetic construct
  source 1..80: mol_type = other DNA
gggccccttataaaaccaacagatctcgtgagaactcactatcacagaacagcatgggggaaaccacccccatgattgaa

SEQ ID NO: 97258 - DNA, 80 bp, synthetic construct
  source 1..80: mol_type = other DNA
ggctattttgttcaacacctggacttttgctgggttggtaagacgtggcatctgtgtaacccaaattgacatttgttttc

SEQ ID NO: 97259 - DNA, 80 bp, synthetic construct
  source 1..80: mol_type = other DNA
gagttttctgggatgtctatatccaataggtcatgatgtgaagttcctcgccgtggctcactgtcaaagtctgaaagccg

SEQ ID NO: 97260 - DNA, 80 bp, synthetic construct; identical to SEQ ID NO: 18323
  source 1..80: mol_type = other DNA

SEQ ID NO: 97261 - DNA, 80 bp, synthetic construct
  source 1..80: mol_type = other DNA
aggaggaacccccagtgagaactcagctgagccagatgactcctaaatccatgaaagatgatttcaaatcatatttttaa

SEQ ID NO: 97262 - DNA, 80 bp, synthetic construct
  source 1..80: mol_type = other DNA
taacaaagacatggctgtgatgcctgggactcatttggaaaacatgagttatcactttaaaatgcttcactgagtttaga

SEQ ID NO: 97263 - DNA, 80 bp, synthetic construct
  source 1..80: mol_type = other DNA
gtacaagtgaaagggagctcaggaaggcagaatgaagggacacatcaaatccttggtgacaaagtttaggacaggctggg

SEQ ID NO: 97264 - DNA, 80 bp, synthetic construct
  source 1..80: mol_type = other DNA
gaggctgaagcaggagaatcgcttgaacccgggaagcggaggttgcagtgagccaggatcccaccactgcaccccagctt

SEQ ID NO: 97265 - DNA, 80 bp, synthetic construct; identical to SEQ ID NO: 18324
  source 1..80: mol_type = other DNA

SEQ ID NO: 97266 - DNA, 80 bp, synthetic construct
  source 1..80: mol_type = other DNA
ctgattatctcaggctgatcaggaaggctggtaccaggagtgagtgactaaatgaagaaattactaattaacaaatgctt

SEQ ID NO: 97267 - DNA, 80 bp, synthetic construct
  source 1..80: mol_type = other DNA
aagaccagcctgggcaacatggcaaaaccctgtctctactaacactataaaaagttagctgggcgtgttggtgcatgctg

SEQ ID NO: 97268 - DNA, 80 bp, synthetic construct; identical to SEQ ID NO: 18325
  source 1..80: mol_type = other DNA

SEQ ID NO: 97269 - DNA, 80 bp, synthetic construct
  source 1..80: mol_type = other DNA
ggaaatgttccagatcacactgtggcggtggtcacatgactgtgcacacttacgacaacccatctaattgtatactgtca

SEQ ID NO: 97270 - DNA, 80 bp, synthetic construct
  source 1..80: mol_type = other DNA
atgcctatattaagaatcctggaatactccatgtgctttttcatgcagcgggagtggaattttcaggaagcagctgtgct

SEQ ID NO: 97271 - DNA, 80 bp, synthetic construct
  source 1..80: mol_type = other DNA
cgtagatgcacagctgccacggaggtaggaagaatgattcgtttgccaccaaaagcccagtttctccaacaggtaagtcc

SEQ ID NO: 97272 - DNA, 80 bp, synthetic construct; identical to SEQ ID NO: 18326
  source 1..80: mol_type = other DNA

SEQ ID NO: 97273 - DNA, 80 bp, synthetic construct
  source 1..80: mol_type = other DNA
tgcccaagtgagcacagggaccgccccgcagcaagacgacggcagatatttaaaatgtgaggaaccccggccacagcggg

SEQ ID NO: 97274 - DNA, 80 bp, synthetic construct
  source 1..80: mol_type = other DNA
aaggtgtagctggctgaaccgcagtgcctcggcatttgggaccattgaaaaatactctggattctttttttttcttttgc

SEQ ID NO: 97275 - DNA, 80 bp, synthetic construct
  source 1..80: mol_type = other DNA
actgtaggcaagaaggcccatgattttgttcctcagataaaagagcagcagggaaacaggaggcctctctcctgcaaagc

SEQ ID NO: 97276 - DNA, 80 bp, synthetic construct; identical to SEQ ID NO: 18327
  source 1..80: mol_type = other DNA

SEQ ID NO: 97277 - DNA, 80 bp, synthetic construct
  source 1..80: mol_type = other DNA
ggctatcctaacgccgcagtggggcacttaaagctcctcacgcccaagcccaggcctggtgggagcacggttctctcccg

SEQ ID NO: 97278 - DNA, 80 bp, synthetic construct
  source 1..80: mol_type = other DNA
ggctcccagccaggtttggccatcctgcgtaaatgcctgccttgggtcttggcctaatactaagggcaaatcccaagagg

SEQ ID NO: 97279 - DNA, 80 bp, synthetic construct
  source 1..80: mol_type = other DNA
ggcctcattccagagttgtggtggccgctccacctggcgagcttcgaggggactccggcaggcgctcgctgtggggtcct

SEQ ID NO: 97280 - DNA, 80 bp, synthetic construct
  source 1..80: mol_type = other DNA
ctgcctgagcccaaatcaagcaccgtttattagggggaagctccgttatccagaaagctcatctttgaagagctacccat

SEQ ID NO: 97281 - DNA, 80 bp, synthetic construct; identical to SEQ ID NO: 18328
  source 1..80: mol_type = other DNA

SEQ ID NO: 97282 - DNA, 80 bp, synthetic construct
  source 1..80: mol_type = other DNA
gtgcattctccttacatcaagtgaagataatattttgtttccttcccactttttctctaacacaagccaccccagttctc

SEQ ID NO: 97283 - DNA, 80 bp, synthetic construct
  source 1..80: mol_type = other DNA
tctaaggttgaaaacatcagttgtttgggttgtgagaaaagaaaagcccacaaggtttccgaggcttggtgctgtttctc

SEQ ID NO: 97284 - DNA, 80 bp, synthetic construct
  source 1..80: mol_type = other DNA
ccagagggcccaccctgggctgcctggaaccccctaaagttgccacccccgcaacacagtagtggggcagttcctggcag

SEQ ID NO: 97285 - DNA, 80 bp, synthetic construct; identical to SEQ ID NO: 18329
  source 1..80: mol_type = other DNA

SEQ ID NO: 97286 - DNA, 80 bp, synthetic construct
  source 1..80: mol_type = other DNA
accctgtccatgtgtgacaggtggggcagaaccaccagctaggacaggtgggattggaagaacaaaggaacgacagggac

SEQ ID NO: 97287 - DNA, 80 bp, synthetic construct
  source 1..80: mol_type = other DNA
agggacctgctatttatgaagcatctattatgtgctggcagctgccccttactcctgcaaggcaggtactgtctccattc

SEQ ID NO: 97288 - DNA, 80 bp, synthetic construct; identical to SEQ ID NO: 18330
  source 1..80: mol_type = other DNA

SEQ ID NO: 97289 - DNA, 80 bp, synthetic construct
  source 1..80: mol_type = other DNA
ggagggaaggtattgagccttgaacgagccacttacctgtaggtccaacctaggtttcctgctacgtcaccagcccccaa

SEQ ID NO: 97290 - DNA, 80 bp, synthetic construct
  source 1..80: mol_type = other DNA
ggttatgcaatctcagtaaattattcaaattcatggagcctcaatttccttgtgtaaaagggaaatctcccaggatcatc

SEQ ID NO: 97291 - DNA, 80 bp, synthetic construct
  source 1..80: mol_type = other DNA
taacgtagagacagatccttctaagaaattaagacccctacctgactgcattaggagtcatcaattgaatctaccgacaa

SEQ ID NO: 97292 - DNA, 80 bp, synthetic construct; identical to SEQ ID NO: 18331
  source 1..80: mol_type = other DNA

SEQ ID NO: 97293 - DNA, 80 bp, synthetic construct
  source 1..80: mol_type = other DNA
ccaatgcctgggacacaggactcaagagtttgttttgctaaagtgctgatgtttaatttcaccctgggacaggacctgaa

SEQ ID NO: 97294 - DNA, 80 bp, synthetic construct
  source 1..80: mol_type = other DNA
aggctggaccgcaggacacctggcttctctttccagctgaatccctttgtgactttaggcaaagaagattaaatatttta

SEQ ID NO: 97295 - DNA, 80 bp, synthetic construct
  source 1..80: mol_type = other DNA
gaagcagctggaaggtgagaaacccccagacctaagaggcccacagtgaggcccctcgggtgagtcggagcctgcccagg

SEQ ID NO: 97296 - DNA, 80 bp, synthetic construct
  source 1..80: mol_type = other DNA
atcttccaacacctacaatccgtaacgccatcaacgctggattccctgctagcccagccttcttcaattgtttactatca

SEQ ID NO: 97297 - DNA, 80 bp, synthetic construct; identical to SEQ ID NO: 18332
  source 1..80: mol_type = other DNA

SEQ ID NO: 97298 - DNA, 80 bp, synthetic construct
  source 1..80: mol_type = other DNA
gatcttctcttccttcccttcctctctcccccactcccctcccatctgctgcttctttggattccccacaacttcagcaa

SEQ ID NO: 97299 - DNA, 80 bp, synthetic construct
  source 1..80: mol_type = other DNA
cttttctgtttgggccaaaggtaataagtgatgactcaggaagggcaaggccaggcaaagaatgacaacttcgctaagat

SEQ ID NO: 97300 - DNA, 80 bp, synthetic construct
  source 1..80: mol_type = other DNA
cactagtgatgctctttaaatcaccaagaaaaagttatgtaaggagaaaacatacagcttccgtggagagaaggaacatt

SEQ ID NO: 97301 - DNA, 80 bp, synthetic construct; identical to SEQ ID NO: 18333
  source 1..80: mol_type = other DNA

SEQ ID NO: 97302 - DNA, 80 bp, synthetic construct
  source 1..80: mol_type = other DNA
tggatggcaggatgcgagtgacggggacgggcggcactcccagctctgacaaatcctgctgcctcactcgaaaggtccat

SEQ ID NO: 97303 - DNA, 80 bp, synthetic construct
  source 1..80: mol_type = other DNA
tggcctaagacagcgcaggcaacggtcttggtggctggagctgctttgctgctcaaaatgcaggcagagctcgggcagat

SEQ ID NO: 97304 - DNA, 80 bp, synthetic construct
  source 1..80: mol_type = other DNA
gatgatgcagcagtggacagctctgggctccaggtcctctggccagcacaacccctgcactgttcccatctaacttcagg

SEQ ID NO: 97305 - DNA, 80 bp, synthetic construct; identical to SEQ ID NO: 18334
  source 1..80: mol_type = other DNA

SEQ ID NO: 97306 - DNA, 80 bp, synthetic construct
  source 1..80: mol_type = other DNA
acccttcccctcctcacctcctcctgggggctctcacaccccaggccatcacccactacccaaatcaccccagggcaggt

SEQ ID NO: 97307 - DNA, 80 bp, synthetic construct
  source 1..80: mol_type = other DNA
agggatctgtgagtatcatcagttccttccttcgtgacactcattcctgagtctgcatgtcttcctgtacctgattacaa

SEQ ID NO: 97308 - DNA, 80 bp, synthetic construct; identical to SEQ ID NO: 18335
  source 1..80: mol_type = other DNA

SEQ ID NO: 97309 - DNA, 80 bp, synthetic construct
  source 1..80: mol_type = other DNA
ctttggggggcctctgtaggggttggaagtccgtggctttcttaaagtcactttcagcccaggagggtaccaggcaatcc

SEQ ID NO: 97310 - DNA, 80 bp, synthetic construct
  source 1..80: mol_type = other DNA
ctgttttttgttttttttttgtccgtagaatgagccatgtgttatgggatgttcctcaaggtccctttcagaccagagca

SEQ ID NO: 97311 - DNA, 80 bp, synthetic construct
  source 1..80: mol_type = other DNA
taagcatcatcctgggatgtgcgggattattctggaaccagagggcagtgctagcataaacctgaggtttagcagaaagc

SEQ ID NO: 97312 - DNA, 80 bp, synthetic construct; identical to SEQ ID NO: 18336
  source 1..80: mol_type = other DNA

SEQ ID NO: 97313 - DNA, 80 bp, synthetic construct
  source 1..80: mol_type = other DNA
gtctcagggacccaggatcactcattagagattaaggaacataaacaactccactcctgcttgcaagctgcccaccgcaa

SEQ ID NO: 97314 - DNA, 80 bp, synthetic construct
  source 1..80: mol_type = other DNA
acaacagagcctagtagatcacagatacttagcaaagcctgaagaccattttggtgcatggggctggtgtcagaatcaga

SEQ ID NO: 97315 - DNA, 80 bp, synthetic construct
  source 1..80: mol_type = other DNA
aaacagaaccagaaaaccttcactagctccatgccatctacagaacaaaccccacttcttcagcatgggctgccaggccc

SEQ ID NO: 97316 - DNA, 80 bp, synthetic construct; identical to SEQ ID NO: 18337
  source 1..80: mol_type = other DNA

SEQ ID NO: 97317 - DNA, 80 bp, synthetic construct
  source 1..80: mol_type = other DNA
ctccccagcctggctccgtacagcacatcctaacagggccactgtccctttattcatttttgtttatttttatcatctag

SEQ ID NO: 97318 - DNA, 80 bp, synthetic construct
  source 1..80: mol_type = other DNA
tgtgcagaaatgggatattgtcaagtatgttctgatagagccagacattggggccttatgatattacataacaagtcaaa

SEQ ID NO: 97319 - DNA, 80 bp, synthetic construct
  source 1..80: mol_type = other DNA
acagacctgggttagatttctcagcatcccagaaatctagcacaaatctttgccaaatcccatgccgccctcagcccttc

SEQ ID NO: 97320 - DNA, 80 bp, synthetic construct
  source 1..80: mol_type = other DNA
gcaactgccctgggcagagacgctgaccaataaagcccatattctaccccccttttatgtgccaatgctgtccctgccct

SEQ ID NO: 97321 - DNA, 80 bp, synthetic construct; identical to SEQ ID NO: 18338
  source 1..80: mol_type = other DNA

SEQ ID NO: 97322 - DNA, 80 bp, synthetic construct
  source 1..80: mol_type = other DNA
tggcgaaatgagtggtgtgcagagtgagtcaggaggatggcacaggctgcagcccccttggataaagagacagagaatct

SEQ ID NO: 97323 - DNA, 80 bp, synthetic construct
  source 1..80: mol_type = other DNA
ctgagacttcctctgagctacaagaacaggttggacctgccgcctaaaatcgcctatagggatttggcaaaccctgctct

SEQ ID NO: 97324 - DNA, 80 bp, synthetic construct; identical to SEQ ID NO: 18339
  source 1..80: mol_type = other DNA

SEQ ID NO: 97325 - DNA, 80 bp, synthetic construct
  source 1..80: mol_type = other DNA
aaaacaaaccaacccccgcaaaggataacagtttctctatctttcaaggccatgttctgaccacctgaaggtcttgagat

SEQ ID NO: 97326 - DNA, 80 bp, synthetic construct
  source 1..80: mol_type = other DNA
ccaatcagggacccacctctaccaaataagccagcaggtctataaacgctaagtcatatgtgatcaatcagtttaagtga

SEQ ID NO: 97327 - DNA, 80 bp, synthetic construct
  source 1..80: mol_type = other DNA
gctaagaccaggtgttcctgattttatgccagcacctgataaggaagagatatgcctatccactggaaaaccggctgaga

SEQ ID NO: 97328 - DNA, 80 bp, synthetic construct
  source 1..80: mol_type = other DNA
tctaaaaaatggtgcatgccaaaaggagctgatgggcttagcataaattcaagagggacaggcttaagcatctgtcagag

SEQ ID NO: 97329 - DNA, 80 bp, synthetic construct; identical to SEQ ID NO: 18340
  source 1..80: mol_type = other DNA

SEQ ID NO: 97330 - DNA, 80 bp, synthetic construct
  source 1..80: mol_type = other DNA
acagggtcaatgtccagtcaaggcaagagctcctcagacctgataagcaggagccactgtctggagatgagcgccacctt

SEQ ID NO: 97331 - DNA, 80 bp, synthetic construct
  source 1..80: mol_type = other DNA
tcccagtcaatggatattcttaggaccccccccagccaggtacctgcctcatgctgcattgctgggacccaagaaaagta

SEQ ID NO: 97332 - DNA, 80 bp, synthetic construct
  source 1..80: mol_type = other DNA
tcatagaagtttccagaaggaaggggctactttggaagaaagtcttaaaaaataacttcatgaaaggagtaagactgaag

SEQ ID NO: 97333 - DNA, 80 bp, synthetic construct
  source 1..80: mol_type = other DNA
taagctgggaaccaggattgggcccaggcttggcacacacagaaggccaacaggctgtagcacaagcctggctagtctca

SEQ ID NO: 97334 - DNA, 80 bp, synthetic construct; identical to SEQ ID NO: 18341
  source 1..80: mol_type = other DNA

SEQ ID NO: 97335 - DNA, 80 bp, synthetic construct
  source 1..80: mol_type = other DNA
ttaataataattatgcccaccccacagggttactgtgaggattaaatccgtatgtatgtatgtacatgcacacacataca

SEQ ID NO: 97336 - DNA, 80 bp, synthetic construct
  source 1..80: mol_type = other DNA
ctgccactggggacagatacagagactctgaaccttaaggcaaggtaggaaatggcagaaagtaaataatagaatgttcc

SEQ ID NO: 97337 - DNA, 80 bp, synthetic construct; identical to SEQ ID NO: 18342
  source 1..80: mol_type = other DNA

SEQ ID NO: 97338 - DNA, 80 bp, synthetic construct
  source 1..80: mol_type = other DNA
gagccggccccgctgcccaggcttgggcacctggggcagctggcctgtgagatggtgctgcttccagtggtggcaggtgg

SEQ ID NO: 97339 - DNA, 80 bp, synthetic construct
  source 1..80: mol_type = other DNA
caaaaggttgcccaatgaatccacaacacagaatgttcagccctgattcaaaaatgaaacaaacaagaaaacaacctcca

SEQ ID NO: 97340 - DNA, 80 bp, synthetic construct
  source 1..80: mol_type = other DNA
gacccctggcttgtcacagcagcaggggccaggccacagccggactctgccaggcgtggcccctctcagcacagccgcct

SEQ ID NO: 97341 - DNA, 80 bp, synthetic construct; identical to SEQ ID NO: 18343
  source 1..80: mol_type = other DNA

SEQ ID NO: 97342 - DNA, 80 bp, synthetic construct
  source 1..80: mol_type = other DNA
ctcatctctgattaaaatgtcaaactccacatcagaggctagggagagacgtgggaagagatgacaccctccatctgttt

SEQ ID NO: 97343 - DNA, 80 bp, synthetic construct
  source 1..80: mol_type = other DNA
gagttttcaaaaactagatcccaattaagaactactgaatcaaaattgctggggctgagaactgggtgattgaaatattc

SEQ ID NO: 97344 - DNA, 80 bp, synthetic construct
  source 1..80: mol_type = other DNA
aatctgagctttccctttaagaaggaatcagcttttgatttaaagtaaactgagaggcaattccttggacttcagggact

SEQ ID NO: 97345 - DNA, 80 bp, synthetic construct; identical to SEQ ID NO: 18344
  source 1..80: mol_type = other DNA

SEQ ID NO: 97346 - DNA, 80 bp, synthetic construct
  source 1..80: mol_type = other DNA
tgtgccttgcatttcccagaagtgatgggtgccacttcccagtggaagcttttggagctgtctgacacctctctcctgct

SEQ ID NO: 97347 - DNA, 80 bp, synthetic construct
  source 1..80: mol_type = other DNA
cctgcccccttccctctctttcttctgagtctattccctaatcctaaataaactcagtgtaacttatagcgcttaagaag

SEQ ID NO: 97348 - DNA, 80 bp, synthetic construct
  source 1..80: mol_type = other DNA
tctactaaaaatacaaaaaaattagctgggtgtggtggcaggcgcgtgtaatctcagctactcaggaggctgaggcagga

SEQ ID NO: 97349 - DNA, 80 bp, synthetic construct; identical to SEQ ID NO: 18345
  source 1..80: mol_type = other DNA

SEQ ID NO: 97350 - DNA, 80 bp, synthetic construct
  source 1..80: mol_type = other DNA
aatgataccttaaaatgatgtgaggatgggagtctttttgtataataaatgctcccaaccctgacatagagccagacacc

SEQ ID NO: 97351 - DNA, 80 bp, synthetic construct
  source 1..80: mol_type = other DNA
cacagtgggaagaatacatttgaagcctgttttttcccctttcatgttaaaacagagaacttcctgccctgtttgtctct

SEQ ID NO: 97352 - DNA, 80 bp, synthetic construct
  source 1..80: mol_type = other DNA
acaaatgcatcgagcgaagggatgcccagcattacagacaccagagcataaagctgtgtggctcagagctaggtcaagct

SEQ ID NO: 97353 - DNA, 80 bp, synthetic construct; identical to SEQ ID NO: 18346
  source 1..80: mol_type = other DNA

SEQ ID NO: 97354 - DNA, 80 bp, synthetic construct
  source 1..80: mol_type = other DNA
gacctcggctcactgcaacttccacctcctaggttcaagtgattctcccacctcagcctcccgagtagctgggattacag

SEQ ID NO: 97355 - DNA, 80 bp, synthetic construct
  source 1..80: mol_type = other DNA
agttccattaatttcacccatttcctctttccatttccagctcttcataaggaggaaattccctctcaccttcccttcct

SEQ ID NO: 97356 - DNA, 80 bp, synthetic construct
  source 1..80: mol_type = other DNA
attaaacaaatactagacgtgatacatcctcaaatacacggagccctcttccaacattctccatttatttttttccttcc

SEQ ID NO: 97357 - DNA, 80 bp, synthetic construct
  source 1..80: mol_type = other DNA
ggtcaggaaaggctgtattgagaaaaaaaaggccacctttctacaagccagtgaaaatcaggtttggagaaaatttaaca

SEQ ID NO: 97358 - DNA, 80 bp, synthetic construct; identical to SEQ ID NO: 18347
  source 1..80: mol_type = other DNA

SEQ ID NO: 97359 - DNA, 80 bp, synthetic construct
  source 1..80: mol_type = other DNA
gagtagccaggattacaggtgcctgccaccacacccagctaatgtttgtatttttagtagagacagggtttcaccatgtt

SEQ ID NO: 97360 - DNA, 80 bp, synthetic construct
  source 1..80: mol_type = other DNA
ctagagaaaggaacacagtgggttccaggacgctcattttacataaagagaaatatgctttttaccaggaaaaggtcctg

SEQ ID NO: 97361 - DNA, 80 bp, synthetic construct
  source 1..80: mol_type = other DNA
aggaggaccacgtggcctccgtcttggtgctgttgttcctgatattgtaatagtggatgtgggcgcttccctgggttcca

SEQ ID NO: 97362 - DNA, 80 bp, synthetic construct
  source 1..80: mol_type = other DNA
ggccacccattcacccagcaagcacacagcaaacgcctgctacccaggggagccccgaccccaggctggccctggaatga

SEQ ID NO: 97363 - DNA, 80 bp, synthetic construct; identical to SEQ ID NO: 18348
  source 1..80: mol_type = other DNA

SEQ ID NO: 97364 - DNA, 80 bp, synthetic construct
  source 1..80: mol_type = other DNA
tgtctcatctcttcttccctccttttaagggcctttcactcaccacgatatcaatataaaactgccaatacttgggcctg

SEQ ID NO: 97365 - DNA, 80 bp, synthetic construct
  source 1..80: mol_type = other DNA
gaggctgcagtgagctatgatcacaccaatgtactccagcctgggcaataaagagagaacctgtctctaaaaagcaaaac

SEQ ID NO: 97366 - DNA, 80 bp, synthetic construct; identical to SEQ ID NO: 18349
  source 1..80: mol_type = other DNA

SEQ ID NO: 97367 - DNA, 80 bp, synthetic construct
  source 1..80: mol_type = other DNA
tcacacccactgggacagctagaacataagagagacaattacaagtgttgacaaggatacaaagaaattgcaatcctcat

SEQ ID NO: 97368 - DNA, 80 bp, synthetic construct
  source 1..80: mol_type = other DNA
ttgtacacaaatgtttgtagcagcattattgataatagccaaaaggcggaaacaacccaaatttcctttaactgatgaat

SEQ ID NO: 97369 - DNA, 80 bp, synthetic construct
  source 1..80: mol_type = other DNA
gcagcgggggagggcataagaggacggggttgacggggggaagccaggcaggagagtcctggagggggacggtggccccg

SEQ ID NO: 97370 - DNA, 80 bp, synthetic construct; identical to SEQ ID NO: 18350
  source 1..80: mol_type = other DNA

SEQ ID NO: 97371 - DNA, 80 bp, synthetic construct
  source 1..80: mol_type = other DNA
cctgcacgggccagagccaagtcccgccacctgcactgtgctgtgtgggccacggaaaggccaagtggcccagggtgcac

SEQ ID NO: 97372 - DNA, 80 bp, synthetic construct
  source 1..80: mol_type = other DNA
ggacggaaactctgagccctgaaaggcccctacagtgtgacctgagaagatctctcagagaagcttccagaaatccatct

SEQ ID NO: 97373 - DNA, 80 bp, synthetic construct
  source 1..80: mol_type = other DNA
gagagggaggagcgtggtcccttctttcactatttattctacacatgttgtgctctctcacctggagtgacttcgagtca

SEQ ID NO: 97374 - DNA, 80 bp, synthetic construct
  source 1..80: mol_type = other DNA
ccactaggacagctagaacataagagagacaattacaagtgttgacaaggatacaaataaattgcaatcctcatattgct

SEQ ID NO: 97375 - DNA, 80 bp, synthetic construct; identical to SEQ ID NO: 18351
  source 1..80: mol_type = other DNA

SEQ ID NO: 97376 - DNA, 80 bp, synthetic construct
  source 1..80: mol_type = other DNA
aaatatttcgttacgtgaaagaagtcataaaagacttcttttaggtgaaggagtttccctcacttaattctcccaagagg

SEQ ID NO: 97377 - DNA, 80 bp, synthetic construct
  source 1..80: mol_type = other DNA
tggcaggaaaacgtgttctgatattcatttgtatgttcccccccttgcacgccctgcctcctcctccaagctggtctcgg

SEQ ID NO: 97378 - DNA, 80 bp, synthetic construct
  source 1..80: mol_type = other DNA
gagcagaggacacttccccagaaccgagacgggagagaggggccagatctcagagcggggtggctgctgcatccaccaga

SEQ ID NO: 97379 - DNA, 80 bp, synthetic construct; identical to SEQ ID NO: 18352
  source 1..80: mol_type = other DNA

SEQ ID NO: 97380 - DNA, 80 bp, synthetic construct
  source 1..80: mol_type = other DNA
gggggcgaagcagaagctccgacttctgggcagtgttcacagtgccttcccaggcagccagcagaccctccatagacacc

SEQ ID NO: 97381 - DNA, 80 bp, synthetic construct
  source 1..80: mol_type = other DNA
ggtcccagcacagcccaccctgggtcccttccacagcgtgagccccccgtgcctgcaaaggaacgcaggatccatgtcca

SEQ ID NO: 97382 - DNA, 80 bp, synthetic construct
  source 1..80: mol_type = other DNA
taggacggtggccatttccagggaggccccgtgccctgaccccacgttgcaggacccgctccggactagcctggtgttcc

SEQ ID NO: 97383 - DNA, 80 bp, synthetic construct; identical to SEQ ID NO: 18353
  source 1..80: mol_type = other DNA

SEQ ID NO: 97384 - DNA, 80 bp, synthetic construct
  source 1..80: mol_type = other DNA
tgtgcagcgggaagggttctcatccctgctcatccctgagcaggacagggtgtgacgaatgatgttcaaaggctgttcca

SEQ ID NO: 97385 - DNA, 80 bp, synthetic construct
  source 1..80: mol_type = other DNA
gtctgtctcggctcttaagccgatggacgctccagaaacccatctggtccccagccccagcaccagccaagatccttcta

SEQ ID NO: 97386 - DNA, 80 bp, synthetic construct
  source 1..80: mol_type = other DNA
ttcacagcctccccgctgtgcctcccccagatggcgggagggggtgtgttctgtggggtgcccagtgcactggcacacaa

SEQ ID NO: 97387 - DNA, 80 bp, synthetic construct; identical to SEQ ID NO: 18354
  source 1..80: mol_type = other DNA

SEQ ID NO: 97388 - DNA, 80 bp, synthetic construct
  source 1..80: mol_type = other DNA
actgactcccacttctaagggaatgagaaagtacacccaagatgacctgagccacaatttttggtaaattaagtcctgta

SEQ ID NO: 97389 - DNA, 80 bp, synthetic construct
  source 1..80: mol_type = other DNA
agcctctggccacgtttttgtcaaccaatcagtacatcacgttgtttgatgtgggtttctgtttaaataaaggcacgggt

SEQ ID NO: 97390 - DNA, 80 bp, synthetic construct
  source 1..80: mol_type = other DNA
gcagagaggtttaagcccccaccccaggaacggagtggagggagtgtggagggctacggcgcagtgccgcccctccccat

SEQ ID NO: 97391 - DNA, 80 bp, synthetic construct; identical to SEQ ID NO: 18355
  source 1..80: mol_type = other DNA

SEQ ID NO: 97392 - DNA, 80 bp, synthetic construct
  source 1..80: mol_type = other DNA
tcttttaggagacacacaattcaactcataacagggtgcccttagaaaggttttatgttcatttgtttttagggtcaggg

SEQ ID NO: 97393 - DNA, 80 bp, synthetic construct
  source 1..80: mol_type = other DNA
ttttaattttttgtagagacgggtctccctatgttgcccaggctggtctcgaactccttggctcaagtgatcctcccacc

SEQ ID NO: 97394 - DNA, 80 bp, synthetic construct; identical to SEQ ID NO: 18356
  source 1..80: mol_type = other DNA

SEQ ID NO: 97395 - DNA, 80 bp, synthetic construct
  source 1..80: mol_type = other DNA
caccgtgatgaaagtgcatctgtcccacaaagggcagcctttccgtattcaagagtggggtgcagctcagggaggcatcg

SEQ ID NO: 97396 - DNA, 80 bp, synthetic construct
  source 1..80: mol_type = other DNA
ccagtgagatgtgattacaatgaatattcatgaccgcttcccatatcctgagttttgtcttcggccgtgtctttggagca

SEQ ID NO: 97397 - DNA, 80 bp, synthetic construct
  source 1..80: mol_type = other DNA
cctgggtccacaggctggattctcaagaggggcgagagaatggggtggtggctgccccaggccagctggtccaggcagct

SEQ ID NO: 97398 - DNA, 80 bp, synthetic construct
  source 1..80: mol_type = other DNA
ttcccagtgtgaattcccctccgatggggtgtggaggctggggtagtctctaggctgtcccagctgtgcctctggcctcc

SEQ ID NO: 97399 - DNA, 80 bp, synthetic construct; identical to SEQ ID NO: 18357
  source 1..80: mol_type = other DNA

SEQ ID NO: 97400 - DNA, 80 bp, synthetic construct
  source 1..80: mol_type = other DNA
cgaggaaaacaaagccacaccacaccgtgcacagccgtcttcacatctctggaagacatcaccgtacaggagcggtgggg

SEQ ID NO: 97401 - DNA, 80 bp, synthetic construct
  source 1..80: mol_type = other DNA
cttcaaatagtatcagaaatattttgaaatgaccctcaattccacattggggtcaattatgggggagggaaagggggaaa

SEQ ID NO: 97402 - DNA, 80 bp, synthetic construct
  source 1..80: mol_type = other DNA
gcgttgagagtgcttcacacaaacggagagaaatggttgatattagtatagtcatggttaatataaaccttaaatacctt

SEQ ID NO: 97403 - DNA, 80 bp, synthetic construct; identical to SEQ ID NO: 18358
  source 1..80: mol_type = other DNA

SEQ ID NO: 97404 - DNA, 80 bp, synthetic construct
  source 1..80: mol_type = other DNA
gggccttggagacacgcacaggaccctggaggaggccacacctgggcctcgggaacgcgcacaggaccccggaggaggcc

SEQ ID NO: 97405 - DNA, 80 bp, synthetic construct
  source 1..80: mol_type = other DNA
aggaggccagctcccactgctgcagcactcagctggggtcagcggggctgtggcgttgcaccactccatgaagggcctgg

SEQ ID NO: 97406 - DNA, 80 bp, synthetic construct
  source 1..80: mol_type = other DNA
acatctataatcccagcactttgggaggctgaagcaggaagattgcttgagcccaggggttggagatcaccctgggcaac

SEQ ID NO: 97407 - DNA, 80 bp, synthetic construct; identical to SEQ ID NO: 18359
  source 1..80: mol_type = other DNA

SEQ ID NO: 97408 - DNA, 80 bp, synthetic construct
  source 1..80: mol_type = other DNA
agaatcgcttgaacccggaaggcagaggttgtagtgtgcagagactgagccattgcactccaggctgggcaacagagtga

SEQ ID NO: 97409 - DNA, 80 bp, synthetic construct
  source 1..80: mol_type = other DNA
gggctcgctgcaccagaagcttcctagaaaaccacatcttttctgctaagaatcagaaaagtcgtgatattctcagacat

SEQ ID NO: 97410 - DNA, 80 bp, synthetic construct; identical to SEQ ID NO: 18360
  source 1..80: mol_type = other DNA

SEQ ID NO: 97411 - DNA, 80 bp, synthetic construct
  source 1..80: mol_type = other DNA
ctcgggcctcggtaaccactagggaagaaacgccagggacacctggtcctgacttgggatctggtgctccaggctctagc

SEQ ID NO: 97412 - DNA, 80 bp, synthetic construct
  source 1..80: mol_type = other DNA
cagggcggcagaggaagctgagcagggtggcagctccctgggaggccacacctgtaccccaggggttcttggacaattgg

SEQ ID NO: 97413 - DNA, 80 bp, synthetic construct
  source 1..80: mol_type = other DNA
aagtagactttcaaaagaagacatcatctaagttacttgttaggagtggcagattcatctccccggagctggtgacagta

SEQ ID NO: 97414 - DNA, 80 bp, synthetic construct; identical to SEQ ID NO: 18361
  source 1..80: mol_type = other DNA

SEQ ID NO: 97415 - DNA, 80 bp, synthetic construct
  source 1..80: mol_type = other DNA
tgtcagttcactgcctcaggagcaagagtaggaatgggaggtcctcccaagatggaagttcactgttctgtgaaacatga

SEQ ID NO: 97416 - DNA, 80 bp, synthetic construct
  source 1..80: mol_type = other DNA
aggctcctcattcatcaactgtggatgttgttagtttaagaatataaagtgctgccgggcacggtggcacctacagtccc

SEQ ID NO: 97417 - DNA, 80 bp, synthetic construct
  source 1..80: mol_type = other DNA
agtggtgcgatctcagctcactgcacccttggcctcctggattcaaacaattctctcaccctgcctcctgagtagctggg

SEQ ID NO: 97418 - DNA, 80 bp, synthetic construct; identical to SEQ ID NO: 18362
  source 1..80: mol_type = other DNA

SEQ ID NO: 97419 - DNA, 80 bp, synthetic construct
  source 1..80: mol_type = other DNA
atggtagggatggtagtgatagtaggtagggatggtagtgatggtaggtagtgatggtagtgatggtaggtagtgatggg

SEQ ID NO: 97420 - DNA, 80 bp, synthetic construct
  source 1..80: mol_type = other DNA
gatggtaggtagtgatgatggtagtgatagtaggtagtaatagtagtgatggtaggttgtgatggtagtgatggtaggta

SEQ ID NO: 97421 - DNA, 80 bp, synthetic construct; identical to SEQ ID NO: 18363
  source 1..80: mol_type = other DNA

SEQ ID NO: 97422 - DNA, 80 bp, synthetic construct
  source 1..80: mol_type = other DNA
gatggtagtgatggtaggtagtgatgatggtagcaatggtaggtagggatggtagtgatggtaggtagtgatgatggtag

SEQ ID NO: 97423 - DNA, 80 bp, synthetic construct
  source 1..80: mol_type = other DNA
ggggatggtagtgatggtaggtggggatggtagtgatggtaggtggggatggtagtgatggtaggtagtgatgatggtag

SEQ ID NO: 97424 - DNA, 80 bp, synthetic construct
  source 1..80: mol_type = other DNA
agtgatggtaggtagtgatgatggtagcgatggtagggatggtagtgatagtagtgagggtaggtagtgatgatggtagt

SEQ ID NO: 97425 - DNA, 80 bp, synthetic construct
  source 1..80: mol_type = other DNA
tgaaggcttcagaactctgatcttctcaattcaggtggaaacgtgtctttaggatagaaaacaagtaaactgcaggattc

SEQ ID NO: 97426 - DNA, 80 bp, synthetic construct; identical to SEQ ID NO: 18364
  source 1..80: mol_type = other DNA

SEQ ID NO: 97427 - DNA, 80 bp, synthetic construct
  source 1..80: mol_type = other DNA
acacttcattctagttctgtggtttctgcaaggaactggtgggccaaccattcctaaggaatatggtgttgacaagctga

SEQ ID NO: 97428 - DNA, 80 bp, synthetic construct
  source 1..80: mol_type = other DNA
agaataaatggatttctgcttgcacttctattcccagagctgagtatttgagtgtttgttctaggatctggtatcacaca

SEQ ID NO: 97429 - DNA, 80 bp, synthetic construct
  source 1..80: mol_type = other DNA
ctctgtttggttaagatcggatagaaattcttcctcttcacatctcacatccatggacatgtcatggcagaaggctccat

SEQ ID NO: 97430 - DNA, 80 bp, synthetic construct
  source 1..80: mol_type = other DNA
agaaggaggagatagaaggagatggagaagaaggcatgagtcagtttcctcccacactccaggcctttcccaggggttgg

SEQ ID NO: 97431 - DNA, 80 bp, synthetic construct; identical to SEQ ID NO: 18365
  source 1..80: mol_type = other DNA

SEQ ID NO: 97432 - DNA, 80 bp, synthetic construct
  source 1..80: mol_type = other DNA
tgagcgaatcacaaagttattttaggtaggtcatacgaaatagaaagagatacgaaacgtagaacagacaataactcagt

SEQ ID NO: 97433 - DNA, 80 bp, synthetic construct
  source 1..80: mol_type = other DNA
ctcttaaagccccgtgtctaaaacagtgcccggcacaaagtaaaggctcagtaagtatttactggatgaataaatcggta

SEQ ID NO: 97434 - DNA, 80 bp, synthetic construct
  source 1..80: mol_type = other DNA
tgcggagctccagggatggcggcaggcagcctccgccccgcacaagggtgctgggagacatctgtccctccccacctgcc

SEQ ID NO: 97435 - DNA, 80 bp, synthetic construct; identical to SEQ ID NO: 18366
  source 1..80: mol_type = other DNA

SEQ ID NO: 97436 - DNA, 80 bp, synthetic construct
  source 1..80: mol_type = other DNA
tgaccccagagcttgctcaagtttgagaaccaccagcctaactattgttgaggagggaggaagcggtggtggccccactt

SEQ ID NO: 97437 - DNA, 80 bp, synthetic construct
  source 1..80: mol_type = other DNA
aaaggccccacctaggagatcagagctcttcccaaacaccaacggcaaccccagctcatcggagccaccaggaataattc

SEQ ID NO: 97438 - DNA, 80 bp, synthetic construct; identical to SEQ ID NO: 18367
  source 1..80: mol_type = other DNA

SEQ ID NO: 97439 - DNA, 80 bp, synthetic construct
  source 1..80: mol_type = other DNA
gatcacttgaggtcaggagttcgagaccagtctggccaacatagcgaaaccccgtctctactaaaaatacaaaacttagc

SEQ ID NO: 97440 - DNA, 80 bp, synthetic construct
  source 1..80: mol_type = other DNA
aataaaaataagcttaaaaattgcacttggatataaaaattgtgcaggtgtgaatggctgcaatttggaactaccctatc

SEQ ID NO: 97441 - DNA, 80 bp, synthetic construct
  source 1..80: mol_type = other DNA
gttatctttgtatctttgtaaaatgaatccccctcttataaccaccatagggcttcataaatgccatgtcctacagtatt

SEQ ID NO: 97442 - DNA, 80 bp, synthetic construct; identical to SEQ ID NO: 18368
  source 1..80: mol_type = other DNA

SEQ ID NO: 97443 - DNA, 80 bp, synthetic construct
  source 1..80: mol_type = other DNA
ttaggctggggtccctgatgtctagtgttattctgggtacacagcagtgtccacacagcagataccagcttaactgtgtg

SEQ ID NO: 97444 - DNA, 80 bp, synthetic construct
  source 1..80: mol_type = other DNA
agtgaattaggcaggtggctcttagctgacttttccttctatgatcagctctgttccttttctcaagccacatcctcacg

SEQ ID NO: 97445 - DNA, 80 bp, synthetic construct
  source 1..80: mol_type = other DNA
aggctcagagcccttttccttccaacacgacgatgagctaacctggtatataaccacgcggcaaagcaccgacaagctcc

SEQ ID NO: 97446 - DNA, 80 bp, synthetic construct
  source 1..80: mol_type = other DNA
gagtctttcgaactggctctttcttccagacacaatgcttctgtcctctggggtttcaggtgtagagaaaaggaggccac

SEQ ID NO: 97447 - DNA, 80 bp, synthetic construct; identical to SEQ ID NO: 18369
  source 1..80: mol_type = other DNA

SEQ ID NO: 97448 - DNA, 80 bp, synthetic construct
  source 1..80: mol_type = other DNA
atattaagaagtgggcttgggggtggttaggtcatgaggacagggccctcagaaatgggttactactcttagaaaagagc

SEQ ID NO: 97449 - DNA, 80 bp, synthetic construct
  source 1..80: mol_type = other DNA
ggactttccagcctccagaactggaaataaatttctattcttcagaaatcacccagtctcgggtattttgttatagcagt

SEQ ID NO: 97450 - DNA, 80 bp, synthetic construct
  source 1..80: mol_type = other DNA
cctcctgagtagctgggattacaggcccccgccaccacccctggctaattttcatattcttagcagagacagggtttcac

SEQ ID NO: 97451 - DNA, 80 bp, synthetic construct; identical to SEQ ID NO: 18370
  source 1..80: mol_type = other DNA

SEQ ID NO: 97452 - DNA, 80 bp, synthetic construct
  source 1..80: mol_type = other DNA
acctcgagaattctaaccgtgttggggaaacgaagacgcagaggcagtgccccctgcctggcaggccgcaggccctgaga

SEQ ID NO: 97453 - DNA, 80 bp, synthetic construct
  source 1..80: mol_type = other DNA
ggatgatggtggggaagttcttagtcaagaatctccgtgcctcagtttctccatgtccctattagtctctgtgtctagat

SEQ ID NO: 97454 - DNA, 80 bp, synthetic construct
  source 1..80: mol_type = other DNA
cagggccgcgccctctctgaagcctgtgggggacccttccgtgcctcttcctagttctgagggtcactggctctccctgg

SEQ ID NO: 97455 - DNA, 80 bp, synthetic construct; identical to SEQ ID NO: 18371
  source 1..80: mol_type = other DNA

SEQ ID NO: 97456 - DNA, 80 bp, synthetic construct
  source 1..80: mol_type = other DNA
tgctgggctgcagggggagcgagacacaccagggaggctgagaacccacaccgcctaaaccgaggggccgtgcacacagg

SEQ ID NO: 97457 - DNA, 80 bp, synthetic construct
  source 1..80: mol_type = other DNA
cttgagtgtttaatggaaagacgcctgtccagaaggtttctcctggaaggagggatcaaatctgtctaagctccgaagta

SEQ ID NO: 97458 - DNA, 80 bp, synthetic construct
  source 1..80: mol_type = other DNA
ggccatgctcatcaaagcagcccaagctcacactcagccaaggagccccgagcctggattggaacccagatggaccaatt

SEQ ID NO: 97459 - DNA, 80 bp, synthetic construct; identical to SEQ ID NO: 18372
  source 1..80: mol_type = other DNA

SEQ ID NO: 97460 - DNA, 80 bp, synthetic construct
  source 1..80: mol_type = other DNA
tgctgccatctaacttttcttaatggcctggtagggaaatatcacaaaacaaacacacacaactcaaagaaaaaagaaac

SEQ ID NO: 97461 - DNA, 80 bp, synthetic construct
  source 1..80: mol_type = other DNA
gagtttggggcctctggcaaaaaaaaaaaagaaaaaaaaaaatcacttctgcttttgccaagcagcttccctttttctgg

SEQ ID NO: 97462 - DNA, 80 bp, synthetic construct; identical to SEQ ID NO: 18373
  source 1..80: mol_type = other DNA

SEQ ID NO: 97463 - DNA, 80 bp, synthetic construct
  source 1..80: mol_type = other DNA
atcatcatcgtctatgaaatgtgcacgtcctcactcccatcactgctaaaacactgctcagactcaacttccccagggga

SEQ ID NO: 97464 - DNA, 80 bp, synthetic construct
  source 1..80: mol_type = other DNA
tgccagcctcaaagcaaaccctcaacagtgctgcttactgagtgacaggacggacgcacaggaacccaggctcctacgca

SEQ ID NO: 97465 - DNA, 80 bp, synthetic construct
  source 1..80: mol_type = other DNA
caggagttcaagaccagcctggccaacatggcgaaaccccgtctttactgaaaatacaaaaattaaccgggcatggtagc

SEQ ID NO: 97466 - DNA, 80 bp, synthetic construct; identical to SEQ ID NO: 18374
  source 1..80: mol_type = other DNA

SEQ ID NO: 97467 - DNA, 80 bp, synthetic construct
  source 1..80: mol_type = other DNA
gcacggagcttctgcccagagccctgcactccacgagaattagcttagatcttgacctcctcctccctccctggggcccc

SEQ ID NO: 97468 - DNA, 80 bp, synthetic construct
  source 1..80: mol_type = other DNA
gtaggggcggctgccttgaatggattccaaggattccaagggtaaacctagtgtctctggactcagccctaagtcacttt

SEQ ID NO: 97469 - DNA, 80 bp, synthetic construct; identical to SEQ ID NO: 18375
  source 1..80: mol_type = other DNA

SEQ ID NO: 97470 - DNA, 80 bp, synthetic construct
  source 1..80: mol_type = other DNA
aaatatggctcacgcctgtaatcccagcaatttgggaggccaaggtgggtggatcacgaggtcaggagattgagaccatc

SEQ ID NO: 97471 - DNA, 80 bp, synthetic construct
  source 1..80: mol_type = other DNA
cagtccagcctgggcaacacagtgagactccgtctcaaaaaaaaaaaaaaaaaaagtcaaatattggctattccacgcag

SEQ ID NO: 97472 - DNA, 80 bp, synthetic construct
  source 1..80: mol_type = other DNA
catgctgcttcccaccgaaaaaccaaaaacaaatagaatccaggccccctttattctacagacaaggataaccttggtgt

SEQ ID NO: 97473 - DNA, 80 bp, synthetic construct; identical to SEQ ID NO: 18376
  source 1..80: mol_type = other DNA

SEQ ID NO: 97474 - DNA, 80 bp, synthetic construct
  source 1..80: mol_type = other DNA
cccaagagcctctggccaggacgcagccttcccccacacatcacaggcacagggaggcatttggagcgcccgaggatagg

SEQ ID NO: 97475 - DNA, 80 bp, synthetic construct
  source 1..80: mol_type = other DNA
ctcccactccttgagctcagggcatgagtacggccacagaatcagggtgcctggtccttagggcgcgcctcctgtgattc

SEQ ID NO: 97476 - DNA, 80 bp, synthetic construct
  source 1..80: mol_type = other DNA
cactttacacacacaccaccctccaccactctccacataccaccctccacacacaccatgctccacacacaccatgctcc

SEQ ID NO: 97477 - DNA, 80 bp, synthetic construct
  source 1..80: mol_type = other DNA
acacacaccaccctccacacacaccaccctccacacacaccaccctccacacacaccacgctccacacacaccgccctcc

SEQ ID NO: 97478 - DNA, 80 bp, synthetic construct; identical to SEQ ID NO: 18377
  source 1..80: mol_type = other DNA

SEQ ID NO: 97479 - DNA, 80 bp, synthetic construct
  source 1..80: mol_type = other DNA
acataccactgcagacactgggatgtttttgccaagcagagaggctgcaggcagagaggcatgggctgtgccatagggga

SEQ ID NO: 97480 - DNA, 80 bp, synthetic construct
  source 1..80: mol_type = other DNA
tgtctccatttccaaaaggatgcttgcaatgcagttacataaaataccttgaaaggaggaaaaacagtagccacaggaag

SEQ ID NO: 97481 - DNA, 80 bp, synthetic construct; identical to SEQ ID NO: 18378
  source 1..80: mol_type = other DNA

SEQ ID NO: 97482 - DNA, 80 bp, synthetic construct
  source 1..80: mol_type = other DNA
gcacgctggagtggccccgaggcgggcccctgcggaggcttgcagctccctggaaggtattttgccttcttcattgcccc

SEQ ID NO: 97483 - DNA, 80 bp, synthetic construct
  source 1..80: mol_type = other DNA
taggaacaggcagagttgctgatgagttaaatggcaaaatatgtgaaagacgttaagtctggcacccacaccgaatataa

SEQ ID NO: 97484 - DNA, 80 bp, synthetic construct
  source 1..80: mol_type = other DNA
taaggaaacaagataaaggaggagaagatacaggacagcaggcagaagacaacaagaagggcggagagaaaacggagcag

SEQ ID NO: 97485 - DNA, 80 bp, synthetic construct; identical to SEQ ID NO: 18379
  source 1..80: mol_type = other DNA

SEQ ID NO: 97486 - DNA, 80 bp, synthetic construct
  source 1..80: mol_type = other DNA
aaaaaaaaaaaaagacttcatataaatgcatctatagtcagcctataaaaatggttggaaagcaacagcccactcctctc

SEQ ID NO: 97487 - DNA, 80 bp, synthetic construct
  source 1..80: mol_type = other DNA
ccaacggcctctgctgtgcagattttcccatctgtagaatggggacaatagcagcaccagcacacagctgtgtggggatg

SEQ ID NO: 97488 - DNA, 80 bp, synthetic construct
  source 1..80: mol_type = other DNA
ctaacaccttctatacaatcccaaacggtgatttcctgtcactaggaaggaatggggcataggagacaaagaattgcggg

SEQ ID NO: 97489 - DNA, 80 bp, synthetic construct; identical to SEQ ID NO: 18380
  source 1..80: mol_type = other DNA

SEQ ID NO: 97490 - DNA, 80 bp, synthetic construct
  source 1..80: mol_type = other DNA
tgaagagcccaatctgtaccacttggtgggaaggtgactgaagctactggctccttggagctttaagcagtatggagatt

SEQ ID NO: 97491 - DNA, 80 bp, synthetic construct
  source 1..80: mol_type = other DNA
accccattattcccctccactattcacctgcccacacacacacaccacccctgtgctacaggaagagagagtcacaggga

SEQ ID NO: 97492 - DNA, 80 bp, synthetic construct
  source 1..80: mol_type = other DNA
tccaaagatgctttgctggtagctaggaggtattcagcaagcacctgctatgcagaatgcacagtgtggagcacttggag

SEQ ID NO: 97493 - DNA, 80 bp, synthetic construct; identical to SEQ ID NO: 18381
  source 1..80: mol_type = other DNA

SEQ ID NO: 97494 - DNA, 80 bp, synthetic construct
  source 1..80: mol_type = other DNA
cggggaacggcgtcagacggggcggggcgaggtgaggcccgcaagccagtccctgctgcacacggtagcgaaggcggaaa

SEQ ID NO: 97495 - DNA, 80 bp, synthetic construct
  source 1..80: mol_type = other DNA
cgtgttcactgagacacagctaagacacacacttaaagggccatgggattagcgaatagggaagacttcccaggggcgag

SEQ ID NO: 97496 - DNA, 80 bp, synthetic construct
  source 1..80: mol_type = other DNA
ctcatcagccacttgccagccatcctcttgtcccagtgagagctgcaggttaaggcaccgaggatgtatctccatctctg

SEQ ID NO: 97497 - DNA, 80 bp, synthetic construct; identical to SEQ ID NO: 18382
  source 1..80: mol_type = other DNA

SEQ ID NO: 97498 - DNA, 80 bp, synthetic construct
  source 1..80: mol_type = other DNA
cagcagctatgatatgcccagccactgccccttctccagcctccgtggagcccctcctgctggaggcagggcagaaaggg

SEQ ID NO: 97499 - DNA, 80 bp, synthetic construct
  source 1..80: mol_type = other DNA
cctccctggcatccacgcctgtactggtggacaatcagagacacgcactgatgggtgccatctgtggtgcccaaggcctc

SEQ ID NO: 97500 - DNA, 80 bp, synthetic construct
  source 1..80: mol_type = other DNA
tttattttctggagtcaaggtgcaaagtccccatgagttccccattagacagcaaatgccccaaggagaagaggacaaaa

SEQ ID NO: 97501 - DNA, 80 bp, synthetic construct
  source 1..80: mol_type = other DNA
aggtgcaggcagacgagactccaaggaccctaaagtcccagtattctgcttctaggtagagcttgccaggttagatttct

SEQ ID NO: 97502 - DNA, 80 bp, synthetic construct; identical to SEQ ID NO: 18383
  source 1..80: mol_type = other DNA

SEQ ID NO: 97503 - DNA, 80 bp, synthetic construct
  source 1..80: mol_type = other DNA
agttcaagaccagcctgaacatggcaaaacttcatctctactaaaaatacaaaacctggccggtcatggtggtgcatgct

SEQ ID NO: 97504 - DNA, 80 bp, synthetic construct
  source 1..80: mol_type = other DNA
aaaagaataaaattatctgaagctggggacatccccagaaaacctgggatgggatggtggccacagctacattcttaggg

SEQ ID NO: 97505 - DNA, 80 bp, synthetic construct; identical to SEQ ID NO: 18384
  source 1..80: mol_type = other DNA

SEQ ID NO: 97506 - DNA, 80 bp, synthetic construct
  source 1..80: mol_type = other DNA
tcccctcagtggacggatgctccctcctccaatggcaccaggaaatagagaggtccctgaaggggatgaggcccgaggca

SEQ ID NO: 97507 - DNA, 80 bp, synthetic construct
  source 1..80: mol_type = other DNA
ggaggtgaaggaaaaaaacaaataacacagtaatgtgcctaaaatctgccccttttttttctggccagtagattggatgg

SEQ ID NO: 97508 - DNA, 80 bp, synthetic construct
  source 1..80: mol_type = other DNA
gatttgtaaaaaacgggttcactcagatttttctaaattgggtcgtcgagttaactaagcatttccattctcaaagacgg

SEQ ID NO: 97509 - DNA, 80 bp, synthetic construct; identical to SEQ ID NO: 18385
  source 1..80: mol_type = other DNA

SEQ ID NO: 97510 - DNA, 80 bp, synthetic construct
  source 1..80: mol_type = other DNA
ctggtagatccctgggttcagagggcactggtaggtctctgggtgcagggagcactggtagatccctgggttcagagggc

SEQ ID NO: 97511 - DNA, 80 bp, synthetic construct
  source 1..80: mol_type = other DNA
cgctggtaggtccccgggtgcagggaccactggtaggtccccgggtacagggggcactggtagaccccagggtacagggg

SEQ ID NO: 97512 - DNA, 80 bp, synthetic construct
  source 1..80: mol_type = other DNA
cccgacgggatccgcctcacccaagttcacatccccttcccagggacagtgtgggagccctttgcctcaatctgggacaa

SEQ ID NO: 97513 - DNA, 80 bp, synthetic construct; identical to SEQ ID NO: 18386
  source 1..80: mol_type = other DNA

SEQ ID NO: 97514 - DNA, 80 bp, synthetic construct
  source 1..80: mol_type = other DNA
agcaggctgaggtaagaggatcgcttgagctcaggagttccaggcagcagtgttcgcaccaccgcactccagcctggact

SEQ ID NO: 97515 - DNA, 80 bp, synthetic construct
  source 1..80: mol_type = other DNA
atctagaggagaggagagaggagggaggtgatagagaatggagtctggagcccacagcccttgtcttgaaatagcacgaa

SEQ ID NO: 97516 - DNA, 80 bp, synthetic construct
  source 1..80: mol_type = other DNA
caacacgcctccagtgcaaaggcccaggttcaatccttgcttcgccactggccagccatgcgacgtggcaggtcacttaa

SEQ ID NO: 97517 - DNA, 80 bp, synthetic construct; identical to SEQ ID NO: 18387
  source 1..80: mol_type = other DNA

SEQ ID NO: 97518 - DNA, 80 bp, synthetic construct
  source 1..80: mol_type = other DNA
aagcagtttccatacagccgtggtgcttgagccaaacggagacttaggctccagccctctttttcaaagtgtatatatgt

SEQ ID NO: 97519 - DNA, 80 bp, synthetic construct
  source 1..80: mol_type = other DNA
cctgtgcacatgaccttgctttccatccacaggcagagtctgtccctccatcccttgagtctcagccgtgtgacttgcca

SEQ ID NO: 97520 - DNA, 80 bp, synthetic construct; identical to SEQ ID NO: 18388
  source 1..80: mol_type = other DNA

SEQ ID NO: 97521 - DNA, 80 bp, synthetic construct
  source 1..80: mol_type = other DNA
caggtgacagaggcgccaggcagggcttcctgattccgagtgtagtgttcattctaatctccattatttaagaagcaaaa

SEQ ID NO: 97522 - DNA, 80 bp, synthetic construct
  source 1..80: mol_type = other DNA
cccgtctctattaaaaaatacaaaaaattagctgggtgtggtggcgggcgcccgtagacccagctactcgggaggctgag

SEQ ID NO: 97523 - DNA, 80 bp, synthetic construct
  source 1..80: mol_type = other DNA
gaagggtaaagaataaccttcaatgaccttcatctagaaaggggccaagtgaagcgtatggagacctgacacacacaggg

SEQ ID NO: 97524 - DNA, 80 bp, synthetic construct; identical to SEQ ID NO: 18389
  source 1..80: mol_type = other DNA

SEQ ID NO: 97525 - DNA, 80 bp, synthetic construct
  source 1..80: mol_type = other DNA
ccaccccagatggtatctgatacaatcaagaatattgatcggtcatcagcaccatgaatgcaactccccatcaagcgtat

SEQ ID NO: 97526 - DNA, 80 bp, synthetic construct
  source 1..80: mol_type = other DNA
attagcccaataggcaaatggctgtgtggagcctgcctgcctgcccgtcttctggaagttgagcaggtgacagagctgtc

SEQ ID NO: 97527 - DNA, 80 bp, synthetic construct
  source 1..80: mol_type = other DNA
gttggttttctcacagcccctccacactagaacttccagcagtgggaggaggggacgcaaggaaagacccagaccttgga

SEQ ID NO: 97528 - DNA, 80 bp, synthetic construct; identical to SEQ ID NO: 18390
  source 1..80: mol_type = other DNA

SEQ ID NO: 97529 - DNA, 80 bp, synthetic construct
  source 1..80: mol_type = other DNA
gactccaggcatagtggatgagggccggtcctaatggcctcatcctaatctatatgttaatcacatctgcaaaaacccca

SEQ ID NO: 97530 - DNA, 80 bp, synthetic construct
  source 1..80: mol_type = other DNA
cccagcactaaccctgcgtaaacatagttcttagcaatggctctctatttctttattcacaagtggagaatttgcatcct

SEQ ID NO: 97531 - DNA, 80 bp, synthetic construct
  source 1..80: mol_type = other DNA
aaaagacgctgggagcctggggttacggagcaaactggtctttgtcgtgcattcatcagcagcttcactgccaggtcaga

SEQ ID NO: 97532 - DNA, 80 bp, synthetic construct; identical to SEQ ID NO: 18391
  source 1..80: mol_type = other DNA

SEQ ID NO: 97533 - DNA, 80 bp, synthetic construct
  source 1..80: mol_type = other DNA
caagcaaagtcaccactctgtttcaacgtcacagctcagctgcccatcggcctttgtttgttgcgcattttaaacgacgt

SEQ ID NO: 97534 - DNA, 80 bp, synthetic construct
  source 1..80: mol_type = other DNA
cagtgtctgtggctctactcggtaaccttagcagcccccataaatgtaaaaaggtgcctagaaacagaaagacactggcc

SEQ ID NO: 97535 - DNA, 80 bp, synthetic construct
  source 1..80: mol_type = other DNA
tgaagaggcgttggcaaataaaaagtgcttccaaatgatttctttcgccagtctagtgttcagcacagtccaaattgcaa

SEQ ID NO: 97536 - DNA, 80 bp, synthetic construct
  source 1..80: mol_type = other DNA
gctgctgcttctgtttatgttaattcagtactcgagctgggaaatcatgatccaggatttaactctttgcattcatcagt

SEQ ID NO: 97537 - DNA, 80 bp, synthetic construct; identical to SEQ ID NO: 18392
  source 1..80: mol_type = other DNA

SEQ ID NO: 97538 - DNA, 80 bp, synthetic construct
  source 1..80: mol_type = other DNA
ggtgtccctgcgccctctgtgtggtagagtctttgaggaagtgatcacgcatcactgtctagctgcccgttccctccagg

SEQ ID NO: 97539 - DNA, 80 bp, synthetic construct
  source 1..80: mol_type = other DNA
aaaaaccctggagccacaggccagtctgaggaccccatcaccaagaagcttgactactgaaggttcccatagcatactct

SEQ ID NO: 97540 - DNA, 80 bp, synthetic construct
  source 1..80: mol_type = other DNA
ctggtttgggcattcatctttatttggaagccaaatgttgaattgcctttgttgaatagtcaaaagtcaaggatatctct

SEQ ID NO: 97541 - DNA, 80 bp, synthetic construct
  source 1..80: mol_type = other DNA
gaggaataactcatgggggcagaagaaatggaacagtattacaccagggaagctattaatagtacccagttgtttttaag

SEQ ID NO: 97542 - DNA, 80 bp, synthetic construct; identical to SEQ ID NO: 18393
  source 1..80: mol_type = other DNA

SEQ ID NO: 97543 - DNA, 80 bp, synthetic construct
  source 1..80: mol_type = other DNA
gggctccccttcccaccctcatcctggagttcccaaactggctcattccagccggatagaggctatggggcaggagctgg

SEQ ID NO: 97544 - DNA, 80 bp, synthetic construct
  source 1..80: mol_type = other DNA
ctctacttttagtttgtctccagcgactgtgcaggctttctggagcacctctccccagagggccagcgacatgtacattc

SEQ ID NO: 97545 - DNA, 80 bp, synthetic construct; identical to SEQ ID NO: 18394
  source 1..80: mol_type = other DNA

SEQ ID NO: 97546 - DNA, 80 bp, synthetic construct
  source 1..80: mol_type = other DNA
atgccaacaggccaggactctgacctctacggccctttgctactttgaaaggccagcatggcctcaggatagaatgtgcc

SEQ ID NO: 97547 - DNA, 80 bp, synthetic construct
  source 1..80: mol_type = other DNA
ttcgttaggtccaagggccacgttcccttccccagtacacagccatcaaccgaattcaattgataaattacttagtagtt

SEQ ID NO: 97548 - DNA, 80 bp, synthetic construct
  source 1..80: mol_type = other DNA
tcaaaatcatcagagcccgagagaggaggtttgcaacaattgcctccaacaccctaggccacggttctgtttatgatatg

SEQ ID NO: 97549 - DNA, 80 bp, synthetic construct; identical to SEQ ID NO: 18395
  source 1..80: mol_type = other DNA

SEQ ID NO: 97550 - DNA, 80 bp, synthetic construct
  source 1..80: mol_type = other DNA
aggctggccttctcacgtcccacgtctgcccttctgcattctctcatcacagctgcagttcaggccctcggacccttacc

SEQ ID NO: 97551 - DNA, 80 bp, synthetic construct
  source 1..80: mol_type = other DNA
cagacaggaacttaggttcaggagtttatcccagggagtgcagacaagggaatggggaaactgaggcaggaactggccag

SEQ ID NO: 97552 - DNA, 80 bp, synthetic construct
  source 1..80: mol_type = other DNA
tgcccctcagggcataatcccagcacttccaggggttcctgcactaggctgagcaagctgccagggtctgagaggattcc

SEQ ID NO: 97553 - DNA, 80 bp, synthetic construct; identical to SEQ ID NO: 18396
  source 1..80: mol_type = other DNA

SEQ ID NO: 97554 - DNA, 80 bp, synthetic construct
  source 1..80: mol_type = other DNA
tcaaaccctttcgccaggaggcgtggctcttcacctggaagcagccatcccctcccgcccgattctgtggggtgctccca

SEQ ID NO: 97555 - DNA, 80 bp, synthetic construct
  source 1..80: mol_type = other DNA
tgctagcctttgtctgaaagcctcattttcccagcgaggttataactgccacctagcctggcacaatgatccataggtaa

SEQ ID NO: 97556 - DNA, 80 bp, synthetic construct
  source 1..80: mol_type = other DNA
tgggctggctcatgccaagaacgttatgaaaagctgccaaagtcaccactggcagcaagaagggtggtccgaggacccca

SEQ ID NO: 97557 - DNA, 80 bp, synthetic construct; identical to SEQ ID NO: 18397
  source 1..80: mol_type = other DNA

SEQ ID NO: 97558 - DNA, 80 bp, synthetic construct
  source 1..80: mol_type = other DNA
tatgatgtatatgtatatatgtatatgtatatgatgtatatgtatatgatgtatatgtatatgtatatgtatatgatgta

SEQ ID NO: 97559 - DNA, 80 bp, synthetic construct
  source 1..80: mol_type = other DNA
tatatgtatatgatgtatatgtatatgatgtatatgtatatgtatatgatgtatatgtatatgtatatgatgtatatgta

SEQ ID NO: 97560 - DNA, 80 bp, synthetic construct
  source 1..80: mol_type = other DNA
gatgggtgtgatggctcacgcctgtaatcccagcactttgagaggtcaaggtgggcgggtcactcgagcccagctcatgt

SEQ ID NO: 97561 - DNA, 80 bp, synthetic construct; identical to SEQ ID NO: 18398
  source 1..80: mol_type = other DNA

SEQ ID NO: 97562 - DNA, 80 bp, synthetic construct
  source 1..80: mol_type = other DNA
taaatgtcttacatgagagatgtaaacaagaatgtttcattttcaaatagaacacttattcctgcataatcgagtcacca

SEQ ID NO: 97563 - DNA, 80 bp, synthetic construct
  source 1..80: mol_type = other DNA
ggccggagtttacacaggaggaccttagcggggcgtctaaaagaagggtggctcagcaaacacggggcagtgcgccctgg

SEQ ID NO: 97564 - DNA, 80 bp, synthetic construct
  source 1..80: mol_type = other DNA
tgtgtgtgtgtacacaaacatttacttggttggctgaggcggagggtgtgacccagtgggccacacctcccaccgcccta

SEQ ID NO: 97565 - DNA, 80 bp, synthetic construct; identical to SEQ ID NO: 18399
  source 1..80: mol_type = other DNA

SEQ ID NO: 97566 - DNA, 80 bp, synthetic construct
  source 1..80: mol_type = other DNA
tcccctcccctctctccgtctccagcagccgagcgcgggctccacctccccggagcgcagtccacaccgtcccttttcag

SEQ ID NO: 97567 - DNA, 80 bp, synthetic construct
  source 1..80: mol_type = other DNA
agattgagccccggctccgccagcccagctcgggccctgtccctctaccctttccccaagccgcccgaagtgacaggagg

SEQ ID NO: 97568 - DNA, 80 bp, synthetic construct
  source 1..80: mol_type = other DNA
cccgccggggctggaaacatcttttttcttcttggtgtccataaccgcgcttcccataactctaaccagaagttgattct

SEQ ID NO: 97569 - DNA, 80 bp, synthetic construct
  source 1..80: mol_type = other DNA
gccgaattcaagcgtcctttcctacggaaccctcgtaggcaaatcagtcaaagcccgtcccggttctggtgtctccccgg

SEQ ID NO: 97570 - DNA, 80 bp, synthetic construct; identical to SEQ ID NO: 18400
  source 1..80: mol_type = other DNA

SEQ ID NO: 97571 - DNA, 80 bp, synthetic construct
  source 1..80: mol_type = other DNA
gcggggtgcgtcccactcacagggatcctctttcagttcatttagataggtgccctttgggcccttgaaattcaacggct

SEQ ID NO: 97572 - DNA, 80 bp, synthetic construct; identical to SEQ ID NO: 18401
  source 1..80: mol_type = other DNA

SEQ ID NO: 97573 - DNA, 80 bp, synthetic construct
  source 1..80: mol_type = other DNA
cagcgtggtcacctggtccttttcacctgtgcacaggtaacctcagactcgagtcagtgacactgctcaacgcacccatc

SEQ ID NO: 97574 - DNA, 80 bp, synthetic construct
  source 1..80: mol_type = other DNA
ccgagcaagccccaggcagctacactgggcatgctcagtagagcctgcggcttggggactctgcgctcgcacccagagct

SEQ ID NO: 97575 - DNA, 80 bp, synthetic construct
  source 1..80: mol_type = other DNA
gatgtggcgggactctttatgcgctgcggcaggatacgcgctcggcgctgggacgcgactgcgctcagttctctcctctc

SEQ ID NO: 97576 - DNA, 80 bp, synthetic construct; identical to SEQ ID NO: 18402
  source 1..80: mol_type = other DNA

SEQ ID NO: 97577 - DNA, 80 bp, synthetic construct
  source 1..80: mol_type = other DNA
gctccagggagggggtctgagtcgcctgtcaccatttccagggctgggaacgccggagagttggtctctccccttctact

SEQ ID NO: 97578 - DNA, 80 bp, synthetic construct
  source 1..80: mol_type = other DNA
cgccgctgccaggcctctggctgctgaggagaagcaggcccagtcgctgcaaccatccagcagccgccgcagcagccatt

SEQ ID NO: 97579 - DNA, 80 bp, synthetic construct
  source 1..80: mol_type = other DNA
catcatcaaagagatcgttagcagaaacaaaaggagatatcaagaggatggattcgacttagacttgacctgtatccatt

SEQ ID NO: 97580 - DNA, 80 bp, synthetic construct; identical to SEQ ID NO: 18403
  source 1..80: mol_type = other DNA

SEQ ID NO: 97581 - DNA, 80 bp, synthetic construct
  source 1..80: mol_type = other DNA
agaataaaatgaaaattagtgttgcacgtacgcatattgcatcagaatcttgcagtgattgttttagtttcctgagttgc

SEQ ID NO: 97582 - DNA, 80 bp, synthetic construct
  source 1..80: mol_type = other DNA
agtcaatagtgccataatataccttataaggcgttcttactagatctttgttatatttacctttttctctccctatgggg

SEQ ID NO: 97583 - DNA, 80 bp, synthetic construct
  source 1..80: mol_type = other DNA
ttcagttcatgcttgaaatttaagtattgttgtgatgccagaattgctgctcaccgtttttaggtttcaggtcctctgac

SEQ ID NO: 97584 - DNA, 80 bp, synthetic construct; identical to SEQ ID NO: 18404
  source 1..80: mol_type = other DNA

SEQ ID NO: 97585 - DNA, 80 bp, synthetic construct
  source 1..80: mol_type = other DNA
aagttattggtctgaagtgactgaagcatttaggctctatcaaggcctaaaatttggtaatatgagtttggtaatgcgaa

SEQ ID NO: 97586 - DNA, 80 bp, synthetic construct
  source 1..80: mol_type = other DNA
atttttttttaagacagcgtttatatcgggagaggttttattccgttggattatgttagctgcatataaatgtgcacagt

SEQ ID NO: 97587 - DNA, 80 bp, synthetic construct
  source 1..80: mol_type = other DNA
acccgcttgcccagaagataattatggaaaaattcttttgtgacttccaaagcagtctactattagcatgaattactgac

SEQ ID NO: 97588 - DNA, 80 bp, synthetic construct; identical to SEQ ID NO: 18405
  source 1..80: mol_type = other DNA

SEQ ID NO: 97589 - DNA, 80 bp, synthetic construct
  source 1..80: mol_type = other DNA
tgcttttttgataattgcactcccaataattttgatattccaacgtacttggtttgcttgttttcacgttaatgttttct

SEQ ID NO: 97590 - DNA, 80 bp, synthetic construct
  source 1..80: mol_type = other DNA
atttctccgaggaaaattgaggacaataattcagttttaaaatattatcgcaaaattaaattattctaaaaatttgttag

SEQ ID NO: 97591 - DNA, 80 bp, synthetic construct
  source 1..80: mol_type = other DNA
ttaacttgtagagagtacagtgactattgaagttacctaaattacctcaaggtaagtgattactgaaattaatcatgagg

SEQ ID NO: 97592 - DNA, 80 bp, synthetic construct
  source 1..80: mol_type = other DNA
gagtaatgtacagtttatatgaggaaaaaggaattttattgctgccagtgtaaaagtttgcacagcagtatagtcatcaa

SEQ ID NO: 97593 - DNA, 80 bp, synthetic construct; identical to SEQ ID NO: 18406
  source 1..80: mol_type = other DNA

SEQ ID NO: 97594 - DNA, 80 bp, synthetic construct
  source 1..80: mol_type = other DNA
ttaaaaaaatattttaagccgcttctgaagtaatcacttcagtgacttttaatggaggagtatttgttatgggaaattca

SEQ ID NO: 97595 - DNA, 80 bp, synthetic construct
  source 1..80: mol_type = other DNA
catatgacaattttctgcttaattgaaatgtgaggcctctgccatactacaaggatttagcttccagaaaatgtaatatt

SEQ ID NO: 97596 - DNA, 80 bp, synthetic construct
  source 1..80: mol_type = other DNA
ttcatcttgtggcctgaattcattaagaaaagatgttaggatttgttctgaagatagtgacttaggaaatttgtgagact

SEQ ID NO: 97597 - DNA, 80 bp, synthetic construct; identical to SEQ ID NO: 18407
  source 1..80: mol_type = other DNA

SEQ ID NO: 97598 - DNA, 80 bp, synthetic construct
  source 1..80: mol_type = other DNA
agtatcggcaaatataagaagagtaacataatttaagggtgaattaattttatttgggaagttttagttctgtatagtta

SEQ ID NO: 97599 - DNA, 80 bp, synthetic construct
  source 1..80: mol_type = other DNA
tgcagtggcaggatctcggctcactggaacctctgcctcccaggttcaggcgattctcctgcctgaacctcccaagcagc

SEQ ID NO: 97600 - DNA, 80 bp, synthetic construct; identical to SEQ ID NO: 18408
  source 1..80: mol_type = other DNA

SEQ ID NO: 97601 - DNA, 80 bp, synthetic construct
  source 1..80: mol_type = other DNA
tatgaacagtgaatctaaccagtgtttgatttctctgtgtgtgtatgtgtatacaaagttagcaaaccttttatcttaat

SEQ ID NO: 97602 - DNA, 80 bp, synthetic construct
  source 1..80: mol_type = other DNA
tttatctatacttttaagcatatatacattgtttcattttagattttagggaggcagtgtgggctctggagccagactgc

SEQ ID NO: 97603 - DNA, 80 bp, synthetic construct
  source 1..80: mol_type = other DNA
ttagcatagtacctgccacattgtaaatacttaaatggtagctactgctctgaaaaactgtaatttcaggttatgtatgt

SEQ ID NO: 97604 - DNA, 80 bp, synthetic construct; identical to SEQ ID NO: 18409
  source 1..80: mol_type = other DNA

SEQ ID NO: 97605 - DNA, 80 bp, synthetic construct
  source 1..80: mol_type = other DNA
tattcacataaagtaaactctgcctcaaatgtaataaacttaatatgagttatgtaaactttggtcaatagaggtatatt

SEQ ID NO: 97606 - DNA, 80 bp, synthetic construct
  source 1..80: mol_type = other DNA
tatttccacatttggccaggattctcaatatgatttaggcccaagacgtgggaagaaagaagtaaagaactaaaggattt

SEQ ID NO: 97607 - DNA, 80 bp, synthetic construct
  source 1..80: mol_type = other DNA
cagatgtaccacagcactcttagtagtgaagcacttgacttctagtgagtggattttttgtgtgtgtgttttatattgca

SEQ ID NO: 97608 - DNA, 80 bp, synthetic construct; identical to SEQ ID NO: 18410
  source 1..80: mol_type = other DNA

SEQ ID NO: 97609 - DNA, 80 bp, synthetic construct
  source 1..80: mol_type = other DNA
tttgatcttttgaagaggatgtaattatttaaggtattatgaaatgcattgtgatttgaattagatactctttggagatg

SEQ ID NO: 97610 - DNA, 80 bp, synthetic construct
  source 1..80: mol_type = other DNA
gcatgcgccaccacgcccggctaattttatattttttttttcagtagagatggggggtttctccatgttggtcaggctgg

SEQ ID NO: 97611 - DNA, 80 bp, synthetic construct
  source 1..80: mol_type = other DNA
aacccaccattgctggcatgaatagatgtatttttagagtgattcataaatatcgtatacatgtttaaagttacaaactt

SEQ ID NO: 97612 - DNA, 80 bp, synthetic construct
  source 1..80: mol_type = other DNA
ttgattttttaggttttttttttagtgtgtattataaattattttacactgattgtcagcgataaaatggaatgcctggg

SEQ ID NO: 97613 - DNA, 80 bp, synthetic construct; identical to SEQ ID NO: 18411
  source 1..80: mol_type = other DNA

SEQ ID NO: 97614 - DNA, 80 bp, synthetic construct
  source 1..80: mol_type = other DNA
tctgaagaaggatgcaggacttttttggcacttggtgcagtatttttcccattatgttacatgagtggttcttaaacttc

SEQ ID NO: 97615 - DNA, 80 bp, synthetic construct
  source 1..80: mol_type = other DNA
gaccaccaatgaacattatctcccaccaagcaaacccttaacatgttatactcctttaggttattagaatttatacatgc

SEQ ID NO: 97616 - DNA, 80 bp, synthetic construct; identical to SEQ ID NO: 18412
  source 1..80: mol_type = other DNA

SEQ ID NO: 97617 - DNA, 80 bp, synthetic construct
  source 1..80: mol_type = other DNA
tagtcccagctactgaggaggctgaggtgggatcacctgagactgggactttgaggctgcattgagctgtgattgggaca

SEQ ID NO: 97618 - DNA, 80 bp, synthetic construct
  source 1..80: mol_type = other DNA
cagtggttttttagttttgttaaaagtacaggtgaggtttttttcagagtattggttgccatctgagagtgatccccttt

SEQ ID NO: 97619 - DNA, 80 bp, synthetic construct
  source 1..80: mol_type = other DNA
aatgctgtgtaaaatgtctggtatataataagtataatatttgatgaaaatcagtacctttgcccccaggtgtgatattt

SEQ ID NO: 97620 - DNA, 80 bp, synthetic construct; identical to SEQ ID NO: 18413
  source 1..80: mol_type = other DNA

SEQ ID NO: 97621 - DNA, 80 bp, synthetic construct
  source 1..80: mol_type = other DNA
tctaaagctgcttttattatagtcagatatgatgaagttaaatgtacaatgtaaaattgcaaatttccaacgagctatac

SEQ ID NO: 97622 - DNA, 80 bp, synthetic construct
  source 1..80: mol_type = other DNA
aaaaaaagaaacaaaatcggaatggagttttaggttagcccagagatgggaagatgccaagaaggtagctttagtggatt

SEQ ID NO: 97623 - DNA, 80 bp, synthetic construct
  source 1..80: mol_type = other DNA
cttttgaaatatgggatattttgagataccaattatttaagacaaataggactcattgttacaattcagttgaataaggc

SEQ ID NO: 97624 - DNA, 80 bp, synthetic construct; identical to SEQ ID NO: 18414
  source 1..80: mol_type = other DNA

SEQ ID NO: 97625 - DNA, 80 bp, synthetic construct
  source 1..80: mol_type = other DNA
taatgttatacaaacctaactgaagtgttagagccttgaagatttttcccccgaattacatatagtaactctacttgtat

SEQ ID NO: 97626 - DNA, 80 bp, synthetic construct
  source 1..80: mol_type = other DNA
taatcagaaggagtatgggcttataatgatgttactgttccctgaagcatattttgaatgatacggtttatatttgcaca

SEQ ID NO: 97627 - DNA, 80 bp, synthetic construct
  source 1..80: mol_type = other DNA
ataattttttatcatgaggtggtattcatttattcatatagttagaacaaaaaatatttaaaatattgaggtagaaacaa

SEQ ID NO: 97628 - DNA, 80 bp, synthetic construct; identical to SEQ ID NO: 18415
  source 1..80: mol_type = other DNA

SEQ ID NO: 97629 - DNA, 80 bp, synthetic construct
  source 1..80: mol_type = other DNA
tgtgattattgtgtagtgtccaagaactaaggcctaccatctgttactcaaatgtatgaaaaagttaagataatttagtg

SEQ ID NO: 97630 - DNA, 80 bp, synthetic construct
  source 1..80: mol_type = other DNA
tgtgtaataaacgcctggccttcagtcatttggttttttttttccctcgattgtttggatagttaactggacatcatgtt

SEQ ID NO: 97631 - DNA, 80 bp, synthetic construct
  source 1..80: mol_type = other DNA
tcatcttctacaacttaattcttgtctgtatgcaaatgagcttccccatttaaaattttgctgttgcattttaggccact

SEQ ID NO: 97632 - DNA, 80 bp, synthetic construct
  source 1..80: mol_type = other DNA
tcatttagtatgttgacattttcttgagaaatttgttatgccaaatgattaacataataatattttaagtttagatatga

SEQ ID NO: 97633 - DNA, 80 bp, synthetic construct; identical to SEQ ID NO: 18416
  source 1..80: mol_type = other DNA

SEQ ID NO: 97634 - DNA, 80 bp, synthetic construct
  source 1..80: mol_type = other DNA
gtgagaggtgttatgtgtttctgtcccttgtttttattcctatccctcccatctaactgttggtactcttatcttcccag

SEQ ID NO: 97635 - DNA, 80 bp, synthetic construct
  source 1..80: mol_type = other DNA
aaattctacagctaatcataattagtaattgtactttttcccctattacaataactggtttcataataaaatggtatccc

SEQ ID NO: 97636 - DNA, 80 bp, synthetic construct
  source 1..80: mol_type = other DNA
tagatattttgattatgcactacttaagaatgaattgtcaagtatgattataaagttgatataatagttaaccttcagtg

SEQ ID NO: 97637 - DNA, 80 bp, synthetic construct; identical to SEQ ID NO: 18417
  source 1..80: mol_type = other DNA

SEQ ID NO: 97638 - DNA, 80 bp, synthetic construct
  source 1..80: mol_type = other DNA
gctggagtgcactggcacgatttcggcttactgcaagctctgcctcccaggttcatgccattctcctgcctcagcctccc

SEQ ID NO: 97639 - DNA, 80 bp, synthetic construct
  source 1..80: mol_type = other DNA
ttttgattgttattagcaactataaaagttttgcagttggcttattggaaaaagaaaacctccttgccggagacggagac

SEQ ID NO: 97640 - DNA, 80 bp, synthetic construct
  source 1..80: mol_type = other DNA
tagtaggtttcaaatattggtgaattagttgatggttaggtctgcataattactgcgtatggaaattctggaaccctatt

SEQ ID NO: 97641 - DNA, 80 bp, synthetic construct
  source 1..80: mol_type = other DNA
tgtaaaaattagtggccttatgtctttctgcataattatagagtagccaaaacctgttttaggttaatcacctctggcaa

SEQ ID NO: 97642 - DNA, 80 bp, synthetic construct; identical to SEQ ID NO: 18418
  source 1..80: mol_type = other DNA

SEQ ID NO: 97643 - DNA, 80 bp, synthetic construct
  source 1..80: mol_type = other DNA
gagttctgaaacaggaaaccagtcttatcatattcatccagagacctaggaagaaggtaattgtttggtatactcgttaa

SEQ ID NO: 97644 - DNA, 80 bp, synthetic construct
  source 1..80: mol_type = other DNA
ttactgcaacctctgcctcccaggttcaggcgtttctcctgtctcagcctcctgagtagctgggattacaggcgcatgct

SEQ ID NO: 97645 - DNA, 80 bp, synthetic construct
  source 1..80: mol_type = other DNA
ataattaacacctgctatgaagaaaaattgattaaaatagttgagaagtctagtacactctcagctaatatactaaatta

SEQ ID NO: 97646 - DNA, 80 bp, synthetic construct; identical to SEQ ID NO: 18419
  source 1..80: mol_type = other DNA

SEQ ID NO: 97647 - DNA, 80 bp, synthetic construct
  source 1..80: mol_type = other DNA
atttttaaagctatagaggtaatatttcatcaggtgagggtaactaccatggtttgtttgctatactgtgttagggttat

SEQ ID NO: 97648 - DNA, 80 bp, synthetic construct
  source 1..80: mol_type = other DNA
atgaacgagtttgtagtattgctaacaaggagaagaattactagcaagtcttgatgttacttttgaagagtgtgatgatt

SEQ ID NO: 97649 - DNA, 80 bp, synthetic construct
  source 1..80: mol_type = other DNA
gtagaaaacttcagtagagtttatagataggcagtcttcctttctggtttggcactgacagcagattaactagaaagtgt

SEQ ID NO: 97650 - DNA, 80 bp, synthetic construct
  source 1..80: mol_type = other DNA
aaccccttatttacaattatagagtcctttgcaattttatagatattttcatgtatcccatttggtccttgaaacaatta

SEQ ID NO: 97651 - DNA, 80 bp, synthetic construct; identical to SEQ ID NO: 18420
  source 1..80: mol_type = other DNA

SEQ ID NO: 97652 - DNA, 80 bp, synthetic construct
  source 1..80: mol_type = other DNA
taccttaagctctagggtacatgtgcacaacatacagatttgttacatatgtatacatgtgccatgttagtgtgctgcac

SEQ ID NO: 97653 - DNA, 80 bp, synthetic construct
  source 1..80: mol_type = other DNA
ttctgtccttgcgatagtttgctcagaatgatggtttctagcttcatccatgtccctaccaaggacatgaagctcatcct

SEQ ID NO: 97654 - DNA, 80 bp, synthetic construct
  source 1..80: mol_type = other DNA
ctcctttgggtatatacccagtaatgggattgctgggtcaaatggtatttctagttctagatcactgaggaattgccaca

SEQ ID NO: 97655 - DNA, 80 bp, synthetic construct
  source 1..80: mol_type = other DNA
ccagtgatgatgagcattttttcatgtgtctgttcgctgcataaatgtattcttttgagtagtgtctgttcatatccttc

SEQ ID NO: 97656 - DNA, 80 bp, synthetic construct; identical to SEQ ID NO: 18421
  source 1..80: mol_type = other DNA

SEQ ID NO: 97657 - DNA, 80 bp, synthetic construct
  source 1..80: mol_type = other DNA
gagaaagtcatagaagttcatcagatttgtatttaaagcatgatttcattagaaaagttgataataaggatttaactgtg

SEQ ID NO: 97658 - DNA, 80 bp, synthetic construct; identical to SEQ ID NO: 18422
  source 1..80: mol_type = other DNA

SEQ ID NO: 97659 - DNA, 80 bp, synthetic construct
  source 1..80: mol_type = other DNA
tcagtgttttatgagccaggcagcttcagactttgcttttgatgctctttgttcattacctctaaagctgtattatcact

SEQ ID NO: 97660 - DNA, 80 bp, synthetic construct
  source 1..80: mol_type = other DNA
aagcatacctatatattaagcactacaaagaaacttttacaatggctttatttttagcaaaccatcatagttaaaataag

SEQ ID NO: 97661 - DNA, 80 bp, synthetic construct
  source 1..80: mol_type = other DNA
atgtcaactcggaagttgttcaagaaaagatattttgttatttagatgtaacttggaacatatttctagtgtttcaagtc

SEQ ID NO: 97662 - DNA, 80 bp, synthetic construct; identical to SEQ ID NO: 18423
  source 1..80: mol_type = other DNA

SEQ ID NO: 97663 - DNA, 80 bp, synthetic construct
  source 1..80: mol_type = other DNA
ggagctggggtgaccatccaacttaggcaagatagctagtaccatgtatgcatttcttttacctttcttattgtatatac

SEQ ID NO: 97664 - DNA, 80 bp, synthetic construct
  source 1..80: mol_type = other DNA
acaacaaccctatgtagttcatactagaattattcccatttaaagatggggaaagtgatgtttagagaggctaagtgact

SEQ ID NO: 97665 - DNA, 80 bp, synthetic construct; identical to SEQ ID NO: 18424
  source 1..80: mol_type = other DNA

SEQ ID NO: 97666 - DNA, 80 bp, synthetic construct
  source 1..80: mol_type = other DNA
tattagtatcttttatatttatctctctcatttcctatattggccatgtttacttttaaaatagtaaaagtcataagctc

SEQ ID NO: 97667 - DNA, 80 bp, synthetic construct
  source 1..80: mol_type = other DNA
aatattagaaaatacaaataagcaaacacatactgaaaatttagtgttcccaaatctaaaacagagacactgtttttttc

SEQ ID NO: 97668 - DNA, 80 bp, synthetic construct
  source 1..80: mol_type = other DNA
aagtagttacagtggggtcttatgggataaggcattaccatttgttcagttgagagacagctatcactatgttttaagca

SEQ ID NO: 97669 - DNA, 80 bp, synthetic construct; identical to SEQ ID NO: 18425
  source 1..80: mol_type = other DNA

SEQ ID NO: 97670 - DNA, 80 bp, synthetic construct
  source 1..80: mol_type = other DNA
aatttgtggcataagaaatatttgcctcaagatttggtgcttgtttaggtagttgctggcattacttttggaaatgtcag

SEQ ID NO: 97671 - DNA, 80 bp, synthetic construct
  source 1..80: mol_type = other DNA
gaaatagaaaaaccttaatttcctctcgttgggcagtatggtgtcaaaagcttgggctttggagcttcgtatataatctg

SEQ ID NO: 97672 - DNA, 80 bp, synthetic construct
  source 1..80: mol_type = other DNA
agttgtctacatctttctaacttaggatggatgccgatgtcttgggtaacatctcaaactttatcagtaaggaaggtgag

SEQ ID NO: 97673 - DNA, 80 bp, synthetic construct; identical to SEQ ID NO: 18426
  source 1..80: mol_type = other DNA

SEQ ID NO: 97674 - DNA, 80 bp, synthetic construct
  source 1..80: mol_type = other DNA
atatattacctacttggtgaaggtttatctgtgtccccacagaattaatccttccctctttaactcttaagctatcttat

SEQ ID NO: 97675 - DNA, 80 bp, synthetic construct
  source 1..80: mol_type = other DNA
atgaaggagggggccagctgaatttactttaatgattatgtaacacccatttatgtatagttatagacttgtctgaaatg

SEQ ID NO: 97676 - DNA, 80 bp, synthetic construct
  source 1..80: mol_type = other DNA
atggtatctctatccttatgaatggattaatgctgtttgaatggtagtggatgagttatcttgggagtttggcctcctcc

SEQ ID NO: 97677 - DNA, 80 bp, synthetic construct
  source 1..80: mol_type = other DNA
ttcattctaaactacctgttttgtggtattctagtaaagcaacataaaatttactaagaaaactggtaccaagagtgtga

SEQ ID NO: 97678 - DNA, 80 bp, synthetic construct; identical to SEQ ID NO: 18427
  source 1..80: mol_type = other DNA

SEQ ID NO: 97679 - DNA, 80 bp, synthetic construct
  source 1..80: mol_type = other DNA
aactaggatatgctgcagaagaaataactcagcagcagagcatttaggttactggatggctacttttaaccacttaaact

SEQ ID NO: 97680 - DNA, 80 bp, synthetic construct
  source 1..80: mol_type = other DNA
gattaatattcctagaggagacccaagggctatttatcaagacagtggaaaaagaccccagaggcattttggagatcttt

SEQ ID NO: 97681 - DNA, 80 bp, synthetic construct; identical to SEQ ID NO: 18428
  source 1..80: mol_type = other DNA

SEQ ID NO: 97682 - DNA, 80 bp, synthetic construct
  source 1..80: mol_type = other DNA
cactacagagagtccctactagggcattgcataatggagccatggcagcaggcccaccaccaaagcttcagaactgtaga

SEQ ID NO: 97683 - DNA, 80 bp, synthetic construct
  source 1..80: mol_type = other DNA
gaggcccaggggcagaatgctatggtttggttgtttccttcaaaactcatgttgaaacttcattgccatgtggcattatt

SEQ ID NO: 97684 - DNA, 80 bp, synthetic construct
  source 1..80: mol_type = other DNA
catgttatgatgcatccagaagactctcaccacatgcagccccttgatcttagacttctcagcttctagaactgtgagtg

SEQ ID NO: 97685 - DNA, 80 bp, synthetic construct
  source 1..80: mol_type = other DNA
accacatttcaagggaggggctttgtacttctgtgcatatctgtaaggataaaaatcttaatactattctcactgaaatt

SEQ ID NO: 97686 - DNA, 80 bp, synthetic construct; identical to SEQ ID NO: 18429
  source 1..80: mol_type = other DNA

SEQ ID NO: 97687 - DNA, 80 bp, synthetic construct
  source 1..80: mol_type = other DNA
tttatttttctcagtttttaaaaaaaatgtcagattggctaagagttggggcagctttcttatgtgagagtagtagatga

SEQ ID NO: 97688 - DNA, 80 bp, synthetic construct
  source 1..80: mol_type = other DNA
ataattttttggtagaaatttggcattaaaaaatgcatacagagctttttctacatacagggcaagacagcattttgtca

SEQ ID NO: 97689 - DNA, 80 bp, synthetic construct
  source 1..80: mol_type = other DNA
tacatgccaccacctatatatgacttttagtactttataatcttttgtctatatatgtctatatggatatatacgtattc

SEQ ID NO: 97690 - DNA, 80 bp, synthetic construct; identical to SEQ ID NO: 18430
  source 1..80: mol_type = other DNA

SEQ ID NO: 97691 - DNA, 80 bp, synthetic construct
  source 1..80: mol_type = other DNA
atgtatttcctgcaaattaaaatttgtatctgaatccttggtggatttgagttgaagatccttaaccatcatagatgatg

SEQ ID NO: 97692 - DNA, 80 bp, synthetic construct
  source 1..80: mol_type = other DNA
gctgtaagaaagttcattttctcatcaaccactcacctattggtttaacaccatttgttgatctttgagtatatcagtaa

SEQ ID NO: 97693 - DNA, 80 bp, synthetic construct; identical to SEQ ID NO: 18431
  source 1..80: mol_type = other DNA

SEQ ID NO: 97694 - DNA, 80 bp, synthetic construct
  source 1..80: mol_type = other DNA
tgtattttttgtagagatggggttttgccatattgcccagcctagcctcaaactcctgggctgaaggaatccacccatct

SEQ ID NO: 97695 - DNA, 80 bp, synthetic construct
  source 1..80: mol_type = other DNA
ttggacctttataccacctcctatgtccatttgatataggccattaatctctataagccttcctccttctcttggaatga

SEQ ID NO: 97696 - DNA, 80 bp, synthetic construct
  source 1..80: mol_type = other DNA
aatgtttattactgctagagtgatgttgcttttaggccatttcagagaaaagacctagaaaacagatttttacaaacatg

SEQ ID NO: 97697 - DNA, 80 bp, synthetic construct
  source 1..80: mol_type = other DNA
aatcccagcactttgggagattgaggcaggtggattgcttgagctcaggagttcaagaccaacctgggcaacatgatgaa

SEQ ID NO: 97698 - DNA, 80 bp, synthetic construct; identical to SEQ ID NO: 18432
  source 1..80: mol_type = other DNA

SEQ ID NO: 97699 - DNA, 80 bp, synthetic construct
  source 1..80: mol_type = other DNA
taaagtttcttcctagtgtttttttgttcttagaatacttcctaccaagaagtgcagtaaaagtgcagtgtccaaatagc

SEQ ID NO: 97700 - DNA, 80 bp, synthetic construct
  source 1..80: mol_type = other DNA
tcaaaaatatataaagatatacacaggagtcctgctgctacctgttcttgctatgcttttccccttttcttccctttctc

SEQ ID NO: 97701 - DNA, 80 bp, synthetic construct
  source 1..80: mol_type = other DNA
agatatacccagtatactctattgggtgggtttttttccttaaaatattcagtagatctctccagttagcacatagttat

SEQ ID NO: 97702 - DNA, 80 bp, synthetic construct; identical to SEQ ID NO: 18433
  source 1..80: mol_type = other DNA

SEQ ID NO: 97703 - DNA, 80 bp, synthetic construct
  source 1..80: mol_type = other DNA
cttgtgtgtagagttttgtttttatgctagctatagtctgtaacataattcactataatgggcatgctaaatatccatga

SEQ ID NO: 97704 - DNA, 80 bp, synthetic construct
  source 1..80: mol_type = other DNA
ctgatgacataatgttcgttaatacatattttatatatgtgtcagatagcatatttgtataataaagtaagctgcaggaa

SEQ ID NO: 97705 - DNA, 80 bp, synthetic construct; identical to SEQ ID NO: 18434
  source 1..80: mol_type = other DNA

SEQ ID NO: 97706 - DNA, 80 bp, synthetic construct
  source 1..80: mol_type = other DNA
ctagaaaggttaagtgacttgtccaaattacacaactagttagagacatagccagctcttaaatctgacttccagatttt

SEQ ID NO: 97707 - DNA, 80 bp, synthetic construct
  source 1..80: mol_type = other DNA
gacataaagtactttagttctgtgatgtataaaccgtgagtttctgtttttctcatatacctgaatactgtccatgtgga

SEQ ID NO: 97708 - DNA, 80 bp, synthetic construct
  source 1..80: mol_type = other DNA
atttctttccttaactaaagtactcagatatttatccaaacattattgctatgggatttcctgcagaaagacttgaaggc

SEQ ID NO: 97709 - DNA, 80 bp, synthetic construct
  source 1..80: mol_type = other DNA
aatcattttttggcttaccgtacctaatggacttcagggggatacagttcatttgataagaactgaccttatacattaca

SEQ ID NO: 97710 - DNA, 80 bp, synthetic construct; identical to SEQ ID NO: 18435
  source 1..80: mol_type = other DNA

SEQ ID NO: 97711 - DNA, 80 bp, synthetic construct
  source 1..80: mol_type = other DNA
aatcgctgggtgtaccaaggctaatcagttttataattttgcataattttctaactgcgattatcatttagtttagaaca

SEQ ID NO: 97712 - DNA, 80 bp, synthetic construct
  source 1..80: mol_type = other DNA
tgtaaattgtcagtaggaaccttaagaattcgtggcgtattttatgaaaggaattcatgtctgatgtgcaaatagtctta

SEQ ID NO: 97713 - DNA, 80 bp, synthetic construct; identical to SEQ ID NO: 18436
  source 1..80: mol_type = other DNA

SEQ ID NO: 97714 - DNA, 80 bp, synthetic construct
  source 1..80: mol_type = other DNA
tgtgtaagtatataagacaacctacattcttcatgagctagccataagttttagcaacttgctttgaaccacggtagatt

SEQ ID NO: 97715 - DNA, 80 bp, synthetic construct
  source 1..80: mol_type = other DNA
taagaagctgaaaatagagaaatgaatttatcttctcatagttaggcagggcacagtagaaggatgcttaacattgcaag

SEQ ID NO: 97716 - DNA, 80 bp, synthetic construct
  source 1..80: mol_type = other DNA
gcagtacagtcaccagacgtgtatcctctcctatggtacagaagtgtttattgggtctctttatggcctgcatgatatat

SEQ ID NO: 97717 - DNA, 80 bp, synthetic construct; identical to SEQ ID NO: 18437
  source 1..80: mol_type = other DNA

SEQ ID NO: 97718 - DNA, 80 bp, synthetic construct
  source 1..80: mol_type = other DNA
actgaggtttagtctatctagcttcacaatctatctagtttgttttgtctagccatatgatttcttcaaatatgccattt

SEQ ID NO: 97719 - DNA, 80 bp, synthetic construct
  source 1..80: mol_type = other DNA
ttcttttttgattgggggataattggccaataaagctttgatagcctctattgcccaggcccctcctcttcttttatgag

SEQ ID NO: 97720 - DNA, 80 bp, synthetic construct
  source 1..80: mol_type = other DNA
cctagtacctaagtgattaatttccttgattggttcacattatattgaggatattagtaatcagtagtgattcctttttt

SEQ ID NO: 97721 - DNA, 80 bp, synthetic construct; identical to SEQ ID NO: 18438
  source 1..80: mol_type = other DNA

SEQ ID NO: 97722 - DNA, 80 bp, synthetic construct
  source 1..80: mol_type = other DNA
tctcctgcctcagcctgcggagcagctgggattatagatgcccgcccccacgcccagctgatttttgtatttgtagtaga

SEQ ID NO: 97723 - DNA, 80 bp, synthetic construct
  source 1..80: mol_type = other DNA
ttttatacttgaggtactcagagtccttttgagacaaatatttaacttctccttttgaggttaccgcctacgattgggaa

SEQ ID NO: 97724 - DNA, 80 bp, synthetic construct; identical to SEQ ID NO: 18439
  source 1..80: mol_type = other DNA

SEQ ID NO: 97725 - DNA, 80 bp, synthetic construct
  source 1..80: mol_type = other DNA
gtgttggtttgctgcacccattaactcgtcatttacattaggtatttctcctaatgttatccctctcccaaccccccacc

SEQ ID NO: 97726 - DNA, 80 bp, synthetic construct
  source 1..80: mol_type = other DNA
gacgtgaagctcatccttttttatggctgcatactactccgtggtgtatatgtgccacattttcttaatccagtcagtca

SEQ ID NO: 97727 - DNA, 80 bp, synthetic construct; identical to SEQ ID NO: 18440
  source 1..80: mol_type = other DNA

SEQ ID NO: 97728 - DNA, 80 bp, synthetic construct
  source 1..80: mol_type = other DNA
aaatgtcttcttttggaaagtgtctgttcatatcctttgcccactttttgatggggttgtttgatttttttcctgtaaat

SEQ ID NO: 97729 - DNA, 80 bp, synthetic construct
  source 1..80: mol_type = other DNA
gcttttgttgccattgcttttggtgttttagtcatgaagtccttgcccatgcctatgtcctgaatggtattgcctaggtt

SEQ ID NO: 97730 - DNA, 80 bp, synthetic construct
  source 1..80: mol_type = other DNA
gggaaccctttccccatttcctgtttttgtcaggtttgtcaaagatcagatggttgtagatgtgtcatgttatttctgag

SEQ ID NO: 97731 - DNA, 80 bp, synthetic construct; identical to SEQ ID NO: 18441
  source 1..80: mol_type = other DNA

SEQ ID NO: 97732 - DNA, 80 bp, synthetic construct
  source 1..80: mol_type = other DNA
ctaggtattttattctctttgtagcagttgtgagtgggagttcactcatgatttggctctctgtctgtctgttattggtg

SEQ ID NO: 97733 - DNA, 80 bp, synthetic construct
  source 1..80: mol_type = other DNA
attgaataccctttatttctttctcttgcctgattgccctggccagaacttccaacactgtgttgaataggagtggtgag

SEQ ID NO: 97734 - DNA, 80 bp, synthetic construct; identical to SEQ ID NO: 18442
  source 1..80: mol_type = other DNA

SEQ ID NO: 97735 - DNA, 80 bp, synthetic construct
  source 1..80: mol_type = other DNA
aaattctctttttttgttgtgtctctgccaggctttggtatcgggatggtgctggcctcctaaaatgagttagggaggat

SEQ ID NO: 97736 - DNA, 80 bp, synthetic construct
  source 1..80: mol_type = other DNA
ttcagggattcaacttcttcctggtttagtcttgggagggtgtatatgtccaggaatttatccatttcttctagattttc

SEQ ID NO: 97737 - DNA, 80 bp, synthetic construct; identical to SEQ ID NO: 18443
  source 1..80: mol_type = other DNA

SEQ ID NO: 97738 - DNA, 80 bp, synthetic construct
  source 1..80: mol_type = other DNA
tgtcccagagattctggtacgttgtgtctttgttctcattggtttcaaagaacatctttatttctgccttcattttgtta

SEQ ID NO: 97739 - DNA, 80 bp, synthetic construct; identical to SEQ ID NO: 18444
  source 1..80: mol_type = other DNA

SEQ ID NO: 97740 - DNA, 80 bp, synthetic construct
  source 1..80: mol_type = other DNA
gtcactcaggacttgctttatgaatctaggtgctcctgtattgggtgtatatatatttaggatagttagctcttcttgtt

SEQ ID NO: 97741 - DNA, 80 bp, synthetic construct; identical to SEQ ID NO: 18445
  source 1..80: mol_type = other DNA

SEQ ID NO: 97742 - DNA, 80 bp, synthetic construct
  source 1..80: mol_type = other DNA
tggctgataccagttgttcctttccatgtttagtgcttccttcaggagctcttgtaaggcaggcctggtagtgacaaaat

SEQ ID NO: 97743 - DNA, 80 bp, synthetic construct
  source 1..80: mol_type = other DNA
tgctgttagtctgatgggcttccctttgtgggtaacccgacctttctctctggctgccctttacattttttcctgcattt

SEQ ID NO: 97744 - DNA, 80 bp, synthetic construct
  source 1..80: mol_type = other DNA
tccattctccccgtcactgtcaagtacaccaatcaaacgtagatttggtcttttcacatagtcccatatttcttggaggc

SEQ ID NO: 97745 - DNA, 80 bp, synthetic construct; identical to SEQ ID NO: 18446
  source 1..80: mol_type = other DNA

SEQ ID NO: 97746 - DNA, 80 bp, synthetic construct
  source 1..80: mol_type = other DNA
gtgaggagctgtgatcctttggaggagaagaggcactctgggttttagaattttcagcttttctgctctgttttctcccc

SEQ ID NO: 97747 - DNA, 80 bp, synthetic construct
  source 1..80: mol_type = other DNA
ctggaggtccactccagacactgtctggatatcaccagtggaggctgcagaacagcaaatattgcagaacagcaaatatt

SEQ ID NO: 97748 - DNA, 80 bp, synthetic construct
  source 1..80: mol_type = other DNA
tggtagaactactgctctcttcagagctgtcagagagggatgtttaagtctgaggaagtttctgctgccttttgttcagc

SEQ ID NO: 97749 - DNA, 80 bp, synthetic construct; identical to SEQ ID NO: 18447
  source 1..80: mol_type = other DNA

SEQ ID NO: 97750 - DNA, 80 bp, synthetic construct
  source 1..80: mol_type = other DNA
cctccgtgggctgcacccactttccaaccagtcccagtgagaagaaccaggtacctcagttggaaatgcagaaatcacct

SEQ ID NO: 97751 - DNA, 80 bp, synthetic construct
  source 1..80: mol_type = other DNA
ggctggggtgcagaggcatgatcacggctcactgcaacctctgccttctgggctcaagtgatcctcccacctcagcctcc

SEQ ID NO: 97752 - DNA, 80 bp, synthetic construct
  source 1..80: mol_type = other DNA
gccactgcacccggccaatatgtatgttaatctcatccctcaagctgatactgaagtttttcaatttatgttatttggtg

SEQ ID NO: 97753 - DNA, 80 bp, synthetic construct
  source 1..80: mol_type = other DNA
cactgcagaacctttaatatgccactatgcattgtaaatctcccaagagtgagattctagtatgatgcttttcttttcct

SEQ ID NO: 97754 - DNA, 80 bp, synthetic construct; identical to SEQ ID NO: 18448
  source 1..80: mol_type = other DNA

SEQ ID NO: 97755 - DNA, 80 bp, synthetic construct
  source 1..80: mol_type = other DNA
agtagctgggaccacaggcgtgtgtcaccgtacatggctaatttttctatttttagtagaggcagagtttcgccatgttt

SEQ ID NO: 97756 - DNA, 80 bp, synthetic construct
  source 1..80: mol_type = other DNA
atatgttgatctctcagtctttcaaccttagttgtatgttgattttcaataaaaaggaagtatttgttgccctaacatca

SEQ ID NO: 97757 - DNA, 80 bp, synthetic construct; identical to SEQ ID NO: 18449
  source 1..80: mol_type = other DNA

SEQ ID NO: 97758 - DNA, 80 bp, synthetic construct
  source 1..80: mol_type = other DNA
cccaggttgtagtgcaatggggcgatctcatctcattgcaacctctgcctcccgagttcaagcaattctcctgcctcagc

SEQ ID NO: 97759 - DNA, 80 bp, synthetic construct
  source 1..80: mol_type = other DNA
agccaccgttctggccacctcctacttctttcattagtcttaattccttagtggatttgacagtgtttatattatctaca

SEQ ID NO: 97760 - DNA, 80 bp, synthetic construct
  source 1..80: mol_type = other DNA
ttaacttccccaagcattacttttagtaagtagtgagactgaaggttgagttctggtctgtcagattccgaagttgtttc

SEQ ID NO: 97761 - DNA, 80 bp, synthetic construct
  source 1..80: mol_type = other DNA
gaaggttgagttctggtctgtcagattccgaagttgtttccttaggaaccatattatcttgtgtacaactcttgggctaa

SEQ ID NO: 97762 - DNA, 80 bp, synthetic construct; identical to SEQ ID NO: 18450
  source 1..80: mol_type = other DNA

SEQ ID NO: 97763 - DNA, 80 bp, synthetic construct
  source 1..80: mol_type = other DNA
cattgtagagatcttgtctctaattaacaggattcataaagagaaaacaaaggagagaaacatccagattgaaaagacct

SEQ ID NO: 97764 - DNA, 80 bp, synthetic construct
  source 1..80: mol_type = other DNA
aaggtagaaggtggtaaaacatcaccttgaaagttctgcattcagcctagaattctgtatccagttaaaccatcaatcaa

SEQ ID NO: 97765 - DNA, 80 bp, synthetic construct
  source 1..80: mol_type = other DNA
acaaagaagaaagtcccaggatgacagctgtgacacaagctgaaaagttaccagttttgcttggagcaggagattagaac

SEQ ID NO: 97766 - DNA, 80 bp, synthetic construct; identical to SEQ ID NO: 18451
  source 1..80: mol_type = other DNA

SEQ ID NO: 97767 - DNA, 80 bp, synthetic construct
  source 1..80: mol_type = other DNA
ttgcatctggggagaagcaggaataaaggtttgaagataaatagggccagagatgagtaattttgttactgtgataatat

SEQ ID NO: 97768 - DNA, 80 bp, synthetic construct
  source 1..80: mol_type = other DNA
gttgtgcaattgtcaccactgtccatctctagaactttttcattatcccacactgacataccacacccattaaataataa

SEQ ID NO: 97769 - DNA, 80 bp, synthetic construct
  source 1..80: mol_type = other DNA
gttagcatttccttccttttaaaaggccgaataatattccattgttatgtatataccatattttgtttatccatttattc

SEQ ID NO: 97770 - DNA, 80 bp, synthetic construct; identical to SEQ ID NO: 18452
  source 1..80: mol_type = other DNA

SEQ ID NO: 97771 - DNA, 80 bp, synthetic construct
  source 1..80: mol_type = other DNA
cttgaagccttttgcccatttatgaattgagtagtttgggatttttaaattgtgttttagaagttctttgtatactctgg

SEQ ID NO: 97772 - DNA, 80 bp, synthetic construct
  source 1..80: mol_type = other DNA
actcagcctgggtgacagagcgagactctgtctcaaaaaaaaagaaaaagaagttctttgtattctctgaatattaatcc

SEQ ID NO: 97773 - DNA, 80 bp, synthetic construct
  source 1..80: mol_type = other DNA
aaataattgccaaattcataccatgaaactttcccccatgttttctcctgaaggtttttatagttttagctctcacattt

SEQ ID NO: 97774 - DNA, 80 bp, synthetic construct; identical to SEQ ID NO: 18453
  source 1..80: mol_type = other DNA

SEQ ID NO: 97775 - DNA, 80 bp, synthetic construct
  source 1..80: mol_type = other DNA
gttcaagcaatcctcccacctcagcctcctgagtagctgggattgtagacacataccaccatgctcagctagtttttgta

SEQ ID NO: 97776 - DNA, 80 bp, synthetic construct
  source 1..80: mol_type = other DNA
tggccccaacttcttatatttcaagatggttttggcccttcagggccctttgtgagttttaggatggattttttttttaa

SEQ ID NO: 97777 - DNA, 80 bp, synthetic construct
  source 1..80: mol_type = other DNA
tctaccagaaacattgttgggattttggtagggattgtattagtctgtagattgcattgaatagtactgacatcttaaca

SEQ ID NO: 97778 - DNA, 80 bp, synthetic construct; identical to SEQ ID NO: 18454
  source 1..80: mol_type = other DNA

SEQ ID NO: 97779 - DNA, 80 bp, synthetic construct
  source 1..80: mol_type = other DNA
tgtcttgtttctgaccttataggaaaagctttcaattctttgccattgactatcatgttagctatgggattttttttttc

SEQ ID NO: 97780 - DNA, 80 bp, synthetic construct
  source 1..80: mol_type = other DNA
cgtatttttagtagaaacatggtttcaccatgttggccaagctggtctcgaactcttggcctcaagtgattcacctgcct

SEQ ID NO: 97781 - DNA, 80 bp, synthetic construct; identical to SEQ ID NO: 18455
  source 1..80: mol_type = other DNA

SEQ ID NO: 97782 - DNA, 80 bp, synthetic construct
  source 1..80: mol_type = other DNA
ggcaatgctggcctcattgaatgtgttaggaagtgtttcctcatccatttttggcaaaactttgggaaaaaacgatgttc

SEQ ID NO: 97783 - DNA, 80 bp, synthetic construct
  source 1..80: mol_type = other DNA
tcgttatttctccatttaatctatattatctaatttgttggcatacaattgttcatagtactgtcttctcttttttttaa

SEQ ID NO: 97784 - DNA, 80 bp, synthetic construct
  source 1..80: mol_type = other DNA
ttatatcctctctaagctttgttatttccttcatcctgctagctttgggtttattagtttgttctttttctagttcctta

SEQ ID NO: 97785 - DNA, 80 bp, synthetic construct; identical to SEQ ID NO: 18456
  source 1..80: mol_type = other DNA

SEQ ID NO: 97786 - DNA, 80 bp, synthetic construct
  source 1..80: mol_type = other DNA
agcctccccagtaggtaggattacaggcacatgccaccatgcccagctaatttttgtatttttagtagagacagggtttc

SEQ ID NO: 97787 - DNA, 80 bp, synthetic construct
  source 1..80: mol_type = other DNA
tgcctatattctgactgggtgtttttgtccattattgagagtagggtatcgaagtgtccagctgttatttcagaactgtc

SEQ ID NO: 97788 - DNA, 80 bp, synthetic construct
  source 1..80: mol_type = other DNA
tattaatgtagctacctgcactctcatttggttattacttgtatagaatgtctttttacatcccttatttgtgtctttgg

SEQ ID NO: 97789 - DNA, 80 bp, synthetic construct; identical to SEQ ID NO: 18457
  source 1..80: mol_type = other DNA

SEQ ID NO: 97790 - DNA, 80 bp, synthetic construct
  source 1..80: mol_type = other DNA
tttataccaatttactttcaatagcatacaaaaattcagctcataagattcagtccctgctcccttccagttattgatgt

SEQ ID NO: 97791 - DNA, 80 bp, synthetic construct
  source 1..80: mol_type = other DNA
cagatctttatttcttaatacagcttcaagttactgtctagtctccttttatttcagcctgaaagactcacttcagcgtt

SEQ ID NO: 97792 - DNA, 80 bp, synthetic construct
  source 1..80: mol_type = other DNA
atcatcccactgccttctgtccttcaagagttctgatgagaaatctgctgatattgaggatccctttgtatgttacaagt

SEQ ID NO: 97793 - DNA, 80 bp, synthetic construct
  source 1..80: mol_type = other DNA
taatatttcttcacataatcttttttgccccttttctctctttttattctgggattcccagagtgtgtatgtgttggtcc

SEQ ID NO: 97794 - DNA, 80 bp, synthetic construct; identical to SEQ ID NO: 18458
  source 1..80: mol_type = other DNA

SEQ ID NO: 97795 - DNA, 80 bp, synthetic construct
  source 1..80: mol_type = other DNA
agtaagtgtctgccatctgatcttctcaggcacagtttctgttaatttatttttttccttttggcctatacttaatgttt

SEQ ID NO: 97796 - DNA, 80 bp, synthetic construct
  source 1..80: mol_type = other DNA
tttctatgctgggtgtaatcttaagatcttctcggcctgtgtttttccctgggcatgtgtagtgactttctaaattgccc

SEQ ID NO: 97797 - DNA, 80 bp, synthetic construct
  source 1..80: mol_type = other DNA
gcagttaaataatgatagtctgcctctgtgtcacattttgatcagaagcagcaattagcaatcagaacacagattcctga

SEQ ID NO: 97798 - DNA, 80 bp, synthetic construct; identical to SEQ ID NO: 18459
  source 1..80: mol_type = other DNA

SEQ ID NO: 97799 - DNA, 80 bp, synthetic construct
  source 1..80: mol_type = other DNA
tctcctgcctcagcttcccaagtagctggaattacaggcgtgcaccaccatgcctggctaattttttgtatttttagtag

SEQ ID NO: 97800 - DNA, 80 bp, synthetic construct; identical to SEQ ID NO: 18460
  source 1..80: mol_type = other DNA

SEQ ID NO: 97801 - DNA, 80 bp, synthetic construct
  source 1..80: mol_type = other DNA
aggccctgggcaagcctgctatgcttttccttccctaatccctcaggggtgggatagagagcacagtggcctcccaggga

SEQ ID NO: 97802 - DNA, 80 bp, synthetic construct
  source 1..80: mol_type = other DNA
ctttccttgcccaggtaagaggtctgcccataagggatattttgcagcatgtgaagctttttaaaaagttaggcttattg

SEQ ID NO: 97803 - DNA, 80 bp, synthetic construct
  source 1..80: mol_type = other DNA
acctctctgcttttgtttatctacttttttagtctctactttccaagtatctataggcaaattttcccatttccctttgg

SEQ ID NO: 97804 - DNA, 80 bp, synthetic construct; identical to SEQ ID NO: 18461
  source 1..80: mol_type = other DNA

SEQ ID NO: 97805 - DNA, 80 bp, synthetic construct
  source 1..80: mol_type = other DNA
tgttcacagtggtaggtaagaaatcataaagttcaaatattaaagggagctcacaaaagagcatggtttcaccagccctc

SEQ ID NO: 97806 - DNA, 80 bp, synthetic construct
  source 1..80: mol_type = other DNA
tcatagtttgacaacaagacttggaagataggtggaagctaagggaagcaagacatggccccaaggtttcaacaggagca

SEQ ID NO: 97807 - DNA, 80 bp, synthetic construct
  source 1..80: mol_type = other DNA
gcaaaaagatctattaatagttggtatcaggcctgtacatgtgttaagagaaagatgaggaaagaagtatctgcttctaa

SEQ ID NO: 97808 - DNA, 80 bp, synthetic construct
  source 1..80: mol_type = other DNA
ccactttttaagaaaagcaaatgggaacatactaccactgtttggcccctttcaaaaattttatatctgaggaatcttcc

SEQ ID NO: 97809 - DNA, 80 bp, synthetic construct; identical to SEQ ID NO: 18462
  source 1..80: mol_type = other DNA

SEQ ID NO: 97810 - DNA, 80 bp, synthetic construct
  source 1..80: mol_type = other DNA
atcttgttatttgatcgtgtttttttaattgtgaggtttagcgactttttgatgtattggtcttatgtactttctggtgt

SEQ ID NO: 97811 - DNA, 80 bp, synthetic construct
  source 1..80: mol_type = other DNA
gcttctcttgccatttgaattttgtgactacaaaattcagatgaaacaataatagcataaagaacttggtgggttatctt

SEQ ID NO: 97812 - DNA, 80 bp, synthetic construct; identical to SEQ ID NO: 18463
  source 1..80: mol_type = other DNA

SEQ ID NO: 97813 - DNA, 80 bp, synthetic construct
  source 1..80: mol_type = other DNA
tttgtatttttagtagatatgggacttcaccatgttggccaggctggtcttgaactcctgacctctagtgatctgcctgc

SEQ ID NO: 97814 - DNA, 80 bp, synthetic construct
  source 1..80: mol_type = other DNA
attatctctcatccccttttttggctattataatatatatatgtacgttttgaatctgagctttgaaggtaaattcactg

SEQ ID NO: 97815 - DNA, 80 bp, synthetic construct
  source 1..80: mol_type = other DNA
cttttgaaatctgttttactgatctgtatcatatctaactacgccagtatttccttccttgtctgacgtgaactctaaaa

SEQ ID NO: 97816 - DNA, 80 bp, synthetic construct; identical to SEQ ID NO: 18464
  source 1..80: mol_type = other DNA

SEQ ID NO: 97817 - DNA, 80 bp, synthetic construct
  source 1..80: mol_type = other DNA
cactagccacatgtagctatcattatgtttaaatgtaaataaaataaaataaatttactgagttgtttttgctagctaca

SEQ ID NO: 97818 - DNA, 80 bp, synthetic construct
  source 1..80: mol_type = other DNA
tactctttctgttgctgtcctctagcttaatcaaaataaatttgagtctttttaaaggtaggttgcattttacatactga

SEQ ID NO: 97819 - DNA, 80 bp, synthetic construct
  source 1..80: mol_type = other DNA
ttcttgtaaacacacaccttcttgtaaacacaacaaccaagatttagaacactcgctttatgaaaagtttccctcatgcc

SEQ ID NO: 97820 - DNA, 80 bp, synthetic construct
  source 1..80: mol_type = other DNA
ggcttctttcttttagtataatatttttgaaatttatccctgttgttactagtatcaataatttgttcttttttattgct

SEQ ID NO: 97821 - DNA, 80 bp, synthetic construct; identical to SEQ ID NO: 18465
  source 1..80: mol_type = other DNA

SEQ ID NO: 97822 - DNA, 80 bp, synthetic construct
  source 1..80: mol_type = other DNA
gtggattgttgacctaaatgtaaaagtaaaatttaaaaatataaaacttctagatgaaaacataggagaaaatctctgtg

SEQ ID NO: 97823 - DNA, 80 bp, synthetic construct
  source 1..80: mol_type = other DNA
ctgaaaaaggacttgaatgtataatatatacataaagatgctcttacaacttcataatgagaaaataaccccataaagag

SEQ ID NO: 97824 - DNA, 80 bp, synthetic construct
  source 1..80: mol_type = other DNA
atggcatgcacctgtagtcctagctgtttgggaggctgaggtgggaggatagcttgagcctgggaggcggaggctgcagt

SEQ ID NO: 97825 - DNA, 80 bp, synthetic construct; identical to SEQ ID NO: 18466
  source 1..80: mol_type = other DNA

SEQ ID NO: 97826 - DNA, 80 bp, synthetic construct
  source 1..80: mol_type = other DNA
agtttttaagattatttttgatagccttctgaatttcttagtgagttataggtcagttctgccactgtttctttcttttc

SEQ ID NO: 97827 - DNA, 80 bp, synthetic construct
  source 1..80: mol_type = other DNA
agtgcagtggcacgatcttggctcactgcaacctccacctcccgggttcaagcaattctccctgcctcagcttccccaat

SEQ ID NO: 97828 - DNA, 80 bp, synthetic construct
  source 1..80: mol_type = other DNA
tgcgcctggcctggcactgtttatttcttttccctccagttttatacctatttagagagattagattttcttgagtacta

SEQ ID NO: 97829 - DNA, 80 bp, synthetic construct; identical to SEQ ID NO: 18467
  source 1..80: mol_type = other DNA

SEQ ID NO: 97830 - DNA, 80 bp, synthetic construct
  source 1..80: mol_type = other DNA
gatcctcagtgttggaggaggggcttggtaggaggtgattggatcatgggagtggtttgtaatggttttagcactatcac

SEQ ID NO: 97831 - DNA, 80 bp, synthetic construct
  source 1..80: mol_type = other DNA
ttggccttctgccatgattgtaagtttcctgaggcctctgattaaacctttcttcttctaaaagattacccagtctcagg

SEQ ID NO: 97832 - DNA, 80 bp, synthetic construct
  source 1..80: mol_type = other DNA
tccaatgtccttaggctgttttccaaatgagataccaaaagctagttctccatcgggtttctcaggctgctagaagcatt

SEQ ID NO: 97833 - DNA, 80 bp, synthetic construct
  source 1..80: mol_type = other DNA
ccgatagattttttttcttagatattgtacttttgaggcctcaaattgctgtcttttgtattttctatgtctgcagagac

SEQ ID NO: 97834 - DNA, 80 bp, synthetic construct; identical to SEQ ID NO: 18468
  source 1..80: mol_type = other DNA

SEQ ID NO: 97835 - DNA, 80 bp, synthetic construct
  source 1..80: mol_type = other DNA
ttccatgaggtctcttccactttgcctaggccagaactccagcttctcccagtattatatttcgttacctctggcgtcat

SEQ ID NO: 97836 - DNA, 80 bp, synthetic construct
  source 1..80: mol_type = other DNA
tgagttccatttccttctgtatcagagaagagccaccatgctgaaagcaaggggcactatgtttctttgttcttaaggat

SEQ ID NO: 97837 - DNA, 80 bp, synthetic construct
  source 1..80: mol_type = other DNA
tcctcatccttcttcttgccagtagttgtattataattcctgccagtagttacattataattttggttatatcaatattg

SEQ ID NO: 97838 - DNA, 80 bp, synthetic construct; identical to SEQ ID NO: 18469
  source 1..80: mol_type = other DNA

SEQ ID NO: 97839 - DNA, 80 bp, synthetic construct
  source 1..80: mol_type = other DNA
tcttgttttggcggagcacatctttagtaacttcctgacaaagtgtatggtttgagatttcgctgattttaaaatgccct

SEQ ID NO: 97840 - DNA, 80 bp, synthetic construct
  source 1..80: mol_type = other DNA
aacctgtttcttctctggcagcttttaggatcttctgtttctttggtattcagaaatttcatgagatatgtgtgcttcta

SEQ ID NO: 97841 - DNA, 80 bp, synthetic construct; identical to SEQ ID NO: 18470
  source 1..80: mol_type = other DNA

SEQ ID NO: 97842 - DNA, 80 bp, synthetic construct
  source 1..80: mol_type = other DNA
aatctctttgagacctacctccctcttctgtatagtgttaataagctctagctctcagatgtttgtgagggtcgaatgga

SEQ ID NO: 97843 - DNA, 80 bp, synthetic construct
  source 1..80: mol_type = other DNA
agctaggtatacttgcactaaatgctaatgctttttaaagaagttatgtcttaatattcagtctcattatgttaggttga

SEQ ID NO: 97844 - DNA, 80 bp, synthetic construct
  source 1..80: mol_type = other DNA
gagattaggaaaaagaaaatctgtcttttggtttttcttgatagtattaatgtaatttcaaatgttagctcatttttgtt

SEQ ID NO: 97845 - DNA, 80 bp, synthetic construct
  source 1..80: mol_type = other DNA
gaggtagagttaaagatacattttaacagaattgtattcctaaaccgattaagtcaagaagtccaagagcattgttagat

SEQ ID NO: 97846 - DNA, 80 bp, synthetic construct; identical to SEQ ID NO: 18471
  source 1..80: mol_type = other DNA

SEQ ID NO: 97847 - DNA, 80 bp, synthetic construct
  source 1..80: mol_type = other DNA
gatgtgaaaaggtaaaaaggaaggaaggaagagaaaacttaactctttttgcccatgaagactgtttttccttctcaaaa

SEQ ID NO: 97848 - DNA, 80 bp, synthetic construct
  source 1..80: mol_type = other DNA
gtggagtggacattgatattgttactctcagtaagttttcactgatttttctcagagtcatgaaggaacaaacgtttgtt

SEQ ID NO: 97849 - DNA, 80 bp, synthetic construct; identical to SEQ ID NO: 18472
  source 1..80: mol_type = other DNA

SEQ ID NO: 97850 - DNA, 80 bp, synthetic construct
  source 1..80: mol_type = other DNA
ttgtggtggcaataggcaacaagataaaagaaagtaaaaggtgttatggaaacttaatgggtccagcttacaaatgatct

SEQ ID NO: 97851 - DNA, 80 bp, synthetic construct
  source 1..80: mol_type = other DNA
ttcaaaagctagaagccattaaactgagtcacttcagggttagactatcagaactggggatttagaaagtctcagaatgg

SEQ ID NO: 97852 - DNA, 80 bp, synthetic construct
  source 1..80: mol_type = other DNA
attcttttcattcctgtgtgtagtgacttcctgctttaagaacttaggacttcagctgtactatcagtattgtaggtcac

SEQ ID NO: 97853 - DNA, 80 bp, synthetic construct; identical to SEQ ID NO: 18473
  source 1..80: mol_type = other DNA

SEQ ID NO: 97854 - DNA, 80 bp, synthetic construct
  source 1..80: mol_type = other DNA
ctctccaaattttactgacttcagaagtttctagaactaagttatagcatgttttgagttctaatgtcactttccgatct

SEQ ID NO: 97855 - DNA, 80 bp, synthetic construct
  source 1..80: mol_type = other DNA
gcactaggcatacccacatttaatagtatgttaaatcttttatagcaattatgatatacatgggtgaagaagagttccta

SEQ ID NO: 97856 - DNA, 80 bp, synthetic construct
  source 1..80: mol_type = other DNA
atggggaaggggagatagtgaataaagagatgtatacttcttgcctttgaggaatttaagttttcactgtataccaattt

SEQ ID NO: 97857 - DNA, 80 bp, synthetic construct
  source 1..80: mol_type = other DNA
tgattctatggcaaatctcacttctctggaagcttttcctgttaatcttattccttcagtttctgcctcttgtttcataa

SEQ ID NO: 97858 - DNA, 80 bp, synthetic construct; identical to SEQ ID NO: 18474
  source 1..80: mol_type = other DNA

SEQ ID NO: 97859 - DNA, 80 bp, synthetic construct
  source 1..80: mol_type = other DNA
tctgtgatttatgacagatactgctcttgtaggaatgctggctttgactgaaatttgttactgcttttgtatttaaaact

SEQ ID NO: 97860 - DNA, 80 bp, synthetic construct
  source 1..80: mol_type = other DNA
gagataataacagttatcacgtgattgtgaggatgaaacaaaaaaaagtggaaactctttgtaaggtgtgttcatctggt

SEQ ID NO: 97861 - DNA, 80 bp, synthetic construct; identical to SEQ ID NO: 18475
  source 1..80: mol_type = other DNA

SEQ ID NO: 97862 - DNA, 80 bp, synthetic construct
  source 1..80: mol_type = other DNA
aaatgtgactgtcttgtcagtcctctttttcctgtttttcatgtcagtgggtatgaaattactagcaaggatgcatatat

SEQ ID NO: 97863 - DNA, 80 bp, synthetic construct
  source 1..80: mol_type = other DNA
ttagttaaaccttcatgtgaatttggttttgaattacctttaaggtagagaagaaactatatagatgtttttcagggttt

SEQ ID NO: 97864 - DNA, 80 bp, synthetic construct
  source 1..80: mol_type = other DNA
ttactcttcgctctaagtgtattaaatattatgtacaatcttattacttcagatcaggatttgctgtagttgagtttgcc

SEQ ID NO: 97865 - DNA, 80 bp, synthetic construct; identical to SEQ ID NO: 18476
  source 1..80: mol_type = other DNA

SEQ ID NO: 97866 - DNA, 80 bp, synthetic construct
  source 1..80: mol_type = other DNA
gttggcttttcaacagggagtaaggtctggtttaaaaaaaaattagtaagcatttggccaagtagattaacaacattcag

SEQ ID NO: 97867 - DNA, 80 bp, synthetic construct
  source 1..80: mol_type = other DNA
cagatttttcatagaggaaatttgaaagcatggaagcacctgaatttacagtactctgtattagtggcatcacaagtttt

SEQ ID NO: 97868 - DNA, 80 bp, synthetic construct; identical to SEQ ID NO: 18477
  source 1..80: mol_type = other DNA

SEQ ID NO: 97869 - DNA, 80 bp, synthetic construct
  source 1..80: mol_type = other DNA
ttgtcaggaagactaaagtgcagcatagactaagaattaggaaaattcctagactaaaaatagtataaggagagggttta

SEQ ID NO: 97870 - DNA, 80 bp, synthetic construct
  source 1..80: mol_type = other DNA
agaggagtctgatggatgagaggagggaactgctttaaatgagtttctacttcagacataagttaattctcagagcccac

SEQ ID NO: 97871 - DNA, 80 bp, synthetic construct
  source 1..80: mol_type = other DNA
gtgggtgccatgagctactattgatgtatttgccattgatccctcctgaaaatctagaatggactttcagacaaatggtt

SEQ ID NO: 97872 - DNA, 80 bp, synthetic construct; identical to SEQ ID NO: 18478
  source 1..80: mol_type = other DNA

SEQ ID NO: 97873 - DNA, 80 bp, synthetic construct
  source 1..80: mol_type = other DNA
gatcttaatagagtggaactaaggtagaaactattaagagcaattaatagtgatatatctatagtcctgtttctaaacaa

SEQ ID NO: 97874 - DNA, 80 bp, synthetic construct
  source 1..80: mol_type = other DNA
gcagtccattgagcatagattcccagaatgtattctcctgcagaaaatggaggaaaataatacttggcttccctaatgat

SEQ ID NO: 97875 - DNA, 80 bp, synthetic construct
  source 1..80: mol_type = other DNA
taaatagtattattccttttgcattgagagtcctgacgaaatgtccatgtgacagttcattttgggtttagctctacctc

SEQ ID NO: 97876 - DNA, 80 bp, synthetic construct; identical to SEQ ID NO: 18479
  source 1..80: mol_type = other DNA

SEQ ID NO: 97877 - DNA, 80 bp, synthetic construct
  source 1..80: mol_type = other DNA
cagcaattcactgtaaagctggaaagggacgaactggtgtaatgatatgtgcatatttattacatcggggcaaattttta

SEQ ID NO: 97878 - DNA, 80 bp, synthetic construct
  source 1..80: mol_type = other DNA
tgacaagtaaaaattatatataaatacaatgtataatatgatgttttgatgtatgtgtatatacattgtgaaatgattac

SEQ ID NO: 97879 - DNA, 80 bp, synthetic construct
  source 1..80: mol_type = other DNA
ttgtgttcctccctccccaccctcagtccctggaaaacaggttttaaagatagttgctaatccttatttcttctaaattt

SEQ ID NO: 97880 - DNA, 80 bp, synthetic construct
  source 1..80: mol_type = other DNA
catattaatcaaaaataagctttatatttctgaagcttgtttgagcatagaatgcctttggataaaataccattacctag

SEQ ID NO: 97881 - DNA, 80 bp, synthetic construct; identical to SEQ ID NO: 18480
  source 1..80: mol_type = other DNA

SEQ ID NO: 97882 - DNA, 80 bp, synthetic construct
  source 1..80: mol_type = other DNA
atcgtattaatcatttaaagctgtgtaattgcatagattccttgttcctttaccccctcttatatcttgtttcctatcct

SEQ ID NO: 97883 - DNA, 80 bp, synthetic construct
  source 1..80: mol_type = other DNA
tactttgatttatcccattatcatctgcagggaaacaattgcttttactgattaaaaatgcaggctgggcacagcggctc

SEQ ID NO: 97884 - DNA, 80 bp, synthetic construct
  source 1..80: mol_type = other DNA
ggatgctgaggcaggagaatcgcttgaacccgggaggtggaggttgcagtgagccgagactgtgccactgcactccagcc

SEQ ID NO: 97885 - DNA, 80 bp, synthetic construct; identical to SEQ ID NO: 18481
  source 1..80: mol_type = other DNA

SEQ ID NO: 97886 - DNA, 80 bp, synthetic construct
  source 1..80: mol_type = other DNA
aaaaaccagtggctactacatgagagcaatgaataaatctaagtggtacaaattaaccaaaattaagctttagttctgtt

SEQ ID NO: 97887 - DNA, 80 bp, synthetic construct
  source 1..80: mol_type = other DNA
gaagagtaaatggaatctgtagattctattgcctgatgaaagtagacgtgtcaagaaataagaattctccaaggctcttc

SEQ ID NO: 97888 - DNA, 80 bp, synthetic construct
  source 1..80: mol_type = other DNA
tcctgtaaacagcagtatcaggctgtagaatttgtcttctgaaagcagggaacttatatatagcaaagaacttcatagtg

SEQ ID NO: 97889 - DNA, 80 bp, synthetic construct; identical to SEQ ID NO: 18482
  source 1..80: mol_type = other DNA

SEQ ID NO: 97890 - DNA, 80 bp, synthetic construct
  source 1..80: mol_type = other DNA
aaaaagattccaaaatgggaatgtttccttgattgtgtcaccatgcttgcatttgatgaaaacttgtagccggctatact

SEQ ID NO: 97891 - DNA, 80 bp, synthetic construct
  source 1..80: mol_type = other DNA
tttctaagatacttgccttcactgttcaactgtgtgactttttgtttgtttagcattacaatcaatatcctagtaggatg

SEQ ID NO: 97892 - DNA, 80 bp, synthetic construct
  source 1..80: mol_type = other DNA
ctgcttcttcagaatagttggctgtgctctgctgatgatgagaacttgccatttaagaaggacttgggatagtccatgtc

SEQ ID NO: 97893 - DNA, 80 bp, synthetic construct; identical to SEQ ID NO: 18483
  source 1..80: mol_type = other DNA

SEQ ID NO: 97894 - DNA, 80 bp, synthetic construct
  source 1..80: mol_type = other DNA
ctgtatattctccatccttgcataggttggaatatcccccaagtgaaaagagattgatgggctaatagttaatagaaaat

SEQ ID NO: 97895 - DNA, 80 bp, synthetic construct
  source 1..80: mol_type = other DNA
tgcttaattaatatacttagaccatatttcggatgaattattcacagaatctaaaggagtatcctcgtgttcttaccttc

SEQ ID NO: 97896 - DNA, 80 bp, synthetic construct
  source 1..80: mol_type = other DNA
ggaatgtttcttatagatgatcaaacaggcacaggaaggggaagtgttgtgatcaatattatccagttaatattagcatt

SEQ ID NO: 97897 - DNA, 80 bp, synthetic construct; identical to SEQ ID NO: 18484
  source 1..80: mol_type = other DNA

SEQ ID NO: 97898 - DNA, 80 bp, synthetic construct
  source 1..80: mol_type = other DNA
tatgaataactaatttcatcataagaaaacttagctaagcatggtaaagctgttgttatacaactgtggaattcttcctg

SEQ ID NO: 97899 - DNA, 80 bp, synthetic construct
  source 1..80: mol_type = other DNA
tcttcttgtcagtatttccttgtagattgagcctgtggatttgcatttttgtaattgtgaatcaccattataggagatac

SEQ ID NO: 97900 - DNA, 80 bp, synthetic construct; identical to SEQ ID NO: 18485
  source 1..80: mol_type = other DNA

SEQ ID NO: 97901 - DNA, 80 bp, synthetic construct
  source 1..80: mol_type = other DNA
attataaagaaaaatgttctgagagtgaggtaaccgcttaagggaaggaagcctccttctgtcttattcactaatttaca

SEQ ID NO: 97902 - DNA, 80 bp, synthetic construct
  source 1..80: mol_type = other DNA
gtcctgtgctccacactatctgcatctgcacttaagtttcaatattagataactcacatgtttaaactatgaagaaagag

SEQ ID NO: 97903 - DNA, 80 bp, synthetic construct
  source 1..80: mol_type = other DNA
tgtgttccagaatgatggcacataaagtaaacattcatatttatttccctttttttgttttttttttttttttttttttt

SEQ ID NO: 97904 - DNA, 80 bp, synthetic construct
  source 1..80: mol_type = other DNA
cacgcctggctaatttttgtatttttagtagagatggggtttcgccatgttggccagactggtcttgaactcttgacctc

SEQ ID NO: 97905 - DNA, 80 bp, synthetic construct; identical to SEQ ID NO: 18486
  source 1..80: mol_type = other DNA

SEQ ID NO: 97906 - DNA, 80 bp, synthetic construct
  source 1..80: mol_type = other DNA
ctgtctttttaaaaatcttccaatgtggcgttcttatttttcttaacatttgaattttcctgggccaaaccatgttacta

SEQ ID NO: 97907 - DNA, 80 bp, synthetic construct
  source 1..80: mol_type = other DNA
gttcaagaccagcttgggcaacatagtgagaggctgtctctacaaaaaaatatttaaaaaatagccgggcatggtgtcac

SEQ ID NO: 97908 - DNA, 80 bp, synthetic construct; identical to SEQ ID NO: 18487
  source 1..80: mol_type = other DNA

SEQ ID NO: 97909 - DNA, 80 bp, synthetic construct
  source 1..80: mol_type = other DNA
aaaacccaactcaaagtagcttaaataaaaggagacattttttgacttacataacctaaaagctctggcctggatctagg

SEQ ID NO: 97910 - DNA, 80 bp, synthetic construct
  source 1..80: mol_type = other DNA
gcaactatgatgagaagagagctacaatttgagcaaaaatttgtagggtgagttctgatttccctggattgaggcacatg

SEQ ID NO: 97911 - DNA, 80 bp, synthetic construct
  source 1..80: mol_type = other DNA
gtctgcttcacatttgttctcaataattagtttcatagaagtgaaatactgtgtaacaccctaaactttagagattcttc

SEQ ID NO: 97912 - DNA, 80 bp, synthetic construct; identical to SEQ ID NO: 18488
  source 1..80: mol_type = other DNA

SEQ ID NO: 97913 - DNA, 80 bp, synthetic construct
  source 1..80: mol_type = other DNA
aacatagatttccgagcttcaagcaaacactattatgttgaaaaatctacattatttctaagtttagcagtgccagtgga

SEQ ID NO: 97914 - DNA, 80 bp, synthetic construct
  source 1..80: mol_type = other DNA
tgttctggtagtagtatggcagtattttaggtctgaaagatgtacataatctgtactttgaagtctgttttttaagagat

SEQ ID NO: 97915 - DNA, 80 bp, synthetic construct
  source 1..80: mol_type = other DNA
catcaacacagggtacactccaggtaaagacttaacagttatgaacgaatgtgctaaacatcaaaatgtattaagtaaaa

SEQ ID NO: 97916 - DNA, 80 bp, synthetic construct; identical to SEQ ID NO: 18489
  source 1..80: mol_type = other DNA

SEQ ID NO: 97917 - DNA, 80 bp, synthetic construct
  source 1..80: mol_type = other DNA
aaataatctttaggcagatcctacaggaggtattccagataaaggcattattgtcataggagatggcagctccatggatg

SEQ ID NO: 97918 - DNA, 80 bp, synthetic construct
  source 1..80: mol_type = other DNA
aaatcttaataaggatacaaagaaaaaatgtttttgtgtagctgtgtaatatgtttttgttttaagttaaatgttacaaa

SEQ ID NO: 97919 - DNA, 80 bp, synthetic construct
  source 1..80: mol_type = other DNA
caccactcacccactgactcacccagagcagcttccaatcctgtaagctccattcgtggtaagtgccctatacaggtgta

SEQ ID NO: 97920 - DNA, 80 bp, synthetic construct; identical to SEQ ID NO: 18490
  source 1..80: mol_type = other DNA

SEQ ID NO: 97921 - DNA, 80 bp, synthetic construct
  source 1..80: mol_type = other DNA
ttacaattcattagaactggagatttttaaaaatgtttaaatttatatggaaatataaaatcatgttttaaataattttt

SEQ ID NO: 97922 - DNA, 80 bp, synthetic construct
  source 1..80: mol_type = other DNA
gtcaaggataaaagaaaagagggaaactaaaagtgagacattaagtatgagaaaggagataaaactaaagtgtggaggtg

SEQ ID NO: 97923 - DNA, 80 bp, synthetic construct
  source 1..80: mol_type = other DNA
ctgcaataatgaaaatgtctaggagccctcaagaaatacctggtttaaattgcatttcaggtggctggttatcacacctt

SEQ ID NO: 97924 - DNA, 80 bp, synthetic construct; identical to SEQ ID NO: 18491
  source 1..80: mol_type = other DNA

SEQ ID NO: 97925 - DNA, 80 bp, synthetic construct
  source 1..80: mol_type = other DNA
tgagagtggtataaaggatagattacagaatggataaagggtgataaatcagttggctatggcaaaattgcaggaagaaa

SEQ ID NO: 97926 - DNA, 80 bp, synthetic construct
  source 1..80: mol_type = other DNA
atctatgatttgtctgtcattttattgtgtaccattagtgtgtatgcatgtatgtatgtgccaggtagttaataggctga

SEQ ID NO: 97927 - DNA, 80 bp, synthetic construct
  source 1..80: mol_type = other DNA
agcagaaagaagatgggaggatcatatagtagttgactagaagctgtggagtttgagtgctgggattatatctagttcca

SEQ ID NO: 97928 - DNA, 80 bp, synthetic construct
  source 1..80: mol_type = other DNA
tggtgttagttattagaaggccatcgagtgctggagaaaataattgaatatcattgatggaaataaaggaagttttccac

SEQ ID NO: 97929 - DNA, 80 bp, synthetic construct; identical to SEQ ID NO: 18492
  source 1..80: mol_type = other DNA

SEQ ID NO: 97930 - DNA, 80 bp, synthetic construct
  source 1..80: mol_type = other DNA
cgcttcaacatctgtttaggagaaagtggagacagactgacctgagtaactaaggtcttggaacagcttacaggtcagaa

SEQ ID NO: 97931 - DNA, 80 bp, synthetic construct
  source 1..80: mol_type = other DNA
gatactggaaactttggttttgggacccaggaacacattgatctgggtatcagatatgacccaagcattgatgtctacag

SEQ ID NO: 97932 - DNA, 80 bp, synthetic construct
  source 1..80: mol_type = other DNA
agaagtatgatgggatcatccttcctggcaaataaattctcatttctacccaaaagggtaataaaaagttttcagtgaaa

SEQ ID NO: 97933 - DNA, 80 bp, synthetic construct; identical to SEQ ID NO: 18493
  source 1..80: mol_type = other DNA

SEQ ID NO: 97934 - DNA, 80 bp, synthetic construct
  source 1..80: mol_type = other DNA
acccccctccccttcaaaaagaaatcagcctcataatcaatttctctggattaaggagtaagagcgtctcaagatttgct

SEQ ID NO: 97935 - DNA, 80 bp, synthetic construct
  source 1..80: mol_type = other DNA
gccagccttggataaagaatgaagattacttgagcatattatttagagacaagtggagagaataaaggcacatgccagat

SEQ ID NO: 97936 - DNA, 80 bp, synthetic construct
  source 1..80: mol_type = other DNA
gatgtgttggtcaggatcaagagagaggttgggagaacaaagtgctaaaatcgttgtggtcaagagtttaaaaagtgtat

SEQ ID NO: 97937 - DNA, 80 bp, synthetic construct; identical to SEQ ID NO: 18494
  source 1..80: mol_type = other DNA

SEQ ID NO: 97938 - DNA, 80 bp, synthetic construct
  source 1..80: mol_type = other DNA
tatagtatattcttaacaataaagtaaactagagaaaagaacatgtatcaagaaaatcataaggaagagaaaacacattt

SEQ ID NO: 97939 - DNA, 80 bp, synthetic construct
  source 1..80: mol_type = other DNA
cactttattcttataatgtctatgacttctttctttgaaagcgcttccatcatcactgttggcacttcatatgggtctca

SEQ ID NO: 97940 - DNA, 80 bp, synthetic construct
  source 1..80: mol_type = other DNA
tgtctctattaaaaataaaaaaattagccaggcatggtggcacgtgcctgtaatcccagctaatcgggaggctgaggcag

SEQ ID NO: 97941 - DNA, 80 bp, synthetic construct; identical to SEQ ID NO: 18495
  source 1..80: mol_type = other DNA

SEQ ID NO: 97942 - DNA, 80 bp, synthetic construct
  source 1..80: mol_type = other DNA
tataataggtttgtgtatattttatggcagtaaatgataaaacagactaatctacatatattttatgtagtcatgacata

SEQ ID NO: 97943 - DNA, 80 bp, synthetic construct
  source 1..80: mol_type = other DNA
aataattttcctcaaaattaaagtggaaaaggagagttactactagtagaaagtagaactgtacccttgggcaggggtgt

SEQ ID NO: 97944 - DNA, 80 bp, synthetic construct; identical to SEQ ID NO: 18496
  source 1..80: mol_type = other DNA

SEQ ID NO: 97945 - DNA, 80 bp, synthetic construct
  source 1..80: mol_type = other DNA
aagatttgaaaacagagtattttttaatctgcaagagctttacagccttttattcatatgtataagcttttaaagatgac

SEQ ID NO: 97946 - DNA, 80 bp, synthetic construct
  source 1..80: mol_type = other DNA
atatttgttaatctagaagtgttgaattttgggtgctgacaaggcagcaggtagataagaattgcaaagttaagaaaata

SEQ ID NO: 97947 - DNA, 80 bp, synthetic construct
  source 1..80: mol_type = other DNA
tccttttttgggtaaggattaacagaatgtataatcacctacattataggtacactactaatcacttgctacttgaaaaa

SEQ ID NO: 97948 - DNA, 80 bp, synthetic construct
  source 1..80: mol_type = other DNA
tttgactagataataaatgcatatggttaaaaaattcacatggttcaaaaaagtacacctcccactcatcttccatgtga

SEQ ID NO: 97949 - DNA, 80 bp, synthetic construct; identical to SEQ ID NO: 18497
  source 1..80: mol_type = other DNA

SEQ ID NO: 97950 - DNA, 80 bp, synthetic construct
  source 1..80: mol_type = other DNA
gctgaggcaggagaatggcgtgaacccgggaggcagagcttgcagtgagccgagatcgcaccactgcactccagcctggg

SEQ ID NO: 97951 - DNA, 80 bp, synthetic construct
  source 1..80: mol_type = other DNA
ctgcatctggtgtttgatcctcatgagagccctgttaaggaagggtacatattattgtcctcattttccttcgaaaacac

SEQ ID NO: 97952 - DNA, 80 bp, synthetic construct; identical to SEQ ID NO: 18498
  source 1..80: mol_type = other DNA

SEQ ID NO: 97953 - DNA, 80 bp, synthetic construct
  source 1..80: mol_type = other DNA
cctcagcctcccaagtagctgggactgcaggtacacatcaccacgcccagctaattttttgtatttttggtagagacggg

SEQ ID NO: 97954 - DNA, 80 bp, synthetic construct
  source 1..80: mol_type = other DNA
ggttgtgtctacaatttttaagacattggggagatttagatgccagtagtaacttaaaagagaaataattgcaaattctt

SEQ ID NO: 97955 - DNA, 80 bp, synthetic construct
  source 1..80: mol_type = other DNA
gtcttcgttagtgaatgcattgttgtacatattagatttttctctttagataactcagcttcccctattaagtgccacat

SEQ ID NO: 97956 - DNA, 80 bp, synthetic construct
  source 1..80: mol_type = other DNA
agaagattgtttcacacatttacatcaactgcatagtcctgtttttgttgggccctaatgccagcatcactttttgctac

SEQ ID NO: 97957 - DNA, 80 bp, synthetic construct; identical to SEQ ID NO: 18499
  source 1..80: mol_type = other DNA

SEQ ID NO: 97958 - DNA, 80 bp, synthetic construct
  source 1..80: mol_type = other DNA
tttttttcaatttggcttctcttttttttctgtccaccagggagtaactattcccagtcagaggcgctatgtgtattatt

SEQ ID NO: 97959 - DNA, 80 bp, synthetic construct
  source 1..80: mol_type = other DNA
atgttcagtggcggaacttgcagtaagtgcttgaaattctcatccttccatgtattggaacagttttcttaaccatatct

SEQ ID NO: 97960 - DNA, 80 bp, synthetic construct
  source 1..80: mol_type = other DNA
tatatttatgaaagaaatattctgtgttataaccaccaaatacagcccaattctgactagatgatggaagaacctgtccc

SEQ ID NO: 97961 - DNA, 80 bp, synthetic construct; identical to SEQ ID NO: 18500
  source 1..80: mol_type = other DNA

SEQ ID NO: 97962 - DNA, 80 bp, synthetic construct
  source 1..80: mol_type = other DNA
tatttctcccttttaccctaatctctataagtctacctcagtcatcctgatcctattctacttctctgatgttgttgtca

SEQ ID NO: 97963 - DNA, 80 bp, synthetic construct
  source 1..80: mol_type = other DNA
ggtactgagctgttggaagtgactgacagatgaatgtaacagattcatagagaaggaaaaaggaagaaaaactcatgctc

SEQ ID NO: 97964 - DNA, 80 bp, synthetic construct; identical to SEQ ID NO: 18501
  source 1..80: mol_type = other DNA

SEQ ID NO: 97965 - DNA, 80 bp, synthetic construct
  source 1..80: mol_type = other DNA
cttcttgggaggctgaggcaggagaatcgcttgaatccaggaggcagaggttgcagttagccgagatcatgccactgcac

SEQ ID NO: 97966 - DNA, 80 bp, synthetic construct
  source 1..80: mol_type = other DNA
ttgaacattgaagaaaacatacagtttagactggcattaaaactgaaagaagtggccagacgcagtggtagacgcagtgg

SEQ ID NO: 97967 - DNA, 80 bp, synthetic construct
  source 1..80: mol_type = other DNA
gggaggctgaggcaggagaattgcttgaagccgaaggtggaggttgcagtgagccgagattgcgtcattgcactccagcc

SEQ ID NO: 97968 - DNA, 80 bp, synthetic construct; identical to SEQ ID NO: 18502
  source 1..80: mol_type = other DNA

SEQ ID NO: 97969 - DNA, 80 bp, synthetic construct
  source 1..80: mol_type = other DNA
attttgtaaaagttttgagcccagtcaggtgaaatagtctcagaaagaaagaaaagtgaatctgagacttggagacatta

SEQ ID NO: 97970 - DNA, 80 bp, synthetic construct
  source 1..80: mol_type = other DNA
atataaataatggtgtggcgtttgggcatgggaagtcttggaggaaaggaagaaaaggagagggtgaggactgagataag

SEQ ID NO: 97971 - DNA, 80 bp, synthetic construct
  source 1..80: mol_type = other DNA
gggttaaaaatgttactaaaagatgatcaatgtggttttcattcaagactataacaatatgtatatatccaaggaaattt

SEQ ID NO: 97972 - DNA, 80 bp, synthetic construct
  source 1..80: mol_type = other DNA
caccgtttcaagtctccactatttatcattccattctttacattctgattttcatttactaggtgtattagtctgttttt

SEQ ID NO: 97973 - DNA, 80 bp, synthetic construct; identical to SEQ ID NO: 18503
  source 1..80: mol_type = other DNA

SEQ ID NO: 97974 - DNA, 80 bp, synthetic construct
  source 1..80: mol_type = other DNA
ttgggagggaaagatatccaaactatatcactaggtctggatcttgttatttattttttggaacatagtcatatatatcc

SEQ ID NO: 97975 - DNA, 80 bp, synthetic construct
  source 1..80: mol_type = other DNA
ataatatttgaagatgcacattttagatgtagtttaattgaaacctggaaatactattaatttgctttttaaagtcctaa

SEQ ID NO: 97976 - DNA, 80 bp, synthetic construct; identical to SEQ ID NO: 18504
  source 1..80: mol_type = other DNA

SEQ ID NO: 97977 - DNA, 80 bp, synthetic construct
  source 1..80: mol_type = other DNA
acatagaaatagtagtaggtgtttactaaactggaaatttcatttaacttggtttagctttgccttgttctcagtcacat

SEQ ID NO: 97978 - DNA, 80 bp, synthetic construct
  source 1..80: mol_type = other DNA
cctgtttctctattatcttggcatgttttcttcaaatggcacttcttaacctcctaaggttaataaatttctttgtaatg

SEQ ID NO: 97979 - DNA, 80 bp, synthetic construct
  source 1..80: mol_type = other DNA
taaaaaataaaacatacaatccttcccttaacacactttcccaccatttggttcaactgctagtgtaaaagcatgatgaa

SEQ ID NO: 97980 - DNA, 80 bp, synthetic construct
  source 1..80: mol_type = other DNA
gttaatgaaaatgaggtgttttggaggaaaggaaggttgtgctgcagtttttacttgaaatctgttacatttctttacag

SEQ ID NO: 97981 - DNA, 80 bp, synthetic construct; identical to SEQ ID NO: 18505
  source 1..80: mol_type = other DNA

SEQ ID NO: 97982 - DNA, 80 bp, synthetic construct
  source 1..80: mol_type = other DNA
tttgaagttactctgccactagaagtctaattttgggacttactattcatgaaataggaattgacttttatataagtaat

SEQ ID NO: 97983 - DNA, 80 bp, synthetic construct
  source 1..80: mol_type = other DNA
tgacagttaaaggcatttcctgtgaaataatactggtatgtatttaaccatgcagatcctcagtttgtggtctgccagct

SEQ ID NO: 97984 - DNA, 80 bp, synthetic construct
  source 1..80: mol_type = other DNA
cgggaagacaagttcatgtactttgagttccctcagccgttacctgtgtgtggtgatatcaaagtagagttcttccacaa

SEQ ID NO: 97985 - DNA, 80 bp, synthetic construct; identical to SEQ ID NO: 18506
  source 1..80: mol_type = other DNA

SEQ ID NO: 97986 - DNA, 80 bp, synthetic construct
  source 1..80: mol_type = other DNA
tggcttatgtttctttttctttccttttttttttttttcctttttgttagagacagggtcttgttctattgcccaggctg

SEQ ID NO: 97987 - DNA, 80 bp, synthetic construct
  source 1..80: mol_type = other DNA
gtgcgccatcatgcctggccttaacgtttcttaagacttgattattttctatttagcttctgtggatttactgattaatt

SEQ ID NO: 97988 - DNA, 80 bp, synthetic construct; identical to SEQ ID NO: 18507
  source 1..80: mol_type = other DNA

SEQ ID NO: 97989 - DNA, 80 bp, synthetic construct
  source 1..80: mol_type = other DNA
cagctactcaggaggcttgaggcaggataattgctgaacccgagaggcggaggttgcagtaagccaagaatgcaccattg

SEQ ID NO: 97990 - DNA, 80 bp, synthetic construct
  source 1..80: mol_type = other DNA
tgctgccttgttaaacatactagatagcatattgccaatctttaaacattctcaatgataggatttatttactttttctg

SEQ ID NO: 97991 - DNA, 80 bp, synthetic construct
  source 1..80: mol_type = other DNA
ccagaaacccatttcctatcgtctgtacaaataaaagttaaatatatctcaataacttagaaaaattattttttgataat

SEQ ID NO: 97992 - DNA, 80 bp, synthetic construct
  source 1..80: mol_type = other DNA
gattaaatatttatgatttatttgtttatccttgactacataaatttccattttattgattttccctgccttatttaaga

SEQ ID NO: 97993 - DNA, 80 bp, synthetic construct; identical to SEQ ID NO: 18508
  source 1..80: mol_type = other DNA

SEQ ID NO: 97994 - DNA, 80 bp, synthetic construct
  source 1..80: mol_type = other DNA
ggccagatttctttgttggtcaatagaggtttaaagtgatgaacttctgttgtgtttttttattaagaaggtattatctt

SEQ ID NO: 97995 - DNA, 80 bp, synthetic construct
  source 1..80: mol_type = other DNA
aaacatgtatttgccatgcgtcatcagggaagttgcactcaccgtccaagaacttttgttaaagtaaatcttggaatagg

SEQ ID NO: 97996 - DNA, 80 bp, synthetic construct
  source 1..80: mol_type = other DNA
agattgtatttttggtttaaaatttgagaatttgagtgaagaaaaatcatgtgaatgaaaatgcaacagataactcagat

SEQ ID NO: 97997 - DNA, 80 bp, synthetic construct; identical to SEQ ID NO: 18509
  source 1..80: mol_type = other DNA

SEQ ID NO: 97998 - DNA, 80 bp, synthetic construct
  source 1..80: mol_type = other DNA
ggtcagttaaattaaacattttgtgggggttgttgacttgtatgtatgtgatgtgtgtttaattctaggagtacagctga

SEQ ID NO: 97999 - DNA, 80 bp, synthetic construct
  source 1..80: mol_type = other DNA
tttccttttcctaattcttcgttgtttgctgaaatctggggcaaaggtgcgggagggggctaaatgactgggatatgaag

SEQ ID NO: 98000 - DNA, 80 bp, synthetic construct
  source 1..80: mol_type = other DNA
tttataaggaccttgtgtttttttttttaccatgacctacaaggcccagcataatttagcacagggctacctcctacatc

SEQ ID NO: 98001 - DNA, 80 bp, synthetic construct
  source 1..80: mol_type = other DNA
atcttcatatttccagccttagcttcaatctcatattctctgaagtcctttgattgtcctcccgttattctttttttaaa

SEQ ID NO: 98002 - DNA, 80 bp, synthetic construct; identical to SEQ ID NO: 18510
  source 1..80: mol_type = other DNA

SEQ ID NO: 98003 - DNA, 80 bp, synthetic construct
  source 1..80: mol_type = other DNA
ccagccggccaatatggcgaaaccctatctgcactacaaatacaaaaattagctgggcatggtgtcgcacacctgtaatc

SEQ ID NO: 98004 - DNA, 80 bp, synthetic construct
  source 1..80: mol_type = other DNA
acacacacacacacacacacacacactattactaccaatatacatacatatatgtatgtatgtatgtatgtatattggta

SEQ ID NO: 98005 - DNA, 80 bp, synthetic construct
  source 1..80: mol_type = other DNA
ttcatgtatgcagtgtgtgatgatcaaatcaggataattagcatatggatcacctcaaacatttgtcatttctttgtgtt

SEQ ID NO: 98006 - DNA, 80 bp, synthetic construct; identical to SEQ ID NO: 18511
  source 1..80: mol_type = other DNA

SEQ ID NO: 98007 - DNA, 80 bp, synthetic construct
  source 1..80: mol_type = other DNA
tctttttccctttagttttattgttttctattttaatattgcaagatgttttatatttgtgattacaaataaaaactcca

SEQ ID NO: 98008 - DNA, 80 bp, synthetic construct
  source 1..80: mol_type = other DNA
agtgagttatacaaatatctgggaaaagagttaagagtacagatgcaaaagcccttagacaagagaatgagcttggtata

SEQ ID NO: 98009 - DNA, 80 bp, synthetic construct; identical to SEQ ID NO: 18512
  source 1..80: mol_type = other DNA

SEQ ID NO: 98010 - DNA, 80 bp, synthetic construct
  source 1..80: mol_type = other DNA
ataatgactcttggataataggggagggaggggctgtcaatataatataatgaagaagggatttgaagtcatttctgatt

SEQ ID NO: 98011 - DNA, 80 bp, synthetic construct
  source 1..80: mol_type = other DNA
tctgttatagaccactgtattatgttaatgtccctctccttcctccctttaggtaaagtttttagggctaataaatccca

SEQ ID NO: 98012 - DNA, 80 bp, synthetic construct
  source 1..80: mol_type = other DNA
acatggtgaaatcccatctctacaaaaaatataaaagctagctgggtgtggtggcatgcacctgtagtcctagctacttg

SEQ ID NO: 98013 - DNA, 80 bp, synthetic construct
  source 1..80: mol_type = other DNA
gaaacattctttttgaactcagctgtttgtgaattgaattttgtaattcaaatgctatattatgtaaactattgatgact

SEQ ID NO: 98014 - DNA, 80 bp, synthetic construct; identical to SEQ ID NO: 18513
  source 1..80: mol_type = other DNA

SEQ ID NO: 98015 - DNA, 80 bp, synthetic construct
  source 1..80: mol_type = other DNA
tgtttagtacctagcaagaaagaaaatgttgaacatcttaagaagagggtcatttaaaaggcctcttaaagatcatgttt

SEQ ID NO: 98016 - DNA, 80 bp, synthetic construct
  source 1..80: mol_type = other DNA
agccgtcaaatccagaggctagcagttcaacttctgtaacaccagatgttagtgacaatgaacctgatcattatagatat

SEQ ID NO: 98017 - DNA, 80 bp, synthetic construct
  source 1..80: mol_type = other DNA
ggacattgtgtcagattaccagttataggaacaattctcttttcctgaccaatcttgttttaccctatacatccacaggg

SEQ ID NO: 98018 - DNA, 80 bp, synthetic construct; identical to SEQ ID NO: 18514
  source 1..80: mol_type = other DNA

SEQ ID NO: 98019 - DNA, 80 bp, synthetic construct
  source 1..80: mol_type = other DNA
atgtattcgggttaggggaatggagggaatgctcagaaaggaaataattttatgctggactctggaccatataccatctc

SEQ ID NO: 98020 - DNA, 80 bp, synthetic construct
  source 1..80: mol_type = other DNA
aaaggcagctaaaggaagtgaatctgtattggggtacaggaatgaaccttctgcaacatcttaagatccacaaatgaagg

SEQ ID NO: 98021 - DNA, 80 bp, synthetic construct
  source 1..80: mol_type = other DNA
tatgttttctcaattgtaacgacttctccatctcctgtgtaatcaaggccagtgctaaaattcagatgctgttagtacct

SEQ ID NO: 98022 - DNA, 80 bp, synthetic construct; identical to SEQ ID NO: 18515
  source 1..80: mol_type = other DNA

SEQ ID NO: 98023 - DNA, 80 bp, synthetic construct
  source 1..80: mol_type = other DNA
gagttgcagtaaactttcaatgctgcacacaaaaaaaagacatttgatttttcagtagaaattgtcctacatgtgcttta

SEQ ID NO: 98024 - DNA, 80 bp, synthetic construct
  source 1..80: mol_type = other DNA
tgcatacgattttaagcggagtacaactactattgtaaagctaatgtgaagatattattaaaaaggtttttttttccaga

SEQ ID NO: 98025 - DNA, 80 bp, synthetic construct
  source 1..80: mol_type = other DNA
acctactagagcagcatttatagagtttgatggcaaatagattaggcagaacttcatctaaaatattcttagtaaataat

SEQ ID NO: 98026 - DNA, 80 bp, synthetic construct; identical to SEQ ID NO: 18516
  source 1..80: mol_type = other DNA

SEQ ID NO: 98027 - DNA, 80 bp, synthetic construct
  source 1..80: mol_type = other DNA
aggtctgaatgagggttttgattttgaatgtttcaatgtttttgagaagccttgcttacattttatggtgtagtcattgg

SEQ ID NO: 98028 - DNA, 80 bp, synthetic construct
  source 1..80: mol_type = other DNA
aattagcctgaaatgcattctgtaggtaatctctgagtttctggaatattttcttagactttttggatgtgcagcagctt

SEQ ID NO: 98029 - DNA, 80 bp, synthetic construct; identical to SEQ ID NO: 18517
  source 1..80: mol_type = other DNA

SEQ ID NO: 98030 - DNA, 80 bp, synthetic construct
  source 1..80: mol_type = other DNA
taaagtgggggctttaactgtagtatttggcagagttgccttctacctgccagttcaaaagttcaacctgttttcatata

SEQ ID NO: 98031 - DNA, 80 bp, synthetic construct
  source 1..80: mol_type = other DNA
ccaatcagatgtccatttgttattgtgtttgttaacaaccctttatctcttagtgttataaactccacttaaaactgatt

SEQ ID NO: 98032 - DNA, 80 bp, synthetic construct
  source 1..80: mol_type = other DNA
aaaaaaaaaaaaaaaaaacatggcctgagagtagagtatctgtctactcatgtttaattaaggaaaaacacttattttta

SEQ ID NO: 98033 - DNA, 80 bp, synthetic construct; identical to SEQ ID NO: 18518
  source 1..80: mol_type = other DNA

SEQ ID NO: 98034 - DNA, 80 bp, synthetic construct
  source 1..80: mol_type = other DNA
gacaatgttacagtgggacttattatttcaagtttacattttctccatgtaattttttaaaaagtaaatgaaaaaatgtg

SEQ ID NO: 98035 - DNA, 80 bp, synthetic construct
  source 1..80: mol_type = other DNA
tatatcatgtcctttgtacgttgtaatatgagctggcttggttcagtaaatgccatcaccatttccattgagaatttaaa

SEQ ID NO: 98036 - DNA, 80 bp, synthetic construct
  source 1..80: mol_type = other DNA
agctattgattagtgctgttgctagttcagaaagaaatgtttgtgaatggaaacaagaatattcagtccaaactgttgta

SEQ ID NO: 98037 - DNA, 80 bp, synthetic construct
  source 1..80: mol_type = other DNA
cttgctgtttttccatcttccaaaagatcttccttctaatatgtatatcagaatgtgggtagccagtcagacaaattcat

SEQ ID NO: 98038 - DNA, 80 bp, synthetic construct; identical to SEQ ID NO: 18519
  source 1..80: mol_type = other DNA

SEQ ID NO: 98039 - DNA, 80 bp, synthetic construct
  source 1..80: mol_type = other DNA
ggacagtgatttgattactttctaatgccacagatgcagattacatgtagttattgagaatcctttcgaattcagtggct

SEQ ID NO: 98040 - DNA, 80 bp, synthetic construct
  source 1..80: mol_type = other DNA
tgtattagtaaacttcatcacctttctacttccttatagtttgaacttttcagtttttgtagttcccaaacagttgctca

SEQ ID NO: 98041 - DNA, 80 bp, synthetic construct
  source 1..80: mol_type = other DNA
gggcttataaaaacatgcaactctttttgatagttatttgagaattttggtgaaaaatatttagctgagggcagtataga

SEQ ID NO: 98042 - DNA, 80 bp, synthetic construct; identical to SEQ ID NO: 18520
  source 1..80: mol_type = other DNA

SEQ ID NO: 98043 - DNA, 80 bp, synthetic construct
  source 1..80: mol_type = other DNA
aggattttctgcctactctatccagttgtccaaatgatatcctacattttacaaatgccctttcagtttctattttcttt

SEQ ID NO: 98044 - DNA, 80 bp, synthetic construct
  source 1..80: mol_type = other DNA
taattcaggcaaacatttttcattggaatttcacagttcattgtaatgaaaatgttaatcctggatgacctttgacatac

SEQ ID NO: 98045 - DNA, 80 bp, synthetic construct; identical to SEQ ID NO: 18521
  source 1..80: mol_type = other DNA

SEQ ID NO: 98046 - DNA, 80 bp, synthetic construct; identical to SEQ ID NO: 18522
  source 1..80: mol_type = other DNA

SEQ ID NO: 98047 - DNA, 80 bp, synthetic construct
  source 1..80: mol_type = other DNA
gccgccgccccctcctgaggaggacccagagcaggacagcggcccggaggacctgcctctcgtcaggtgagcgagcagag

SEQ ID NO: 98048 - DNA, 80 bp, synthetic construct
  source 1..80: mol_type = other DNA
ccccccgccacggcggagcgtctgcagaatggtgacaggattctgggttcttgggcgaggggtctcggcttcaacttgac

SEQ ID NO: 98049 - DNA, 80 bp, synthetic construct
  source 1..80: mol_type = other DNA
aatacaaaaatggtgtctgtgggagagtttttcaccggagaattggagtactccggtggtcgtctgactttctgttttgg

SEQ ID NO: 98050 - DNA, 80 bp, synthetic construct; identical to SEQ ID NO: 18523
  source 1..80: mol_type = other DNA

SEQ ID NO: 98051 - DNA, 80 bp, synthetic construct
  source 1..80: mol_type = other DNA
tatttcttccattttgccttttgactttgaaccagcaaggatcttggtgtcccctctttttgcctttgtttttggcacaa

SEQ ID NO: 98052 - DNA, 80 bp, synthetic construct
  source 1..80: mol_type = other DNA
ctatgattgaaagagtgtaattgtcattattgtcagcactggttctactttgagacaagttcattgcagagggaatggga

SEQ ID NO: 98053 - DNA, 80 bp, synthetic construct
  source 1..80: mol_type = other DNA
cggtatacactaacaattcacggcagaaaagattgaagtgggatttaggaaatggcccctggaaggctattaaaaattta

SEQ ID NO: 98054 - DNA, 80 bp, synthetic construct; identical to SEQ ID NO: 18524
  source 1..80: mol_type = other DNA

SEQ ID NO: 98055 - DNA, 80 bp, synthetic construct
  source 1..80: mol_type = other DNA
acccacaaagggtttcattaacatagacagttgaactctataaattaaccagcaagggtagaaccgctgccgtgcagtct

SEQ ID NO: 98056 - DNA, 80 bp, synthetic construct
  source 1..80: mol_type = other DNA
agtaatgtagctggaagggaaactgtcactaggaacagcataccacattcattgttgaaataatcaaaggttaatcatgt

SEQ ID NO: 98057 - DNA, 80 bp, synthetic construct; identical to SEQ ID NO: 18525
  source 1..80: mol_type = other DNA

SEQ ID NO: 98058 - DNA, 80 bp, synthetic construct
  source 1..80: mol_type = other DNA
aaaactaattatgttttgaaggaggaattggcagtctagaatagtggtcaagggcatggattatagagttagactgttgg

SEQ ID NO: 98059 - DNA, 80 bp, synthetic construct
  source 1..80: mol_type = other DNA
atgtctacttttacagatgagaatacttatctaaaagggctgatgtcgggattcagtgaaaccatatgtttaaggtactt

SEQ ID NO: 98060 - DNA, 80 bp, synthetic construct
  source 1..80: mol_type = other DNA
cgcatcatgtaagatgtgctagtaggtagagagatatatgaaacattgataagagaagactacagtttaacaaagtcact

SEQ ID NO: 98061 - DNA, 80 bp, synthetic construct
  source 1..80: mol_type = other DNA
actgtgtggtatccttattttggaatgaccatgaaaaagataatcatatgtttaaatttgaagtgtaatgtttttctaag

SEQ ID NO: 98062 - DNA, 80 bp, synthetic construct; identical to SEQ ID NO: 18526
  source 1..80: mol_type = other DNA

SEQ ID NO: 98063 - DNA, 80 bp, synthetic construct
  source 1..80: mol_type = other DNA
acaataaaagctaataataattccattacccagaggaaatttacctctgctaacattaaaaatgtttgaggccgggcacg

SEQ ID NO: 98064 - DNA, 80 bp, synthetic construct
  source 1..80: mol_type = other DNA
aaaaaaaaaaaaattagcagggtgtggcgtgcgcctgtagtcccagctatttgggaagctgaggcaggagaattgcttga

SEQ ID NO: 98065 - DNA, 80 bp, synthetic construct
  source 1..80: mol_type = other DNA
cccaccaaactattttaaagcaggtcttagttatattttattcactatgatacaaggacttttaaaaaaacaccgccata

SEQ ID NO: 98066 - DNA, 80 bp, synthetic construct; identical to SEQ ID NO: 18527
  source 1..80: mol_type = other DNA

SEQ ID NO: 98067 - DNA, 80 bp, synthetic construct
  source 1..80: mol_type = other DNA
tgttgcaaaaaaaaataaataaaaataaggctgggcgtggtggctcaaacctgtaatcccagcactttgggaggcccagg

SEQ ID NO: 98068 - DNA, 80 bp, synthetic construct
  source 1..80: mol_type = other DNA
ttgggagggtgaggcaggagaattgcttgaacctgggaggcagagtttgcagtgagccgtgatcatgccactgcactcca

SEQ ID NO: 98069 - DNA, 80 bp, synthetic construct; identical to SEQ ID NO: 18528
  source 1..80: mol_type = other DNA

SEQ ID NO: 98070 - DNA, 80 bp, synthetic construct
  source 1..80: mol_type = other DNA
gctagtggatgtattttaatttgttaactcttactggatatttgggttttttccaactttttgatgctataaaataatgt

SEQ ID NO: 98071 - DNA, 80 bp, synthetic construct
  source 1..80: mol_type = other DNA
tgattattgctagattacacttcagacagatacttttaatgaatttactttctcaacatagtagtataagagtatatatc

SEQ ID NO: 98072 - DNA, 80 bp, synthetic construct
  source 1..80: mol_type = other DNA
gagaggaatactgaagtatcttgaatgtatgacttgggtattataatccccaggcatctaatgtatattttaactgactt

SEQ ID NO: 98073 - DNA, 80 bp, synthetic construct
  source 1..80: mol_type = other DNA
tcaatttataagtgcattgtgttccaaatctgtttgcaagtttgatatagtagttaggtttccagcctggttcacataac

SEQ ID NO: 98074 - DNA, 80 bp, synthetic construct; identical to SEQ ID NO: 18529
  source 1..80: mol_type = other DNA

SEQ ID NO: 98075 - DNA, 80 bp, synthetic construct
  source 1..80: mol_type = other DNA
aggaatttcatgttatttttgggatttgaggtgtgcttttgaagggtatgatggaagatgatgtcctgttgtcctgttgt

SEQ ID NO: 98076 - DNA, 80 bp, synthetic construct
  source 1..80: mol_type = other DNA
agtgcagctattctagtggcagttgtctctcttctttgaaacaagaggaggaatattgtcaaaaaggaaaccctttttaa

SEQ ID NO: 98077 - DNA, 80 bp, synthetic construct
  source 1..80: mol_type = other DNA
gccttagttttcttacctgtaaaagggactgacagtaatttctggatcttggagttatgtgcagattaaataaattaatg

SEQ ID NO: 98078 - DNA, 80 bp, synthetic construct; identical to SEQ ID NO: 18530
  source 1..80: mol_type = other DNA

SEQ ID NO: 98079 - DNA, 80 bp, synthetic construct
  source 1..80: mol_type = other DNA
actttccattaagaaattggctaaggtgatgttcatattgtgacttaaggtgaatcagctgttagaattttggtttactt

SEQ ID NO: 98080 - DNA, 80 bp, synthetic construct
  source 1..80: mol_type = other DNA
ctcagtttgctcacctgtaaggcagaaataatgcctgaatgtgaacctcataggctttttgttatacatacatatatatg

SEQ ID NO: 98081 - DNA, 80 bp, synthetic construct
  source 1..80: mol_type = other DNA
gatttcatcgttgtgtgaacatcatagcatgtacttacacaaacctggatggtatagcctatgacacacctatgctgtgt

SEQ ID NO: 98082 - DNA, 80 bp, synthetic construct; identical to SEQ ID NO: 18531
  source 1..80: mol_type = other DNA

SEQ ID NO: 98083 - DNA, 80 bp, synthetic construct
  source 1..80: mol_type = other DNA
cccggctaatttttgtatttttagtagagacggggtttcaccgtgttagtcaggctggtctcgaactcctgacctcatga

SEQ ID NO: 98084 - DNA, 80 bp, synthetic construct
  source 1..80: mol_type = other DNA
ttatccaaatttatatcttttgttctgcagtgtccacatatcgattccacttttcttgtgatcactctttacaatgtgta

SEQ ID NO: 98085 - DNA, 80 bp, synthetic construct
  source 1..80: mol_type = other DNA
tccctgtgtctcttcctttcatgttgtgccacagatgagccattatttatatcttttctctcattggaggttcctttttt

SEQ ID NO: 98086 - DNA, 80 bp, synthetic construct
  source 1..80: mol_type = other DNA
tgctttctttacaggtttaccttggtattcagtgtctgtccataggactaattaaaactataccagactccttctatttt

SEQ ID NO: 98087 - DNA, 80 bp, synthetic construct; identical to SEQ ID NO: 18532
  source 1..80: mol_type = other DNA

SEQ ID NO: 98088 - DNA, 80 bp, synthetic construct
  source 1..80: mol_type = other DNA
tggtctgtgctttaaccttccttccagtcttattttttatttccattgttggcccccaatgcctgtgttctcttcccttc

SEQ ID NO: 98089 - DNA, 80 bp, synthetic construct
  source 1..80: mol_type = other DNA
tgcagttaaagcttctcctttatgcatatctcttataagatatattatttgcagacttttccccccattctgtgagttgc

SEQ ID NO: 98090 - DNA, 80 bp, synthetic construct; identical to SEQ ID NO: 18533
  source 1..80: mol_type = other DNA

SEQ ID NO: 98091 - DNA, 80 bp, synthetic construct
  source 1..80: mol_type = other DNA
cttgatgaaaatcagttgactataaaaaccagggtttatttctggagtctcagttctattccattgctctgtatgtttat

SEQ ID NO: 98092 - DNA, 80 bp, synthetic construct
  source 1..80: mol_type = other DNA
acgcccggctaatttttctgtatttttagtagagacggggtttcactgtgttagccaggatggtctcgatctcctgacct

SEQ ID NO: 98093 - DNA, 80 bp, synthetic construct
  source 1..80: mol_type = other DNA
tggttttctttttcaagattacttttgttactcttggtacttgaatttccatgtgaatttttaggatcaatttgtcaatt

SEQ ID NO: 98094 - DNA, 80 bp, synthetic construct; identical to SEQ ID NO: 18534
  source 1..80: mol_type = other DNA

SEQ ID NO: 98095 - DNA, 80 bp, synthetic construct
  source 1..80: mol_type = other DNA
gaggtcaggaatttgagaccagcctggccaacatggtgaaaccctgtctctactaaaaatacaaaaaattagctgggtgt

SEQ ID NO: 98096 - DNA, 80 bp, synthetic construct
  source 1..80: mol_type = other DNA
aatctctaatacagtaccattttatttattatagtcctcatgttgtatattagatctctggacttgttcatcctatgtat

SEQ ID NO: 98097 - DNA, 80 bp, synthetic construct
  source 1..80: mol_type = other DNA
actctgtgaataatgtcattggtagtctgatagaaacagcattgaacctgtaaattgctttgggcagtgtggccatttta

SEQ ID NO: 98098 - DNA, 80 bp, synthetic construct
  source 1..80: mol_type = other DNA
agtgggttgcattcttgatttggctctcagcttgggtattggtacacaggaatgctagtgatttttgtacattgatttta

SEQ ID NO: 98099 - DNA, 80 bp, synthetic construct; identical to SEQ ID NO: 18535
  source 1..80: mol_type = other DNA

SEQ ID NO: 98100 - DNA, 80 bp, synthetic construct
  source 1..80: mol_type = other DNA
agttgtgaattgtgctgcaataaacaagtgcaggtttctttttgatattatgacttcttttattttgggtagatacccag

SEQ ID NO: 98101 - DNA, 80 bp, synthetic construct
  source 1..80: mol_type = other DNA
attttccatataaaaaggggtttatttagatgttagaatcatctagtgattcagaaagattggacatgaatccacccagg

SEQ ID NO: 98102 - DNA, 80 bp, synthetic construct; identical to SEQ ID NO: 18536
  source 1..80: mol_type = other DNA

SEQ ID NO: 98103 - DNA, 80 bp, synthetic construct
  source 1..80: mol_type = other DNA
aaaaaacatcagagtctctgtgaacttggctgcgatgataagaaccaaatgttttctaatctaagacttgtatgcagaac

SEQ ID NO: 98104 - DNA, 80 bp, synthetic construct
  source 1..80: mol_type = other DNA
tctgttaaataaaagcattgtttcatgttggtgtacgtctatacagggctatgtataaccgactcctgtttctcctccct

SEQ ID NO: 98105 - DNA, 80 bp, synthetic construct
  source 1..80: mol_type = other DNA
tcactgctgagctgccgccactgtcctccgtgcgcggagtgtcgctgaagtcactggcgtcactaaccaaggcgtgcccg

SEQ ID NO: 98106 - DNA, 80 bp, synthetic construct
  source 1..80: mol_type = other DNA
agtgtgggcttccaaagacagggctgggcccggcctgggcctccctgaaggcagagaaggacgggccctgtggaggcagc

SEQ ID NO: 98107 - DNA, 80 bp, synthetic construct; identical to SEQ ID NO: 18537
  source 1..80: mol_type = other DNA

SEQ ID NO: 98108 - DNA, 80 bp, synthetic construct
  source 1..80: mol_type = other DNA
tcggcccctcgtgagcgctggtctttctgaatgtaaacatttctcctgctcgctgagagccccttggcggagacactgcc

SEQ ID NO: 98109 - DNA, 80 bp, synthetic construct
  source 1..80: mol_type = other DNA
gtgcacacgccaggcggtggggcccgctccttcctgcacagcaactctggcctgaatgagccccatttcccgagagcagc

SEQ ID NO: 98110 - DNA, 80 bp, synthetic construct; identical to SEQ ID NO: 18538
  source 1..80: mol_type = other DNA

SEQ ID NO: 98111 - DNA, 80 bp, synthetic construct
  source 1..80: mol_type = other DNA
gcatctgggcagtgctgaacctgaccttcctgcacgcagccctgggttccctgcacctcttcttgagctttcgcttggac

SEQ ID NO: 98112 - DNA, 80 bp, synthetic construct
  source 1..80: mol_type = other DNA
ccgggacctcgctggctttgccctggacgggcaggtcccgcccctcatggccgggcacggctcacgcctggctgtggtcg

SEQ ID NO: 98113 - DNA, 80 bp, synthetic construct
  source 1..80: mol_type = other DNA
gcggtgaaagtgggccctgggcagcctgcgagcagctctcacctctggccagcaaactccccgactatgccttgagggtc

SEQ ID NO: 98114 - DNA, 80 bp, synthetic construct; identical to SEQ ID NO: 18539
  source 1..80: mol_type = other DNA

SEQ ID NO: 98115 - DNA, 80 bp, synthetic construct
  source 1..80: mol_type = other DNA
ctgcttgtgctgtgtgcggggtcaggcgtcctctctcctcccggcgctgggccctctggggcaggtccccgttggcctcc

SEQ ID NO: 98116 - DNA, 80 bp, synthetic construct
  source 1..80: mol_type = other DNA
ctgaagggctgcagggggctgctggcttcgggctgcccttgttctcctgcttggtcgtgaccctggacttgaggcttctg

SEQ ID NO: 98117 - DNA, 80 bp, synthetic construct
  source 1..80: mol_type = other DNA
ttgaccccatcacatttttgggtcgcatgctatctcttctcattcagaagctgttctatttccgccttaatgctctgctc

SEQ ID NO: 98118 - DNA, 80 bp, synthetic construct; identical to SEQ ID NO: 18540
  source 1..80: mol_type = other DNA

SEQ ID NO: 98119 - DNA, 80 bp, synthetic construct
  source 1..80: mol_type = other DNA
gtgggcttggcagctggcttggcgtctgccctgtggcccctctgtgcagcgcgctcatcggtggtgccccgagcaacccc

SEQ ID NO: 98120 - DNA, 80 bp, synthetic construct
  source 1..80: mol_type = other DNA
ctgagaaacattctagcagaaggggagggacgcgcagagggacgacgctttatttctctgccagcttcatatactcaaaa

SEQ ID NO: 98121 - DNA, 80 bp, synthetic construct
  source 1..80: mol_type = other DNA
gcctgtagtcccagctactcgtgaggcagaggccagggaatcgcttgaagccggaaggtggaggttgcagtgagctgaga

SEQ ID NO: 98122 - DNA, 80 bp, synthetic construct; identical to SEQ ID NO: 18541
  source 1..80: mol_type = other DNA

SEQ ID NO: 98123 - DNA, 80 bp, synthetic construct
  source 1..80: mol_type = other DNA
gcgcttgcgtcccgcgtcccgcatccggggggaggcggcgggcccgggtctctggggctggcccatttacttagttttgt

SEQ ID NO: 98124 - DNA, 80 bp, synthetic construct
  source 1..80: mol_type = other DNA
gccccgcctccccgcgcgccgctgccaccgccccgcacctttttttgactttttaataatgctcattctgactgtgataa

SEQ ID NO: 98125 - DNA, 80 bp, synthetic construct
  source 1..80: mol_type = other DNA
ggcgggtggatcacctgaggtcaggagttcgagaccagcctggctaacatggtgaaactccgtgtctactaaaaatacaa

SEQ ID NO: 98126 - DNA, 80 bp, synthetic construct; identical to SEQ ID NO: 18542
  source 1..80: mol_type = other DNA

SEQ ID NO: 98127 - DNA, 80 bp, synthetic construct
  source 1..80: mol_type = other DNA
agtcccatttacttagttttgtttttgttgcatttgtttttggtgacaccccctattttttagattccacatataaatga

SEQ ID NO: 98128 - DNA, 80 bp, synthetic construct
  source 1..80: mol_type = other DNA
ttgacagacacataggttgtttccatattacttagctgtatatagaaatacaggtggtttttgtatgttgattttgtact

SEQ ID NO: 98129 - DNA, 80 bp, synthetic construct
  source 1..80: mol_type = other DNA
gtctaaaatctccaatagaatgttgaatagaatgatgagaaggacattgttgtctcttcctggatcttagtgggagacca

SEQ ID NO: 98130 - DNA, 80 bp, synthetic construct
  source 1..80: mol_type = other DNA
gttcttgttctttattgaaatggtgtagtatattagttgattttcaggtgttaaaccaacattgcatctctggaataagt

SEQ ID NO: 98131 - DNA, 80 bp, synthetic construct; identical to SEQ ID NO: 18543
  source 1..80: mol_type = other DNA

SEQ ID NO: 98132 - DNA, 80 bp, synthetic construct
  source 1..80: mol_type = other DNA
aggaatttgtctacctcatctaagttacctagttcattggcaaataattgttcatggcattgccattataatccttttta

SEQ ID NO: 98133 - DNA, 80 bp, synthetic construct
  source 1..80: mol_type = other DNA
tctctaaaaaattttgatcaaacgatttttccctgttttttcactacccaatgtttatacttaatgtgtgtattggataa

SEQ ID NO: 98134 - DNA, 80 bp, synthetic construct; identical to SEQ ID NO: 18544
  source 1..80: mol_type = other DNA

SEQ ID NO: 98135 - DNA, 80 bp, synthetic construct
  source 1..80: mol_type = other DNA
atattttactttcacaattataagtaaataaagacttgttttaacataaatcacactttatagtaataaagagcggatct

SEQ ID NO: 98136 - DNA, 80 bp, synthetic construct
  source 1..80: mol_type = other DNA
atcatttatttgtgttaggagcattccaattctaatcttttagttattttgaaatatacaataaattattgttaactata

SEQ ID NO: 98137 - DNA, 80 bp, synthetic construct
  source 1..80: mol_type = other DNA
gttcaatatttttttttttttttaagctcttgcttgtaagtgagaacatgtacttgtccttctgtgcctggcttatttca

SEQ ID NO: 98138 - DNA, 80 bp, synthetic construct
  source 1..80: mol_type = other DNA
ttcaacatgggaatgcagatatctctttgatatactgtttttatttcttttggatatatacccagtggtgggattgctgt

SEQ ID NO: 98139 - DNA, 80 bp, synthetic construct; identical to SEQ ID NO: 18545
  source 1..80: mol_type = other DNA

SEQ ID NO: 98140 - DNA, 80 bp, synthetic construct
  source 1..80: mol_type = other DNA
ttatttcattgcccaggaatgaagtccaatacctactagttgtttgtcctaatccgcttcctctcccaccctccaccctc

SEQ ID NO: 98141 - DNA, 80 bp, synthetic construct
  source 1..80: mol_type = other DNA
tgctctttttctattcctagttatatccatagaaatgaccattgatagtttttgcttactctgtccctccagtttttcct

SEQ ID NO: 98142 - DNA, 80 bp, synthetic construct; identical to SEQ ID NO: 18546
  source 1..80: mol_type = other DNA

SEQ ID NO: 98143 - DNA, 80 bp, synthetic construct
  source 1..80: mol_type = other DNA
ccgttgcggtgaattatccttatatatacattttcatgcacaaatgagagtacttttatagtgtagattcctagaagtag

SEQ ID NO: 98144 - DNA, 80 bp, synthetic construct
  source 1..80: mol_type = other DNA
actctgcttaatactgtaacctgcccctacttctccctgaacttctctatccattgcactctattccttttctagcatag

SEQ ID NO: 98145 - DNA, 80 bp, synthetic construct
  source 1..80: mol_type = other DNA
atacataagcaaacagtatccaaaattatcctccgtaaaaatgcctaatttcttttttttcctctgtatctcaatgaata

SEQ ID NO: 98146 - DNA, 80 bp, synthetic construct; identical to SEQ ID NO: 18547
  source 1..80: mol_type = other DNA

SEQ ID NO: 98147 - DNA, 80 bp, synthetic construct
  source 1..80: mol_type = other DNA
caaagagttaggaatatacacaggttgcttctctgagttattaccgactaaaagagctcagcgagcagttaccaccaata

SEQ ID NO: 98148 - DNA, 80 bp, synthetic construct
  source 1..80: mol_type = other DNA
acaccctacaatacacaaattcacaaagtatgtgtggtgagattccaaaaaatgtttgaagatgcattttctttccttct

SEQ ID NO: 98149 - DNA, 80 bp, synthetic construct
  source 1..80: mol_type = other DNA
gtaagaaagccagtagttaagttcaattcaaattggatttcacaagttagtaatttaaatccttggacaaagttacagaa

SEQ ID NO: 98150 - DNA, 80 bp, synthetic construct; identical to SEQ ID NO: 18548
  source 1..80: mol_type = other DNA

SEQ ID NO: 98151 - DNA, 80 bp, synthetic construct
  source 1..80: mol_type = other DNA
agcgtctgtatccactgatagcaatgcaacacctagtttatgatgacttgaaagaaaacaaatgcccatgaagaaaaaag

SEQ ID NO: 98152 - DNA, 80 bp, synthetic construct
  source 1..80: mol_type = other DNA
aattaactttttgcttccctcttaatgtgctaatagttgtgtctaaaaaaataggcaattcttaaaaaggtaccatttct

SEQ ID NO: 98153 - DNA, 80 bp, synthetic construct
  source 1..80: mol_type = other DNA
aagtggctccaaaggtagtcttataccattcttaaaaaaaggaaactgttctttttaactttatacccacccacacccca

SEQ ID NO: 98154 - DNA, 80 bp, synthetic construct
  source 1..80: mol_type = other DNA
ctcatctttgcttctggaggcctttcctctgattcactatcttcatcttcattaaaagctgctgctactgaaagagtttt

SEQ ID NO: 98155 - DNA, 80 bp, synthetic construct; identical to SEQ ID NO: 18549
  source 1..80: mol_type = other DNA

SEQ ID NO: 98156 - DNA, 80 bp, synthetic construct
  source 1..80: mol_type = other DNA
ccgccttcccatcagccatttcccccgccgcattgtttttttaagatttcagaaatctttctaatacaagttgggatata

SEQ ID NO: 98157 - DNA, 80 bp, synthetic construct
  source 1..80: mol_type = other DNA
ggatacagcaaacactgctataacacctctctcataggattcaaatcagtgtggagattattataggctccagatgagtt

SEQ ID NO: 98158 - DNA, 80 bp, synthetic construct
  source 1..80: mol_type = other DNA
aactttccttatttatgtacattataattttaaaggcctgatagtcataattattgatgttcagattggtagttatttct

SEQ ID NO: 98159 - DNA, 80 bp, synthetic construct
  source 1..80: mol_type = other DNA
tgcattttcatattctaaaaactatttttaaagacaggttgattcagaattacagtgtacttgaaaatcatcaggtacct

SEQ ID NO: 98160 - DNA, 80 bp, synthetic construct; identical to SEQ ID NO: 18550
  source 1..80: mol_type = other DNA

SEQ ID NO: 98161 - DNA, 80 bp, synthetic construct
  source 1..80: mol_type = other DNA
agaaactcccagaccacgagacttaatggttaatgatctctttcagttctctttcaacttggaattctcttattccaatg

SEQ ID NO: 98162 - DNA, 80 bp, synthetic construct
  source 1..80: mol_type = other DNA
agaatggttagacagctgatgtcagcaagatggtggaatagtagcgctgtccttcagaaacaccaattttgacaactacc

SEQ ID NO: 98163 - DNA, 80 bp, synthetic construct
  source 1..80: mol_type = other DNA
tctcaccataatggcataaaactagcaagcaaaaataacaggaaaactgggaaatactcaaatatgtgaaaattaaacat

SEQ ID NO: 98164 - DNA, 80 bp, synthetic construct; identical to SEQ ID NO: 18551
  source 1..80: mol_type = other DNA

SEQ ID NO: 98165 - DNA, 80 bp, synthetic construct
  source 1..80: mol_type = other DNA
caaagaatcctgagaatactttgaacaaattatatactaacaaattggatgacctgaaagagacagattgtttgccacat

SEQ ID NO: 98166 - DNA, 80 bp, synthetic construct
  source 1..80: mol_type = other DNA
cttctcaaacgttttcaaaaatttgaataggaggaaacacttccaaactcatttaacaaggctagcattaccttgatacc

SEQ ID NO: 98167 - DNA, 80 bp, synthetic construct
  source 1..80: mol_type = other DNA
catatgcaaatctataaatataccacttcaacagaatgaaggacaaattatgtgatcatcttaatagatccagaaaaagt

SEQ ID NO: 98168 - DNA, 80 bp, synthetic construct; identical to SEQ ID NO: 18552
  source 1..80: mol_type = other DNA

SEQ ID NO: 98169 - DNA, 80 bp, synthetic construct
  source 1..80: mol_type = other DNA
ctgagagtggcatcagtggctttatcccaagctaacatcttagcatgctcagttctctcaccatgcgataccctgcacca

SEQ ID NO: 98170 - DNA, 80 bp, synthetic construct
  source 1..80: mol_type = other DNA
aactaaaactaccacatgattcagcaatcctaccttttggtagatatccacaggaaatgaagtcagtatgttgaagagat

SEQ ID NO: 98171 - DNA, 80 bp, synthetic construct
  source 1..80: mol_type = other DNA
taagttaaaattgcattaagatcatgacaaacccagttgaaaaatcgcaaattgaaccattgtaagtcaaggactatctg

SEQ ID NO: 98172 - DNA, 80 bp, synthetic construct; identical to SEQ ID NO: 18553
  source 1..80: mol_type = other DNA

SEQ ID NO: 98173 - DNA, 80 bp, synthetic construct
  source 1..80: mol_type = other DNA
ttacaggcggtgacatgtacttgtagtcccagctacttgggactctgaggtaggaggagtgcttgtgcacccaggaggtt

SEQ ID NO: 98174 - DNA, 80 bp, synthetic construct
  source 1..80: mol_type = other DNA
ttcttgaaattcactaagagaaatcttaagtatccttacgacatacacacagacaaaatggtgactatgtgaagtgatag

SEQ ID NO: 98175 - DNA, 80 bp, synthetic construct; identical to SEQ ID NO: 18554
  source 1..80: mol_type = other DNA

SEQ ID NO: 98176 - DNA, 80 bp, synthetic construct
  source 1..80: mol_type = other DNA
acctccataaagctggaaaaaaatgtgacctcatttgtttgttggtgatttccttttttgaaacagcacatgtcatattt

SEQ ID NO: 98177 - DNA, 80 bp, synthetic construct
  source 1..80: mol_type = other DNA
cagttttctttcctatatggttatacctttttggatggatcatttttgggctttgagctcaataatctaagcagagagct

SEQ ID NO: 98178 - DNA, 80 bp, synthetic construct
  source 1..80: mol_type = other DNA
ctattaatgtgtgaatgggagctgaagaaactatagtggaaccaacagtcttaacttacactttggtggttcagttgctg

SEQ ID NO: 98179 - DNA, 80 bp, synthetic construct; identical to SEQ ID NO: 18555
  source 1..80: mol_type = other DNA

SEQ ID NO: 98180 - DNA, 80 bp, synthetic construct
  source 1..80: mol_type = other DNA
gctcaacttttgggcagatggccaggtaaatctgaatttgccaggtacatgtttttctggaaatagaatcaactttctta

SEQ ID NO: 98181 - DNA, 80 bp, synthetic construct
  source 1..80: mol_type = other DNA
ccactcttgccttttacttctgtgcacatccaagaatgtccttaacactagactgctgtaagctcatattatacaggtga

SEQ ID NO: 98182 - DNA, 80 bp, synthetic construct
  source 1..80: mol_type = other DNA
gtctcatgaactatgcgtaaggatatatcttttgaccctgaggtagagcacaaaagcacatgtttcttatgacttatttt

SEQ ID NO: 98183 - DNA, 80 bp, synthetic construct; identical to SEQ ID NO: 18556
  source 1..80: mol_type = other DNA

SEQ ID NO: 98184 - DNA, 80 bp, synthetic construct
  source 1..80: mol_type = other DNA
tgataaagatttttctcgagtatttctaatttttctctctcctgctttatgtaaatgtagcacttattgacttttctcct

SEQ ID NO: 98185 - DNA, 80 bp, synthetic construct
  source 1..80: mol_type = other DNA
tgcagaactttttattctgtttttttcttaacgttatatgttgggtatttttacatatccctttaatattccttgaaact

SEQ ID NO: 98186 - DNA, 80 bp, synthetic construct
  source 1..80: mol_type = other DNA
tacatatcaagtgtacacatttatgggacatatgaaatgccctgatgcaagcatgcagttctgttactctaaatcttgac

SEQ ID NO: 98187 - DNA, 80 bp, synthetic construct
  source 1..80: mol_type = other DNA
gttctttgcccattttccccccattttttgttctttttttggtgtgtgtgggggaattgttttggctaggtaagaattac

SEQ ID NO: 98188 - DNA, 80 bp, synthetic construct; identical to SEQ ID NO: 18557
  source 1..80: mol_type = other DNA

SEQ ID NO: 98189 - DNA, 80 bp, synthetic construct
  source 1..80: mol_type = other DNA
ctactgaaaaaagttgcatggaggtatactgaaggagaaaaattgcaacagtgtcagatgctgcatagaggtctttctgg

SEQ ID NO: 98190 - DNA, 80 bp, synthetic construct
  source 1..80: mol_type = other DNA
cagctcctctttgtacctctggtagaattcggctgtgaattcatctgctcctggacttcttttggttggtaggatattaa

SEQ ID NO: 98191 - DNA, 80 bp, synthetic construct
  source 1..80: mol_type = other DNA
ttgtatttctgtgggatctgtggtgatatcccctttatcattttttattgcatctatttgattcttctctcttttcttct

SEQ ID NO: 98192 - DNA, 80 bp, synthetic construct; identical to SEQ ID NO: 18558
  source 1..80: mol_type = other DNA

SEQ ID NO: 98193 - DNA, 80 bp, synthetic construct
  source 1..80: mol_type = other DNA
atgcggttttgagtgagtttcttaatcctgagttctagtttgattgcactgtgatctgagagacagtttgttataatttc

SEQ ID NO: 98194 - DNA, 80 bp, synthetic construct
  source 1..80: mol_type = other DNA
tggatatccttgttaacgttctgactcattgaactgtctaatgttgacagtggggtgttaaagtctcccattattattgt

SEQ ID NO: 98195 - DNA, 80 bp, synthetic construct
  source 1..80: mol_type = other DNA
ggtttaacgtctgttttatcagagactaggattgcaacccctgcctttttttgttttccatttgcttggtagatcttcct

SEQ ID NO: 98196 - DNA, 80 bp, synthetic construct; identical to SEQ ID NO: 18559
  source 1..80: mol_type = other DNA

SEQ ID NO: 98197 - DNA, 80 bp, synthetic construct
  source 1..80: mol_type = other DNA
agtttggctggatatgaaattctgggttgaaaattcttttctttaagaatgttgaatattggcccccactctcttctggc

SEQ ID NO: 98198 - DNA, 80 bp, synthetic construct
  source 1..80: mol_type = other DNA
tttgtggcattctctgtatttcctgaatttgaatgttggcctgccttgctaggttggggaagttctcctgtataatatcc

SEQ ID NO: 98199 - DNA, 80 bp, synthetic construct
  source 1..80: mol_type = other DNA
tcatttgatcttccatcactgataccctttcttccagttgatcgaatcagctgctgaagcttgtgcattcatcacgtagt

SEQ ID NO: 98200 - DNA, 80 bp, synthetic construct; identical to SEQ ID NO: 18560
  source 1..80: mol_type = other DNA

SEQ ID NO: 98201 - DNA, 80 bp, synthetic construct
  source 1..80: mol_type = other DNA
agctgcaggtctgttggagtttgctggaggttgactccagaccctgtttgcctgggtatcagcagtggaggctgcagaac

SEQ ID NO: 98202 - DNA, 80 bp, synthetic construct
  source 1..80: mol_type = other DNA
tgtccattctcagatctcaaacttcatgctgggagaaccactacgctcttcaaagctgtcagacagggacatttaagtct

SEQ ID NO: 98203 - DNA, 80 bp, synthetic construct
  source 1..80: mol_type = other DNA
ctcctagcctcgctactgccttgcagtttgatctcagactgctgtgctagcaatgagcgaggctccgtgggtgtgggacc

SEQ ID NO: 98204 - DNA, 80 bp, synthetic construct; identical to SEQ ID NO: 18561
  source 1..80: mol_type = other DNA

SEQ ID NO: 98205 - DNA, 80 bp, synthetic construct
  source 1..80: mol_type = other DNA
gattgaaaaattttgaatcaaactcaactaaaatgaacaaaatatatgaaactacaataatgaagacgttatgatattgg

SEQ ID NO: 98206 - DNA, 80 bp, synthetic construct
  source 1..80: mol_type = other DNA
agaaaatgaacttcaatccttacctcacaccatttataaaaactaaccagaaatgaagcatagacctaaacttctagaag

SEQ ID NO: 98207 - DNA, 80 bp, synthetic construct; identical to SEQ ID NO: 18562
  source 1..80: mol_type = other DNA

SEQ ID NO: 98208 - DNA, 80 bp, synthetic construct
  source 1..80: mol_type = other DNA
agagagaaaaaaaaaggctggaattgatgaaaggacatatattgagagcagttattgcctgagtgcaaagaaacaaacca

SEQ ID NO: 98209 - DNA, 80 bp, synthetic construct
  source 1..80: mol_type = other DNA
tatatttttaattagtcttgaaaacagtgaagcagtgtatactttgtatcttcaatttcagaaacagtaagtatgtaaca

SEQ ID NO: 98210 - DNA, 80 bp, synthetic construct
  source 1..80: mol_type = other DNA
ctttgcagtcatttcccaacacctcccctctgttccgcaggcaactacagatctactttttgactttaaagattggtttt

SEQ ID NO: 98211 - DNA, 80 bp, synthetic construct
  source 1..80: mol_type = other DNA
atttatttttccatgcacttcttttttttttatatttgggttgtttgtagtttttggccattatgactgaagctgctatg

SEQ ID NO: 98212 - DNA, 80 bp, synthetic construct; identical to SEQ ID NO: 18563
  source 1..80: mol_type = other DNA

SEQ ID NO: 98213 - DNA, 80 bp, synthetic construct
  source 1..80: mol_type = other DNA
ttacctgtaaaatttggtaatctggaacaactcacttatcctaaagcttttatataattgatatttcaaaataatgtaag

SEQ ID NO: 98214 - DNA, 80 bp, synthetic construct
  source 1..80: mol_type = other DNA
tggggaaaaatgtgttctaaagataatgaaaaagtactctagtgataatgatagccatcaatcattaagaactgactgta

SEQ ID NO: 98215 - DNA, 80 bp, synthetic construct; identical to SEQ ID NO: 18564
  source 1..80: mol_type = other DNA

SEQ ID NO: 98216 - DNA, 80 bp, synthetic construct
  source 1..80: mol_type = other DNA
gaaatgaaatcctttcaaatatatgccatcagaaggatgtgttacaaatatacagtattacaaacatttattttgtatgc

SEQ ID NO: 98217 - DNA, 80 bp, synthetic construct
  source 1..80: mol_type = other DNA
aactgtggggaatctgtatctttattgcagcagttgacctagatgagatgtcgttcacttttactgagctacagaaaaac

SEQ ID NO: 98218 - DNA, 80 bp, synthetic construct
  source 1..80: mol_type = other DNA
catggagccgttatgaaagtgtatttatgctgtatttctttaagaggtagcagtttgtgtcctggaaaaattttcattgt

SEQ ID NO: 98219 - DNA, 80 bp, synthetic construct; identical to SEQ ID NO: 18565
  source 1..80: mol_type = other DNA

SEQ ID NO: 98220 - DNA, 80 bp, synthetic construct
  source 1..80: mol_type = other DNA
atttttaccaaataggtaattatgtttctccttgaacaaagacatctagaattaaacataattgatattttatttaaacg

SEQ ID NO: 98221 - DNA, 80 bp, synthetic construct
  source 1..80: mol_type = other DNA
ctctcccttccttgttttcttcccttaagtttcccctagaaaaaaggctttgttgtaacaattcagttttcatggtaatc

SEQ ID NO: 98222 - DNA, 80 bp, synthetic construct
  source 1..80: mol_type = other DNA
catttctactctttctttatttgctttttcacatagcttgtcatggctcccccattcctttctgtatcataggaacttta

SEQ ID NO: 98223 - DNA, 80 bp, synthetic construct
  source 1..80: mol_type = other DNA
ggtcaggtgactatcttttgtttcagttagctgctttggtataattccttatacaaaattcatgattagaaattagcatg

SEQ ID NO: 98224 - DNA, 80 bp, synthetic construct; identical to SEQ ID NO: 18566
  source 1..80: mol_type = other DNA

SEQ ID NO: 98225 - DNA, 80 bp, synthetic construct
  source 1..80: mol_type = other DNA
cagaacccttccacagtgaggaagtgtctatgctaaggggtggggtaagtccagaactgggagtcagttctgagaagaac

SEQ ID NO: 98226 - DNA, 80 bp, synthetic construct
  source 1..80: mol_type = other DNA
gtaaactgaggatgaatgggttccaggtttcccactgtcaatgaagagttacaaatatagaaagggaaacactaaaatga

SEQ ID NO: 98227 - DNA, 80 bp, synthetic construct; identical to SEQ ID NO: 18567
  source 1..80: mol_type = other DNA

SEQ ID NO: 98228 - DNA, 80 bp, synthetic construct
  source 1..80: mol_type = other DNA
aaaagaaattgataccagtaccaaagttgataatgctatgtcaagactgttgaagaagtatgatgtattgtttgcactct

SEQ ID NO: 98229 - DNA, 80 bp, synthetic construct
  source 1..80: mol_type = other DNA
cttagctttcttatttatccagtaatatgcattctgaatgcttcctggaaaattaaccgttttattatcctttcatgtct

SEQ ID NO: 98230 - DNA, 80 bp, synthetic construct
  source 1..80: mol_type = other DNA
cctatactataaagtaatgatttgtactcccaatggtggcttagaggactttttccattacagttcgagtaggagcataa

SEQ ID NO: 98231 - DNA, 80 bp, synthetic construct; identical to SEQ ID NO: 18568
  source 1..80: mol_type = other DNA

SEQ ID NO: 98232 - DNA, 80 bp, synthetic construct
  source 1..80: mol_type = other DNA
tcaaaggcctagggcttttgaaggactgtcttttcttgcccctggttttaattgtaatatggtagcattggccatctttt

SEQ ID NO: 98233 - DNA, 80 bp, synthetic construct
  source 1..80: mol_type = other DNA
aaatatgaatcgaccaaaatgtcaacagtggagagaatcacttttcatattttagaatgtttctttcctttgggtattgt

SEQ ID NO: 98234 - DNA, 80 bp, synthetic construct
  source 1..80: mol_type = other DNA
tattttaatatgatcctaaatacaatgttgctttagagtttttttggtacaatattatttaggcccctgaaaaactggaa

SEQ ID NO: 98235 - DNA, 80 bp, synthetic construct
  source 1..80: mol_type = other DNA
tgtgtaaggaagaaacctagaccactaacgcatagaatgaaatgactggagagaagtttaccacaatgttaacccaagtt

SEQ ID NO: 98236 - DNA, 80 bp, synthetic construct; identical to SEQ ID NO: 18569
  source 1..80: mol_type = other DNA

SEQ ID NO: 98237 - DNA, 80 bp, synthetic construct
  source 1..80: mol_type = other DNA
aatgtccgaatagggtttacaggaaaaatagaaattcaccaagcaaaatgagtgggaactgggagcgagcatcttagaga

SEQ ID NO: 98238 - DNA, 80 bp, synthetic construct
  source 1..80: mol_type = other DNA
aactccttgaatgattttaaactagggagtaacagttggatttggcctcaaaagaccactcaggactttgtaaaagggat

SEQ ID NO: 98239 - DNA, 80 bp, synthetic construct
  source 1..80: mol_type = other DNA
ggattaactgtaattatatattaaagtgatgtgagatgtcataaattgggaaaatctacttgaactttgttttataatgc

SEQ ID NO: 98240 - DNA, 80 bp, synthetic construct; identical to SEQ ID NO: 18570
  source 1..80: mol_type = other DNA

SEQ ID NO: 98241 - DNA, 80 bp, synthetic construct
  source 1..80: mol_type = other DNA
gaagaactaataaggtggaattgattcaggacagcatatcaccaactctgagaaaaatgcaacaaatgcaaattcattga

SEQ ID NO: 98242 - DNA, 80 bp, synthetic construct
  source 1..80: mol_type = other DNA
aatgcatgctctaacagtatgcccatgtagagctccagagttttttcttggaaacagaatgagtagtacatgagattttc

SEQ ID NO: 98243 - DNA, 80 bp, synthetic construct; identical to SEQ ID NO: 18571
  source 1..80: mol_type = other DNA

SEQ ID NO: 98244 - DNA, 80 bp, synthetic construct
  source 1..80: mol_type = other DNA
atacttttttttcttaatttttttttttgcagcttctcatggtcaagaatgtatactattctgtgggctaaatatcatat

SEQ ID NO: 98245 - DNA, 80 bp, synthetic construct
  source 1..80: mol_type = other DNA
acaaaaagaaacacccaaaagatatatctggaaaactttctttcagtgatacatttttcctgttttttttctgctttcta

SEQ ID NO: 98246 - DNA, 80 bp, synthetic construct
  source 1..80: mol_type = other DNA
tttttattgagtaatgtactcctccctcattctctgcttggcttattaactgttagcaagttcctataattctggtacta

SEQ ID NO: 98247 - DNA, 80 bp, synthetic construct; identical to SEQ ID NO: 18572
  source 1..80: mol_type = other DNA

SEQ ID NO: 98248 - DNA, 80 bp, synthetic construct
  source 1..80: mol_type = other DNA
aaaactactttcactaaaggaagacagaaaggaaagaaagaaggaagagaagaccacaaaacaaccagaaaacaaataac

SEQ ID NO: 98249 - DNA, 80 bp, synthetic construct
  source 1..80: mol_type = other DNA
gactgaaaataaagggatggaaaaatatattccatgcccacagaaaccaaaataagagcaggggtcactatacttatatc

SEQ ID NO: 98250 - DNA, 80 bp, synthetic construct
  source 1..80: mol_type = other DNA
gagacataggccccaatacaatagaaatagctggagacttcaacaccccactttcagcattggacagatcttccagacag

SEQ ID NO: 98251 - DNA, 80 bp, synthetic construct
  source 1..80: mol_type = other DNA
gcatgaaataatatcaagcatattctctgatcacaatagaataaaactagaaattaataacaaggtattttggaaactgt

SEQ ID NO: 98252 - DNA, 80 bp, synthetic construct; identical to SEQ ID NO: 18573
  source 1..80: mol_type = other DNA

SEQ ID NO: 98253 - DNA, 80 bp, synthetic construct
  source 1..80: mol_type = other DNA
tcagttttcatcatttagctcccacttataagtgaggccatgcagtatttagttttttattcctgcattagtttgctaag

SEQ ID NO: 98254 - DNA, 80 bp, synthetic construct
  source 1..80: mol_type = other DNA
tagtgctgcagtgaacattcacgtgcttttgtctttatggtagaatgatttctattcctttgagtatgtactcagtaatg

SEQ ID NO: 98255 - DNA, 80 bp, synthetic construct
  source 1..80: mol_type = other DNA
gtaacagctattctgactggtgtgagatgatatctcattgtggttttgatttgcatttctctaatgatcagtgatatgga

SEQ ID NO: 98256 - DNA, 80 bp, synthetic construct; identical to SEQ ID NO: 18574
  source 1..80: mol_type = other DNA

SEQ ID NO: 98257 - DNA, 80 bp, synthetic construct
  source 1..80: mol_type = other DNA
gctcactgcaacctctgcctcccgggtttaagtgattatcttgcctcagcctcctgagtaactgggactacaggtgtgca

SEQ ID NO: 98258 - DNA, 80 bp, synthetic construct
  source 1..80: mol_type = other DNA
caatccatcttgagttgatttttgtatatggtgtaaggaatgggtccagcttcaatcttctgcatatggctagccactta

SEQ ID NO: 98259 - DNA, 80 bp, synthetic construct
  source 1..80: mol_type = other DNA
taccagtaacatgctgttttggttactgtagccctgtagtatagtctgaagttggataatgtgatgcctccagctttgtt

SEQ ID NO: 98260 - DNA, 80 bp, synthetic construct
  source 1..80: mol_type = other DNA
tgatatttattcttcctatccatgagcatgggatgtttttccatgtgtttgtgtcatctctgattgctttgagcagtgtt

SEQ ID NO: 98261 - DNA, 80 bp, synthetic construct; identical to SEQ ID NO: 18575
  source 1..80: mol_type = other DNA

SEQ ID NO: 98262 - DNA, 80 bp, synthetic construct
  source 1..80: mol_type = other DNA
gaatgcttcaagcttctgcacattcagtatgatgttggctgtgggttagttataggtgaaaaaaagaggaaaaactcaaa

SEQ ID NO: 98263 - DNA, 80 bp, synthetic construct; identical to SEQ ID NO: 18576
  source 1..80: mol_type = other DNA

SEQ ID NO: 98264 - DNA, 80 bp, synthetic construct
  source 1..80: mol_type = other DNA
aacaagtaatgagattgaagccataataaagtctcctagtaaagaaaagcctgggacctgatggcttcactgctgaattg

SEQ ID NO: 98265 - DNA, 80 bp, synthetic construct
  source 1..80: mol_type = other DNA
gataaagacccattaaaaaaagaaaactataggccagtatttctgaggaatattgatacagaaatcttcaacaaaacact

SEQ ID NO: 98266 - DNA, 80 bp, synthetic construct
  source 1..80: mol_type = other DNA
aaaaagcatttgataaaattcagcatccttcatgcccaaaaccctaaaaaacctgaggatagaaggaacataccttaacg

SEQ ID NO: 98267 - DNA, 80 bp, synthetic construct; identical to SEQ ID NO: 18577
  source 1..80: mol_type = other DNA

SEQ ID NO: 98268 - DNA, 80 bp, synthetic construct
  source 1..80: mol_type = other DNA
cataaaataaaatgcctaggaattaaccacagaagtgaaagatctctatgatgaaaaccatagaatactgatgaaagaaa

SEQ ID NO: 98269 - DNA, 80 bp, synthetic construct
  source 1..80: mol_type = other DNA
tcctcaaatttatatggaactacaaaagacccagaatagcgaaaactatcctaagcagaaagacgacgttgcttgacttc

SEQ ID NO: 98270 - DNA, 80 bp, synthetic construct
  source 1..80: mol_type = other DNA
agtctcttcaataaatggtgctgggaaaactggatatccatatgcagaagaatgaaactagacccctatctgtcaccata

SEQ ID NO: 98271 - DNA, 80 bp, synthetic construct; identical to SEQ ID NO: 18578
  source 1..80: mol_type = other DNA

SEQ ID NO: 98272 - DNA, 80 bp, synthetic construct
  source 1..80: mol_type = other DNA
gcatatgaaaaggtgctcaacatcagtgatcatcagagaaatgcaaatcaaaactacaatgaggtatttatctcactgca

SEQ ID NO: 98273 - DNA, 80 bp, synthetic construct
  source 1..80: mol_type = other DNA
tattatccaacaatcccactgccaggtatatacccaacgaaaggaagtcagtatatcaaagaggtatctgcactcctatg

SEQ ID NO: 98274 - DNA, 80 bp, synthetic construct
  source 1..80: mol_type = other DNA
tggagatcattatgttaaatgaaataagccaggtacagaaagacaaacatcacatactctcatttatttgtgagatctaa

SEQ ID NO: 98275 - DNA, 80 bp, synthetic construct
  source 1..80: mol_type = other DNA
ataccttaattgtacattttaaaataacttaaagagtgtaattggattgtttgtaactcaaaggataaatgcttgaggag

SEQ ID NO: 98276 - DNA, 80 bp, synthetic construct; identical to SEQ ID NO: 18579
  source 1..80: mol_type = other DNA

SEQ ID NO: 98277 - DNA, 80 bp, synthetic construct
  source 1..80: mol_type = other DNA
agtttgtgtttttatttaaagcaatatactttaatctggtttgaagaaggttactatcttcactcttcctggtgcctccc

SEQ ID NO: 98278 - DNA, 80 bp, synthetic construct
  source 1..80: mol_type = other DNA
ggattctaaggttatcataactcctatatcatagtttctccatttctcagttctttatttttattcatctcttagctggc

SEQ ID NO: 98279 - DNA, 80 bp, synthetic construct; identical to SEQ ID NO: 18580
  source 1..80: mol_type = other DNA

SEQ ID NO: 98280 - DNA, 80 bp, synthetic construct
  source 1..80: mol_type = other DNA
agctaggttgttctataccattgtattttgggaacattttcttatgttggattgcttttattctccctatttattgtctt

SEQ ID NO: 98281 - DNA, 80 bp, synthetic construct
  source 1..80: mol_type = other DNA
tcattaatttcctttttatgatacatttttattgaattggatttataatagacgaattattcaataatatgtatttggat

SEQ ID NO: 98282 - DNA, 80 bp, synthetic construct
  source 1..80: mol_type = other DNA
taaaagctatgaggtggtgatggtgatgctaccctcttatctcagaggcacgtttacatttcatatagtacattacaggt

SEQ ID NO: 98283 - DNA, 80 bp, synthetic construct
  source 1..80: mol_type = other DNA
atgttccctgctcagctagaacttacagtcaagtaagggagatagacattaaatgaacaatcacagaaatacttaactac

SEQ ID NO: 98284 - DNA, 80 bp, synthetic construct; identical to SEQ ID NO: 18581
  source 1..80: mol_type = other DNA

SEQ ID NO: 98285 - DNA, 80 bp, synthetic construct
  source 1..80: mol_type = other DNA
ttcactctgcacttaatctgtgacttgtttatgttccccaaagagctatggtatgggagcaggcatttttattatatctg

SEQ ID NO: 98286 - DNA, 80 bp, synthetic construct
  source 1..80: mol_type = other DNA
ttttctatagcaggattgttttgggattcaaattgtccccagttcaacacagtatgcagagtctctgtgttgtcagaaaa

SEQ ID NO: 98287 - DNA, 80 bp, synthetic construct; identical to SEQ ID NO: 18582
  source 1..80: mol_type = other DNA

SEQ ID NO: 98288 - DNA, 80 bp, synthetic construct
  source 1..80: mol_type = other DNA
aacctataaagatgcaacgttatctgttttctcacaaagtttctgcacatccagtgtttgctgagattattactggttta

SEQ ID NO: 98289 - DNA, 80 bp, synthetic construct
  source 1..80: mol_type = other DNA
ttatgtagctacactatttgttttcttaggtatctgttatatgcatttattttctcacagccatctagttgtatatatat

SEQ ID NO: 98290 - DNA, 80 bp, synthetic construct
  source 1..80: mol_type = other DNA
atcataattttataaataaaataattattttaaatttttagataatgagaattaattgaatcattggaattagaataaat

SEQ ID NO: 98291 - DNA, 80 bp, synthetic construct
  source 1..80: mol_type = other DNA
tggagtaatacattctatagttcttaaaattagaaataaatttaaaaagcaaaatttatagtgattttagacataaagaa

SEQ ID NO: 98292 - DNA, 80 bp, synthetic construct; identical to SEQ ID NO: 18583
  source 1..80: mol_type = other DNA

SEQ ID NO: 98293 - DNA, 80 bp, synthetic construct
  source 1..80: mol_type = other DNA
tgccccttttactttctcattcagcagttgcttattgaatgtctagtgggtaccaaacatggttctaaggctgacaggat

SEQ ID NO: 98294 - DNA, 80 bp, synthetic construct
  source 1..80: mol_type = other DNA
attagagtatatggtagaaagtggtttgggtcaaaatacaacaaatggaggtttgggagacaagaaagtttttccagctg

SEQ ID NO: 98295 - DNA, 80 bp, synthetic construct
  source 1..80: mol_type = other DNA
aagcaagaaacaagaaaaagatatgaatgaaattgcatggggaagagtggcctattctaagggaacagcttaactaagtt

SEQ ID NO: 98296 - DNA, 80 bp, synthetic construct
  source 1..80: mol_type = other DNA
tattccttttagcctagaattgcttcctttcatggcttcaagagtaggatttcaaagtcacttattatattattatatac

SEQ ID NO: 98297 - DNA, 80 bp, synthetic construct; identical to SEQ ID NO: 18584
  source 1..80: mol_type = other DNA

SEQ ID NO: 98298 - DNA, 80 bp, synthetic construct
  source 1..80: mol_type = other DNA
aatctttgttcttttggataattcaaatgtacatgtgaattctctaagtgctctgttaaagagcaatcagcatggggtat

SEQ ID NO: 98299 - DNA, 80 bp, synthetic construct
  source 1..80: mol_type = other DNA
tttacagttaatctgtagccccattgcctgctcagttcccccagctgtattattttgaagcacatctttgcataccattt

SEQ ID NO: 98300 - DNA, 80 bp, synthetic construct
  source 1..80: mol_type = other DNA
ctagaaagtgctcagattttcttgtaaaaataattaaaaaatttttttacagtttgaatgagaatctaaataagatttat

SEQ ID NO: 98301 - DNA, 80 bp, synthetic construct; identical to SEQ ID NO: 18585
  source 1..80: mol_type = other DNA

SEQ ID NO: 98302 - DNA, 80 bp, synthetic construct
  source 1..80: mol_type = other DNA
cagcctcccgagtagctgggactatgggcatgcaccaccacacctggctaatttttgtatttttagtagagacggggttt

SEQ ID NO: 98303 - DNA, 80 bp, synthetic construct
  source 1..80: mol_type = other DNA
taatccaggagattttttttttaaatcacagtttattatcatattattatatttactataatatattttatacctatctt

SEQ ID NO: 98304 - DNA, 80 bp, synthetic construct
  source 1..80: mol_type = other DNA
gctatttccatgccttctctttgtatttgtttatgagactgtagtttacagttctttttgggagcagagtagaagaggga

SEQ ID NO: 98305 - DNA, 80 bp, synthetic construct; identical to SEQ ID NO: 18586
  source 1..80: mol_type = other DNA

SEQ ID NO: 98306 - DNA, 80 bp, synthetic construct
  source 1..80: mol_type = other DNA
tcagaacaggagtgcacggatagcaaaacaactagaaaatgatacaagaattattgaagttctctgtaaagaacatgaat

SEQ ID NO: 98307 - DNA, 80 bp, synthetic construct
  source 1..80: mol_type = other DNA
ttaattcgttatatttagttactttgattttaaagagagtagctccctcactctggaatcactgaaaagtatataatcaa

SEQ ID NO: 98308 - DNA, 80 bp, synthetic construct
  source 1..80: mol_type = other DNA
aggtctagaccagcctgaacaacatagcgagactctgtctctacaaaatacatatttaaaaaaatgaactgggcatggtg

SEQ ID NO: 98309 - DNA, 80 bp, synthetic construct
  source 1..80: mol_type = other DNA
ccctgcttagaaaactctagtgctctagtgttttagtttagtgataagtgataccaacattaaatttctgtttggccttc

SEQ ID NO: 98310 - DNA, 80 bp, synthetic construct; identical to SEQ ID NO: 18587
  source 1..80: mol_type = other DNA

SEQ ID NO: 98311 - DNA, 80 bp, synthetic construct
  source 1..80: mol_type = other DNA
atatcatagtttttgcactatggcttactaatttcaacaaatatacagttgactcttgaacaacaggtttgaattgcatg

SEQ ID NO: 98312 - DNA, 80 bp, synthetic construct
  source 1..80: mol_type = other DNA
gtctattttatcatttactataccataaaatacatacaaaactgtagctgcagatgcctgctgtttcaggcggacgattt

SEQ ID NO: 98313 - DNA, 80 bp, synthetic construct; identical to SEQ ID NO: 18588
  source 1..80: mol_type = other DNA

SEQ ID NO: 98314 - DNA, 80 bp, synthetic construct
  source 1..80: mol_type = other DNA
ttactgcatgggggattgacacctctaacttaccctgcattgttcaagagtcaagagattagattttgttttaaatttta

SEQ ID NO: 98315 - DNA, 80 bp, synthetic construct
  source 1..80: mol_type = other DNA
aggataattgtctaactttcttagatcaatttactgtgtatcacattttttttttgcccaagaagaatctagccaagtag

SEQ ID NO: 98316 - DNA, 80 bp, synthetic construct
  source 1..80: mol_type = other DNA
tggtaagcctcattaagcgtaggaaccatgattaatgccatcaacattattggcattactacattgtggaacatctcttt

SEQ ID NO: 98317 - DNA, 80 bp, synthetic construct
  source 1..80: mol_type = other DNA
gagctttgcatggtaagacgaaatatgtggagaaaaggatgctgtgatagatgatgaagaacaaaaccagtgttttagaa

SEQ ID NO: 98318 - DNA, 80 bp, synthetic construct; identical to SEQ ID NO: 18589
  source 1..80: mol_type = other DNA

SEQ ID NO: 98319 - DNA, 80 bp, synthetic construct
  source 1..80: mol_type = other DNA
ctgagtaagcattacagatatagcatttccaagggttggacattgtagattcaaaggtgcagtgatgtatgatagtatgg

SEQ ID NO: 98320 - DNA, 80 bp, synthetic construct
  source 1..80: mol_type = other DNA
ttgtagcaatctttttttctcctttaaaaggattatagttttaatataaatcttaagagtaattttactttttctccaat

SEQ ID NO: 98321 - DNA, 80 bp, synthetic construct; identical to SEQ ID NO: 18590
  source 1..80: mol_type = other DNA

SEQ ID NO: 98322 - DNA, 80 bp, synthetic construct
  source 1..80: mol_type = other DNA
caagatacttaactgaagggtactggagtgaaccaaagggtttagaaaacattggtagaatatgtaatcaagaggatttg

SEQ ID NO: 98323 - DNA, 80 bp, synthetic construct
  source 1..80: mol_type = other DNA
ccccgtctctactaaaaatacaaaaattagccgggcatggtagcaggtacctataatcccagctactcgggaggctgagg

SEQ ID NO: 98324 - DNA, 80 bp, synthetic construct
  source 1..80: mol_type = other DNA
ttaaacagttattataatacctatttttatcttaggtactgttttgtagcattggctatctttgtctacataaaattcta

SEQ ID NO: 98325 - DNA, 80 bp, synthetic construct; identical to SEQ ID NO: 18591
  source 1..80: mol_type = other DNA

SEQ ID NO: 98326 - DNA, 80 bp, synthetic construct
  source 1..80: mol_type = other DNA
gattgatttgctttagatataggttgatactgatataggtagattatatagtctttagcttagtgacctttagatatcat

SEQ ID NO: 98327 - DNA, 80 bp, synthetic construct
  source 1..80: mol_type = other DNA
aagataatggctaaagtaattagtttcttcaaatagtggtctctaccttatttctatcctttcatatactattgcctgcc

SEQ ID NO: 98328 - DNA, 80 bp, synthetic construct
  source 1..80: mol_type = other DNA
tttgtgtctttagcatgaactcttttaatatgaaactgaaaatatgcgtaatttagaagttaaacacagtaaaatgtttt

SEQ ID NO: 98329 - DNA, 80 bp, synthetic construct
  source 1..80: mol_type = other DNA
ctttgtcataaacataatggaaagagacccacaattaaaaagagtagtgaaaaatattttatttaagcagcagctgggtc

SEQ ID NO: 98330 - DNA, 80 bp, synthetic construct; identical to SEQ ID NO: 18592
  source 1..80: mol_type = other DNA

SEQ ID NO: 98331 - DNA, 80 bp, synthetic construct
  source 1..80: mol_type = other DNA
tcacctgaggttaggagtttgagaccggcctggccaacatggtgaaaccccgtctctactagaaatacaaaaattagctg

SEQ ID NO: 98332 - DNA, 80 bp, synthetic construct
  source 1..80: mol_type = other DNA
atataatctttgtgtgctgggcattttactggttgctgaagatatggttattggacctagttttgtctgttcttaaagaa

SEQ ID NO: 98333 - DNA, 80 bp, synthetic construct
  source 1..80: mol_type = other DNA
aataatctacctccaaaatatttcctgagtgcatctacttttctccatttctgctctcacaactcttgtccaagacattg

SEQ ID NO: 98334 - DNA, 80 bp, synthetic construct; identical to SEQ ID NO: 18593
  source 1..80: mol_type = other DNA

SEQ ID NO: 98335 - DNA, 80 bp, synthetic construct
  source 1..80: mol_type = other DNA
tccaagttttttgaaaaccctcgtacttgatattccctcttcttgaaatttcctccttttctttccatggattaccaact

SEQ ID NO: 98336 - DNA, 80 bp, synthetic construct
  source 1..80: mol_type = other DNA
tagccttaaaattccatatcacagagaccataacctttttgttcactgtctaataattagggcctgttataaaacttggt

SEQ ID NO: 98337 - DNA, 80 bp, synthetic construct; identical to SEQ ID NO: 18594
  source 1..80: mol_type = other DNA

SEQ ID NO: 98338 - DNA, 80 bp, synthetic construct
  source 1..80: mol_type = other DNA
tctaatttacttctgacactgcttacctggagatagtgtcagatcccacaggttgagggctcagtccccaaaactggccc

SEQ ID NO: 98339 - DNA, 80 bp, synthetic construct
  source 1..80: mol_type = other DNA
tacaaaggatgcagatgtaaagatgcataggatgaggtatgggggatgggatgggaagcttctatgccctccctggccag

SEQ ID NO: 98340 - DNA, 80 bp, synthetic construct
  source 1..80: mol_type = other DNA
cattgcataggcatgacagattagatcattggctattgattatcaacctaaccttcagcttccctccccttcctagaggt

SEQ ID NO: 98341 - DNA, 80 bp, synthetic construct; identical to SEQ ID NO: 18595
  source 1..80: mol_type = other DNA

SEQ ID NO: 98342 - DNA, 80 bp, synthetic construct
  source 1..80: mol_type = other DNA
actcacaaatttggagtgtagcatgtgcatgatatagcctgtgctataaatggatgttaagcaggggtaaggataaaatc

SEQ ID NO: 98343 - DNA, 80 bp, synthetic construct
  source 1..80: mol_type = other DNA
taaaaattttgtgtcccattccactgaggaatatgcctaggccttactaccacagacatagtgtataaaaatctctgggc

SEQ ID NO: 98344 - DNA, 80 bp, synthetic construct
  source 1..80: mol_type = other DNA
gatagccttctatagatttgggaatcatcaggggagttaaacccataaaaaaaaatgagattgcttgaagggagggtgca

SEQ ID NO: 98345 - DNA, 80 bp, synthetic construct
  source 1..80: mol_type = other DNA
tagacaggcaagtgagcattactgcctgagatctacctcctgtcagatcagcagtggaattagattctcataggtgcatg

SEQ ID NO: 98346 - DNA, 80 bp, synthetic construct; identical to SEQ ID NO: 18596
  source 1..80: mol_type = other DNA

SEQ ID NO: 98347 - DNA, 80 bp, synthetic construct
  source 1..80: mol_type = other DNA
aatcactgtagcttaaatatgattagtggacacagaagcatatagaagctgtgttgcaatatatttgaaagacgaggctg

SEQ ID NO: 98348 - DNA, 80 bp, synthetic construct
  source 1..80: mol_type = other DNA
aggaggctgaggcaggagaatcacttgaacccgggaagtggaggttgcagtgagccaagattgcgccactgcactccagc

SEQ ID NO: 98349 - DNA, 80 bp, synthetic construct; identical to SEQ ID NO: 18597
  source 1..80: mol_type = other DNA

SEQ ID NO: 98350 - DNA, 80 bp, synthetic construct
  source 1..80: mol_type = other DNA
ctaagtatcttattgtctttaatttgaaaatgtttaatatttggttgtaataatgttttcttaaaacaataccattttgt

SEQ ID NO: 98351 - DNA, 80 bp, synthetic construct
  source 1..80: mol_type = other DNA
gtcttatttgagggaatgtagagacaagtgggaggcagtgtatttgaagatacatttaacttgggagatggaaaacattt

SEQ ID NO: 98352 - DNA, 80 bp, synthetic construct
  source 1..80: mol_type = other DNA
cttcagaaaatctgatttcctattttaacgtaagccatatatgaaacattatttattgtaatatcttggcaaagaaactt

SEQ ID NO: 98353 - DNA, 80 bp, synthetic construct; identical to SEQ ID NO: 18598
  source 1..80: mol_type = other DNA

SEQ ID NO: 98354 - DNA, 80 bp, synthetic construct
  source 1..80: mol_type = other DNA
gaagataatacattacctggatcccatttttgctaattaagaagtcttatgccactcaatctaactgttgttcctttgta

SEQ ID NO: 98355 - DNA, 80 bp, synthetic construct
  source 1..80: mol_type = other DNA
gcaactcctgatagacaataagtttaatatctgaaggcatctgataccctctctcccctaaagacaaggagaaagaaaga

SEQ ID NO: 98356 - DNA, 80 bp, synthetic construct
  source 1..80: mol_type = other DNA
tacttgttaacaattcattcattgccataacctgcctgtgattttgtcataatctgttgtcatctcttgctatgttcccc

SEQ ID NO: 98357 - DNA, 80 bp, synthetic construct
  source 1..80: mol_type = other DNA
agcaagggctaatgaaagaatttaaaagaatgataagccctttcttctcatatcattttgaatacttcctccaatatttg

SEQ ID NO: 98358 - DNA, 80 bp, synthetic construct; identical to SEQ ID NO: 18599
  source 1..80: mol_type = other DNA

SEQ ID NO: 98359 - DNA, 80 bp, synthetic construct
  source 1..80: mol_type = other DNA
tttgctattgtgaatagcataccagtgaacatatgagtgcatgtgaaagacattttctagagctcaatttaaagcttaac

SEQ ID NO: 98360 - DNA, 80 bp, synthetic construct
  source 1..80: mol_type = other DNA
ttagaagctatgaacattttaatggacattttggcaacaattcttttatgacaggaaatgcttgtttgttatatgtttct

SEQ ID NO: 98361 - DNA, 80 bp, synthetic construct
  source 1..80: mol_type = other DNA
ctggagtgaaatggcatgataattggctcactacaacctccatctcctgggttcaagcgattcttgtgactcagcctccc

SEQ ID NO: 98362 - DNA, 80 bp, synthetic construct; identical to SEQ ID NO: 18600
  source 1..80: mol_type = other DNA

SEQ ID NO: 98363 - DNA, 80 bp, synthetic construct
  source 1..80: mol_type = other DNA
gttttaattattaaagttgaatagccccactccaaatgatacatgtattggaacttcttttgcaacaatttccctatctt

SEQ ID NO: 98364 - DNA, 80 bp, synthetic construct
  source 1..80: mol_type = other DNA
caggctggtcaacatggcaaaaccccatctctactaaagagacaaaaattagtgaggcgtggtgcgcttgcctataatcc

SEQ ID NO: 98365 - DNA, 80 bp, synthetic construct
  source 1..80: mol_type = other DNA
gccttggttttatttcatttgctttttcggaagcaacatacatcccaatataactcttaattgaaggtattttatgagaa

SEQ ID NO: 98366 - DNA, 80 bp, synthetic construct; identical to SEQ ID NO: 18601
  source 1..80: mol_type = other DNA

SEQ ID NO: 98367 - DNA, 80 bp, synthetic construct
  source 1..80: mol_type = other DNA
gagaaatttgctaaagctgtgggacagggttgtgtcgaaattggatcacaggtaacttgaattcattgtaattcgtggta

SEQ ID NO: 98368 - DNA, 80 bp, synthetic construct
  source 1..80: mol_type = other DNA
atttatgggtaactttatggaaaactacctcccaccccattataaaaactatgtaataaaggaacacatagccattgtag

SEQ ID NO: 98369 - DNA, 80 bp, synthetic construct; identical to SEQ ID NO: 18602
  source 1..80: mol_type = other DNA

SEQ ID NO: 98370 - DNA, 80 bp, synthetic construct
  source 1..80: mol_type = other DNA
gccatcagtgttttaaacattgatatttaatggttctttttgattctacagccatgcaccacttaacagggatatgttct

SEQ ID NO: 98371 - DNA, 80 bp, synthetic construct
  source 1..80: mol_type = other DNA
ccaaacatagaaaaggtaaagatatagtacaaaagataaaaaatggaacatttgcacagagcacttactatgaaaggagc

SEQ ID NO: 98372 - DNA, 80 bp, synthetic construct
  source 1..80: mol_type = other DNA
tagtaaattaaccatagctcactgtaacttttttactttataaatcttcagtttgtaagaaacttttgactcttataaca

SEQ ID NO: 98373 - DNA, 80 bp, synthetic construct; identical to SEQ ID NO: 18603
  source 1..80: mol_type = other DNA

SEQ ID NO: 98374 - DNA, 80 bp, synthetic construct
  source 1..80: mol_type = other DNA
ttcattattaagtattatgtactgtacataattgtatgtactatacttttatatgactggcagtgcaataggtttattta

SEQ ID NO: 98375 - DNA, 80 bp, synthetic construct
  source 1..80: mol_type = other DNA
attgaccaaaaacgttgttatgcggtgcatgattatatatgagatttttgctcttagtttggaaggaaataatatggtgt

SEQ ID NO: 98376 - DNA, 80 bp, synthetic construct
  source 1..80: mol_type = other DNA
ttatggacaaagactgtcctcttaatcctggacagctatcttgaaaatacatgtcctaggtcatgagaaatgttatataa

SEQ ID NO: 98377 - DNA, 80 bp, synthetic construct; identical to SEQ ID NO: 18604
  source 1..80: mol_type = other DNA

SEQ ID NO: 98378 - DNA, 80 bp, synthetic construct
  source 1..80: mol_type = other DNA
gtgattttctaaaatagcaggctcttatttttctttttgtttgtttgtagcgatacaaacttggagttcgcttgtattac

SEQ ID NO: 98379 - DNA, 80 bp, synthetic construct
  source 1..80: mol_type = other DNA
accctgtctctactaaaagtacaaaaattagctgggcgtggtggtgtagacctgtagtcccagctacttggcaggctgag

SEQ ID NO: 98380 - DNA, 80 bp, synthetic construct
  source 1..80: mol_type = other DNA
tttttttttttttaaattatctgtttcaggaagaagaacgattatccattcaaaattttaggtaaattttttacttttag

SEQ ID NO: 98381 - DNA, 80 bp, synthetic construct
  source 1..80: mol_type = other DNA
aacacttttgttcaatttaaagttaaaatgtggtgtgtttctttggtcgggggagagggatagtgtgaggttaaggagaa

SEQ ID NO: 98382 - DNA, 80 bp, synthetic construct; identical to SEQ ID NO: 18605
  source 1..80: mol_type = other DNA

SEQ ID NO: 98383 - DNA, 80 bp, synthetic construct
  source 1..80: mol_type = other DNA
tgcaaatgttaaaagaaagttttgcttgcagaaacaaaaggaacatttgtataaggatgcaaaacacagaaaaagaggaa

SEQ ID NO: 98384 - DNA, 80 bp, synthetic construct
  source 1..80: mol_type = other DNA
aatctgtctatcctcttaccaaggattaatgagaattaaaatagatatgccaatggctgataagatactaaacctgttcc

SEQ ID NO: 98385 - DNA, 80 bp, synthetic construct
  source 1..80: mol_type = other DNA
ttaacctttctactgttttctttgtctgataataacttccaaaaaaatacctagctcaagggttaatatttcataaatag

SEQ ID NO: 98386 - DNA, 80 bp, synthetic construct; identical to SEQ ID NO: 18606
  source 1..80: mol_type = other DNA

SEQ ID NO: 98387 - DNA, 80 bp, synthetic construct
  source 1..80: mol_type = other DNA
ggatcaagtggaatattagaatggagctttaatcgagcaccctaaaccatctaatacagcacagtgatttatttaagaat

SEQ ID NO: 98388 - DNA, 80 bp, synthetic construct
  source 1..80: mol_type = other DNA
tcctaatgctatccctccctcctctccctaccccatgacaggccccagtgtgtgatgttccccaccctgtgtccacgtgt

SEQ ID NO: 98389 - DNA, 80 bp, synthetic construct
  source 1..80: mol_type = other DNA
tattccatggtatatatgtgccacattttcttactccagtctattattgttggacatttgggttgcttccaagtctttgc

SEQ ID NO: 98390 - DNA, 80 bp, synthetic construct
  source 1..80: mol_type = other DNA
agtcccaccaacagtgtaaaagtgttcctatttcttcacatcctctccagcatctgttgtttcctgactttttaatgatc

SEQ ID NO: 98391 - DNA, 80 bp, synthetic construct; identical to SEQ ID NO: 18607
  source 1..80: mol_type = other DNA

SEQ ID NO: 98392 - DNA, 80 bp, synthetic construct
  source 1..80: mol_type = other DNA
aatggtattgcctaggttttcttctagggtttttatggttttaggtctaacatttaagtctttaatccatcttgaattaa

SEQ ID NO: 98393 - DNA, 80 bp, synthetic construct
  source 1..80: mol_type = other DNA
tgagggccctgttctaaaccaaaacagaattctttaaagtatttagataatttatttaaagtacagttgttatatatttg

SEQ ID NO: 98394 - DNA, 80 bp, synthetic construct; identical to SEQ ID NO: 18608
  source 1..80: mol_type = other DNA

SEQ ID NO: 98395 - DNA, 80 bp, synthetic construct
  source 1..80: mol_type = other DNA
taggtatgccataatcctaatttgcacatgtaaccttagttttaatttccttacgttttgaatttttaatgactaagcga

SEQ ID NO: 98396 - DNA, 80 bp, synthetic construct
  source 1..80: mol_type = other DNA
gaatgaatttacacttgataaggagtacttagaagaaaactttctgaatctgggtaattaagtgaaagtaaaaataaata

SEQ ID NO: 98397 - DNA, 80 bp, synthetic construct; identical to SEQ ID NO: 18609
  source 1..80: mol_type = other DNA

SEQ ID NO: 98398 - DNA, 80 bp, synthetic construct
  source 1..80: mol_type = other DNA
tatttttgagaatttttggagaaaaagtgacaagccccaaatctggaaaagagtatgattgatttacaataggagacgtg

SEQ ID NO: 98399 - DNA, 80 bp, synthetic construct
  source 1..80: mol_type = other DNA
taaaaaccttgagtggtagtggataactttgtgaagataagttatgccacacaaacaggatactgtgtatttttcctgtg

SEQ ID NO: 98400 - DNA, 80 bp, synthetic construct
  source 1..80: mol_type = other DNA
tggtgaatttgtcacaaattgaacacatccgtgtaaacaacacccagataaaggcccagagcaagctttcatagtctttt

SEQ ID NO: 98401 - DNA, 80 bp, synthetic construct; identical to SEQ ID NO: 18610
  source 1..80: mol_type = other DNA

SEQ ID NO: 98402 - DNA, 80 bp, synthetic construct
  source 1..80: mol_type = other DNA
atgcatcatacctaagggttagatgaaatgacttccaagagtttggccctattaaatctgttaagaggtttataatgcca

SEQ ID NO: 98403 - DNA, 80 bp, synthetic construct
  source 1..80: mol_type = other DNA
tttgctaccttgagaccatttctctcacagcagccagagaaatctgctcataatgtaaatctcatcatgctaattcctca

SEQ ID NO: 98404 - DNA, 80 bp, synthetic construct
  source 1..80: mol_type = other DNA
tgaaattactggacaggaagaacagatgctagttgagaaagagaagaggggagctgggagcctgaggagaaggcttttag

SEQ ID NO: 98405 - DNA, 80 bp, synthetic construct
  source 1..80: mol_type = other DNA
agaaagggtacccagattctgtctgaaatctgaataattcctgtgtgtcacagactcagagcagccaaatgaagggcaaa

SEQ ID NO: 98406 - DNA, 80 bp, synthetic construct; identical to SEQ ID NO: 18611
  source 1..80: mol_type = other DNA

SEQ ID NO: 98407 - DNA, 80 bp, synthetic construct
  source 1..80: mol_type = other DNA
ttgggaggctgaggcaacacagcgagactctgtctcaaaaaaataaaaaataaaaacaaaaaaactagaatgggagcttt

SEQ ID NO: 98408 - DNA, 80 bp, synthetic construct
  source 1..80: mol_type = other DNA
agcctgctacacatcagggtaggaatagcctgttgcttctagactacagacctgtatggtattttttttttaatctccac

SEQ ID NO: 98409 - DNA, 80 bp, synthetic construct; identical to SEQ ID NO: 18612
  source 1..80: mol_type = other DNA

SEQ ID NO: 98410 - DNA, 80 bp, synthetic construct
  source 1..80: mol_type = other DNA
atccaccactgaaagcttgacagagtcctaatatataaaatacttttctgatgaaatcggtggtgatatcaatgaatgtg

SEQ ID NO: 98411 - DNA, 80 bp, synthetic construct
  source 1..80: mol_type = other DNA
caatggattttaaagtcttaaaatacgaaaaatttatttcggttcattgagattgtttccagttccgccctgcaactaac

SEQ ID NO: 98412 - DNA, 80 bp, synthetic construct
  source 1..80: mol_type = other DNA
agaagcggataggaaaattcagctctttgctgttatgccagatagtgaagacattcagaagatcataaaacagtgctatt

SEQ ID NO: 98413 - DNA, 80 bp, synthetic construct
  source 1..80: mol_type = other DNA
catcctttaatgtaaaaaagctattagctactttatgcttcctaatggaagaatatataaccaccttgaaaacatgatgt

SEQ ID NO: 98414 - DNA, 80 bp, synthetic construct; identical to SEQ ID NO: 18613
  source 1..80: mol_type = other DNA

SEQ ID NO: 98415 - DNA, 80 bp, synthetic construct
  source 1..80: mol_type = other DNA
aaattttaactaaattaagttttaattactaacaaagtaaatattaatagatttaacccacacaaacaaaagcttttggg

SEQ ID NO: 98416 - DNA, 80 bp, synthetic construct
  source 1..80: mol_type = other DNA
ctgtccctgagtcttgaaatgctttcctctgcctttttcttgaccagattttaaggtccattttgcctttcctgatcatc

SEQ ID NO: 98417 - DNA, 80 bp, synthetic construct
  source 1..80: mol_type = other DNA
cagttaattacataagggtaaagaacagagaggagtcaacttatgatgacatgcaggtttctggcttgtataacttaagt

SEQ ID NO: 98418 - DNA, 80 bp, synthetic construct; identical to SEQ ID NO: 18614
  source 1..80: mol_type = other DNA

SEQ ID NO: 98419 - DNA, 80 bp, synthetic construct
  source 1..80: mol_type = other DNA
gctttgctgagtaactgaagtttggagaagggataagatcacttaaggggagaatatagtatgagaagagaaggaggcta

SEQ ID NO: 98420 - DNA, 80 bp, synthetic construct
  source 1..80: mol_type = other DNA
cagaaaagagaagcctgtgcctacaaaagagattgaaatagaacagccaggaagataagaagaaaatcaggagaagtggt

SEQ ID NO: 98421 - DNA, 80 bp, synthetic construct
  source 1..80: mol_type = other DNA
accctgtctctactaaaaatacaaaaattagctgggcctggtggtgaatgcctgtaattctagctactcgggaggctgag

SEQ ID NO: 98422 - DNA, 80 bp, synthetic construct; identical to SEQ ID NO: 18615
  source 1..80: mol_type = other DNA

SEQ ID NO: 98423 - DNA, 80 bp, synthetic construct
  source 1..80: mol_type = other DNA
taggatgagatctgaatgagagataaagtggacacagtcaaatagatggcttttatcaaaagttttgcctgtgaagagaa

SEQ ID NO: 98424 - DNA, 80 bp, synthetic construct
  source 1..80: mol_type = other DNA
atattttattttgcttatgattttttgggtcaggaatttgggttgaacttgactgggtggtttgtctccgactatgtgtc

SEQ ID NO: 98425 - DNA, 80 bp, synthetic construct
  source 1..80: mol_type = other DNA
gttagaatgttaagctttggagttttcacctgcagagagaagataggagattcatagtgaaagtagaggttttaagaaac

SEQ ID NO: 98426 - DNA, 80 bp, synthetic construct
  source 1..80: mol_type = other DNA
cacacctgtggttcttgggaggctgaactgggagaattgcctgagcctgggatgttaaggctgcagtgagctgtgattgc

SEQ ID NO: 98427 - DNA, 80 bp, synthetic construct
  source 1..80: mol_type = other DNA
ttaataggtgtagtgggagtaacaatgagaatgaaagtgtaggaggttgtagtcaaagagttgtttcaccttagaatttc

SEQ ID NO: 98428 - DNA, 80 bp, synthetic construct; identical to SEQ ID NO: 18616
  source 1..80: mol_type = other DNA

SEQ ID NO: 98429 - DNA, 80 bp, synthetic construct
  source 1..80: mol_type = other DNA
agagggctagagaggtcctgaaagcaaaactcctggctcacttaaaaaaaaactaatctctctctcaatacctaatctaa

SEQ ID NO: 98430 - DNA, 80 bp, synthetic construct
  source 1..80: mol_type = other DNA
gaaaactacttgtgcctgatactagtgaagccattccagctttcttcccattaatatcaacatggcatattttccccatt

SEQ ID NO: 98431 - DNA, 80 bp, synthetic construct
  source 1..80: mol_type = other DNA
aaattctccatcttattattcattttctatttgtctcatctcccttttcctccctttcctctttttctgccttcttttgg

SEQ ID NO: 98432 - DNA, 80 bp, synthetic construct; identical to SEQ ID NO: 18617
  source 1..80: mol_type = other DNA

SEQ ID NO: 98433 - DNA, 80 bp, synthetic construct
  source 1..80: mol_type = other DNA
actttttttggccaggggcagtggctcatacccgtaatcccaacacttagtggggctgaggcgggaggatctcttgaagc

SEQ ID NO: 98434 - DNA, 80 bp, synthetic construct
  source 1..80: mol_type = other DNA
cacctcctgggttcaagcgattctcctgcctcagcctcctgagtagctgggattacaggcacacgccaccatgcctagct

SEQ ID NO: 98435 - DNA, 80 bp, synthetic construct
  source 1..80: mol_type = other DNA
tgtctactagtgatgaattcttccagcttttatgtctggaaaaaaacattttacctttatttttaaaaggtcttttgctg

SEQ ID NO: 98436 - DNA, 80 bp, synthetic construct
  source 1..80: mol_type = other DNA
cactgcaacctctgcctcccaggttcaagcgattcttctgcctcagcctcctgagtgactgggactaaaggcacatgcca

SEQ ID NO: 98437 - DNA, 80 bp, synthetic construct; identical to SEQ ID NO: 18618
  source 1..80: mol_type = other DNA

SEQ ID NO: 98438 - DNA, 80 bp, synthetic construct
  source 1..80: mol_type = other DNA
ggatataggtattataactttttaaatgtccctgttactaagtctagtacctatgtctttttaggtctgtttctcttgac

SEQ ID NO: 98439 - DNA, 80 bp, synthetic construct
  source 1..80: mol_type = other DNA
atgtttctgcttttttgactgcttggtgatttttttgttaggtgccagatatcatgaattttgctttagtgggtcctgga

SEQ ID NO: 98440 - DNA, 80 bp, synthetic construct; identical to SEQ ID NO: 18619
  source 1..80: mol_type = other DNA

SEQ ID NO: 98441 - DNA, 80 bp, synthetic construct
  source 1..80: mol_type = other DNA
ttaaccctctgcagacctctggagttctctttttgtagctttcttctctctagtattctgtcctgctaattttagtttgc

SEQ ID NO: 98442 - DNA, 80 bp, synthetic construct
  source 1..80: mol_type = other DNA
aatgaggctcaccatttgttttccttctcccagggattgctgttctgtactgcctgttgtttattgtgtaaaaagaattc

SEQ ID NO: 98443 - DNA, 80 bp, synthetic construct
  source 1..80: mol_type = other DNA
tctggtccctgtttcttcatcagagctggcagggttactaaacgtaaggcttagtgattgatgaagtatttacaaatatg

SEQ ID NO: 98444 - DNA, 80 bp, synthetic construct; identical to SEQ ID NO: 18620
  source 1..80: mol_type = other DNA

SEQ ID NO: 98445 - DNA, 80 bp, synthetic construct
  source 1..80: mol_type = other DNA
tgatttctccatttccaactgaggtacctggctcatctcattgggactggttagacagtggatgcagcccacggagggca

SEQ ID NO: 98446 - DNA, 80 bp, synthetic construct
  source 1..80: mol_type = other DNA
ggagattccctcgggtgcctacaccaccagggccctgggtttcaagcacaaaactgggcagctgtttgggcagataccga

SEQ ID NO: 98447 - DNA, 80 bp, synthetic construct; identical to SEQ ID NO: 18621
  source 1..80: mol_type = other DNA

SEQ ID NO: 98448 - DNA, 80 bp, synthetic construct; identical to SEQ ID NO: 18622
  source 1..80: mol_type = other DNA

SEQ ID NO: 98449 - DNA, 80 bp, synthetic construct
  source 1..80: mol_type = other DNA
tcatacaggagagttccagctgccatctggtgggtacccctctgggacgaagcttccagaggaaggaacaggcagcaatc

SEQ ID NO: 98450 - DNA, 80 bp, synthetic construct
  source 1..80: mol_type = other DNA
acagaaaccccatttgaaggtcatcaacatcaaagaccaaaggtagataaatccatgaagatgaggaaaaaccagcacaa

SEQ ID NO: 98451 - DNA, 80 bp, synthetic construct
  source 1..80: mol_type = other DNA
ggaagctaagaactttgaaaaaaggttagaggaattgctaactagaataaccagtttagagaagaacataaatgacctga

SEQ ID NO: 98452 - DNA, 80 bp, synthetic construct
  source 1..80: mol_type = other DNA
caaagcctccaagaaataggggactatgtgaaaagaccaaacctatgtttgattggtgtacctgaaagtgacagggagag

SEQ ID NO: 98453 - DNA, 80 bp, synthetic construct; identical to SEQ ID NO: 18623
  source 1..80: mol_type = other DNA

SEQ ID NO: 98454 - DNA, 80 bp, synthetic construct
  source 1..80: mol_type = other DNA
gccgagacaatcttaagcaaaaagaacaaagctggaggcatcacgctacttgacttcaaactatactacaaggccacaat

SEQ ID NO: 98455 - DNA, 80 bp, synthetic construct
  source 1..80: mol_type = other DNA
tgggaaaactgactagccatatgcagaaaactgaaactggaccccttccttacaccttatacaaaaattaactcaaaatg

SEQ ID NO: 98456 - DNA, 80 bp, synthetic construct; identical to SEQ ID NO: 18624
  source 1..80: mol_type = other DNA

SEQ ID NO: 98457 - DNA, 80 bp, synthetic construct
  source 1..80: mol_type = other DNA
ccactggtcattagagaaatgcaaatcaaaaccacagtgagataccatctcatgccagttagaatggtgatcattaaaaa

SEQ ID NO: 98458 - DNA, 80 bp, synthetic construct
  source 1..80: mol_type = other DNA
agagccagaaataatatttgacccagtaatcccattactgagcatatacccaaaggattataaatcattctactaaaaag

SEQ ID NO: 98459 - DNA, 80 bp, synthetic construct
  source 1..80: mol_type = other DNA
gggacatggatgaagctggaaaccatcattctcagcaaactaaccaggaagagaaaaccaaacaacacatgttttcactt

SEQ ID NO: 98460 - DNA, 80 bp, synthetic construct; identical to SEQ ID NO: 18625
  source 1..80: mol_type = other DNA

SEQ ID NO: 98461 - DNA, 80 bp, synthetic construct; identical to SEQ ID NO: 18626
  source 1..80: mol_type = other DNA

SEQ ID NO: 98462 - DNA, 80 bp, synthetic construct
  source 1..80: mol_type = other DNA
ggccaggacaatgaagcagtatgatgccatatatacttttacacaacagccatgctaatataatgataaagcaattatgc

SEQ ID NO: 98463 - DNA, 80 bp, synthetic construct
  source 1..80: mol_type = other DNA
gctttaacctttctcactctgacccaatatattcctaatatagctttgcccttgacttccacagctaaatactagtttct

SEQ ID NO: 98464 - DNA, 80 bp, synthetic construct
  source 1..80: mol_type = other DNA
atgtctatttttccattacttttcaaatcatctgggcttaaatactgagcactttctccttttctttctcaatagtttga

SEQ ID NO: 98465 - DNA, 80 bp, synthetic construct; identical to SEQ ID NO: 18627
  source 1..80: mol_type = other DNA

SEQ ID NO: 98466 - DNA, 80 bp, synthetic construct
  source 1..80: mol_type = other DNA
ggaagtgttttgcctaggagctaataagtaacaagaaagggaaaagtaacatttgttgactagctcctttgtgcagtgca

SEQ ID NO: 98467 - DNA, 80 bp, synthetic construct
  source 1..80: mol_type = other DNA
acaataatttaggttgaaattaggtatttggatcaactttcaagggaaggggtgacaatgaggtgaaatagacatctaga

SEQ ID NO: 98468 - DNA, 80 bp, synthetic construct; identical to SEQ ID NO: 18628
  source 1..80: mol_type = other DNA

SEQ ID NO: 98469 - DNA, 80 bp, synthetic construct
  source 1..80: mol_type = other DNA
taatcatccactgaaatgtagcaaggatatgctacatatgaaatgtaattagatgattgcttaaagatctaggaatataa

SEQ ID NO: 98470 - DNA, 80 bp, synthetic construct
  source 1..80: mol_type = other DNA
agataacttataaatcaatgcaggtattctgtgttaaatgcttatgtaagcctgagttcttcatccagatctgtttatga

SEQ ID NO: 98471 - DNA, 80 bp, synthetic construct
  source 1..80: mol_type = other DNA
gtagagaaatattcataacttgtctattcatgtcactcctccccaccacaccatccatattatacacattacccattctc

SEQ ID NO: 98472 - DNA, 80 bp, synthetic construct
  source 1..80: mol_type = other DNA
agtagtgctcatcacttgcttacttctttggaagtttgtctgataattatacagaccagcatcaaaataactctcattta

SEQ ID NO: 98473 - DNA, 80 bp, synthetic construct; identical to SEQ ID NO: 18629
  source 1..80: mol_type = other DNA

SEQ ID NO: 98474 - DNA, 80 bp, synthetic construct
  source 1..80: mol_type = other DNA
atattcacagaagcctggaagtgtaaacactgctatccctattttatagataaagagacctgaggtccagagatgtcatg

SEQ ID NO: 98475 - DNA, 80 bp, synthetic construct
  source 1..80: mol_type = other DNA
ttttcctctgctatacagtgatttcataagaacagagaaccgaggattcagttacacagtattaacctgtttatcttggc

SEQ ID NO: 98476 - DNA, 80 bp, synthetic construct; identical to SEQ ID NO: 18630
  source 1..80: mol_type = other DNA

SEQ ID NO: 98477 - DNA, 80 bp, synthetic construct
  source 1..80: mol_type = other DNA
atcttaactggaattgtgaggaagggctctagaattctggatatgcaagaaacaaagaagagaaataggagaaatcgatc

SEQ ID NO: 98478 - DNA, 80 bp, synthetic construct
  source 1..80: mol_type = other DNA
tttccaactatttatagcatgttttaaaaactctgaactgtcacgacccagtctgtttcaacatacacatttgtggtcct

SEQ ID NO: 98479 - DNA, 80 bp, synthetic construct
  source 1..80: mol_type = other DNA
gaaacgtagaataggaaacagctggatttgtttcttagccttttcaaaaaagccttttcttactttgctaagtttcagtg

SEQ ID NO: 98480 - DNA, 80 bp, synthetic construct
  source 1..80: mol_type = other DNA
taaaagtttttaaatttacatattaagtaatgatagtttttatattaggttttatcatttagtttttttcttttaaacat

SEQ ID NO: 98481 - DNA, 80 bp, synthetic construct; identical to SEQ ID NO: 18631
  source 1..80: mol_type = other DNA

SEQ ID NO: 98482 - DNA, 80 bp, synthetic construct
  source 1..80: mol_type = other DNA
ctggagtgcaatgacacaatcatagctcactgaagccttgaactcttgggctcaagtgatcctcccacctcagcctcctt

SEQ ID NO: 98483 - DNA, 80 bp, synthetic construct
  source 1..80: mol_type = other DNA
cactcttggcctacagaaactatttatatgtgtcctttgctttatttttctttaaatgcaggtccattttttcccctcgt

SEQ ID NO: 98484 - DNA, 80 bp, synthetic construct
  source 1..80: mol_type = other DNA
ttagtgctaagtcttaagtagtattcatttttatttaaataaattgcttctgttcgtaaagtactatatataaaaccttt

SEQ ID NO: 98485 - DNA, 80 bp, synthetic construct; identical to SEQ ID NO: 18632
  source 1..80: mol_type = other DNA

SEQ ID NO: 98486 - DNA, 80 bp, synthetic construct
  source 1..80: mol_type = other DNA
agactgtgaagcagaaaaactgtggagggaagtggaggagttgattcatttttttagtataaaaaataaatgatgagtgt

SEQ ID NO: 98487 - DNA, 80 bp, synthetic construct
  source 1..80: mol_type = other DNA
agagcccccaagctcaaagtagcagatacagagagtggggcaataatcaggaaggttttctaaagtgctgtttggcaatg

SEQ ID NO: 98488 - DNA, 80 bp, synthetic construct
  source 1..80: mol_type = other DNA
actttgtgagcaacattttaagaacatgaaacacctggaccagtcccccatctaaggccatgccagcctatgagaataaa

SEQ ID NO: 98489 - DNA, 80 bp, synthetic construct; identical to SEQ ID NO: 18633
  source 1..80: mol_type = other DNA

SEQ ID NO: 98490 - DNA, 80 bp, synthetic construct
  source 1..80: mol_type = other DNA
agaacagaaattgaagtaaaccgagacttctgtaacagacctaaagaaaaagaaataggaaaggcagttcttcctaggag

SEQ ID NO: 98491 - DNA, 80 bp, synthetic construct
  source 1..80: mol_type = other DNA
atgaaaaccagggggcttcagatggaaagggcccatagtgccaagcatgatgaatgaatgtggatactttttgttttttt

SEQ ID NO: 98492 - DNA, 80 bp, synthetic construct
  source 1..80: mol_type = other DNA
ttacaggcacgagacaacgcgcccagataatttttgtatttttagtagagacgggttttcaccatgttggttagcctgat

SEQ ID NO: 98493 - DNA, 80 bp, synthetic construct; identical to SEQ ID NO: 18634
  source 1..80: mol_type = other DNA

SEQ ID NO: 98494 - DNA, 80 bp, synthetic construct
  source 1..80: mol_type = other DNA
cctaataaaaaaactgtcacaccagagcagagagaaaaatgcaaaaaatcctacgatgcaacaagcccagaaaatgtttg

SEQ ID NO: 98495 - DNA, 80 bp, synthetic construct
  source 1..80: mol_type = other DNA
caaaagaaaatttgccttttttcctcgggcttttgaagaattttaagattcattctaattattgagaccaattatgtgcc

SEQ ID NO: 98496 - DNA, 80 bp, synthetic construct
  source 1..80: mol_type = other DNA
ttgcactgcagtacagagctgagaagttgcagccagaaagtagagcctgcaaaccgaaaatatttactatctactccttg

SEQ ID NO: 98497 - DNA, 80 bp, synthetic construct; identical to SEQ ID NO: 18635
  source 1..80: mol_type = other DNA

SEQ ID NO: 98498 - DNA, 80 bp, synthetic construct
  source 1..80: mol_type = other DNA
ctagttttctatgattggacatctaggtggtttccagtattttgcaatttcaactattaccacaataaataactctgtgt

SEQ ID NO: 98499 - DNA, 80 bp, synthetic construct
  source 1..80: mol_type = other DNA
tcattcccaccagaaatgtatgaaggtagcaatttctccatgacggccactgtccaaattttgccaagtaatgacattaa

SEQ ID NO: 98500 - DNA, 80 bp, synthetic construct
  source 1..80: mol_type = other DNA
tgcatctctaccctgtatcagacgaatctttatttgatcatgtctcccctaccttgaaattcttgaggactttccacagc

SEQ ID NO: 98501 - DNA, 80 bp, synthetic construct; identical to SEQ ID NO: 18636
  source 1..80: mol_type = other DNA

SEQ ID NO: 98502 - DNA, 80 bp, synthetic construct
  source 1..80: mol_type = other DNA
aacaaacaaacagggttcttaccctggcgctacattaatttgttatgtgacattgtgtctgttgtttagtcttacagttc

SEQ ID NO: 98503 - DNA, 80 bp, synthetic construct
  source 1..80: mol_type = other DNA
gccattttgataggacgataatggaacctagcacatttaccccatggctattaactgtaacgctgctgtaagtatacaac

SEQ ID NO: 98504 - DNA, 80 bp, synthetic construct
  source 1..80: mol_type = other DNA
aggtaattttctacccttttaagaggttattgtagtaaatcttttgggagcaggaagacaggaaggtaggagaggcttaa

SEQ ID NO: 98505 - DNA, 80 bp, synthetic construct
  source 1..80: mol_type = other DNA
tgagaattagagattttaggagttatgtacatgctgatctctggaaaatattgctaaataagtaatgctgttgatcatta

SEQ ID NO: 98506 - DNA, 80 bp, synthetic construct; identical to SEQ ID NO: 18637
  source 1..80: mol_type = other DNA

SEQ ID NO: 98507 - DNA, 80 bp, synthetic construct
  source 1..80: mol_type = other DNA
tcatcaggtgtccaaaattgtaggaccaaaaagcaattgcttcagattcttgataactatgtaccattcatgaaccaaat

SEQ ID NO: 98508 - DNA, 80 bp, synthetic construct
  source 1..80: mol_type = other DNA
agcattttgaatgtagaatattaaggttcattgatagctccttaagtagtgtcttcagtttaattttctgtgaatataat

SEQ ID NO: 98509 - DNA, 80 bp, synthetic construct; identical to SEQ ID NO: 18638
  source 1..80: mol_type = other DNA

SEQ ID NO: 98510 - DNA, 80 bp, synthetic construct
  source 1..80: mol_type = other DNA
cacaaagtacaacactagcaaaggaaaataaattttgttctggtacactttttttccatagttctagatgagaaaaccat

SEQ ID NO: 98511 - DNA, 80 bp, synthetic construct
  source 1..80: mol_type = other DNA
ttatgatcttgccttaagttgagatctttaagctgaggagagttctgagaaatctcaaagttatacaattctccacccct

SEQ ID NO: 98512 - DNA, 80 bp, synthetic construct
  source 1..80: mol_type = other DNA
catttatattatgtatatatttctcttgggatataaaggaccatggttagtatcttcactagttttttgggttttttttc

SEQ ID NO: 98513 - DNA, 80 bp, synthetic construct; identical to SEQ ID NO: 18639
  source 1..80: mol_type = other DNA

SEQ ID NO: 98514 - DNA, 80 bp, synthetic construct
  source 1..80: mol_type = other DNA
ttaaaagagttttttgtccaagttgtattgaggacttgaaagattaagacagtagaaatcagataggttggatgctgaat

SEQ ID NO: 98515 - DNA, 80 bp, synthetic construct
  source 1..80: mol_type = other DNA
tctgactcctgggttcaagcgattctcctgcctctgcctcccgagtagctgggactacaggcatgtgccaccacacccag

SEQ ID NO: 98516 - DNA, 80 bp, synthetic construct
  source 1..80: mol_type = other DNA
ttggataataaaaaagttttagtgtacttggtactttttttctaaagtatacctcagagccagacctattttatgtttag

SEQ ID NO: 98517 - DNA, 80 bp, synthetic construct; identical to SEQ ID NO: 18640
  source 1..80: mol_type = other DNA

SEQ ID NO: 98518 - DNA, 80 bp, synthetic construct
  source 1..80: mol_type = other DNA
gtacacactgtgatgtttgcacgacataattacctaagcaagcatcataagcaacacgtgacagtatattactttctaaa

SEQ ID NO: 98519 - DNA, 80 bp, synthetic construct
  source 1..80: mol_type = other DNA
ttctccctctcaatttttgtggcatatatcattttgaaattgggtgcattatatacagaaaatcaaaatagtaacttcaa

SEQ ID NO: 98520 - DNA, 80 bp, synthetic construct
  source 1..80: mol_type = other DNA
acagaagactacgtttttagttatacatatattttaaaatactcccaaaacatttatttcaaattactcttctttctcat

SEQ ID NO: 98521 - DNA, 80 bp, synthetic construct
  source 1..80: mol_type = other DNA
taatataaaaaggaattcaaagacattacagattggcaccacataatttaagtcagtcacttttagacactaaataactt

SEQ ID NO: 98522 - DNA, 80 bp, synthetic construct; identical to SEQ ID NO: 18641
  source 1..80: mol_type = other DNA

SEQ ID NO: 98523 - DNA, 80 bp, synthetic construct
  source 1..80: mol_type = other DNA
taaagtagtaaactatagggtcaaaacaacagttggaaacagcaatacagagagtgattgggtacattgtccttactgct

SEQ ID NO: 98524 - DNA, 80 bp, synthetic construct
  source 1..80: mol_type = other DNA
accttagttttgtttattttgcttctacttaatgtaacaggtttggttaaagtttttagcaccatactagaacaagttac

SEQ ID NO: 98525 - DNA, 80 bp, synthetic construct; identical to SEQ ID NO: 18642
  source 1..80: mol_type = other DNA

SEQ ID NO: 98526 - DNA, 80 bp, synthetic construct
  source 1..80: mol_type = other DNA
acaaaaagcaagtctgacattgccaagttaatcatgtaagttgtagtttcatttcggactttgaggacgcagatgaaaat

SEQ ID NO: 98527 - DNA, 80 bp, synthetic construct
  source 1..80: mol_type = other DNA
tcagctgcagtctcctttgggattcagattataacctctataacctccaatttatttgcaaattatctggatctttggat

SEQ ID NO: 98528 - DNA, 80 bp, synthetic construct
  source 1..80: mol_type = other DNA
taaaaaatacagtcaacgagtccaacccataggattataaatttaaagaaaagctgtgatctgtgaccagaatgaaacca

SEQ ID NO: 98529 - DNA, 80 bp, synthetic construct
  source 1..80: mol_type = other DNA
gcttcttttaaatgaagttttccttttttgttttcctgcagtggatcccagattgtgggtaagcagaagagtcttttaaa

SEQ ID NO: 98530 - DNA, 80 bp, synthetic construct; identical to SEQ ID NO: 18643
  source 1..80: mol_type = other DNA

SEQ ID NO: 98531 - DNA, 80 bp, synthetic construct
  source 1..80: mol_type = other DNA
agaaaaaaatcactattcagcctgttctcttattcgattgttttcgtgtttgggatatgacaatttagaaaagaaaatgt

SEQ ID NO: 98532 - DNA, 80 bp, synthetic construct
  source 1..80: mol_type = other DNA
ttatgagtagctcttatcctgggtctcattagtttttgataagcaattttctaacattctttcctctttcctatgcagtt

SEQ ID NO: 98533 - DNA, 80 bp, synthetic construct; identical to SEQ ID NO: 18644
  source 1..80: mol_type = other DNA

SEQ ID NO: 98534 - DNA, 80 bp, synthetic construct
  source 1..80: mol_type = other DNA
ttgagagcagcctggccaaaatggcgaaaccccatctctaccaaaaatacaaaactagcctagggcaatagtgcgtgcct

SEQ ID NO: 98535 - DNA, 80 bp, synthetic construct
  source 1..80: mol_type = other DNA
aaaatcagaagaagaaagtgtgtgtaaggtgagggtacttaaatgtaggtgttatttcctcaaagattgaggatatcaca

SEQ ID NO: 98536 - DNA, 80 bp, synthetic construct
  source 1..80: mol_type = other DNA
tcataaattacttagctagcttaaaaataacttattacagtaaaatgttttgtgttgttttgcaccattctttcacactc

SEQ ID NO: 98537 - DNA, 80 bp, synthetic construct; identical to SEQ ID NO: 18645
  source 1..80: mol_type = other DNA

SEQ ID NO: 98538 - DNA, 80 bp, synthetic construct
  source 1..80: mol_type = other DNA
tgtatatgctgatctcatcctacttttactttcattttgaatatggcggcattttctcattcaaataattaaaatttatt

SEQ ID NO: 98539 - DNA, 80 bp, synthetic construct
  source 1..80: mol_type = other DNA
atcttgtcttactgcaacctctgcctcccaggttccagcaattttcccacctcagcctcccgagtagctgggattatggg

SEQ ID NO: 98540 - DNA, 80 bp, synthetic construct
  source 1..80: mol_type = other DNA
atttatagttttttaatgtttgagttactggggcttaaaaatggatagatcactatttgttgaattaggcttttcattat

SEQ ID NO: 98541 - DNA, 80 bp, synthetic construct
  source 1..80: mol_type = other DNA
aagaagataattgaatactgcattttttccagatattaaatttggcctctaattaaggaaccaaaggggaatttagaaac

SEQ ID NO: 98542 - DNA, 80 bp, synthetic construct; identical to SEQ ID NO: 18646
  source 1..80: mol_type = other DNA

SEQ ID NO: 98543 - DNA, 80 bp, synthetic construct
  source 1..80: mol_type = other DNA
tcgccttacacgggaagtgcaaggggccagggaacttcctcccctagctaagggaagccatgagggaatgtgccacgagg

SEQ ID NO: 98544 - DNA, 80 bp, synthetic construct
  source 1..80: mol_type = other DNA
tttttcgtactccagtggcacctgaaacaccagtgagacagaactgttaactcccctggaacaggggctgaagccaggga

SEQ ID NO: 98545 - DNA, 80 bp, synthetic construct; identical to SEQ ID NO: 18647
  source 1..80: mol_type = other DNA

SEQ ID NO: 98546 - DNA, 80 bp, synthetic construct
  source 1..80: mol_type = other DNA
tgctggctctgaagagagcagcagatctcccaggacattgctcgagctctgctaagggacagactgcctcctcaagtggg

SEQ ID NO: 98547 - DNA, 80 bp, synthetic construct
  source 1..80: mol_type = other DNA
ctggtgatatccagacaaacagggtctggagtggacctccagcaaattccagcagacctgcagcagaggggcctgactgt

SEQ ID NO: 98548 - DNA, 80 bp, synthetic construct
  source 1..80: mol_type = other DNA
accagaatgccttttctcttccaaagaatcacaactcctcgccagcaagggaacaaaactggacagagaataataaactc

SEQ ID NO: 98549 - DNA, 80 bp, synthetic construct; identical to SEQ ID NO: 18648
  source 1..80: mol_type = other DNA

SEQ ID NO: 98550 - DNA, 80 bp, synthetic construct
  source 1..80: mol_type = other DNA
caacctagcacgacaggccaacattccaattcaggaaatacagagaacaccacaaagatactcctcaagaagagcaaccc

SEQ ID NO: 98551 - DNA, 80 bp, synthetic construct
  source 1..80: mol_type = other DNA
attcaacattcttaaagaaaggaattttcaacccagaattttgtatccagccaaactaagcttcataagtgaatgagaaa

SEQ ID NO: 98552 - DNA, 80 bp, synthetic construct; identical to SEQ ID NO: 18649
  source 1..80: mol_type = other DNA

SEQ ID NO: 98553 - DNA, 80 bp, synthetic construct
  source 1..80: mol_type = other DNA
gaaagcaaaaaaaaaaaaaagcaggggttgcaatcctagtctctgataaaacagactttaaaccaacgaagatcaaaaaa

SEQ ID NO: 98554 - DNA, 80 bp, synthetic construct
  source 1..80: mol_type = other DNA
ctttaacaccccactgtcaatatttgacagatcaatgagacagaaaattaacaaggatattcaggacttgaactcagctc

SEQ ID NO: 98555 - DNA, 80 bp, synthetic construct
  source 1..80: mol_type = other DNA
gtctctgagacctcagtgcaatcaaattagaactcaggattaagaaactcactcaaacctgcacaactgcatggaaactg

SEQ ID NO: 98556 - DNA, 80 bp, synthetic construct; identical to SEQ ID NO: 18650
  source 1..80: mol_type = other DNA

SEQ ID NO: 98557 - DNA, 80 bp, synthetic construct
  source 1..80: mol_type = other DNA
agaagaatcaaatagacacaataaaaaaatgctaaaggggatatcaccactgatcccacagaaatacaaactaccatcag

SEQ ID NO: 98558 - DNA, 80 bp, synthetic construct
  source 1..80: mol_type = other DNA
ccaaccaaaaaaatcccaggagcagatggattcacagctgaattctgccagaggtacaaggaggagctggtactattcct

SEQ ID NO: 98559 - DNA, 80 bp, synthetic construct
  source 1..80: mol_type = other DNA
tactggcaaactgaatccatagcacatcaaaaagcttatccaccacaaacaagtcggcttcatccctgggatgcaaggct

SEQ ID NO: 98560 - DNA, 80 bp, synthetic construct
  source 1..80: mol_type = other DNA
tctcaaaataataagagctatttatggcagacccacagccaatatcatactgaatcagcaaaagctggaagcattccctt

SEQ ID NO: 98561 - DNA, 80 bp, synthetic construct; identical to SEQ ID NO: 18651
  source 1..80: mol_type = other DNA

SEQ ID NO: 98562 - DNA, 80 bp, synthetic construct
  source 1..80: mol_type = other DNA
tcactgctcaaggaaataaagaggacacaaacaaatggaagaacattccatgttcatggataggaagaatcaatcttgtg

SEQ ID NO: 98563 - DNA, 80 bp, synthetic construct
  source 1..80: mol_type = other DNA
ggaggcatcatgctacctgacttcaaactatactacaaggctacaataaccaaaacagcatggtattggtaccaaaacag

SEQ ID NO: 98564 - DNA, 80 bp, synthetic construct
  source 1..80: mol_type = other DNA
tacaccttatacaaaaattaactcaagatggattaaagagttaaatgtaagacctaaagccatgaaaaccctagaagaaa

SEQ ID NO: 98565 - DNA, 80 bp, synthetic construct; identical to SEQ ID NO: 18652
  source 1..80: mol_type = other DNA

SEQ ID NO: 98566 - DNA, 80 bp, synthetic construct
  source 1..80: mol_type = other DNA
tctcatggccgttagaatggcgattattaaaacgtcaggaaacaacagatgctggagaggatgtggagaataggaatgct

SEQ ID NO: 98567 - DNA, 80 bp, synthetic construct
  source 1..80: mol_type = other DNA
acacatatgcttattgcagcagtatttacaatagcaaagacttggaacccacccaaatgcgcatcaatgatagacaggat

SEQ ID NO: 98568 - DNA, 80 bp, synthetic construct
  source 1..80: mol_type = other DNA
gggaactgaacaatgagaacacatggacacagggaggggaacatcacacatcggggcctgtcggggttgggggttagagg

SEQ ID NO: 98569 - DNA, 80 bp, synthetic construct; identical to SEQ ID NO: 18653
  source 1..80: mol_type = other DNA

SEQ ID NO: 98570 - DNA, 80 bp, synthetic construct
  source 1..80: mol_type = other DNA
ttgattgtaccactgcacttcagcctggtgacagatcaagaccttgtctaaaaaaaaaacaaaaaggaaagaatatagcc

SEQ ID NO: 98571 - DNA, 80 bp, synthetic construct
  source 1..80: mol_type = other DNA
cagcctaggcaacatagtgacaccctgtttccaaaaattagccaagtgtggtggtgggcacctgtagtcctggttactag

SEQ ID NO: 98572 - DNA, 80 bp, synthetic construct
  source 1..80: mol_type = other DNA
atgcatcggtttttaaaatttaatgacatctgattctgattctttgaatactttcactgcttaagctgctgggttgggtt

SEQ ID NO: 98573 - DNA, 80 bp, synthetic construct
  source 1..80: mol_type = other DNA
ttaaggatttctgatttttgaaacaggttgcacaagaaacatgtataagattaaatattctgtaaaaggcttccctttat

SEQ ID NO: 98574 - DNA, 80 bp, synthetic construct; identical to SEQ ID NO: 18654
  source 1..80: mol_type = other DNA

SEQ ID NO: 98575 - DNA, 80 bp, synthetic construct
  source 1..80: mol_type = other DNA
taaacttacttcagtcattttgcatgcagcaaatgtttgccatggtgaaatgtgacttccatctcttaatttacacttat

SEQ ID NO: 98576 - DNA, 80 bp, synthetic construct
  source 1..80: mol_type = other DNA
ctaaggagaaaaaatcttaaattctagactagtattaccataagtctatcggtatcatttcgaagtgatttaccttcctt

SEQ ID NO: 98577 - DNA, 80 bp, synthetic construct; identical to SEQ ID NO: 18655
  source 1..80: mol_type = other DNA

SEQ ID NO: 98578 - DNA, 80 bp, synthetic construct
  source 1..80: mol_type = other DNA
tacttccacagtacttagtttgccttttaagacatatacgtgcaattcaattaagaatgaaaaacaaggccatgtgtggt

SEQ ID NO: 98579 - DNA, 80 bp, synthetic construct
  source 1..80: mol_type = other DNA
ctcagaaggctaaggcaggagaatcacttgaacctgggaagcagaggttgcagtgacggagatcatgccactgcactcca

SEQ ID NO: 98580 - DNA, 80 bp, synthetic construct
  source 1..80: mol_type = other DNA
taatgaaggctagcctttacagttgaatacaaattttaaatttcaggtcttgaaggctagagccattcctggtaataatg

SEQ ID NO: 98581 - DNA, 80 bp, synthetic construct; identical to SEQ ID NO: 18656
  source 1..80: mol_type = other DNA

SEQ ID NO: 98582 - DNA, 80 bp, synthetic construct
  source 1..80: mol_type = other DNA
gcaatatagagagtcctcaactcttaaaggaaaaaaaaaatgacatgaccttgagcaaataatttagcttctctattgta

SEQ ID NO: 98583 - DNA, 80 bp, synthetic construct
  source 1..80: mol_type = other DNA
acttgcttaggattacaaagtgattattggtggagaatgacgaagtcaaaactaaaaactgggtcctcacaagaagtacc

SEQ ID NO: 98584 - DNA, 80 bp, synthetic construct; identical to SEQ ID NO: 18657
  source 1..80: mol_type = other DNA

SEQ ID NO: 98585 - DNA, 80 bp, synthetic construct
  source 1..80: mol_type = other DNA
caataagatttgttttgttttcttgaccagataggatgcctgtgctctgtcagataaagaagtgatcatgtgatgcattt

SEQ ID NO: 98586 - DNA, 80 bp, synthetic construct
  source 1..80: mol_type = other DNA
ttgcattagtcttaatatcctctaatgttggagctagcactggatcctagaaattcagaataaaagtccaccttacccct

SEQ ID NO: 98587 - DNA, 80 bp, synthetic construct
  source 1..80: mol_type = other DNA
gtttcttgacttctagtcaaatgttctcgtagtaacaggtagctttcaccctttttttcttactgatgttgtgctagttc

SEQ ID NO: 98588 - DNA, 80 bp, synthetic construct; identical to SEQ ID NO: 18658
  source 1..80: mol_type = other DNA

SEQ ID NO: 98589 - DNA, 80 bp, synthetic construct
  source 1..80: mol_type = other DNA
cccctgatgtagtcatcttctaccaaacctcacctccagcattggggagcacacttcaacacgagtcatctaccaaacct

SEQ ID NO: 98590 - DNA, 80 bp, synthetic construct
  source 1..80: mol_type = other DNA
acctccagcattggggagcacacttcaacacgagtcatcttctaccaaacctcacctccagcattggggagcacacttca

SEQ ID NO: 98591 - DNA, 80 bp, synthetic construct
  source 1..80: mol_type = other DNA
cacgagtcatcttctaccaaacctctcctccagcactggggagcacacttcaacacgagtcatcttctaccaaacctcac

SEQ ID NO: 98592 - DNA, 80 bp, synthetic construct; identical to SEQ ID NO: 18659
  source 1..80: mol_type = other DNA

SEQ ID NO: 98593 - DNA, 80 bp, synthetic construct
  source 1..80: mol_type = other DNA
gagtcatcttctaccaaacctcacctccagcattggggagcacatttcaacacgagtcatcttctaccaaacctcacctc

SEQ ID NO: 98594 - DNA, 80 bp, synthetic construct
  source 1..80: mol_type = other DNA
acatttcaacacgagtcatcttctaccaaacctcacctccagcattggggagcacatttcaacacgagtcatcttctacc

SEQ ID NO: 98595 - DNA, 80 bp, synthetic construct
  source 1..80: mol_type = other DNA
aaacattgaaaccatatcagacataaaataggaaacttggtccatagcttaggtaaatattaagcaaagaactttgtctt

SEQ ID NO: 98596 - DNA, 80 bp, synthetic construct
  source 1..80: mol_type = other DNA
tgcatttgtacatagtaatgtgccaagttttatacaaaagcaggaaatatctctgctgctttcaaataattagaacaagg

SEQ ID NO: 98597 - DNA, 80 bp, synthetic construct; identical to SEQ ID NO: 18660
  source 1..80: mol_type = other DNA

SEQ ID NO: 98598 - DNA, 80 bp, synthetic construct
  source 1..80: mol_type = other DNA
tgactcagaggcaagttgcagaaaatattgtagacttagatgtagaaaagatatgagggggcaacgtaagaaactagaaa

SEQ ID NO: 98599 - DNA, 80 bp, synthetic construct
  source 1..80: mol_type = other DNA
aaagtagaaggattgtgtctctaggcctcagactcctttgcatttttctgtcctcaccctgcacatagtgaaaatcataa

SEQ ID NO: 98600 - DNA, 80 bp, synthetic construct
  source 1..80: mol_type = other DNA
ttcctgcttagctttttaaattaactggtgccaatctctcaaataagacaatttatgtaccagcagtaatcaactggaaa

SEQ ID NO: 98601 - DNA, 80 bp, synthetic construct; identical to SEQ ID NO: 18661
  source 1..80: mol_type = other DNA

SEQ ID NO: 98602 - DNA, 80 bp, synthetic construct
  source 1..80: mol_type = other DNA
caggtcaaagtagtatcttgtttagtttgcatttctttagttataaggagtccagaaataatcccatacccaggggaatt

SEQ ID NO: 98603 - DNA, 80 bp, synthetic construct
  source 1..80: mol_type = other DNA
aaaatgactccatttaaaaaatgactccatataagttctggaaaaaaatgagcacgttagaaaaataacagtagaggcca

SEQ ID NO: 98604 - DNA, 80 bp, synthetic construct
  source 1..80: mol_type = other DNA
cagatactcggaaggctgaggcaggagaatggcttgaacccagggggcggaggttgcagtgagccgagattgtgccactg

SEQ ID NO: 98605 - DNA, 80 bp, synthetic construct; identical to SEQ ID NO: 18662
  source 1..80: mol_type = other DNA

SEQ ID NO: 98606 - DNA, 80 bp, synthetic construct
  source 1..80: mol_type = other DNA
tgacaaattatggaaacaagtctgttagaacaaactaacaaaaaataacaacccattcaaaaaggtgggagatgcatcta

SEQ ID NO: 98607 - DNA, 80 bp, synthetic construct
  source 1..80: mol_type = other DNA
aaccaaaaacatattttgactttaggcatttatgcagataaatgtttcgctcttaacccacttggaattcaaagagacta

SEQ ID NO: 98608 - DNA, 80 bp, synthetic construct; identical to SEQ ID NO: 18663
  source 1..80: mol_type = other DNA

SEQ ID NO: 98609 - DNA, 80 bp, synthetic construct
  source 1..80: mol_type = other DNA
tcttcatctctgggtcaactgatacttatttttttttccagtagcaaaatatttattgagtgtaactgtgtaccaggtgc

SEQ ID NO: 98610 - DNA, 80 bp, synthetic construct
  source 1..80: mol_type = other DNA
tgaagaaaaataatttaggaggaaaaagggggtgggcttttactgttctacatagggaggtcaaagaaggccttgctaat

SEQ ID NO: 98611 - DNA, 80 bp, synthetic construct
  source 1..80: mol_type = other DNA
ctcacctcccagaaattcactcaccatgttcatgtccccaagatctttggggcaaatagaaatttctaaacagtatttca

SEQ ID NO: 98612 - DNA, 80 bp, synthetic construct; identical to SEQ ID NO: 18664
  source 1..80: mol_type = other DNA

SEQ ID NO: 98613 - DNA, 80 bp, synthetic construct
  source 1..80: mol_type = other DNA
tacaggaatataaaattttatttccttggaataaaattttaatttataatataggagagatattactattaaggctcttg

SEQ ID NO: 98614 - DNA, 80 bp, synthetic construct
  source 1..80: mol_type = other DNA
aatgggatactgctctttctttttatgtgctcttagataagaactctttctactgtgtcttataaactctgtcataccat

SEQ ID NO: 98615 - DNA, 80 bp, synthetic construct
  source 1..80: mol_type = other DNA
ttcaaaaagatacatatgtacttttctatttatgagtatacctgggtaaatatagaacataggaaaatgtactttgatgt

SEQ ID NO: 98616 - DNA, 80 bp, synthetic construct; identical to SEQ ID NO: 18665
  source 1..80: mol_type = other DNA

SEQ ID NO: 98617 - DNA, 80 bp, synthetic construct
  source 1..80: mol_type = other DNA
taggtatgcattgtattacaaaacaatgatatcttttggaaaactttcagttaaactagacaaataaggactttggctta

SEQ ID NO: 98618 - DNA, 80 bp, synthetic construct
  source 1..80: mol_type = other DNA
gaactcctggactcaagttattctcctgccttagcctcccaaagtgctgggattataggcatgagccactgtgcctggcc

SEQ ID NO: 98619 - DNA, 80 bp, synthetic construct
  source 1..80: mol_type = other DNA
tgcctgtaatccttacactttgggaggctgaggcaggaggatcagttgaggccagtagtttgagaacggcctggacaaca

SEQ ID NO: 98620 - DNA, 80 bp, synthetic construct; identical to SEQ ID NO: 18666
  source 1..80: mol_type = other DNA

SEQ ID NO: 98621 - DNA, 80 bp, synthetic construct
  source 1..80: mol_type = other DNA
acctggtgaaaatgtgtaggtccatgtatccaccaccacaagcaattgcacccatatccctccagcctctctacccctgt

SEQ ID NO: 98622 - DNA, 80 bp, synthetic construct
  source 1..80: mol_type = other DNA
tttttattgctgactagtattttgtagcatgaatgtactacagtttctttggccagacacatgttgaagaatatcaggac

SEQ ID NO: 98623 - DNA, 80 bp, synthetic construct
  source 1..80: mol_type = other DNA
tattttgcattttctttgataaaagactgcaaaagtattttccagagtggttgaatcattttaaatttccgccagcaata

SEQ ID NO: 98624 - DNA, 80 bp, synthetic construct; identical to SEQ ID NO: 18667
  source 1..80: mol_type = other DNA

SEQ ID NO: 98625 - DNA, 80 bp, synthetic construct
  source 1..80: mol_type = other DNA
tcttggcctgtagcttctttcttcatcttcttcacatcatgtttctcatccaaaagtttttaattttcataaagtccagt

SEQ ID NO: 98626 - DNA, 80 bp, synthetic construct
  source 1..80: mol_type = other DNA
ttaagtttatttttgtacaaagtttgagatttgggttgaggtttttttagggggtgctgagttgggcaccatggatgttc

SEQ ID NO: 98627 - DNA, 80 bp, synthetic construct
  source 1..80: mol_type = other DNA
agaaaagatgagacaaatagatgtagaatttaaactaattatattaataattgcattaaatgtcagtgctctaagcagcc

SEQ ID NO: 98628 - DNA, 80 bp, synthetic construct
  source 1..80: mol_type = other DNA
aggtcctggatggaactgaggttaactgaggataattttaagatttgtactatgggtgattaggtggttgataacacaat

SEQ ID NO: 98629 - DNA, 80 bp, synthetic construct; identical to SEQ ID NO: 18668
  source 1..80: mol_type = other DNA

SEQ ID NO: 98630 - DNA, 80 bp, synthetic construct
  source 1..80: mol_type = other DNA
atggtggcacatgcctgtaatcccagctactcgggaggctgaggcaggagaatcgcttgaacccgggagacggaggttgc

SEQ ID NO: 98631 - DNA, 80 bp, synthetic construct
  source 1..80: mol_type = other DNA
atcttcagaaaggccaaggtctgccaaaattcttctattttctattctagtttcctcttgcgaggcaaaacagtcttaga

SEQ ID NO: 98632 - DNA, 80 bp, synthetic construct
  source 1..80: mol_type = other DNA
cttttaggagcaccttgacttaatagccttggagtcctttactttctagacaagttcatgcttgccttagaaatgtatgt

SEQ ID NO: 98633 - DNA, 80 bp, synthetic construct
  source 1..80: mol_type = other DNA
taggctgacagttaatttgagtagataagtaataacatgagttgagtacaagagaaaactactgcccaagtcctggatag

SEQ ID NO: 98634 - DNA, 80 bp, synthetic construct; identical to SEQ ID NO: 18669
  source 1..80: mol_type = other DNA

SEQ ID NO: 98635 - DNA, 80 bp, synthetic construct
  source 1..80: mol_type = other DNA
gtggaagagatcctagagagggagagaacctaagatggaaactgcagatttttataaattcatctcagaagtgacatgcc

SEQ ID NO: 98636 - DNA, 80 bp, synthetic construct
  source 1..80: mol_type = other DNA
cagtgtcagagattattggggtgatcttggaggctggctgccatagttatgacttagtgtcaattagaaaacaaatccta

SEQ ID NO: 98637 - DNA, 80 bp, synthetic construct; identical to SEQ ID NO: 18670
  source 1..80: mol_type = other DNA

SEQ ID NO: 98638 - DNA, 80 bp, synthetic construct
  source 1..80: mol_type = other DNA
ttagctgcatgaagtttccccagggccatattattttttcttctcttgcttctgagcacactattcttctgctttttact

SEQ ID NO: 98639 - DNA, 80 bp, synthetic construct
  source 1..80: mol_type = other DNA
aatctcttccaagaagttttctctaatgctcctaatctgagttagttgtctcttctgattttcatggcaccctgtgtatt

SEQ ID NO: 98640 - DNA, 80 bp, synthetic construct
  source 1..80: mol_type = other DNA
tttggaactgtgtcctggatccaccacttattcatgtgactggacaatttactccttgtctacctttcttcacttataaa

SEQ ID NO: 98641 - DNA, 80 bp, synthetic construct
  source 1..80: mol_type = other DNA
ccaaactttttatataggttattttattttcacaacaactctatgtagtgggtactactatgaatgtgctatttctctta

SEQ ID NO: 98642 - DNA, 80 bp, synthetic construct; identical to SEQ ID NO: 18671
  source 1..80: mol_type = other DNA

SEQ ID NO: 98643 - DNA, 80 bp, synthetic construct
  source 1..80: mol_type = other DNA
agataatcatgaagacagaattttggtagtgaggtagtgagagaaataaaatagaatcatgaagtataaggtaatgactt

SEQ ID NO: 98644 - DNA, 80 bp, synthetic construct
  source 1..80: mol_type = other DNA
tgttcagaatattctgccttcttaccgtatcatcactttagcccaaatgctgggaaaaagagaaacaaaagtcttctgtc

SEQ ID NO: 98645 - DNA, 80 bp, synthetic construct
  source 1..80: mol_type = other DNA
ggaaggtttgaaagaaggcctttttgaacctaagaagacaagaaattgaactgttatcacaatattgctatttaagaaag

SEQ ID NO: 98646 - DNA, 80 bp, synthetic construct; identical to SEQ ID NO: 18672
  source 1..80: mol_type = other DNA

SEQ ID NO: 98647 - DNA, 80 bp, synthetic construct
  source 1..80: mol_type = other DNA
ggcatgcatgtttaataaagcttccttggggactctgatatatgctgcctcccaaataaattacaagccatatcaggaaa

SEQ ID NO: 98648 - DNA, 80 bp, synthetic construct
  source 1..80: mol_type = other DNA
gaggcaaagaggagggaggctagagttgatgaagacatctttcttttatgtatgatattgtctatgttgggccctgttaa

SEQ ID NO: 98649 - DNA, 80 bp, synthetic construct
  source 1..80: mol_type = other DNA
tttggcttcatatatataaagattggggtaaggcgatctgccttgcctttcttctactgtgtcaaagaatttatgatcaa

SEQ ID NO: 98650 - DNA, 80 bp, synthetic construct
  source 1..80: mol_type = other DNA
gtattcataataaatagaaaatgaaaggagcttaaaaagcaaattgaacacatagttatcagagaaaacaattttaaaat

SEQ ID NO: 98651 - DNA, 80 bp, synthetic construct; identical to SEQ ID NO: 18673
  source 1..80: mol_type = other DNA

SEQ ID NO: 98652 - DNA, 80 bp, synthetic construct
  source 1..80: mol_type = other DNA
aagggtactaatcatccttttcatgagggatgtgttgaaactaaattgtgcctgaagacccttatgttacctttacatat

SEQ ID NO: 98653 - DNA, 80 bp, synthetic construct
  source 1..80: mol_type = other DNA
atctagttctgtttcagaattggaagctttaaggattatgaaattctgggaacttggagtaggtccacctagaagtagaa

SEQ ID NO: 98654 - DNA, 80 bp, synthetic construct
  source 1..80: mol_type = other DNA
atagaattatatatatgggtaaagggtaccagttagattcccattggcaaaaacctggtgattttcattctgtggtatag

SEQ ID NO: 98655 - DNA, 80 bp, synthetic construct; identical to SEQ ID NO: 18674
  source 1..80: mol_type = other DNA

SEQ ID NO: 98656 - DNA, 80 bp, synthetic construct
  source 1..80: mol_type = other DNA
ggagtcttgctctgttgcccaggctggagtgcagtggcaccatctccactcactgcaagctctgcctcctgggttcacgc

SEQ ID NO: 98657 - DNA, 80 bp, synthetic construct
  source 1..80: mol_type = other DNA
tttttgtcttatttcagttagaacaggatttttttctttggattcagaaggtaactttcctactgtacttaggataaatt

SEQ ID NO: 98658 - DNA, 80 bp, synthetic construct
  source 1..80: mol_type = other DNA
cccttggagctgcctcccagagctggtatatcagacatcctcaagtaaacctggacccaattttagaaatcttggctaat

SEQ ID NO: 98659 - DNA, 80 bp, synthetic construct
  source 1..80: mol_type = other DNA
atcagacctaatcaaattgatatatctctcattttctttgaaaattttgaccaagatatcaattaataaatccactttga

SEQ ID NO: 98660 - DNA, 80 bp, synthetic construct; identical to SEQ ID NO: 18675
  source 1..80: mol_type = other DNA

SEQ ID NO: 98661 - DNA, 80 bp, synthetic construct
  source 1..80: mol_type = other DNA
ttccacactcaaaaaatatttctaatgtattaagtcacagtttactaaaatagctaagttttctgattcataaaatgaat

SEQ ID NO: 98662 - DNA, 80 bp, synthetic construct
  source 1..80: mol_type = other DNA
ttattgtcagtttagtgttcagggcaccaagggtacatttcatactaagattgtgcaagtgagagtaaatgcctccttaa

SEQ ID NO: 98663 - DNA, 80 bp, synthetic construct; identical to SEQ ID NO: 18676
  source 1..80: mol_type = other DNA

SEQ ID NO: 98664 - DNA, 80 bp, synthetic construct
  source 1..80: mol_type = other DNA
cccatacctcatacccccagacaccatcctaggcctccagaacttctgacctactggcttcaaattggggttctcacacc

SEQ ID NO: 98665 - DNA, 80 bp, synthetic construct
  source 1..80: mol_type = other DNA
gccaggagttcaagaacagcctggccaacatggcaaaaccccgtctctactaaaaatacaaaaattatctgggtgtggtg

SEQ ID NO: 98666 - DNA, 80 bp, synthetic construct
  source 1..80: mol_type = other DNA
cacacttaccggtttattacaaaggatattgcaaaggatacagatgaggagatgcgtagggtgaggtatgggagcagggg

SEQ ID NO: 98667 - DNA, 80 bp, synthetic construct; identical to SEQ ID NO: 18677
  source 1..80: mol_type = other DNA

SEQ ID NO: 98668 - DNA, 80 bp, synthetic construct
  source 1..80: mol_type = other DNA
aactcctgagttatatgcatacaaccccaaagttgtttgctgtctggagctgtgcctacacccgcctggcatattcttga

SEQ ID NO: 98669 - DNA, 80 bp, synthetic construct
  source 1..80: mol_type = other DNA
agtgctagtgatgtgataggaagccagacacaattgaactagctatctctatattagtgacttatcctaaaacagagttt

SEQ ID NO: 98670 - DNA, 80 bp, synthetic construct
  source 1..80: mol_type = other DNA
atcagtttcttagcatatgatctttcatcttttggaagatctctgccccttctcctttcaaagcacagcctccttctcac

SEQ ID NO: 98671 - DNA, 80 bp, synthetic construct; identical to SEQ ID NO: 18678
  source 1..80: mol_type = other DNA

SEQ ID NO: 98672 - DNA, 80 bp, synthetic construct
  source 1..80: mol_type = other DNA
gcagataacacatatttttagaggatttagagtatatataactaagaaggttccctttatttgttattttttgggaggga

SEQ ID NO: 98673 - DNA, 80 bp, synthetic construct
  source 1..80: mol_type = other DNA
gatggggtttcaccatgttggccaggctggtcttgaactcctgatctcaggtgatccacctgcctcagccttccaaggtg

SEQ ID NO: 98674 - DNA, 80 bp, synthetic construct
  source 1..80: mol_type = other DNA
tgtgccaggtagttttaaacattggggatactattgaataagatagacaaagcccaagccttcctgcatcttgcttgcta

SEQ ID NO: 98675 - DNA, 80 bp, synthetic construct
  source 1..80: mol_type = other DNA
ttaggcaagatgtttagacaaggctttgcttaggaggtgctatttgaggagatatgtgaataatggagtggggtgagtca

SEQ ID NO: 98676 - DNA, 80 bp, synthetic construct; identical to SEQ ID NO: 18679
  source 1..80: mol_type = other DNA

SEQ ID NO: 98677 - DNA, 80 bp, synthetic construct
  source 1..80: mol_type = other DNA
ccagtttgtaggatgcttttgcagtgggacagaaaagagataagaattgctttgactctagcaatggtacaggtaatgaa

SEQ ID NO: 98678 - DNA, 80 bp, synthetic construct
  source 1..80: mol_type = other DNA
tggatacaaggagtgatttaatgatatggtaaagactagggagaagcagtcgtttttggggggtggtagaggatgattaa

SEQ ID NO: 98679 - DNA, 80 bp, synthetic construct; identical to SEQ ID NO: 18680
  source 1..80: mol_type = other DNA

SEQ ID NO: 98680 - DNA, 80 bp, synthetic construct
  source 1..80: mol_type = other DNA
attagtatctctgctctacagttgagaagcttattgagggtcatgtagctacaggtggccaggatttgaacccatgtact

SEQ ID NO: 98681 - DNA, 80 bp, synthetic construct
  source 1..80: mol_type = other DNA
tgaaaaatgccaccttaatccttggaagagaaatttacttttagtataatcctattgggtgaatctgaagcacaactaga

SEQ ID NO: 98682 - DNA, 80 bp, synthetic construct
  source 1..80: mol_type = other DNA
ggtagtaggccactcttgaatatatgtgggtttatactcataccattttagttaaagattttcaattcatccatggctag

SEQ ID NO: 98683 - DNA, 80 bp, synthetic construct; identical to SEQ ID NO: 18681
  source 1..80: mol_type = other DNA

SEQ ID NO: 98684 - DNA, 80 bp, synthetic construct
  source 1..80: mol_type = other DNA
tgcagtgatatgtgtaatgactatatgattatcatgcctctttttattcacagcttatcaagtacctacttgacatgtag

SEQ ID NO: 98685 - DNA, 80 bp, synthetic construct
  source 1..80: mol_type = other DNA
ctacttgaagtcacttcatgtgatgtatcatgtaatcctgcaaaatgagtgctgtattcctgtttttcaagtaatgaaac

SEQ ID NO: 98686 - DNA, 80 bp, synthetic construct
  source 1..80: mol_type = other DNA
aggataaataagaaaaatagtatttagtaatgtattgcttaggcatgagtaacttcctatttgaaagaactgttgcgtaa

SEQ ID NO: 98687 - DNA, 80 bp, synthetic construct; identical to SEQ ID NO: 18682
  source 1..80: mol_type = other DNA

SEQ ID NO: 98688 - DNA, 80 bp, synthetic construct
  source 1..80: mol_type = other DNA
tttccttaatgctgagttccaattcagttttttctcacctactgagtaggttaccatttgtgtatctgccttccaagctt

SEQ ID NO: 98689 - DNA, 80 bp, synthetic construct
  source 1..80: mol_type = other DNA
cgttttagtggggttttatgagagagagttaatgtctgcattcatttggcatctttaaccaatgttgtttatcttctgca

SEQ ID NO: 98690 - DNA, 80 bp, synthetic construct; identical to SEQ ID NO: 18683
  source 1..80: mol_type = other DNA

SEQ ID NO: 98691 - DNA, 80 bp, synthetic construct
  source 1..80: mol_type = other DNA
ttacatttaagtctttaattcatcttgagttaatttttgtataaggtttacagaaggggtctagtttcaattttctgcat

SEQ ID NO: 98692 - DNA, 80 bp, synthetic construct
  source 1..80: mol_type = other DNA
ctgttccattcgtctgtgtgtctgcttttgtactaataccatgctgttttggttactgtagccttgtagtatagtttgaa

SEQ ID NO: 98693 - DNA, 80 bp, synthetic construct
  source 1..80: mol_type = other DNA
agcattgaatctataaataactttgggctgtatggtcagtcttacaatattgattctttctatccataagcatggaatgt

SEQ ID NO: 98694 - DNA, 80 bp, synthetic construct
  source 1..80: mol_type = other DNA
attgttggtgtataggaatgctagcgattattgcacattgattttgtatctgagagtttgctgaagttgcttatcagctt

SEQ ID NO: 98695 - DNA, 80 bp, synthetic construct; identical to SEQ ID NO: 18684
  source 1..80: mol_type = other DNA

SEQ ID NO: 98696 - DNA, 80 bp, synthetic construct
  source 1..80: mol_type = other DNA
tgaagccagcttgatcatggtagataagctttttggtgtgtgctggatttggtttgccagtattttattgtggatttttg

SEQ ID NO: 98697 - DNA, 80 bp, synthetic construct
  source 1..80: mol_type = other DNA
gtagaattcagttgtgaatgcatctgatcctgggattttttttttttttttggttggtaggctatttattactgcctcaa

SEQ ID NO: 98698 - DNA, 80 bp, synthetic construct
  source 1..80: mol_type = other DNA
ggggtaagggtggtatctcccttgtcatttctgattgcgtttattccattcttctttctttccttctatattagtctagc

SEQ ID NO: 98699 - DNA, 80 bp, synthetic construct; identical to SEQ ID NO: 18685
  source 1..80: mol_type = other DNA

SEQ ID NO: 98700 - DNA, 80 bp, synthetic construct
  source 1..80: mol_type = other DNA
taatttgtatttttgtagtaattttccacttggtctacgttttccaatttattgatataaaattattcataataattccc

SEQ ID NO: 98701 - DNA, 80 bp, synthetic construct
  source 1..80: mol_type = other DNA
tcagtttcattaagttctgctcatgtcttcatttctttctctccactttcttcgttttttttctgtctttcctcctaact

SEQ ID NO: 98702 - DNA, 80 bp, synthetic construct
  source 1..80: mol_type = other DNA
ttttaaattgccactgtcaattgtgcctaaaattcatagtacttaccatgtcaaacaatatgattttgatatgtacctgg

SEQ ID NO: 98703 - DNA, 80 bp, synthetic construct
  source 1..80: mol_type = other DNA
ttgtcctcttaatcttcctctccagaataatcacactgcagcagatatgtaagcaaaatatatgttatgttgaccattca

SEQ ID NO: 98704 - DNA, 80 bp, synthetic construct; identical to SEQ ID NO: 18686
  source 1..80: mol_type = other DNA

SEQ ID NO: 98705 - DNA, 80 bp, synthetic construct
  source 1..80: mol_type = other DNA
aacacacagttgattagtgtgtgctggtgatgacgatgggaaaagaaaatgtaaacccaaatgtatctgaaacaggtctc

SEQ ID NO: 98706 - DNA, 80 bp, synthetic construct
  source 1..80: mol_type = other DNA
aaagagcaggtagaggaatcgtcaattatctatccatctcatgctgagtgaatcgacattttacataagataaggtgaac

SEQ ID NO: 98707 - DNA, 80 bp, synthetic construct
  source 1..80: mol_type = other DNA
gcaatcactaactgtgtgctgggcaatggcctaagtacttaagatttattttttcatttaatcttcataacagcccataa

SEQ ID NO: 98708 - DNA, 80 bp, synthetic construct; identical to SEQ ID NO: 18687
  source 1..80: mol_type = other DNA

SEQ ID NO: 98709 - DNA, 80 bp, synthetic construct
  source 1..80: mol_type = other DNA
cagtattctgtattagtgcaggggccattttccagagatgtcattttcatgctaacttgtacccaaagtgtttctggcat

SEQ ID NO: 98710 - DNA, 80 bp, synthetic construct
  source 1..80: mol_type = other DNA
ccctcatagagcttacattctggaggaggaacacaggcaatgaacaagtaaaccaagatgtaagatgattttagagtata

SEQ ID NO: 98711 - DNA, 80 bp, synthetic construct
  source 1..80: mol_type = other DNA
cattccaggcagaacaaacagcaagtgcagtggctgtagggcagatcaaacttagctggatttaggaacagaaagaaaga

SEQ ID NO: 98712 - DNA, 80 bp, synthetic construct; identical to SEQ ID NO: 18688
  source 1..80: mol_type = other DNA

SEQ ID NO: 98713 - DNA, 80 bp, synthetic construct
  source 1..80: mol_type = other DNA
ctagatgtaatgtggagctattctttgagatgggaaaataaatccagagctctgctttgttcttattaagtctgagattc

SEQ ID NO: 98714 - DNA, 80 bp, synthetic construct
  source 1..80: mol_type = other DNA
ctagaccagacactggtccttctaaaatcattgtgataatgggtcgcttttcttagtgtactggttaatatactacgtgt

SEQ ID NO: 98715 - DNA, 80 bp, synthetic construct
  source 1..80: mol_type = other DNA
ttattctgttaaataggggcagcacagaacgataatatttgtaatatctctgccttgagttatgcctgacatatttagta

SEQ ID NO: 98716 - DNA, 80 bp, synthetic construct
  source 1..80: mol_type = other DNA
gataacagtatttaatatcaataaattgttttttaagctggaatcaccttatggtctcaataccactataattattaaaa

SEQ ID NO: 98717 - DNA, 80 bp, synthetic construct; identical to SEQ ID NO: 18689
  source 1..80: mol_type = other DNA

SEQ ID NO: 98718 - DNA, 80 bp, synthetic construct
  source 1..80: mol_type = other DNA
aaaaaggttagtagatgattattttcaagagcatggactctgaaactaggctgactgggttcaaatcatgtttcttctac

SEQ ID NO: 98719 - DNA, 80 bp, synthetic construct
  source 1..80: mol_type = other DNA
cggaaacctctgtgaccggtggcgcccttgatcaatttttgctcaggcccaccgggctcatttcagccccttggtctgac

SEQ ID NO: 98720 - DNA, 80 bp, synthetic construct
  source 1..80: mol_type = other DNA
acaggtgccaactctctgtgaggctgcacctggaccagacacaccacaagcggtttccacagctggcactggggaacaat

SEQ ID NO: 98721 - DNA, 80 bp, synthetic construct
  source 1..80: mol_type = other DNA
cctgtttgtgttacagccctttcagcctcgccatttggtgggtcctgagttcttgtcctgcagccaggaagaatgaggta

SEQ ID NO: 98722 - DNA, 80 bp, synthetic construct; identical to SEQ ID NO: 18690
  source 1..80: mol_type = other DNA

SEQ ID NO: 98723 - DNA, 80 bp, synthetic construct
  source 1..80: mol_type = other DNA
ggccactagtgggcccagaaaaggtaccacaagtcctcactcctgtccgtgggactggcagcgcccacccccagccttca

SEQ ID NO: 98724 - DNA, 80 bp, synthetic construct
  source 1..80: mol_type = other DNA
cgcccaaagtctggagagggctgaggcggcagggggctggcgtgtcagcgctgccttgagcgtgcgcacatctggctggg

SEQ ID NO: 98725 - DNA, 80 bp, synthetic construct
  source 1..80: mol_type = other DNA
gggtccacagccacggtttgggtagctgcagctgcactggggagggtgggactcctacctgctccccagcccagagagca

SEQ ID NO: 98726 - DNA, 80 bp, synthetic construct; identical to SEQ ID NO: 18691
  source 1..80: mol_type = other DNA

SEQ ID NO: 98727 - DNA, 80 bp, synthetic construct
  source 1..80: mol_type = other DNA
tacttcctagtgcatatccacttggagctctttgaaagacagtaaaaggtcatgttcctccatgataatctttttcctga

SEQ ID NO: 98728 - DNA, 80 bp, synthetic construct
  source 1..80: mol_type = other DNA
tcaatcagaaactcttaagatagggccctcaaaaccttgttttaacaaccctccagctaagtctgatgtatgctaaagtt

SEQ ID NO: 98729 - DNA, 80 bp, synthetic construct
  source 1..80: mol_type = other DNA
ttttttataaactaaataaattacatattgcagtcattttacatataggtaatctacaagtttaccatttttcaacagag

SEQ ID NO: 98730 - DNA, 80 bp, synthetic construct; identical to SEQ ID NO: 18692
  source 1..80: mol_type = other DNA

SEQ ID NO: 98731 - DNA, 80 bp, synthetic construct
  source 1..80: mol_type = other DNA
ccaaacacctattttttaaaaaaactcatgcctacataatgaagcctccataaaaactcaaaaggacctggttctgggag

SEQ ID NO: 98732 - DNA, 80 bp, synthetic construct
  source 1..80: mol_type = other DNA
ggaaagaaaagagtggtagaaaagaggtttctgttaaaatgctacttaacagcattataattagagcgatttcatgattt

SEQ ID NO: 98733 - DNA, 80 bp, synthetic construct
  source 1..80: mol_type = other DNA
acaccctgcagaatgagtatgaactcatgagagacaggcatttggaccaagtaagaaaatcaagcacttcaccttctctc

SEQ ID NO: 98734 - DNA, 80 bp, synthetic construct
  source 1..80: mol_type = other DNA
cagtggcgcaatctcggctcactgcaacctccgcctcccaggttcaagtgattctcctgcctcagcctcccaggtagcta

SEQ ID NO: 98735 - DNA, 80 bp, synthetic construct; identical to SEQ ID NO: 18693
  source 1..80: mol_type = other DNA

SEQ ID NO: 98736 - DNA, 80 bp, synthetic construct
  source 1..80: mol_type = other DNA
aatagctgaagaaccttcttatcactggctttttctatgtagtagtgagctagatatcattttagtgtgaaaaaagcatg

SEQ ID NO: 98737 - DNA, 80 bp, synthetic construct
  source 1..80: mol_type = other DNA
gaacaatatacttttggctgggtgcagtggctcacgcctgtaatcctagcactttgggaggctgaggtgggcagatcgct

SEQ ID NO: 98738 - DNA, 80 bp, synthetic construct
  source 1..80: mol_type = other DNA
gtgagctgagatcacaccactgtgctccaacctgggtaacagagcaagaccttgtctcaaaaaaattttgttaattaaaa

SEQ ID NO: 98739 - DNA, 80 bp, synthetic construct; identical to SEQ ID NO: 18694
  source 1..80: mol_type = other DNA

SEQ ID NO: 98740 - DNA, 80 bp, synthetic construct
  source 1..80: mol_type = other DNA
atacaccacattatgcttatcattcataaagtgataaacatttgggttgtttccactttttggctattatgaataatgtt

SEQ ID NO: 98741 - DNA, 80 bp, synthetic construct
  source 1..80: mol_type = other DNA
ttctaatttctctatatcctcaccaacttttttatcttttttttttaataatagccatcctagtgggtataaaatggcat

SEQ ID NO: 98742 - DNA, 80 bp, synthetic construct
  source 1..80: mol_type = other DNA
gctctgtcgcccaggctagagtgcagtggcacgatctcggctcacggcaatcttcgccttctgggttcaagcaattcttc

SEQ ID NO: 98743 - DNA, 80 bp, synthetic construct; identical to SEQ ID NO: 18695
  source 1..80: mol_type = other DNA

SEQ ID NO: 98744 - DNA, 80 bp, synthetic construct
  source 1..80: mol_type = other DNA
tgaatggttgagctcaagtaagccacccaccttggcctcccaaagtgctaggattacaggcatgagccaccatgcccaga

SEQ ID NO: 98745 - DNA, 80 bp, synthetic construct
  source 1..80: mol_type = other DNA
agttttttattttgatgatgtccaatttatgtagttgttttcttgttattgatgctttagtgtcatatctaagaaaccag

SEQ ID NO: 98746 - DNA, 80 bp, synthetic construct; identical to SEQ ID NO: 18696
  source 1..80: mol_type = other DNA

SEQ ID NO: 98747 - DNA, 80 bp, synthetic construct
  source 1..80: mol_type = other DNA
tacttaaattaggctataaagttcatacaaataaagaaaatctgacattttaaagtcacagggaatcattttcagatctt

SEQ ID NO: 98748 - DNA, 80 bp, synthetic construct
  source 1..80: mol_type = other DNA
tcttacatgctcttccagtcaccatagcctccttaccaccaccaccaagtgtgttcaatattattttatctaatagtttg

SEQ ID NO: 98749 - DNA, 80 bp, synthetic construct
  source 1..80: mol_type = other DNA
tttgttctttaaacacactttgggttaaacacttcatgtagactttcaaactgagctcagtatggaaagaaataactctg

SEQ ID NO: 98750 - DNA, 80 bp, synthetic construct; identical to SEQ ID NO: 18697
  source 1..80: mol_type = other DNA

SEQ ID NO: 98751 - DNA, 80 bp, synthetic construct
  source 1..80: mol_type = other DNA
attatgaaattacccatattcatagttttttataaagttaataaataatattttatccctgtaataagcaggtatttgta

SEQ ID NO: 98752 - DNA, 80 bp, synthetic construct
  source 1..80: mol_type = other DNA
gtagtagtaaaatatacttggtatgacacatttcatattgttctgtggaaagtgagttgaggggtatttttcccatttat

SEQ ID NO: 98753 - DNA, 80 bp, synthetic construct
  source 1..80: mol_type = other DNA
atagtgcttttactaaatgtctacttcttgcaattgcgtaatgtatactgaaacccttatagattgggggggataccggg

SEQ ID NO: 98754 - DNA, 80 bp, synthetic construct; identical to SEQ ID NO: 18698
  source 1..80: mol_type = other DNA

SEQ ID NO: 98755 - DNA, 80 bp, synthetic construct
  source 1..80: mol_type = other DNA
ctgttcttcctcagacattcaaacgtgttttgatcaaagaagaggagtatgattctattatagtattctataactcggtc

SEQ ID NO: 98756 - DNA, 80 bp, synthetic construct
  source 1..80: mol_type = other DNA
tacctcacattcctcgaagcccttacaagtttcctagttcacccttacggattcctggagggaacatctatatttcaccc

SEQ ID NO: 98757 - DNA, 80 bp, synthetic construct; identical to SEQ ID NO: 18699
  source 1..80: mol_type = other DNA

SEQ ID NO: 98758 - DNA, 80 bp, synthetic construct; identical to SEQ ID NO: 18700
  source 1..80: mol_type = other DNA

SEQ ID NO: 98759 - DNA, 80 bp, synthetic construct
  source 1..80: mol_type = other DNA
aaaagaaaatctatttacttggatgggtttacagatttagttatcagctttcctgactgttaggtatcttcttttgagaa

SEQ ID NO: 98760 - DNA, 80 bp, synthetic construct; identical to SEQ ID NO: 18701
  source 1..80: mol_type = other DNA

SEQ ID NO: 98761 - DNA, 80 bp, synthetic construct
  source 1..80: mol_type = other DNA
ttatcttccacatccaaccacaagtgctctctagctttgaagtgcttcagttgactaattatatgttatcatgggctatt

SEQ ID NO: 98762 - DNA, 80 bp, synthetic construct
  source 1..80: mol_type = other DNA
ctagtatagttaatgtagtctcatctcagaaattatcagcccatatggttgtacctaatgggcaagaaaagggggcatat

SEQ ID NO: 98763 - DNA, 80 bp, synthetic construct; identical to SEQ ID NO: 18702
  source 1..80: mol_type = other DNA

SEQ ID NO: 98764 - DNA, 80 bp, synthetic construct
  source 1..80: mol_type = other DNA
ttctgaacatcctaactaataaatcattgaccaggcattaggagagcatcttaacactctacccagtacatttaggtact

SEQ ID NO: 98765 - DNA, 80 bp, synthetic construct
  source 1..80: mol_type = other DNA
ttccatgttcatgttttcaaatctttgtcgagtcatgtcaggctaatgatgttcttcagctttattataaagaacataaa

SEQ ID NO: 98766 - DNA, 80 bp, synthetic construct
  source 1..80: mol_type = other DNA
atgaaagaaatttgataacttacccattgatttatgaagaactaagtaggggtaaccttgaaacttgcctttgccctccc

SEQ ID NO: 98767 - DNA, 80 bp, synthetic construct; identical to SEQ ID NO: 18703
  source 1..80: mol_type = other DNA

SEQ ID NO: 98768 - DNA, 80 bp, synthetic construct
  source 1..80: mol_type = other DNA
tgcattgtaagtataaaagaaattaaagctttctataatttgaatttccaaatgcagttattcaaacacctcatccaggc

SEQ ID NO: 98769 - DNA, 80 bp, synthetic construct
  source 1..80: mol_type = other DNA
tacgtgagctgtttttgctcacaacatttctatcaccaaatgtgtgagatttttttctcacccaaatctattcttcaact

SEQ ID NO: 98770 - DNA, 80 bp, synthetic construct
  source 1..80: mol_type = other DNA
aatacgaagttggggggttccgatagtgcctcttccttacagtttgatccactgccagaactactcacaaaactctggaa

SEQ ID NO: 98771 - DNA, 80 bp, synthetic construct
  source 1..80: mol_type = other DNA
agttggggtgcaccaccttcctagcacttagacatgtttaccaactccaaagatctcccaaccttattgttgaggggttt

SEQ ID NO: 98772 - DNA, 80 bp, synthetic construct; identical to SEQ ID NO: 18704
  source 1..80: mol_type = other DNA

SEQ ID NO: 98773 - DNA, 80 bp, synthetic construct
  source 1..80: mol_type = other DNA
attttgaaattcactcattatgagtgtgatttgaaatgagatactccaaaatgtaagcccgatatccaaatgtcaccagc

SEQ ID NO: 98774 - DNA, 80 bp, synthetic construct
  source 1..80: mol_type = other DNA
ggaaagctttgctttgaaacatttattctaggctgcaaatccacaaccctagttggccttccattaaagtcactaattca

SEQ ID NO: 98775 - DNA, 80 bp, synthetic construct
  source 1..80: mol_type = other DNA
ccacaaccctagttggccttccattaaagtcactaattcagcagtcccatattcaatatgcattactgttaatatgttgc

SEQ ID NO: 98776 - DNA, 80 bp, synthetic construct
  source 1..80: mol_type = other DNA
ccaccatgtccagctaatttttaaattttttgtagagacagggttttctatgttggccagattggtattgaactcctggc

SEQ ID NO: 98777 - DNA, 80 bp, synthetic construct; identical to SEQ ID NO: 18705
  source 1..80: mol_type = other DNA

SEQ ID NO: 98778 - DNA, 80 bp, synthetic construct
  source 1..80: mol_type = other DNA
ggaggcagggaaataaagagcaagagagaggtcacagtcttattgtaatctaattctggaaatgacagcccattactttt

SEQ ID NO: 98779 - DNA, 80 bp, synthetic construct
  source 1..80: mol_type = other DNA
tttatatgccagatgaccaaatattaaaatgtgtgttacaaatagttcacgatgggctcagctgtcagactttacaaagg

SEQ ID NO: 98780 - DNA, 80 bp, synthetic construct; identical to SEQ ID NO: 18706
  source 1..80: mol_type = other DNA

SEQ ID NO: 98781 - DNA, 80 bp, synthetic construct
  source 1..80: mol_type = other DNA
aacacatcatctcttatcaaattcttgtgaccttccttctggttgtataatagcctaaaaaacaaaaaaaggacaaaagc

SEQ ID NO: 98782 - DNA, 80 bp, synthetic construct
  source 1..80: mol_type = other DNA
gcatgggaaaagacaggaggatttacaaagagtgggtgtttaattggggatggaattaggtagttattctgatttttaga

SEQ ID NO: 98783 - DNA, 80 bp, synthetic construct
  source 1..80: mol_type = other DNA
tctgagaagttccagaaaataaatcagatggtatgtaacagcgaccgtgtgctcaaaagaagtgctgaaggaagcaaccc

SEQ ID NO: 98784 - DNA, 80 bp, synthetic construct; identical to SEQ ID NO: 18707
  source 1..80: mol_type = other DNA

SEQ ID NO: 98785 - DNA, 80 bp, synthetic construct
  source 1..80: mol_type = other DNA
ctgtattttgtgagaaccactgaaaaaatacatagcatcataaatttgtgacatttatgttttagatggttagtttttaa

SEQ ID NO: 98786 - DNA, 80 bp, synthetic construct
  source 1..80: mol_type = other DNA
ttaatctgcagtaaacatctcccaggagagtccaaatttcagcagaaactggcagaaatgagtaagtacttttttcacct

SEQ ID NO: 98787 - DNA, 80 bp, synthetic construct
  source 1..80: mol_type = other DNA
aaatgaaggtcatttttaccctttctatgatctttcatgcaggaagactaagaagtgaaacattgcttgaccacattcaa

SEQ ID NO: 98788 - DNA, 80 bp, synthetic construct
  source 1..80: mol_type = other DNA
atttgcaaatcttaaaacaatttcaaacaaaagtttccattactggaaatcagaattttaataaagaacacttatgtcat

SEQ ID NO: 98789 - DNA, 80 bp, synthetic construct; identical to SEQ ID NO: 18708
  source 1..80: mol_type = other DNA

SEQ ID NO: 98790 - DNA, 80 bp, synthetic construct
  source 1..80: mol_type = other DNA
ttttttaaagtgtaattaaaactaaataactaaaacaaaattttctagttataaatgaatctctttttggattttatgtc

SEQ ID NO: 98791 - DNA, 80 bp, synthetic construct
  source 1..80: mol_type = other DNA
aacatgtatattttcttagagaagtgttcagttgctatagttagtacatttcccagtgacacacttagctatgatggcga

SEQ ID NO: 98792 - DNA, 80 bp, synthetic construct
  source 1..80: mol_type = other DNA
tgcccagaatggaagggcattccatttttccaaatgtgcttctttataaagaactcatgcctacctctaaaatcaagtta

SEQ ID NO: 98793 - DNA, 80 bp, synthetic construct
  source 1..80: mol_type = other DNA
caagaccagcctgggcaacatagcaagaccccatctttacaaaaaaatccaaaaattagccaggcctggtggcatgtgcc

SEQ ID NO: 98794 - DNA, 80 bp, synthetic construct; identical to SEQ ID NO: 18709
  source 1..80: mol_type = other DNA

SEQ ID NO: 98795 - DNA, 80 bp, synthetic construct
  source 1..80: mol_type = other DNA
gaatagtggcctacaaaatggggcatacctgaagtatgcaaagtcatcttttggggtacataaagtagaagttctattta

SEQ ID NO: 98796 - DNA, 80 bp, synthetic construct
  source 1..80: mol_type = other DNA
aaatttactcacagggatatatgatttttaaagatttggagaccactgtttttttggggggtggggagggaatttttttt

SEQ ID NO: 98797 - DNA, 80 bp, synthetic construct; identical to SEQ ID NO: 18710
  source 1..80: mol_type = other DNA

SEQ ID NO: 98798 - DNA, 80 bp, synthetic construct
  source 1..80: mol_type = other DNA
agaaatgaggatctcaggaccttggtggacactgtgtacacctctggattcattgtctctcacagatgtgactgtataac

SEQ ID NO: 98799 - DNA, 80 bp, synthetic construct
  source 1..80: mol_type = other DNA
aaagttgtagcagattgtttcctcttccaaagtaaaattgctgtgctttatggatagtaagaatggccctagagtgggag

SEQ ID NO: 98800 - DNA, 80 bp, synthetic construct
  source 1..80: mol_type = other DNA
aaatgtgtcctatctatcttccaaatgcaatttgattgactgcccattcaccaaaattatcctgaactcttctgcaaaaa

SEQ ID NO: 98801 - DNA, 80 bp, synthetic construct
  source 1..80: mol_type = other DNA
ctggaagcaaagtataaccatatgatactatcatactactgaaacagatttcatacctcagaatgtaaaagaacttactg

SEQ ID NO: 98802 - DNA, 80 bp, synthetic construct; identical to SEQ ID NO: 18711
  source 1..80: mol_type = other DNA

SEQ ID NO: 98803 - DNA, 80 bp, synthetic construct
  source 1..80: mol_type = other DNA
taattgcatctcaaaattattctgccctccttaatttgggaaggtttgtgttttctctggaatggtacatgtcttccatg

SEQ ID NO: 98804 - DNA, 80 bp, synthetic construct
  source 1..80: mol_type = other DNA
aagcttcaaattaaaacagctgcattagaaaaagaggcgcttctcccctcccctacacctaaaggtgtatttaaactatc

SEQ ID NO: 98805 - DNA, 80 bp, synthetic construct; identical to SEQ ID NO: 18712
  source 1..80: mol_type = other DNA

SEQ ID NO: 98806 - DNA, 80 bp, synthetic construct
  source 1..80: mol_type = other DNA
tgagatttcttaaataatgcttcagatattattgctttattgcttttttgtattggttaaaactgtacatttaaaattgc

SEQ ID NO: 98807 - DNA, 80 bp, synthetic construct
  source 1..80: mol_type = other DNA
tccattcctagcctttaaggggctctatatgctagagatttccaaatttatttcttcagccctgatcttttcacagaggt

SEQ ID NO: 98808 - DNA, 80 bp, synthetic construct
  source 1..80: mol_type = other DNA
ttaattcttgtctggaccactgctaaagacttctaaccagtctccctgttccctttctttctttactgtcaaactccaca

SEQ ID NO: 98809 - DNA, 80 bp, synthetic construct; identical to SEQ ID NO: 18713
  source 1..80: mol_type = other DNA

SEQ ID NO: 98810 - DNA, 80 bp, synthetic construct
  source 1..80: mol_type = other DNA
ctccccatccctagccactccccaccccagattgtaaccatcagcctatctattcttatttaccactttaggtctagcac

SEQ ID NO: 98811 - DNA, 80 bp, synthetic construct
  source 1..80: mol_type = other DNA
ttccaggcacagttctaaatgctagagctataacaatgaataaataaaaccaaaatccccatccttgcagaactgacttt

SEQ ID NO: 98812 - DNA, 80 bp, synthetic construct
  source 1..80: mol_type = other DNA
cttgagtgatatttgggcaaagatctgaaggagacaagagagtgagccagacacaaacaggagtcaaacattccacagag

SEQ ID NO: 98813 - DNA, 80 bp, synthetic construct
  source 1..80: mol_type = other DNA
aaaatccagtgattctgtgtgttttgtgccaaaagtcatatggcatcaaaaccatatgtaaactggcacagagctattta

SEQ ID NO: 98814 - DNA, 80 bp, synthetic construct; identical to SEQ ID NO: 18714
  source 1..80: mol_type = other DNA

SEQ ID NO: 98815 - DNA, 80 bp, synthetic construct
  source 1..80: mol_type = other DNA
gcagtctcttaggtcacgtcaaaatcaagcagcctaaatgacactaaaaaattttgtctgcatggcagagaattgttcac

SEQ ID NO: 98816 - DNA, 80 bp, synthetic construct
  source 1..80: mol_type = other DNA
gctggaatgcaatggcacgatcttggctcactgcaacctctacctcccgggctcaggcgattctcctgcctcagcctccc

SEQ ID NO: 98817 - DNA, 80 bp, synthetic construct; identical to SEQ ID NO: 18715
  source 1..80: mol_type = other DNA

SEQ ID NO: 98818 - DNA, 80 bp, synthetic construct
  source 1..80: mol_type = other DNA
ctaaatagatattttacaggacgactcaaaccttacctccagaaatattaaatttccaccataggtgtagcttcttaaat

SEQ ID NO: 98819 - DNA, 80 bp, synthetic construct
  source 1..80: mol_type = other DNA
tgacaatacgaaaggttaaatttactacacagaccaacctcagttacttcctaaatgcaaaatgttatttttaactgaat

SEQ ID NO: 98820 - DNA, 80 bp, synthetic construct
  source 1..80: mol_type = other DNA
gtttgtagttgcatcttttcattattcttggttaagaatccagcctctaaataaaactctccatgttaaggtccagaatg

SEQ ID NO: 98821 - DNA, 80 bp, synthetic construct
  source 1..80: mol_type = other DNA
atcttcacaaacctctatcagcagatgagggcacttcttcattcctataaaatcttaacctttctctgtgtaaattagtg

SEQ ID NO: 98822 - DNA, 80 bp, synthetic construct; identical to SEQ ID NO: 18716
  source 1..80: mol_type = other DNA

SEQ ID NO: 98823 - DNA, 80 bp, synthetic construct
  source 1..80: mol_type = other DNA
gttttaagggctaaaccactaattctcatccttggctgaacatcaaattacttgtggagcttttaaaatgtactgaattt

SEQ ID NO: 98824 - DNA, 80 bp, synthetic construct
  source 1..80: mol_type = other DNA
gtggtctcagctacttaggaggctgagacaggagaatcgcttgaacccgggaggcagaggttgcagtgagctgagatcgc

SEQ ID NO: 98825 - DNA, 80 bp, synthetic construct
  source 1..80: mol_type = other DNA
aacactgtgaaaccccgtctctactaaaaatacaaaaaattagctgggcgtggtggcgggcacctgtagtcccagctact

SEQ ID NO: 98826 - DNA, 80 bp, synthetic construct; identical to SEQ ID NO: 18717
  source 1..80: mol_type = other DNA

SEQ ID NO: 98827 - DNA, 80 bp, synthetic construct
  source 1..80: mol_type = other DNA
aataagcaagaaaaaggaagacactgtgaagctataaaagcttggtcagctatagctagcacaggaaggtgggggagaga

SEQ ID NO: 98828 - DNA, 80 bp, synthetic construct
  source 1..80: mol_type = other DNA
tatagttttaaaaacaggattcagatttagatctagagacactcagactctgcctctaccagataaagtctgaagaaaaa

SEQ ID NO: 98829 - DNA, 80 bp, synthetic construct; identical to SEQ ID NO: 18718
  source 1..80: mol_type = other DNA

SEQ ID NO: 98830 - DNA, 80 bp, synthetic construct
  source 1..80: mol_type = other DNA
tggctaattttttgtatttttaatagagatggggtttcaccatgttggccaggctagtcttgaactcctgaccttatgat

SEQ ID NO: 98831 - DNA, 80 bp, synthetic construct
  source 1..80: mol_type = other DNA
tgcccccaggacccatacacttcccaccagtccctaaggcctcccaacaccaccacagtggggatcaaatttcaatatga

SEQ ID NO: 98832 - DNA, 80 bp, synthetic construct
  source 1..80: mol_type = other DNA
aaaacaattttaaaaaaagatttaaaaattggctaccaatctgaacagatgcctcatcaaagaagatatgcagatagcaa

SEQ ID NO: 98833 - DNA, 80 bp, synthetic construct; identical to SEQ ID NO: 18719
  source 1..80: mol_type = other DNA

SEQ ID NO: 98834 - DNA, 80 bp, synthetic construct
  source 1..80: mol_type = other DNA
tggtacatccaggcaatggagtattattcagcactaaaaagaaatgagctatcaagccacgaaaagacttgtggaaactt

SEQ ID NO: 98835 - DNA, 80 bp, synthetic construct
  source 1..80: mol_type = other DNA
tcagaggatttttagggcaatgaaaccactctctatgatacaataatgatggacacaggtcattatacatttgtccaaac

SEQ ID NO: 98836 - DNA, 80 bp, synthetic construct
  source 1..80: mol_type = other DNA
acagcagggaaggctgcgcatgtgtagggcatgaggcataagggaaaactgtgttttcttcacagttttgctgtgaacct

SEQ ID NO: 98837 - DNA, 80 bp, synthetic construct; identical to SEQ ID NO: 18720
  source 1..80: mol_type = other DNA

SEQ ID NO: 98838 - DNA, 80 bp, synthetic construct
  source 1..80: mol_type = other DNA
aattccaaaagggtttcctttacattacatgacattgtgagatacacattagaagaatctgagactatgttccatttcag

SEQ ID NO: 98839 - DNA, 80 bp, synthetic construct
  source 1..80: mol_type = other DNA
tactggtgccaggttaagagacctattttatagtgagtgacatgaaagtcaactacaagaaaagcacattgtcattttca

SEQ ID NO: 98840 - DNA, 80 bp, synthetic construct
  source 1..80: mol_type = other DNA
attagcccttgggccttgacaatttaattgccagggccttttgtcaattctaaacaatgttctaaattagccacaatttc

SEQ ID NO: 98841 - DNA, 80 bp, synthetic construct
  source 1..80: mol_type = other DNA
aagatttataataaattgagtgcctattatacacaaggcactgtgctgagtgctgaaaatgtggtaaggacagacagcac

SEQ ID NO: 98842 - DNA, 80 bp, synthetic construct; identical to SEQ ID NO: 18721
  source 1..80: mol_type = other DNA

SEQ ID NO: 98843 - DNA, 80 bp, synthetic construct
  source 1..80: mol_type = other DNA
gatgggatcaatttttaaaggctccaactctgcttgctttgctgataaagttcttcaggagatcatggtccatttctgca

SEQ ID NO: 98844 - DNA, 80 bp, synthetic construct
  source 1..80: mol_type = other DNA
caacatagcatgaaaatcgctaaaacaagttaggcaaagaaaaaggatttaataggcaagtggaggaaatgatggcatgg

SEQ ID NO: 98845 - DNA, 80 bp, synthetic construct
  source 1..80: mol_type = other DNA
ctttttcttcccagagataggcatgtgagtgtgtgaattccttggtacctttgtctagtgacagtatttgtaactgttga

SEQ ID NO: 98846 - DNA, 80 bp, synthetic construct
  source 1..80: mol_type = other DNA
agagttgatggaagaaaaaggtaagccataaaaagcagtaatgccaagaaattgctgctctgaagtcattaacaggccac

SEQ ID NO: 98847 - DNA, 80 bp, synthetic construct; identical to SEQ ID NO: 18722
  source 1..80: mol_type = other DNA

SEQ ID NO: 98848 - DNA, 80 bp, synthetic construct
  source 1..80: mol_type = other DNA
taggacaagatgctgctaggtggtggtcaatttttaaaagtttcctctccaagctactgtaggtaatttataaaaaataa

SEQ ID NO: 98849 - DNA, 80 bp, synthetic construct; identical to SEQ ID NO: 18723
  source 1..80: mol_type = other DNA

SEQ ID NO: 98850 - DNA, 80 bp, synthetic construct
  source 1..80: mol_type = other DNA
aaatttttagaaatgacatttttgcctacagcacacaaaagtgaaaccagatagagatgcatcatctctttggctgaagt

SEQ ID NO: 98851 - DNA, 80 bp, synthetic construct
  source 1..80: mol_type = other DNA
aatgggagaatgaaaggaccctaaaaagttatcacttggatccatgctcctttactttattctagagtgggatcttcccc

SEQ ID NO: 98852 - DNA, 80 bp, synthetic construct
  source 1..80: mol_type = other DNA
cattatttttcagttaaagaattgtagtctattttgaatgctaccactctgtatggcttcatgttcaaaatggggccctc

SEQ ID NO: 98853 - DNA, 80 bp, synthetic construct; identical to SEQ ID NO: 18724
  source 1..80: mol_type = other DNA

SEQ ID NO: 98854 - DNA, 80 bp, synthetic construct
  source 1..80: mol_type = other DNA
tgcatcattagacaagcttccatttcccacatcttaaaaaagtaaagatgttttacctcaaatgccccaaagctcttcct

SEQ ID NO: 98855 - DNA, 80 bp, synthetic construct
  source 1..80: mol_type = other DNA
agtcctcgtgcagacgtgccagcagcatctggtgtggttcggacttcttccttcctgtttcgctttctttcccagcctgc

SEQ ID NO: 98856 - DNA, 80 bp, synthetic construct
  source 1..80: mol_type = other DNA
atttctctctgacttccaggcttgcttatccaatttgcttattagacatttccatttggatgtctaatagacatcacata

SEQ ID NO: 98857 - DNA, 80 bp, synthetic construct; identical to SEQ ID NO: 18725
  source 1..80: mol_type = other DNA

SEQ ID NO: 98858 - DNA, 80 bp, synthetic construct
  source 1..80: mol_type = other DNA
acttcaaatgcccatcatatctgctcctctccaaaccctctgatggccactcaccttggaactctgattcctgaaacttg

SEQ ID NO: 98859 - DNA, 80 bp, synthetic construct
  source 1..80: mol_type = other DNA
gcttgagtcacctgctcactgatgtcttgcctccctgaccattctatttaaaatttcaactttcatctcaggatggcatt

SEQ ID NO: 98860 - DNA, 80 bp, synthetic construct
  source 1..80: mol_type = other DNA
ttgtcaccatctgacatactatatatcctattcatttattgatcacctatctcccctcaccagaaattcccatgagagca

SEQ ID NO: 98861 - DNA, 80 bp, synthetic construct; identical to SEQ ID NO: 18726
  source 1..80: mol_type = other DNA

SEQ ID NO: 98862 - DNA, 80 bp, synthetic construct
  source 1..80: mol_type = other DNA
ctaagtgacagtccagcatgagggataataatttgctgaaagagcccatttcttgcttatttgagccaggcaaatcaaat

SEQ ID NO: 98863 - DNA, 80 bp, synthetic construct
  source 1..80: mol_type = other DNA
caacagtgcatctctataggcaaaactgaacatccatgaaaggggtatttagtaggtacctactctgtgtcagacaccgt

SEQ ID NO: 98864 - DNA, 80 bp, synthetic construct
  source 1..80: mol_type = other DNA
atataaaaaagtattaaaaatgaagcctgattcagatgcaaacaccacgtgccaccatcttgacatctgagatggccctc

SEQ ID NO: 98865 - DNA, 80 bp, synthetic construct
  source 1..80: mol_type = other DNA
ctttttttttaatgttaagtgaaaaaaaatctaggtttcaagtatttacaaatatataatgtgacataaaacaaaaactc

SEQ ID NO: 98866 - DNA, 80 bp, synthetic construct; identical to SEQ ID NO: 18727
  source 1..80: mol_type = other DNA

SEQ ID NO: 98867 - DNA, 80 bp, synthetic construct
  source 1..80: mol_type = other DNA
agaaaataaaaatcacccacaatcccaccattcaatgataaccactaagcatagttttcagtctttttttctatgtagat

SEQ ID NO: 98868 - DNA, 80 bp, synthetic construct
  source 1..80: mol_type = other DNA
ttcaaaattataaactgctgaagtaaacacctttgaagctaagtctttgtgcaaatccatgattaattcctcaagataaa

SEQ ID NO: 98869 - DNA, 80 bp, synthetic construct
  source 1..80: mol_type = other DNA
tttgacaggtgaaaagttataccttgttttcatttatgttttttgtctatttatagagccatttgttctttggtccattt

SEQ ID NO: 98870 - DNA, 80 bp, synthetic construct
  source 1..80: mol_type = other DNA
taaatcctttatggcttctgcctttgatgtccatcccaacattatataaatacttgcttatacgttgtctagtactcttg

SEQ ID NO: 98871 - DNA, 80 bp, synthetic construct; identical to SEQ ID NO: 18728
  source 1..80: mol_type = other DNA

SEQ ID NO: 98872 - DNA, 80 bp, synthetic construct
  source 1..80: mol_type = other DNA
ctcagccactcagagatgattttgacactattttagatataatcctcagtgaagcactgcatagactgatgctgactgac

SEQ ID NO: 98873 - DNA, 80 bp, synthetic construct
  source 1..80: mol_type = other DNA
gcaatctcaatgtcagcttctcctgggccactcccaggagcacacacacatgctgtaagagtgcccgccgtgaaaagaaa

SEQ ID NO: 98874 - DNA, 80 bp, synthetic construct
  source 1..80: mol_type = other DNA
accctttcatggacacgtgtcttcctcctgttaccctatcccactgctcctctctacagcaaaactcctagacagagcta

SEQ ID NO: 98875 - DNA, 80 bp, synthetic construct; identical to SEQ ID NO: 18729
  source 1..80: mol_type = other DNA

SEQ ID NO: 98876 - DNA, 80 bp, synthetic construct
  source 1..80: mol_type = other DNA
atattacctgtcacctattttcaagtaattcaacgtagactgggtgaggtgacatatgtaaattaattttaatctacccc

SEQ ID NO: 98877 - DNA, 80 bp, synthetic construct
  source 1..80: mol_type = other DNA
gctgaatccggctactagaacactgtcatgtccacctcaagctaacttttcatgcaaggtacttaatagagtgtacgaag

SEQ ID NO: 98878 - DNA, 80 bp, synthetic construct; identical to SEQ ID NO: 18730
  source 1..80: mol_type = other DNA

SEQ ID NO: 98879 - DNA, 80 bp, synthetic construct
  source 1..80: mol_type = other DNA
ctgcctgcataattggccttgaggccacatgtgtgggtatttcctcccttagaccccaccaccaatgtgcagaccccctg

SEQ ID NO: 98880 - DNA, 80 bp, synthetic construct
  source 1..80: mol_type = other DNA
tcctttcagttcttaatgaaattacatttttcaaggtgggaggattggacatatttttatctgaagttcactagcttgac

SEQ ID NO: 98881 - DNA, 80 bp, synthetic construct
  source 1..80: mol_type = other DNA
gcggatcacctgaggtcgggagttcaagaccagcctgaccaacacggagaaacctcgtttctactaaaaatacaaaatta

SEQ ID NO: 98882 - DNA, 80 bp, synthetic construct; identical to SEQ ID NO: 18731
  source 1..80: mol_type = other DNA

SEQ ID NO: 98883 - DNA, 80 bp, synthetic construct
  source 1..80: mol_type = other DNA
atatatctagaatctgatctcttttcaatacttccactgctatacaaccccaacccaggagaccatcatctcacacctga

SEQ ID NO: 98884 - DNA, 80 bp, synthetic construct
  source 1..80: mol_type = other DNA
atccattcttcctttctactgaaaccacagaatttttagccaagctacggccctctggaaatgcccattttcccagcctc

SEQ ID NO: 98885 - DNA, 80 bp, synthetic construct
  source 1..80: mol_type = other DNA
ttgattcttctctctcttatctgtccagtcaacctttgtaataaagtagtaacaagggaaacgtgtttggattcaacaca

SEQ ID NO: 98886 - DNA, 80 bp, synthetic construct
  source 1..80: mol_type = other DNA
gtattccaggaaggcccggtaaacaggatatgaaaattcactcatttctacaatatcatcctcgttatcttccaatgacg

SEQ ID NO: 98887 - DNA, 80 bp, synthetic construct; identical to SEQ ID NO: 18732
  source 1..80: mol_type = other DNA

SEQ ID NO: 98888 - DNA, 80 bp, synthetic construct
  source 1..80: mol_type = other DNA
ttttataaaatctaagtaattctgtttcctcactccattacgggttgaatgatgtcctctaaaaattcctgtgttgaagt

SEQ ID NO: 98889 - DNA, 80 bp, synthetic construct
  source 1..80: mol_type = other DNA
aatcccagcactttggaaggccgaggcgggtggatcacgaggtcaggagtttgagaccagcctggccaatatggtgaaac

SEQ ID NO: 98890 - DNA, 80 bp, synthetic construct; identical to SEQ ID NO: 18733
  source 1..80: mol_type = other DNA

SEQ ID NO: 98891 - DNA, 80 bp, synthetic construct
  source 1..80: mol_type = other DNA
tgcttaagccacccgggccatagtactgtgttacagcaaacaaatccaccccccttctttcatgcaggttgatgtgatat

SEQ ID NO: 98892 - DNA, 80 bp, synthetic construct
  source 1..80: mol_type = other DNA
cacaaatgaatgcatcctgtatcatcccatctaaatacactctagaaaatgctaactcagctacagtgacagaaggagct

SEQ ID NO: 98893 - DNA, 80 bp, synthetic construct
  source 1..80: mol_type = other DNA
atgtgattttttaaaatctctgtgctagcctcactatagacctttttggtctggaaaggccttgatcttctctttcttaa

SEQ ID NO: 98894 - DNA, 80 bp, synthetic construct
  source 1..80: mol_type = other DNA
cctttttggtctggaaaggccttgatcttctctttcttaaaccatctaaaagtacgccacaagtgattataagaaggtga

SEQ ID NO: 98895 - DNA, 80 bp, synthetic construct; identical to SEQ ID NO: 18734
  source 1..80: mol_type = other DNA

SEQ ID NO: 98896 - DNA, 80 bp, synthetic construct
  source 1..80: mol_type = other DNA
aatcttgagaaggactttatgtgcataaatgtactttccatcaactagaaacttcaggtctgcagtgtccgggttgtcaa

SEQ ID NO: 98897 - DNA, 80 bp, synthetic construct
  source 1..80: mol_type = other DNA
ctactggtactcatgaaagtaccaattcctcaaaataactgagcaactgagcaatggattttttcccctgaagacagatt

SEQ ID NO: 98898 - DNA, 80 bp, synthetic construct
  source 1..80: mol_type = other DNA
gtaaatacgctagttaaaagtaaaaaacagtttctcagtaaaattaaaaagcactcaaataaggatagggcacaatggct

SEQ ID NO: 98899 - DNA, 80 bp, synthetic construct
  source 1..80: mol_type = other DNA
tcaataggctaaggcaaaaggatcgcttgaacccaggggctgaagggtacagcgagttatgattgcaccaccgcactcca

SEQ ID NO: 98900 - DNA, 80 bp, synthetic construct; identical to SEQ ID NO: 18735
  source 1..80: mol_type = other DNA

SEQ ID NO: 98901 - DNA, 80 bp, synthetic construct
  source 1..80: mol_type = other DNA
gtcttggccgcagacgtgtgtgtggagtgacaggctgcaatctcgataatcctaaattcacaaacacacaccacataagc

SEQ ID NO: 98902 - DNA, 80 bp, synthetic construct
  source 1..80: mol_type = other DNA
accgttatttacatttaagccacacttcaatggcacttataactcatgaagatctgtttgtaccacttctagccagtagg

SEQ ID NO: 98903 - DNA, 80 bp, synthetic construct
  source 1..80: mol_type = other DNA
taacccaagagagtagtggtcccccctaccaaaaaagggtggtttaaaatttttccccctaaaacatcacttactgaaga

SEQ ID NO: 98904 - DNA, 80 bp, synthetic construct; identical to SEQ ID NO: 18736
  source 1..80: mol_type = other DNA

SEQ ID NO: 98905 - DNA, 80 bp, synthetic construct
  source 1..80: mol_type = other DNA
acacctgactaacttttgtattttttgtagagacaaggttttgccatgttgcccaggttggtcttgaactccagagctca

SEQ ID NO: 98906 - DNA, 80 bp, synthetic construct
  source 1..80: mol_type = other DNA
tccatcagaataagccaccatacagattgaaggaaaatggtaaactcttttaacccaggggaagtccccatcttgatttt

SEQ ID NO: 98907 - DNA, 80 bp, synthetic construct
  source 1..80: mol_type = other DNA
tttaccactttctttagaatatccagttaaataacaaagatgctttctttgtaatgtctcccctcagccaccactggggg

SEQ ID NO: 98908 - DNA, 80 bp, synthetic construct; identical to SEQ ID NO: 18737
  source 1..80: mol_type = other DNA

SEQ ID NO: 98909 - DNA, 80 bp, synthetic construct
  source 1..80: mol_type = other DNA
caatgacttcatacatggttgttcaggaatgttctttctctctgccttacaaaccctacccatcttgtaaggcccagttc

SEQ ID NO: 98910 - DNA, 80 bp, synthetic construct
  source 1..80: mol_type = other DNA
gcacataacgtggtgtcttactgaatataatctatgggtcactttactgactgaggaagactcaacaacacagagcaaag

SEQ ID NO: 98911 - DNA, 80 bp, synthetic construct
  source 1..80: mol_type = other DNA
gtgcggtaatctcactgacttattatgaggatcgttcttagcccttgaaaaccacccaaaaatactagaggaaaaaaagg

SEQ ID NO: 98912 - DNA, 80 bp, synthetic construct
  source 1..80: mol_type = other DNA
ggctgcgtgactaggggaatgtcacttagcacctaggagccttggtttcatcacattgcaagggtggtgtgagaatcaag

SEQ ID NO: 98913 - DNA, 80 bp, synthetic construct; identical to SEQ ID NO: 18738
  source 1..80: mol_type = other DNA

SEQ ID NO: 98914 - DNA, 80 bp, synthetic construct
  source 1..80: mol_type = other DNA
ccactgttagtatcgattttactggcaagcctcctaagttacaagcaaatgtgaggatagcgacatggtctgtcttcgtg

SEQ ID NO: 98915 - DNA, 80 bp, synthetic construct
  source 1..80: mol_type = other DNA
tgtacgtgaaataagttccttggcagagctgagaaccgaaaaaggcttccttccgtgactaaaagtgtttaccagctgct

SEQ ID NO: 98916 - DNA, 80 bp, synthetic construct
  source 1..80: mol_type = other DNA
atatttcaagtaaaagggaactaactgggccatgtatgctttggactggccagagccgtggaataagagtctgtgaggtg

SEQ ID NO: 98917 - DNA, 80 bp, synthetic construct; identical to SEQ ID NO: 18739
  source 1..80: mol_type = other DNA

SEQ ID NO: 98918 - DNA, 80 bp, synthetic construct
  source 1..80: mol_type = other DNA
cctggatgttaatgcagagggagggagaggagcggaaggtggcccaggggatgagtctaagaaaacccccggctggcagt

SEQ ID NO: 98919 - DNA, 80 bp, synthetic construct
  source 1..80: mol_type = other DNA
ccaatgaacaatgtgaagataagcatttatgaactgctcttcctttcttcagattttagcactttgcagtgacctactag

SEQ ID NO: 98920 - DNA, 80 bp, synthetic construct; identical to SEQ ID NO: 18740
  source 1..80: mol_type = other DNA

SEQ ID NO: 98921 - DNA, 80 bp, synthetic construct
  source 1..80: mol_type = other DNA
aggggtggggcgcggatttggttggctgcagtagctgctacaggaatgagaatgcagaaagtttagagggtactttcagg

SEQ ID NO: 98922 - DNA, 80 bp, synthetic construct
  source 1..80: mol_type = other DNA
atgcgacagacaatgactatcaactgagctaacctttactgtcaggatgtctggcgtatttcacacttttattttgtagc

SEQ ID NO: 98923 - DNA, 80 bp, synthetic construct
  source 1..80: mol_type = other DNA
gcagagagtgagaaagaatagaaactggaaaaccttgaggggggtgaaaggtcatctgtgagggagaagaatattggaga

SEQ ID NO: 98924 - DNA, 80 bp, synthetic construct; identical to SEQ ID NO: 18741
  source 1..80: mol_type = other DNA

SEQ ID NO: 98925 - DNA, 80 bp, synthetic construct
  source 1..80: mol_type = other DNA
tctccttcccacttctgtgaacaggtaactaagaactgaaacccaccccaccccacattcaatccagttcctaattagtc

SEQ ID NO: 98926 - DNA, 80 bp, synthetic construct
  source 1..80: mol_type = other DNA
ccgtgattgagtgcctggttgaaactgtgcaagttcagaaaccaccacttgaaattcaagtacggaaaacagaaaatcag

SEQ ID NO: 98927 - DNA, 80 bp, synthetic construct
  source 1..80: mol_type = other DNA
agggattctcgtgcctcagcctcccaagtaactgggattacaggcatgtgccactgtgcccagctaatttttatattttt

SEQ ID NO: 98928 - DNA, 80 bp, synthetic construct; identical to SEQ ID NO: 18742
  source 1..80: mol_type = other DNA

SEQ ID NO: 98929 - DNA, 80 bp, synthetic construct
  source 1..80: mol_type = other DNA
agaccagggatggatgtgctaaagttctgggtaagtgtaggagcaccataaaaagtaatgggccaggccaggcgcagtgg

SEQ ID NO: 98930 - DNA, 80 bp, synthetic construct
  source 1..80: mol_type = other DNA
ggctaaggtgggaggatcgcctgagcttgggaagtcaagactacagtgagccgtgattgcaccactgcaccccaacctgg

SEQ ID NO: 98931 - DNA, 80 bp, synthetic construct
  source 1..80: mol_type = other DNA
caaagcctcaggactgtcccttctcttctgaggagctctaagctacaagatgtgtgaatgaacagctgcaggcatctacc

SEQ ID NO: 98932 - DNA, 80 bp, synthetic construct
  source 1..80: mol_type = other DNA
gtcagccaagttcacaatacccaaatgaaaactgaggcagttgaaaaatgacaatttggttcttcattttcattgttaag

SEQ ID NO: 98933 - DNA, 80 bp, synthetic construct; identical to SEQ ID NO: 18743
  source 1..80: mol_type = other DNA

SEQ ID NO: 98934 - DNA, 80 bp, synthetic construct
  source 1..80: mol_type = other DNA
cgtagtgacagcttgggagttaaagtaatgaaataaccctatccttctcaactggcaaatttccatgtagctgagtgacc

SEQ ID NO: 98935 - DNA, 80 bp, synthetic construct
  source 1..80: mol_type = other DNA
aggcagaagagtaacagaatagctgttgcaagtttagtcactgcagtttgcttagaatagctgttggaggtatagatgaa

SEQ ID NO: 98936 - DNA, 80 bp, synthetic construct
  source 1..80: mol_type = other DNA
tccccaccattctctatatatctaagtcctgtttaatcacaatcaccaaagaccagtgtggggactgtgaaaatgcccgt

SEQ ID NO: 98937 - DNA, 80 bp, synthetic construct; identical to SEQ ID NO: 18744
  source 1..80: mol_type = other DNA

SEQ ID NO: 98938 - DNA, 80 bp, synthetic construct
  source 1..80: mol_type = other DNA
agttcactagagctttaatactcacagaaatcaaggggtatgaggggaatgtaagaaacagacacttgtattttttaaat

SEQ ID NO: 98939 - DNA, 80 bp, synthetic construct
  source 1..80: mol_type = other DNA
tataagcagttctgtatcttgcttcattttaccattacacatagcagttttccatgtcattaaaaattctttgtatacaa

SEQ ID NO: 98940 - DNA, 80 bp, synthetic construct
  source 1..80: mol_type = other DNA
gttggttcctcagggaaattccctaggagtagaactacaggtcaaagggtataaaagcttttaagcttcctcaggaaagc

SEQ ID NO: 98941 - DNA, 80 bp, synthetic construct; identical to SEQ ID NO: 18745
  source 1..80: mol_type = other DNA

SEQ ID NO: 98942 - DNA, 80 bp, synthetic construct
  source 1..80: mol_type = other DNA
gacataccatactggcatgagactgatgtggcaaacacggtttttaaacaagatgtaaaataacttccttacctcccccg

SEQ ID NO: 98943 - DNA, 80 bp, synthetic construct
  source 1..80: mol_type = other DNA
ggaaagatcagtaaatgaaacagattaatttataaactgtctcaactggacactgacatgtacttgtggcaccgagtctt

SEQ ID NO: 98944 - DNA, 80 bp, synthetic construct; identical to SEQ ID NO: 18746
  source 1..80: mol_type = other DNA

SEQ ID NO: 98945 - DNA, 80 bp, synthetic construct
  source 1..80: mol_type = other DNA
agaccttactacgtacaggtaaatgtcacaacatcaacaccctgactgtgaattgctaccaaaaataaggctgaatttga

SEQ ID NO: 98946 - DNA, 80 bp, synthetic construct
  source 1..80: mol_type = other DNA
tagcaccaaagaatggtaagacccacaggcaacttcaatgacttgtttgtttgacagattagtagagatatgacagggca

SEQ ID NO: 98947 - DNA, 80 bp, synthetic construct
  source 1..80: mol_type = other DNA
tatacgaaaatatatgtagcacagcttccacaaatgaaatctaaaaattcaggtgcaaaaagctaatcaacttccccatt

SEQ ID NO: 98948 - DNA, 80 bp, synthetic construct
  source 1..80: mol_type = other DNA
aagagcagagaaaaggctgctgggagtaatagcaaaaacattagaatgaagtcaaatattagaaggccacttaactcccc

SEQ ID NO: 98949 - DNA, 80 bp, synthetic construct; identical to SEQ ID NO: 18747
  source 1..80: mol_type = other DNA

SEQ ID NO: 98950 - DNA, 80 bp, synthetic construct
  source 1..80: mol_type = other DNA
ttcatctgtattttccagcatgttgtctcttagtgttatattctgaatagtgacttctcatttatcttctggtttactaa

SEQ ID NO: 98951 - DNA, 80 bp, synthetic construct
  source 1..80: mol_type = other DNA
tataattggtgtctgataattttaatgcctgatatttagtaatccgttcttgctgtctgttgtttcttctggttcccatt

SEQ ID NO: 98952 - DNA, 80 bp, synthetic construct
  source 1..80: mol_type = other DNA
aactaataatcaaagagaacaattacaaaatgtactgttcacaatgtcacagatagaagatttgttcttaccataaatct

SEQ ID NO: 98953 - DNA, 80 bp, synthetic construct; identical to SEQ ID NO: 18748
  source 1..80: mol_type = other DNA

SEQ ID NO: 98954 - DNA, 80 bp, synthetic construct
  source 1..80: mol_type = other DNA
aaggataacgggagactactgtatatctggttatctctgactatgtgctgcctattgccactgaacaattattttggtta

SEQ ID NO: 98955 - DNA, 80 bp, synthetic construct
  source 1..80: mol_type = other DNA
ggttacaaccttttggggagaagttttatttattttcttccttttttcctccttgcttcactcagagcaaggaatttttc

SEQ ID NO: 98956 - DNA, 80 bp, synthetic construct
  source 1..80: mol_type = other DNA
tttagtctttcaattcatagatcaagaatccaaagttcagacagacttgccaaagtccacaatcagttcgtcagtgttta

SEQ ID NO: 98957 - DNA, 80 bp, synthetic construct; identical to SEQ ID NO: 18749
  source 1..80: mol_type = other DNA

SEQ ID NO: 98958 - DNA, 80 bp, synthetic construct
  source 1..80: mol_type = other DNA
aagcacaaaaatctatgggaaaaaccactgttagttcaagcagttctatttctaacaaatctataaattacatccaaaca

SEQ ID NO: 98959 - DNA, 80 bp, synthetic construct
  source 1..80: mol_type = other DNA
acctcatcatttactgtagtgtataaaacttcattgccagcactgccaaagacacaagcctgacgaattaactgtagttc

SEQ ID NO: 98960 - DNA, 80 bp, synthetic construct
  source 1..80: mol_type = other DNA
tgaattttctctgccccttcagttctgtagaagagggcgaacactggttttgggaggaacacactgcatccatttttgag

SEQ ID NO: 98961 - DNA, 80 bp, synthetic construct
  source 1..80: mol_type = other DNA
cagatactttaaatattggctatgtcttaaaagtagctgtggaaactaggctggttgtaaaagcaagagagacagagaga

SEQ ID NO: 98962 - DNA, 80 bp, synthetic construct; identical to SEQ ID NO: 18750
  source 1..80: mol_type = other DNA

SEQ ID NO: 98963 - DNA, 80 bp, synthetic construct
  source 1..80: mol_type = other DNA
cttctccctatgtctgttcacatcatctccccccatgccctgcatatctctgcatctaaatttcccctttttataaggac

SEQ ID NO: 98964 - DNA, 80 bp, synthetic construct
  source 1..80: mol_type = other DNA
gatcacgagcacccacactcctataagaggaagttataaatttgtttgaaagagttttacctatttgctacttaggaggc

SEQ ID NO: 98965 - DNA, 80 bp, synthetic construct; identical to SEQ ID NO: 18751
  source 1..80: mol_type = other DNA

SEQ ID NO: 98966 - DNA, 80 bp, synthetic construct
  source 1..80: mol_type = other DNA
cagagaccgagtctttcaccaccatgtcatccatcccttgaaaggagctaacaatgcaatacctacctttgtgttggtta

SEQ ID NO: 98967 - DNA, 80 bp, synthetic construct
  source 1..80: mol_type = other DNA
atcatcaaacacaactttgttactaagtcctcaaacttttaagtttccttctgatcacggccaacagtattaacttgtat

SEQ ID NO: 98968 - DNA, 80 bp, synthetic construct
  source 1..80: mol_type = other DNA
gcactattgaatgctgtagctaaaaagagctcaaaagatagttttctgagaaacccgaagaaaccccagagaggagctgc

SEQ ID NO: 98969 - DNA, 80 bp, synthetic construct
  source 1..80: mol_type = other DNA
cgagagggcacacagtgatgcacagggaagaaggccagatgacaacagacacagggactgcagtaatgcatctggaagtc

SEQ ID NO: 98970 - DNA, 80 bp, synthetic construct; identical to SEQ ID NO: 18752
  source 1..80: mol_type = other DNA

SEQ ID NO: 98971 - DNA, 80 bp, synthetic construct
  source 1..80: mol_type = other DNA
cctaaaaaggacaccttctgttatcttttgggcaacaccaacagttggttctcccattcacttttgaaacagtgcttact

SEQ ID NO: 98972 - DNA, 80 bp, synthetic construct
  source 1..80: mol_type = other DNA
ttagaggtaggaaaatccacaggcatttcctacaggacaaccttaatttggaatttggaattcaaaaaaaaatctcacat

SEQ ID NO: 98973 - DNA, 80 bp, synthetic construct
  source 1..80: mol_type = other DNA
actgaaaaaagagcaacttgcccaaggccacaatagagctaaggatggaattttgttacgttagcttttagttaagcttc

SEQ ID NO: 98974 - DNA, 80 bp, synthetic construct; identical to SEQ ID NO: 18753
  source 1..80: mol_type = other DNA

SEQ ID NO: 98975 - DNA, 80 bp, synthetic construct
  source 1..80: mol_type = other DNA
ggcaataatacctactgtgggttgtcttccacaaacagcacacatggaaagatacaatgactgacggctatttcattttt

SEQ ID NO: 98976 - DNA, 80 bp, synthetic construct
  source 1..80: mol_type = other DNA
atggtacccagcccgtaactctactggctactgggattccaatgcgtgtgttttctttaatgaaacctccagtctgtaag

SEQ ID NO: 98977 - DNA, 80 bp, synthetic construct; identical to SEQ ID NO: 18754
  source 1..80: mol_type = other DNA

SEQ ID NO: 98978 - DNA, 80 bp, synthetic construct
  source 1..80: mol_type = other DNA
tttgagcaccaattatgatgttcaaaggtcctgctcaaaggaaatgttcattagagcatttcagatttcaggttttcaga

SEQ ID NO: 98979 - DNA, 80 bp, synthetic construct
  source 1..80: mol_type = other DNA
ttcttctgtccagcacactcatgaaacaatgtaggattcacacaatagtcccccataggagcctcaatctatctgcagcc

SEQ ID NO: 98980 - DNA, 80 bp, synthetic construct
  source 1..80: mol_type = other DNA
ccctagaattcagtcctggtttggcacaggtaaccttccttactgcaaataacactactgcaggtgataattaacccaga

SEQ ID NO: 98981 - DNA, 80 bp, synthetic construct; identical to SEQ ID NO: 18755
  source 1..80: mol_type = other DNA

SEQ ID NO: 98982 - DNA, 80 bp, synthetic construct
  source 1..80: mol_type = other DNA
atatatattcattatattcattatatcttataaatatattcactatgtagtattcattatatcatattcattcattataa

SEQ ID NO: 98983 - DNA, 80 bp, synthetic construct
  source 1..80: mol_type = other DNA
acattacttttgtaaactacttttggactttcctacaagggctcacaaatgaacacttaagtctgcacacggtaatgcta

SEQ ID NO: 98984 - DNA, 80 bp, synthetic construct
  source 1..80: mol_type = other DNA
acacaagatggaaatcaatatgcgtgcaggaagatgtgaggcttttaacaacaactggacactgagtagacataagttgg

SEQ ID NO: 98985 - DNA, 80 bp, synthetic construct
  source 1..80: mol_type = other DNA
gacagtttataattttaaaaatctctgggaatgggataaacattgatcaactcatagcctcttgcaggccagcactgtct

SEQ ID NO: 98986 - DNA, 80 bp, synthetic construct; identical to SEQ ID NO: 18756
  source 1..80: mol_type = other DNA

SEQ ID NO: 98987 - DNA, 80 bp, synthetic construct
  source 1..80: mol_type = other DNA
cacacatgctccaagggcatgatttttttctaaccttgccactgtctccagagaaaagaggaagttcttcttccatatgg

SEQ ID NO: 98988 - DNA, 80 bp, synthetic construct
  source 1..80: mol_type = other DNA
ggcatgggaatgaacagctataaaactccaaaaatgttttaactgttctggaactactggatggcctcttacgggaatct

SEQ ID NO: 98989 - DNA, 80 bp, synthetic construct
  source 1..80: mol_type = other DNA
atcacggggaagagcggacatcaattctcagctccacagaagaatatatgatttgctaagctggaaaaaaaaaaggagaa

SEQ ID NO: 98990 - DNA, 80 bp, synthetic construct; identical to SEQ ID NO: 18757
  source 1..80: mol_type = other DNA

SEQ ID NO: 98991 - DNA, 80 bp, synthetic construct
  source 1..80: mol_type = other DNA
attttctacagtagagtgagagcctcataatagacagataaaaacaataatcaaaatacagccaagtctaaacagtgttc

SEQ ID NO: 98992 - DNA, 80 bp, synthetic construct
  source 1..80: mol_type = other DNA
agtaaaaaagatatgcttgctttttagaagattacttagaagtttctcacttaaaaatttataaaccgatctgattgaca

SEQ ID NO: 98993 - DNA, 80 bp, synthetic construct
  source 1..80: mol_type = other DNA
catcaatgtggatcctgattacccaaatgggctgggacctcttctctgtatttccacagcactttttgttttgtttttaa

SEQ ID NO: 98994 - DNA, 80 bp, synthetic construct; identical to SEQ ID NO: 18758
  source 1..80: mol_type = other DNA

SEQ ID NO: 98995 - DNA, 80 bp, synthetic construct
  source 1..80: mol_type = other DNA
ctgcactaccctaggccccctttcgttcctagcagaagggaaatcttcctaatgtgctaaaatcatgaaaaaccgatcct

SEQ ID NO: 98996 - DNA, 80 bp, synthetic construct
  source 1..80: mol_type = other DNA
aagaaatgacatgcaggattcaaattgaatgaaatgtaagattaacataatttcatatttgtcaatcagaaagtccttca

SEQ ID NO: 98997 - DNA, 80 bp, synthetic construct
  source 1..80: mol_type = other DNA
agtttgtgcactacacgtggagattaccttaccctgttatccatgtgatttcaccaggctattaacaatatgttgatata

SEQ ID NO: 98998 - DNA, 80 bp, synthetic construct; identical to SEQ ID NO: 18759
  source 1..80: mol_type = other DNA

SEQ ID NO: 98999 - DNA, 80 bp, synthetic construct
  source 1..80: mol_type = other DNA
tgttttaaatttctggaacccagtattcagtcatctttaatcctgttccttttagatccttgtaaagttgtcttctagag

SEQ ID NO: 99000 - DNA, 80 bp, synthetic construct
  source 1..80: mol_type = other DNA
gcagcagagatgctctattataaaaatactaaagttataaaatgtaactttagaatatcatactttataagcttcaggag

SEQ ID NO: 99001 - DNA, 80 bp, synthetic construct
  source 1..80: mol_type = other DNA
cctcagagcagttaaagatttcatacataagacaggaaagcataaaacacaaagaaaagagcagtaaacttgaacaaaag

SEQ ID NO: 99002 - DNA, 80 bp, synthetic construct
  source 1..80: mol_type = other DNA
atatatatatatatatatatatatatatatatatattcagttatatatgtatatataactgaaatttcacaaaataattc

SEQ ID NO: 99003 - DNA, 80 bp, synthetic construct; identical to SEQ ID NO: 18760
  source 1..80: mol_type = other DNA

SEQ ID NO: 99004 - DNA, 80 bp, synthetic construct
  source 1..80: mol_type = other DNA
aacattttaaaacatgcagaagacagtactattttaatgtgttatggataccaacatatgcatggctagactttgatggg

SEQ ID NO: 99005 - DNA, 80 bp, synthetic construct
  source 1..80: mol_type = other DNA
acccaatgttaaagaaaataaactcttaaaatgagaatgctatcattctaattttgcctttaccaaggacatggaaattc

SEQ ID NO: 99006 - DNA, 80 bp, synthetic construct
  source 1..80: mol_type = other DNA
tgggcaacataggaagacaccgtctctacagaaaacttaaaaattagctacacgtggtagtacacgcctgtagtcccagc

SEQ ID NO: 99007 - DNA, 80 bp, synthetic construct; identical to SEQ ID NO: 18761
  source 1..80: mol_type = other DNA

SEQ ID NO: 99008 - DNA, 80 bp, synthetic construct
  source 1..80: mol_type = other DNA
gagaatcacttgaacttgggaggcagaggttacagtgatccaagatcacaccactgcactccagcctgggtgacagagtg

SEQ ID NO: 99009 - DNA, 80 bp, synthetic construct
  source 1..80: mol_type = other DNA
tgctttctacttatggtctaaatctgcttacaaatgtccccccttttctgcataggagggcaatgtttcttgtagagcca

SEQ ID NO: 99010 - DNA, 80 bp, synthetic construct
  source 1..80: mol_type = other DNA
gtgttactttattagtttttcccttatatgtttgttttgggatatatgacttggctcatatatatatatatatgatatat

SEQ ID NO: 99011 - DNA, 80 bp, synthetic construct; identical to SEQ ID NO: 18762
  source 1..80: mol_type = other DNA

SEQ ID NO: 99012 - DNA, 80 bp, synthetic construct
  source 1..80: mol_type = other DNA
tttggggcagataactccttatttctatatattctatgttgagagttttctctacacttttaaaaactacacagttgaag

SEQ ID NO: 99013 - DNA, 80 bp, synthetic construct
  source 1..80: mol_type = other DNA
tatttgtggcaaagtaatcagtattaatcagtgtatctgctacacaatgtgttatattactcggtaatacctctgaccta

SEQ ID NO: 99014 - DNA, 80 bp, synthetic construct
  source 1..80: mol_type = other DNA
tgtccacattaccccaacccaatggtaggttttaaatgctgacattttgcagttaatcaggggcttctaaatgctaataa

SEQ ID NO: 99015 - DNA, 80 bp, synthetic construct
  source 1..80: mol_type = other DNA
gagaaacacactgatatttttagaattctctcaatatagaactctatgcttaaaattatcccatctgggtgggtaacaca

SEQ ID NO: 99016 - DNA, 80 bp, synthetic construct; identical to SEQ ID NO: 18763
  source 1..80: mol_type = other DNA

SEQ ID NO: 99017 - DNA, 80 bp, synthetic construct
  source 1..80: mol_type = other DNA
acaagtaacagtaaaatacctacatggctaattaaaatggaacaattataaacaggacggacaaaactaaaacactaaaa

SEQ ID NO: 99018 - DNA, 80 bp, synthetic construct
  source 1..80: mol_type = other DNA
cttcagtacaaagcaaagcggtatttaattgaaaagattactgagcttgacaacttcagtcttttcagccacacacggca

SEQ ID NO: 99019 - DNA, 80 bp, synthetic construct; identical to SEQ ID NO: 18764
  source 1..80: mol_type = other DNA

SEQ ID NO: 99020 - DNA, 80 bp, synthetic construct
  source 1..80: mol_type = other DNA
agggagatatacataagagatattagctcaggccaattagcaaggctgaagacgtaaaagaaacccactctaatgtcaaa

SEQ ID NO: 99021 - DNA, 80 bp, synthetic construct
  source 1..80: mol_type = other DNA
gaggcaagccatccactcctttgaagtaaaatctccaagtagaactctcttttagtctttaacaagagtccttaatgtca

SEQ ID NO: 99022 - DNA, 80 bp, synthetic construct
  source 1..80: mol_type = other DNA
cggctccagtgatcctcacactacagcctcccaagtatctgaaactacaggtgtgtgccaccatgcctggctcatttttt

SEQ ID NO: 99023 - DNA, 80 bp, synthetic construct
  source 1..80: mol_type = other DNA
gtaaacctcaacagtagcagtatcttggggcatttaaattttactttaaccaactgataaaaccaaacttgaatatgaca

SEQ ID NO: 99024 - DNA, 80 bp, synthetic construct; identical to SEQ ID NO: 18765
  source 1..80: mol_type = other DNA

SEQ ID NO: 99025 - DNA, 80 bp, synthetic construct
  source 1..80: mol_type = other DNA
tagaagcaattgcaaaaactgtggagacaacgtacagtttttctcagcacaatttacatagatgtctggctagctcttcc

SEQ ID NO: 99026 - DNA, 80 bp, synthetic construct
  source 1..80: mol_type = other DNA
ttgtagagcacgataaagaacgttttctcccagaagaacatttatttctaaaacccagttccccatgttaaacatcacct

SEQ ID NO: 99027 - DNA, 80 bp, synthetic construct
  source 1..80: mol_type = other DNA
atgtaagctccagagggaagggatctttgtctcttttgttcattgatgcatcccaagcatcaaggacaggacgtgataga

SEQ ID NO: 99028 - DNA, 80 bp, synthetic construct; identical to SEQ ID NO: 18766
  source 1..80: mol_type = other DNA

SEQ ID NO: 99029 - DNA, 80 bp, synthetic construct
  source 1..80: mol_type = other DNA
aggcctgagtggtggaagtggggtatgcaagaacgtatcattcttgttgcttttacctgctgcttaataacacgcatgta

SEQ ID NO: 99030 - DNA, 80 bp, synthetic construct
  source 1..80: mol_type = other DNA
cacagagtaatgacattgttagaaactcttcacagtagccccaggagtcacgaaactgacttaactaagacccactgtct

SEQ ID NO: 99031 - DNA, 80 bp, synthetic construct; identical to SEQ ID NO: 18767
  source 1..80: mol_type = other DNA

SEQ ID NO: 99032 - DNA, 80 bp, synthetic construct
  source 1..80: mol_type = other DNA
ttttcaatgtctgaaaacctctatttccagggctgagcagagcactatgttgcggcttaagacgctcggcgatttcttcc

SEQ ID NO: 99033 - DNA, 80 bp, synthetic construct
  source 1..80: mol_type = other DNA
taggggtcgaggccacagaaatgaaaacatcggcaacatatgcagtgcagcgagtgggttaggagggagaaacttcaggc

SEQ ID NO: 99034 - DNA, 80 bp, synthetic construct
  source 1..80: mol_type = other DNA
gggcaggatgtagtcgcgagcagcgcaccgggcccacgccagcggaattgcgcatgcgcagggccgcctctgcctgcggc

SEQ ID NO: 99035 - DNA, 80 bp, synthetic construct; identical to SEQ ID NO: 18768
  source 1..80: mol_type = other DNA

SEQ ID NO: 99036 - DNA, 80 bp, synthetic construct
  source 1..80: mol_type = other DNA
ggatgcgctcgggtgcccggccgagacggaaacgaagggagcgcagacaagaggagggggctggcgacggcgtctcgccc

SEQ ID NO: 99037 - DNA, 80 bp, synthetic construct
  source 1..80: mol_type = other DNA
gcaaattttgggaatttgtggatacccgacctagaaggataaggcgtgtatgatgctgagagcaaccttttccacagccc

SEQ ID NO: 99038 - DNA, 80 bp, synthetic construct
  source 1..80: mol_type = other DNA
gggatgacctcagttaccttggggccaagggcttcgaaaacagccaccttctccccttatgattatattttgcagtaatt

SEQ ID NO: 99039 - DNA, 80 bp, synthetic construct; identical to SEQ ID NO: 18769
  source 1..80: mol_type = other DNA

SEQ ID NO: 99040 - DNA, 80 bp, synthetic construct
  source 1..80: mol_type = other DNA
gcctcagaaggaggcacgcaaaatggtacacaggtatttcttgtagagctctaaatggaagaaaaagtaagtatacatta

SEQ ID NO: 99041 - DNA, 80 bp, synthetic construct
  source 1..80: mol_type = other DNA
tcacttcagtgatgatagctggcattttttttttaagcacctattgtgtgccaagaggtttatcttatttggagctcaca

SEQ ID NO: 99042 - DNA, 80 bp, synthetic construct
  source 1..80: mol_type = other DNA
ttacgcattatggacagctgaagttcatgcaggccttacggtgtgcttcagctgaagcctgacaattagctaacaataaa

SEQ ID NO: 99043 - DNA, 80 bp, synthetic construct
  source 1..80: mol_type = other DNA
ccatcacatataagtttccttcaacacttttggataatttggtctactaaacttcactgtattgctgaattcagtagact

SEQ ID NO: 99044 - DNA, 80 bp, synthetic construct; identical to SEQ ID NO: 18770
  source 1..80: mol_type = other DNA

SEQ ID NO: 99045 - DNA, 80 bp, synthetic construct
  source 1..80: mol_type = other DNA
gtctcttccaaaatgtcttaaaagagtcacttatactaactgtatcctcatcccctcctcctattcatcctctttttttt

SEQ ID NO: 99046 - DNA, 80 bp, synthetic construct
  source 1..80: mol_type = other DNA
ttttgaatttttaatagagatggggtttcgccatgttggccagaatggtctagagctcctgacctcaggtgatctatcca

SEQ ID NO: 99047 - DNA, 80 bp, synthetic construct
  source 1..80: mol_type = other DNA
tacttttccattatctcacctgaactatcagcagcattagaagcatttgcttacagctgccatcttgaagcattcatctt

SEQ ID NO: 99048 - DNA, 80 bp, synthetic construct; identical to SEQ ID NO: 18771
  source 1..80: mol_type = other DNA

SEQ ID NO: 99049 - DNA, 80 bp, synthetic construct
  source 1..80: mol_type = other DNA
gccctaatcacaagaaaaggtggatggggccgtcttttgactttttcttggaaattcagaaagtctaattacgcttcagg

SEQ ID NO: 99050 - DNA, 80 bp, synthetic construct
  source 1..80: mol_type = other DNA
gaccttgggtagcaccttagttttctagaacttaaattccttcagactccattaaattggtgcactgcccagctctgtgt

SEQ ID NO: 99051 - DNA, 80 bp, synthetic construct; identical to SEQ ID NO: 18772
  source 1..80: mol_type = other DNA

SEQ ID NO: 99052 - DNA, 80 bp, synthetic construct
  source 1..80: mol_type = other DNA
cagccacttgggaggctgagtcagtgtgagttagctaagagaacaaaggttagggatggaagtgttagggaagggaagta

SEQ ID NO: 99053 - DNA, 80 bp, synthetic construct
  source 1..80: mol_type = other DNA
aaattgctcagtaaggctgaaacaaaggctatatggagggaatagggcaatggtaggaaattaaagtaaccattcattca

SEQ ID NO: 99054 - DNA, 80 bp, synthetic construct
  source 1..80: mol_type = other DNA
acctctgtactggttttcgtaatgcctgtactaatttacattcccatcaacaaaggttcctttttctccacatcattgcc

SEQ ID NO: 99055 - DNA, 80 bp, synthetic construct
  source 1..80: mol_type = other DNA
aggtcctctgcccatttttaaattgggttgttttattgctactgaattgtttgaattccttatatattttggatattaac

SEQ ID NO: 99056 - DNA, 80 bp, synthetic construct; identical to SEQ ID NO: 18773
  source 1..80: mol_type = other DNA

SEQ ID NO: 99057 - DNA, 80 bp, synthetic construct
  source 1..80: mol_type = other DNA
aaaaaaaaaaaagacaattctgtcatttgtgacaacatggatgaacatggaggtcattaagtaaaatatcacatgatctc

SEQ ID NO: 99058 - DNA, 80 bp, synthetic construct
  source 1..80: mol_type = other DNA
gggtgattgtagttaataacaatgttttgtatatttacaaattgccaagaaagcagatgttaaatgtgctcagcaggcac

SEQ ID NO: 99059 - DNA, 80 bp, synthetic construct
  source 1..80: mol_type = other DNA
ataattttttttttttttttttttgagatagagtctccctctgtcacccagtctggagtgcagtttcacgatctcagctc

SEQ ID NO: 99060 - DNA, 80 bp, synthetic construct; identical to SEQ ID NO: 18774
  source 1..80: mol_type = other DNA

SEQ ID NO: 99061 - DNA, 80 bp, synthetic construct
  source 1..80: mol_type = other DNA
acttgtggggaaaatctgtattttaaagagaatcttccttctccctcctttttcctgttccaggagagaatcacctctga

SEQ ID NO: 99062 - DNA, 80 bp, synthetic construct
  source 1..80: mol_type = other DNA
aactttgaatctacctataacctggaagccgctccttccagttgtcccatctttctagactaaaccaatataccccttat

SEQ ID NO: 99063 - DNA, 80 bp, synthetic construct
  source 1..80: mol_type = other DNA
tttgactctttttgtcaacattacagttactggcaacttaagtcatttttgccccatcctacaggtgagatagtggagac

SEQ ID NO: 99064 - DNA, 80 bp, synthetic construct; identical to SEQ ID NO: 18775
  source 1..80: mol_type = other DNA

SEQ ID NO: 99065 - DNA, 80 bp, synthetic construct
  source 1..80: mol_type = other DNA
gaacatggatttgagaaaattttagaagttgaaattagcaagactggatataaagagtagaaaatggccaggtgtggtgg

SEQ ID NO: 99066 - DNA, 80 bp, synthetic construct
  source 1..80: mol_type = other DNA
ttagtgggatgtggtggctcatttctgcagtctcagctactagagaggctgaggtgggaggatcacttgagccccaggag

SEQ ID NO: 99067 - DNA, 80 bp, synthetic construct
  source 1..80: mol_type = other DNA
taatattctaggggcctcaaaaatctttacctttaaaaatggaggattagacttagtgtttccttaatattttaagattt

SEQ ID NO: 99068 - DNA, 80 bp, synthetic construct; identical to SEQ ID NO: 18776
  source 1..80: mol_type = other DNA

SEQ ID NO: 99069 - DNA, 80 bp, synthetic construct
  source 1..80: mol_type = other DNA
aaattctaagcccctcaaccatctgaacggacccctcctcttggccacgtgcactccaagttaacctgaaaacctagttc

SEQ ID NO: 99070 - DNA, 80 bp, synthetic construct
  source 1..80: mol_type = other DNA
catattttaagtttggcctaaaggtttttctgtacatcataaattataacaagtagaggtgtacatggaacactatgcag

SEQ ID NO: 99071 - DNA, 80 bp, synthetic construct
  source 1..80: mol_type = other DNA
catcacacactggggcctgtttgggggtgggggtctgggagagggatagcattaggagaactacctaatgtaaatgacga

SEQ ID NO: 99072 - DNA, 80 bp, synthetic construct; identical to SEQ ID NO: 18777
  source 1..80: mol_type = other DNA

SEQ ID NO: 99073 - DNA, 80 bp, synthetic construct
  source 1..80: mol_type = other DNA
ggaaatggtgatatcctaaccctatcatttcatcttcatttattagctgacatgcttttataaagggaaactttcttcct

SEQ ID NO: 99074 - DNA, 80 bp, synthetic construct
  source 1..80: mol_type = other DNA
atgaatttaagcttattttattgcccacaggactctggtttttgtgatgatcacagaggagcaagcctggcttgtccgag

SEQ ID NO: 99075 - DNA, 80 bp, synthetic construct
  source 1..80: mol_type = other DNA
ggcccaaagttagaacttacaccgctgtttccctgctcgaatcttgccttttccaaagcacccatggccccaccctgccc

SEQ ID NO: 99076 - DNA, 80 bp, synthetic construct; identical to SEQ ID NO: 18778
  source 1..80: mol_type = other DNA

SEQ ID NO: 99077 - DNA, 80 bp, synthetic construct
  source 1..80: mol_type = other DNA
ggcctgctgagctgttagcactcaagttgtctgtgtacagcaggcaaagctaaaagggcactgtagcactccctctgggg

SEQ ID NO: 99078 - DNA, 80 bp, synthetic construct
  source 1..80: mol_type = other DNA
agttcactcctgctggcactgaagcagctggctagttccagcacccgtgcactccagttcctgcctcatttgctcacggg

SEQ ID NO: 99079 - DNA, 80 bp, synthetic construct; identical to SEQ ID NO: 18779
  source 1..80: mol_type = other DNA

SEQ ID NO: 99080 - DNA, 80 bp, synthetic construct
  source 1..80: mol_type = other DNA
tatgtaaaattgaacacaagtgtgtctatttacactgagacctgcttggaaatacttaaatattgagtggtcatttctga

SEQ ID NO: 99081 - DNA, 80 bp, synthetic construct
  source 1..80: mol_type = other DNA
taatggggttttttttctaaatatataagatctcataactggcattacatgattttctccatggcatgatcatcaacagg

SEQ ID NO: 99082 - DNA, 80 bp, synthetic construct
  source 1..80: mol_type = other DNA
tgctttccagcccagtggagcacagtcatcttgtcagagaaaaaacactttcagaaaaacatgagttttatagacatttt

SEQ ID NO: 99083 - DNA, 80 bp, synthetic construct
  source 1..80: mol_type = other DNA
atttctaggcttccggagaaaaattgaaaaagggtcttctttcttttgttaatgaccttttaaatggctggtcctgcaca

SEQ ID NO: 99084 - DNA, 80 bp, synthetic construct; identical to SEQ ID NO: 18780
  source 1..80: mol_type = other DNA

SEQ ID NO: 99085 - DNA, 80 bp, synthetic construct
  source 1..80: mol_type = other DNA
ttctcttagcatcattggagtcttcagaagggttaaactgaaaacaagatttttctgtccatccttgggtcagagctcta

SEQ ID NO: 99086 - DNA, 80 bp, synthetic construct
  source 1..80: mol_type = other DNA
atcacctccccatacatacagataaagatgtgatcctgaccccagttcaaaaacagtaggccatcaatcccagggccata

SEQ ID NO: 99087 - DNA, 80 bp, synthetic construct
  source 1..80: mol_type = other DNA
gaacagactgctctgaaatctagttagaggtcagatgaggccttcctaagttttctctggaacagcaggaactcaaacct

SEQ ID NO: 99088 - DNA, 80 bp, synthetic construct; identical to SEQ ID NO: 18781
  source 1..80: mol_type = other DNA

SEQ ID NO: 99089 - DNA, 80 bp, synthetic construct
  source 1..80: mol_type = other DNA
ctgatggtctcatatacatgacagtggaataagaaacaacatgaacattttaattttttctgtactttgagataattacc

SEQ ID NO: 99090 - DNA, 80 bp, synthetic construct
  source 1..80: mol_type = other DNA
gttgattctgttcccaggggacttctcaagtaatttatagaaggagaaatgaagcttaagacaggcaaatttggaggcga

SEQ ID NO: 99091 - DNA, 80 bp, synthetic construct; identical to SEQ ID NO: 18782
  source 1..80: mol_type = other DNA

SEQ ID NO: 99092 - DNA, 80 bp, synthetic construct
  source 1..80: mol_type = other DNA
taggaccacttgaaccagctcatggatcagatacgtcttccacatcttccaaaaagctcagaggattttctaccccaaag

SEQ ID NO: 99093 - DNA, 80 bp, synthetic construct
  source 1..80: mol_type = other DNA
aaagcatccactgtgaaacggaaaattgtgttttgaagataatgctagaaagctgacaccgctaagtcatacaattctcg

SEQ ID NO: 99094 - DNA, 80 bp, synthetic construct
  source 1..80: mol_type = other DNA
atgcagaaccatggcaacaagagcttctgttagagagaaaaggaactaacacttattgagtgctgtgtactaggtaccat

SEQ ID NO: 99095 - DNA, 80 bp, synthetic construct; identical to SEQ ID NO: 18783
  source 1..80: mol_type = other DNA

SEQ ID NO: 99096 - DNA, 80 bp, synthetic construct
  source 1..80: mol_type = other DNA
atgaacacagatttcaatggaactcaagtgaccatttcatgagaatgtatacattgcgtcctttcatttcatctgtgttt

SEQ ID NO: 99097 - DNA, 80 bp, synthetic construct
  source 1..80: mol_type = other DNA
atttaaatctagtaggtaaaatatgtatacaacctcttatttaaaaaattaaggccagcctgggcatggtgctcatgctt

SEQ ID NO: 99098 - DNA, 80 bp, synthetic construct
  source 1..80: mol_type = other DNA
agtagtgtgcacctgtaatctcagctactctgtaggctgaggcaggagaatcacttgaacctggaaggtggaggttgcag

SEQ ID NO: 99099 - DNA, 80 bp, synthetic construct; identical to SEQ ID NO: 18784
  source 1..80: mol_type = other DNA

SEQ ID NO: 99100 - DNA, 80 bp, synthetic construct
  source 1..80: mol_type = other DNA
gacattttggaaaaagaataaacgaaaacctacccatatttgcttttgtgtttcagaccttttttagccaggcatttaag

SEQ ID NO: 99101 - DNA, 80 bp, synthetic construct
  source 1..80: mol_type = other DNA
ttgcaccattcagcagtgtcaggtcatgaagcacagattctctccaacagtgcttcataaatacagcaagtgaatttggg

SEQ ID NO: 99102 - DNA, 80 bp, synthetic construct
  source 1..80: mol_type = other DNA
ctgttcacttaaactcctgaaatgaaatcacattctacattgatggaattggtctaaaaaacacacatatgttctctata

SEQ ID NO: 99103 - DNA, 80 bp, synthetic construct; identical to SEQ ID NO: 18785
  source 1..80: mol_type = other DNA

SEQ ID NO: 99104 - DNA, 80 bp, synthetic construct
  source 1..80: mol_type = other DNA
ttaatcttatttctaggaatccattctgtcatgaacttagcatccctgcaaaagctgccaagccaaacccagttttttcc

SEQ ID NO: 99105 - DNA, 80 bp, synthetic construct
  source 1..80: mol_type = other DNA
atagtatagtggactggggaaactgttgggttatttggtcttgttattattgttgttgttgcctgcccagcacatttggt

SEQ ID NO: 99106 - DNA, 80 bp, synthetic construct
  source 1..80: mol_type = other DNA
gtcctcccaaatgcatgtgttggagacttaatccccaacgcaagtgttgggagatggtgacttttgggaggtgtttaggt

SEQ ID NO: 99107 - DNA, 80 bp, synthetic construct; identical to SEQ ID NO: 18786
  source 1..80: mol_type = other DNA

SEQ ID NO: 99108 - DNA, 80 bp, synthetic construct
  source 1..80: mol_type = other DNA
aggaacagctttcttttgaattgatatacaaatgtggtgagtgaattgcttttctgctgggatggctgggctgggagaat

SEQ ID NO: 99109 - DNA, 80 bp, synthetic construct
  source 1..80: mol_type = other DNA
ggagagagaagggaaatgagagagaaaacaatgttatttactatgcgtaaatctaaattcatccccagacttccctgttt

SEQ ID NO: 99110 - DNA, 80 bp, synthetic construct
  source 1..80: mol_type = other DNA
attgtcacctgtctcctcctcctctttgaattccatcaagaatctactcatataatgccttagtgaacaatgaacacttt

SEQ ID NO: 99111 - DNA, 80 bp, synthetic construct
  source 1..80: mol_type = other DNA
ggttccttctatatgtaaaacaatgtagctaccatcttttattacttgagcagtcccttgagattttgactttgattcca

SEQ ID NO: 99112 - DNA, 80 bp, synthetic construct; identical to SEQ ID NO: 18787
  source 1..80: mol_type = other DNA

SEQ ID NO: 99113 - DNA, 80 bp, synthetic construct
  source 1..80: mol_type = other DNA
agtgggaaaggtgcagcaggggctgcaggatccatggagttgacaggagcagggaacaggtgggggcttctgagttggag

SEQ ID NO: 99114 - DNA, 80 bp, synthetic construct
  source 1..80: mol_type = other DNA
ccaatttaggagtaaagttgaggccaagtccaagcattgttgcaacatggccaggtgtgcacatgcctggagcagcactg

SEQ ID NO: 99115 - DNA, 80 bp, synthetic construct
  source 1..80: mol_type = other DNA
gatggtgtcaggaggcagacaggcttctgggtggaaagggacagatccccagtgaagccctaccttcaagccagggatgg

SEQ ID NO: 99116 - DNA, 80 bp, synthetic construct; identical to SEQ ID NO: 18788
  source 1..80: mol_type = other DNA

SEQ ID NO: 99117 - DNA, 80 bp, synthetic construct
  source 1..80: mol_type = other DNA
taacacaaacaaggctgaaatgcatcccccagcttccctctcaccatgttgtgggtgacaaggagagaagagctatggcc

SEQ ID NO: 99118 - DNA, 80 bp, synthetic construct
  source 1..80: mol_type = other DNA
agctgcagtcttgcatggagctggtacctatgcccatgcctggagctgcctgccccaccagtgtgactggctgtgtgcag

SEQ ID NO: 99119 - DNA, 80 bp, synthetic construct; identical to SEQ ID NO: 18789
  source 1..80: mol_type = other DNA

SEQ ID NO: 99120 - DNA, 80 bp, synthetic construct
  source 1..80: mol_type = other DNA
aaactacatttccagctgtgcttgtaggtaggtatggcatatagctaagttccagacaatgggatataagcataaggtga

SEQ ID NO: 99121 - DNA, 80 bp, synthetic construct
  source 1..80: mol_type = other DNA
tgagaaagagcctgggtctctgatgactgtagagttgccataccatacttttgtcttctataagtcaccgttcgtgtgtt

SEQ ID NO: 99122 - DNA, 80 bp, synthetic construct
  source 1..80: mol_type = other DNA
aggttcatgccattctctggcctcagcctcctgagtagctgggactacaggcacctgccaccatgcccggctaatttttt

SEQ ID NO: 99123 - DNA, 80 bp, synthetic construct; identical to SEQ ID NO: 18790
  source 1..80: mol_type = other DNA

SEQ ID NO: 99124 - DNA, 80 bp, synthetic construct
  source 1..80: mol_type = other DNA
tttcaccaccaagtgtgacatttgtagtaagtttttaataagtgttcttgatggtttaagaaagtttccttctgttcctc

SEQ ID NO: 99125 - DNA, 80 bp, synthetic construct
  source 1..80: mol_type = other DNA
ttatttttaattgactcataattttacatatttatggggtacacggtgatattttgatacatgcatacaatgtgtaatga

SEQ ID NO: 99126 - DNA, 80 bp, synthetic construct
  source 1..80: mol_type = other DNA
cctatttaactgtacttttgattccttaaccaacctctggcatcccttcttcccactatccttcccaggatctagtacca

SEQ ID NO: 99127 - DNA, 80 bp, synthetic construct; identical to SEQ ID NO: 18791
  source 1..80: mol_type = other DNA

SEQ ID NO: 99128 - DNA, 80 bp, synthetic construct
  source 1..80: mol_type = other DNA
gctggtctcaaactcctgacctcaggtgatctgcctgttttggcctaccaaagtgttaggattacaggcatgagccactg

SEQ ID NO: 99129 - DNA, 80 bp, synthetic construct
  source 1..80: mol_type = other DNA
gaaagtaatctagtacccatgataagtcaataccagtttttttcagcaattgtctgtttggatttgttagttgtcctttg

SEQ ID NO: 99130 - DNA, 80 bp, synthetic construct
  source 1..80: mol_type = other DNA
agttttaatgatctttatgttaaactcttatttttcatatggtttatttgtgccttcttttcttgatcaatcttgtcaga

SEQ ID NO: 99131 - DNA, 80 bp, synthetic construct
  source 1..80: mol_type = other DNA
aactataatttttcctcttagtatcactatctgtaattaataagttttaaaatgcaatactcatagaatgtcattcaggt

SEQ ID NO: 99132 - DNA, 80 bp, synthetic construct; identical to SEQ ID NO: 18792
  source 1..80: mol_type = other DNA

SEQ ID NO: 99133 - DNA, 80 bp, synthetic construct
  source 1..80: mol_type = other DNA
ttgttcattgcatatgggttcaagattatttgttactgatcaattgtttttttctgtcactaagtcttaatcctttttat

SEQ ID NO: 99134 - DNA, 80 bp, synthetic construct
  source 1..80: mol_type = other DNA
agctaatttaacccatttatatttattgtaagttctgacatgtttggtttcatgtctgctatctttttttgtgttttgca

SEQ ID NO: 99135 - DNA, 80 bp, synthetic construct; identical to SEQ ID NO: 18793
  source 1..80: mol_type = other DNA

SEQ ID NO: 99136 - DNA, 80 bp, synthetic construct
  source 1..80: mol_type = other DNA
gccttgagatcacatggaagagaactgaggaattgagctgacaatgagaattgaggtcccagcctatggtcccagttgtg

SEQ ID NO: 99137 - DNA, 80 bp, synthetic construct
  source 1..80: mol_type = other DNA
ttgttttaagcctctgatacttgggatctatttctacatgatgacagataactgaaatgttaatgaaatcttgtccctca

SEQ ID NO: 99138 - DNA, 80 bp, synthetic construct
  source 1..80: mol_type = other DNA
tgttacccagttttttttttgcttaatgttgcttcttatatccacatactcattttgtgtcctgtttcttgttttcttaa

SEQ ID NO: 99139 - DNA, 80 bp, synthetic construct
  source 1..80: mol_type = other DNA
agataacagactattaccatccggtttttgttgttgctattgagtcatgtgctgtttgagtctaaatttcatttcttctt

SEQ ID NO: 99140 - DNA, 80 bp, synthetic construct; identical to SEQ ID NO: 18794
  source 1..80: mol_type = other DNA

SEQ ID NO: 99141 - DNA, 80 bp, synthetic construct
  source 1..80: mol_type = other DNA
gcaaatttagcaaaatatgaatggtctctttaagatttaatgaggaaagaagacttgtttaggttggaaaaacaccgtct

SEQ ID NO: 99142 - DNA, 80 bp, synthetic construct
  source 1..80: mol_type = other DNA
agcctaggttttctgttcaaaatgtttttctaccctctcttagaactgacagactaagaagcagcaaggattgagaggat

SEQ ID NO: 99143 - DNA, 80 bp, synthetic construct; identical to SEQ ID NO: 18795
  source 1..80: mol_type = other DNA

SEQ ID NO: 99144 - DNA, 80 bp, synthetic construct
  source 1..80: mol_type = other DNA
cagtggggaactctcaaaggaaagaaaatacatagaactgagtgaaatgaaatacaacatatcaatacatgtgggatgca

SEQ ID NO: 99145 - DNA, 80 bp, synthetic construct
  source 1..80: mol_type = other DNA
aatccaaggtaagcagaagaagggaaacaaagtaaaaacagaagtcaatgcaatagaaacaggaaaacaacagagagaaa

SEQ ID NO: 99146 - DNA, 80 bp, synthetic construct
  source 1..80: mol_type = other DNA
aatgctacaaacaactttatgcttatatatttgataacttaaagaagtggatcaattttttaaaaaccaaaaattaccca

SEQ ID NO: 99147 - DNA, 80 bp, synthetic construct; identical to SEQ ID NO: 18796
  source 1..80: mol_type = other DNA

SEQ ID NO: 99148 - DNA, 80 bp, synthetic construct
  source 1..80: mol_type = other DNA
aaagaattctacgccatgaccaatttggacttattctaggaatgtaagattggttcaacattcaaaattaaacattggta

SEQ ID NO: 99149 - DNA, 80 bp, synthetic construct
  source 1..80: mol_type = other DNA
aaaaacaaaagaactcaacctaaatatcatacgttatacaaaccaaccgaaagatgaacttaactgtaaaacacaaaact

SEQ ID NO: 99150 - DNA, 80 bp, synthetic construct
  source 1..80: mol_type = other DNA
catggtggcgcacgcctgtagtcccagctcctctgaaggctgaggcagaagaattgcttgaatccaggagccagaggttg

SEQ ID NO: 99151 - DNA, 80 bp, synthetic construct; identical to SEQ ID NO: 18797
  source 1..80: mol_type = other DNA

SEQ ID NO: 99152 - DNA, 80 bp, synthetic construct
  source 1..80: mol_type = other DNA
atgaaaaaatgttcaacatctcttgccattaggaaaatccagcttaggaccatgatgagctatcactgcacacacatcag

SEQ ID NO: 99153 - DNA, 80 bp, synthetic construct
  source 1..80: mol_type = other DNA
cagcaattgtactcttgatcaaatgaaataaaaagctgtataagaatgttcatagcatctttctgtaagagttgaaaact

SEQ ID NO: 99154 - DNA, 80 bp, synthetic construct
  source 1..80: mol_type = other DNA
attaaaaggaacaaactattgacgtaggccataatttgggtgattcttcagggaattacggtgaatgaaaaaaggccaat

SEQ ID NO: 99155 - DNA, 80 bp, synthetic construct; identical to SEQ ID NO: 18798
  source 1..80: mol_type = other DNA

SEQ ID NO: 99156 - DNA, 80 bp, synthetic construct
  source 1..80: mol_type = other DNA
ggattatttcttacaactgcatgtgaatctacaattatctcaataaaaaatttctataaaaatgctctattaaataatct

SEQ ID NO: 99157 - DNA, 80 bp, synthetic construct
  source 1..80: mol_type = other DNA
ttctcggttctggtgttttttcagctgagtcagttatattaagaatcatcttctctgccggactcactcctataatcaca

SEQ ID NO: 99158 - DNA, 80 bp, synthetic construct
  source 1..80: mol_type = other DNA
gagcccaggaggtagaggctgcggtgagccatgattgtgccacagcagacagagtgagacccgaacgaaaaaaaaaaatt

SEQ ID NO: 99159 - DNA, 80 bp, synthetic construct; identical to SEQ ID NO: 18799
  source 1..80: mol_type = other DNA

SEQ ID NO: 99160 - DNA, 80 bp, synthetic construct
  source 1..80: mol_type = other DNA
gttcatttgtcccttacaatctcctacctattatttccctgtaattagaagctcatgggggtgaggctttttcattttgg

SEQ ID NO: 99161 - DNA, 80 bp, synthetic construct
  source 1..80: mol_type = other DNA
aaacaccttgattttttgagagattagtactaagaaaccagacttactcattccattaagactttgaaaatccaacccaa

SEQ ID NO: 99162 - DNA, 80 bp, synthetic construct
  source 1..80: mol_type = other DNA
acactcttaatcaggggaataaagtacacaaaaaaattcagcagcaattgcaccatttactgctctgatgtttttgaaaa

SEQ ID NO: 99163 - DNA, 80 bp, synthetic construct
  source 1..80: mol_type = other DNA
tactggacctgtcaaaacagtgaacccaatgacagtgtttagaaaatgttcactgaaatggactcacagaccaaaagtat

SEQ ID NO: 99164 - DNA, 80 bp, synthetic construct; identical to SEQ ID NO: 18800
  source 1..80: mol_type = other DNA

SEQ ID NO: 99165 - DNA, 80 bp, synthetic construct
  source 1..80: mol_type = other DNA
agactcaaacttggtacaatttcctcagaccaactaaataatacgcctaagcttggacaaagtctatgggaacaccaaaa

SEQ ID NO: 99166 - DNA, 80 bp, synthetic construct
  source 1..80: mol_type = other DNA
attaacttagatgttaggcaatgccatttcccatctctgtctagaatgataggcctcttcaaccacaatggtctctttgc

SEQ ID NO: 99167 - DNA, 80 bp, synthetic construct
  source 1..80: mol_type = other DNA
aggccgggcacggtggcttacacctgtaatcccagcactttgggaggccgaggcgggtggatcacctgaggtcaggagtt

SEQ ID NO: 99168 - DNA, 80 bp, synthetic construct; identical to SEQ ID NO: 18801
  source 1..80: mol_type = other DNA

SEQ ID NO: 99169 - DNA, 80 bp, synthetic construct
  source 1..80: mol_type = other DNA
ctactggtgtaaaaatcttcctttatttgccatggtcccttattatcatcatggccccttactgttatcatgtctagcta

SEQ ID NO: 99170 - DNA, 80 bp, synthetic construct
  source 1..80: mol_type = other DNA
atcaccctgactcccagcttcctcatctgtaatataaaaggactggtctaggtaaaccccaaagtctctccctgctctaa

SEQ ID NO: 99171 - DNA, 80 bp, synthetic construct
  source 1..80: mol_type = other DNA
aactataagggaccatggccgtaggaaccttagcattaattaggccatgtgagacttccttaaattaaaaaataaaaaaa

SEQ ID NO: 99172 - DNA, 80 bp, synthetic construct; identical to SEQ ID NO: 18802
  source 1..80: mol_type = other DNA

SEQ ID NO: 99173 - DNA, 80 bp, synthetic construct
  source 1..80: mol_type = other DNA
cagtttaaaaagatcatctttccctgtttcctttcctcttttgactgctgacctgctgtattataacagtgataagagac

SEQ ID NO: 99174 - DNA, 80 bp, synthetic construct
  source 1..80: mol_type = other DNA
ttgagtattgtgaggggaaaaaggggcctaaaaaagtcacagatatatttgactagaggaagtaggaatacagtttaaga

SEQ ID NO: 99175 - DNA, 80 bp, synthetic construct
  source 1..80: mol_type = other DNA
atttgaacaatattatttgtgtatatcagtgtatctattcatggatgagtttgtctctcaggagacatttggcaattcct

SEQ ID NO: 99176 - DNA, 80 bp, synthetic construct; identical to SEQ ID NO: 18803
  source 1..80: mol_type = other DNA

SEQ ID NO: 99177 - DNA, 80 bp, synthetic construct
  source 1..80: mol_type = other DNA
ggtaattcttggattatttcaccgatcttaggtagagtgtaagaaactcctgtagtcactaattcaaccagaaggaagaa

SEQ ID NO: 99178 - DNA, 80 bp, synthetic construct
  source 1..80: mol_type = other DNA
gtagttgcaatgatgaaacagtctgcacacaagcaactcgatcagccagagcagggagtgggaaacataggtatgtgtga

SEQ ID NO: 99179 - DNA, 80 bp, synthetic construct; identical to SEQ ID NO: 18804
  source 1..80: mol_type = other DNA

SEQ ID NO: 99180 - DNA, 80 bp, synthetic construct
  source 1..80: mol_type = other DNA
ctgtggggagtgcgttaggggatgatggagagaaactttatatgtttaattcaattgtactcgttattaaagcttattca

SEQ ID NO: 99181 - DNA, 80 bp, synthetic construct
  source 1..80: mol_type = other DNA
aaacttcatacaccaccacttatagtttttagttctgtaatatacacgtacatatatgagtacagtgtatattctttgct

SEQ ID NO: 99182 - DNA, 80 bp, synthetic construct
  source 1..80: mol_type = other DNA
gtacctaatcttatgagcaagaaagaggagaatgaatatacaaagaagaccaagattaatttggggtatttaagacttta

SEQ ID NO: 99183 - DNA, 80 bp, synthetic construct
  source 1..80: mol_type = other DNA
gcctgtaatcccaactactcaggaggccgaggcaggagaatcgcttgaacccggcaggcagaggttgccgtgagccgaga

SEQ ID NO: 99184 - DNA, 80 bp, synthetic construct; identical to SEQ ID NO: 18805
  source 1..80: mol_type = other DNA

SEQ ID NO: 99185 - DNA, 80 bp, synthetic construct
  source 1..80: mol_type = other DNA
tatcagatgtgtccattgctactgagatattactgcttcttggcccctttagtagagatagttagaatacatatttattt

SEQ ID NO: 99186 - DNA, 80 bp, synthetic construct
  source 1..80: mol_type = other DNA
ttcttgactcatgttcaagtttgtaatcatttatttcttattttgctcctaaagtgacccagtaagggaaagctgatgtg

SEQ ID NO: 99187 - DNA, 80 bp, synthetic construct
  source 1..80: mol_type = other DNA
aacaaaaacaccactttccaaaatcctgtgtatttcacatatgtctaaggttttgaggacaacccaacctatacagcttt

SEQ ID NO: 99188 - DNA, 80 bp, synthetic construct; identical to SEQ ID NO: 18806
  source 1..80: mol_type = other DNA

SEQ ID NO: 99189 - DNA, 80 bp, synthetic construct
  source 1..80: mol_type = other DNA
tttgtttgaggttccaaattcaatacacagctagcactgaggagggtgtagcaaattttccagcagttgcagccaggatt

SEQ ID NO: 99190 - DNA, 80 bp, synthetic construct
  source 1..80: mol_type = other DNA
gtccttgggcaaagcattggttccctttgaggctgtttccttccctgtaaaacaaaaataaaagtcatgttcttgcttac

SEQ ID NO: 99191 - DNA, 80 bp, synthetic construct
  source 1..80: mol_type = other DNA
taattcaagtaatttcaaatgcctcagggtacaaagagctgtgtgagagtcttagatatttgcactgccctgtggtaata

SEQ ID NO: 99192 - DNA, 80 bp, synthetic construct; identical to SEQ ID NO: 18807
  source 1..80: mol_type = other DNA

SEQ ID NO: 99193 - DNA, 80 bp, synthetic construct
  source 1..80: mol_type = other DNA
caataaatgtcggaggaggaggttacacatatagggagatcctggggggaaaggagtttccaggcttagtgacaaaggag

SEQ ID NO: 99194 - DNA, 80 bp, synthetic construct
  source 1..80: mol_type = other DNA
aaacaaaatcttacaagaaccccaatatgtaaaacagaaaaatttgacgctgctctgttgaagcaaggcctgggggactc

SEQ ID NO: 99195 - DNA, 80 bp, synthetic construct; identical to SEQ ID NO: 18808
  source 1..80: mol_type = other DNA

SEQ ID NO: 99196 - DNA, 80 bp, synthetic construct
  source 1..80: mol_type = other DNA
gagcgtaagacaagacagaacaagagaaagcttctactgacaatgtcttggtcacttcattgcaaaaacaaagctagtcc

SEQ ID NO: 99197 - DNA, 80 bp, synthetic construct
  source 1..80: mol_type = other DNA
cctgtagtctataaatattctatgttacgaggcaatggagaaactaagattgctaaccagctgactgtgaggtgggaaga

SEQ ID NO: 99198 - DNA, 80 bp, synthetic construct
  source 1..80: mol_type = other DNA
gtgatgtgatttgagaacttgactggtcactgcagtttttgagatggaagagggccacaggccaaagcaatgcaggcagc

SEQ ID NO: 99199 - DNA, 80 bp, synthetic construct; identical to SEQ ID NO: 18809
  source 1..80: mol_type = other DNA

SEQ ID NO: 99200 - DNA, 80 bp, synthetic construct
  source 1..80: mol_type = other DNA
agtggctttacttcctcctccccacaaatgagaaaatgaggcccgagagatgtgttctgacctgtcccaggtcacatgca

SEQ ID NO: 99201 - DNA, 80 bp, synthetic construct
  source 1..80: mol_type = other DNA
taggaccctgtgtttgtaaacagctcacaagtgaggtctggcctctgggtctggagcggctgtagaagcagcttctgttc

SEQ ID NO: 99202 - DNA, 80 bp, synthetic construct
  source 1..80: mol_type = other DNA
aaaggtcagggctaaccagaaggatataactctttgtgctgcccaagagaaagatgtcactcataagtgatgattatttt

SEQ ID NO: 99203 - DNA, 80 bp, synthetic construct
  source 1..80: mol_type = other DNA
tgcatgcctataatcccacctactctagacgctgaggcaggaggatcatctgagcctggggagatgagggctgcagtgag

SEQ ID NO: 99204 - DNA, 80 bp, synthetic construct; identical to SEQ ID NO: 18810
  source 1..80: mol_type = other DNA

SEQ ID NO: 99205 - DNA, 80 bp, synthetic construct
  source 1..80: mol_type = other DNA
cccaggagggttgctactctgtaactgcggtcatggacccctgagtcttcattttaaaagaatccatgcacccctctgtt

SEQ ID NO: 99206 - DNA, 80 bp, synthetic construct
  source 1..80: mol_type = other DNA
gatatgtgaactcagagaggaagccaaagtttggctgactggtttctaggagtacagagtgaaaacgttgcttgtattta

SEQ ID NO: 99207 - DNA, 80 bp, synthetic construct; identical to SEQ ID NO: 18811
  source 1..80: mol_type = other DNA

SEQ ID NO: 99208 - DNA, 80 bp, synthetic construct
  source 1..80: mol_type = other DNA
ttttgtgagacagtcttgctctgtcacccaggctgggagtacagtggcgtgatctcggctcactgcaatgtctgcctcct

SEQ ID NO: 99209 - DNA, 80 bp, synthetic construct
  source 1..80: mol_type = other DNA
ggcctcccaaagtgctgggattacaggcatcagccaccacgtctggcctatatttcttttttggtttttttttttaatat

SEQ ID NO: 99210 - DNA, 80 bp, synthetic construct
  source 1..80: mol_type = other DNA
tcaggaggctgaggtgggaagatcacttgagcctgggaggtcaagggtgcagtgagctgtgattgtggcacttcactcca

SEQ ID NO: 99211 - DNA, 80 bp, synthetic construct; identical to SEQ ID NO: 18812
  source 1..80: mol_type = other DNA

SEQ ID NO: 99212 - DNA, 80 bp, synthetic construct
  source 1..80: mol_type = other DNA
taattcttcaggaaaataatgaaatatgttgatcagttgcctggctcagtcagcaaacactgaggtgcctataaagtcca

SEQ ID NO: 99213 - DNA, 80 bp, synthetic construct
  source 1..80: mol_type = other DNA
gggaacttgaggctatggggttttcagttgtcaatctagagtagcgaaaaaacaagcttgagggttacacgacccttgtt

SEQ ID NO: 99214 - DNA, 80 bp, synthetic construct
  source 1..80: mol_type = other DNA
tttcttcctccaagagcccgaagcaaacaggggattttcaagaataatttctgtttggctatgggatatgttatgttacc

SEQ ID NO: 99215 - DNA, 80 bp, synthetic construct
  source 1..80: mol_type = other DNA
atacatgcacataaaggagaaatggctgtgtttagaaaaaatggtcatacataaataagttgattactttggtgatggga

SEQ ID NO: 99216 - DNA, 80 bp, synthetic construct; identical to SEQ ID NO: 18813
  source 1..80: mol_type = other DNA

SEQ ID NO: 99217 - DNA, 80 bp, synthetic construct
  source 1..80: mol_type = other DNA
ctcacttgcgccagcccttctaaggccctagaactaggttcttatggttgtatgatttctgtaaaatttgtaagaaatat

SEQ ID NO: 99218 - DNA, 80 bp, synthetic construct
  source 1..80: mol_type = other DNA
attcatttagtttgggtttagtgggatgtgtatatgtgtgttgtagcctcttccaggtagagttaagctgttgctgggaa

SEQ ID NO: 99219 - DNA, 80 bp, synthetic construct; identical to SEQ ID NO: 18814
  source 1..80: mol_type = other DNA

SEQ ID NO: 99220 - DNA, 80 bp, synthetic construct
  source 1..80: mol_type = other DNA
ctctgagtttataggcaagtctgaagcagtactacaaaagcaaggtgtctctagcagtttatgaatgaaaaaagcaaaag

SEQ ID NO: 99221 - DNA, 80 bp, synthetic construct
  source 1..80: mol_type = other DNA
gcgtgggagactcatttagtttgggtttagtgggatgtgtatatgtgtgttgtagcctcttccaggtagagttaagctat

SEQ ID NO: 99222 - DNA, 80 bp, synthetic construct
  source 1..80: mol_type = other DNA
gagtgcagtggggtgatcttggctcactgcaacctctgtctcccgggttcaagctattctcctgcctcagcctcctgagt

SEQ ID NO: 99223 - DNA, 80 bp, synthetic construct
  source 1..80: mol_type = other DNA
atgccaggttgagattttttttggaaagttttcttaaaagcgtctccttacctctgcttctaatacagctcttttatatt

SEQ ID NO: 99224 - DNA, 80 bp, synthetic construct; identical to SEQ ID NO: 18815
  source 1..80: mol_type = other DNA

SEQ ID NO: 99225 - DNA, 80 bp, synthetic construct
  source 1..80: mol_type = other DNA
acaaccactaattaattccaaaggcaaggtaggcaaatatcattatcttcaatttacaggccaggaatttaacaaggaag

SEQ ID NO: 99226 - DNA, 80 bp, synthetic construct
  source 1..80: mol_type = other DNA
agaagttgttttggagccaatatttgtggatgacattgtgggactacaaaagatgacagcaaaaagcagcacatgattaa

SEQ ID NO: 99227 - DNA, 80 bp, synthetic construct
  source 1..80: mol_type = other DNA
aagaatgcaagggcttgactgcttttcacttgggccctttctcaggttatttgctgtgaataaccttgagggacgagata

SEQ ID NO: 99228 - DNA, 80 bp, synthetic construct; identical to SEQ ID NO: 18816
  source 1..80: mol_type = other DNA

SEQ ID NO: 99229 - DNA, 80 bp, synthetic construct
  source 1..80: mol_type = other DNA
ccctcctgttatgacactgagcaccctttattgtaattgcttatttaattcctttattccccaccaggctggaagctatg

SEQ ID NO: 99230 - DNA, 80 bp, synthetic construct
  source 1..80: mol_type = other DNA
aaccagttccccaggaggaaagagttttaaaaggtaggcagagtaactgctttcatgtgtcctcgaacattccactctct

SEQ ID NO: 99231 - DNA, 80 bp, synthetic construct
  source 1..80: mol_type = other DNA
ccccaacctgcttgtttgagtgtatggttctggtgtggatgttcgctcaatttccacatctcatgggcattggtggaaag

SEQ ID NO: 99232 - DNA, 80 bp, synthetic construct; identical to SEQ ID NO: 18817
  source 1..80: mol_type = other DNA

SEQ ID NO: 99233 - DNA, 80 bp, synthetic construct
  source 1..80: mol_type = other DNA
tctcctctcacctttccttctcccttcccttcctccttctgagacacaaacggaaatagtatattagctatgaccatgaa

SEQ ID NO: 99234 - DNA, 80 bp, synthetic construct
  source 1..80: mol_type = other DNA
gcccgggaaacacttccaagttgtcttgggaagtgctcccttatgtatttgcacaggcagggtctttttttttttttttt

SEQ ID NO: 99235 - DNA, 80 bp, synthetic construct; identical to SEQ ID NO: 18818
  source 1..80: mol_type = other DNA

SEQ ID NO: 99236 - DNA, 80 bp, synthetic construct
  source 1..80: mol_type = other DNA
ctataccttgttgagctatagggtaagagctatggtatctagcatatggcattgttaggttaatgtatggccacttggtg

SEQ ID NO: 99237 - DNA, 80 bp, synthetic construct
  source 1..80: mol_type = other DNA
tgagattttgtttttttttgtttttaactcaacaatcatgtattgagcctgtccggggccagtctgggccagtccagaga

SEQ ID NO: 99238 - DNA, 80 bp, synthetic construct
  source 1..80: mol_type = other DNA
gtgagaatagcagtcagtaggttaagaacacaggtttctagttcaacagaccttgactcagtcccatcctatcttattag

SEQ ID NO: 99239 - DNA, 80 bp, synthetic construct
  source 1..80: mol_type = other DNA
ccctttattttagttcaaattaaacaaatactcaaatgccctggtggaagcagttaacacccacaagttaaaacttgcct

SEQ ID NO: 99240 - DNA, 80 bp, synthetic construct; identical to SEQ ID NO: 18819
  source 1..80: mol_type = other DNA

SEQ ID NO: 99241 - DNA, 80 bp, synthetic construct
  source 1..80: mol_type = other DNA
ttgtgtcagccagtgccaaagtccttccaggtggtggctgctctttctaaggactatttgaacttacagcaatctgatca

SEQ ID NO: 99242 - DNA, 80 bp, synthetic construct
  source 1..80: mol_type = other DNA
ttgttggtgctgggcactgtgttagactccagaaagacagataattgtttagtaaaggaaaaaaaaatgctgtttctgcc

SEQ ID NO: 99243 - DNA, 80 bp, synthetic construct
  source 1..80: mol_type = other DNA
ctaaaagagtatagttggatggtttgtaacacaaaggataaatgcttgaggggatggataccctactttccatgatgtga

SEQ ID NO: 99244 - DNA, 80 bp, synthetic construct; identical to SEQ ID NO: 18820
  source 1..80: mol_type = other DNA

SEQ ID NO: 99245 - DNA, 80 bp, synthetic construct
  source 1..80: mol_type = other DNA
tggaagattcaatggtcttccagagttttctcacatacccccctaaaataattgtgaataatcatgtgcctccttgcgtg

SEQ ID NO: 99246 - DNA, 80 bp, synthetic construct
  source 1..80: mol_type = other DNA
attgtcagaccaatcagctaactttgaattgctttctgacagaaaaatagtttactcgactgtattaatcacgctgctga

SEQ ID NO: 99247 - DNA, 80 bp, synthetic construct
  source 1..80: mol_type = other DNA
aaaggggaaacccctataaaagcatcaaatgtttgatgaaaagactttgaaattcattgttgaaaagacttattctgttc

SEQ ID NO: 99248 - DNA, 80 bp, synthetic construct; identical to SEQ ID NO: 18821
  source 1..80: mol_type = other DNA

SEQ ID NO: 99249 - DNA, 80 bp, synthetic construct
  source 1..80: mol_type = other DNA
gttttactttcatgggactctcctgtcttagctctaaattttcttattgtcccattgtttggtgcaagttcttttttttt

SEQ ID NO: 99250 - DNA, 80 bp, synthetic construct
  source 1..80: mol_type = other DNA
gtttttagtagagactgggtttctccgtgttggtcaggctggtctcgaactcccgacctcaggtgatctgcccaccttgg

SEQ ID NO: 99251 - DNA, 80 bp, synthetic construct
  source 1..80: mol_type = other DNA
gttttaaggaggacatgcagaagttgaagatgtggaacacacatcccatctaaggggtgacatccttcagtttgtggaca

SEQ ID NO: 99252 - DNA, 80 bp, synthetic construct; identical to SEQ ID NO: 18822
  source 1..80: mol_type = other DNA

SEQ ID NO: 99253 - DNA, 80 bp, synthetic construct
  source 1..80: mol_type = other DNA
agacactaagatgattcactgtctgctgaggagcaccttgaaagtcagaccaggatatttcaggtcctacaccacctgac

SEQ ID NO: 99254 - DNA, 80 bp, synthetic construct
  source 1..80: mol_type = other DNA
cactgcccgttgatagaacctgcttccccctttgaaccatatctgacttgccttgactttcacctttgtaaaaatgggaa

SEQ ID NO: 99255 - DNA, 80 bp, synthetic construct
  source 1..80: mol_type = other DNA
ctggattcaagctattctcctgcctcagcctcccaagtaacttgcattacaggctcatgccaccacctcggctgattttt

SEQ ID NO: 99256 - DNA, 80 bp, synthetic construct; identical to SEQ ID NO: 18823
  source 1..80: mol_type = other DNA

SEQ ID NO: 99257 - DNA, 80 bp, synthetic construct
  source 1..80: mol_type = other DNA
catccgtgagcgtgagggaattgtgattgtgatcagggaatttgtcatggattgatgaccaagtgtggaaaaactcaaac

SEQ ID NO: 99258 - DNA, 80 bp, synthetic construct
  source 1..80: mol_type = other DNA
caagcaagcaatcaataagttctggaggggacaccagctgggtatcctctggcccagtttgattccaatctgtctacgtg

SEQ ID NO: 99259 - DNA, 80 bp, synthetic construct
  source 1..80: mol_type = other DNA
aaattggggttctcacaacgctttccttggcttcaatcagtttgctagagcagttcagagaaatacaattactggtttat

SEQ ID NO: 99260 - DNA, 80 bp, synthetic construct; identical to SEQ ID NO: 18824
  source 1..80: mol_type = other DNA

SEQ ID NO: 99261 - DNA, 80 bp, synthetic construct
  source 1..80: mol_type = other DNA
gaaggacacatatcactgaagattccaagaatttttggagttgtatttcaggaaatgggtaggaagatcaaacatacatt

SEQ ID NO: 99262 - DNA, 80 bp, synthetic construct
  source 1..80: mol_type = other DNA
gaagcccaaccttgttcatggattttttttccctttcataggagagactgtgctcaagatccagattcatttgttgattc

SEQ ID NO: 99263 - DNA, 80 bp, synthetic construct; identical to SEQ ID NO: 18825
  source 1..80: mol_type = other DNA

SEQ ID NO: 99264 - DNA, 80 bp, synthetic construct
  source 1..80: mol_type = other DNA
tctaaattgatagggactaagttcatttggataatcataaatctgcaaataaataggagggtagttggagggattctgca

SEQ ID NO: 99265 - DNA, 80 bp, synthetic construct
  source 1..80: mol_type = other DNA
tcattctgtactataaagatgaaagtcttggctatcacgtgggaaggcaagttcttgaatggaaatatgtgctaaggtag

SEQ ID NO: 99266 - DNA, 80 bp, synthetic construct
  source 1..80: mol_type = other DNA
ttcactgcagcctctacctccttggcacaagcaactctcccaactcagtgtcctgagaagttgggactataggcgcttgc

SEQ ID NO: 99267 - DNA, 80 bp, synthetic construct
  source 1..80: mol_type = other DNA
tgtgccaccacgcccagctaatttttgtaattttgagtagagacagaatttcaccatgatggccaagctggtctcaaact

SEQ ID NO: 99268 - DNA, 80 bp, synthetic construct; identical to SEQ ID NO: 18826
  source 1..80: mol_type = other DNA

SEQ ID NO: 99269 - DNA, 80 bp, synthetic construct
  source 1..80: mol_type = other DNA
ccagccttttatagagccaagaagctggctctttaccgcatgtttttttcaacatcctctataaaaaaccctttgtggtg

SEQ ID NO: 99270 - DNA, 80 bp, synthetic construct
  source 1..80: mol_type = other DNA
tttattggatgacctctcactgacctttctcttgtgttctaaatgccattctcatgccaaactccataagagttattgtt

SEQ ID NO: 99271 - DNA, 80 bp, synthetic construct; identical to SEQ ID NO: 18827
  source 1..80: mol_type = other DNA

SEQ ID NO: 99272 - DNA, 80 bp, synthetic construct
  source 1..80: mol_type = other DNA
aacacgtactctttctctaccaaaagtgaatttatcagttacacatacaaggtacacttttccttaatgactgaggtttg

SEQ ID NO: 99273 - DNA, 80 bp, synthetic construct
  source 1..80: mol_type = other DNA
cagttctcaaatcctttggttatatgggttagggaatcccatgagttctgaatctagtgatagaacaatcacattgtacc

SEQ ID NO: 99274 - DNA, 80 bp, synthetic construct
  source 1..80: mol_type = other DNA
ttcacttctggagcctcacgtcttgactgctgccacaaccaagttttcctgccaagtgcttacacccacagaaaggctgt

SEQ ID NO: 99275 - DNA, 80 bp, synthetic construct
  source 1..80: mol_type = other DNA
acagggaatgaatgataaagaggaaacagagctgccaggatgagtgattgtcaaaggtggatgctttcctgattagctgc

SEQ ID NO: 99276 - DNA, 80 bp, synthetic construct; identical to SEQ ID NO: 18828
  source 1..80: mol_type = other DNA

SEQ ID NO: 99277 - DNA, 80 bp, synthetic construct
  source 1..80: mol_type = other DNA
cccatccctaaaaaactaaaaagtgaaaaattagccaggcatggtggtatgtgcctgtagtcccagctacttgggaggct

SEQ ID NO: 99278 - DNA, 80 bp, synthetic construct
  source 1..80: mol_type = other DNA
gccaaggcaggtggatctcctgaggtcaggagttcaagactagcctggccaacatggtgagaccctgtctctactaaaaa

SEQ ID NO: 99279 - DNA, 80 bp, synthetic construct; identical to SEQ ID NO: 18829
  source 1..80: mol_type = other DNA

SEQ ID NO: 99280 - DNA, 80 bp, synthetic construct
  source 1..80: mol_type = other DNA
aggattataataggccttcccaaaactaaactacttttgtaaaactaatgaaaggtcacaaggttaggaaggttaggatt

SEQ ID NO: 99281 - DNA, 80 bp, synthetic construct
  source 1..80: mol_type = other DNA
tcatttctgacaaccagatgactccacctggacccatgtcccttacccagatgctgactcagcgcatgaggactattttc

SEQ ID NO: 99282 - DNA, 80 bp, synthetic construct
  source 1..80: mol_type = other DNA
ctattgcaattcccctgtcttgataaatcagctgtatctgggcagtgggcaagatgagcccattgggtggttacattgct

SEQ ID NO: 99283 - DNA, 80 bp, synthetic construct
  source 1..80: mol_type = other DNA
agaatctgactttttgctggtgcctcttctgtgacaccagccaccttctgtagaacacacccagccaggcagcctggctt

SEQ ID NO: 99284 - DNA, 80 bp, synthetic construct; identical to SEQ ID NO: 18830
  source 1..80: mol_type = other DNA

SEQ ID NO: 99285 - DNA, 80 bp, synthetic construct
  source 1..80: mol_type = other DNA
aggagatcaagaccatcctggccaacatggtgaaaccccacctactaaaaatacaaaaattagctaggcatggtggtgca

SEQ ID NO: 99286 - DNA, 80 bp, synthetic construct
  source 1..80: mol_type = other DNA
atttggggttagagtttttaagggttttggagggggtcaaagggtggagagtgttgattggttgaagagtgcagggtgta

SEQ ID NO: 99287 - DNA, 80 bp, synthetic construct
  source 1..80: mol_type = other DNA
taacaatgtggatgcaaatccatttttaaatagtcttttgacctaacatcagaaatcctatctctatgaacaatggggat

SEQ ID NO: 99288 - DNA, 80 bp, synthetic construct; identical to SEQ ID NO: 18831
  source 1..80: mol_type = other DNA

SEQ ID NO: 99289 - DNA, 80 bp, synthetic construct
  source 1..80: mol_type = other DNA
gccctgcaaatttatatattgaaacccaggagttaattagttcttgagggtggagagctaatgatgggatttgtcccctt

SEQ ID NO: 99290 - DNA, 80 bp, synthetic construct
  source 1..80: mol_type = other DNA
aggctatggtatttttatcacagcagcctgagctaagacacgcccacaccccaccctacttgtattagtctgttcttaga

SEQ ID NO: 99291 - DNA, 80 bp, synthetic construct
  source 1..80: mol_type = other DNA
tgagcatgtgtgaaggaagcaaaaggggaagagccccttgtaaaaccatcagatctcgtgagaactcactatcatgagaa

SEQ ID NO: 99292 - DNA, 80 bp, synthetic construct; identical to SEQ ID NO: 18832
  source 1..80: mol_type = other DNA

SEQ ID NO: 99293 - DNA, 80 bp, synthetic construct
  source 1..80: mol_type = other DNA
tgacacctgttttggcctctctgttgcctcatgttggtaaatgttgtttctatgtttgcctttacctatgagtgtgtgtg

SEQ ID NO: 99294 - DNA, 80 bp, synthetic construct
  source 1..80: mol_type = other DNA
cacacccgaaggaaagtcccttggaaaactttgtttgggagtgtcaatgaaaaggccaaactccataaaatatttaaaga

SEQ ID NO: 99295 - DNA, 80 bp, synthetic construct
  source 1..80: mol_type = other DNA
gctgggagcatcagcaagctactgccttaaaatccgagctccccgaatgcacaatttctgtcccttttaagggctcacaa

SEQ ID NO: 99296 - DNA, 80 bp, synthetic construct
  source 1..80: mol_type = other DNA
ctaagttatgagttgatttttaactagtgggtttaggccaggcaggcctaggcctggtttcgggcctggcaccgggctgc

SEQ ID NO: 99297 - DNA, 80 bp, synthetic construct; identical to SEQ ID NO: 18833
  source 1..80: mol_type = other DNA

SEQ ID NO: 99298 - DNA, 80 bp, synthetic construct
  source 1..80: mol_type = other DNA
gcctttgaaaggtgctagactcttaatcttttcaggatcaggaggccctggaaggggaaagactctatgttaacagagat

SEQ ID NO: 99299 - DNA, 80 bp, synthetic construct; identical to SEQ ID NO: 18834
  source 1..80: mol_type = other DNA

SEQ ID NO: 99300 - DNA, 80 bp, synthetic construct
  source 1..80: mol_type = other DNA
tggggtgaccacagtgggcaagtattacaatttcctcagttttttgcataaagaatctgaggctcagaaagctgaataag

SEQ ID NO: 99301 - DNA, 80 bp, synthetic construct
  source 1..80: mol_type = other DNA
agaaatagtacagttgacccttgaacaacacagaggttaggggcactaaccgccacccccccctcaccatgcagttgaaa

SEQ ID NO: 99302 - DNA, 80 bp, synthetic construct
  source 1..80: mol_type = other DNA
catgaggaagagaaagtatattcactcttcattaagtgaagctggatcttcatctttttcttcacgttgaacaggctgag

SEQ ID NO: 99303 - DNA, 80 bp, synthetic construct
  source 1..80: mol_type = other DNA
aaaaacctgcataaaagtgcaattcaaaccatgttattcaagggccagccgtacaaacctccagaagaatataaagtgaa

SEQ ID NO: 99304 - DNA, 80 bp, synthetic construct; identical to SEQ ID NO: 18835
  source 1..80: mol_type = other DNA

SEQ ID NO: 99305 - DNA, 80 bp, synthetic construct
  source 1..80: mol_type = other DNA
cttatttacttcaggaaacatctctgttcctcttgagcatattttctctctttaattatggagtgtttttgcctggggag

SEQ ID NO: 99306 - DNA, 80 bp, synthetic construct
  source 1..80: mol_type = other DNA
aggtgcagcagggtttagctttctgctttccctgaaggatttgtcagggtagcttagtgttttgattaattaacttaaag

SEQ ID NO: 99307 - DNA, 80 bp, synthetic construct
  source 1..80: mol_type = other DNA
ctgggattctatataaatgcaaattgtcaccttcccccacccattcagtccctttcaggcacagaaatgagtaagagctg

SEQ ID NO: 99308 - DNA, 80 bp, synthetic construct; identical to SEQ ID NO: 18836
  source 1..80: mol_type = other DNA

SEQ ID NO: 99309 - DNA, 80 bp, synthetic construct
  source 1..80: mol_type = other DNA
gtgagggcacagtgagaaaacagtcgtctacgaaccgggaaatggtctctcagcagacactgaatcagctggcaccctga

SEQ ID NO: 99310 - DNA, 80 bp, synthetic construct
  source 1..80: mol_type = other DNA
aagggggaaaatgtcacaaaaagtctgatctttgtagaggcaaaggaaagcacatttatggaattgttaaagtgtcaggc

SEQ ID NO: 99311 - DNA, 80 bp, synthetic construct
  source 1..80: mol_type = other DNA
cttaactgatgacattaccttgtgaaattccttctcctggctcatcctggctcaaaaagctccctcactgagcaccttgt

SEQ ID NO: 99312 - DNA, 80 bp, synthetic construct; identical to SEQ ID NO: 18837
  source 1..80: mol_type = other DNA

SEQ ID NO: 99313 - DNA, 80 bp, synthetic construct
  source 1..80: mol_type = other DNA
tcacaggaaagctgtggacatttgacaagatgtttttgcaagttgcacctgacaactccctaacaaataccagctgatgt

SEQ ID NO: 99314 - DNA, 80 bp, synthetic construct
  source 1..80: mol_type = other DNA
ctagagcccatgagacttttagggacccatgaaagtgttttaattactttcaaaatcagaagaaaaaatagaatattaat

SEQ ID NO: 99315 - DNA, 80 bp, synthetic construct
  source 1..80: mol_type = other DNA
tcacctcagagagtgagttggcagcatgggttgctgcttgctgttgtttgctcaggtaatggaacaggtggagcctgaaa

SEQ ID NO: 99316 - DNA, 80 bp, synthetic construct; identical to SEQ ID NO: 18838
  source 1..80: mol_type = other DNA

SEQ ID NO: 99317 - DNA, 80 bp, synthetic construct
  source 1..80: mol_type = other DNA
aggatgaggtaggaggtcggcacaagatacaggtcataaagacctagctgataaaacaggttgcagtaaagaagccggcc

SEQ ID NO: 99318 - DNA, 80 bp, synthetic construct
  source 1..80: mol_type = other DNA
acatgtcatcaggaaataaccataaaaatgggcaaccagtagctgtcagggctgctctgcctacggagtagcctttcctt

SEQ ID NO: 99319 - DNA, 80 bp, synthetic construct
  source 1..80: mol_type = other DNA
gtaaaagacttaagacaaatgatgggattcaggacatgtcctgaattctcctatgactttaggagaccagaaacatgcca

SEQ ID NO: 99320 - DNA, 80 bp, synthetic construct; identical to SEQ ID NO: 18839
  source 1..80: mol_type = other DNA

SEQ ID NO: 99321 - DNA, 80 bp, synthetic construct
  source 1..80: mol_type = other DNA
agcaaaggatggtttttaagcttgaagtcaaagctacctatttgagatctgctctcaagaattattcattccctggctat

SEQ ID NO: 99322 - DNA, 80 bp, synthetic construct
  source 1..80: mol_type = other DNA
ctcccctacacacaaataatggtggtttcttgcttcacatttctgtctttctgtctccttattcctgttccttgaaggca

SEQ ID NO: 99323 - DNA, 80 bp, synthetic construct
  source 1..80: mol_type = other DNA
tctattatggcagatgaagatttagctgtcttaacattctccaccttatttctcctccctcccccagctactaatatagt

SEQ ID NO: 99324 - DNA, 80 bp, synthetic construct; identical to SEQ ID NO: 18840
  source 1..80: mol_type = other DNA

SEQ ID NO: 99325 - DNA, 80 bp, synthetic construct
  source 1..80: mol_type = other DNA
caaaagttgccttttggcccaccacacccacctatcctgtacccttataaaccctaaccccaggctccacaagcagacaa

SEQ ID NO: 99326 - DNA, 80 bp, synthetic construct
  source 1..80: mol_type = other DNA
agagccacctccaccactcagtaaaactcccacgtttgccatcctttaagtccaggcgtgaccttatttttcctggacac

SEQ ID NO: 99327 - DNA, 80 bp, synthetic construct
  source 1..80: mol_type = other DNA
gcactgtaacacatgcccacttgggcttcgggagtcacaggcacccacccctagatgcaaccatggggccggaggccaaa

SEQ ID NO: 99328 - DNA, 80 bp, synthetic construct; identical to SEQ ID NO: 18841
  source 1..80: mol_type = other DNA

SEQ ID NO: 99329 - DNA, 80 bp, synthetic construct
  source 1..80: mol_type = other DNA
tctttcccaaagcaaaccataaacctaaaaatgtcagtctctgacctttcttctccccttaaaactctcatttgacaggt

SEQ ID NO: 99330 - DNA, 80 bp, synthetic construct
  source 1..80: mol_type = other DNA
gccaagaagaagctaaacaaacaagccatgatggattcccatctcagcttattaccattgggacatgtcctttttgtcca

SEQ ID NO: 99331 - DNA, 80 bp, synthetic construct; identical to SEQ ID NO: 18842
  source 1..80: mol_type = other DNA

SEQ ID NO: 99332 - DNA, 80 bp, synthetic construct
  source 1..80: mol_type = other DNA
tgcagcagccgccgccgccgccccagccaccgcccccgccccaagccggcctaccccagatcatccaaaagtaagaaggg

SEQ ID NO: 99333 - DNA, 80 bp, synthetic construct
  source 1..80: mol_type = other DNA
ggctggaaagaggggagccaagttctttagggaaaattattttgtttttccttatctcctttctcttctcttcaggaatg

SEQ ID NO: 99334 - DNA, 80 bp, synthetic construct
  source 1..80: mol_type = other DNA
cccttcatggtgcccctgaaaccaaccagtggaaagggaggtgacagtttgtaaacaacatgttttactttgccctgaaa

SEQ ID NO: 99335 - DNA, 80 bp, synthetic construct; identical to SEQ ID NO: 18843
  source 1..80: mol_type = other DNA

SEQ ID NO: 99336 - DNA, 80 bp, synthetic construct
  source 1..80: mol_type = other DNA
tgatgcgcacctctgcgaaactgacaacactaaataaatacacgcaagtacagcaaaatttacccttatggaacacagca

SEQ ID NO: 99337 - DNA, 80 bp, synthetic construct; identical to SEQ ID NO: 18844
  source 1..80: mol_type = other DNA

SEQ ID NO: 99338 - DNA, 80 bp, synthetic construct
  source 1..80: mol_type = other DNA
tacttaaaatttctctttattccttaatataaatgtaaagcaacagagaaaaactatttaaaatttaaagtttacttagt

SEQ ID NO: 99339 - DNA, 80 bp, synthetic construct
  source 1..80: mol_type = other DNA
agaaaactgggaactttatattcacagaaaagtctttgtagaagggcgtctgattatgaaatactgccaggttgaaaata

SEQ ID NO: 99340 - DNA, 80 bp, synthetic construct
  source 1..80: mol_type = other DNA
ttgaagggcaggatggagacctcaagaagcgcctcatggctttgcttgctttacattggtgacggatcagtgttcaggga

SEQ ID NO: 99341 - DNA, 80 bp, synthetic construct; identical to SEQ ID NO: 18845
  source 1..80: mol_type = other DNA

SEQ ID NO: 99342 - DNA, 80 bp, synthetic construct
  source 1..80: mol_type = other DNA
gaacctctattttttctagttattttagtgaggtcgttatgtaactggtaagaggagaagttttgattgctttcaaaatg

SEQ ID NO: 99343 - DNA, 80 bp, synthetic construct
  source 1..80: mol_type = other DNA
cagttcctgttcacgttatatttggtgtttagagaactgccgtatactacatttacaaagataaacacatgaagcgtgat

SEQ ID NO: 99344 - DNA, 80 bp, synthetic construct
  source 1..80: mol_type = other DNA
agcttccattaagaatcatccataccttttctgctcttgtttactgtaaagattatcagccatgtatagacacagataat

SEQ ID NO: 99345 - DNA, 80 bp, synthetic construct
  source 1..80: mol_type = other DNA
tgagaacttaacaaatatatattttttccatactagcagaaataagaaaacattgacattctggtgaatgttttataagg

SEQ ID NO: 99346 - DNA, 80 bp, synthetic construct; identical to SEQ ID NO: 18846
  source 1..80: mol_type = other DNA

SEQ ID NO: 99347 - DNA, 80 bp, synthetic construct
  source 1..80: mol_type = other DNA
tgaagtgaatgtagaggtgattttcctaacttatttgatttgcagcaaaatattcctgggtaatgcgtggcatcaggttg

SEQ ID NO: 99348 - DNA, 80 bp, synthetic construct
  source 1..80: mol_type = other DNA
tgatctctttgatctatagtcttccgtatagcattagaacactggctgtctatattttcagagcaaagtgctcccctcac

SEQ ID NO: 99349 - DNA, 80 bp, synthetic construct
  source 1..80: mol_type = other DNA
agtcagagagaagaaataagaatttgctaaaaagggacattccctttcattcatacttggtcctttctggaaagaggatg

SEQ ID NO: 99350 - DNA, 80 bp, synthetic construct; identical to SEQ ID NO: 18847
  source 1..80: mol_type = other DNA

SEQ ID NO: 99351 - DNA, 80 bp, synthetic construct
  source 1..80: mol_type = other DNA
aaatgtagtacattattcccattagtcacagtaaaggactatgcatatggtgcacacagagctgttctaatgccagtgct

SEQ ID NO: 99352 - DNA, 80 bp, synthetic construct
  source 1..80: mol_type = other DNA
ccattggaatgtgaactctgatctgttaagatctctttgccagtcctaatagtcaccagggggcagaaaaaaaccaacca

SEQ ID NO: 99353 - DNA, 80 bp, synthetic construct
  source 1..80: mol_type = other DNA
aaactaatattcttccccgcccacaacagccggtcctcaagtgaacaaattgatatagctcaattcacaggtttgataaa

SEQ ID NO: 99354 - DNA, 80 bp, synthetic construct; identical to SEQ ID NO: 18848
  source 1..80: mol_type = other DNA

SEQ ID NO: 99355 - DNA, 80 bp, synthetic construct
  source 1..80: mol_type = other DNA
tttggtatattttaacagggaaaattgctgtggatctgcagctagtgtgagtgactggtagctgcgtttagagtgttgaa

SEQ ID NO: 99356 - DNA, 80 bp, synthetic construct
  source 1..80: mol_type = other DNA
tcccaccagtgagtagactggcagattctgatcctaattaagaagacatgtttttgaatcaggaatgtgaatttggtttg

SEQ ID NO: 99357 - DNA, 80 bp, synthetic construct
  source 1..80: mol_type = other DNA
gggaggaagtgaaagtgagaaggacccctccccccaaataacttgtgtgtgttttggatatgttgcatatatccatttaa

SEQ ID NO: 99358 - DNA, 80 bp, synthetic construct; identical to SEQ ID NO: 18849
  source 1..80: mol_type = other DNA

SEQ ID NO: 99359 - DNA, 80 bp, synthetic construct
  source 1..80: mol_type = other DNA
tgtggtatttgctttaaggctgtaccagggccacttgcttctgccttttctttgcacctgctttctcttgatcacactaa

SEQ ID NO: 99360 - DNA, 80 bp, synthetic construct
  source 1..80: mol_type = other DNA
tgccctccagtgtcaggagtagactaggtaatatatattttaaagatgcattggtttcactaaatctcctcctttggttt

SEQ ID NO: 99361 - DNA, 80 bp, synthetic construct
  source 1..80: mol_type = other DNA
aacctttctaatctagcctctccagggattggaaatgatcaattgcagtttcttccaagaataaaattaggtggctcttg

SEQ ID NO: 99362 - DNA, 80 bp, synthetic construct
  source 1..80: mol_type = other DNA
accacaaaaagagaatgaaatactttctctagcattcacaaagaatatttggatcagtgacataattttaaaagtcagaa

SEQ ID NO: 99363 - DNA, 80 bp, synthetic construct; identical to SEQ ID NO: 18850
  source 1..80: mol_type = other DNA

SEQ ID NO: 99364 - DNA, 80 bp, synthetic construct
  source 1..80: mol_type = other DNA
tcccaaagctgggcctcatgcttccgtgtagcctcactgaatcaggagaccgagtgtttccagagccaggatgtgggcgc

SEQ ID NO: 99365 - DNA, 80 bp, synthetic construct
  source 1..80: mol_type = other DNA
aggatgaacataagcatatttatttcaacactgtctagaaaagtgaaaattagaaaccacttaaatgtttctcagttgga

SEQ ID NO: 99366 - DNA, 80 bp, synthetic construct; identical to SEQ ID NO: 18851
  source 1..80: mol_type = other DNA

SEQ ID NO: 99367 - DNA, 80 bp, synthetic construct
  source 1..80: mol_type = other DNA
cgagtatttcatttttaaaaacagcaacagaaggagtagacatttcacattggtattgcactgtcttgaagactgagctg

SEQ ID NO: 99368 - DNA, 80 bp, synthetic construct
  source 1..80: mol_type = other DNA
tatttctgtcttatattttctgctaagccaccattttgtcatcctgggaatggaggagagagaaatggaggcattcataa

SEQ ID NO: 99369 - DNA, 80 bp, synthetic construct
  source 1..80: mol_type = other DNA
tgctctgttccttcctgccaaacagaagccaaccatcacattttcttctctgctcttctttgttcaaggttactcttttt

SEQ ID NO: 99370 - DNA, 80 bp, synthetic construct
  source 1..80: mol_type = other DNA
cctttcatacccagaaacgtcctcttaacaccttcaagctgtggtttaaagatgaaccttttgagatgtaaaagcataac

SEQ ID NO: 99371 - DNA, 80 bp, synthetic construct; identical to SEQ ID NO: 18852
  source 1..80: mol_type = other DNA

SEQ ID NO: 99372 - DNA, 80 bp, synthetic construct
  source 1..80: mol_type = other DNA
gtgcaatcacagctcactgcagccttgacctccctggctcaagcaatctcccacctcaaccttccaagtagctggtactg

SEQ ID NO: 99373 - DNA, 80 bp, synthetic construct
  source 1..80: mol_type = other DNA
tttcttctttttaatctaccaagtatacccacctctttctactttccaatactgaagattacaggctagttgtcttggag

SEQ ID NO: 99374 - DNA, 80 bp, synthetic construct
  source 1..80: mol_type = other DNA
cattgtagacagacatttttctgtttgtgataagtagtaagttgtctgcagaggtgctaccatgagaccctctgaatatc

SEQ ID NO: 99375 - DNA, 80 bp, synthetic construct; identical to SEQ ID NO: 18853
  source 1..80: mol_type = other DNA

SEQ ID NO: 99376 - DNA, 80 bp, synthetic construct
  source 1..80: mol_type = other DNA
ctctgttttcaaaatcactgtatgaagcaggctttaaaaatgactgatgacttgccctggtgcctaaactgggtgagtct

SEQ ID NO: 99377 - DNA, 80 bp, synthetic construct
  source 1..80: mol_type = other DNA
tctatgttctggattcagctttgccactactaaccctgagcatcagtgttcttatctgttaaaggaagcagtaataataa

SEQ ID NO: 99378 - DNA, 80 bp, synthetic construct
  source 1..80: mol_type = other DNA
taggacccaggaaagctaagaaaaatagtatttatgaaaacatggtggaatggggcttggaataaagaatgttatactaa

SEQ ID NO: 99379 - DNA, 80 bp, synthetic construct; identical to SEQ ID NO: 18854
  source 1..80: mol_type = other DNA

SEQ ID NO: 99380 - DNA, 80 bp, synthetic construct
  source 1..80: mol_type = other DNA
gtttgatttgcaaagtgtgtctgccaacttccaccagaccatttttgaaccaattcagaaaaccaggattctgcaatgat

SEQ ID NO: 99381 - DNA, 80 bp, synthetic construct
  source 1..80: mol_type = other DNA
cagactgaacagaatccataaactggggaaggattgtgccttttgatctgcgacagggtttacagtaaaaatcctttaaa

SEQ ID NO: 99382 - DNA, 80 bp, synthetic construct; identical to SEQ ID NO: 18855
  source 1..80: mol_type = other DNA

SEQ ID NO: 99383 - DNA, 80 bp, synthetic construct
  source 1..80: mol_type = other DNA
actaaaaatacaaaaaatttgccgggcgtggtggtgggcgcctgaaatcccagctactctggaggctgaggcaggagaat

SEQ ID NO: 99384 - DNA, 80 bp, synthetic construct
  source 1..80: mol_type = other DNA
tttcttcatacttcttataatttatctttccctcttctccttatccccctcacattcagggaaccactgatctgctttct

SEQ ID NO: 99385 - DNA, 80 bp, synthetic construct
  source 1..80: mol_type = other DNA
tggttgcattgcctcaaaaggaaacttcatacctactaagcagttgcttcccattcccacctctccccagtccctggaaa

SEQ ID NO: 99386 - DNA, 80 bp, synthetic construct; identical to SEQ ID NO: 18856
  source 1..80: mol_type = other DNA

SEQ ID NO: 99387 - DNA, 80 bp, synthetic construct
  source 1..80: mol_type = other DNA
taattctttttttttttttgagatggaatcttgctctggcacccaggctggagtgcattggcgtgatctcgattcactgc

SEQ ID NO: 99388 - DNA, 80 bp, synthetic construct
  source 1..80: mol_type = other DNA
ccacctgccttgacctcccaaggtgctgggattacaggcatgagccaccatgcccggcctgttcttttttttttttaatg

SEQ ID NO: 99389 - DNA, 80 bp, synthetic construct
  source 1..80: mol_type = other DNA
gggttttttacattcttgttttggaatggtaagagtctttgaaaattctggagagtaggcccttatcaggtgtataattt

SEQ ID NO: 99390 - DNA, 80 bp, synthetic construct; identical to SEQ ID NO: 18857
  source 1..80: mol_type = other DNA

SEQ ID NO: 99391 - DNA, 80 bp, synthetic construct
  source 1..80: mol_type = other DNA
tttgggtgaaacgtcttcaaatttttattagtatgtcattgaatggagcatgttaatgtaaccctttaaggtgtttaaag

SEQ ID NO: 99392 - DNA, 80 bp, synthetic construct
  source 1..80: mol_type = other DNA
aactgaaagaaaccctaaaaatcacctgagtcagctcttttattttacagaaaaggtgatgaggtccagaaaggagactg

SEQ ID NO: 99393 - DNA, 80 bp, synthetic construct
  source 1..80: mol_type = other DNA
ttgtttccttctaggttatcccagttaatcctccaacaaccctgtgaagtaggtagggactaagtaactaggagtagctc

SEQ ID NO: 99394 - DNA, 80 bp, synthetic construct
  source 1..80: mol_type = other DNA
cctgctggattgggctccactccttctttctctgcagcagcacagtcttgaccttgtcctctgcttgctggaagccctgc

SEQ ID NO: 99395 - DNA, 80 bp, synthetic construct; identical to SEQ ID NO: 18858
  source 1..80: mol_type = other DNA

SEQ ID NO: 99396 - DNA, 80 bp, synthetic construct
  source 1..80: mol_type = other DNA
acatagtgtgttgaatatctgggaatgaggaacttaactgcaactgaactttcaatctaactgacttggtgatgagaaat

SEQ ID NO: 99397 - DNA, 80 bp, synthetic construct
  source 1..80: mol_type = other DNA
gcctgtctgaaagggctagacagacatttatgttcagagaggccatataagaagaatataaatgcggaaagtcataaact

SEQ ID NO: 99398 - DNA, 80 bp, synthetic construct; identical to SEQ ID NO: 18859
  source 1..80: mol_type = other DNA

SEQ ID NO: 99399 - DNA, 80 bp, synthetic construct
  source 1..80: mol_type = other DNA
gcttgcatcaatgctttcaatgatacatttctgcatctcaaaaaaaagtttctaagccctaagctagcatctgcctattt

SEQ ID NO: 99400 - DNA, 80 bp, synthetic construct
  source 1..80: mol_type = other DNA
cttttttttttaattttttttttgacagggccttactctcacccagactagagtgcatactgatcctcccacctcaacct

SEQ ID NO: 99401 - DNA, 80 bp, synthetic construct
  source 1..80: mol_type = other DNA
gtgtgagtgaccatgcttggcctcaagcaatttctaaaataacacaaatcaagacaacagcaacaccaagatactgcttt

SEQ ID NO: 99402 - DNA, 80 bp, synthetic construct; identical to SEQ ID NO: 18860
  source 1..80: mol_type = other DNA

SEQ ID NO: 99403 - DNA, 80 bp, synthetic construct
  source 1..80: mol_type = other DNA
ccccgagataggaccatctagttgcaggaaaataagctcagggctcccactgattctatattatggtgagttgtataatt

SEQ ID NO: 99404 - DNA, 80 bp, synthetic construct
  source 1..80: mol_type = other DNA
tatataatttactcatttattatgttcttactgtctattatggctcctttcaccctgcccccaccacataagctctccaa

SEQ ID NO: 99405 - DNA, 80 bp, synthetic construct; identical to SEQ ID NO: 18861
  source 1..80: mol_type = other DNA

SEQ ID NO: 99406 - DNA, 80 bp, synthetic construct
  source 1..80: mol_type = other DNA
ggagggagagcagcaggcctgggctcagtccctagacatagaggccaaaaaagattggaacaaccgtgtgtccagcaata

SEQ ID NO: 99407 - DNA, 80 bp, synthetic construct
  source 1..80: mol_type = other DNA
gaggaaggtgaatatgtattcatatttgcttcagtgaccagagggtgagatttgagagatgttgaaagtaggggccaggc

SEQ ID NO: 99408 - DNA, 80 bp, synthetic construct
  source 1..80: mol_type = other DNA
agctacttgggaggctgaggcaggagaatcgcttgaacccaggaggcggaagctgcagtgagctgagatcatgccattgc

SEQ ID NO: 99409 - DNA, 80 bp, synthetic construct
  source 1..80: mol_type = other DNA
aatggtaccattaaattccaaatagatctgtgctttgttagaagggctgtgaagggatgaggaaagaaaaaagcactgag

SEQ ID NO: 99410 - DNA, 80 bp, synthetic construct; identical to SEQ ID NO: 18862
  source 1..80: mol_type = other DNA

SEQ ID NO: 99411 - DNA, 80 bp, synthetic construct
  source 1..80: mol_type = other DNA
ataggatctatcccaagatacacacacaaaaattttttaaaagacataggcacaagcttctccatcatgtcactatttgc

SEQ ID NO: 99412 - DNA, 80 bp, synthetic construct
  source 1..80: mol_type = other DNA
tcaaatctggcccctctggtcactgaagcaaatacaaatatatattcaccttcctctcaccctgctttctttctttcttt

SEQ ID NO: 99413 - DNA, 80 bp, synthetic construct; identical to SEQ ID NO: 18863
  source 1..80: mol_type = other DNA

SEQ ID NO: 99414 - DNA, 80 bp, synthetic construct
  source 1..80: mol_type = other DNA
ctatggaatgatctccagggcgtactattaaatgaaaaagcagagtgcagaaaaagcggatggcatgctatctattattt

SEQ ID NO: 99415 - DNA, 80 bp, synthetic construct
  source 1..80: mol_type = other DNA
ttatagatgtttgtcttaattataaaaaaattaaattcacatggacaaaagtaatccccaaaaatcaagactaaagtgaa

SEQ ID NO: 99416 - DNA, 80 bp, synthetic construct
  source 1..80: mol_type = other DNA
tgatagaactgtactgacactaatatatatccacacacacccacataaacatatgagtatacataataagagcaattatg

SEQ ID NO: 99417 - DNA, 80 bp, synthetic construct; identical to SEQ ID NO: 18864
  source 1..80: mol_type = other DNA

SEQ ID NO: 99418 - DNA, 80 bp, synthetic construct
  source 1..80: mol_type = other DNA
tcaaagaccacggtgtcctgtgagaagtactcagaagctaattgaaggggctccccctgtccaaatattgaacaatttgg

SEQ ID NO: 99419 - DNA, 80 bp, synthetic construct
  source 1..80: mol_type = other DNA
caggagtttgagaccagcctgaccaacgtggtgaaaacccgtctctactaaaaatacaaaaattagctgggtgtggtggc

SEQ ID NO: 99420 - DNA, 80 bp, synthetic construct
  source 1..80: mol_type = other DNA
aaaaataaaaaaataaaaattcagtagtttccactatagggtgctggggaaccaactttcatcccctttgtcttcctcct

SEQ ID NO: 99421 - DNA, 80 bp, synthetic construct; identical to SEQ ID NO: 18865
  source 1..80: mol_type = other DNA

SEQ ID NO: 99422 - DNA, 80 bp, synthetic construct
  source 1..80: mol_type = other DNA
aggaatgaatattagcattttgcaacccctggtgaataatgagtttagacaatgtggttgttaatggctactaagctgtt

SEQ ID NO: 99423 - DNA, 80 bp, synthetic construct
  source 1..80: mol_type = other DNA
tcaggtaatcagaaaatgggacatgctgcaggcctggtttccttaacaaataaattttaagaatcaaaatagcaggaggg

SEQ ID NO: 99424 - DNA, 80 bp, synthetic construct
  source 1..80: mol_type = other DNA
ttattagttacttatttatagctgtggtaatggtattttgattatgttaaaatacagaagttggctgggtgttgtggctc

SEQ ID NO: 99425 - DNA, 80 bp, synthetic construct; identical to SEQ ID NO: 18866
  source 1..80: mol_type = other DNA

SEQ ID NO: 99426 - DNA, 80 bp, synthetic construct
  source 1..80: mol_type = other DNA
tcagatgtccttaaatttaatattgggctgtggagccgacagacccttcttaaaaatcacctgggggctgggtgcagtgg

SEQ ID NO: 99427 - DNA, 80 bp, synthetic construct
  source 1..80: mol_type = other DNA
ctcaggagactgaggtaggaggatcatttgagcccaggaatttgaggctgcagtgagctatgattataccactgcactcc

SEQ ID NO: 99428 - DNA, 80 bp, synthetic construct
  source 1..80: mol_type = other DNA
caaactattgtaggattgtttagattgaggattatagggttttacaagcagctgtaatataaacatgggaaaattggggc

SEQ ID NO: 99429 - DNA, 80 bp, synthetic construct; identical to SEQ ID NO: 18867
  source 1..80: mol_type = other DNA

SEQ ID NO: 99430 - DNA, 80 bp, synthetic construct
  source 1..80: mol_type = other DNA
ttatgtgtttggacatccctgtgacgtgggtacccccactgaaccccatgatattctccagcactttcttggggaccttg

SEQ ID NO: 99431 - DNA, 80 bp, synthetic construct
  source 1..80: mol_type = other DNA
aagtagctagatgactagaagccagcttgaactttgccagctttgagattggaaggaaaaggtgaaattgcctgctcttc

SEQ ID NO: 99432 - DNA, 80 bp, synthetic construct
  source 1..80: mol_type = other DNA
ttttcattagccctttaagaatgactggcaaatgcacttgtttgagtcatttgatcacctgggaagtgtctgggagccat

SEQ ID NO: 99433 - DNA, 80 bp, synthetic construct
  source 1..80: mol_type = other DNA
tgatttacgaactgtccggatttaactgaggctacagcacttttattaatagaacatgctgcatttcctttttataaaaa

SEQ ID NO: 99434 - DNA, 80 bp, synthetic construct; identical to SEQ ID NO: 18868
  source 1..80: mol_type = other DNA

SEQ ID NO: 99435 - DNA, 80 bp, synthetic construct
  source 1..80: mol_type = other DNA
cataaaacaagggaaaaactaaccaaaccaaccaacctatggccattttgtgatgcgtaaagtctcccctaattggcaca

SEQ ID NO: 99436 - DNA, 80 bp, synthetic construct
  source 1..80: mol_type = other DNA
aactgaacaagtgtcgttcctgcccagagagtttgcgatgagtgatgagagtgccagagaaaccttttagaaaccctctt

SEQ ID NO: 99437 - DNA, 80 bp, synthetic construct
  source 1..80: mol_type = other DNA
cagagactgacgaagttcttttttgaacttcttaggacagttccctgtggttacttttttagtataacaattaaaaaaaa

SEQ ID NO: 99438 - DNA, 80 bp, synthetic construct; identical to SEQ ID NO: 18869
  source 1..80: mol_type = other DNA

SEQ ID NO: 99439 - DNA, 80 bp, synthetic construct
  source 1..80: mol_type = other DNA
ggcggggtaggggggacagggttgtcttttggggaataggaatgatatttaaacgaccagctcctccatgtattatttgg

SEQ ID NO: 99440 - DNA, 80 bp, synthetic construct
  source 1..80: mol_type = other DNA
ggctcagaagattgctttcaaatctgaaaactttgcaccttcacttggttacagtactttttaaaaaatggagatacggt

SEQ ID NO: 99441 - DNA, 80 bp, synthetic construct; identical to SEQ ID NO: 18870
  source 1..80: mol_type = other DNA

SEQ ID NO: 99442 - DNA, 80 bp, synthetic construct
  source 1..80: mol_type = other DNA
acccaactttatttagtaagtctaataattcatctctttgaaaccttttagtttccaccttattttttttttgaagagtg

SEQ ID NO: 99443 - DNA, 80 bp, synthetic construct
  source 1..80: mol_type = other DNA
gagtctaaaagtttcacaccttggagttttagagtagattcaagaaatgatctagctcactcttgtctctttcccaggga

SEQ ID NO: 99444 - DNA, 80 bp, synthetic construct
  source 1..80: mol_type = other DNA
accatcattatgatttgtgggcattgatgctaggcctggaatccctgcagcattcatctctgctggggttctctaataca

SEQ ID NO: 99445 - DNA, 80 bp, synthetic construct
  source 1..80: mol_type = other DNA
actttgagatgtacttcagtttctccaaactttatgcataacaacacgactgtaacaacaaaaagggaaattcttgaaag

SEQ ID NO: 99446 - DNA, 80 bp, synthetic construct; identical to SEQ ID NO: 18871
  source 1..80: mol_type = other DNA

SEQ ID NO: 99447 - DNA, 80 bp, synthetic construct
  source 1..80: mol_type = other DNA
tacctcctcactgagctgacttacccaaagttattattcacctactgatggacaatgatggttctagtttttctgtctta

SEQ ID NO: 99448 - DNA, 80 bp, synthetic construct
  source 1..80: mol_type = other DNA
ataggaggatattggtctcacaataactaagcggaaccactctgcccagctttgaattccagcttgacacttggcattta

SEQ ID NO: 99449 - DNA, 80 bp, synthetic construct; identical to SEQ ID NO: 18872
  source 1..80: mol_type = other DNA

SEQ ID NO: 99450 - DNA, 80 bp, synthetic construct
  source 1..80: mol_type = other DNA
cattctggtgtgattattgatattatgtaggaattctttttcagcttttacagagttgctatccctttagggtggagtct

SEQ ID NO: 99451 - DNA, 80 bp, synthetic construct
  source 1..80: mol_type = other DNA
ggactcttcttcctatcttgtccgatgacggctctcggaggctcctggttttgatgtctggcattgcttttacccggtgg

SEQ ID NO: 99452 - DNA, 80 bp, synthetic construct
  source 1..80: mol_type = other DNA
ctcggctttccccttcttaatccgctttctgctgagctctccgaataattcaaccctcgtgtttgaaaactagaagcctg

SEQ ID NO: 99453 - DNA, 80 bp, synthetic construct
  source 1..80: mol_type = other DNA
gccgcaggcggtcttcccgggtgttcgcggaagctgcgcgctcgcgcccccacggttctccagcgacccctgaagatgct

SEQ ID NO: 99454 - DNA, 80 bp, synthetic construct; identical to SEQ ID NO: 18873
  source 1..80: mol_type = other DNA

SEQ ID NO: 99455 - DNA, 80 bp, synthetic construct
  source 1..80: mol_type = other DNA
catatacagccactctacttttgaatatttaggtgtttttttattttcattaaaaaattctgcagtaaacatctttctgg

SEQ ID NO: 99456 - DNA, 80 bp, synthetic construct
  source 1..80: mol_type = other DNA
ggctggagtaccatggtgcaatctcagctcacagcaacctctgcttcttgggttcgagcaattctcctgcctcagcttcc

SEQ ID NO: 99457 - DNA, 80 bp, synthetic construct
  source 1..80: mol_type = other DNA
caccatgcccagcatccaaatggcttttcaaaaaatttgtataaatgtttactcctgctagctgtgcttaagtgtttatt

SEQ ID NO: 99458 - DNA, 80 bp, synthetic construct; identical to SEQ ID NO: 18874
  source 1..80: mol_type = other DNA

SEQ ID NO: 99459 - DNA, 80 bp, synthetic construct
  source 1..80: mol_type = other DNA
cagtctgagggtgtatcttcctgaggcaaggccagacttgaggatattctaatcctccttcctgcatttttatattgcaa

SEQ ID NO: 99460 - DNA, 80 bp, synthetic construct
  source 1..80: mol_type = other DNA
aaacatattggaaggaagggctgggctttaatatctgtgtaggatggaagtcatttttgagttatagtcaattcttatgt

SEQ ID NO: 99461 - DNA, 80 bp, synthetic construct
  source 1..80: mol_type = other DNA
aagtttaaacacattctgagcatcctctgagaatcattcccaattccaagcccatttccagacgatgagcagacttgaat

SEQ ID NO: 99462 - DNA, 80 bp, synthetic construct; identical to SEQ ID NO: 18875
  source 1..80: mol_type = other DNA

SEQ ID NO: 99463 - DNA, 80 bp, synthetic construct
  source 1..80: mol_type = other DNA
ctatggaggacatagaaatatatcatatactgtcctcaaggagcttgcaaccaagttgtggggataaggcaaacaaagtc

SEQ ID NO: 99464 - DNA, 80 bp, synthetic construct
  source 1..80: mol_type = other DNA
tgggatttgggggagccttgaagaagtgagcaagttttggataggtggaagtgaacttactggctatacccggaaaagag

SEQ ID NO: 99465 - DNA, 80 bp, synthetic construct
  source 1..80: mol_type = other DNA
cagcaccatcatcattatgagcagctgtgtcttgcattcttataatgtggttctgaggactttacatgtagtatcttatt

SEQ ID NO: 99466 - DNA, 80 bp, synthetic construct; identical to SEQ ID NO: 18876
  source 1..80: mol_type = other DNA

SEQ ID NO: 99467 - DNA, 80 bp, synthetic construct
  source 1..80: mol_type = other DNA
aatatatataatcatttagcagaatgcctagcagagagtaagcaggcaggaaatgatagctgctatggcttatatttcac

SEQ ID NO: 99468 - DNA, 80 bp, synthetic construct
  source 1..80: mol_type = other DNA
aattccagatgtggttctgctttgctccaagaactgactgcatttccttttgtcttctaaaacccagagggtgaaaccag

SEQ ID NO: 99469 - DNA, 80 bp, synthetic construct
  source 1..80: mol_type = other DNA
cggcgctgacagataagtgccctgcatctcacagagagagaaaaatagatatttggaagtggtatcttttattgcctata

SEQ ID NO: 99470 - DNA, 80 bp, synthetic construct; identical to SEQ ID NO: 18877
  source 1..80: mol_type = other DNA

SEQ ID NO: 99471 - DNA, 80 bp, synthetic construct
  source 1..80: mol_type = other DNA
tgtccctgtatcgttgatataatccaacttggcttctttggaagcaacaaatgctattttttttgcttcaaatccaatat

SEQ ID NO: 99472 - DNA, 80 bp, synthetic construct
  source 1..80: mol_type = other DNA
ttttctgttgcttttaacagaattcctaaaacaggataatttttaaagaaaccaaaatttatttattatagttatggggg

SEQ ID NO: 99473 - DNA, 80 bp, synthetic construct; identical to SEQ ID NO: 18878
  source 1..80: mol_type = other DNA

SEQ ID NO: 99474 - DNA, 80 bp, synthetic construct
  source 1..80: mol_type = other DNA
ctacgggtgcccaccaccacgcccagctaattttttgtatttttagtagagatggggtttcaccgtgttagccaggatgg

SEQ ID NO: 99475 - DNA, 80 bp, synthetic construct
  source 1..80: mol_type = other DNA
ctggagtgttacatattgtttaatttttccaaatttctgataaaacggaagatcttagatagttggtgtgttcgatgggc

SEQ ID NO: 99476 - DNA, 80 bp, synthetic construct
  source 1..80: mol_type = other DNA
ctagatgttgctccttcacagcttaaccctcggggaacttcatttttaattcattcaactgaaagaagtatttactgaac

SEQ ID NO: 99477 - DNA, 80 bp, synthetic construct
  source 1..80: mol_type = other DNA
ggatttctttcaaccttatctttcttatagacaatgtggggaaatagagctatgggagtactcaaaagtttatccacaca

SEQ ID NO: 99478 - DNA, 80 bp, synthetic construct; identical to SEQ ID NO: 18879
  source 1..80: mol_type = other DNA

SEQ ID NO: 99479 - DNA, 80 bp, synthetic construct
  source 1..80: mol_type = other DNA
tcccttgatcaatgaacttggcttctctgagacttggagatttggtttccacatctggaatataaaggtgttgagcctga

SEQ ID NO: 99480 - DNA, 80 bp, synthetic construct
  source 1..80: mol_type = other DNA
ctcagcaatacagagacttttggaatgacttggtttatgttcattcaggcctggagcacagatgggttcatgctttgctg

SEQ ID NO: 99481 - DNA, 80 bp, synthetic construct; identical to SEQ ID NO: 18880
  source 1..80: mol_type = other DNA

SEQ ID NO: 99482 - DNA, 80 bp, synthetic construct
  source 1..80: mol_type = other DNA
gcctcagcctcacgagtagctgggactataggcacgagccaccatgcccagctaatttttattttttgtagagacagggt

SEQ ID NO: 99483 - DNA, 80 bp, synthetic construct
  source 1..80: mol_type = other DNA
atcatgtaagcccctatgttttggtttcctgcttatggtgtctgcctcatggggttgttttgaaaatcaggtgtgacttt

SEQ ID NO: 99484 - DNA, 80 bp, synthetic construct
  source 1..80: mol_type = other DNA
gcacatgcagacgcacttcccagccaggcagacagacccagcacacagatggccacagcggcattcacttggtgattgtc

SEQ ID NO: 99485 - DNA, 80 bp, synthetic construct; identical to SEQ ID NO: 18881
  source 1..80: mol_type = other DNA

SEQ ID NO: 99486 - DNA, 80 bp, synthetic construct
  source 1..80: mol_type = other DNA
aggggtggcactggccagggaaggcccacagggctgttttccctgtctgaatggtccattcataaaattgcctcctcttt

SEQ ID NO: 99487 - DNA, 80 bp, synthetic construct
  source 1..80: mol_type = other DNA
tctcatctgttctcctgggctggcatgatggatggcctcgggctgctgggttgtgtgttcagtggcgagccaggatttgc

SEQ ID NO: 99488 - DNA, 80 bp, synthetic construct
  source 1..80: mol_type = other DNA
tcaccccagctttgatgcacctataccaggtttgatcagtaaggttggaggaagacaggtgcttctcgagggtccgtttg

SEQ ID NO: 99489 - DNA, 80 bp, synthetic construct; identical to SEQ ID NO: 18882
  source 1..80: mol_type = other DNA

SEQ ID NO: 99490 - DNA, 80 bp, synthetic construct
  source 1..80: mol_type = other DNA
ggtctgcaccaaacctcctcctgccaacacttccaagaaaatcttcacatccacctatctttaagggttagtttaagctt

SEQ ID NO: 99491 - DNA, 80 bp, synthetic construct
  source 1..80: mol_type = other DNA
tgctctctgctaatcttttctgccttcaggtcactggcttgaagtgtcagtgaccttggaattatttttgcagttgcttt

SEQ ID NO: 99492 - DNA, 80 bp, synthetic construct
  source 1..80: mol_type = other DNA
gtgcagagagttcctgtatgctttttacccagctgcacctagcgttaacatcttggataagccatgatacatttatcaca

SEQ ID NO: 99493 - DNA, 80 bp, synthetic construct
  source 1..80: mol_type = other DNA
ttgcagtgcaatggcatgatcttggctcactgcaacctctgcctcccgggttcagatgattctcctgcctcagcctcctg

SEQ ID NO: 99494 - DNA, 80 bp, synthetic construct; identical to SEQ ID NO: 18883
  source 1..80: mol_type = other DNA

SEQ ID NO: 99495 - DNA, 80 bp, synthetic construct
  source 1..80: mol_type = other DNA
gccacatgttctctgttgcaactacccacctttactgttgtggcacagatcagcctcagacaatatgtaaataaatgaac

SEQ ID NO: 99496 - DNA, 80 bp, synthetic construct
  source 1..80: mol_type = other DNA
attcccaaagaggggatgtgcccttctcagagcatcacttaattgcttgcttaaggtggtgttaactgtaaagttaaaag

SEQ ID NO: 99497 - DNA, 80 bp, synthetic construct; identical to SEQ ID NO: 18884
  source 1..80: mol_type = other DNA

SEQ ID NO: 99498 - DNA, 80 bp, synthetic construct
  source 1..80: mol_type = other DNA
accttcttgatttcatagtcagctttattctaattacaactttgtgggcagccggtgccctaagacctaataggtctgaa

SEQ ID NO: 99499 - DNA, 80 bp, synthetic construct
  source 1..80: mol_type = other DNA
tgtgtgcaagaggagattggtaatgttttctcgtaaatgctaggtcaggtttgcattttgagagtggttccagttattat

SEQ ID NO: 99500 - DNA, 80 bp, synthetic construct
  source 1..80: mol_type = other DNA
ctaaatgattttgcctcaattggagagccaatcaagacttccaattcaactttcaaaagctatttgacctgttttaaaaa

SEQ ID NO: 99501 - DNA, 80 bp, synthetic construct; identical to SEQ ID NO: 18885
  source 1..80: mol_type = other DNA

SEQ ID NO: 99502 - DNA, 80 bp, synthetic construct
  source 1..80: mol_type = other DNA
acaagaattgtcatttgggatgggcgcagtggctcatgcctgtaatcccagcactttgggaggccgaggcaggtggatcg

SEQ ID NO: 99503 - DNA, 80 bp, synthetic construct
  source 1..80: mol_type = other DNA
gtgagccaagattgtgccattgcactccagcctgggtgacagagtgagactccatcttaaaaacaaaacaaaacaaaaca

SEQ ID NO: 99504 - DNA, 80 bp, synthetic construct
  source 1..80: mol_type = other DNA
acagcttaatttccaccctctttaactaaagaagtatgtgctacaaaacactgtagaagttcaggccagtttccactcat

SEQ ID NO: 99505 - DNA, 80 bp, synthetic construct
  source 1..80: mol_type = other DNA
aatcgtagactttgtcaccatgtgtttatttcactatctgggatgcagcctaaataaagttatgagtcagatgtagacct

SEQ ID NO: 99506 - DNA, 80 bp, synthetic construct; identical to SEQ ID NO: 18886
  source 1..80: mol_type = other DNA

SEQ ID NO: 99507 - DNA, 80 bp, synthetic construct
  source 1..80: mol_type = other DNA
tttgaaagcgtatcgctgattgcacattttattccataagtgctcagcgcgtttcatgtaactcctggaggcctctgaga

SEQ ID NO: 99508 - DNA, 80 bp, synthetic construct
  source 1..80: mol_type = other DNA
gggtagctggaagatagctctggcatttaaacacctagataggaaggagacgatggaatgtatttttctttgctattttg

SEQ ID NO: 99509 - DNA, 80 bp, synthetic construct
  source 1..80: mol_type = other DNA
gtatatggtataggtatttttaatgcctagaaagggaatggctggaaggaacatgaaaaataaaggttggaattgaggta

SEQ ID NO: 99510 - DNA, 80 bp, synthetic construct; identical to SEQ ID NO: 18887
  source 1..80: mol_type = other DNA

SEQ ID NO: 99511 - DNA, 80 bp, synthetic construct
  source 1..80: mol_type = other DNA
ggctcttgtgagggcccaaggtacagcgctacatgacaatgtcgtcatgactctttaaatatcctatgaaacctgtgata

SEQ ID NO: 99512 - DNA, 80 bp, synthetic construct
  source 1..80: mol_type = other DNA
ttcccccgatcccacccccacacaatttagcacagaatgccagtaattcagtctgaagcccagttaaaactctctgattt

SEQ ID NO: 99513 - DNA, 80 bp, synthetic construct; identical to SEQ ID NO: 18888
  source 1..80: mol_type = other DNA

SEQ ID NO: 99514 - DNA, 80 bp, synthetic construct
  source 1..80: mol_type = other DNA
atcatttgaggtcaggagttcgagaccagcctgaccaacacggtgaaaccccgcctctactaaaaatataaaaattagcc

SEQ ID NO: 99515 - DNA, 80 bp, synthetic construct
  source 1..80: mol_type = other DNA
aagaaaaaatttgtgttccttgtataagcacagtgcttttctagtactgtcccagttcagctgcctatggcaagattgta

SEQ ID NO: 99516 - DNA, 80 bp, synthetic construct
  source 1..80: mol_type = other DNA
tttccatccttaaaatgtcatagctaactagagggttaacattttttaagtgctgagtccaatcaatgtgatttaaatca

SEQ ID NO: 99517 - DNA, 80 bp, synthetic construct
  source 1..80: mol_type = other DNA
tgggaaaaagtaaatctaaacgagcaaaaaatgtctgggtattaactccagtctgatggtattacaagttttcccagtta

SEQ ID NO: 99518 - DNA, 80 bp, synthetic construct; identical to SEQ ID NO: 18889
  source 1..80: mol_type = other DNA

SEQ ID NO: 99519 - DNA, 80 bp, synthetic construct
  source 1..80: mol_type = other DNA
actcttctaaccagctcctagattaagaaataaaacatcaacatcctagaagtcctccttgtccttcctctgggtcatga

SEQ ID NO: 99520 - DNA, 80 bp, synthetic construct
  source 1..80: mol_type = other DNA
tttggaatcctaataatccagtccacaattccttatctgcagttttgaaatacaaatagctctgaaaacagagaggtttt

SEQ ID NO: 99521 - DNA, 80 bp, synthetic construct; identical to SEQ ID NO: 18890
  source 1..80: mol_type = other DNA

SEQ ID NO: 99522 - DNA, 80 bp, synthetic construct
  source 1..80: mol_type = other DNA
actgcttggtgcattatcaaacatccttcttccaatcctgcatttaaaaaaaaagcactgttactttgcaataattttag

SEQ ID NO: 99523 - DNA, 80 bp, synthetic construct
  source 1..80: mol_type = other DNA
ggatccaacatggcatttagttatcatttcttcttagtcttccccagcctataatagcttctctgtctttcctgtttttt

SEQ ID NO: 99524 - DNA, 80 bp, synthetic construct
  source 1..80: mol_type = other DNA
aggaccctgtgtaccctttattccgtttcccccaatggcaacatcttgaaaaccatcacctgatatcataaccaggatat

SEQ ID NO: 99525 - DNA, 80 bp, synthetic construct; identical to SEQ ID NO: 18891
  source 1..80: mol_type = other DNA

SEQ ID NO: 99526 - DNA, 80 bp, synthetic construct
  source 1..80: mol_type = other DNA
ttatatctttgttggaaatccacacggttgttctgtgctggtagtgcgggtctttaaaaatctagggagtttgtttgttg

SEQ ID NO: 99527 - DNA, 80 bp, synthetic construct
  source 1..80: mol_type = other DNA
ccacagtgtagagtccctcctgttggtgatggcattttgtacatttagtgacaattggcatagagtataaagccttttac

SEQ ID NO: 99528 - DNA, 80 bp, synthetic construct
  source 1..80: mol_type = other DNA
cttaattttaagtgcttccagaaaatgggaatgaaacaatgcttaaatagggccttcagatcaatttatggaatgatatc

SEQ ID NO: 99529 - DNA, 80 bp, synthetic construct; identical to SEQ ID NO: 18892
  source 1..80: mol_type = other DNA

SEQ ID NO: 99530 - DNA, 80 bp, synthetic construct
  source 1..80: mol_type = other DNA
aaaaaaacaaaacctgtacaattcactgacattaaataggttcacaaagttgtttaaccacccacactatttccttaact

SEQ ID NO: 99531 - DNA, 80 bp, synthetic construct
  source 1..80: mol_type = other DNA
tctggcttatttcatttagcatcgtgttttcaaggatcattcatactgtagcatgtatcaaaattgtattcctttttatg

SEQ ID NO: 99532 - DNA, 80 bp, synthetic construct
  source 1..80: mol_type = other DNA
atgaatgttggtgtacaaatatttgagtccttgctggacttgaaagacctgagtcaatacttttgggcatatacctagga

SEQ ID NO: 99533 - DNA, 80 bp, synthetic construct; identical to SEQ ID NO: 18893
  source 1..80: mol_type = other DNA

SEQ ID NO: 99534 - DNA, 80 bp, synthetic construct
  source 1..80: mol_type = other DNA
gcgtgttcaagcaacctggtctatggcaatttgttatagcacctcgaattgactaagaaaatatgataattctgtggtta

SEQ ID NO: 99535 - DNA, 80 bp, synthetic construct
  source 1..80: mol_type = other DNA
tttattatggccatcctagtaggtgtgaagtagtatctcattgtagttttgatttgcattgctctaatgaccaatgaggt

SEQ ID NO: 99536 - DNA, 80 bp, synthetic construct
  source 1..80: mol_type = other DNA
tatgtattcagaatataaccctttatcaagcatatgatttgcatatattttcttccactctgtgtgttgtctttttactc

SEQ ID NO: 99537 - DNA, 80 bp, synthetic construct; identical to SEQ ID NO: 18894
  source 1..80: mol_type = other DNA

SEQ ID NO: 99538 - DNA, 80 bp, synthetic construct
  source 1..80: mol_type = other DNA
tatgccagtaccacactcttttgattactgtagctttgtagttagttttgaaatcaggaggtatacatttcccaactttg

SEQ ID NO: 99539 - DNA, 80 bp, synthetic construct
  source 1..80: mol_type = other DNA
ccatgaacatggaatgtctttccacttattttatcttctttgagtttattcagcaatgctttgtagttttcagtgtagaa

SEQ ID NO: 99540 - DNA, 80 bp, synthetic construct
  source 1..80: mol_type = other DNA
tatgagttgatattgtatcctgcatctttgctatttgtttatgagctataaccattgtgtgtgtgtgtgtaacttgaggg

SEQ ID NO: 99541 - DNA, 80 bp, synthetic construct; identical to SEQ ID NO: 18895
  source 1..80: mol_type = other DNA

SEQ ID NO: 99542 - DNA, 80 bp, synthetic construct
  source 1..80: mol_type = other DNA
tgctcatgaggttttcctttttattttgttaatgtggtatattacattgactaatttttttatattgaactatctttgca

SEQ ID NO: 99543 - DNA, 80 bp, synthetic construct
  source 1..80: mol_type = other DNA
caggattatattagcctcatagaatatgtaggaaatgttttcttctcatcaaatttttggaagagtttgagaaagattgg

SEQ ID NO: 99544 - DNA, 80 bp, synthetic construct
  source 1..80: mol_type = other DNA
tatctttctaggcattcgtccatttcaaacgtgaccattctaaactaaactgttggcaaatttgttactactgtctgttt

SEQ ID NO: 99545 - DNA, 80 bp, synthetic construct
  source 1..80: mol_type = other DNA
atgtcttttgactcattaaaagtgggaaatctcatttgtgtataagattatcaggctatataaaaatgattccaacatac

SEQ ID NO: 99546 - DNA, 80 bp, synthetic construct; identical to SEQ ID NO: 18896
  source 1..80: mol_type = other DNA

SEQ ID NO: 99547 - DNA, 80 bp, synthetic construct
  source 1..80: mol_type = other DNA
tccctgtgctttgggagaaccaatgaacccaatgaaccgaatgaaaccaaagccaaaaggcagccttgatcccccaaaag

SEQ ID NO: 99548 - DNA, 80 bp, synthetic construct
  source 1..80: mol_type = other DNA
gatgcagtcagtaaatttgtgcatggccttggaaaccttccagaattgtaagtgaaagctgatattctctccacagaaga

SEQ ID NO: 99549 - DNA, 80 bp, synthetic construct; identical to SEQ ID NO: 18897
  source 1..80: mol_type = other DNA

SEQ ID NO: 99550 - DNA, 80 bp, synthetic construct
  source 1..80: mol_type = other DNA
aggaaagatatactagcagagtatagtgtcatgtctgtggttcaaaggttgtgtccttacctcttgagttacattttgat

SEQ ID NO: 99551 - DNA, 80 bp, synthetic construct
  source 1..80: mol_type = other DNA
cccaaagacccctgcagtttaactgaggtgtttattcatctgcagactggaagccaaggattggaaatttaacatgaaat

SEQ ID NO: 99552 - DNA, 80 bp, synthetic construct
  source 1..80: mol_type = other DNA
ataatctaactgcatgctgcccaggcattccatagcatgggccatttagatttaatgcccaggcactcacttgtaactga

SEQ ID NO: 99553 - DNA, 80 bp, synthetic construct; identical to SEQ ID NO: 18898
  source 1..80: mol_type = other DNA

SEQ ID NO: 99554 - DNA, 80 bp, synthetic construct
  source 1..80: mol_type = other DNA
tgacaggcactgagaggtagcaatccattttctggtgaccaagggtaaggatgcaactactagttctaattatgtctgca

SEQ ID NO: 99555 - DNA, 80 bp, synthetic construct
  source 1..80: mol_type = other DNA
atctacttaggaatgcaaattctcaggccctgttccagagccaatcagtctccttagtgggcccaggaatctgtttttaa

SEQ ID NO: 99556 - DNA, 80 bp, synthetic construct
  source 1..80: mol_type = other DNA
tacccaggactcagctagtcccctggcttttttttctctccagatctcatgtttccagattctgtgctcagtcacttctt

SEQ ID NO: 99557 - DNA, 80 bp, synthetic construct; identical to SEQ ID NO: 18899
  source 1..80: mol_type = other DNA

SEQ ID NO: 99558 - DNA, 80 bp, synthetic construct
  source 1..80: mol_type = other DNA
ggagagggtttcgtccaactctgggggaccttttttgctttttatgttactagatatagtaaagtctgcaactcttactt

SEQ ID NO: 99559 - DNA, 80 bp, synthetic construct
  source 1..80: mol_type = other DNA
tggggacttttttagactatccacttcttaaggaaaaaaacttatcctgtagagccaaagatggctcaggcttgatatga

SEQ ID NO: 99560 - DNA, 80 bp, synthetic construct
  source 1..80: mol_type = other DNA
tttttaagctcattgctcagatttaaaagttgggggatttcacacaacaaaagcccaacaacactgggctcgtgaacctc

SEQ ID NO: 99561 - DNA, 80 bp, synthetic construct; identical to SEQ ID NO: 18900
  source 1..80: mol_type = other DNA

SEQ ID NO: 99562 - DNA, 80 bp, synthetic construct
  source 1..80: mol_type = other DNA
tccttggatgccacccatgctggttgtttcctggcccctgagcccaccttgtttcatgatcatcacacatccactgtcac

SEQ ID NO: 99563 - DNA, 80 bp, synthetic construct
  source 1..80: mol_type = other DNA
attttatcagcgtattccccacaccacaatcccatcaattctcaattatttattccctcacattgaagaaacaggggcct

SEQ ID NO: 99564 - DNA, 80 bp, synthetic construct
  source 1..80: mol_type = other DNA
caccaacacgcccggctaatttttttgtatttttagtagagacggggttttactgtgttagccaggatagtctcgatctc

SEQ ID NO: 99565 - DNA, 80 bp, synthetic construct; identical to SEQ ID NO: 18901
  source 1..80: mol_type = other DNA

SEQ ID NO: 99566 - DNA, 80 bp, synthetic construct
  source 1..80: mol_type = other DNA
gaggagggtgcagaaactccagccacagggccacagacgttctggacagtgtcatgtgaggtggcattggagcttctcct

SEQ ID NO: 99567 - DNA, 80 bp, synthetic construct
  source 1..80: mol_type = other DNA
tgatacagattgctaaaggcaactcaattgcaaatagccccgcaccatgtgacactgcctccttgaaaagtacttcagat

SEQ ID NO: 99568 - DNA, 80 bp, synthetic construct
  source 1..80: mol_type = other DNA
tgtgcaagcttccaagaactacttggcttcctgacagggaacatgatagaatgtcaggacctaagctaatgtaaaatatg

SEQ ID NO: 99569 - DNA, 80 bp, synthetic construct; identical to SEQ ID NO: 18902
  source 1..80: mol_type = other DNA

SEQ ID NO: 99570 - DNA, 80 bp, synthetic construct
  source 1..80: mol_type = other DNA
cgctgaccaccacgcctggctaatttttgtatttttagtagagatggggtttcaccatgttggtcaagctagttttgaac

SEQ ID NO: 99571 - DNA, 80 bp, synthetic construct
  source 1..80: mol_type = other DNA
ctgcattcttaaagggtacttgtttcctgtcgctcttttttcctttatacggtggtccccccttatccatggaggatatg

SEQ ID NO: 99572 - DNA, 80 bp, synthetic construct
  source 1..80: mol_type = other DNA
tcctatcattgaggtggctactaaatgacttgcgggtgggaagtatagacagcatgtatatgctggacaaaaaggtgatt

SEQ ID NO: 99573 - DNA, 80 bp, synthetic construct
  source 1..80: mol_type = other DNA
tgtgggtaaggggggactactgtattcccctcttcctgtttttcacctctcccatgcctccccctagtccctcccatttc

SEQ ID NO: 99574 - DNA, 80 bp, synthetic construct; identical to SEQ ID NO: 18903
  source 1..80: mol_type = other DNA

SEQ ID NO: 99575 - DNA, 80 bp, synthetic construct
  source 1..80: mol_type = other DNA
tctttccatcccctaccttgccacgttccatgatgtttttgttcttatgcctatggcctcctcttcacaggacagtgaca

SEQ ID NO: 99576 - DNA, 80 bp, synthetic construct
  source 1..80: mol_type = other DNA
gaccagtctggccaacatggtgaaagcctgtctctactaaaataaaaaaattagccagccatgatagcgggtgcctgtaa

SEQ ID NO: 99577 - DNA, 80 bp, synthetic construct
  source 1..80: mol_type = other DNA
tttgcttctgccttatctgggaggggaaattttcagactcattgcaaaggaaatgtcatttaaatgtgaaaactgatgca

SEQ ID NO: 99578 - DNA, 80 bp, synthetic construct; identical to SEQ ID NO: 18904
  source 1..80: mol_type = other DNA

SEQ ID NO: 99579 - DNA, 80 bp, synthetic construct
  source 1..80: mol_type = other DNA
aaaagttcaggtccagccctcctttgccttatcttgggaaatgactttctgctaaaataatttcggtttgtacatatgca

SEQ ID NO: 99580 - DNA, 80 bp, synthetic construct
  source 1..80: mol_type = other DNA
ctttcccacttgataatctgaaaatctcccaagcctgattgccttgctataggcctgcaacctggaatgctgcataggtt

SEQ ID NO: 99581 - DNA, 80 bp, synthetic construct
  source 1..80: mol_type = other DNA
attcctctggggatagagcagcaggactttgggagctgggacaattgtgtgaagcaggacgtgattgcgtggtcttgttt

SEQ ID NO: 99582 - DNA, 80 bp, synthetic construct; identical to SEQ ID NO: 18905
  source 1..80: mol_type = other DNA

SEQ ID NO: 99583 - DNA, 80 bp, synthetic construct
  source 1..80: mol_type = other DNA
tcaaaagtgagacccccccatctctaccaaacaaacaaacaaacaaacaaatttgctgagtgagatggtacacacctgta

SEQ ID NO: 99584 - DNA, 80 bp, synthetic construct
  source 1..80: mol_type = other DNA
ctaaaaaatacataaatgaagttgaaagcatgtgaagtttatgattggctttgtgatcggaaggatgtgtcatgctttcc

SEQ ID NO: 99585 - DNA, 80 bp, synthetic construct; identical to SEQ ID NO: 18906
  source 1..80: mol_type = other DNA

SEQ ID NO: 99586 - DNA, 80 bp, synthetic construct
  source 1..80: mol_type = other DNA
tgggttttttttcttgtttttttttttgtttttttttttggttggcttaatacctttctaactgaaatttttgttgagat

SEQ ID NO: 99587 - DNA, 80 bp, synthetic construct
  source 1..80: mol_type = other DNA
aaaatacaaaaaatgagccaggcatggtggcaggcacctgtaattccagctactcgggaggctgaggcaggacaatcgct

SEQ ID NO: 99588 - DNA, 80 bp, synthetic construct
  source 1..80: mol_type = other DNA
tgagatttcccatgtaccatttatccagttcccccagtgataacagtttgcaaaactgtagaagagtatcacagccagga

SEQ ID NO: 99589 - DNA, 80 bp, synthetic construct; identical to SEQ ID NO: 18907
  source 1..80: mol_type = other DNA

SEQ ID NO: 99590 - DNA, 80 bp, synthetic construct
  source 1..80: mol_type = other DNA
gaggccaggagttcgagaccagcctggccaatatggcgaaacaccatctctcctaaaaatacaaaaattagccagttgtg

SEQ ID NO: 99591 - DNA, 80 bp, synthetic construct
  source 1..80: mol_type = other DNA
ataatacagtgtgtaaccttttgggacaagcctttccactcagcataatttcctggagatttatctaagtttttgagtgt

SEQ ID NO: 99592 - DNA, 80 bp, synthetic construct
  source 1..80: mol_type = other DNA
gaacataagttttcatttctctgggaaaaatgcctaaaatgcctaagagtgcaattgctgggttatatggtaattacatg

SEQ ID NO: 99593 - DNA, 80 bp, synthetic construct; identical to SEQ ID NO: 18908
  source 1..80: mol_type = other DNA

SEQ ID NO: 99594 - DNA, 80 bp, synthetic construct
  source 1..80: mol_type = other DNA
ggtttggagaagccttgtcaatgttggtgccaccgatggctgagtttggaaattttatggtcttttgtatttgacaaaaa

SEQ ID NO: 99595 - DNA, 80 bp, synthetic construct
  source 1..80: mol_type = other DNA
aagaagaaaacagaagcatggccttgctggaaaatggctggttttagtgactcaccattgtgaacaaaaagttcgattgt

SEQ ID NO: 99596 - DNA, 80 bp, synthetic construct
  source 1..80: mol_type = other DNA
taatttttcacattactgtcctctatatgacaacattattttcaataaaaaccatgcagtcagcaataattttcttgatt

SEQ ID NO: 99597 - DNA, 80 bp, synthetic construct
  source 1..80: mol_type = other DNA
ccagtgaatcgataatactgcagggattggagatacaaactgtgttggaaatggaattgaaaatgaattgattctaaact

SEQ ID NO: 99598 - DNA, 80 bp, synthetic construct; identical to SEQ ID NO: 18909
  source 1..80: mol_type = other DNA

SEQ ID NO: 99599 - DNA, 80 bp, synthetic construct
  source 1..80: mol_type = other DNA
catggtgaaacccccatctctactaaaaatacaaaaattggccgggtgtgatggcagagtcttgtaatcccagctacttg

SEQ ID NO: 99600 - DNA, 80 bp, synthetic construct
  source 1..80: mol_type = other DNA
tattcctgttgtaaaaatctctagagacaacatcctaccttattgcctgcactggggtagcagtttggttgtgtagctgt

SEQ ID NO: 99601 - DNA, 80 bp, synthetic construct; identical to SEQ ID NO: 18910
  source 1..80: mol_type = other DNA

SEQ ID NO: 99602 - DNA, 80 bp, synthetic construct
  source 1..80: mol_type = other DNA
ttgaactccaaaggaagcttgaataaattctagagtttctttgctgtgtccatgcaagcttggatgggagagctattctg

SEQ ID NO: 99603 - DNA, 80 bp, synthetic construct
  source 1..80: mol_type = other DNA
ctgtttctcctaatcaaagagggttggttgtagtcaggccatttacaaatcactttccttttctttctctgtcttggtct

SEQ ID NO: 99604 - DNA, 80 bp, synthetic construct
  source 1..80: mol_type = other DNA
aaaacgcttaaatgacccagggaggctctaggatggctactttacatagcaattgtgtgctgtaaaatgaacctgttgca

SEQ ID NO: 99605 - DNA, 80 bp, synthetic construct
  source 1..80: mol_type = other DNA
agaaaatctatcctagaaaaacatctcatgttgtaaataagctcagatgtagattgttggatataaaatggagcttaaga

SEQ ID NO: 99606 - DNA, 80 bp, synthetic construct; identical to SEQ ID NO: 18911
  source 1..80: mol_type = other DNA

SEQ ID NO: 99607 - DNA, 80 bp, synthetic construct
  source 1..80: mol_type = other DNA
gagctaaaaattaaaacaactgaactcatagagagtaaaatgatggttaccagaggctgggaagagagggtagaaagtgg

SEQ ID NO: 99608 - DNA, 80 bp, synthetic construct
  source 1..80: mol_type = other DNA
atgagttacctgatatgattattatatgttgtacctctgtgtcaagacaccacatgtactccacaaagaggtacacctat

SEQ ID NO: 99609 - DNA, 80 bp, synthetic construct; identical to SEQ ID NO: 18912
  source 1..80: mol_type = other DNA

SEQ ID NO: 99610 - DNA, 80 bp, synthetic construct
  source 1..80: mol_type = other DNA
tgaatttgtgaggaccagcgtgatgaactttcatgtagataatttttttcaactattttcaaagggctaagtattagata

SEQ ID NO: 99611 - DNA, 80 bp, synthetic construct
  source 1..80: mol_type = other DNA
agtggctattgctgaaagctgggatttcaaatgattttcactttctaagttttatagctctgagttcaagtttttacaac

SEQ ID NO: 99612 - DNA, 80 bp, synthetic construct
  source 1..80: mol_type = other DNA
tattcctgagggcaaccacagaaaatttagtgaagttcaagaaatggcttggaatgattgagagtgtggctggggtggca

SEQ ID NO: 99613 - DNA, 80 bp, synthetic construct; identical to SEQ ID NO: 18913
  source 1..80: mol_type = other DNA

SEQ ID NO: 99614 - DNA, 80 bp, synthetic construct
  source 1..80: mol_type = other DNA
tgtacaatgtggcatggctaatgccctcctgctgcttgtgaaatggccaggatttaaatgctgggatcgggagtcaaaga

SEQ ID NO: 99615 - DNA, 80 bp, synthetic construct
  source 1..80: mol_type = other DNA
ccctgggaggagggaccatctcttacttttctgtctgtaggcagaaatgttttcactaaaggccctggcacatcttaaac

SEQ ID NO: 99616 - DNA, 80 bp, synthetic construct
  source 1..80: mol_type = other DNA
agctgagactacaggcgtgtgccaccatgcctggctattttgtttttttaattttgtagagatggggggtctcattttgt

SEQ ID NO: 99617 - DNA, 80 bp, synthetic construct
  source 1..80: mol_type = other DNA
ttcaactaaaaaagtcagaacccattagagatgaacagaatgtttgtttttttaaaacctttgtcccttggagccccagg

SEQ ID NO: 99618 - DNA, 80 bp, synthetic construct; identical to SEQ ID NO: 18914
  source 1..80: mol_type = other DNA

SEQ ID NO: 99619 - DNA, 80 bp, synthetic construct
  source 1..80: mol_type = other DNA
gtagccaagactgcaaattatgatgacaataatcagacacttctgtagcatatactgtgtgctcgcacttgcctgagcac

SEQ ID NO: 99620 - DNA, 80 bp, synthetic construct
  source 1..80: mol_type = other DNA
ctgcctcccagttaaactcccagccccagtaggaaggactgaggcgggagaaggagctcacagtttggagaatgcagttt

SEQ ID NO: 99621 - DNA, 80 bp, synthetic construct; identical to SEQ ID NO: 18915
  source 1..80: mol_type = other DNA

SEQ ID NO: 99622 - DNA, 80 bp, synthetic construct
  source 1..80: mol_type = other DNA
gttactgtcccccagcccaagaccatggaggacttgtggggtgcgtgtgtgattagactccagccgggcgattgtggcca

SEQ ID NO: 99623 - DNA, 80 bp, synthetic construct
  source 1..80: mol_type = other DNA
ggaggcggaggctgcagtgagctgagactgtgccacttcactccagcctgggagacagagtgagactccatctcaaaaaa

SEQ ID NO: 99624 - DNA, 80 bp, synthetic construct
  source 1..80: mol_type = other DNA
aaatgaactgagctgagtcttagaaatctaaatgagactggataattgcaagtgactgaaaagtcaacggatgactttaa

SEQ ID NO: 99625 - DNA, 80 bp, synthetic construct; identical to SEQ ID NO: 18916
  source 1..80: mol_type = other DNA

SEQ ID NO: 99626 - DNA, 80 bp, synthetic construct
  source 1..80: mol_type = other DNA
ggtaatgtgttgttgatctacagtgggaaagtgctagcattgtttcagattcaggaagcttattcacattagtaatggta

SEQ ID NO: 99627 - DNA, 80 bp, synthetic construct
  source 1..80: mol_type = other DNA
caaacaaggtgctcagttacagttagttaattgtgagttcatgtatggttttcaggtaagtcatatgccagctctggccc

SEQ ID NO: 99628 - DNA, 80 bp, synthetic construct
  source 1..80: mol_type = other DNA
catgacatgaggaggttggctagaatatttcaatctttattgattgaggccaataaaaactgatctagaggctgggtgcg

SEQ ID NO: 99629 - DNA, 80 bp, synthetic construct
  source 1..80: mol_type = other DNA
aattagcagggcgtggcagtgcctgcctttaatcccagctactcgggaggctgaggcaggagaatcgcttgaacctggga

SEQ ID NO: 99630 - DNA, 80 bp, synthetic construct; identical to SEQ ID NO: 18917
  source 1..80: mol_type = other DNA

SEQ ID NO: 99631 - DNA, 80 bp, synthetic construct
  source 1..80: mol_type = other DNA
tttagggcttttagtgtgagaatcacagaagataagtcattgacatacatacaggcttgactaacggggcagatgcagag

SEQ ID NO: 99632 - DNA, 80 bp, synthetic construct
  source 1..80: mol_type = other DNA
taacgtgcactaggcttagctagtattataactgttgctggttattagataatctttcctggcctcagtttccttgctgt

SEQ ID NO: 99633 - DNA, 80 bp, synthetic construct; identical to SEQ ID NO: 18918
  source 1..80: mol_type = other DNA

SEQ ID NO: 99634 - DNA, 80 bp, synthetic construct
  source 1..80: mol_type = other DNA
ttaatgtcagcctcgcaaccattccctaaagtaggtagagcacatctgacctcaatttatggataaagaaatggaagctt

SEQ ID NO: 99635 - DNA, 80 bp, synthetic construct
  source 1..80: mol_type = other DNA
tgataatattcagatgtattaatccctagaagatacatggcccaaaggatcatcacccaggaatgttattagaatgaagc

SEQ ID NO: 99636 - DNA, 80 bp, synthetic construct
  source 1..80: mol_type = other DNA
tgagtagacacttgagccttggcatagttgggattagggaatggtaggagaccctcttaagaaagaaaagagtgttccct

SEQ ID NO: 99637 - DNA, 80 bp, synthetic construct; identical to SEQ ID NO: 18919
  source 1..80: mol_type = other DNA

SEQ ID NO: 99638 - DNA, 80 bp, synthetic construct
  source 1..80: mol_type = other DNA
gagagcaggaacagcctctgggagctgtgggtggcccatgcccaacaggagtcaccagtaggagcagcagatagagtacc

SEQ ID NO: 99639 - DNA, 80 bp, synthetic construct
  source 1..80: mol_type = other DNA
cttcaagtcacttgttggaggggtggcccagggaaaaaggattgccttcccaaatgatgttgatgaaaataatatctgta

SEQ ID NO: 99640 - DNA, 80 bp, synthetic construct
  source 1..80: mol_type = other DNA
tggtcaacatggtgaaaccccaactctactaaaaatacaaaaattagctgggcatgatggcagactcctgtaatcccagc

SEQ ID NO: 99641 - DNA, 80 bp, synthetic construct; identical to SEQ ID NO: 18920
  source 1..80: mol_type = other DNA

SEQ ID NO: 99642 - DNA, 80 bp, synthetic construct
  source 1..80: mol_type = other DNA
tgtacatatcttagccctccactagactaaagtcttttttgttaagtcctgataggttaggtttatgctgtagccacaaa

SEQ ID NO: 99643 - DNA, 80 bp, synthetic construct
  source 1..80: mol_type = other DNA
ggccttgatcactgagatggggaagagagagtactgaagggtctcacccctgcaattacattgcaattacaattacagta

SEQ ID NO: 99644 - DNA, 80 bp, synthetic construct
  source 1..80: mol_type = other DNA
gcccagaagaaaagaactagatgagcatgagcactagaagtctctccacaagcttttgattatgttcttggttccctcac

SEQ ID NO: 99645 - DNA, 80 bp, synthetic construct; identical to SEQ ID NO: 18921
  source 1..80: mol_type = other DNA

SEQ ID NO: 99646 - DNA, 80 bp, synthetic construct
  source 1..80: mol_type = other DNA
ggcccattgaccaggtctcaattatgtaacatctggcctaattaaacgtgtactgtttacctttattcatgcaattgcca

SEQ ID NO: 99647 - DNA, 80 bp, synthetic construct
  source 1..80: mol_type = other DNA
tacaagaaacaatgatcagagttcagaagacagtgggtatttcagtatgcatattcatggggaataaatgactggagtat

SEQ ID NO: 99648 - DNA, 80 bp, synthetic construct
  source 1..80: mol_type = other DNA
gtgtggtggtgggcgcctgtagtcccagctacttgagaggctgaggcagaagaatggcgggaacctgggaggtggagctt

SEQ ID NO: 99649 - DNA, 80 bp, synthetic construct
  source 1..80: mol_type = other DNA
agtttttttcattgtttgtttggtttttgcataaagaaatgtttgatatcacatttgtcttgtccgtgtttcttgtgaca

SEQ ID NO: 99650 - DNA, 80 bp, synthetic construct; identical to SEQ ID NO: 18922
  source 1..80: mol_type = other DNA

SEQ ID NO: 99651 - DNA, 80 bp, synthetic construct
  source 1..80: mol_type = other DNA
gcttactgtagagatgacatcaatgtcccctggccatctggaatgaactgagtgtgaggtggagagagtgtgggctttga

SEQ ID NO: 99652 - DNA, 80 bp, synthetic construct
  source 1..80: mol_type = other DNA
ttccttgaggggaattcctcatccacctcacatggtcctactgtggctatcagtcatggaatcacaaagggatcttcctc

SEQ ID NO: 99653 - DNA, 80 bp, synthetic construct; identical to SEQ ID NO: 18923
  source 1..80: mol_type = other DNA

SEQ ID NO: 99654 - DNA, 80 bp, synthetic construct
  source 1..80: mol_type = other DNA
tttgtttcagcaactttgggttgggtttctgtcacatgcacttaaaagagtttgaatacaaatacctttatcatcctcta

SEQ ID NO: 99655 - DNA, 80 bp, synthetic construct
  source 1..80: mol_type = other DNA
actgacagctgtttggggtataaacttctagccctttttctggtatttctatctgtatgtttgtatacatgcatagatag

SEQ ID NO: 99656 - DNA, 80 bp, synthetic construct
  source 1..80: mol_type = other DNA
ggctggaatgtagtggtgtgatctctactcactacaacatccgcctccgaggttcaagctattcttctgcctcagcttcc

SEQ ID NO: 99657 - DNA, 80 bp, synthetic construct
  source 1..80: mol_type = other DNA
ataagccaccatacccagcctaattctacttcttttttattaaagacttcacagatttgatagcatagttaatctgctta

SEQ ID NO: 99658 - DNA, 80 bp, synthetic construct; identical to SEQ ID NO: 18924
  source 1..80: mol_type = other DNA

SEQ ID NO: 99659 - DNA, 80 bp, synthetic construct
  source 1..80: mol_type = other DNA
atactcattgatttcactttctaaacatgtgattgtgtgtccttcttattgacttgacaaattcctaattcctaacaggt

SEQ ID NO: 99660 - DNA, 80 bp, synthetic construct
  source 1..80: mol_type = other DNA
tttgaacctgttcatctttttctttatggcttctgagttttgtgtctttcttgggaagacctttcccatcccagattaca

SEQ ID NO: 99661 - DNA, 80 bp, synthetic construct; identical to SEQ ID NO: 18925
  source 1..80: mol_type = other DNA

SEQ ID NO: 99662 - DNA, 80 bp, synthetic construct
  source 1..80: mol_type = other DNA
gataccatcacaatgcaggtgagatgccaacatatgggttttgggagaactccaatgttcagtccaccctcccacctttc

SEQ ID NO: 99663 - DNA, 80 bp, synthetic construct
  source 1..80: mol_type = other DNA
tttgctctcctggaaagtgacattcttctatctactttctagtccacattttgcagtgcaaccgcgggactggaacatag

SEQ ID NO: 99664 - DNA, 80 bp, synthetic construct
  source 1..80: mol_type = other DNA
acttggatccctgcagtgcctgtcccaccctgcccctgcagcctgatctcctaaccctcatccttgcagtgtccatccca

SEQ ID NO: 99665 - DNA, 80 bp, synthetic construct; identical to SEQ ID NO: 18926
  source 1..80: mol_type = other DNA

SEQ ID NO: 99666 - DNA, 80 bp, synthetic construct
  source 1..80: mol_type = other DNA
agcattgcctgacacattatacatttacttgtcctctactggaatgtcatttccatgaggagagagactttttcttgttc

SEQ ID NO: 99667 - DNA, 80 bp, synthetic construct
  source 1..80: mol_type = other DNA
tgggcagtgtgaacatttgctcttgtgaatgccgtttcccatgggccttggtaagttctgccatggagggacgggactgg

SEQ ID NO: 99668 - DNA, 80 bp, synthetic construct; identical to SEQ ID NO: 18927
  source 1..80: mol_type = other DNA

SEQ ID NO: 99669 - DNA, 80 bp, synthetic construct
  source 1..80: mol_type = other DNA
agactttgggtattagaacaaggcatactggggtgtcaggggcagagatttatctcctctcccagttggagaggggaggg

SEQ ID NO: 99670 - DNA, 80 bp, synthetic construct
  source 1..80: mol_type = other DNA
cctgactcttggttgctgtcagtgtttaattatggttgtcaggcaagatgatttgaaatgattaatgggaagatgtattt

SEQ ID NO: 99671 - DNA, 80 bp, synthetic construct
  source 1..80: mol_type = other DNA
agagtggtacagttattacagttgatgaacctgcatgaagcattgtgatcactcagagtccgtagtttacagtggggagc

SEQ ID NO: 99672 - DNA, 80 bp, synthetic construct; identical to SEQ ID NO: 18928
  source 1..80: mol_type = other DNA

SEQ ID NO: 99673 - DNA, 80 bp, synthetic construct
  source 1..80: mol_type = other DNA
ggggtcaggagtttgagattagcctggccaaaaaggcaaaactctgtctctactaaaaatatataaattagccgggcgtt

SEQ ID NO: 99674 - DNA, 80 bp, synthetic construct
  source 1..80: mol_type = other DNA
cagcaaccctataaggtaggaggtgggtactgttttgttaataacagctttgatgagatgtaagtcacatatcatgaaat

SEQ ID NO: 99675 - DNA, 80 bp, synthetic construct
  source 1..80: mol_type = other DNA
cactaaactatttcctgtctgtgtggatttgcctcatctggacatttcatataaatgggataatgtaggagtggaattgc

SEQ ID NO: 99676 - DNA, 80 bp, synthetic construct
  source 1..80: mol_type = other DNA
tctagtggatatgaaggggaaactcattgtggttttgatttgcatttccttagtgactaacaatgttgaacatcttctca

SEQ ID NO: 99677 - DNA, 80 bp, synthetic construct; identical to SEQ ID NO: 18929
  source 1..80: mol_type = other DNA

SEQ ID NO: 99678 - DNA, 80 bp, synthetic construct
  source 1..80: mol_type = other DNA
caaaagttaccgggtaagagaccaagccagggtccaagtcaggtctattgacttcagggcttgtattctgaagtcaatac

SEQ ID NO: 99679 - DNA, 80 bp, synthetic construct
  source 1..80: mol_type = other DNA
aaatgaccaaacaaaacaaaactgatgctgtgatgctggaccttcaagctagtgatgcttcagaatacaccacaccagac

SEQ ID NO: 99680 - DNA, 80 bp, synthetic construct; identical to SEQ ID NO: 18930
  source 1..80: mol_type = other DNA

SEQ ID NO: 99681 - DNA, 80 bp, synthetic construct
  source 1..80: mol_type = other DNA
tgaagccaaagcagatgttttcacttcatctggggatgaatcatctggggaatgagaacagtaggcaaggaaggcaggat

SEQ ID NO: 99682 - DNA, 80 bp, synthetic construct
  source 1..80: mol_type = other DNA
ggaggagtcccagtcctcaaggagtttaaagttttgggtagagaaacgtgtggattgccaagttactgcaaagtggactg

SEQ ID NO: 99683 - DNA, 80 bp, synthetic construct
  source 1..80: mol_type = other DNA
aatgactcgggagtaaatgagaccaagaatgtgccagagttgagtgtactagtggtgctaacattttggaatcagagatc

SEQ ID NO: 99684 - DNA, 80 bp, synthetic construct
  source 1..80: mol_type = other DNA
ctgtttcggtgcttgttccctgaaggatgttttaaaagtcccagataaattcacattactattattaggaatcctatgtt

SEQ ID NO: 99685 - DNA, 80 bp, synthetic construct; identical to SEQ ID NO: 18931
  source 1..80: mol_type = other DNA

SEQ ID NO: 99686 - DNA, 80 bp, synthetic construct
  source 1..80: mol_type = other DNA
agacgggaggcaggattgacagccacagcttggcctctgtgctgggggtggaatctgctgcgtgtgcagcctccttcctg

SEQ ID NO: 99687 - DNA, 80 bp, synthetic construct
  source 1..80: mol_type = other DNA
cctctgccggcctctccctctcagtggaatgttctgtcccaggaggcattgcatcactgctgaccagcctcctgctcctg

SEQ ID NO: 99688 - DNA, 80 bp, synthetic construct
  source 1..80: mol_type = other DNA
ttctaaggtctcccctatcctctcatggcatgggttactgttccaagcatcagcaatgagtgaggccctctattcacttg

SEQ ID NO: 99689 - DNA, 80 bp, synthetic construct; identical to SEQ ID NO: 18932
  source 1..80: mol_type = other DNA

SEQ ID NO: 99690 - DNA, 80 bp, synthetic construct
  source 1..80: mol_type = other DNA
aggaaaaagatacaaattaaaataagctgagggcaggggcccacagggaatctcacctgagcctgtatttttgttttgtt

SEQ ID NO: 99691 - DNA, 80 bp, synthetic construct
  source 1..80: mol_type = other DNA
ttttgtgtttttagcagagacagggtttcgtcatgttggccaggctggtctcaaactcctgacctcaagtgatctgcctt

SEQ ID NO: 99692 - DNA, 80 bp, synthetic construct
  source 1..80: mol_type = other DNA
tacataattcattttttcagtttttgggtttctgattcacgcacggtttattctggtgtttggtgtcaggtgtgggctgc

SEQ ID NO: 99693 - DNA, 80 bp, synthetic construct; identical to SEQ ID NO: 18933
  source 1..80: mol_type = other DNA

SEQ ID NO: 99694 - DNA, 80 bp, synthetic construct
  source 1..80: mol_type = other DNA
tttgtcctaatgctttccctccccttgtcccccatccctcaacaggccccagtgtgtggtgttcccctccctgtgttcat

SEQ ID NO: 99695 - DNA, 80 bp, synthetic construct
  source 1..80: mol_type = other DNA
atatatgtgcaacattttattgatccagtctatcattgatgggcatttgggttggttccaagtctttgctattgtaaata

SEQ ID NO: 99696 - DNA, 80 bp, synthetic construct; identical to SEQ ID NO: 18934
  source 1..80: mol_type = other DNA

SEQ ID NO: 99697 - DNA, 80 bp, synthetic construct
  source 1..80: mol_type = other DNA
agtgctcatttttatgcctcagggtcaaggtgagggggagtgacttcaattttctctctttctcctttctctgtaattat

SEQ ID NO: 99698 - DNA, 80 bp, synthetic construct
  source 1..80: mol_type = other DNA
gggcaggtgtcattattccaattttacaggtgaggcaggtgatgtcataggaagcttgctgagtcgccaggtctcaggac

SEQ ID NO: 99699 - DNA, 80 bp, synthetic construct
  source 1..80: mol_type = other DNA
gaagcatgtaaagtataggcttttaatactgttcgccgagacagaatattggttactgttgctgcaaccatgacagcaat

SEQ ID NO: 99700 - DNA, 80 bp, synthetic construct; identical to SEQ ID NO: 18935
  source 1..80: mol_type = other DNA

SEQ ID NO: 99701 - DNA, 80 bp, synthetic construct
  source 1..80: mol_type = other DNA
ttgacagtttgattaatatctatctcttcttctaggctatgagccgcaggagggcagaagctgagatcgtatctcccaga

SEQ ID NO: 99702 - DNA, 80 bp, synthetic construct
  source 1..80: mol_type = other DNA
ccgccctagatgcgatgttggaatgcttgagaggccctctcctgaccccctctgtcaggaacattaatgtcatttcttcc

SEQ ID NO: 99703 - DNA, 80 bp, synthetic construct
  source 1..80: mol_type = other DNA
cggctaatttttttgtatttttaatagagatggggtttctccatgttggttaggctggtctcaaactcccaacctcaggt

SEQ ID NO: 99704 - DNA, 80 bp, synthetic construct; identical to SEQ ID NO: 18936
  source 1..80: mol_type = other DNA

SEQ ID NO: 99705 - DNA, 80 bp, synthetic construct
  source 1..80: mol_type = other DNA
gccaaggcaaagtttctatggcaaaggtttaagaacatgcaaattgaatgcgcctgattttaacctcattaatcctggct

SEQ ID NO: 99706 - DNA, 80 bp, synthetic construct
  source 1..80: mol_type = other DNA
gggttctcgtcctggctgtgctattgacattgtggccttgaacaagctttaagttgctaggaacttcatctgtaaaatgg

SEQ ID NO: 99707 - DNA, 80 bp, synthetic construct
  source 1..80: mol_type = other DNA
aagaagctctgagacctcatgcccagcccctccttcctttgtgtttcccaattaaataactgcaagagcaaagtcatgtg

SEQ ID NO: 99708 - DNA, 80 bp, synthetic construct
  source 1..80: mol_type = other DNA
accagtgggctagagctctttaaccattgtgtaacttatatgctttgtctagaactccttctgataagtatttccagtgg

SEQ ID NO: 99709 - DNA, 80 bp, synthetic construct
  source 1..80: mol_type = other DNA
tcctttcttatttcctctcacctcctccatgtctgcccacaaattcaaacaaaaaacaaggaagcgaagaagctgctaat

SEQ ID NO: 99710 - DNA, 80 bp, synthetic construct; identical to SEQ ID NO: 18937
  source 1..80: mol_type = other DNA

SEQ ID NO: 99711 - DNA, 80 bp, synthetic construct
  source 1..80: mol_type = other DNA
ttgttatctaggctaattcaccttagaattttctgagagtgtgctaatgaaaatagacattcttatgttagaatggctcc

SEQ ID NO: 99712 - DNA, 80 bp, synthetic construct
  source 1..80: mol_type = other DNA
tcttttaaaatccttacccttgcatttggcattagatgcctctgaatctcacattcatggaccttcaggtccatcttctc

SEQ ID NO: 99713 - DNA, 80 bp, synthetic construct
  source 1..80: mol_type = other DNA
tgatagtgacatttttccctcccctgctttttgccttttctcgagagtatttcttatacatagcatccttcaatattccc

SEQ ID NO: 99714 - DNA, 80 bp, synthetic construct; identical to SEQ ID NO: 18938
  source 1..80: mol_type = other DNA

SEQ ID NO: 99715 - DNA, 80 bp, synthetic construct
  source 1..80: mol_type = other DNA
attcttaggttctgaaatcattccctaaatttcttttatttctcaaactccggttttgcctttctggggtccaggggcct

SEQ ID NO: 99716 - DNA, 80 bp, synthetic construct
  source 1..80: mol_type = other DNA
agactgaaatcatgtcaagggtgagaacttggtctcctgagtctagaagttttgaagacctcactggaaatcattgactg

SEQ ID NO: 99717 - DNA, 80 bp, synthetic construct
  source 1..80: mol_type = other DNA
tatcatcagggctactcaccaggctcggaaaatctccttttgttcttctattttccatatggaatcaattcttataagta

SEQ ID NO: 99718 - DNA, 80 bp, synthetic construct; identical to SEQ ID NO: 18939
  source 1..80: mol_type = other DNA

SEQ ID NO: 99719 - DNA, 80 bp, synthetic construct
  source 1..80: mol_type = other DNA
gggatgtgtaatgttgagaaggaggatgaggtgaaaccacacggtatagagccgggtgtatggctgggaggattgacgat

SEQ ID NO: 99720 - DNA, 80 bp, synthetic construct
  source 1..80: mol_type = other DNA
tgaggtcatggttaatcaggggtgcattctctttcataatccctggggatcttgcctggcatttttgtttagctggagaa

SEQ ID NO: 99721 - DNA, 80 bp, synthetic construct; identical to SEQ ID NO: 18940
  source 1..80: mol_type = other DNA

SEQ ID NO: 99722 - DNA, 80 bp, synthetic construct
  source 1..80: mol_type = other DNA
cttttttttgtaaaaatcaaatcaacccctcccttccattggatgaggagataattatcatcattcactgaaggtcgaca

SEQ ID NO: 99723 - DNA, 80 bp, synthetic construct
  source 1..80: mol_type = other DNA
atgttgagcaaaaggatggtgagattgtaggagcagaaagagggatggagaagagactagaacatggaaaatcaggtcca

SEQ ID NO: 99724 - DNA, 80 bp, synthetic construct
  source 1..80: mol_type = other DNA
ggtgtcactggaaatgattccctctgctcaatatggatttgcatctatgttgatttcatgttgttacctaccttattaaa

SEQ ID NO: 99725 - DNA, 80 bp, synthetic construct
  source 1..80: mol_type = other DNA
aagaggagatattttctcatttgtaaaatagggctcctgactcagtttcttgggtctcttcccagagatattctttattt

SEQ ID NO: 99726 - DNA, 80 bp, synthetic construct; identical to SEQ ID NO: 18941
  source 1..80: mol_type = other DNA

SEQ ID NO: 99727 - DNA, 80 bp, synthetic construct
  source 1..80: mol_type = other DNA
tgctggtgattcagatatgcccaagagaagccataaagtgcttcctttaagtgaaaaggtaaatgtttattccaggtata

SEQ ID NO: 99728 - DNA, 80 bp, synthetic construct
  source 1..80: mol_type = other DNA
catactgtctagccaccatacttaacttcgttttgacaatgtgtctctgaagagattgtagcctgtctgcacacaagcct

SEQ ID NO: 99729 - DNA, 80 bp, synthetic construct
  source 1..80: mol_type = other DNA
gagtccatcggaaggatacatttctgtaaataggattgctgggtgaaaggtatatttgcttttgttttgatgaaaacagt

SEQ ID NO: 99730 - DNA, 80 bp, synthetic construct; identical to SEQ ID NO: 18942
  source 1..80: mol_type = other DNA

SEQ ID NO: 99731 - DNA, 80 bp, synthetic construct
  source 1..80: mol_type = other DNA
catttgcccagaacattcacactttcagacctggagatgaaacacaattttttggcagcaaatctcaaataacatgtatt

SEQ ID NO: 99732 - DNA, 80 bp, synthetic construct
  source 1..80: mol_type = other DNA
aatatacccagtttgcactgaattccattccttgcttctttttcccttcttagtcacacactatctgtgcgtgtcaagac

SEQ ID NO: 99733 - DNA, 80 bp, synthetic construct
  source 1..80: mol_type = other DNA
aaaaagaaagaaagaaaccaatccagatgacagaaactgagagggacatggtggttgcaggtgtccgtgtgtgctgggaa

SEQ ID NO: 99734 - DNA, 80 bp, synthetic construct; identical to SEQ ID NO: 18943
  source 1..80: mol_type = other DNA

SEQ ID NO: 99735 - DNA, 80 bp, synthetic construct
  source 1..80: mol_type = other DNA
aatacaaaaaaattagccgggcatggtgttgcgcgcctgtaatcccagctactcgggaggctgagacaggagaatcactt

SEQ ID NO: 99736 - DNA, 80 bp, synthetic construct
  source 1..80: mol_type = other DNA
caccaggcaccaaatctgctggtgccttgattgtggacttcccagcctccagaactttgagcaataaatttctattgttt

SEQ ID NO: 99737 - DNA, 80 bp, synthetic construct; identical to SEQ ID NO: 18944
  source 1..80: mol_type = other DNA

SEQ ID NO: 99738 - DNA, 80 bp, synthetic construct
  source 1..80: mol_type = other DNA
tatacctggttagtgttcgcggctgtgtagtattccattacaggaatacaccactatttattcattctactcttgatgga

SEQ ID NO: 99739 - DNA, 80 bp, synthetic construct
  source 1..80: mol_type = other DNA
ttgcctgctgctagattcttgtcatcattaatcatcatctatatgccaggcactatgtgaggcattgggaatagtaagga

SEQ ID NO: 99740 - DNA, 80 bp, synthetic construct
  source 1..80: mol_type = other DNA
aaaaacagagagagagttggcggccctacagcaaaacataggctttatgtccaacataaaacctgcagaggttgggggcc

SEQ ID NO: 99741 - DNA, 80 bp, synthetic construct; identical to SEQ ID NO: 18945
  source 1..80: mol_type = other DNA

SEQ ID NO: 99742 - DNA, 80 bp, synthetic construct
  source 1..80: mol_type = other DNA
agagcacgcggggcatgttcctggagctgaaggagtgccaaggtgccagagcatggaggcgggaatggggatagaggagg

SEQ ID NO: 99743 - DNA, 80 bp, synthetic construct
  source 1..80: mol_type = other DNA
attagtaggaagcatttgaaatggtccacagctgctcacaatccttaagggagtttatctgtaactgagagagtatgggg

SEQ ID NO: 99744 - DNA, 80 bp, synthetic construct
  source 1..80: mol_type = other DNA
agggctcttgaagtcatgctgtgtttttaggaagatatttgagcaggagatcatgaaaattttgcaagaatctgcaatct

SEQ ID NO: 99745 - DNA, 80 bp, synthetic construct; identical to SEQ ID NO: 18946
  source 1..80: mol_type = other DNA

SEQ ID NO: 99746 - DNA, 80 bp, synthetic construct
  source 1..80: mol_type = other DNA
gacttggggcaactttgatcttctaaatgggtattaatagttcccacctgcaggactgaactgtggaaatgcactgagat

SEQ ID NO: 99747 - DNA, 80 bp, synthetic construct
  source 1..80: mol_type = other DNA
tgcagacttgtctggaaacacggacaacaaggcagcttggcatttccgagccaactgctgagatgaaacaggttcattgt

SEQ ID NO: 99748 - DNA, 80 bp, synthetic construct; identical to SEQ ID NO: 18947
  source 1..80: mol_type = other DNA

SEQ ID NO: 99749 - DNA, 80 bp, synthetic construct
  source 1..80: mol_type = other DNA
ctagtgggagccaggtgtgtggagctgcctttcacagaactgggttatggacccaccagagagatggagccccttctctc

SEQ ID NO: 99750 - DNA, 80 bp, synthetic construct
  source 1..80: mol_type = other DNA
gatggcagcagatataacatcattatgtgtgtgaaaacatacaaagacactcgttctagggggtgttgtccagcagatgc

SEQ ID NO: 99751 - DNA, 80 bp, synthetic construct
  source 1..80: mol_type = other DNA
taccatctgcatttgttttttctttttgattgggtggcattcacctgggctttccttcacttcctgacgattcaagatgg

SEQ ID NO: 99752 - DNA, 80 bp, synthetic construct
  source 1..80: mol_type = other DNA
tacccttctgcacctaggacctcttccactccttcccagtcaagaagcacctatgaataagcacaggtattcaatatttg

SEQ ID NO: 99753 - DNA, 80 bp, synthetic construct; identical to SEQ ID NO: 18948
  source 1..80: mol_type = other DNA

SEQ ID NO: 99754 - DNA, 80 bp, synthetic construct
  source 1..80: mol_type = other DNA
caagactgccccaccaagccttctgccatttgtcaactcacaactctgtggcagcctgaaattgttttcaattcccagta

SEQ ID NO: 99755 - DNA, 80 bp, synthetic construct
  source 1..80: mol_type = other DNA
gatcctgctcctctagaatgcccacttcccacccagtgtgaggatgatcagtttacgtgcctgcctccccatggacgtac

SEQ ID NO: 99756 - DNA, 80 bp, synthetic construct; identical to SEQ ID NO: 18949
  source 1..80: mol_type = other DNA

SEQ ID NO: 99757 - DNA, 80 bp, synthetic construct
  source 1..80: mol_type = other DNA
ttttcagtagcttcctgagccatttctttcttagctcccaggctggaggccttttcccaggtctctaatggacaaacttt

SEQ ID NO: 99758 - DNA, 80 bp, synthetic construct
  source 1..80: mol_type = other DNA
ttttctggagctactaaaggaaagaaacccagttgaacccaggatttttttctttacccccgaacttctttgtacagaag

SEQ ID NO: 99759 - DNA, 80 bp, synthetic construct
  source 1..80: mol_type = other DNA
cagaggctcgggttcttgagtagagggctgatgctagaaacataaagagattcatctgcatcttcttcaacagtgtgcct

SEQ ID NO: 99760 - DNA, 80 bp, synthetic construct; identical to SEQ ID NO: 18950
  source 1..80: mol_type = other DNA

SEQ ID NO: 99761 - DNA, 80 bp, synthetic construct
  source 1..80: mol_type = other DNA
cttagaggctttcacattcattatttcacttaattctctaaacctccaatggggtaaatcaatttctgttttgcagacca

SEQ ID NO: 99762 - DNA, 80 bp, synthetic construct
  source 1..80: mol_type = other DNA
taattactaggttttaatggtcaactttagtccaaagcttctccctcttctcaccttctcccagccttctgattcagttt

SEQ ID NO: 99763 - DNA, 80 bp, synthetic construct
  source 1..80: mol_type = other DNA
aacctctgcctcccagttcaagcgattctcatgcctcagtctcctgagtagctgggaccacagatgcgcaccatcacacc

SEQ ID NO: 99764 - DNA, 80 bp, synthetic construct; identical to SEQ ID NO: 18951
  source 1..80: mol_type = other DNA

SEQ ID NO: 99765 - DNA, 80 bp, synthetic construct
  source 1..80: mol_type = other DNA
cctctcagtgcctcagatacctctctatacagaggaaatgcaagcggaagtataaggaagatcacacgaaatagcgcctg

SEQ ID NO: 99766 - DNA, 80 bp, synthetic construct
  source 1..80: mol_type = other DNA
ggctgatgcttgtggctgggaaacgccactaccaaggtgatgaaaggtgaaggtgggttgatatataaaataaaagaact

SEQ ID NO: 99767 - DNA, 80 bp, synthetic construct
  source 1..80: mol_type = other DNA
tggaaacgcagattctcaaaccttcctccagacttactgaacggaaactctgggggtggatgctagtgatattgtgtttg

SEQ ID NO: 99768 - DNA, 80 bp, synthetic construct
  source 1..80: mol_type = other DNA
ggaaagaaatctgctgatatgaagactcagttatatttcgaacaaaggcaatgaatccatcttggtcctttgcttggctc

SEQ ID NO: 99769 - DNA, 80 bp, synthetic construct; identical to SEQ ID NO: 18952
  source 1..80: mol_type = other DNA

SEQ ID NO: 99770 - DNA, 80 bp, synthetic construct
  source 1..80: mol_type = other DNA
taaagactttctagcctgaataccaccatggcaagtcataagccttgttcttcccctcctgtgctccacatcccagggat

SEQ ID NO: 99771 - DNA, 80 bp, synthetic construct
  source 1..80: mol_type = other DNA
tgctactcctgtccccactagcttttgtgtaccttcttgtctgtttgataaattctctggattaaattctccaagggatt

SEQ ID NO: 99772 - DNA, 80 bp, synthetic construct; identical to SEQ ID NO: 18953
  source 1..80: mol_type = other DNA

SEQ ID NO: 99773 - DNA, 80 bp, synthetic construct
  source 1..80: mol_type = other DNA
ttgagaatgttcaaatctgttccattataagccaccccagaacttaatgatttagaaccctttattatttctcatgattc

SEQ ID NO: 99774 - DNA, 80 bp, synthetic construct
  source 1..80: mol_type = other DNA
actctgaggccaattgaggtagaggcttggaagttacacagcatctcttcctgtgcattctgcttcaaagcaagtcaaga

SEQ ID NO: 99775 - DNA, 80 bp, synthetic construct
  source 1..80: mol_type = other DNA
cctggaatagatttaaaaggttgctcaactggtaagacccacaaatggagagctgccactgctttccttagttctttgtc

SEQ ID NO: 99776 - DNA, 80 bp, synthetic construct; identical to SEQ ID NO: 18954
  source 1..80: mol_type = other DNA

SEQ ID NO: 99777 - DNA, 80 bp, synthetic construct
  source 1..80: mol_type = other DNA
tttgtataacagtgtctgcaaaaactgataacatttgattaaggcctgcagtctagtccattgtattgtgccagtgtcaa

SEQ ID NO: 99778 - DNA, 80 bp, synthetic construct
  source 1..80: mol_type = other DNA
ctccacctgcttgtgtattactggtatttgcatcatcatttgggagaaaagttgagcattgattttaaaaactctttttt

SEQ ID NO: 99779 - DNA, 80 bp, synthetic construct
  source 1..80: mol_type = other DNA
ccacctcctttcttccctttctggactcagagatcctctgtcccaagtttctcccttatagtcagggctctgccctttac

SEQ ID NO: 99780 - DNA, 80 bp, synthetic construct; identical to SEQ ID NO: 18955
  source 1..80: mol_type = other DNA

SEQ ID NO: 99781 - DNA, 80 bp, synthetic construct
  source 1..80: mol_type = other DNA
tttttagaaagttttctttctgaaagagaaaactttttcaagtgaagtaaaacttctttgaaatattacgtgtttaaact

SEQ ID NO: 99782 - DNA, 80 bp, synthetic construct
  source 1..80: mol_type = other DNA
acaataggcagcaatgggtttaggagttctatggcgaaaaggcatttcctgagattgaatcagtggcaaaaggagagcct

SEQ ID NO: 99783 - DNA, 80 bp, synthetic construct
  source 1..80: mol_type = other DNA
gagctcagagtatgtctacctggggaactaaaccagtgtgcatgaaatgaccagagagtgatatggggcagatagggttt

SEQ ID NO: 99784 - DNA, 80 bp, synthetic construct; identical to SEQ ID NO: 18956
  source 1..80: mol_type = other DNA

SEQ ID NO: 99785 - DNA, 80 bp, synthetic construct
  source 1..80: mol_type = other DNA
taagtgcatttacaatgctgggcaatcatcatgactatttagttccaggaccttttcattacccacaaaggagaccatgt

SEQ ID NO: 99786 - DNA, 80 bp, synthetic construct
  source 1..80: mol_type = other DNA
tgagaacatgaaaaagacagttacatcctatgaccaacatcatgcttgctgggaaaaccttagaagcattcccaattaca

SEQ ID NO: 99787 - DNA, 80 bp, synthetic construct
  source 1..80: mol_type = other DNA
caacgagttgcttacctcttttattatatgtaatacttttggaaattcagtgtccatgtacagaaagcaatagcatttct

SEQ ID NO: 99788 - DNA, 80 bp, synthetic construct
  source 1..80: mol_type = other DNA
tatgttcgtagataggatagctcatttgtgtaaaagtgtctcattgaagacaattccaataaatatcccaacaggattta

SEQ ID NO: 99789 - DNA, 80 bp, synthetic construct; identical to SEQ ID NO: 18957
  source 1..80: mol_type = other DNA

SEQ ID NO: 99790 - DNA, 80 bp, synthetic construct
  source 1..80: mol_type = other DNA
caaccccgggagaatatctttatgacctgagaggttaaaaagaattccttagaaaggatccaaaaaacacaactcagaag

SEQ ID NO: 99791 - DNA, 80 bp, synthetic construct
  source 1..80: mol_type = other DNA
tgataaaaatgttaacattggttaatcctggttggtggggacacaagggcttgttacacttagaaatatttccatgttta

SEQ ID NO: 99792 - DNA, 80 bp, synthetic construct
  source 1..80: mol_type = other DNA
tgtgctctggaaaacaagagggttggactgattactagcttaggtcctcctcccttgccagcgctcacattttctcttct

SEQ ID NO: 99793 - DNA, 80 bp, synthetic construct; identical to SEQ ID NO: 18958
  source 1..80: mol_type = other DNA

SEQ ID NO: 99794 - DNA, 80 bp, synthetic construct
  source 1..80: mol_type = other DNA
gcgatgggtctctaaggaggtaccagtgttttaagcaaggtggtcatttgtgggctggtaatttgaaaatgggagttgtg

SEQ ID NO: 99795 - DNA, 80 bp, synthetic construct
  source 1..80: mol_type = other DNA
acatacttatagctatcactgctgtcaatctaagcagggagtataaccaatgtctccatcatcttaagtaatttgtgtgt

SEQ ID NO: 99796 - DNA, 80 bp, synthetic construct; identical to SEQ ID NO: 18959
  source 1..80: mol_type = other DNA

SEQ ID NO: 99797 - DNA, 80 bp, synthetic construct
  source 1..80: mol_type = other DNA
tcttgcacctaaaccgtcatggcaagcacactttggataaatcatttaacttcattagacttcaattgcatcatccataa

SEQ ID NO: 99798 - DNA, 80 bp, synthetic construct
  source 1..80: mol_type = other DNA
gttttgggaaggaacttgggggagatagagcagatcctctgctcaggcacactttttttttctttctgaaagactgtttt

SEQ ID NO: 99799 - DNA, 80 bp, synthetic construct
  source 1..80: mol_type = other DNA
aagtctgtcctttacactggggttcactcttagtggtgtacgttctgtgggtctggacaaacgcatgatgacgtgtatcc

SEQ ID NO: 99800 - DNA, 80 bp, synthetic construct; identical to SEQ ID NO: 18960
  source 1..80: mol_type = other DNA

SEQ ID NO: 99801 - DNA, 80 bp, synthetic construct
  source 1..80: mol_type = other DNA
tatggatttttgatctgctaaacactgaactaagaagatttctggatatagatgtagttgaaagggataaatatgtactt

SEQ ID NO: 99802 - DNA, 80 bp, synthetic construct
  source 1..80: mol_type = other DNA
cagccatcccagcctccttcctcacttacacctttgtgtaatttccttgcttttctctataattttaccacttgtgtttc

SEQ ID NO: 99803 - DNA, 80 bp, synthetic construct
  source 1..80: mol_type = other DNA
ttgcccaggctggagtgcagcagtgagatctcggctcactgcaacctctgcctcccgggttcaagcaattctcctgcctc

SEQ ID NO: 99804 - DNA, 80 bp, synthetic construct
  source 1..80: mol_type = other DNA
agccaccgtgcctggcgaaattataatatttatactgacagtctaaagtttatcaaagctttcatttcccatagagtaac

SEQ ID NO: 99805 - DNA, 80 bp, synthetic construct; identical to SEQ ID NO: 18961
  source 1..80: mol_type = other DNA

SEQ ID NO: 99806 - DNA, 80 bp, synthetic construct
  source 1..80: mol_type = other DNA
aaacctggtgactcaaaacgacacaaattcattctcctttgattctggaaggcagaagcccatcatcagtttccctgggc

SEQ ID NO: 99807 - DNA, 80 bp, synthetic construct
  source 1..80: mol_type = other DNA
tcctcaaagacagcagccattgtagcatctccaaatctctctcctgtcacatcaccttctctgtgtcaaatccctctttg

SEQ ID NO: 99808 - DNA, 80 bp, synthetic construct; identical to SEQ ID NO: 18962
  source 1..80: mol_type = other DNA

SEQ ID NO: 99809 - DNA, 80 bp, synthetic construct
  source 1..80: mol_type = other DNA
ctggtaactacgatgggtctaggtgtacattccttaacatttactttgcttgggattctctggtcttttgaccacttagt

SEQ ID NO: 99810 - DNA, 80 bp, synthetic construct
  source 1..80: mol_type = other DNA
gcttttgatgctgtattttgaacaatttcctgtgatctaacctctggtccttaattctctcttctattgtttttaatctt

SEQ ID NO: 99811 - DNA, 80 bp, synthetic construct
  source 1..80: mol_type = other DNA
tttgcaagcttgtttactttttcatgtggttagcaaatataaacttactgagtttgcatctgaagtgtgtccaggtcggt

SEQ ID NO: 99812 - DNA, 80 bp, synthetic construct; identical to SEQ ID NO: 18963
  source 1..80: mol_type = other DNA

SEQ ID NO: 99813 - DNA, 80 bp, synthetic construct
  source 1..80: mol_type = other DNA
gggacccagcttactgtaggtatatgtctcctgtaagagtctacatcagatgtgctctgggccctgacatctttcatcct

SEQ ID NO: 99814 - DNA, 80 bp, synthetic construct
  source 1..80: mol_type = other DNA
cagtgtttttatggttacttactcagagttgtttttagctgagggctcatccaataattcaatcacctaaccttccctcg

SEQ ID NO: 99815 - DNA, 80 bp, synthetic construct
  source 1..80: mol_type = other DNA
aatcaagggaatgtagggccacaagtttttatttgctttaagatattagtagccacatgggatattgacctggtgtccca

SEQ ID NO: 99816 - DNA, 80 bp, synthetic construct; identical to SEQ ID NO: 18964
  source 1..80: mol_type = other DNA

SEQ ID NO: 99817 - DNA, 80 bp, synthetic construct
  source 1..80: mol_type = other DNA
ttaacgctccaacgtgcatctgtgacaatgacagcggattcctgactgtggccatggctcaggatacttcagtggataaa

SEQ ID NO: 99818 - DNA, 80 bp, synthetic construct
  source 1..80: mol_type = other DNA
gttcagtcctcatatcccagatttggatggaaacctctgatgctataatcaacatgaggaaaagcctgtaaatcatttac

SEQ ID NO: 99819 - DNA, 80 bp, synthetic construct
  source 1..80: mol_type = other DNA
cctaagagagaagctgagatttagaggagccactgaggatggctgtgaaagtgatctggctaggatgtttgtcatcccat

SEQ ID NO: 99820 - DNA, 80 bp, synthetic construct; identical to SEQ ID NO: 18965
  source 1..80: mol_type = other DNA

SEQ ID NO: 99821 - DNA, 80 bp, synthetic construct
  source 1..80: mol_type = other DNA
tcctacacaagtgaggttggtgcatttattaattaatgtcactaagagatcagttaaagcctcagcaaacaattgccatg

SEQ ID NO: 99822 - DNA, 80 bp, synthetic construct
  source 1..80: mol_type = other DNA
tcctagtgtggttcagagcacagattccacctgcttttattttgctttctaattgcttattattctcccaagcacacact

SEQ ID NO: 99823 - DNA, 80 bp, synthetic construct
  source 1..80: mol_type = other DNA
catgttttgctgagtataatacccttgccattcaaattttaattgaagtaaatagtaaaacaaagttggagtagagtggg

SEQ ID NO: 99824 - DNA, 80 bp, synthetic construct
  source 1..80: mol_type = other DNA
aatgctatattagaggatattttggtcttttgcaaaaacagagaatgaagacagtgcaaagtgctaggcacagcactggg

SEQ ID NO: 99825 - DNA, 80 bp, synthetic construct; identical to SEQ ID NO: 18966
  source 1..80: mol_type = other DNA

SEQ ID NO: 99826 - DNA, 80 bp, synthetic construct
  source 1..80: mol_type = other DNA
gcaatctccagctcccaggctcaagcaatcctcctgtctcagcctcccaagtagctgggactagaggtgtgcaccaccac

SEQ ID NO: 99827 - DNA, 80 bp, synthetic construct
  source 1..80: mol_type = other DNA
gagcttatattccaggggagggacaagcaataaagtgcaagataaacaaggtaattttatagtgataaagataggataag

SEQ ID NO: 99828 - DNA, 80 bp, synthetic construct; identical to SEQ ID NO: 18967
  source 1..80: mol_type = other DNA

SEQ ID NO: 99829 - DNA, 80 bp, synthetic construct
  source 1..80: mol_type = other DNA
gtggcaaatagctatcctattgaacagtgcagatgaggggaaggacgtttcaggtagggagggcagcttgtgagaaggta

SEQ ID NO: 99830 - DNA, 80 bp, synthetic construct
  source 1..80: mol_type = other DNA
taaaatccctgctcaacaaagaacctatttcctttcctaggaaggactcattccacattggctgactcacaactcttgac

SEQ ID NO: 99831 - DNA, 80 bp, synthetic construct
  source 1..80: mol_type = other DNA
gtctctttgtattccacatacaactcctccatcatcctagggggctcagacctcatcttttctggcatagcttttctatt

SEQ ID NO: 99832 - DNA, 80 bp, synthetic construct; identical to SEQ ID NO: 18968
  source 1..80: mol_type = other DNA

SEQ ID NO: 99833 - DNA, 80 bp, synthetic construct
  source 1..80: mol_type = other DNA
gatggagattcggctccagcaagattgccaggcgaaaacagagatgaggttgccaatgctggctcagtgtgctgaggatt

SEQ ID NO: 99834 - DNA, 80 bp, synthetic construct
  source 1..80: mol_type = other DNA
ccaccctgaaaggtgtaagaaacaaagcaaaggcaatccaaatgttaaattggaggccacagagccaagcccacctccat

SEQ ID NO: 99835 - DNA, 80 bp, synthetic construct
  source 1..80: mol_type = other DNA
gtttgagatcataaaatgagtacctgtgatgactgaacaatgtgctggcgtgttccatccccttttgcaaagaaccttcc

SEQ ID NO: 99836 - DNA, 80 bp, synthetic construct; identical to SEQ ID NO: 18969
  source 1..80: mol_type = other DNA

SEQ ID NO: 99837 - DNA, 80 bp, synthetic construct
  source 1..80: mol_type = other DNA
gattacaggcactaaccaccacgcacggctaatttttgtatttttagtagagacgcagggtttcaacatgttggtcagac

SEQ ID NO: 99838 - DNA, 80 bp, synthetic construct
  source 1..80: mol_type = other DNA
aggtgcagtggctcaggcctgtaatcccagcactttgggaggccaaggcaggcagatcatgaggtcaggagtttgagacc

SEQ ID NO: 99839 - DNA, 80 bp, synthetic construct
  source 1..80: mol_type = other DNA
cactgcactccagcctgggcaacaagagcaagactccatctcaaaaaaaaaaaaaaaaaagaaaagagaaaagaaaagaa

SEQ ID NO: 99840 - DNA, 80 bp, synthetic construct; identical to SEQ ID NO: 18970
  source 1..80: mol_type = other DNA

SEQ ID NO: 99841 - DNA, 80 bp, synthetic construct
  source 1..80: mol_type = other DNA
aatggcagcatagtatgtccttaagttcctgtgtacttggcacttgggcgacttaagccacaaggactcagtaacggttg

SEQ ID NO: 99842 - DNA, 80 bp, synthetic construct
  source 1..80: mol_type = other DNA
gtgtataccactgccagttgcctcctccttacattattgtgttttaacaccctcttctacttccagtgagggccactata

SEQ ID NO: 99843 - DNA, 80 bp, synthetic construct
  source 1..80: mol_type = other DNA
gtgcttctcccaacccagcttccacctcttaccttaatactagttttggagtaaaaggaaggattaactgacatggcata

SEQ ID NO: 99844 - DNA, 80 bp, synthetic construct
  source 1..80: mol_type = other DNA
tggaatccaacaaacattgtttcaaataaccacatactaggctttgacactttaggtgaggtactcagtcatttggagct

SEQ ID NO: 99845 - DNA, 80 bp, synthetic construct; identical to SEQ ID NO: 18971
  source 1..80: mol_type = other DNA

SEQ ID NO: 99846 - DNA, 80 bp, synthetic construct
  source 1..80: mol_type = other DNA
atgagggttccttttatttcaataatcaagctcacattcagtgtatcatgttacggagctcacaatagcagatacacagc

SEQ ID NO: 99847 - DNA, 80 bp, synthetic construct
  source 1..80: mol_type = other DNA
gccttctatgtgggtttgggaagatgtgtgtggtggggcgcttttcaataaactcttagtctaagaaagttctgggcata

SEQ ID NO: 99848 - DNA, 80 bp, synthetic construct
  source 1..80: mol_type = other DNA
caggctggctggttccctcaggtcaggagctgggactggcgcttttaggtgtctgtgactgagtcagcggctgaggccaa

SEQ ID NO: 99849 - DNA, 80 bp, synthetic construct; identical to SEQ ID NO: 18972
  source 1..80: mol_type = other DNA

SEQ ID NO: 99850 - DNA, 80 bp, synthetic construct
  source 1..80: mol_type = other DNA
cactggggagttttgaccttttaaaaggaatataccctattgactgttttggataggagattacagtggacaccaggcat

SEQ ID NO: 99851 - DNA, 80 bp, synthetic construct
  source 1..80: mol_type = other DNA
agtttggtttgagtgtttaaggattacagtgtgagatttggaaggagaaaagtaaaaaaaagttggcaggagaacggtgg

SEQ ID NO: 99852 - DNA, 80 bp, synthetic construct
  source 1..80: mol_type = other DNA
tgagagcacagtttctcaactgcaacactattgatatcttgggccaaataattatcttttgtggtggttgtcttgagcat

SEQ ID NO: 99853 - DNA, 80 bp, synthetic construct; identical to SEQ ID NO: 18973
  source 1..80: mol_type = other DNA

SEQ ID NO: 99854 - DNA, 80 bp, synthetic construct
  source 1..80: mol_type = other DNA
accaccaccaccacccacagcagcaacaacaaaaaatagggaagtaaaccaggcgaggctttggaattttattaaaaatg

SEQ ID NO: 99855 - DNA, 80 bp, synthetic construct
  source 1..80: mol_type = other DNA
tatgtgaagaggctgagaacatgtggcataaacatcgactgatattgtttgccatttacactcagcatgtgtaatgcagc

SEQ ID NO: 99856 - DNA, 80 bp, synthetic construct
  source 1..80: mol_type = other DNA
catgcagaaagctggtagaatgtcattggaattttctagggaggcacatgcgcaacacccaaaatgactccaggcttcga

SEQ ID NO: 99857 - DNA, 80 bp, synthetic construct; identical to SEQ ID NO: 18974
  source 1..80: mol_type = other DNA

SEQ ID NO: 99858 - DNA, 80 bp, synthetic construct
  source 1..80: mol_type = other DNA
accagatctgggagaatggaaggggatgcattcagaatcccaaaactttataaatgatgggcatctcttaagggtgaggt

SEQ ID NO: 99859 - DNA, 80 bp, synthetic construct
  source 1..80: mol_type = other DNA
gaatagcttctgagcacccctgaagtagctggaatatgaatttcagcacctcttaggtatctttaagtaaagttaagtgt

SEQ ID NO: 99860 - DNA, 80 bp, synthetic construct
  source 1..80: mol_type = other DNA
caagtagcttcaacacatgtggtagaggaatactagttttctgcttgcaagtgtgtaaaagcaaatccatactcataaaa

SEQ ID NO: 99861 - DNA, 80 bp, synthetic construct; identical to SEQ ID NO: 18975
  source 1..80: mol_type = other DNA

SEQ ID NO: 99862 - DNA, 80 bp, synthetic construct
  source 1..80: mol_type = other DNA
aaccattctttctggcctcagccaaggcagttttcaatctgcttggatcgtaaccacaggtttagtttgtggtattctaa

SEQ ID NO: 99863 - DNA, 80 bp, synthetic construct
  source 1..80: mol_type = other DNA
ggtatttggcagggtcataggacaatagtggagggaaggtcagcagataaacaagtgaacaaaggtctctggttttccta

SEQ ID NO: 99864 - DNA, 80 bp, synthetic construct
  source 1..80: mol_type = other DNA
atgtttcagagggcacagggttgggggtaaggtcacagatcaacaggatcacaaggcagaagaatttttcttagtacaga

SEQ ID NO: 99865 - DNA, 80 bp, synthetic construct
  source 1..80: mol_type = other DNA
gggtggtggccgggcagaggggctcctcacttcccagtaggggcggccgggcagaggcgcccctcacctcccggacgggg

SEQ ID NO: 99866 - DNA, 80 bp, synthetic construct; identical to SEQ ID NO: 18976
  source 1..80: mol_type = other DNA

SEQ ID NO: 99867 - DNA, 80 bp, synthetic construct
  source 1..80: mol_type = other DNA
gggggctgacccccccacctccctcccggacagggcggctggcctggcgggggctgacccccacctccctcccggacggg

SEQ ID NO: 99868 - DNA, 80 bp, synthetic construct
  source 1..80: mol_type = other DNA
gcggttgccagacggagggtctcctcgcttctcagacggggcggacgggcagagacgctcctcacctcccagacggggtc

SEQ ID NO: 99869 - DNA, 80 bp, synthetic construct; identical to SEQ ID NO: 18977
  source 1..80: mol_type = other DNA

SEQ ID NO: 99870 - DNA, 80 bp, synthetic construct
  source 1..80: mol_type = other DNA
cgtctccaccaaaaaaatacgaaaaccagtcaggcgtggcggcgcgcgcctgcaatcgcaggcactcggcaggctgaggc

SEQ ID NO: 99871 - DNA, 80 bp, synthetic construct
  source 1..80: mol_type = other DNA
taagatagaggcaaaagccaaaagtaatgcacatataatattctctgccttgggcgacatctgtgttgtgttggctgtag

SEQ ID NO: 99872 - DNA, 80 bp, synthetic construct
  source 1..80: mol_type = other DNA
aaacacacacggaaacatataccatgtccttcacaaggaaacagggtattctggtaagatctacattcccacatgcttaa

SEQ ID NO: 99873 - DNA, 80 bp, synthetic construct; identical to SEQ ID NO: 18978
  source 1..80: mol_type = other DNA

SEQ ID NO: 99874 - DNA, 80 bp, synthetic construct
  source 1..80: mol_type = other DNA
agacaaatggtcatgctgtttggagtgacaaaaatggcttgtgggacccaaagtaataaagaacagattgattctattct

SEQ ID NO: 99875 - DNA, 80 bp, synthetic construct
  source 1..80: mol_type = other DNA
ctttttaaaacttcccaagtaattcctaagtgccaccaagtttgagatctagtgatacagatgactttatcaacaacctt

SEQ ID NO: 99876 - DNA, 80 bp, synthetic construct; identical to SEQ ID NO: 18979
  source 1..80: mol_type = other DNA

SEQ ID NO: 99877 - DNA, 80 bp, synthetic construct
  source 1..80: mol_type = other DNA
tataattaattacatgtgtcccttgaaattatttttacattgtctgaaacccccatggaagaggaagcccattcttggtg

SEQ ID NO: 99878 - DNA, 80 bp, synthetic construct
  source 1..80: mol_type = other DNA
tcaagtgatcgtcccacctgagcctcccaagtagctgagattacagttgtgcgccaccatgcctggccaatctaaaaaat

SEQ ID NO: 99879 - DNA, 80 bp, synthetic construct
  source 1..80: mol_type = other DNA
agccacctcactatacattcttagggttggaaagtattttcaaaatactctagtacagcggttctcaaggtgcagcatca

SEQ ID NO: 99880 - DNA, 80 bp, synthetic construct
  source 1..80: mol_type = other DNA
gaagttctcctctccgggtgcccaccaaaatttgaattactgctgttatttcaccttgtcagaaactgaggtaccccagt

SEQ ID NO: 99881 - DNA, 80 bp, synthetic construct; identical to SEQ ID NO: 18980
  source 1..80: mol_type = other DNA

SEQ ID NO: 99882 - DNA, 80 bp, synthetic construct
  source 1..80: mol_type = other DNA
tggacttctagtatttggctgaaatcacgtcagttaaaatgtctaggttaattgtcaggcaactctagaaaaagaccaac

SEQ ID NO: 99883 - DNA, 80 bp, synthetic construct
  source 1..80: mol_type = other DNA
catcccaacatcgtgtagattaggcacttaacagcgcctcagaggcacacactgaaattgcattttcttccgatttggtt

SEQ ID NO: 99884 - DNA, 80 bp, synthetic construct; identical to SEQ ID NO: 18981
  source 1..80: mol_type = other DNA

SEQ ID NO: 99885 - DNA, 80 bp, synthetic construct
  source 1..80: mol_type = other DNA
ttgtattttttttagtagagaccaggtttcgccatgttggtcaggctggtctagaactcctgaccttaagtgatccgcct

SEQ ID NO: 99886 - DNA, 80 bp, synthetic construct
  source 1..80: mol_type = other DNA
gggaaagtcagacaagtgcttcagtagacaattatgagagcaggtggtggagttagaagagagtacagttgaggctgatg

SEQ ID NO: 99887 - DNA, 80 bp, synthetic construct
  source 1..80: mol_type = other DNA
gaggggccagtatatgccaaggcatcaatgcttgtgtgtacattttctatcactgggccaggattgatctataaatccct

SEQ ID NO: 99888 - DNA, 80 bp, synthetic construct
  source 1..80: mol_type = other DNA
atcttatgttaccgagaaaatggaaagatttcccctaaccccagaagtcaaaccagcttcctcaatttgagactgcacaa

SEQ ID NO: 99889 - DNA, 80 bp, synthetic construct; identical to SEQ ID NO: 18982
  source 1..80: mol_type = other DNA

SEQ ID NO: 99890 - DNA, 80 bp, synthetic construct
  source 1..80: mol_type = other DNA
tctaggtttaaacatatttagatatgcacaaatactcaccattgtgttccagttgcctccagcattcagtacaggaacat

SEQ ID NO: 99891 - DNA, 80 bp, synthetic construct
  source 1..80: mol_type = other DNA
tctttaaaagcactcccaggagtggccaggtgcagaaatagctgaatttgtgagcaatgataatgatagttaatataatt

SEQ ID NO: 99892 - DNA, 80 bp, synthetic construct; identical to SEQ ID NO: 18983
  source 1..80: mol_type = other DNA

SEQ ID NO: 99893 - DNA, 80 bp, synthetic construct
  source 1..80: mol_type = other DNA
gtggaaaaatcccttattttcctgctttttttctatatatagatacaggcagatacacagacagatagacacaccacatg

SEQ ID NO: 99894 - DNA, 80 bp, synthetic construct
  source 1..80: mol_type = other DNA
agcatttattcattttggataatgggcactgaattcataagtgtttgttttcctcttcatatttctgtattttaaaattt

SEQ ID NO: 99895 - DNA, 80 bp, synthetic construct
  source 1..80: mol_type = other DNA
ctctgctttaagtctttcctgtgatgacactagcagaatgtgtatcattttctctgcatttgctgcaggatcagttctct

SEQ ID NO: 99896 - DNA, 80 bp, synthetic construct; identical to SEQ ID NO: 18984
  source 1..80: mol_type = other DNA

SEQ ID NO: 99897 - DNA, 80 bp, synthetic construct
  source 1..80: mol_type = other DNA
ttcttactatagactggaaatggtcatatttgacttagctgtccatatggctgttctggagatgagacagctaatgaagt

SEQ ID NO: 99898 - DNA, 80 bp, synthetic construct
  source 1..80: mol_type = other DNA
cagtagtctcgaaattagtcacagaggccaagctagtgaagacccagcagccctattgttatcaagaaagagcactatcc

SEQ ID NO: 99899 - DNA, 80 bp, synthetic construct
  source 1..80: mol_type = other DNA
cagtcccagctcttctctgtctcggtgtgtgacttaggcggtttcacagaggacgccaacttcattggcttttgcggttt

SEQ ID NO: 99900 - DNA, 80 bp, synthetic construct; identical to SEQ ID NO: 18985
  source 1..80: mol_type = other DNA

SEQ ID NO: 99901 - DNA, 80 bp, synthetic construct
  source 1..80: mol_type = other DNA
gctttaagtctctcctgtgttgacactagcagaatgtgtcataaagacatggaaagatcataaattctcaactctgctct

SEQ ID NO: 99902 - DNA, 80 bp, synthetic construct
  source 1..80: mol_type = other DNA
cactggaagtgaatttaaattcctgaactggttatcttggaagatattgtgcttattgcagatgtggccggtgcatgagt

SEQ ID NO: 99903 - DNA, 80 bp, synthetic construct
  source 1..80: mol_type = other DNA
tccttgttattccacagccctttaagtcctggttcaccaaccagatgttaagactctcttggatccctcaaatcccatcc

SEQ ID NO: 99904 - DNA, 80 bp, synthetic construct
  source 1..80: mol_type = other DNA
gtcaatgtgggccacagacaggaaccgtctttaaaagatggttaaatgcccgtggtttacgtaggttggctttctttaag

SEQ ID NO: 99905 - DNA, 80 bp, synthetic construct; identical to SEQ ID NO: 18986
  source 1..80: mol_type = other DNA

SEQ ID NO: 99906 - DNA, 80 bp, synthetic construct
  source 1..80: mol_type = other DNA
ggatcaattcataccagcaaggtccagtcagcccctacacctaccaccgcctctctagtggaagccacttttgcatctaa

SEQ ID NO: 99907 - DNA, 80 bp, synthetic construct
  source 1..80: mol_type = other DNA
gctctaagggacaatctgtttcctggtcttttctagtttctaagaggcttcctgcatttctttggctcatggccccttcc

SEQ ID NO: 99908 - DNA, 80 bp, synthetic construct
  source 1..80: mol_type = other DNA
attgggcataccaaattaaattcagaaattcagataatcaagatctttaattcaatcatgtctgcaaagtcccctttacc

SEQ ID NO: 99909 - DNA, 80 bp, synthetic construct; identical to SEQ ID NO: 18987
  source 1..80: mol_type = other DNA

SEQ ID NO: 99910 - DNA, 80 bp, synthetic construct
  source 1..80: mol_type = other DNA
aattactttgtgcccataaagtgggaggcagtgtgctgaggaaatacaagattctccaagacacactcctttctcttgtg

SEQ ID NO: 99911 - DNA, 80 bp, synthetic construct
  source 1..80: mol_type = other DNA
ttggttcagaaatatgatcactactatatgcacctcaatttcaggttattaactattgcaggctaagaattttagggctt

SEQ ID NO: 99912 - DNA, 80 bp, synthetic construct; identical to SEQ ID NO: 18988
  source 1..80: mol_type = other DNA

SEQ ID NO: 99913 - DNA, 80 bp, synthetic construct
  source 1..80: mol_type = other DNA
caattttagaaaatagagctgacttctctgggaaaaacaaaaccaaccttgtcttactctggtcatggaaaccaacttgg

SEQ ID NO: 99914 - DNA, 80 bp, synthetic construct
  source 1..80: mol_type = other DNA
acttaatactacacaagtcaaaatctatcatcagactcttgaccatccattctcctcttccttccgtattcttgcctaca

SEQ ID NO: 99915 - DNA, 80 bp, synthetic construct
  source 1..80: mol_type = other DNA
agcccggctccccaaaggagaacagggctgtaactacctttaactttcagtgccctcttcccccatattttaaaatgcag

SEQ ID NO: 99916 - DNA, 80 bp, synthetic construct
  source 1..80: mol_type = other DNA
ttatctggctctcaaatgtgctttgtacttacatttaaatgtgggtgtgcctgatgttctgggaactcccttccaacaag

SEQ ID NO: 99917 - DNA, 80 bp, synthetic construct; identical to SEQ ID NO: 18989
  source 1..80: mol_type = other DNA

SEQ ID NO: 99918 - DNA, 80 bp, synthetic construct
  source 1..80: mol_type = other DNA
ctttccagtttccagaccatgcacactgatttttggtccagaaaccactataaccaaccaatataggtcacatgaaagac

SEQ ID NO: 99919 - DNA, 80 bp, synthetic construct
  source 1..80: mol_type = other DNA
ggtcttcctcaggtttcctagcataaaactccaaaagtctttggaatcggataaatatctttttgtatgctaataagctg

SEQ ID NO: 99920 - DNA, 80 bp, synthetic construct
  source 1..80: mol_type = other DNA
tcaaacatgcctgtgcaatgaaacctccgtaaaaacccagaaaggactgggacatgtggaggttcctggagaggggggtg

SEQ ID NO: 99921 - DNA, 80 bp, synthetic construct
  source 1..80: mol_type = other DNA
ctaattctgatttacagccagttggtcagaagcatgagtaaaacaacctggggcttgtgattgacatccaaagtgggggg

SEQ ID NO: 99922 - DNA, 80 bp, synthetic construct; identical to SEQ ID NO: 18990
  source 1..80: mol_type = other DNA

SEQ ID NO: 99923 - DNA, 80 bp, synthetic construct
  source 1..80: mol_type = other DNA
tttggcaaattcaagataatgtttaccattggcaatcacggggaagggtgaggtggggggagcacgtaaccaagggagat

SEQ ID NO: 99924 - DNA, 80 bp, synthetic construct
  source 1..80: mol_type = other DNA
tattatgttggtgtatcataatttcctcagttcaaatcccatctcgctattgttggatatttgtaattttcaactttgga

SEQ ID NO: 99925 - DNA, 80 bp, synthetic construct; identical to SEQ ID NO: 18991
  source 1..80: mol_type = other DNA

SEQ ID NO: 99926 - DNA, 80 bp, synthetic construct
  source 1..80: mol_type = other DNA
gaaggtcttgtttatgtgggaggggggaccacagataacaaagaacagccccttgcccccctcattgaaaaccagctgtg

SEQ ID NO: 99927 - DNA, 80 bp, synthetic construct
  source 1..80: mol_type = other DNA
tgtcaccaacaacactgcagccgccacagtcctgaaccaagtcctctccaaagtggccatgtcccagcctctcttcaatc

SEQ ID NO: 99928 - DNA, 80 bp, synthetic construct
  source 1..80: mol_type = other DNA
gccacccagtgccatggtgatgcatcctttcactggggtaatgcctcagacccctggccagccagcagtcatcttgggca

SEQ ID NO: 99929 - DNA, 80 bp, synthetic construct; identical to SEQ ID NO: 18992
  source 1..80: mol_type = other DNA

SEQ ID NO: 99930 - DNA, 80 bp, synthetic construct
  source 1..80: mol_type = other DNA
gtacgaccccgaggaaccaacctcagacaggacacctccttccttcgggggtcggcttaacaacagcaaacagggtttta

SEQ ID NO: 99931 - DNA, 80 bp, synthetic construct
  source 1..80: mol_type = other DNA
ctgttgcattggggtaacagaattttgccatcagtattcttgactaaaatcacaggtattaggacccataggaatttcag

SEQ ID NO: 99932 - DNA, 80 bp, synthetic construct; identical to SEQ ID NO: 18993
  source 1..80: mol_type = other DNA

SEQ ID NO: 99933 - DNA, 80 bp, synthetic construct
  source 1..80: mol_type = other DNA
atgctttgagttcctgcaaacagaggtatatgatagtataatgtccccccaaaaaatgtattgcagatgcagtgaaatat

SEQ ID NO: 99934 - DNA, 80 bp, synthetic construct
  source 1..80: mol_type = other DNA
acctccccagcttgaaagtggcagagtggagattcaaatgtggccctgaccctttcagagcctgcaccatttaaacactg

SEQ ID NO: 99935 - DNA, 80 bp, synthetic construct
  source 1..80: mol_type = other DNA
ggaggggactagctgacacggggaggtgctcaaggattttgtctctcatgaaccttttctaaggctttgtaagtcactgt

SEQ ID NO: 99936 - DNA, 80 bp, synthetic construct
  source 1..80: mol_type = other DNA
gagggaatccaatttgtgagtctgggctcctgttcaagatgggcatgagatgtatggatgaggagctgatggagcaaagg

SEQ ID NO: 99937 - DNA, 80 bp, synthetic construct; identical to SEQ ID NO: 18994
  source 1..80: mol_type = other DNA

SEQ ID NO: 99938 - DNA, 80 bp, synthetic construct
  source 1..80: mol_type = other DNA
acaggggccagggagatgataaacaaaatgaacaagaaaattacagcatccctggtggtaaatgctaggcagaaaacacc

SEQ ID NO: 99939 - DNA, 80 bp, synthetic construct
  source 1..80: mol_type = other DNA
tgtgcaaatgttaccactctctagttccggaatattttcattactccaaaaggaaacctcatactcattaagtaatcact

SEQ ID NO: 99940 - DNA, 80 bp, synthetic construct
  source 1..80: mol_type = other DNA
catccatgttgtaatatgtacaacctttctatgactgaacaatattctattgcatgtatatatcacattcttgtttatcc

SEQ ID NO: 99941 - DNA, 80 bp, synthetic construct; identical to SEQ ID NO: 18995
  source 1..80: mol_type = other DNA

SEQ ID NO: 99942 - DNA, 80 bp, synthetic construct
  source 1..80: mol_type = other DNA
tcacggatgtagaaagcaaacagatcccaagacactaaaatgcattgggcctgctgtctgggcccatcagtattctctga

SEQ ID NO: 99943 - DNA, 80 bp, synthetic construct
  source 1..80: mol_type = other DNA
gtaattcatcatttagattatgcctcaaatcttggaacatcatacgtgcccattccagcaaggtcattcactcagtcaag

SEQ ID NO: 99944 - DNA, 80 bp, synthetic construct
  source 1..80: mol_type = other DNA
taactcctggtcccaagtgatcttcctgcctcggtcaaccaaagtgctggaattacaggtggccaaagtgctaggattac

SEQ ID NO: 99945 - DNA, 80 bp, synthetic construct; identical to SEQ ID NO: 18996
  source 1..80: mol_type = other DNA

SEQ ID NO: 99946 - DNA, 80 bp, synthetic construct
  source 1..80: mol_type = other DNA
cagtgagccgagatcgcaccactgcactccagcgcaggtgacagaccgggactctgtctcaaaacaaacaaacaaaaaaa

SEQ ID NO: 99947 - DNA, 80 bp, synthetic construct
  source 1..80: mol_type = other DNA
cttaagaagcagacataaatccttaaaattcaaggcattcctggactttctagcattcagcgctggcttagaaaaaaaaa

SEQ ID NO: 99948 - DNA, 80 bp, synthetic construct; identical to SEQ ID NO: 18997
  source 1..80: mol_type = other DNA

SEQ ID NO: 99949 - DNA, 80 bp, synthetic construct
  source 1..80: mol_type = other DNA
aggaaaactgactgtaaaacaaatgcatttgtctgaaccctgctggagggcacctgtttgtgtgccttagcctgtgcctg

SEQ ID NO: 99950 - DNA, 80 bp, synthetic construct
  source 1..80: mol_type = other DNA
tgagtaagcggaaaagcgaggtggttcatgatgagacgtgaggcctgcctgagcccaggcttctgtttatttgtgtgtgt

SEQ ID NO: 99951 - DNA, 80 bp, synthetic construct
  source 1..80: mol_type = other DNA
caggtcaatggcagcttcgggtcagtcccaggagactgcaatggctagattcagtgaggcctgtcctctgaggtcagatt

SEQ ID NO: 99952 - DNA, 80 bp, synthetic construct
  source 1..80: mol_type = other DNA
ttgtaaattgactccaacctggggtctgggtacggggaagagatggcattaactgagcccctccataaaggggggtggat

SEQ ID NO: 99953 - DNA, 80 bp, synthetic construct; identical to SEQ ID NO: 18998
  source 1..80: mol_type = other DNA

SEQ ID NO: 99954 - DNA, 80 bp, synthetic construct
  source 1..80: mol_type = other DNA
cagatgagataatatcagggacaatgatttgggaaccgtcaagtacatatgaagtaaccatggctgttcttgagtaacga

SEQ ID NO: 99955 - DNA, 80 bp, synthetic construct
  source 1..80: mol_type = other DNA
tagagatgttttgaggttcccatggatgtacttttaaattacgtaccagtgggcaagcacaagctatctgatgatttgtg

SEQ ID NO: 99956 - DNA, 80 bp, synthetic construct; identical to SEQ ID NO: 18999
  source 1..80: mol_type = other DNA

SEQ ID NO: 99957 - DNA, 80 bp, synthetic construct
  source 1..80: mol_type = other DNA
ctaggcagcctagctctggaagcctcatttgtaaccactaagccctgcagcctctctgcgaggatctgaggggtctcttc

SEQ ID NO: 99958 - DNA, 80 bp, synthetic construct
  source 1..80: mol_type = other DNA
tcagatgtttggaggccttttctacagacccagtggaaggggagagtcagcatttgtctggttttatcattataacctct

SEQ ID NO: 99959 - DNA, 80 bp, synthetic construct
  source 1..80: mol_type = other DNA
aatgcaggtgtatctgtcttgaggaaaacctgaaatgcgagaacattgacatttgaagacaagctgagaaatggagaaat

SEQ ID NO: 99960 - DNA, 80 bp, synthetic construct; identical to SEQ ID NO: 19000
  source 1..80: mol_type = other DNA

SEQ ID NO: 99961 - DNA, 80 bp, synthetic construct
  source 1..80: mol_type = other DNA
acttttttttgagtaaaaccaggaacagccaggatcctgccactgtctgatcatatcactaatgtctgtggagcgaagag

SEQ ID NO: 99962 - DNA, 80 bp, synthetic construct
  source 1..80: mol_type = other DNA
tggctgcatttaaacttctcccacctgtgttggagtctgagtgtttcgttgccttgtttgtttatttatttttgtttagg

SEQ ID NO: 99963 - DNA, 80 bp, synthetic construct
  source 1..80: mol_type = other DNA
tcagctaatttttggagagacagggtgtcgccatgttgcccaggctcgcgtgtttatatttgacagagacgggacactgc

SEQ ID NO: 99964 - DNA, 80 bp, synthetic construct; identical to SEQ ID NO: 19001
  source 1..80: mol_type = other DNA

SEQ ID NO: 99965 - DNA, 80 bp, synthetic construct
  source 1..80: mol_type = other DNA
ttgtataaataaggaaatggaggctcaggaaaatagaaatgtctgtggaaggccagaggtgtaagtcacaggctgcaact

SEQ ID NO: 99966 - DNA, 80 bp, synthetic construct
  source 1..80: mol_type = other DNA
gagagcaaagaggaggagacaggagacctgggtaggttttgttttggaatttgttctttttacaaatcttactttttctt

SEQ ID NO: 99967 - DNA, 80 bp, synthetic construct
  source 1..80: mol_type = other DNA
tagctagtgtatgtgtacatgtttcattagtaaaagtaattttttgggcacaaaccagataacgtcatacaatctgttac

SEQ ID NO: 99968 - DNA, 80 bp, synthetic construct; identical to SEQ ID NO: 19002
  source 1..80: mol_type = other DNA

SEQ ID NO: 99969 - DNA, 80 bp, synthetic construct
  source 1..80: mol_type = other DNA
gagctaatatgctctataaaatatttgaaagcatcaataaaggcaactgtgtctaccctccaagttaagccaagatccat

SEQ ID NO: 99970 - DNA, 80 bp, synthetic construct
  source 1..80: mol_type = other DNA
ctgtgccagataacattagatcacatctgagacagatcaggctggagcacagaaatcgtttactgaagatggaatctaca

SEQ ID NO: 99971 - DNA, 80 bp, synthetic construct
  source 1..80: mol_type = other DNA
caccaaggggcaatgaaaggtcttagaatcttcatatacaagtctgtttgcttcttttgcatttctccccagctacaaaa

SEQ ID NO: 99972 - DNA, 80 bp, synthetic construct; identical to SEQ ID NO: 19003
  source 1..80: mol_type = other DNA

SEQ ID NO: 99973 - DNA, 80 bp, synthetic construct
  source 1..80: mol_type = other DNA
aaacttacagaaaagttaccaaaaaggtataaggaactcccatataacttttgtccagattaatttcactactcctttat

SEQ ID NO: 99974 - DNA, 80 bp, synthetic construct
  source 1..80: mol_type = other DNA
attgtacctcttcacttctttttcagcatgaatttcctaagaatacagactttctcttacataatcacaacaatattttt

SEQ ID NO: 99975 - DNA, 80 bp, synthetic construct
  source 1..80: mol_type = other DNA
attacccctgttttacagacaagccaacttgggcttggagaaattcagtaactggcccacagttagtcacagagggagca

SEQ ID NO: 99976 - DNA, 80 bp, synthetic construct
  source 1..80: mol_type = other DNA
agcagaattattcatggagctgcaggattcataaacaaggtgctcactgcttggagcttatctttagtcctataaagatg

SEQ ID NO: 99977 - DNA, 80 bp, synthetic construct; identical to SEQ ID NO: 19004
  source 1..80: mol_type = other DNA

SEQ ID NO: 99978 - DNA, 80 bp, synthetic construct
  source 1..80: mol_type = other DNA
ctctgtcttctaggaggatgctctttccactggaaagtcccaagctttttatagctcaagtcgcctttcattatttactt

SEQ ID NO: 99979 - DNA, 80 bp, synthetic construct
  source 1..80: mol_type = other DNA
taaaagacaaattgtaaatgaattaaatttaacagagtttaatttaattgggcagccctcagaaccggaagaggttcaga

SEQ ID NO: 99980 - DNA, 80 bp, synthetic construct; identical to SEQ ID NO: 19005
  source 1..80: mol_type = other DNA

SEQ ID NO: 99981 - DNA, 80 bp, synthetic construct
  source 1..80: mol_type = other DNA
aatgtttagccccctgcttcctgtggtattattacctttgaagacctttaagggcttataagagagcccgggttgggaat

SEQ ID NO: 99982 - DNA, 80 bp, synthetic construct
  source 1..80: mol_type = other DNA
tctcccacagggcatagggcaaataatagccatgtttatgtaaagtgtaatgagaatagaatagagtgaaaacagctact

SEQ ID NO: 99983 - DNA, 80 bp, synthetic construct
  source 1..80: mol_type = other DNA
aactggataggatttaccacatgccctgaagccagacaccacacaaaagcaaactattaacctagagattctcaagattt

SEQ ID NO: 99984 - DNA, 80 bp, synthetic construct; identical to SEQ ID NO: 19006
  source 1..80: mol_type = other DNA

SEQ ID NO: 99985 - DNA, 80 bp, synthetic construct
  source 1..80: mol_type = other DNA
cagaagatgtctttttaaaatttgactggaaattttaattgagacccattcacttagtgcctttggtaacgacatcttca

SEQ ID NO: 99986 - DNA, 80 bp, synthetic construct
  source 1..80: mol_type = other DNA
actaggcaactggataggccaggagcaggataggcctggaactgccttgggtgtctgctccattgtccaagcacacatta

SEQ ID NO: 99987 - DNA, 80 bp, synthetic construct
  source 1..80: mol_type = other DNA
cacactaatgggaggcaaagattctgcttcttaatagcactcctcctttcgtttctgcagaagggttcagtcctcactag

SEQ ID NO: 99988 - DNA, 80 bp, synthetic construct
  source 1..80: mol_type = other DNA
ttcaacaattcagggctgaaccataaaaggaaattcttattgactgtaattgttttcagctcaaatgagacaaatgaggg

SEQ ID NO: 99989 - DNA, 80 bp, synthetic construct; identical to SEQ ID NO: 19007
  source 1..80: mol_type = other DNA

SEQ ID NO: 99990 - DNA, 80 bp, synthetic construct
  source 1..80: mol_type = other DNA
cccaaggtttgaccagaatagctcctcttttatttgttgaatacattgggataaaccagttttgtttgaagaaaggactc

SEQ ID NO: 99991 - DNA, 80 bp, synthetic construct
  source 1..80: mol_type = other DNA
gtctcatcttactgccttcccattctgcttctctgaagataaccagcattgacaggttgatatatatgctgcacatcttt

SEQ ID NO: 99992 - DNA, 80 bp, synthetic construct; identical to SEQ ID NO: 19008
  source 1..80: mol_type = other DNA

SEQ ID NO: 99993 - DNA, 80 bp, synthetic construct
  source 1..80: mol_type = other DNA
gtcgggaggatggcttgagcccaggagttcaaggctgcagtgagctatgattgtgccactgcattctagtctgagtggta

SEQ ID NO: 99994 - DNA, 80 bp, synthetic construct
  source 1..80: mol_type = other DNA
attgttggacattcaggctgttcccccaattttttgccacctaataaattactgtaataaatgttcttgcacatgagcca

SEQ ID NO: 99995 - DNA, 80 bp, synthetic construct
  source 1..80: mol_type = other DNA
tttcctcatatcctccacagccctcgttgttactgcttataaaaaacattattatgaaatggtggtgcatgcctgtggtc

SEQ ID NO: 99996 - DNA, 80 bp, synthetic construct; identical to SEQ ID NO: 19009
  source 1..80: mol_type = other DNA

SEQ ID NO: 99997 - DNA, 80 bp, synthetic construct
  source 1..80: mol_type = other DNA
tgggtactttcactccagtgtatatgccacagaccacacattagtgaaagggaacgatataatttttgaaagaagccatt

SEQ ID NO: 99998 - DNA, 80 bp, synthetic construct
  source 1..80: mol_type = other DNA
tgaggtgctcattcacatagaaagggtaattggcacccaaaataaaaatctatggacttgaatctcttcactgtgttgtc

SEQ ID NO: 99999 - DNA, 80 bp, synthetic construct
  source 1..80: mol_type = other DNA
tggatggatgcttactaagtctaaggaactaagaatccttaacctgtaggagttgactgagccctttgggatggagtacc

SEQ ID NO: 100000 - DNA, 80 bp, synthetic construct; identical to SEQ ID NO: 19010
  source 1..80: mol_type = other DNA

SEQ ID NO: 100001 - DNA, 80 bp, synthetic construct
  source 1..80: mol_type = other DNA
accctaaagaatcttgacttcttagtcgcccacgctaatgccatagactatgacagcatggagaaaagctgtgcatctga

SEQ ID NO: 100002 - DNA, 80 bp, synthetic construct
  source 1..80: mol_type = other DNA
gtacaaaccaaacaaatccaaaaaacaatagcagcaacaaattcaccacaccaactactggggtaaactgatgcacagtc

SEQ ID NO: 100003 - DNA, 80 bp, synthetic construct
  source 1..80: mol_type = other DNA
agcctaggggtttgtgagttcctgaatttttttataaggaaagtagaactcaaataaccaaagcttgtgtctcttgctgt

SEQ ID NO: 100004 - DNA, 80 bp, synthetic construct; identical to SEQ ID NO: 19011
  source 1..80: mol_type = other DNA

SEQ ID NO: 100005 - DNA, 80 bp, synthetic construct
  source 1..80: mol_type = other DNA
acatgtgtacacccatataattaacacccaggtaaagatatagagcatttccagaatgtcaggtttccttatgcttcttc

SEQ ID NO: 100006 - DNA, 80 bp, synthetic construct
  source 1..80: mol_type = other DNA
ttctttcttaggcctttttagagatggcttacacagaagctgcacaggccatggtccagtattatcaagaaaaatctgct

SEQ ID NO: 100007 - DNA, 80 bp, synthetic construct
  source 1..80: mol_type = other DNA
ataggaaaagattcagaaattacacactgcctttgaggatctcgaggcaaaccattgcagcatggcaagaaaagtgctct

SEQ ID NO: 100008 - DNA, 80 bp, synthetic construct; identical to SEQ ID NO: 19012
  source 1..80: mol_type = other DNA

SEQ ID NO: 100009 - DNA, 80 bp, synthetic construct
  source 1..80: mol_type = other DNA
atggtttaaaaagtaataatgggtgagatctcacaaatcccgtaaaaccaccaccaaagtcaagaaatagaatatggaca

SEQ ID NO: 100010 - DNA, 80 bp, synthetic construct
  source 1..80: mol_type = other DNA
tataaatggaattatgctgtgttcttacagatcttgcttctttcattcaacatgatgccatccatgttgttgggcatgtc

SEQ ID NO: 100011 - DNA, 80 bp, synthetic construct
  source 1..80: mol_type = other DNA
catacataactaagattgagatagctgcatcataaggcatgcttacctcaactttcctagatgatagcaagctctttcca

SEQ ID NO: 100012 - DNA, 80 bp, synthetic construct
  source 1..80: mol_type = other DNA
caggggttcaagagcagcctggccaacatggtgaaaccccgtctctactaaaaatacaaaaattagccaggcgtggtggc

SEQ ID NO: 100013 - DNA, 80 bp, synthetic construct; identical to SEQ ID NO: 19013
  source 1..80: mol_type = other DNA

SEQ ID NO: 100014 - DNA, 80 bp, synthetic construct
  source 1..80: mol_type = other DNA
gctactttttttttttttttttttgtattttaatagagacagggtttcgccatattggccaggatggtctcaatatcctg

SEQ ID NO: 100015 - DNA, 80 bp, synthetic construct
  source 1..80: mol_type = other DNA
ctctgatgggctgtttcttttcaggtcatctgcccatgcttttcttttgcattgtgtcttcttattggtttgcaggagtt

SEQ ID NO: 100016 - DNA, 80 bp, synthetic construct
  source 1..80: mol_type = other DNA
aagacccacaggccttaatccaccttcaaggttgaagttagaagacaaaggcttagtggatgtttctggctaggactggc

SEQ ID NO: 100017 - DNA, 80 bp, synthetic construct; identical to SEQ ID NO: 19014
  source 1..80: mol_type = other DNA

SEQ ID NO: 100018 - DNA, 80 bp, synthetic construct
  source 1..80: mol_type = other DNA
aagcatagcaataccttcctgagggagatagtttggggtggtgcaaaaaacatgggttaaagaggtcagatggtcgagtt

SEQ ID NO: 100019 - DNA, 80 bp, synthetic construct
  source 1..80: mol_type = other DNA
gatggtgatgtcagcctgggctctaccgcttcctgctttagtgagcttagaaaagttgcttaacctctgtgaacctcagt

SEQ ID NO: 100020 - DNA, 80 bp, synthetic construct; identical to SEQ ID NO: 19015
  source 1..80: mol_type = other DNA

SEQ ID NO: 100021 - DNA, 80 bp, synthetic construct
  source 1..80: mol_type = other DNA
gtctatgtgaaaaaaacctgagaaatcaggtaatttgcttatagtcacccagccaagaagccgcagagatagtattctaa

SEQ ID NO: 100022 - DNA, 80 bp, synthetic construct
  source 1..80: mol_type = other DNA
agggcgcagaacacattattttctgatctttagcagggcttttctgctccccaagctgccatattccctcttaaggcatt

SEQ ID NO: 100023 - DNA, 80 bp, synthetic construct
  source 1..80: mol_type = other DNA
aaaaaaaaaaaaaaaaaaaaaaaagaatttatggatgcatgtaaatgaaacgtccaggagtagatctggctgcaggtgcg

SEQ ID NO: 100024 - DNA, 80 bp, synthetic construct; identical to SEQ ID NO: 19016
  source 1..80: mol_type = other DNA

SEQ ID NO: 100025 - DNA, 80 bp, synthetic construct
  source 1..80: mol_type = other DNA
gggaggaacagctgctatcaggaggagggagagtggctaccgggaaggtagagggcaaacactgtatccatgtgtgtctc

SEQ ID NO: 100026 - DNA, 80 bp, synthetic construct
  source 1..80: mol_type = other DNA
tttcttcatgcacatatcttatctccccatatacttcctgtggcaagggagttcctcagcttatttgaggcagaaccttt

SEQ ID NO: 100027 - DNA, 80 bp, synthetic construct
  source 1..80: mol_type = other DNA
aatctctctgatgcagaagtgaacttggaataatttaaaccagtgtctcccagtcacttcatcagagggtcatcagggga

SEQ ID NO: 100028 - DNA, 80 bp, synthetic construct; identical to SEQ ID NO: 19017
  source 1..80: mol_type = other DNA

SEQ ID NO: 100029 - DNA, 80 bp, synthetic construct
  source 1..80: mol_type = other DNA
tggcaaaaggcagtgtgactgaggggtgtgaaaaagggaagagattcctaaacaaggccttgaagaaggggagaattagc

SEQ ID NO: 100030 - DNA, 80 bp, synthetic construct
  source 1..80: mol_type = other DNA
agtgtgtaaaacaggtgtggagttgtcagagggcatgaaactttccagcagctcccttcatgttggccaagcactctgtg

SEQ ID NO: 100031 - DNA, 80 bp, synthetic construct
  source 1..80: mol_type = other DNA
cctgggttgagattcctagtggtggtgcctccctcttaatatgccagcacttttctaggactgcatggggcttggaatct

SEQ ID NO: 100032 - DNA, 80 bp, synthetic construct; identical to SEQ ID NO: 19018
  source 1..80: mol_type = other DNA

SEQ ID NO: 100033 - DNA, 80 bp, synthetic construct
  source 1..80: mol_type = other DNA
gagaatcgcttgaacccagaaggcagaggttgcagtgagccaaggtcgcaccactgcactccagcctgggacacagtgtg

SEQ ID NO: 100034 - DNA, 80 bp, synthetic construct
  source 1..80: mol_type = other DNA
catgtctttcatggccagagcaggagttagagtgggagcagggaggtgctacacacttttaaacagccagatctcgtgag

SEQ ID NO: 100035 - DNA, 80 bp, synthetic construct
  source 1..80: mol_type = other DNA
caagattagtcatcattgttggctgaagatgggtaatggattcttcggggttcagtaaaccattctctctacttttgtgt

SEQ ID NO: 100036 - DNA, 80 bp, synthetic construct
  source 1..80: mol_type = other DNA
ggagagaattttcttagggctttccgaagtcaattctcttatttgaaaatctttggctacttctgtccccttttcagatg

SEQ ID NO: 100037 - DNA, 80 bp, synthetic construct; identical to SEQ ID NO: 19019
  source 1..80: mol_type = other DNA

SEQ ID NO: 100038 - DNA, 80 bp, synthetic construct
  source 1..80: mol_type = other DNA
ggggcagaggaatgtttaagccaaggagaggctcttctaagctcactctaactgcacctctttgacccctgggaaactgc

SEQ ID NO: 100039 - DNA, 80 bp, synthetic construct
  source 1..80: mol_type = other DNA
cctgacctgctcctgcccccatgcacctgagccctaccctcatagtcactctgccatgggtaatctgcaaaacctcagcc

SEQ ID NO: 100040 - DNA, 80 bp, synthetic construct; identical to SEQ ID NO: 19020
  source 1..80: mol_type = other DNA

SEQ ID NO: 100041 - DNA, 80 bp, synthetic construct
  source 1..80: mol_type = other DNA
ggaccagccatcccagctggctttcccttgatgatacagtagccggagttcattgtgtggcccaaggtgggcaggcagga

SEQ ID NO: 100042 - DNA, 80 bp, synthetic construct
  source 1..80: mol_type = other DNA
gacaccaacaggcttggcttctatccttgtttggccttggtctgaacaaggtccagtttaagtggctgaggtgctggagg

SEQ ID NO: 100043 - DNA, 80 bp, synthetic construct
  source 1..80: mol_type = other DNA
ttttcttgaatgggggattggctgacttctaaaacctctgacttattcacaagcacagttgaaggagtcactgccttctc

SEQ ID NO: 100044 - DNA, 80 bp, synthetic construct
  source 1..80: mol_type = other DNA
ccctctatctcaacaataacagataatcagccacgccactcagagcactcataccatgctaggccagctagatcacatct

SEQ ID NO: 100045 - DNA, 80 bp, synthetic construct; identical to SEQ ID NO: 19021
  source 1..80: mol_type = other DNA

SEQ ID NO: 100046 - DNA, 80 bp, synthetic construct
  source 1..80: mol_type = other DNA
atagaaaaaatcaaggaaaaaaagtcgattaaatttaataaaactcattatcaaaagtttacatagactgagggttttta

SEQ ID NO: 100047 - DNA, 80 bp, synthetic construct
  source 1..80: mol_type = other DNA
tcatttattatttatttattttggttatcatgtgtccattctgggtttaggaaagggctttggtcgggaatggggggctg

SEQ ID NO: 100048 - DNA, 80 bp, synthetic construct
  source 1..80: mol_type = other DNA
gaagggggcacagagcatggaaagcatggaaaggaacttggagttaaaatacctggtgtcaggtcctgattcttttcact

SEQ ID NO: 100049 - DNA, 80 bp, synthetic construct; identical to SEQ ID NO: 19022
  source 1..80: mol_type = other DNA

SEQ ID NO: 100050 - DNA, 80 bp, synthetic construct
  source 1..80: mol_type = other DNA
gcattatactcacactcatccgttggattacaccttttgtcttccccacacaaggtattttttcccttttggtggaccag

SEQ ID NO: 100051 - DNA, 80 bp, synthetic construct
  source 1..80: mol_type = other DNA
cagacaggtgaggccccaagccccaagtctccaggcaggttctgggcagtgggaacagactcctgtttctcattcttagg

SEQ ID NO: 100052 - DNA, 80 bp, synthetic construct; identical to SEQ ID NO: 19023
  source 1..80: mol_type = other DNA

SEQ ID NO: 100053 - DNA, 80 bp, synthetic construct
  source 1..80: mol_type = other DNA
aacattgaatatattcagttttccaacccatttcttccaaccgaagtttgtgatcaggccaagctggggctataagttga

SEQ ID NO: 100054 - DNA, 80 bp, synthetic construct
  source 1..80: mol_type = other DNA
gtgtcccctggtcagtgagggctacgtggttttcctgtgtttgggaacttaatgaaaaaatgcccatccttttagaatat

SEQ ID NO: 100055 - DNA, 80 bp, synthetic construct
  source 1..80: mol_type = other DNA
tttaaagacgtgtaaagccacatcttgccacctgcaattctgcggcagagtggaggggggttaggaagtcttgttctgaa

SEQ ID NO: 100056 - DNA, 80 bp, synthetic construct; identical to SEQ ID NO: 19024
  source 1..80: mol_type = other DNA

SEQ ID NO: 100057 - DNA, 80 bp, synthetic construct
  source 1..80: mol_type = other DNA
agaaggcaagctggaaccgagccaaatcagcccagttcttcttcctagttcccaggagcagaatgagtaaaggcacagcg

SEQ ID NO: 100058 - DNA, 80 bp, synthetic construct
  source 1..80: mol_type = other DNA
tgtgggtggggtgggatgggaggtgtgaagattctaaatcctgctccttggctccctcacagatatggcccagaaaggcc

SEQ ID NO: 100059 - DNA, 80 bp, synthetic construct
  source 1..80: mol_type = other DNA
gagcgagacccggctccctggagggacaacggagatgacaagagggacaggatggacccctgggcacatgatcgcaaaca

SEQ ID NO: 100060 - DNA, 80 bp, synthetic construct; identical to SEQ ID NO: 19025
  source 1..80: mol_type = other DNA

SEQ ID NO: 100061 - DNA, 80 bp, synthetic construct
  source 1..80: mol_type = other DNA
gcagagaatgaggtaatgatcaatttcttccccaggtaaggcgaggcaggccctgaaggagaataatcataataatataa

SEQ ID NO: 100062 - DNA, 80 bp, synthetic construct
  source 1..80: mol_type = other DNA
gaggcacagagaacttacgttatttgtccaagaacacacggtcaggaaatggcagacccagaattataccaaggagatct

SEQ ID NO: 100063 - DNA, 80 bp, synthetic construct; identical to SEQ ID NO: 19026
  source 1..80: mol_type = other DNA

SEQ ID NO: 100064 - DNA, 80 bp, synthetic construct
  source 1..80: mol_type = other DNA
gaaaccctgtctctactaaaaatacaaaaattagccaggcaaggtggtgcacccctgtagtcccagctactcaggaggct

SEQ ID NO: 100065 - DNA, 80 bp, synthetic construct
  source 1..80: mol_type = other DNA
ggtctgagggcttgcagcagtacttcagttcacacaggggcgtcacaaggagggttgtggttaccaggtttatattctaa

SEQ ID NO: 100066 - DNA, 80 bp, synthetic construct
  source 1..80: mol_type = other DNA
cattctgacctgggagttggtgacaatactaagtgcaaataaggaaaccaaatctctactccatgaacactgaagagtca

SEQ ID NO: 100067 - DNA, 80 bp, synthetic construct; identical to SEQ ID NO: 19027
  source 1..80: mol_type = other DNA

SEQ ID NO: 100068 - DNA, 80 bp, synthetic construct
  source 1..80: mol_type = other DNA
acctctgcctcctaggttcaagcaattctcctgcctcagcctccttagtatttgggattacaggagtgcgccaccacgcc

SEQ ID NO: 100069 - DNA, 80 bp, synthetic construct
  source 1..80: mol_type = other DNA
gccagggcaaaagtgaaaaagaaagactgttttgaagaacctggagataatcggcatggctgcatctttagggcatatta

SEQ ID NO: 100070 - DNA, 80 bp, synthetic construct
  source 1..80: mol_type = other DNA
aaaagagaatccaaagagcaggcaacatatacaggcaatcaggaatgctaaaatgaatttgctaataggtgtaaaagtgg

SEQ ID NO: 100071 - DNA, 80 bp, synthetic construct; identical to SEQ ID NO: 19028
  source 1..80: mol_type = other DNA

SEQ ID NO: 100072 - DNA, 80 bp, synthetic construct
  source 1..80: mol_type = other DNA
gatcccaaggacctggtgaaccagtggatattttaaaaagtgtatgtgcttggaggtgtccaagttgctggtgatggatg

SEQ ID NO: 100073 - DNA, 80 bp, synthetic construct
  source 1..80: mol_type = other DNA
tctactgttttaccaccctgctctcatcggtttgtataacattgctcatttaaggtgacactatgtgtcagccaaagagc

SEQ ID NO: 100074 - DNA, 80 bp, synthetic construct
  source 1..80: mol_type = other DNA
tgtgtgttggaatgactgcagaacagagagtattttgcactgtcctcaaactctgtatgatgaactcaagaaaagcccag

SEQ ID NO: 100075 - DNA, 80 bp, synthetic construct; identical to SEQ ID NO: 19029
  source 1..80: mol_type = other DNA

SEQ ID NO: 100076 - DNA, 80 bp, synthetic construct
  source 1..80: mol_type = other DNA
gcataccatctcaacaccccaacccactcttctccctccccgccactgcagaccatctcaacaccccaacctgctcccct

SEQ ID NO: 100077 - DNA, 80 bp, synthetic construct
  source 1..80: mol_type = other DNA
atttaccaccttcaaacctatcacttaatgtctttattttacttagtgtctattgtcacccccagctccaggtgtaaact

SEQ ID NO: 100078 - DNA, 80 bp, synthetic construct
  source 1..80: mol_type = other DNA
gaccctgctttcttctgcctcacttttcttgtttgtaaaatggatgtgatcacaaggctgttgtagtactgtaaagaggt

SEQ ID NO: 100079 - DNA, 80 bp, synthetic construct; identical to SEQ ID NO: 19030
  source 1..80: mol_type = other DNA

SEQ ID NO: 100080 - DNA, 80 bp, synthetic construct
  source 1..80: mol_type = other DNA
aggaacgcatgccacgctgtcaaatctcccttttcttagagcaagacaagtgtctagtataaaccaaaacatacctgtgg

SEQ ID NO: 100081 - DNA, 80 bp, synthetic construct
  source 1..80: mol_type = other DNA
ttcattcttttattgaccaatatttgtggagcacccggcattgggactatagttagtgacactgaaatgacccctgggct

SEQ ID NO: 100082 - DNA, 80 bp, synthetic construct
  source 1..80: mol_type = other DNA
ataaatctgagccttctcagggttaggctgtgcctattgagatttggaggcacggtgagtattgactgggtgaaaaggaa

SEQ ID NO: 100083 - DNA, 80 bp, synthetic construct; identical to SEQ ID NO: 19031
  source 1..80: mol_type = other DNA

SEQ ID NO: 100084 - DNA, 80 bp, synthetic construct
  source 1..80: mol_type = other DNA
atggtgaaaccctgtctctactaaaaatacaaaaaaaaaaaaaaaattagccaggtgtggtggcaggcacctgtaatccc

SEQ ID NO: 100085 - DNA, 80 bp, synthetic construct
  source 1..80: mol_type = other DNA
tcatttttgcattttggaatgatcattcttgattgccttgggaagaatagattttgggggaaggtacagagcagaagtgg

SEQ ID NO: 100086 - DNA, 80 bp, synthetic construct
  source 1..80: mol_type = other DNA
acccatctgttccacttaagctgctgctctctcctggaagtgatcccacagcaaagggaagctctgaaaggttgtttcct

SEQ ID NO: 100087 - DNA, 80 bp, synthetic construct
  source 1..80: mol_type = other DNA
ttcattttgacaagagagggccatggataggtgattcagggagataaaaataaagtcacctgttggtagaagctataata

SEQ ID NO: 100088 - DNA, 80 bp, synthetic construct; identical to SEQ ID NO: 19032
  source 1..80: mol_type = other DNA

SEQ ID NO: 100089 - DNA, 80 bp, synthetic construct
  source 1..80: mol_type = other DNA
ccaaagtttaagtcatgggagaatatcccccagaaacttctaatgtgggggttggcaaagttttctaggactagatagta

SEQ ID NO: 100090 - DNA, 80 bp, synthetic construct
  source 1..80: mol_type = other DNA
tttgttgacccttgtcttaaaggttgggtagaggccctaattctcaaaccaaacacctgctttcaattgttcagtttcac

SEQ ID NO: 100091 - DNA, 80 bp, synthetic construct
  source 1..80: mol_type = other DNA
tttttttcatagccaagatgactctgttggggaaatgtcaccgtgatggttaaccctggggtcttggccggcccaagtca

SEQ ID NO: 100092 - DNA, 80 bp, synthetic construct; identical to SEQ ID NO: 19033
  source 1..80: mol_type = other DNA

SEQ ID NO: 100093 - DNA, 80 bp, synthetic construct
  source 1..80: mol_type = other DNA
aagcagagttctctgatccggaaaacacaaggacaaagaaggtaaagtttgtttcagattctgcacttctgccatgaggg

SEQ ID NO: 100094 - DNA, 80 bp, synthetic construct
  source 1..80: mol_type = other DNA
ttacccacatgtctgggctctgctcactctccagcaatttggctgtgttcctacgagaaaacatgtgcccaaaaaaagac

SEQ ID NO: 100095 - DNA, 80 bp, synthetic construct; identical to SEQ ID NO: 19034
  source 1..80: mol_type = other DNA

SEQ ID NO: 100096 - DNA, 80 bp, synthetic construct
  source 1..80: mol_type = other DNA
tgaggggctttgctgcagttacatttagtgatgacccagatgcaagaaagatgctccagtaagtatttagagtttataac

SEQ ID NO: 100097 - DNA, 80 bp, synthetic construct
  source 1..80: mol_type = other DNA
ggttcacagtaattgtaccaggtagaggtaagaatgctcagattcttcctgatttgagtggtccttatggccaagtcttg

SEQ ID NO: 100098 - DNA, 80 bp, synthetic construct
  source 1..80: mol_type = other DNA
ttttatcgtggaaccagacatcccagagctggaagaaattgtgcccattgaccagaaagacaaaatttgcccagaaacat

SEQ ID NO: 100099 - DNA, 80 bp, synthetic construct; identical to SEQ ID NO: 19035
  source 1..80: mol_type = other DNA

SEQ ID NO: 100100 - DNA, 80 bp, synthetic construct
  source 1..80: mol_type = other DNA
gaggagagggcccggcagccaagcccatttgtggatgattgcaagaccagggggacccccgaagatggggcttgtgaagg

SEQ ID NO: 100101 - DNA, 80 bp, synthetic construct
  source 1..80: mol_type = other DNA
ggactcctgctcacctgataaagtatgagcatgtgcaggctggaatgaacataagtaaggtttcaactagcattaaagtg

SEQ ID NO: 100102 - DNA, 80 bp, synthetic construct
  source 1..80: mol_type = other DNA
aactcagggcagacttctctgcatttacaggagcccagatggacttggataactaaaattagactgggttatcagcaaaa

SEQ ID NO: 100103 - DNA, 80 bp, synthetic construct; identical to SEQ ID NO: 19036
  source 1..80: mol_type = other DNA

SEQ ID NO: 100104 - DNA, 80 bp, synthetic construct
  source 1..80: mol_type = other DNA
cagaaagcctgtagcacaccagaggttgaagtgagagtcaggggcagaaaatacagaggaaaggcttaaaaatgaacatt

SEQ ID NO: 100105 - DNA, 80 bp, synthetic construct
  source 1..80: mol_type = other DNA
ggcccaggctctgtctagagaaggcaagaataaaggaggagtgaaatcttcacctcactccaatcaagccccttttattt

SEQ ID NO: 100106 - DNA, 80 bp, synthetic construct
  source 1..80: mol_type = other DNA
agcctcggtggacgtcagcacaatttttgcccgtcagtaattcctctgcctgcagagatggaatgatactgagatgggag

SEQ ID NO: 100107 - DNA, 80 bp, synthetic construct
  source 1..80: mol_type = other DNA
ccccagccttatgtgattaagcagtccaaggaacaattcccaatcatactatgcaggcatagaatttcagggactctttg

SEQ ID NO: 100108 - DNA, 80 bp, synthetic construct; identical to SEQ ID NO: 19037
  source 1..80: mol_type = other DNA

SEQ ID NO: 100109 - DNA, 80 bp, synthetic construct
  source 1..80: mol_type = other DNA
caagtgatcctcccacctcagcctcctgagaaacttggacaacaggtacacaccaccaggcccggctaatttttttaatt

SEQ ID NO: 100110 - DNA, 80 bp, synthetic construct
  source 1..80: mol_type = other DNA
aataacctagatttgcaaggggcggctgtaaactttcttgcaatttcagtctcccgtaatagaccagatactccgtgaaa

SEQ ID NO: 100111 - DNA, 80 bp, synthetic construct
  source 1..80: mol_type = other DNA
cttcgtctgctattgttcattgctccagtccttcccagaacaatgctacatatttttttctctttaaaggaccaactttt

SEQ ID NO: 100112 - DNA, 80 bp, synthetic construct; identical to SEQ ID NO: 19038
  source 1..80: mol_type = other DNA

SEQ ID NO: 100113 - DNA, 80 bp, synthetic construct
  source 1..80: mol_type = other DNA
gaattagataaagtagtagtagcagctgctcagaaggagagctcaggaaagtgtcacctgggaaagtgtcacaaggaagc

SEQ ID NO: 100114 - DNA, 80 bp, synthetic construct
  source 1..80: mol_type = other DNA
tttatagtcagatctggagagcaaacttccttttttttttaagggataaatttgctgcacagcatctcccaagacaaaaa

SEQ ID NO: 100115 - DNA, 80 bp, synthetic construct; identical to SEQ ID NO: 19039
  source 1..80: mol_type = other DNA

SEQ ID NO: 100116 - DNA, 80 bp, synthetic construct
  source 1..80: mol_type = other DNA
cagtctccagaggtagcctaccactgtcatgcccagtttttctctcacaaaaatgggatcacactacacacataatgttc

SEQ ID NO: 100117 - DNA, 80 bp, synthetic construct
  source 1..80: mol_type = other DNA
cctctgctggtgaacagttaggctgtctgctctttttcccattttaatagctaagcttttattgttaacattccccatgc

SEQ ID NO: 100118 - DNA, 80 bp, synthetic construct
  source 1..80: mol_type = other DNA
agctaataactggcaaaaaccagagtcaggttcaaatcccagtcatctgactctagagccatgttcttagcttctgttct

SEQ ID NO: 100119 - DNA, 80 bp, synthetic construct; identical to SEQ ID NO: 19040
  source 1..80: mol_type = other DNA

SEQ ID NO: 100120 - DNA, 80 bp, synthetic construct
  source 1..80: mol_type = other DNA
ccacaatcaagactgggaacaatgttcatcatatcccaaatttcctgtctcctatgtaacccctccctccccacagtgca

SEQ ID NO: 100121 - DNA, 80 bp, synthetic construct
  source 1..80: mol_type = other DNA
gtatgtgctagtttggcttcttttgctcaacatcattgagattcatctgtactgttgggtggatcagtagtctgtttcat

SEQ ID NO: 100122 - DNA, 80 bp, synthetic construct
  source 1..80: mol_type = other DNA
ccacgcctggctagtttttggtctttttttagtagagataaggttccaccatgttggccttgaactgttggggtcttgaa

SEQ ID NO: 100123 - DNA, 80 bp, synthetic construct
  source 1..80: mol_type = other DNA
aatatttgggttgttttcagttcggggcctttacagattgtatttgttaatagtcttcagttagctttgagattcattat

SEQ ID NO: 100124 - DNA, 80 bp, synthetic construct; identical to SEQ ID NO: 19041
  source 1..80: mol_type = other DNA

SEQ ID NO: 100125 - DNA, 80 bp, synthetic construct
  source 1..80: mol_type = other DNA
gttcttccagttcaggcagcaacacagtgtaggaaaggctacatttgtgcagaaactatgaacacagtctgtggaatctg

SEQ ID NO: 100126 - DNA, 80 bp, synthetic construct
  source 1..80: mol_type = other DNA
gcagagttatttcgaggattaagtgaacaaatactggtaaggtcttagtggcttccagtgggaggtacttaataagggtt

SEQ ID NO: 100127 - DNA, 80 bp, synthetic construct
  source 1..80: mol_type = other DNA
tgagagacaattttttggctttgtcccatggaaagcatagagctgaaataagggatgtcaaggactgggctcccagatgg

SEQ ID NO: 100128 - DNA, 80 bp, synthetic construct; identical to SEQ ID NO: 19042
  source 1..80: mol_type = other DNA

SEQ ID NO: 100129 - DNA, 80 bp, synthetic construct
  source 1..80: mol_type = other DNA
cacattccagaagtgtcctgagttgtgccatgggatatgtggtgtctgcagcaacccccatttattctgggacaagttac

SEQ ID NO: 100130 - DNA, 80 bp, synthetic construct
  source 1..80: mol_type = other DNA
caagtgagaaagccaacatttaggcagttattaacagcttctgtgatgaaatatttaacacgtgtctccaaaccagtatt

SEQ ID NO: 100131 - DNA, 80 bp, synthetic construct
  source 1..80: mol_type = other DNA
cagcataagtaaaagagttgggtttgcctctacattctattttctctccatgacactgtggcttccaaggtttttttttg

SEQ ID NO: 100132 - DNA, 80 bp, synthetic construct; identical to SEQ ID NO: 19043
  source 1..80: mol_type = other DNA

SEQ ID NO: 100133 - DNA, 80 bp, synthetic construct
  source 1..80: mol_type = other DNA
aggctgggacgggactgagagtgtggctctgatcaaagctctccttttttcccagctgcccctctcctatactgcggggg

SEQ ID NO: 100134 - DNA, 80 bp, synthetic construct
  source 1..80: mol_type = other DNA
ggccacttttccatcctttgcagagaggaagggaaggacactcaacctccctccgggcacctgggcctgagtgaggccct

SEQ ID NO: 100135 - DNA, 80 bp, synthetic construct; identical to SEQ ID NO: 19044
  source 1..80: mol_type = other DNA

SEQ ID NO: 100136 - DNA, 80 bp, synthetic construct
  source 1..80: mol_type = other DNA
ctgttcccctgcctgtgccattcccaggccccttccttccttctacccaggatggccagacctgaaaccattgcccagcc

SEQ ID NO: 100137 - DNA, 80 bp, synthetic construct
  source 1..80: mol_type = other DNA
tgttcctacctccattctcaggtgaggaaactgagccccaggagcagttcggctgactctccccgggtcacatgggttct

SEQ ID NO: 100138 - DNA, 80 bp, synthetic construct
  source 1..80: mol_type = other DNA
tctctggcggtggtgccagttgtttcctttgcttggaatcaaaaggcctcccagaattctgggacttatatttaataaat

SEQ ID NO: 100139 - DNA, 80 bp, synthetic construct; identical to SEQ ID NO: 19045
  source 1..80: mol_type = other DNA

SEQ ID NO: 100140 - DNA, 80 bp, synthetic construct
  source 1..80: mol_type = other DNA
aaatcaccttcattgttcttggaaggaggctgatagtaggagaacaggccagcggcaggccatggaatggctaagtgctt

SEQ ID NO: 100141 - DNA, 80 bp, synthetic construct
  source 1..80: mol_type = other DNA
atttctacctgatggctgccaggacacaggggcctgcctcccatgccatcctaaccctgcgtgtctatcccccatccttt

SEQ ID NO: 100142 - DNA, 80 bp, synthetic construct
  source 1..80: mol_type = other DNA
gggctccccagtctccataaccgagccaggtgtctggcgtccttggccttgcttgcctctgagtctagctcctacctgca

SEQ ID NO: 100143 - DNA, 80 bp, synthetic construct; identical to SEQ ID NO: 19046
  source 1..80: mol_type = other DNA

SEQ ID NO: 100144 - DNA, 80 bp, synthetic construct
  source 1..80: mol_type = other DNA
gctttgttctttttaactgttcatccatacagcaaatacttatcacaggcatgctaggtaccagacactattctagggac

SEQ ID NO: 100145 - DNA, 80 bp, synthetic construct
  source 1..80: mol_type = other DNA
aggtgccatcatttgtaaggcaccactattttttggtaccaactagaaaaaaaatgttgcaaatcaagtgatgagactcc

SEQ ID NO: 100146 - DNA, 80 bp, synthetic construct
  source 1..80: mol_type = other DNA
tttgatagcttaacagaagacatggtatatcagagggccaggggtaagtatctgaagacacctcctgtttttactacaag

SEQ ID NO: 100147 - DNA, 80 bp, synthetic construct; identical to SEQ ID NO: 19047
  source 1..80: mol_type = other DNA

SEQ ID NO: 100148 - DNA, 80 bp, synthetic construct
  source 1..80: mol_type = other DNA
tctactatacttgtcttggaaactgagacccataatgtcatggcctgggtcaccatgtgcagagaagtatcataggctat

SEQ ID NO: 100149 - DNA, 80 bp, synthetic construct
  source 1..80: mol_type = other DNA
aaagccagctgagggaagtcatctagcttgaagacataatcaatcccttttcccaacaagatgaaacctacagaatggta

SEQ ID NO: 100150 - DNA, 80 bp, synthetic construct
  source 1..80: mol_type = other DNA
gtcaggaattcgagaccagcctgaccaacagtgtgaaatcccgtctctactaaaaatacaaaaactagccaggcgtggtg

SEQ ID NO: 100151 - DNA, 80 bp, synthetic construct
  source 1..80: mol_type = other DNA
cttcctggctctcaccctactcttgttttctcattttctgtagggctgggcctgagagtctgtattgtaaaccatcctta

SEQ ID NO: 100152 - DNA, 80 bp, synthetic construct; identical to SEQ ID NO: 19048
  source 1..80: mol_type = other DNA

SEQ ID NO: 100153 - DNA, 80 bp, synthetic construct
  source 1..80: mol_type = other DNA
ggtgcacctgctggggagctgggagtttccaccacaggcttcccagataggatttctgtcagcggctttgacagaatgcc

SEQ ID NO: 100154 - DNA, 80 bp, synthetic construct
  source 1..80: mol_type = other DNA
agcctgtgctgtgccccacggctggtcacggctctgcaagaacccacccagagtgattcagaacaacaggtggagtcagc

SEQ ID NO: 100155 - DNA, 80 bp, synthetic construct
  source 1..80: mol_type = other DNA
gccatccaccgtttgctcttctcctagtcaggctgcacccgtttctggaagccaactgcagtctcttctatggagacagc

SEQ ID NO: 100156 - DNA, 80 bp, synthetic construct; identical to SEQ ID NO: 19049
  source 1..80: mol_type = other DNA

SEQ ID NO: 100157 - DNA, 80 bp, synthetic construct
  source 1..80: mol_type = other DNA
ggataggattgaacccaggtcatatgacttcaaagtgcacacacttaaccaccgtactggtctgcacccttctgtctcct

SEQ ID NO: 100158 - DNA, 80 bp, synthetic construct
  source 1..80: mol_type = other DNA
ttctggggtcatgcagaggcagccctcaacgatagaatagacaggcccatttttaaatccatcaaaagacctccaaggct

SEQ ID NO: 100159 - DNA, 80 bp, synthetic construct; identical to SEQ ID NO: 19050
  source 1..80: mol_type = other DNA

SEQ ID NO: 100160 - DNA, 80 bp, synthetic construct
  source 1..80: mol_type = other DNA
cccaggctggattgcaacggtgcgatctcggttcacagcaacctccgcctcccgggttcaagtgattctcctgcctcagc

SEQ ID NO: 100161 - DNA, 80 bp, synthetic construct
  source 1..80: mol_type = other DNA
tgagacaccacgctcggcctgtactttctacattttctacaggagacatgtattacttgcaagctaacataatgaggtac

SEQ ID NO: 100162 - DNA, 80 bp, synthetic construct
  source 1..80: mol_type = other DNA
ttctttccacagaaatatttgtcccagctggccgaggagggcctcaaggagaccgagggggcagatagcccgaggccaga

SEQ ID NO: 100163 - DNA, 80 bp, synthetic construct
  source 1..80: mol_type = other DNA
agggcacattgcttgggcttgttcccagagactcagtgaaatgcccctgatatgtctccaggagcaagtcacccaggtgt

SEQ ID NO: 100164 - DNA, 80 bp, synthetic construct; identical to SEQ ID NO: 19051
  source 1..80: mol_type = other DNA

SEQ ID NO: 100165 - DNA, 80 bp, synthetic construct
  source 1..80: mol_type = other DNA
tccaactgggccacccttttgaaaagcccctgtttttaataactgtttcatcctctcagttattctagaaatctgccaga

SEQ ID NO: 100166 - DNA, 80 bp, synthetic construct
  source 1..80: mol_type = other DNA
tccaaacttattcccctcctcttgatttcaggagatgtcagggtttttctattctggacaatgaatttggtacagagtca

SEQ ID NO: 100167 - DNA, 80 bp, synthetic construct; identical to SEQ ID NO: 19052
  source 1..80: mol_type = other DNA

SEQ ID NO: 100168 - DNA, 80 bp, synthetic construct
  source 1..80: mol_type = other DNA
tagttgagggctccctgggtttgactgtatgtgcagactttgataccaaaatgttatgaaaagtcgtgattcccgctgct

SEQ ID NO: 100169 - DNA, 80 bp, synthetic construct
  source 1..80: mol_type = other DNA
gagcagagatactctcctgaaagcacccttcatagcttagcccaggaaaaataaaacaaggaagacaggtcactctcccc

SEQ ID NO: 100170 - DNA, 80 bp, synthetic construct
  source 1..80: mol_type = other DNA
attctgtcctctgtactaatggaggaagggcagagagattagttcaaggctaacattttatatcaggtaactgaggcaca

SEQ ID NO: 100171 - DNA, 80 bp, synthetic construct; identical to SEQ ID NO: 19053
  source 1..80: mol_type = other DNA

SEQ ID NO: 100172 - DNA, 80 bp, synthetic construct
  source 1..80: mol_type = other DNA
agcatgatgaagtgtccttggttttaacctttataaggaaagcagctttgagatgaccagtctggtttttgttctttgtg

SEQ ID NO: 100173 - DNA, 80 bp, synthetic construct
  source 1..80: mol_type = other DNA
ttgagaagaccatatgggggctgctgaaaagttggtatctcaaataaagtctgaagatcacggctcagcccagattgttc

SEQ ID NO: 100174 - DNA, 80 bp, synthetic construct
  source 1..80: mol_type = other DNA
acaatttttatcagaggttagaactgtacattatcagagagactggacactttatcccctagcaaagtgggagaagattt

SEQ ID NO: 100175 - DNA, 80 bp, synthetic construct
  source 1..80: mol_type = other DNA
gcgctatctgccttcaatcagaaccttcggtttaaaatcatctaagagtctatacttgtgtgtacatacgtatttatttt

SEQ ID NO: 100176 - DNA, 80 bp, synthetic construct; identical to SEQ ID NO: 19054
  source 1..80: mol_type = other DNA

SEQ ID NO: 100177 - DNA, 80 bp, synthetic construct
  source 1..80: mol_type = other DNA
tcccattcttggacagtccgaggctgtgacctgttagataattagattatacttgaactggaccagagtttgttttttga

SEQ ID NO: 100178 - DNA, 80 bp, synthetic construct
  source 1..80: mol_type = other DNA
actacttttcctgatctgtataactgactgcaaagtgtttgtttttacaaaagagaaaagaaaagatttttaataaagag

SEQ ID NO: 100179 - DNA, 80 bp, synthetic construct; identical to SEQ ID NO: 19055
  source 1..80: mol_type = other DNA

SEQ ID NO: 100180 - DNA, 80 bp, synthetic construct
  source 1..80: mol_type = other DNA
ctgctgctgctgccgctgctaggcaaaggtgagttctgccggccgccggctcccgcaggggccagggcgaagttggcgcc

SEQ ID NO: 100181 - DNA, 80 bp, synthetic construct
  source 1..80: mol_type = other DNA
ggcgggtctcgggcgggagcggagcgcgggccgggccgcgggggtcggtgctcagaaccctagccatagccgcaggtctc

SEQ ID NO: 100182 - DNA, 80 bp, synthetic construct; identical to SEQ ID NO: 19056
  source 1..80: mol_type = other DNA

SEQ ID NO: 100183 - DNA, 80 bp, synthetic construct
  source 1..80: mol_type = other DNA
gcccagggcttggggtggggcaggggtttgcgccgccagccagcgttggtgctgggcctggtgaaacctcaggtgcctta

SEQ ID NO: 100184 - DNA, 80 bp, synthetic construct
  source 1..80: mol_type = other DNA
aaccaagtttccctctaagagggaaggagccctggccatcctccctcactccttacaaagggctttctctccccacagcc

SEQ ID NO: 100185 - DNA, 80 bp, synthetic construct
  source 1..80: mol_type = other DNA
caggggagaagcccttgcctttctatcttttctgagtgttaggactttggggtcccagtgctgcagggggaagacacggg

SEQ ID NO: 100186 - DNA, 80 bp, synthetic construct
  source 1..80: mol_type = other DNA
ccacacccttccacagccttgcgttcagttggggtggccagtgaggctgtgggggccaggctctgggggccggcttgtgg

SEQ ID NO: 100187 - DNA, 80 bp, synthetic construct; identical to SEQ ID NO: 19057
  source 1..80: mol_type = other DNA

SEQ ID NO: 100188 - DNA, 80 bp, synthetic construct
  source 1..80: mol_type = other DNA
tgcacactcacactggatcaccaagacacactcctgccccttctcacagcacttgctgccaaggctgtggacatgcacag

SEQ ID NO: 100189 - DNA, 80 bp, synthetic construct
  source 1..80: mol_type = other DNA
agagaacctccatctaaaagttacattcatttaaaagttgctcttaaaggtttctggcatttcattgctcaacacagata

SEQ ID NO: 100190 - DNA, 80 bp, synthetic construct; identical to SEQ ID NO: 19058
  source 1..80: mol_type = other DNA

SEQ ID NO: 100191 - DNA, 80 bp, synthetic construct
  source 1..80: mol_type = other DNA
ggttcacctgggcctggcttgcttcctcctccactccagctcactaaccctgtctggcctccagaagctgcctgcagccc

SEQ ID NO: 100192 - DNA, 80 bp, synthetic construct
  source 1..80: mol_type = other DNA
cacctagcggggagctaatagccttttagccagtggaggagaaaaccaattaaaaattatgatatctgttaaaatggaac

SEQ ID NO: 100193 - DNA, 80 bp, synthetic construct
  source 1..80: mol_type = other DNA
gtgctgtgcctactcacttcatcttttccaacaagtctgcaagggtcatggtcttggcccatttcacaggtgaggaaaca

SEQ ID NO: 100194 - DNA, 80 bp, synthetic construct
  source 1..80: mol_type = other DNA
ctggtgagtccccccacctcgggctccaggtgccctcaggacatcccagcccagatcccagagtaatgtgtggcaccatg

SEQ ID NO: 100195 - DNA, 80 bp, synthetic construct; identical to SEQ ID NO: 19059
  source 1..80: mol_type = other DNA

SEQ ID NO: 100196 - DNA, 80 bp, synthetic construct
  source 1..80: mol_type = other DNA
gaagaaagccagggaataggggcaaagcagggtgcagccccccatgctccctgctgccctcctcccctcctgcagaggca

SEQ ID NO: 100197 - DNA, 80 bp, synthetic construct
  source 1..80: mol_type = other DNA
acttaatagtaacaataacagtaacaataatagtaacaacagcaggctgggagcactcctgagggagcctcggctcctgc

SEQ ID NO: 100198 - DNA, 80 bp, synthetic construct
  source 1..80: mol_type = other DNA
gagaaggtgatgatggcaccagggctgtctctccgtgcccgtctgcacctgggcctgccagagccgtcttctgtgcccca

SEQ ID NO: 100199 - DNA, 80 bp, synthetic construct; identical to SEQ ID NO: 19060
  source 1..80: mol_type = other DNA

SEQ ID NO: 100200 - DNA, 80 bp, synthetic construct
  source 1..80: mol_type = other DNA
cctgaacctccatggagctctggtcccgcagctgtgtgatcatgggggcctcagggaccccgctcccctccattccccaa

SEQ ID NO: 100201 - DNA, 80 bp, synthetic construct
  source 1..80: mol_type = other DNA
agcaggaccttaaggacagcagttcaggtcgcacctggccctggagggagcaggtggccagctccaagcaaacacctctg

SEQ ID NO: 100202 - DNA, 80 bp, synthetic construct
  source 1..80: mol_type = other DNA
gggctctgtgctcaggggagaacctgtggccctacagccccaggttctagaccccctcccagattcgggtgctgcagctg

SEQ ID NO: 100203 - DNA, 80 bp, synthetic construct; identical to SEQ ID NO: 19061
  source 1..80: mol_type = other DNA

SEQ ID NO: 100204 - DNA, 80 bp, synthetic construct
  source 1..80: mol_type = other DNA
gcttcctcttgctctgttccccttcctgctccaccaccattgcctgtagggcgtctgccagccccaggaagcctaacact

SEQ ID NO: 100205 - DNA, 80 bp, synthetic construct
  source 1..80: mol_type = other DNA
actcctctggcaggtcacatacaggatgccccacagcaccttgaaaactcgtgacccgggaaagcctcaaattgtctttg

SEQ ID NO: 100206 - DNA, 80 bp, synthetic construct; identical to SEQ ID NO: 19062
  source 1..80: mol_type = other DNA

SEQ ID NO: 100207 - DNA, 80 bp, synthetic construct
  source 1..80: mol_type = other DNA
acatggtcgttctcaccccaggaggcttcaagtacagaggacgcggggatgggggcacgcaggggtgtacctgcacacac

SEQ ID NO: 100208 - DNA, 80 bp, synthetic construct
  source 1..80: mol_type = other DNA
taagtgaaccatttggtggcatttagcacatttacagcattgaacaggcattgccttagttccaaaaaatttgcatcacc

SEQ ID NO: 100209 - DNA, 80 bp, synthetic construct
  source 1..80: mol_type = other DNA
tgtggcacacatcagccccttcctgtgaggggtaaatagtgtgccgtcacccattcatctggggatggacacgtgggtgc

SEQ ID NO: 100210 - DNA, 80 bp, synthetic construct; identical to SEQ ID NO: 19063
  source 1..80: mol_type = other DNA

SEQ ID NO: 100211 - DNA, 80 bp, synthetic construct
  source 1..80: mol_type = other DNA
tctaactagatggctgtcttgccatacagctgactttgctgttgcatctgcatcaagagctgcagagaagcagctttatc

SEQ ID NO: 100212 - DNA, 80 bp, synthetic construct
  source 1..80: mol_type = other DNA
gaagacctggactctgaggccacgttgagcaccaacatctggaaaccatggtgtcactgcttgtgcataagaaggggcct

SEQ ID NO: 100213 - DNA, 80 bp, synthetic construct
  source 1..80: mol_type = other DNA
tcctgaaccctgactctaaaaataaccaggctgataatcggatccgctgtaagttgattatcatcattgccgtggtgtga

SEQ ID NO: 100214 - DNA, 80 bp, synthetic construct; identical to SEQ ID NO: 19064
  source 1..80: mol_type = other DNA

SEQ ID NO: 100215 - DNA, 80 bp, synthetic construct
  source 1..80: mol_type = other DNA
ggaggacacttgcagtcttaatcctgttttggccccatgtccctcaccccccaggggccacctaggccagagcctgtcct

SEQ ID NO: 100216 - DNA, 80 bp, synthetic construct
  source 1..80: mol_type = other DNA
cgaggccctgagggaggcgtgagttgtcacacatgggggtagtgtcagatgaagacttggcaccacttccctgggcatcc

SEQ ID NO: 100217 - DNA, 80 bp, synthetic construct
  source 1..80: mol_type = other DNA
tctggccccaggtctgtgctgggctgaaacctactgtctcagaggctcctggctctctccctctgctctccactgctctt

SEQ ID NO: 100218 - DNA, 80 bp, synthetic construct
  source 1..80: mol_type = other DNA
tagcctctgtgtggcctccagcagggtacctaagctagtgctgcctcattttcctcctgtgtgagatgggaatcctcatg

SEQ ID NO: 100219 - DNA, 80 bp, synthetic construct; identical to SEQ ID NO: 19065
  source 1..80: mol_type = other DNA

SEQ ID NO: 100220 - DNA, 80 bp, synthetic construct
  source 1..80: mol_type = other DNA
acttgggtggccagtcctgttcagccaggccttgccctaggaaagaaattaattataacctaattggcagtttcctttgc

SEQ ID NO: 100221 - DNA, 80 bp, synthetic construct
  source 1..80: mol_type = other DNA
ccctcagagcagaaggctgggtctgtgtgcagaaggtagccttgggctgccaggtcccccagtgcccagttgcggacctc

SEQ ID NO: 100222 - DNA, 80 bp, synthetic construct; identical to SEQ ID NO: 19066
  source 1..80: mol_type = other DNA

SEQ ID NO: 100223 - DNA, 80 bp, synthetic construct
  source 1..80: mol_type = other DNA
gaagaaccaattcttaagtctggtactgaggccgcactgccatgatgataactggtgtcaccaggacaccagggaaggag

SEQ ID NO: 100224 - DNA, 80 bp, synthetic construct
  source 1..80: mol_type = other DNA
acaggctgtcagatttttctcaaaggaggtattgacttgttagcgggtacaattaggccgaggaaccaggggctgatgca

SEQ ID NO: 100225 - DNA, 80 bp, synthetic construct
  source 1..80: mol_type = other DNA
tttccttccatggttagtgtaggttaaacctggcaaaaagctgctttcatttggaagtctcaggatgccagcaaagtgat

SEQ ID NO: 100226 - DNA, 80 bp, synthetic construct; identical to SEQ ID NO: 19067
  source 1..80: mol_type = other DNA

SEQ ID NO: 100227 - DNA, 80 bp, synthetic construct
  source 1..80: mol_type = other DNA
gtattagtgaaggtgatggtgaaggtggtggtggaggtcatgatggtgaaggtggggatggtggtggtagaggcagtggt

SEQ ID NO: 100228 - DNA, 80 bp, synthetic construct
  source 1..80: mol_type = other DNA
aggtaatggtagtggtagaggtgacggtgatgttgatggtcgtgatgcagccatcttctgtgagcatttgcttggtgcca

SEQ ID NO: 100229 - DNA, 80 bp, synthetic construct
  source 1..80: mol_type = other DNA
tgggtacagaggagaaactgagatacaaatatatgtcccttgctccaggctcattaccactgcaacacacactttctctc

SEQ ID NO: 100230 - DNA, 80 bp, synthetic construct
  source 1..80: mol_type = other DNA
ctctacctcctgctgcttttcccctcctttcactctggctctgcccccagccctcccgtcctgccgggcactggctcctg

SEQ ID NO: 100231 - DNA, 80 bp, synthetic construct; identical to SEQ ID NO: 19068
  source 1..80: mol_type = other DNA

SEQ ID NO: 100232 - DNA, 80 bp, synthetic construct
  source 1..80: mol_type = other DNA
catgagcccagggctatgggtgaccagcaagccattagcatatgcgtgtccatctgtcctgcctggctggtgggctgcca

SEQ ID NO: 100233 - DNA, 80 bp, synthetic construct
  source 1..80: mol_type = other DNA
cctgctgtgtaccagggccgacagcattgtgtcggggagcccgcccccacatgcaaggacacaccacacacagggaggcg

SEQ ID NO: 100234 - DNA, 80 bp, synthetic construct
  source 1..80: mol_type = other DNA
accctgagagttaagggaggcaaaggccagcaaggtcaggacttggggcagagatcggggctgggacaggagcttgttca

SEQ ID NO: 100235 - DNA, 80 bp, synthetic construct; identical to SEQ ID NO: 19069
  source 1..80: mol_type = other DNA

SEQ ID NO: 100236 - DNA, 80 bp, synthetic construct
  source 1..80: mol_type = other DNA
tgcccgggagcctcttgggttggcactgggctcgtgtgaggaggaggcgtggcaaagggaagggctctgtgacagaaggc

SEQ ID NO: 100237 - DNA, 80 bp, synthetic construct
  source 1..80: mol_type = other DNA
ggcccctcccacatccaaaagcaaaattatattctgcaactgtgttggtataagacaaacacaatccaggccactttatt

SEQ ID NO: 100238 - DNA, 80 bp, synthetic construct
  source 1..80: mol_type = other DNA
ggctggccctagcggcccagcccttgtgagccctcacacctgcctagagatggcgcgctccctagccagtcagggcgctc

SEQ ID NO: 100239 - DNA, 80 bp, synthetic construct; identical to SEQ ID NO: 19070
  source 1..80: mol_type = other DNA

SEQ ID NO: 100240 - DNA, 80 bp, synthetic construct
  source 1..80: mol_type = other DNA
cccatggaatgggagaaaaacttgtaattcatagatctgatcagtgttaatccagaatctgtagagaactcctcacactc

SEQ ID NO: 100241 - DNA, 80 bp, synthetic construct
  source 1..80: mol_type = other DNA
ttcgaaagcagcctagccaacatggtgaaaccttgtctctactaaaaatacaaaaaaattagccaggcgtggtggcaggt

SEQ ID NO: 100242 - DNA, 80 bp, synthetic construct; identical to SEQ ID NO: 19071
  source 1..80: mol_type = other DNA

SEQ ID NO: 100243 - DNA, 80 bp, synthetic construct
  source 1..80: mol_type = other DNA
agtgtagctgctgtggagaacagcaggaaggctcctcaaaggttaaacctagagctgacttcggctccagcacctccact

SEQ ID NO: 100244 - DNA, 80 bp, synthetic construct
  source 1..80: mol_type = other DNA
attacttggctttaaaaaggaaaaaaaatttgccacatcctatgccatggttgaacctcgagggcattatgtcacagaag

SEQ ID NO: 100245 - DNA, 80 bp, synthetic construct
  source 1..80: mol_type = other DNA
gtacagaatttcagttttacaggataaaaagagtgctgtggaaggatggtttgcatggcagtgtgaatgcacttaatgcc

SEQ ID NO: 100246 - DNA, 80 bp, synthetic construct; identical to SEQ ID NO: 19072
  source 1..80: mol_type = other DNA

SEQ ID NO: 100247 - DNA, 80 bp, synthetic construct
  source 1..80: mol_type = other DNA
cagcacagtggctggccccacaaggttgctggtgcactagtgggcactgcacgtgtgcacagggcgcatccacacagctc

SEQ ID NO: 100248 - DNA, 80 bp, synthetic construct
  source 1..80: mol_type = other DNA
gttgattcattgattcattcattggttcataaatttattcattcagctcacagaaagtgagttggcagatgtggcaggaa

SEQ ID NO: 100249 - DNA, 80 bp, synthetic construct
  source 1..80: mol_type = other DNA
agattgcctgtcctgcccagcatgtggtccagggttggacaggggtggcagaggggacttgggaggtggggtgaggggtg

SEQ ID NO: 100250 - DNA, 80 bp, synthetic construct; identical to SEQ ID NO: 19073
  source 1..80: mol_type = other DNA

SEQ ID NO: 100251 - DNA, 80 bp, synthetic construct
  source 1..80: mol_type = other DNA
atgtagagtggaggaaaatagctgtccacatggaattctccacccagcaaaaatgggccttccatgaatgacgtcaaaaa

SEQ ID NO: 100252 - DNA, 80 bp, synthetic construct
  source 1..80: mol_type = other DNA
tcgttgtacatgtcaaatatttgactatagtaagagaaaacgtgagtgggaagtgggagggaagcggtgggggggtgggg

SEQ ID NO: 100253 - DNA, 80 bp, synthetic construct
  source 1..80: mol_type = other DNA
attgcattaggaaatcgtctcttaaggagattctgctgggccataataaagctgtcatctgcatcgtctgccacccatca

SEQ ID NO: 100254 - DNA, 80 bp, synthetic construct; identical to SEQ ID NO: 19074
  source 1..80: mol_type = other DNA

SEQ ID NO: 100255 - DNA, 80 bp, synthetic construct
  source 1..80: mol_type = other DNA
tagtatgtgtgcaccgagggtgcaggaaaatgtgtgtgcttgtgtgtgaaagcgggtatataccagtatgagcaaataca

SEQ ID NO: 100256 - DNA, 80 bp, synthetic construct
  source 1..80: mol_type = other DNA
agcatatgggagaacaagtgtataacagtgtgtgcccccgtggtgtgtaatggtatgcgtctgagagaatgagtgtgtgt

SEQ ID NO: 100257 - DNA, 80 bp, synthetic construct
  source 1..80: mol_type = other DNA
aggtgggcaccagggaaggaaccccttcccagctggggtcagagcctgagggaggagctggatgctaggctggggctgct

SEQ ID NO: 100258 - DNA, 80 bp, synthetic construct
  source 1..80: mol_type = other DNA
cgtggactgcccgggcagcaggacctagaaaaggcaggtgtaacaaccggagacaggagcaacccctggcctgtcccagc

SEQ ID NO: 100259 - DNA, 80 bp, synthetic construct; identical to SEQ ID NO: 19075
  source 1..80: mol_type = other DNA

SEQ ID NO: 100260 - DNA, 80 bp, synthetic construct
  source 1..80: mol_type = other DNA
atatacacacactcatgacacacactacataggccttgaaggtttctgaggtctctctgaatgtgagcagcaacttgggt

SEQ ID NO: 100261 - DNA, 80 bp, synthetic construct
  source 1..80: mol_type = other DNA
gcaccgtcggtgggtgtggtgtgtgccaggccaccgctgtgctgcagaagtacagggtgggcccagccctggcaaccaaa

SEQ ID NO: 100262 - DNA, 80 bp, synthetic construct
  source 1..80: mol_type = other DNA
cgacccacgggcctggccttggtccacaggccaggcggcccttctaggcagaaaggcggcagcaggatgggaagccaacc

SEQ ID NO: 100263 - DNA, 80 bp, synthetic construct; identical to SEQ ID NO: 19076
  source 1..80: mol_type = other DNA

SEQ ID NO: 100264 - DNA, 80 bp, synthetic construct
  source 1..80: mol_type = other DNA
gtgggccccttgatctagaattatgaagaatttcaagactgtagcaaagagcattaaaccaagcgtgagacctctgagca

SEQ ID NO: 100265 - DNA, 80 bp, synthetic construct
  source 1..80: mol_type = other DNA
gcattttaagtgcatttaagtctgtttctgctcgcaatcattgcctgacccacaaatcccttttggcagcagggagacca

SEQ ID NO: 100266 - DNA, 80 bp, synthetic construct; identical to SEQ ID NO: 19077
  source 1..80: mol_type = other DNA

SEQ ID NO: 100267 - DNA, 80 bp, synthetic construct
  source 1..80: mol_type = other DNA
catcctctctggggtaagaacatggaccccactgcctgcatggatagcccagacataggatgccacatgggattgggagg

SEQ ID NO: 100268 - DNA, 80 bp, synthetic construct
  source 1..80: mol_type = other DNA
aagctttctcctgttctattttcccactgtgggactccagacgtctcacctgttctcttccaggctccccttggcacttg

SEQ ID NO: 100269 - DNA, 80 bp, synthetic construct
  source 1..80: mol_type = other DNA
cagtattcctaatgtgtcctttggatgttggtattgtttgggcattctagagtctatttgcaggttcttaatggatttta

SEQ ID NO: 100270 - DNA, 80 bp, synthetic construct; identical to SEQ ID NO: 19078
  source 1..80: mol_type = other DNA

SEQ ID NO: 100271 - DNA, 80 bp, synthetic construct
  source 1..80: mol_type = other DNA
caggctggagtgcaatggcacaatctcggctcactacaacctccgcctcgtgggttcaagccattctcctggcttagcct

SEQ ID NO: 100272 - DNA, 80 bp, synthetic construct
  source 1..80: mol_type = other DNA
gagccactgcgcccggccagatttccctcctttctaagactgaatattccattgtatgtatagaccatgttttgttcatc

SEQ ID NO: 100273 - DNA, 80 bp, synthetic construct
  source 1..80: mol_type = other DNA
tttttaagtttttgggaactaccttcttgtttttcatgataactgtatattattttccattttcaccgacaatgtacatg

SEQ ID NO: 100274 - DNA, 80 bp, synthetic construct; identical to SEQ ID NO: 19079
  source 1..80: mol_type = other DNA

SEQ ID NO: 100275 - DNA, 80 bp, synthetic construct
  source 1..80: mol_type = other DNA
tactaagaaaatacaaaattagctgggcatggtggtgcatgcctgtaatcccagctactggggaggctgaggcaggagaa

SEQ ID NO: 100276 - DNA, 80 bp, synthetic construct
  source 1..80: mol_type = other DNA
accttagctgcacaatactgacaaacgaatatgcccacgtgatctgcacccttctcaggatatgggaccttcacattccc

SEQ ID NO: 100277 - DNA, 80 bp, synthetic construct
  source 1..80: mol_type = other DNA
tctgcctggcttcctcaccttggcatggtttgtgtgtgtgacccatccaggtgtttgcgtgtatccatagttcatccttt

SEQ ID NO: 100278 - DNA, 80 bp, synthetic construct
  source 1..80: mol_type = other DNA
gtggaattgcagggtcatatggtaggcgtatgtttagataaagatttatgactttcctgtaaagtgctttcttcattttt

SEQ ID NO: 100279 - DNA, 80 bp, synthetic construct; identical to SEQ ID NO: 19080
  source 1..80: mol_type = other DNA

SEQ ID NO: 100280 - DNA, 80 bp, synthetic construct
  source 1..80: mol_type = other DNA
aatgattttttttttttttgtccttgaagaagccttattctcaccatccctcactcacttccctacttcccacagtggca

SEQ ID NO: 100281 - DNA, 80 bp, synthetic construct
  source 1..80: mol_type = other DNA
tgcatgagaacaactggatctgcatccaggaggacaccggcctcctctaccttaaccggagcctggaccatagctcctgg

SEQ ID NO: 100282 - DNA, 80 bp, synthetic construct
  source 1..80: mol_type = other DNA
cccaccgctggtgtggaaggcgtcaggggttaagtgaggctggcctgcctctgtgtccagcctggagagaagccaggaca

SEQ ID NO: 100283 - DNA, 80 bp, synthetic construct; identical to SEQ ID NO: 19081
  source 1..80: mol_type = other DNA

SEQ ID NO: 100284 - DNA, 80 bp, synthetic construct
  source 1..80: mol_type = other DNA
cccctgtgacaggaaacggtgatgctgcacctggtagctcccatccctagcacccctccagggccacagcttgcacagcc

SEQ ID NO: 100285 - DNA, 80 bp, synthetic construct
  source 1..80: mol_type = other DNA
gcagttcctggaggaggcagcatctgaggttggtcgtggttctacgcacttagttgctgccctcttcatcctgagcctcc

SEQ ID NO: 100286 - DNA, 80 bp, synthetic construct; identical to SEQ ID NO: 19082
  source 1..80: mol_type = other DNA

SEQ ID NO: 100287 - DNA, 80 bp, synthetic construct
  source 1..80: mol_type = other DNA
tcaccccttactggagaagttgccaccatcagagttggggagccttagacccagtgctcaacacacctccctgaggaagg

SEQ ID NO: 100288 - DNA, 80 bp, synthetic construct
  source 1..80: mol_type = other DNA
gagctcctgcctcctccccattcccgactgcctggcagatgtggccgatgcccccacagacctgacttctctctgcagac

SEQ ID NO: 100289 - DNA, 80 bp, synthetic construct
  source 1..80: mol_type = other DNA
tcccagagacaaggccctccttccgcattcgggagaaccgacccccaggcaccttccaccagttccgcctgctgcctgtg

SEQ ID NO: 100290 - DNA, 80 bp, synthetic construct; identical to SEQ ID NO: 19083
  source 1..80: mol_type = other DNA

SEQ ID NO: 100291 - DNA, 80 bp, synthetic construct
  source 1..80: mol_type = other DNA
ccattcctctatcgtaaattgggtggtcagggtgggggctagcagagcaaaggtgggagggtgccgggtaggcaggccta

SEQ ID NO: 100292 - DNA, 80 bp, synthetic construct
  source 1..80: mol_type = other DNA
gactttggagggagggagtgctggcaggacctgacttagttttaaaaggattagtcagactactgtgttaggaatggttt

SEQ ID NO: 100293 - DNA, 80 bp, synthetic construct
  source 1..80: mol_type = other DNA
atcccagtggagaggggagaaggcagctgactaggtgcagggaggccccatttgaccatcagaaagtcaggaagtggggc

SEQ ID NO: 100294 - DNA, 80 bp, synthetic construct
  source 1..80: mol_type = other DNA
gagcacttggttttttgcatgctgccctttttcactaaaaattatgtgattaaatttagtttagtggggggttttttgta

SEQ ID NO: 100295 - DNA, 80 bp, synthetic construct; identical to SEQ ID NO: 19084
  source 1..80: mol_type = other DNA

SEQ ID NO: 100296 - DNA, 80 bp, synthetic construct
  source 1..80: mol_type = other DNA
gtcacatcataccccagatgtccactgtgtttgttttcaagtggtagaatcgtggctttctcacgttctctaaaatgaac

SEQ ID NO: 100297 - DNA, 80 bp, synthetic construct
  source 1..80: mol_type = other DNA
ggagaatcgcctgaacccgggagttggaggttgcagtgagccaagatcgcgccactgcactccagcctgggcaacacagc

SEQ ID NO: 100298 - DNA, 80 bp, synthetic construct; identical to SEQ ID NO: 19085
  source 1..80: mol_type = other DNA

SEQ ID NO: 100299 - DNA, 80 bp, synthetic construct
  source 1..80: mol_type = other DNA
cggtcccggctggtgatcacgcggggcccctgtctgcttggtgcgcaggtgagggtctgcccttccgctgcgccccggac

SEQ ID NO: 100300 - DNA, 80 bp, synthetic construct
  source 1..80: mol_type = other DNA
ccgcgggcgtcgacaccgccagcgccgtggtggagttcaagcggaaggaggtgcttgtccgcgcgtgctgtggtctaccc

SEQ ID NO: 100301 - DNA, 80 bp, synthetic construct
  source 1..80: mol_type = other DNA
gggccttgcctcgggaggcaaggaccaggacgaggcccgagggctcgcgtctggggcatacttgtgccgctgcaggcggg

SEQ ID NO: 100302 - DNA, 80 bp, synthetic construct
  source 1..80: mol_type = other DNA
ctccggctcgcgctggtggagcgcgaccgccacctgctgggcctcggccttcctgcagccggcccacccagcaggggccg

SEQ ID NO: 100303 - DNA, 80 bp, synthetic construct; identical to SEQ ID NO: 19086
  source 1..80: mol_type = other DNA

SEQ ID NO: 100304 - DNA, 80 bp, synthetic construct
  source 1..80: mol_type = other DNA
gggcatcggctgtaattctccttataagaggtctgcattgtacctgttacacaggcgaggctcagtggctcagggaaggt

SEQ ID NO: 100305 - DNA, 80 bp, synthetic construct
  source 1..80: mol_type = other DNA
ctgcactgaccaacgccctctgcatcctgcaggacaccgtggtggccacgctgcgtgtcttcgatgcagacgtggtacct

SEQ ID NO: 100306 - DNA, 80 bp, synthetic construct
  source 1..80: mol_type = other DNA
ggtggcacggcctggctaggcccccaggaaatgaggtgctcgctcttcatgggcaagcagcaccctacacacatgcacac

SEQ ID NO: 100307 - DNA, 80 bp, synthetic construct; identical to SEQ ID NO: 19087
  source 1..80: mol_type = other DNA

SEQ ID NO: 100308 - DNA, 80 bp, synthetic construct
  source 1..80: mol_type = other DNA
cctccctccgccacctcctgcagatttctcctgggatcgccttccaaataaaccacctgcatttggggtctgtgtctggt

SEQ ID NO: 100309 - DNA, 80 bp, synthetic construct
  source 1..80: mol_type = other DNA
cccatcattgtttccaccacatgagatccacagtggcagcacgcggcaggtacaccgatggcatgacttccagggcttgg

SEQ ID NO: 100310 - DNA, 80 bp, synthetic construct
  source 1..80: mol_type = other DNA
cacacacacacacacacaccctgttacccaaaaaacgaaactctgtaaaacattttaaagaggtttattctgagccagga

SEQ ID NO: 100311 - DNA, 80 bp, synthetic construct; identical to SEQ ID NO: 19088
  source 1..80: mol_type = other DNA

SEQ ID NO: 100312 - DNA, 80 bp, synthetic construct
  source 1..80: mol_type = other DNA
tatacagggtcaggagggaaagtaaaccacgttatacctgggtaacttaaaaaaaaaaggtttttaacaagattttatgg

SEQ ID NO: 100313 - DNA, 80 bp, synthetic construct
  source 1..80: mol_type = other DNA
acatgcctggattccaggaacctgggaggctgaggtgggaggatggctggagcctgggaggtcaaggctgcaatgagatg

SEQ ID NO: 100314 - DNA, 80 bp, synthetic construct
  source 1..80: mol_type = other DNA
taatgccggtcagttgtgtccaaactccagcaggaagagggcctaataaggcaagtccaccctgccttcctgtcatggcc

SEQ ID NO: 100315 - DNA, 80 bp, synthetic construct; identical to SEQ ID NO: 19089
  source 1..80: mol_type = other DNA

SEQ ID NO: 100316 - DNA, 80 bp, synthetic construct
  source 1..80: mol_type = other DNA
tgcagggctgtgtctgggaagaggtgtgctacacatgaggaagcagccagagcagcttggtggtcattgttgtgccccta

SEQ ID NO: 100317 - DNA, 80 bp, synthetic construct
  source 1..80: mol_type = other DNA
gtacctactccctctccgtgagcaggagggctcgccgatttgcccaggtgagcccatacctattgcctgtctggggaaga

SEQ ID NO: 100318 - DNA, 80 bp, synthetic construct
  source 1..80: mol_type = other DNA
ggctccttgggcctctctttttttcccctttccattcttggtatctttaaaatgtattttcaaaaatgcaagagcaatac

SEQ ID NO: 100319 - DNA, 80 bp, synthetic construct
  source 1..80: mol_type = other DNA
tgccctcagggggaggcaggaaacgcttccactttttactttttgtaactaggtttgctagaaagcgtatatttatattt

SEQ ID NO: 100320 - DNA, 80 bp, synthetic construct; identical to SEQ ID NO: 19090
  source 1..80: mol_type = other DNA

SEQ ID NO: 100321 - DNA, 80 bp, synthetic construct
  source 1..80: mol_type = other DNA
tcagctcctggcagccacccgtgtccagcccacgagggagcccacccttggacatatctaagctccccgaccacctcctt

SEQ ID NO: 100322 - DNA, 80 bp, synthetic construct
  source 1..80: mol_type = other DNA
actgtggtctcacctttctccccagtttgtaaagctgtgaattagggacaggaaccctgaacaattttgagagtcacatg

SEQ ID NO: 100323 - DNA, 80 bp, synthetic construct; identical to SEQ ID NO: 19091
  source 1..80: mol_type = other DNA

SEQ ID NO: 100324 - DNA, 80 bp, synthetic construct
  source 1..80: mol_type = other DNA
gtggctggggttcagtgctctgaccaggggacaccagggcagggtggacctctaaaccctgtgcactgagggaggagtga

SEQ ID NO: 100325 - DNA, 80 bp, synthetic construct
  source 1..80: mol_type = other DNA
cctgggttgccttgacctccagctcccaggaacaggggcagctggtaacatgtggcctgagtggaacggggcagggcagg

SEQ ID NO: 100326 - DNA, 80 bp, synthetic construct
  source 1..80: mol_type = other DNA
ggtgttcccctgtgcccccctagatcgggaaagtctgtgtggaaaactgccaggcattcagtggcatcaacgtccagtac

SEQ ID NO: 100327 - DNA, 80 bp, synthetic construct
  source 1..80: mol_type = other DNA
ggcaggcccaggcccagctgcttgtaacagtggaggggtcatgtgagtgcctgctccagggagggagggtcggggtcctg

SEQ ID NO: 100328 - DNA, 80 bp, synthetic construct; identical to SEQ ID NO: 19092
  source 1..80: mol_type = other DNA

SEQ ID NO: 100329 - DNA, 80 bp, synthetic construct
  source 1..80: mol_type = other DNA
gtgaccatgatgtcctgtaccctgccctgcgccctgtgctcctggcactgtctttgctgccctgggtctgtcactccggt

SEQ ID NO: 100330 - DNA, 80 bp, synthetic construct
  source 1..80: mol_type = other DNA
agagacggctggagtgtgaggagtgtggcggcctgggctccccaacaggcaggtgtgagtggaggcaaggagatggcaaa

SEQ ID NO: 100331 - DNA, 80 bp, synthetic construct; identical to SEQ ID NO: 19093
  source 1..80: mol_type = other DNA

SEQ ID NO: 100332 - DNA, 80 bp, synthetic construct
  source 1..80: mol_type = other DNA
tcccggcctctttgctgtaagggccacctgtgtgaggaaccccccatacctcctctcccataagccatggctccccagga

SEQ ID NO: 100333 - DNA, 80 bp, synthetic construct
  source 1..80: mol_type = other DNA
aacttctccacctgctctcccagcaccaagacctgccccgacggccactgcgatgttgtggagacccaagacatcaacat

SEQ ID NO: 100334 - DNA, 80 bp, synthetic construct
  source 1..80: mol_type = other DNA
ctagccatggggagggagcaggcagggtcagggacagggggaaggcagggacccacagactgtccaggcccctgctgagg

SEQ ID NO: 100335 - DNA, 80 bp, synthetic construct
  source 1..80: mol_type = other DNA
ttaggagggggcctggcttcacccatggcttcagaaaggcactgtgaccaagccctgcccggctaagccaagctgctggg

SEQ ID NO: 100336 - DNA, 80 bp, synthetic construct; identical to SEQ ID NO: 19094
  source 1..80: mol_type = other DNA

SEQ ID NO: 100337 - DNA, 80 bp, synthetic construct
  source 1..80: mol_type = other DNA
cacccaggagaggggccagggcccctgtaaagtgtcttctggccataagttctatgatggacaggccagaaaagcagttc

SEQ ID NO: 100338 - DNA, 80 bp, synthetic construct
  source 1..80: mol_type = other DNA
tctgtcattgagttttctggtattatatagccctacgtccctagccacttagcattttcataaagaaaatgccaaagaca

SEQ ID NO: 100339 - DNA, 80 bp, synthetic construct
  source 1..80: mol_type = other DNA
aatggcagtacccatgctcgatggggtgttctcaggccttcccacacctccatggccacttcccagctggcgcggacacg

SEQ ID NO: 100340 - DNA, 80 bp, synthetic construct; identical to SEQ ID NO: 19095
  source 1..80: mol_type = other DNA

SEQ ID NO: 100341 - DNA, 80 bp, synthetic construct
  source 1..80: mol_type = other DNA
ccttccagggagggaggccagctggggagacagaggccatcctgtgaggggctgccaacgctgggcagacgaggcctgtg

SEQ ID NO: 100342 - DNA, 80 bp, synthetic construct
  source 1..80: mol_type = other DNA
gcctttctggggagcctggcctgcaggtctgcatgtgctactcagagcctccaggctgtgccgagtatcctggagcctcc

SEQ ID NO: 100343 - DNA, 80 bp, synthetic construct
  source 1..80: mol_type = other DNA
gtggcgtgaatagctcctcggcaggagcctccagggaggaagctgagcacccagtggccacagggccctggcagttccca

SEQ ID NO: 100344 - DNA, 80 bp, synthetic construct; identical to SEQ ID NO: 19096
  source 1..80: mol_type = other DNA

SEQ ID NO: 100345 - DNA, 80 bp, synthetic construct
  source 1..80: mol_type = other DNA
tgagaggatcaggttgatgtcgccctcatgtgcttattgcagtctctagagtgtggtaaacaggtttccagtgccagctg

SEQ ID NO: 100346 - DNA, 80 bp, synthetic construct
  source 1..80: mol_type = other DNA
caggctttggcctccctggtcagagttcaagtactgggggccagggtgggggtctgggaaggcatccggagcagtcccaa

SEQ ID NO: 100347 - DNA, 80 bp, synthetic construct
  source 1..80: mol_type = other DNA
tgtagagaagttgtcctggacacttccactgtagtcagaggtcctgggctgggcctggtgctcatttagtcctggggcag

SEQ ID NO: 100348 - DNA, 80 bp, synthetic construct; identical to SEQ ID NO: 19097
  source 1..80: mol_type = other DNA

SEQ ID NO: 100349 - DNA, 80 bp, synthetic construct
  source 1..80: mol_type = other DNA
accacggtggccgtgaagatgctgaaaggtacctgccaggcacaggcacagtgcccctgggggagtctccggggcggggg

SEQ ID NO: 100350 - DNA, 80 bp, synthetic construct
  source 1..80: mol_type = other DNA
cagtgccactgaagatctaagctttaaacatttaaaaagccctttgattttgagctgacagctgtcttcactccagtctg

SEQ ID NO: 100351 - DNA, 80 bp, synthetic construct; identical to SEQ ID NO: 19098
  source 1..80: mol_type = other DNA

SEQ ID NO: 100352 - DNA, 80 bp, synthetic construct
  source 1..80: mol_type = other DNA
aaggggtcctggggccccaactcccaactgtcctctcccttccagacaacctttcaggacagaggaggtggcacggcaca

SEQ ID NO: 100353 - DNA, 80 bp, synthetic construct
  source 1..80: mol_type = other DNA
gtttccatcatgcctctacagttagactctctggggaatcatgctattcattaagaataagccagaatgtcaggtgtgca

SEQ ID NO: 100354 - DNA, 80 bp, synthetic construct
  source 1..80: mol_type = other DNA
ctggtcgcggtgtgtggacctcctttatggctctccaccttctccagggcctctcccgacaagtgggtgtgtgggtaccc

SEQ ID NO: 100355 - DNA, 80 bp, synthetic construct
  source 1..80: mol_type = other DNA
cttcctcagggtggatgaggcccctgtccactgatcccaaaggctgggagaagcctcaagcagcatcgtctttgcaggcc

SEQ ID NO: 100356 - DNA, 80 bp, synthetic construct; identical to SEQ ID NO: 19099
  source 1..80: mol_type = other DNA

SEQ ID NO: 100357 - DNA, 80 bp, synthetic construct
  source 1..80: mol_type = other DNA
gtggtcactttccatcagaggggccccgcgctagcggcactccctgggcccacagggctactcagaggtctctggtgtga

SEQ ID NO: 100358 - DNA, 80 bp, synthetic construct
  source 1..80: mol_type = other DNA
attgtcaccatttctcagataaagacccaggagaccagcctggtttgttggttttccaaaccaccatgctgctcaggggc

SEQ ID NO: 100359 - DNA, 80 bp, synthetic construct; identical to SEQ ID NO: 19100
  source 1..80: mol_type = other DNA

SEQ ID NO: 100360 - DNA, 80 bp, synthetic construct
  source 1..80: mol_type = other DNA
cagcagtgctgcctgaggcagggctgtgtccacccccttactcattgggtggccgggcctggggaccctgcggcctccca

SEQ ID NO: 100361 - DNA, 80 bp, synthetic construct
  source 1..80: mol_type = other DNA
gtggaggcagccgcaactccagctccctggaccacccggatgagcgggccctcaccatgggcgacctcatctcatttgcc

SEQ ID NO: 100362 - DNA, 80 bp, synthetic construct
  source 1..80: mol_type = other DNA
catgcccctgccatggcatgccatgctatggctcaccacgcccctgccatgtcacaccctgactccaccacgcccctgcc

SEQ ID NO: 100363 - DNA, 80 bp, synthetic construct
  source 1..80: mol_type = other DNA
cagaaacatcctggtagctgaggggcggaagatgaagatttcggatttcggcttgtcccgagatgtttatgaagaggatt

SEQ ID NO: 100364 - DNA, 80 bp, synthetic construct; identical to SEQ ID NO: 19101
  source 1..80: mol_type = other DNA

SEQ ID NO: 100365 - DNA, 80 bp, synthetic construct
  source 1..80: mol_type = other DNA
cttctgcagaataaaggtcaccgttctgatatgaccttagctcttttctcaaagaagggtgggatgaaattagcaggatc

SEQ ID NO: 100366 - DNA, 80 bp, synthetic construct
  source 1..80: mol_type = other DNA
cgcagcccagctttgtccaagtctatgaaacaggcagtgggcacccttggggacacctggttccctaccatggtcctagt

SEQ ID NO: 100367 - DNA, 80 bp, synthetic construct
  source 1..80: mol_type = other DNA
aaaaaaaaaaaccacaaaaggcgacttcctatgattcagctttgctctgaggggtctggagaagccatttgtgttgccag

SEQ ID NO: 100368 - DNA, 80 bp, synthetic construct; identical to SEQ ID NO: 19102
  source 1..80: mol_type = other DNA

SEQ ID NO: 100369 - DNA, 80 bp, synthetic construct
  source 1..80: mol_type = other DNA
ccctgcaatacaataagagagaaaaaacagcctcccccaaggcacacagacaaatcccttccctcaaggctccttcagtg

SEQ ID NO: 100370 - DNA, 80 bp, synthetic construct
  source 1..80: mol_type = other DNA
agctggccctgtgtgcctgtgggtgggcagctgactcccgccagcatctcagcaatccacaggaggttcaggctggagct

SEQ ID NO: 100371 - DNA, 80 bp, synthetic construct; identical to SEQ ID NO: 19103
  source 1..80: mol_type = other DNA

SEQ ID NO: 100372 - DNA, 80 bp, synthetic construct
  source 1..80: mol_type = other DNA
atgatgtgttcgtgaggcaaatggctgggccaggccgggctgcagttctgaaagctccggtagagcatgagagccgagca

SEQ ID NO: 100373 - DNA, 80 bp, synthetic construct
  source 1..80: mol_type = other DNA
agcttggggactccacctgaagatggccttgtgtgagtttatagattggtgtgccccaaactgctcaaaggtggaagcca

SEQ ID NO: 100374 - DNA, 80 bp, synthetic construct
  source 1..80: mol_type = other DNA
gtggcgcaatcctggctcactgcaacctccacctcctgggttcaagcgattcctgtgcctcagcctcctgagtagctggg

SEQ ID NO: 100375 - DNA, 80 bp, synthetic construct; identical to SEQ ID NO: 19104
  source 1..80: mol_type = other DNA

SEQ ID NO: 100376 - DNA, 80 bp, synthetic construct
  source 1..80: mol_type = other DNA
tttattgccctaaatgggctcatgcgatgctgttttgtgatatgattttgttcccattgcaaagcgagttttccttcaca

SEQ ID NO: 100377 - DNA, 80 bp, synthetic construct
  source 1..80: mol_type = other DNA
atacaaggcactctgagtctggtggcctgcattctcaccgctttaagtgtgagaatcttaagaattattaagattaattc

SEQ ID NO: 100378 - DNA, 80 bp, synthetic construct
  source 1..80: mol_type = other DNA
tgctacatccatctgagcagccagacccaggctgacatctgtgagcatctgtgcttgaagccgacagggtcagcaggtgc

SEQ ID NO: 100379 - DNA, 80 bp, synthetic construct
  source 1..80: mol_type = other DNA
cggctcttcaaccttctgaagaccggccaccggatggagaggccagacaactgcagcgaggagatgtgagcggggactgg

SEQ ID NO: 100380 - DNA, 80 bp, synthetic construct; identical to SEQ ID NO: 19105
  source 1..80: mol_type = other DNA

SEQ ID NO: 100381 - DNA, 80 bp, synthetic construct
  source 1..80: mol_type = other DNA
gatggtcttagaaaccaggctgagaacagatgagaaagggctgcccagaggcagagatgcatggtacatgcattccacag

SEQ ID NO: 100382 - DNA, 80 bp, synthetic construct
  source 1..80: mol_type = other DNA
cttgtttgtctgtctccacacctaaaagccctcaatcaattcattcttcttgagagttttaaggactggcacttctcact

SEQ ID NO: 100383 - DNA, 80 bp, synthetic construct
  source 1..80: mol_type = other DNA
caggccatgccccagtcccacgaggctcagagatgtcagcgatgcagaaatagctttggagttggagacagagcacactg

SEQ ID NO: 100384 - DNA, 80 bp, synthetic construct; identical to SEQ ID NO: 19106
  source 1..80: mol_type = other DNA

SEQ ID NO: 100385 - DNA, 80 bp, synthetic construct
  source 1..80: mol_type = other DNA
agtcatgaagaaaccaagattcttgacatttaggaaaagctctctacagacaggcatgggaggaaaatattccaaagcca

SEQ ID NO: 100386 - DNA, 80 bp, synthetic construct
  source 1..80: mol_type = other DNA
gagtacctgtggcctgcagaaaaaggagccaggaatgggctgggtcttctgaattttatgaggtttatgttgtctcccag

SEQ ID NO: 100387 - DNA, 80 bp, synthetic construct
  source 1..80: mol_type = other DNA
ttttcaaccaatattcatcaggcagctgctaggacccatactatgtctcagaggctgggaatgcagataaacaagaccag

SEQ ID NO: 100388 - DNA, 80 bp, synthetic construct; identical to SEQ ID NO: 19107
  source 1..80: mol_type = other DNA

SEQ ID NO: 100389 - DNA, 80 bp, synthetic construct
  source 1..80: mol_type = other DNA
atttcagaactcagccctgacgtgacgttctagatggcaggggtccttggggaaagctggaaaacatcctgcaggctggg

SEQ ID NO: 100390 - DNA, 80 bp, synthetic construct
  source 1..80: mol_type = other DNA
cacatttctttccccagggaggtgactttccaggggaagagacagaatagacaacacccaggggagtgatggggacctca

SEQ ID NO: 100391 - DNA, 80 bp, synthetic construct
  source 1..80: mol_type = other DNA
gcttgttgtatactgagttgtatctagttgtggcacatggcttggagtgaccggccatctctgtcttccaggactacttg

SEQ ID NO: 100392 - DNA, 80 bp, synthetic construct; identical to SEQ ID NO: 19108
  source 1..80: mol_type = other DNA

SEQ ID NO: 100393 - DNA, 80 bp, synthetic construct
  source 1..80: mol_type = other DNA
tgtttttctaaaaggatgtgaaaataagtgtaattaccacattgcccagcaacttaggatggtagaggaaaaaacagatc

SEQ ID NO: 100394 - DNA, 80 bp, synthetic construct
  source 1..80: mol_type = other DNA
tttaactaagtggataaatatacaaatctggggaggtattcagttgagaaaggagccaccagcaccactcagcctgcact

SEQ ID NO: 100395 - DNA, 80 bp, synthetic construct
  source 1..80: mol_type = other DNA
gaggacgcacccccactgctgttttcacatcctttcccttacccaccttcaggacggttgtcacttatgaagtcagtgct

SEQ ID NO: 100396 - DNA, 80 bp, synthetic construct; identical to SEQ ID NO: 19109
  source 1..80: mol_type = other DNA

SEQ ID NO: 100397 - DNA, 80 bp, synthetic construct
  source 1..80: mol_type = other DNA
attgagtgcagcagtgtgctgttgccctacactgccttagaaaaagagttaagcagttcgacaaatatacatcagattag

SEQ ID NO: 100398 - DNA, 80 bp, synthetic construct
  source 1..80: mol_type = other DNA
ttaatataattggcacagaaaccacgagtttggtttgaacatcaaagggagttttgccaaggccttactgtctgcacttg

SEQ ID NO: 100399 - DNA, 80 bp, synthetic construct
  source 1..80: mol_type = other DNA
ttccaagatatccaaatgatagtgtatatgctaactggatgctttcaccctcagcggcaaaattaatggacacgtttgat

SEQ ID NO: 100400 - DNA, 80 bp, synthetic construct; identical to SEQ ID NO: 19110
  source 1..80: mol_type = other DNA

SEQ ID NO: 100401 - DNA, 80 bp, synthetic construct
  source 1..80: mol_type = other DNA
ttggacctgaactgttggatttttctagttgccgccaaacaaggcaaaaaaatttaaacatgaagcacacacacaaaaaa

SEQ ID NO: 100402 - DNA, 80 bp, synthetic construct
  source 1..80: mol_type = other DNA
atgggcctgggctcagcattcgagatcttgagaatgattttttttaaatcatgcaacctttccttaggaagacatttggt

SEQ ID NO: 100403 - DNA, 80 bp, synthetic construct
  source 1..80: mol_type = other DNA
acccctgatgagaacagtatgaagaaagggggctgttggagtcccagaattgctgacagcagaggctttgctgctgtgaa

SEQ ID NO: 100404 - DNA, 80 bp, synthetic construct; identical to SEQ ID NO: 19111
  source 1..80: mol_type = other DNA

SEQ ID NO: 100405 - DNA, 80 bp, synthetic construct
  source 1..80: mol_type = other DNA
ctgtgtgaaaggcccatggatcagctcttcctgtgtttgtaatttaatgctgctacaagatgtttctgtttcttagattc

SEQ ID NO: 100406 - DNA, 80 bp, synthetic construct
  source 1..80: mol_type = other DNA
gttgtcagcactgtaacttcgcagaaaagagtcggattaccaaaacactgcctgctcttcagacttaaagcactgatagg

SEQ ID NO: 100407 - DNA, 80 bp, synthetic construct
  source 1..80: mol_type = other DNA
gacacgtaacctggctctaatttgggctgtttttcagatacactgtgataagttcttttacaaatatctatagacatggt

SEQ ID NO: 100408 - DNA, 80 bp, synthetic construct
  source 1..80: mol_type = other DNA
agtgatggggaatttatccttgaccaatttatccttgaccaataacctaattgtctattcctgagttataaaagtcccca

SEQ ID NO: 100409 - DNA, 80 bp, synthetic construct; identical to SEQ ID NO: 19112
  source 1..80: mol_type = other DNA

SEQ ID NO: 100410 - DNA, 80 bp, synthetic construct
  source 1..80: mol_type = other DNA
caatatttatttttaaacaatctctggaagaaaagaaatttaaaaacaaaaggcttaaaatgtattaatacctcaatgtt

SEQ ID NO: 100411 - DNA, 80 bp, synthetic construct
  source 1..80: mol_type = other DNA
ctatatgtacttgcttttatgttacataagcttttaatatataacttaatctctgagatgttatttggttgagaggcctc

SEQ ID NO: 100412 - DNA, 80 bp, synthetic construct
  source 1..80: mol_type = other DNA
ccctggtttgagaaaaagtttggtttgacatttagtaattaagccttattgcatgatacttccttgactcagcaaagcca

SEQ ID NO: 100413 - DNA, 80 bp, synthetic construct
  source 1..80: mol_type = other DNA
agtaagtccacattcatttcctatttgattgctaaatatttaagagtttttcagttatggcctgtctcacagaggaagta

SEQ ID NO: 100414 - DNA, 80 bp, synthetic construct
  source 1..80: mol_type = other DNA
gattgcagacctgaagctgattttctcagttttgctaccaaaaacatatcttgctggagtatgctcaagattttttgaac

SEQ ID NO: 100415 - DNA, 80 bp, synthetic construct
  source 1..80: mol_type = other DNA
gctcaccaccacactcagaactacacctgtttatcagaagtaaattaggcaatattgagtttttaaaagcccaagctata

SEQ ID NO: 100416 - DNA, 80 bp, synthetic construct; identical to SEQ ID NO: 19113
  source 1..80: mol_type = other DNA

SEQ ID NO: 100417 - DNA, 80 bp, synthetic construct
  source 1..80: mol_type = other DNA
tatggtttctaagatcgatctggaagctgacttccttcgaacaaaatgagaacaaatcttttacagcttcgactggatat

SEQ ID NO: 100418 - DNA, 80 bp, synthetic construct
  source 1..80: mol_type = other DNA
atctgagttgctggtgtggctctgggtcttttttcaagccctagcttaccgaaagaacaaatgaaaactattcacagacc

SEQ ID NO: 100419 - DNA, 80 bp, synthetic construct
  source 1..80: mol_type = other DNA
attgatgctccatcgtgacaccaaatggtgctttgacatttttttctactggtaatcaacaagacctgatcaaaagatga

SEQ ID NO: 100420 - DNA, 80 bp, synthetic construct; identical to SEQ ID NO: 19114
  source 1..80: mol_type = other DNA

SEQ ID NO: 100421 - DNA, 80 bp, synthetic construct
  source 1..80: mol_type = other DNA
acaaagtgattcaagccaagtccatacgcatatgtgtaaggtttcccacaatacttctggtaattgatttgaggaaactc

SEQ ID NO: 100422 - DNA, 80 bp, synthetic construct
  source 1..80: mol_type = other DNA
aattgcagtggcagttgtattggggagcgtgactaaattcttgcctgtgtcagcctaggagagaagataacagaaacctc

SEQ ID NO: 100423 - DNA, 80 bp, synthetic construct
  source 1..80: mol_type = other DNA
tgtcagtcactggctatgtatcactgggaaagtcacataacctcttaggccatcaattttctcttcagtaaaatgagacc

SEQ ID NO: 100424 - DNA, 80 bp, synthetic construct
  source 1..80: mol_type = other DNA
gcctgagggatgaaagaatgtatatttcgttcacacgtagaatatgttttgattttgcttgaaaaaaaaaatccttacag

SEQ ID NO: 100425 - DNA, 80 bp, synthetic construct; identical to SEQ ID NO: 19115
  source 1..80: mol_type = other DNA

SEQ ID NO: 100426 - DNA, 80 bp, synthetic construct
  source 1..80: mol_type = other DNA
aaaactcttagaagatgagagaattagcaatgcagatatctggggaagagtgttcacgctaagagaacaaattgtgcaaa

SEQ ID NO: 100427 - DNA, 80 bp, synthetic construct
  source 1..80: mol_type = other DNA
agccattggagggttttcagcacaggagtgagatgctatgatttatttttagggtagccttgttagtagggaggatccaa

SEQ ID NO: 100428 - DNA, 80 bp, synthetic construct; identical to SEQ ID NO: 19116
  source 1..80: mol_type = other DNA

SEQ ID NO: 100429 - DNA, 80 bp, synthetic construct
  source 1..80: mol_type = other DNA
catgaatatttaacaacgagtgagtgtataaatggaagataggggaaccaaggccctccaacaagacgaggaatgagaag

SEQ ID NO: 100430 - DNA, 80 bp, synthetic construct
  source 1..80: mol_type = other DNA
atggataattcagtatatgagtacagatgctggtgggtgggtagatgtgctggcaagtctatggttcctttctgatttct

SEQ ID NO: 100431 - DNA, 80 bp, synthetic construct
  source 1..80: mol_type = other DNA
gtggtcatgcatctaaaatggaaccaattaacatgattgtgtgttgtctgcacttagttcagcctcagaggtataagcat

SEQ ID NO: 100432 - DNA, 80 bp, synthetic construct; identical to SEQ ID NO: 19117
  source 1..80: mol_type = other DNA

SEQ ID NO: 100433 - DNA, 80 bp, synthetic construct
  source 1..80: mol_type = other DNA
atgagatgaaaacttagggaattttaagggtgaatagagggaacaatgatctgaaagcagcaaagaagaaggacctctac

SEQ ID NO: 100434 - DNA, 80 bp, synthetic construct
  source 1..80: mol_type = other DNA
agattttttctggtggtggactaagaattaaaagtaaatagtggaagattttcagaatagggaaaggatgggaggtggga

SEQ ID NO: 100435 - DNA, 80 bp, synthetic construct
  source 1..80: mol_type = other DNA
atgtggtttcaagttgaattttttactttgttctattttgcttattttcattgttaaattagatttcctgtttgtttgtt

SEQ ID NO: 100436 - DNA, 80 bp, synthetic construct; identical to SEQ ID NO: 19118
  source 1..80: mol_type = other DNA

SEQ ID NO: 100437 - DNA, 80 bp, synthetic construct
  source 1..80: mol_type = other DNA
gtgacgttactctctcttagtaggaactagggctttctggtggctcttgtttctttttctggcttctcttgtttcttttt

SEQ ID NO: 100438 - DNA, 80 bp, synthetic construct
  source 1..80: mol_type = other DNA
tttccccccctgcctgcagtcttatctctctattcttacatatttcattatcatttcaataccattaattatgggctttt

SEQ ID NO: 100439 - DNA, 80 bp, synthetic construct
  source 1..80: mol_type = other DNA
ttataatagccaattctctctgcgtatctccctctccacctatctgtctttcctcaaactgttctttctgtcttcagttg

SEQ ID NO: 100440 - DNA, 80 bp, synthetic construct; identical to SEQ ID NO: 19119
  source 1..80: mol_type = other DNA

SEQ ID NO: 100441 - DNA, 80 bp, synthetic construct
  source 1..80: mol_type = other DNA
cttttttctttattttgcaatgtgaatatttaagttaagtgatcctcttttatttccttaaagatgattgtgatttttac

SEQ ID NO: 100442 - DNA, 80 bp, synthetic construct
  source 1..80: mol_type = other DNA
ctccagatccatgtacagcagctgcctatggaatgctttgctaagattgctagtgggtactttcaaattacatctataaa

SEQ ID NO: 100443 - DNA, 80 bp, synthetic construct
  source 1..80: mol_type = other DNA
gggttcaagcgattctcttgcttcagcctcctgagtagctgggattacaggcatgcaccaccatgcccagctaattttgt

SEQ ID NO: 100444 - DNA, 80 bp, synthetic construct; identical to SEQ ID NO: 19120
  source 1..80: mol_type = other DNA

SEQ ID NO: 100445 - DNA, 80 bp, synthetic construct
  source 1..80: mol_type = other DNA
actctccactttccagtctgtcttccatgatgctgccagagtaactttctgaatcacagatctaatcatgtcctaaaata

SEQ ID NO: 100446 - DNA, 80 bp, synthetic construct
  source 1..80: mol_type = other DNA
actcagcaactacttcatatttatagatgaaatcttgcatttttaactcctccttgcctttatagacgcccctttgcctg

SEQ ID NO: 100447 - DNA, 80 bp, synthetic construct
  source 1..80: mol_type = other DNA
aataaccccttttgtgcaaccagggagcaaatagatataaaagaaagcatatattcacatacctatatgtgagaattata

SEQ ID NO: 100448 - DNA, 80 bp, synthetic construct
  source 1..80: mol_type = other DNA
agaagatttatagaaaaccaaaataatgaactggtttccctacaagagtactttttgatgcttcatctctccagaacttc

SEQ ID NO: 100449 - DNA, 80 bp, synthetic construct; identical to SEQ ID NO: 19121
  source 1..80: mol_type = other DNA

SEQ ID NO: 100450 - DNA, 80 bp, synthetic construct
  source 1..80: mol_type = other DNA
cttcaggttggggagcctttctggcattttttttcacctcttcccagttctcacgtaaattggctaaatataagtaatta

SEQ ID NO: 100451 - DNA, 80 bp, synthetic construct
  source 1..80: mol_type = other DNA
ttcctcccgcccacacaggatgaaaataaagcaacctgcttaatggatttgtttaagtaacagcagccttgagatacttt

SEQ ID NO: 100452 - DNA, 80 bp, synthetic construct
  source 1..80: mol_type = other DNA
tcacctctcaggtcacagaatcttttgttttcaggtggggttcatggacccgattagttttcaatcattaatcatagttt

SEQ ID NO: 100453 - DNA, 80 bp, synthetic construct; identical to SEQ ID NO: 19122
  source 1..80: mol_type = other DNA

SEQ ID NO: 100454 - DNA, 80 bp, synthetic construct
  source 1..80: mol_type = other DNA
caaacttgacaaatatatctaagacttacccccatggtttcattggactcaaaacaatccatgtagttggctccccaaag

SEQ ID NO: 100455 - DNA, 80 bp, synthetic construct
  source 1..80: mol_type = other DNA
atgaaagggctgattctcaagccacagacaaatttgtatatatgtggtatgctcagttacaagaatcaacagtgcctaca

SEQ ID NO: 100456 - DNA, 80 bp, synthetic construct
  source 1..80: mol_type = other DNA
aatcggtcactgcaggggaattgtacaacgatctctgacttgcttattggatcttccttgtctgaaataaagtggtttta

SEQ ID NO: 100457 - DNA, 80 bp, synthetic construct; identical to SEQ ID NO: 19123
  source 1..80: mol_type = other DNA

SEQ ID NO: 100458 - DNA, 80 bp, synthetic construct
  source 1..80: mol_type = other DNA
ctcagaatggtcaaaatgccttttgcaacatcttaagatgcccaaaggatatagtttagatgggtttgtgtcaatagccc

SEQ ID NO: 100459 - DNA, 80 bp, synthetic construct
  source 1..80: mol_type = other DNA
aaggctcaagatttgtatttctaacagtttcctaggtgatggtcttggtccaaggactacactttgagaactgtactaaa

SEQ ID NO: 100460 - DNA, 80 bp, synthetic construct
  source 1..80: mol_type = other DNA
tgtagttttgggaattaagcgcaacatatttagtacactctcatatatgtatgtatgctattatgcacacatacatgctt

SEQ ID NO: 100461 - DNA, 80 bp, synthetic construct; identical to SEQ ID NO: 19124
  source 1..80: mol_type = other DNA

SEQ ID NO: 100462 - DNA, 80 bp, synthetic construct
  source 1..80: mol_type = other DNA
tattgtaaacggttccatcattttcaatgtgggggtgagcagtggccccattgacagagacatagttgcaaagatcaacc

SEQ ID NO: 100463 - DNA, 80 bp, synthetic construct
  source 1..80: mol_type = other DNA
accttcatgcagaacataatgccccctcatgtgtctgaatctggagttacctgtgacatctctttatttgatgtatacca

SEQ ID NO: 100464 - DNA, 80 bp, synthetic construct
  source 1..80: mol_type = other DNA
tcgtatggtactatgtaaataccaactatatgtcttgcacatggtactgtatgagtttggaactgaaagggacttcaagc

SEQ ID NO: 100465 - DNA, 80 bp, synthetic construct
  source 1..80: mol_type = other DNA
gcagaaggataaattggggttccagagagatcaagtgtcttgtttaaggataaagagctagataaatcagcactagattt

SEQ ID NO: 100466 - DNA, 80 bp, synthetic construct; identical to SEQ ID NO: 19125
  source 1..80: mol_type = other DNA

SEQ ID NO: 100467 - DNA, 80 bp, synthetic construct
  source 1..80: mol_type = other DNA
agttctattggacagccctgcattagaccaataagccggtgtaaagcactgtgagtgtgcaatggcatcgtagagaagcg

SEQ ID NO: 100468 - DNA, 80 bp, synthetic construct
  source 1..80: mol_type = other DNA
cagtgtattccagggagtgggaatcctaatgtaaatgcatagacttgtgaaataatgtgtgctgtttggccattactagt

SEQ ID NO: 100469 - DNA, 80 bp, synthetic construct; identical to SEQ ID NO: 19126
  source 1..80: mol_type = other DNA

SEQ ID NO: 100470 - DNA, 80 bp, synthetic construct
  source 1..80: mol_type = other DNA
atgatttagaaactcagcttttgttcttctctaaaggagctacacacacacttgtatatggttacacacacacaacataa

SEQ ID NO: 100471 - DNA, 80 bp, synthetic construct
  source 1..80: mol_type = other DNA
ttatttttaccagtactgcatttgtggttctggcttttagtttcacctcttggtctcccagctatactgtatctcttttg

SEQ ID NO: 100472 - DNA, 80 bp, synthetic construct
  source 1..80: mol_type = other DNA
agcttttaatttcatcctaccctgtgtctcaatattccccttgacattaactactctaggcaactagttctcaactggga

SEQ ID NO: 100473 - DNA, 80 bp, synthetic construct
  source 1..80: mol_type = other DNA
cctgcctaatgtcatactaatacctccactgagaaatgctgcaagtctagtccaaggagattattctccagttttcatga

SEQ ID NO: 100474 - DNA, 80 bp, synthetic construct; identical to SEQ ID NO: 19127
  source 1..80: mol_type = other DNA

SEQ ID NO: 100475 - DNA, 80 bp, synthetic construct
  source 1..80: mol_type = other DNA
gtatctaaggactgctgcattgagattccctaagttctccataaaatttgtcacttccaaatattgctgaaattttgttc

SEQ ID NO: 100476 - DNA, 80 bp, synthetic construct
  source 1..80: mol_type = other DNA
gcttataaaagctatgaaaggcagggaccatgttaccctactcattgatctatcccttgcatctagcataaattctgaat

SEQ ID NO: 100477 - DNA, 80 bp, synthetic construct
  source 1..80: mol_type = other DNA
ggatttgaaacttaatgtggctctcatgttcttttcaccaaattacaccaattgcaggaaagcatcatagacagaggcaa

SEQ ID NO: 100478 - DNA, 80 bp, synthetic construct; identical to SEQ ID NO: 19128
  source 1..80: mol_type = other DNA

SEQ ID NO: 100479 - DNA, 80 bp, synthetic construct
  source 1..80: mol_type = other DNA
taacctggaaaatatattcttgcagggatctgggaaagcacaggtgccaaattctgttatgacgatccttttctcagtca

SEQ ID NO: 100480 - DNA, 80 bp, synthetic construct
  source 1..80: mol_type = other DNA
agggttttattagctcactttcttggggtgaccaagcagggcagacacaatgtcccttgagtttacgtttttatctttta

SEQ ID NO: 100481 - DNA, 80 bp, synthetic construct; identical to SEQ ID NO: 19129
  source 1..80: mol_type = other DNA

SEQ ID NO: 100482 - DNA, 80 bp, synthetic construct
  source 1..80: mol_type = other DNA
gctaaaccatatcttagagtagacagcatactttgcccaggatttctgatatggagagccagttaaaatctgattttgta

SEQ ID NO: 100483 - DNA, 80 bp, synthetic construct
  source 1..80: mol_type = other DNA
taccaccacgcccggctaatttttctgtatttttagtagagacggggtttcaccatgctagccaggctggtctcaaactc

SEQ ID NO: 100484 - DNA, 80 bp, synthetic construct
  source 1..80: mol_type = other DNA
tcttatggctacatttctgcttgacatcatccgtttctcttctattatcatgcaagttgtcctgcttcaagtcccctttc

SEQ ID NO: 100485 - DNA, 80 bp, synthetic construct
  source 1..80: mol_type = other DNA
ataatctcttgttttcagaaaacttctctttctggtagcactatgacatgtttcatccttcactactttgtggcagcccc

SEQ ID NO: 100486 - DNA, 80 bp, synthetic construct; identical to SEQ ID NO: 19130
  source 1..80: mol_type = other DNA

SEQ ID NO: 100487 - DNA, 80 bp, synthetic construct
  source 1..80: mol_type = other DNA
actttgaggaggaggagtggcatggagtgctgctttaccttctgtggtatgtgacatgtccttctttaaagtcaaacttg

SEQ ID NO: 100488 - DNA, 80 bp, synthetic construct
  source 1..80: mol_type = other DNA
gcttgtccttggtaaggcagagtatatcagcagcctgattgggcagcttcttcctcatagagctggcagtgattttcatt

SEQ ID NO: 100489 - DNA, 80 bp, synthetic construct; identical to SEQ ID NO: 19131
  source 1..80: mol_type = other DNA

SEQ ID NO: 100490 - DNA, 80 bp, synthetic construct
  source 1..80: mol_type = other DNA
actgcttggatgaaagtcaatctgctgtagcagaaagtccacagggttggatgtcagggacatgacttctggtttaggat

SEQ ID NO: 100491 - DNA, 80 bp, synthetic construct
  source 1..80: mol_type = other DNA
gaggcctaggcgggcggatcacgaggtcaggagatcgagaccacggcgaaaccccgtctctactaaaaatacgaaaaatt

SEQ ID NO: 100492 - DNA, 80 bp, synthetic construct
  source 1..80: mol_type = other DNA
aaacaaaaaaaaccccaggtaggtttatcctttgagaagggcagtgattgacagtgcttccttgattcctaccagtgaag

SEQ ID NO: 100493 - DNA, 80 bp, synthetic construct; identical to SEQ ID NO: 19132
  source 1..80: mol_type = other DNA

SEQ ID NO: 100494 - DNA, 80 bp, synthetic construct
  source 1..80: mol_type = other DNA
gctaggcactgacagtttgaagatgacaaaggtgtaatcctgatccttagggaattccaattaggtagcgtttttctgca

SEQ ID NO: 100495 - DNA, 80 bp, synthetic construct
  source 1..80: mol_type = other DNA
acagtttcaaacagtttcttgtaaccaccagcaggatgctcaaccctgaaatggtggaagaataaggaagaagcccatgt

SEQ ID NO: 100496 - DNA, 80 bp, synthetic construct; identical to SEQ ID NO: 19133
  source 1..80: mol_type = other DNA

SEQ ID NO: 100497 - DNA, 80 bp, synthetic construct
  source 1..80: mol_type = other DNA
tatctccttcctaggggttgagagatgacagctttttgggtcaggtacctcatctttcattattcactcatattatacca

SEQ ID NO: 100498 - DNA, 80 bp, synthetic construct
  source 1..80: mol_type = other DNA
atctctgaccagactcaattataataattaccttttactaaacaattactatgtcctacataccataaaaagaactttgc

SEQ ID NO: 100499 - DNA, 80 bp, synthetic construct
  source 1..80: mol_type = other DNA
aagtctgtctgaaatccccatactcaagactgcttccaaaccccgggctaagtcacacaaaccccccataatttggacct

SEQ ID NO: 100500 - DNA, 80 bp, synthetic construct; identical to SEQ ID NO: 19134
  source 1..80: mol_type = other DNA

SEQ ID NO: 100501 - DNA, 80 bp, synthetic construct
  source 1..80: mol_type = other DNA
cccgcagccccctccctctgttccccgacctcagaccctgggcttccgacctcgacatcatgggtgacgcagaaggcgaa

SEQ ID NO: 100502 - DNA, 80 bp, synthetic construct; identical to SEQ ID NO: 19135
  source 1..80: mol_type = other DNA

SEQ ID NO: 100503 - DNA, 80 bp, synthetic construct
  source 1..80: mol_type = other DNA
taattctctttttgctccagactctgacctatttaaattcttgagaagggagctggagtgagctggaggacacagctgct

SEQ ID NO: 100504 - DNA, 80 bp, synthetic construct
  source 1..80: mol_type = other DNA
ctccatgtctctgtctcttcctccatctcagtctccctgtctctgtttcttagcttaaggccctctgattttcgctgtct

SEQ ID NO: 100505 - DNA, 80 bp, synthetic construct
  source 1..80: mol_type = other DNA
catcttcccctcccagtggctccgcagggtgtggggtcgtaaatatgggaggggacgtcctctcctctgggctaggtctg

SEQ ID NO: 100506 - DNA, 80 bp, synthetic construct
  source 1..80: mol_type = other DNA
aggaacaaacagctggggctggtagtgaaggatggggacagctgggaaggggcctagcttcagccgagactctctcccca

SEQ ID NO: 100507 - DNA, 80 bp, synthetic construct; identical to SEQ ID NO: 19136
  source 1..80: mol_type = other DNA

SEQ ID NO: 100508 - DNA, 80 bp, synthetic construct
  source 1..80: mol_type = other DNA
tggaatctctccaccccagactgggtcagtttttctgattgttactgaggtcgtggtggatttctcaaaactttctggag

SEQ ID NO: 100509 - DNA, 80 bp, synthetic construct
  source 1..80: mol_type = other DNA
aaaatacaaaaaaatattagccaggcgtggtggtgcatgcctgtaatcttagctactcgggaggctgaagtgggaggatt

SEQ ID NO: 100510 - DNA, 80 bp, synthetic construct; identical to SEQ ID NO: 19137
  source 1..80: mol_type = other DNA

SEQ ID NO: 100511 - DNA, 80 bp, synthetic construct
  source 1..80: mol_type = other DNA
ggcgcgtgccaccaagccgagctaattttttgtatttttagtagagatggggtttcaccatgttggccaggctggtcttg

SEQ ID NO: 100512 - DNA, 80 bp, synthetic construct
  source 1..80: mol_type = other DNA
tccacttcccaggctccagtgatcctcccacctcagcctcctgagtagctgggactacacgtgcatagcaccatgcttgg

SEQ ID NO: 100513 - DNA, 80 bp, synthetic construct
  source 1..80: mol_type = other DNA
tatttttgacattcatccatgtagcatgtattgagtttgttgctttttgttgccgaatattattccattgtgcgactata

SEQ ID NO: 100514 - DNA, 80 bp, synthetic construct; identical to SEQ ID NO: 19138
  source 1..80: mol_type = other DNA

SEQ ID NO: 100515 - DNA, 80 bp, synthetic construct
  source 1..80: mol_type = other DNA
ctcttgatggtggtaggggactgggccagcagggaagctatatttttaaccagaaccctccgcttccttcattttttttt

SEQ ID NO: 100516 - DNA, 80 bp, synthetic construct
  source 1..80: mol_type = other DNA
cggctaatttttgtacttttaatagagatggggtttcaccatgttggccaggctggtctcgaactcctgacctcaagtga

SEQ ID NO: 100517 - DNA, 80 bp, synthetic construct
  source 1..80: mol_type = other DNA
tcgctgctttgcactctggctttgccatttgcctgcttcctaatttggggcaagtgatttttatttttctctctgagcct

SEQ ID NO: 100518 - DNA, 80 bp, synthetic construct
  source 1..80: mol_type = other DNA
caaaaaatgttaaactttagctgggcgtggcagtgtgcacctgtagtaccagctacttgggaggctgaggtgggaagatc

SEQ ID NO: 100519 - DNA, 80 bp, synthetic construct; identical to SEQ ID NO: 19139
  source 1..80: mol_type = other DNA

SEQ ID NO: 100520 - DNA, 80 bp, synthetic construct
  source 1..80: mol_type = other DNA
ccctcctcttaccccagagatgagcaggcctgattccttcttgttatttggacaaggctcaactcaaatgtcacctcctt

SEQ ID NO: 100521 - DNA, 80 bp, synthetic construct
  source 1..80: mol_type = other DNA
ttcacctgtttattccctgtctccaccatgaggatttaagctccctgagggccgtgattttttttttttccttttgagac

SEQ ID NO: 100522 - DNA, 80 bp, synthetic construct; identical to SEQ ID NO: 19140
  source 1..80: mol_type = other DNA

SEQ ID NO: 100523 - DNA, 80 bp, synthetic construct
  source 1..80: mol_type = other DNA
ggtttcaccatgttagccaggatggtctcgatcctctgaccttgtgaccctcccaccttgtcctccgaaagtgctgggat

SEQ ID NO: 100524 - DNA, 80 bp, synthetic construct; identical to SEQ ID NO: 19141
  source 1..80: mol_type = other DNA

SEQ ID NO: 100525 - DNA, 80 bp, synthetic construct
  source 1..80: mol_type = other DNA
ctgggataacaggcatacgccaccatgcccgggtaattttgtatttttagtagagacagggtttctccatgttgttcagg

SEQ ID NO: 100526 - DNA, 80 bp, synthetic construct
  source 1..80: mol_type = other DNA
atctcagctccctgcaacctctgcctcctgggttcaggcgattctcctggctcagactcccgagtagctggaactacagg

SEQ ID NO: 100527 - DNA, 80 bp, synthetic construct; identical to SEQ ID NO: 19142
  source 1..80: mol_type = other DNA

SEQ ID NO: 100528 - DNA, 80 bp, synthetic construct
  source 1..80: mol_type = other DNA
ggtccatctgtgtcccactttgagcttcagtttccccattttaaaatggggataagccaggcacaacagttcatgcctgt

SEQ ID NO: 100529 - DNA, 80 bp, synthetic construct
  source 1..80: mol_type = other DNA
gagttcgagagcagcctggccaacatggcgaaaccttgtctctactaaaaatataaaaattagccaggtgtggtggtgca

SEQ ID NO: 100530 - DNA, 80 bp, synthetic construct; identical to SEQ ID NO: 19143
  source 1..80: mol_type = other DNA

SEQ ID NO: 100531 - DNA, 80 bp, synthetic construct
  source 1..80: mol_type = other DNA
ctagcaacgcgcaggtctgtgcaggagggagaggggcctggggacaggggcgtctgaaggggcagagaatcttgggtcca

SEQ ID NO: 100532 - DNA, 80 bp, synthetic construct
  source 1..80: mol_type = other DNA
aagtgtggtaggccagggcgggggctgctgatccagaacgttccttggcaggtggctgagtgggcagaaagcctcgggtt

SEQ ID NO: 100533 - DNA, 80 bp, synthetic construct
  source 1..80: mol_type = other DNA
tatttttaaaagtttttcaggtaacaagactgaattattatggggtgttttagggggaaggaggccctcggcgggggcgg

SEQ ID NO: 100534 - DNA, 80 bp, synthetic construct; identical to SEQ ID NO: 19144
  source 1..80: mol_type = other DNA

SEQ ID NO: 100535 - DNA, 80 bp, synthetic construct
  source 1..80: mol_type = other DNA
gagactgaggagggagtataaggttgagcgccctcctgtgtctgtgaagcagaggtcagaggtgtttgaaggaaaaggca

SEQ ID NO: 100536 - DNA, 80 bp, synthetic construct
  source 1..80: mol_type = other DNA
tgagattaggtggaacacgggttagtggggagggttagggttagggaagtttctatggagtctgggtgggtctgaggtgt

SEQ ID NO: 100537 - DNA, 80 bp, synthetic construct
  source 1..80: mol_type = other DNA
atgttgctggggtgggggggtcttctgacccctcacttacatccccctcccaccccagaatgtgccccccgatctggcca

SEQ ID NO: 100538 - DNA, 80 bp, synthetic construct
  source 1..80: mol_type = other DNA
aaggatgggtgagaggacccgggggtcgcttaccatctgctcttcttcctctctctgccctgccccccacaggccctcaa

SEQ ID NO: 100539 - DNA, 80 bp, synthetic construct; identical to SEQ ID NO: 19145
  source 1..80: mol_type = other DNA

SEQ ID NO: 100540 - DNA, 80 bp, synthetic construct
  source 1..80: mol_type = other DNA
tgatgggaggcatggtgacatcgagcagtcagatgtctgccccaaggtccgggttggggaccttgtgctggggaggggcg

SEQ ID NO: 100541 - DNA, 80 bp, synthetic construct
  source 1..80: mol_type = other DNA
tagaagacgggttcattctcctgagtgatttccagccaaggtgaaggcagcagagaggacagagtgggctttggggaata

SEQ ID NO: 100542 - DNA, 80 bp, synthetic construct; identical to SEQ ID NO: 19146
  source 1..80: mol_type = other DNA

SEQ ID NO: 100543 - DNA, 80 bp, synthetic construct
  source 1..80: mol_type = other DNA
gaggctgacctccctctacaaccctagtatctgagctgcctcaccacctcccgctccatgactgacaagctggccttcga

SEQ ID NO: 100544 - DNA, 80 bp, synthetic construct
  source 1..80: mol_type = other DNA
tgcggtacagtccagacagggagacagacacacgttggggaccactaggcagagagtctgaagtcaggaacggggaactg

SEQ ID NO: 100545 - DNA, 80 bp, synthetic construct
  source 1..80: mol_type = other DNA
gcacccagcctccaagcagaggtctgaaggagaaaaggtccgcgttggggatgacatcatccttgtcagtgtctcctccg

SEQ ID NO: 100546 - DNA, 80 bp, synthetic construct
  source 1..80: mol_type = other DNA
gatttctgacctcccattgcccgacttgatcatttcctgatctgtgatctctgatgactctgtctcccatctgccggttt

SEQ ID NO: 100547 - DNA, 80 bp, synthetic construct
  source 1..80: mol_type = other DNA
accccatctgctcccgctgcgaagagggtgagggccccagacctccccctaaatggagatccccccaaaacagaccctta

SEQ ID NO: 100548 - DNA, 80 bp, synthetic construct; identical to SEQ ID NO: 19147
  source 1..80: mol_type = other DNA

SEQ ID NO: 100549 - DNA, 80 bp, synthetic construct
  source 1..80: mol_type = other DNA
tattaaaaatgcaaaattatctgagtgtggtggcatgtgcctgtaatcccacctactcaggagggtgaggcaggagaatt

SEQ ID NO: 100550 - DNA, 80 bp, synthetic construct
  source 1..80: mol_type = other DNA
aaccaagactccaatcttcagccctccaacctcagacttccaaacttcaatttcaaatcccaaaaaccaaaatccaccaa

SEQ ID NO: 100551 - DNA, 80 bp, synthetic construct; identical to SEQ ID NO: 19148
  source 1..80: mol_type = other DNA

SEQ ID NO: 100552 - DNA, 80 bp, synthetic construct
  source 1..80: mol_type = other DNA
ttgagatcaggagttcgagaccagcctgggccaacatggcaaaaccccatctctactaaaaatacaaaaattggctgggc

SEQ ID NO: 100553 - DNA, 80 bp, synthetic construct
  source 1..80: mol_type = other DNA
acaaaaaaaccctcaaaattcaggccctaactccagaacccagcctcagacccaaccatcacccttctaaacccagaggc

SEQ ID NO: 100554 - DNA, 80 bp, synthetic construct
  source 1..80: mol_type = other DNA
cattagacctccacctttcaccacacacacactctgaccccaacctcaaaagtccaaactcagaaccttaaatgacagac

SEQ ID NO: 100555 - DNA, 80 bp, synthetic construct
  source 1..80: mol_type = other DNA
ggttcccccaggggaggagcagggcccctgacttcatcttggctcctggtcttcctggggctccagcctcccattgacca

SEQ ID NO: 100556 - DNA, 80 bp, synthetic construct; identical to SEQ ID NO: 19149
  source 1..80: mol_type = other DNA

SEQ ID NO: 100557 - DNA, 80 bp, synthetic construct
  source 1..80: mol_type = other DNA
agatctgataaagagactgaagggtctcgagggaaaatcagagcagcctgagagagagatgaaaatctcggccaggcgtg

SEQ ID NO: 100558 - DNA, 80 bp, synthetic construct; identical to SEQ ID NO: 19150
  source 1..80: mol_type = other DNA

SEQ ID NO: 100559 - DNA, 80 bp, synthetic construct
  source 1..80: mol_type = other DNA
aggagttccagaccaggctggctaacgtggtgaaaccctgtctctactaaagatacaaaaatttgcctggtgtggtggtg

SEQ ID NO: 100560 - DNA, 80 bp, synthetic construct
  source 1..80: mol_type = other DNA
gtggctcacacctgtaatcccagcactttgggaagccgaggcaggtggatcatttgaggtcaggagttcaagaccagcct

SEQ ID NO: 100561 - DNA, 80 bp, synthetic construct
  source 1..80: mol_type = other DNA
cagcctgggcaacagagtgaggccctgccttaaaaaaaaaaaaaaaaacaagcaaaacaaaaataaaaaatgaagtctct

SEQ ID NO: 100562 - DNA, 80 bp, synthetic construct
  source 1..80: mol_type = other DNA
ttcctaagggaggactaggggtcctaattaagatggtttgaggaacactggaagagggttcggggcttgaggaggtttgg

SEQ ID NO: 100563 - DNA, 80 bp, synthetic construct; identical to SEQ ID NO: 19151
  source 1..80: mol_type = other DNA

SEQ ID NO: 100564 - DNA, 80 bp, synthetic construct
  source 1..80: mol_type = other DNA
ttctgcttccgcatctccaaggtcagtggggtttgtggcgccctccctcacctgaagcccccagtcccagcccagcctgc

SEQ ID NO: 100565 - DNA, 80 bp, synthetic construct
  source 1..80: mol_type = other DNA
tgcagcatgtggcctcaggactgtggctcacctatgctgctccagaccccaaggccctgcggctcggcgtgctcaagaag

SEQ ID NO: 100566 - DNA, 80 bp, synthetic construct
  source 1..80: mol_type = other DNA
accttgggagtttgaggatgagactgagagaaagatagagactgggagagaaactgagactgagagaaacagcaaaaaag

SEQ ID NO: 100567 - DNA, 80 bp, synthetic construct; identical to SEQ ID NO: 19152
  source 1..80: mol_type = other DNA

SEQ ID NO: 100568 - DNA, 80 bp, synthetic construct
  source 1..80: mol_type = other DNA
ctctactaaaaatacaaaaattagccaggcgtggtggcagctgcctgtaatcccagctactcaggaggctgaggcaggag

SEQ ID NO: 100569 - DNA, 80 bp, synthetic construct
  source 1..80: mol_type = other DNA
ctgagaataactttcaacaaacaattactgagtacccgcgttgttctggttgtgtgtgcagaaaatagatgagctgtagc

SEQ ID NO: 100570 - DNA, 80 bp, synthetic construct
  source 1..80: mol_type = other DNA
aaactgcctttagtgaagtacatagttttacaattaaggagtgggaaaactatttttggcagcaggaacagcatgtgcaa

SEQ ID NO: 100571 - DNA, 80 bp, synthetic construct; identical to SEQ ID NO: 19153
  source 1..80: mol_type = other DNA

SEQ ID NO: 100572 - DNA, 80 bp, synthetic construct
  source 1..80: mol_type = other DNA
ctgggaacagactacggtcaggggacagagccagagcagggagaccagagaagagactgccatgatgttacaaatgggag

SEQ ID NO: 100573 - DNA, 80 bp, synthetic construct
  source 1..80: mol_type = other DNA
aactggaaggatggaagtgctgaaacagcctcattgtctggagtatcacccaaggtttgtggtctcacagccacagagaa

SEQ ID NO: 100574 - DNA, 80 bp, synthetic construct
  source 1..80: mol_type = other DNA
ggtatctgatttacctagggtgcaaaagactggttggaccagttgtgccatttgcatagggcacaaatttctggctgcct

SEQ ID NO: 100575 - DNA, 80 bp, synthetic construct; identical to SEQ ID NO: 19154
  source 1..80: mol_type = other DNA

SEQ ID NO: 100576 - DNA, 80 bp, synthetic construct
  source 1..80: mol_type = other DNA
ctagaacagagccacttactacagccttgctgaatggacaagtaggaatccttggggaggcactcgtttgcaaaaacagg

SEQ ID NO: 100577 - DNA, 80 bp, synthetic construct
  source 1..80: mol_type = other DNA
tctcacctcgtggaaaggtggtctggcattctatctgggacaggttcaatttgggggttagagctttctggtcgggggga

SEQ ID NO: 100578 - DNA, 80 bp, synthetic construct
  source 1..80: mol_type = other DNA
agagaggagagagagaatcaaagacacagaggagacagatgacgggggacagaaaaatgaggaggaatttgcagtgagat

SEQ ID NO: 100579 - DNA, 80 bp, synthetic construct; identical to SEQ ID NO: 19155
  source 1..80: mol_type = other DNA

SEQ ID NO: 100580 - DNA, 80 bp, synthetic construct
  source 1..80: mol_type = other DNA
aagcgcagtggctcacacctgtaatcccaagactttgggagggcaaggcatgaggatcgcttgggcccaggagcttgaga

SEQ ID NO: 100581 - DNA, 80 bp, synthetic construct
  source 1..80: mol_type = other DNA
cagatcgcttgagcccaggagttcgagaccagcctgagcaatatagtgaaaccctgtctctataaaaaaaataacaaaat

SEQ ID NO: 100582 - DNA, 80 bp, synthetic construct
  source 1..80: mol_type = other DNA
cacatgacccctaacctctaaactcctgacctctgtacacttgacccctaatctgaccttgacaaccatgatcacattcc

SEQ ID NO: 100583 - DNA, 80 bp, synthetic construct; identical to SEQ ID NO: 19156
  source 1..80: mol_type = other DNA

SEQ ID NO: 100584 - DNA, 80 bp, synthetic construct
  source 1..80: mol_type = other DNA
cgttatcctgagcctgcaggacctcatcatctacttcgagcctccctccgaggacttgcagcacgaggagaagcagagca

SEQ ID NO: 100585 - DNA, 80 bp, synthetic construct
  source 1..80: mol_type = other DNA
gagaagggggcggggcaggagaaggagccggacaggaaccccagccagtgagaacacgatggggcggggccttgggaggg

SEQ ID NO: 100586 - DNA, 80 bp, synthetic construct
  source 1..80: mol_type = other DNA
gtggggccagaggtcagaggtagggctgccgactcagcgggcggggtctgctggcgcggggtctgtggggtgggcggaca

SEQ ID NO: 100587 - DNA, 80 bp, synthetic construct; identical to SEQ ID NO: 19157
  source 1..80: mol_type = other DNA

SEQ ID NO: 100588 - DNA, 80 bp, synthetic construct
  source 1..80: mol_type = other DNA
acgagggccaggccttggtgaggactttggctttgggagccacaggaggttttggtcctctacagtcacagctagttagt

SEQ ID NO: 100589 - DNA, 80 bp, synthetic construct
  source 1..80: mol_type = other DNA
cagtggtgtgatcttggctcactgcaacctccacctcccaggttcaaatgattctcctgcctcctcagcctcccaagtag

SEQ ID NO: 100590 - DNA, 80 bp, synthetic construct
  source 1..80: mol_type = other DNA
cacccagacagttttgtcctttttgttgatttcactgtttataatgtctcccaagtgtagtgctgaagtgctgtctagct

SEQ ID NO: 100591 - DNA, 80 bp, synthetic construct; identical to SEQ ID NO: 19158
  source 1..80: mol_type = other DNA

SEQ ID NO: 100592 - DNA, 80 bp, synthetic construct
  source 1..80: mol_type = other DNA
ataaagtgagaaaaatctttctgatggttggtgtggagaatgaactgggcctctccagttggtgggagtggggttccagt

SEQ ID NO: 100593 - DNA, 80 bp, synthetic construct
  source 1..80: mol_type = other DNA
cctggtgttaataaggactgaattatcatagactgaatctcatattggggatagagtcagagaggacaagaatagatatg

SEQ ID NO: 100594 - DNA, 80 bp, synthetic construct
  source 1..80: mol_type = other DNA
tgcctcttattttcctcatcctaggggatgctctccatggtcctgaattgcatagaccgcctaaatgtctacaccactgc

SEQ ID NO: 100595 - DNA, 80 bp, synthetic construct
  source 1..80: mol_type = other DNA
tccccagtcctattggatctgacacctcttcccccctcagcttctctaatccgtggcaatcgtagcaactgtgccctctt

SEQ ID NO: 100596 - DNA, 80 bp, synthetic construct; identical to SEQ ID NO: 19159
  source 1..80: mol_type = other DNA

SEQ ID NO: 100597 - DNA, 80 bp, synthetic construct
  source 1..80: mol_type = other DNA
ctccacacaggggtctcaaacaatgactcttaagttgattctgggccacagatgtgcttggttagatctctgaaatgttt

SEQ ID NO: 100598 - DNA, 80 bp, synthetic construct
  source 1..80: mol_type = other DNA
ccagctaatttttgtattttttttttagtagagacagggtttcacaatgttggccaggatggtctcgatctcttggcttc

SEQ ID NO: 100599 - DNA, 80 bp, synthetic construct
  source 1..80: mol_type = other DNA
tcccgggttcaagcaattctcctgcctcagcctcctgagtagctgggattacaggtgcccgccaccacgcccagctaatt

SEQ ID NO: 100600 - DNA, 80 bp, synthetic construct; identical to SEQ ID NO: 19160
  source 1..80: mol_type = other DNA

SEQ ID NO: 100601 - DNA, 80 bp, synthetic construct
  source 1..80: mol_type = other DNA
cctggctaatgcggtgaaaccctgtctctactaaaaatacaaaaaattagccaggcatggtggcaggcgcctgtagtccc

SEQ ID NO: 100602 - DNA, 80 bp, synthetic construct
  source 1..80: mol_type = other DNA
ttacttttgctccagcctaatacattttccacttggcccctaaagacacaagtttgcaacccctgctgatttaaaatttc

SEQ ID NO: 100603 - DNA, 80 bp, synthetic construct
  source 1..80: mol_type = other DNA
taaagacacaagtttgcaacccctgctgatttaaaatttcatcttgattcctgtgtctctcactggtcgtttcagtctgc

SEQ ID NO: 100604 - DNA, 80 bp, synthetic construct; identical to SEQ ID NO: 19161
  source 1..80: mol_type = other DNA

SEQ ID NO: 100605 - DNA, 80 bp, synthetic construct
  source 1..80: mol_type = other DNA
ctcatcaactatgtcaccaggtctggctctcaacatctgaccccagaactcagaacctctcaaccctctccctgacttag

SEQ ID NO: 100606 - DNA, 80 bp, synthetic construct
  source 1..80: mol_type = other DNA
tctccctctccctctctctctgttttctctttttatctttgcctgtttctgtcttgattcttcctccatgtctttctccc

SEQ ID NO: 100607 - DNA, 80 bp, synthetic construct
  source 1..80: mol_type = other DNA
acgcagtacagcaaatggtactttgaggtgatggtggacgaggtgactccatttctgacagctcaggccacccacttgcg

SEQ ID NO: 100608 - DNA, 80 bp, synthetic construct; identical to SEQ ID NO: 19162
  source 1..80: mol_type = other DNA

SEQ ID NO: 100609 - DNA, 80 bp, synthetic construct
  source 1..80: mol_type = other DNA
atatcccagaagaccacgcagattactgtgatctctgatctttgacttctaaccccaggagaatttatttatttatttat

SEQ ID NO: 100610 - DNA, 80 bp, synthetic construct
  source 1..80: mol_type = other DNA
tgcaccaccacgcccggctcatttttgtatttttagtagagacagggtttcaccacattggccaggctggtctcctgacc

SEQ ID NO: 100611 - DNA, 80 bp, synthetic construct
  source 1..80: mol_type = other DNA
tccaagggagcactttccattagggtttccaggatgcaatctccacaggagcctccaatatctgtcccttttctcttgtt

SEQ ID NO: 100612 - DNA, 80 bp, synthetic construct
  source 1..80: mol_type = other DNA
tcaacggctgccccgtgcagggtgtctttgagtccttcaacctggacgggctcttcttccctgttgtcagcttctcggct

SEQ ID NO: 100613 - DNA, 80 bp, synthetic construct; identical to SEQ ID NO: 19163
  source 1..80: mol_type = other DNA

SEQ ID NO: 100614 - DNA, 80 bp, synthetic construct
  source 1..80: mol_type = other DNA
cagaatctgataatgatctaatgactccagaccctccttaaccccctaatgacttcagactcttccaatgacaccatact

SEQ ID NO: 100615 - DNA, 80 bp, synthetic construct
  source 1..80: mol_type = other DNA
tcctttcccaatcaccccaagctctccgaatgtccattcagtggtgtttatgtttatttcataattgtaacagatgctca

SEQ ID NO: 100616 - DNA, 80 bp, synthetic construct; identical to SEQ ID NO: 19164
  source 1..80: mol_type = other DNA

SEQ ID NO: 100617 - DNA, 80 bp, synthetic construct
  source 1..80: mol_type = other DNA
caagttcctgcccccacctggctatgctccatgccatgaggctgtgctccctcgagagcgactccatcttgaacccatca

SEQ ID NO: 100618 - DNA, 80 bp, synthetic construct
  source 1..80: mol_type = other DNA
gggcagggtgccatcgttcatgcctgtaatcccagcactttggatggccaggcgtggtggctcacgcctgtaagcccagc

SEQ ID NO: 100619 - DNA, 80 bp, synthetic construct
  source 1..80: mol_type = other DNA
aggagaatcgcttgaacccgggaggtggaggttgcagtgagctgaggtcacgccattgtactccagcctaagcaacaaga

SEQ ID NO: 100620 - DNA, 80 bp, synthetic construct
  source 1..80: mol_type = other DNA
gcaacagagtgagacttcatctcaaaacaaacaaacaaacaaaaacaaccaacattttgggaagccgaagtgggggcctc

SEQ ID NO: 100621 - DNA, 80 bp, synthetic construct; identical to SEQ ID NO: 19165
  source 1..80: mol_type = other DNA

SEQ ID NO: 100622 - DNA, 80 bp, synthetic construct
  source 1..80: mol_type = other DNA
ttaaaagttagctgaggtgatggtccacgactgtagtcccagctacttgggaggctgagatgggagggtcacttgagccc

SEQ ID NO: 100623 - DNA, 80 bp, synthetic construct
  source 1..80: mol_type = other DNA
ttgggaggctgaggcgggcagatcacctaaagtcaggaattcaagaccagcctggccaacatggtgaaaccccatctcta

SEQ ID NO: 100624 - DNA, 80 bp, synthetic construct; identical to SEQ ID NO: 19166
  source 1..80: mol_type = other DNA

SEQ ID NO: 100625 - DNA, 80 bp, synthetic construct
  source 1..80: mol_type = other DNA
aggcaagatgcttagtccagtcctgattaaacagtaagcactcaagacagtcactcattattagtagcagtgatatcatc

SEQ ID NO: 100626 - DNA, 80 bp, synthetic construct
  source 1..80: mol_type = other DNA
ccgctactgtctactaggctcttaccctctgccaggcatcgatattaactatgtaacatttagtaatttacattaatgat

SEQ ID NO: 100627 - DNA, 80 bp, synthetic construct
  source 1..80: mol_type = other DNA
ggagaaggaaggagactcctccattcttttcattcagcaaacatttcctgagcctctcttctgggtctgagtctggttct

SEQ ID NO: 100628 - DNA, 80 bp, synthetic construct
  source 1..80: mol_type = other DNA
ctgttgcccaggctgaagtgcagtggcacaatcttggctcactgcaacctctgcctccagagttcaagcaattctcctgc

SEQ ID NO: 100629 - DNA, 80 bp, synthetic construct; identical to SEQ ID NO: 19167
  source 1..80: mol_type = other DNA

SEQ ID NO: 100630 - DNA, 80 bp, synthetic construct
  source 1..80: mol_type = other DNA
ctctgcctctagattgtcctgccgccccatctggagcgcattcgggagaagctggcggagaacatccacgagctctgggc

SEQ ID NO: 100631 - DNA, 80 bp, synthetic construct
  source 1..80: mol_type = other DNA
gcagaactagggttggaggtcaggggtcatagtctgggcatgtggggagtgggaaggaaaggggagcacatggagttgac

SEQ ID NO: 100632 - DNA, 80 bp, synthetic construct; identical to SEQ ID NO: 19168
  source 1..80: mol_type = other DNA

SEQ ID NO: 100633 - DNA, 80 bp, synthetic construct
  source 1..80: mol_type = other DNA
gccgggcgtggtggtgcacctctgtaatcccagctcctcaggaggctgaggcaggagaatcatttgaacctgggaggcag

SEQ ID NO: 100634 - DNA, 80 bp, synthetic construct
  source 1..80: mol_type = other DNA
tggaaagagagagagatgcagaaagagacagggagacaggagaaagtggcagacaggaaaagacagacatagttagttat

SEQ ID NO: 100635 - DNA, 80 bp, synthetic construct
  source 1..80: mol_type = other DNA
cctgtcgcctccactcccccacccccaggactctgctggctctgggctgccacgtgggcatggcggatgagaaggcggag

SEQ ID NO: 100636 - DNA, 80 bp, synthetic construct
  source 1..80: mol_type = other DNA
tgaaggtcatagggtcagggctctggggtcagaggtgaatgtccaggattgaggagttaggagtttcagagagagagaga

SEQ ID NO: 100637 - DNA, 80 bp, synthetic construct; identical to SEQ ID NO: 19169
  source 1..80: mol_type = other DNA

SEQ ID NO: 100638 - DNA, 80 bp, synthetic construct
  source 1..80: mol_type = other DNA
gacccctctacaaaaaatttaaaaattagcaggacatggtggtgggacatgcctgtagttccagcaacttgggaggttga

SEQ ID NO: 100639 - DNA, 80 bp, synthetic construct
  source 1..80: mol_type = other DNA
gaggcgggcggatcacctgaggtcgggaattcgagaccagcctgaccaacacggtgaaacccaccctctaccaaaaatac

SEQ ID NO: 100640 - DNA, 80 bp, synthetic construct; identical to SEQ ID NO: 19170
  source 1..80: mol_type = other DNA

SEQ ID NO: 100641 - DNA, 80 bp, synthetic construct
  source 1..80: mol_type = other DNA
gcagtcagggatcccatatagtgcagagcccggaagtggaggtgagggccttgtcccatggagccctaccatgcccgcag

SEQ ID NO: 100642 - DNA, 80 bp, synthetic construct
  source 1..80: mol_type = other DNA
gacatcccagcgcgccgaaaccctcggctggtgccctaccgcctgctggatgaagccaccaagcgcagcaaccgggacag

SEQ ID NO: 100643 - DNA, 80 bp, synthetic construct
  source 1..80: mol_type = other DNA
tgggctatatctttttttttttttttttttttgagacggagtctcgctgtccccaggctggagtgcaatggcgcgatctc

SEQ ID NO: 100644 - DNA, 80 bp, synthetic construct
  source 1..80: mol_type = other DNA
gacctcgtgatccgcctgcctcggactcccaaagtgctgggattacaggcgtgagccactgcacctggcccaaatgggct

SEQ ID NO: 100645 - DNA, 80 bp, synthetic construct; identical to SEQ ID NO: 19171
  source 1..80: mol_type = other DNA

SEQ ID NO: 100646 - DNA, 80 bp, synthetic construct
  source 1..80: mol_type = other DNA
cccaacctgaatttccatcccttccataatcctggctctgaccctccaatcctggtctcagcccttcattctaatcaacc

SEQ ID NO: 100647 - DNA, 80 bp, synthetic construct
  source 1..80: mol_type = other DNA
gtctctctcaacaggtccctgcctctctctgacttttctgaggttccccaattctcctctaactccaagaaattgaccct

SEQ ID NO: 100648 - DNA, 80 bp, synthetic construct
  source 1..80: mol_type = other DNA
ttccgggcagagaaatcctatacagtgcagagcggccgctggtacttcgagtttgaagcagtcaccacaggcgagatgcg

SEQ ID NO: 100649 - DNA, 80 bp, synthetic construct; identical to SEQ ID NO: 19172
  source 1..80: mol_type = other DNA

SEQ ID NO: 100650 - DNA, 80 bp, synthetic construct
  source 1..80: mol_type = other DNA
gccaacatagggagaccccatctctacaaaaaataaaaaaattagctaggcaaggtagcatgcacatatagtcccatcat

SEQ ID NO: 100651 - DNA, 80 bp, synthetic construct
  source 1..80: mol_type = other DNA
tccaataaccatctgcccatccaacaaccatttatacaaccatccttcccttcttccctctatctgtcatccatttattt

SEQ ID NO: 100652 - DNA, 80 bp, synthetic construct
  source 1..80: mol_type = other DNA
gatctgtatggggacactgataggttcatttttcctttccatccctctacttactgctgcttccagccccccactaccac

SEQ ID NO: 100653 - DNA, 80 bp, synthetic construct; identical to SEQ ID NO: 19173
  source 1..80: mol_type = other DNA

SEQ ID NO: 100654 - DNA, 80 bp, synthetic construct
  source 1..80: mol_type = other DNA
gtctgactcaggctccgaaacagccttccgggagattgagattggggacggtgagggctgagaccccttcacatgccctt

SEQ ID NO: 100655 - DNA, 80 bp, synthetic construct
  source 1..80: mol_type = other DNA
cctggccaggtgggtcatctgaacctgggccaggacgtgagctctctgaggttctttgccatctgtggcctccaggaagg

SEQ ID NO: 100656 - DNA, 80 bp, synthetic construct; identical to SEQ ID NO: 19174
  source 1..80: mol_type = other DNA

SEQ ID NO: 100657 - DNA, 80 bp, synthetic construct
  source 1..80: mol_type = other DNA
tatcccagcacttagggaggctgaggcaggaggatcccttgagcccaggagttcaagaccagccttggcaacatagggag

SEQ ID NO: 100658 - DNA, 80 bp, synthetic construct
  source 1..80: mol_type = other DNA
agctacttagggggctgaggcaggagactcgcttgaacacgggagatggaggttgcagtgagccaagattgcgcccttgc

SEQ ID NO: 100659 - DNA, 80 bp, synthetic construct
  source 1..80: mol_type = other DNA
agctgggtgctgtggcacatgcctggtgtcccagccactcggcaaactgaggcaggaggatcctctgagctcaggaggtc

SEQ ID NO: 100660 - DNA, 80 bp, synthetic construct
  source 1..80: mol_type = other DNA
gaagttcaagatgagcctggccaatatggcaaaaacccatctctactaaaaatactcccccaaaattaatggcgtggtgg

SEQ ID NO: 100661 - DNA, 80 bp, synthetic construct; identical to SEQ ID NO: 19175
  source 1..80: mol_type = other DNA

SEQ ID NO: 100662 - DNA, 80 bp, synthetic construct
  source 1..80: mol_type = other DNA
atgctacacggaagtgagaatgaatacctggaaatacacacagccatgtggacgaatctcagacataatgtcgagtagaa

SEQ ID NO: 100663 - DNA, 80 bp, synthetic construct
  source 1..80: mol_type = other DNA
agacattgttagttactttgaatgcaaatcacaggagggagctcagtcagtagactattgccaaagaacaaaggctggtt

SEQ ID NO: 100664 - DNA, 80 bp, synthetic construct
  source 1..80: mol_type = other DNA
ccagcctgggcaacatagcaaaaccctgtctctacacagaataaacaaaattatctgggcatggtggtatgtgcctgtgg

SEQ ID NO: 100665 - DNA, 80 bp, synthetic construct; identical to SEQ ID NO: 19176
  source 1..80: mol_type = other DNA

SEQ ID NO: 100666 - DNA, 80 bp, synthetic construct
  source 1..80: mol_type = other DNA
gggcgcctgtaatcccagttactcgggaggctgaggcaggagaattgcttgaacccaggaggcaaaagttgcagtcagcc

SEQ ID NO: 100667 - DNA, 80 bp, synthetic construct
  source 1..80: mol_type = other DNA
cttggagaggtcaacgtgaggaggggcatgaaagagaacaactttcattgtttaccgagtctctaggagacttttgagag

SEQ ID NO: 100668 - DNA, 80 bp, synthetic construct
  source 1..80: mol_type = other DNA
accacgcctggctaatttttttgtatttttagtacagatgaggtttcaccatgctggccaggctggtctcaaactcctga

SEQ ID NO: 100669 - DNA, 80 bp, synthetic construct; identical to SEQ ID NO: 19177
  source 1..80: mol_type = other DNA

SEQ ID NO: 100670 - DNA, 80 bp, synthetic construct
  source 1..80: mol_type = other DNA
gcggatcacatgaactcaggagattgagaccagcctgggcaacatggtgaaaccccgtctctaccaaaaatacaaaaatt

SEQ ID NO: 100671 - DNA, 80 bp, synthetic construct
  source 1..80: mol_type = other DNA
aaaaaaagaagtctgagaacaaagaatcttgtacgcacagtttttggggcaaattttcaggagactgagacacaagaatc

SEQ ID NO: 100672 - DNA, 80 bp, synthetic construct; identical to SEQ ID NO: 19178
  source 1..80: mol_type = other DNA

SEQ ID NO: 100673 - DNA, 80 bp, synthetic construct
  source 1..80: mol_type = other DNA
cccttgactaattcccatgcaggtgcactatggcctaatggtggctccgtgtgtgaccaggtgtaggaccaacggcctgg

SEQ ID NO: 100674 - DNA, 80 bp, synthetic construct
  source 1..80: mol_type = other DNA
gtccagttccaccagcacttccgctgcactgcaggggccaccccgctggcacctcctggcctgcagccccccgccgagga

SEQ ID NO: 100675 - DNA, 80 bp, synthetic construct
  source 1..80: mol_type = other DNA
aatgagaaggatgccaccaccgagaagaacaagaagagagggtgagtcgaggggggcccagagtggggattgggggctgc

SEQ ID NO: 100676 - DNA, 80 bp, synthetic construct
  source 1..80: mol_type = other DNA
ccccattattttcctgggatgccctaatgtccccaagaatatataattgggtaccctagtatctatatggagaactctat

SEQ ID NO: 100677 - DNA, 80 bp, synthetic construct; identical to SEQ ID NO: 19179
  source 1..80: mol_type = other DNA

SEQ ID NO: 100678 - DNA, 80 bp, synthetic construct
  source 1..80: mol_type = other DNA
cgccaccatgcccagctaatttttgtatttttagtagagacggggttttgccatgttggccaggctggtctcaaactcct

SEQ ID NO: 100679 - DNA, 80 bp, synthetic construct
  source 1..80: mol_type = other DNA
tgcaatctccgcctcctgggttcaagcaattctcctgcctcagcctcttgagtatctgggactacaggtgtgtgccacca

SEQ ID NO: 100680 - DNA, 80 bp, synthetic construct
  source 1..80: mol_type = other DNA
acccattgtgtctcttggtggatgtttggaaatgatggagtctttgtggtcattacagtttgggaggggctgctgctgct

SEQ ID NO: 100681 - DNA, 80 bp, synthetic construct; identical to SEQ ID NO: 19180
  source 1..80: mol_type = other DNA

SEQ ID NO: 100682 - DNA, 80 bp, synthetic construct
  source 1..80: mol_type = other DNA
gccaagaaggtcgccatgatgacccagccaccggccacccccacgctgccccgactccctcacgacgtggtgcctgcaga

SEQ ID NO: 100683 - DNA, 80 bp, synthetic construct
  source 1..80: mol_type = other DNA
tacactagaaactcataaaatatggcacacacagatttaatcctttgaacccctaaatccatatagctatggcccacaaa

SEQ ID NO: 100684 - DNA, 80 bp, synthetic construct; identical to SEQ ID NO: 19181
  source 1..80: mol_type = other DNA

SEQ ID NO: 100685 - DNA, 80 bp, synthetic construct
  source 1..80: mol_type = other DNA
cttgctctgttgcccagtctggagtgcagtggtgtgatcttggctcactgaaacctctgcctcctgggttcaaacgattc

SEQ ID NO: 100686 - DNA, 80 bp, synthetic construct
  source 1..80: mol_type = other DNA
cgggttcaagtgattcttctgcctcagcctcccaagtagctgggactatgggcacacgccaccatgcccggctaattttt

SEQ ID NO: 100687 - DNA, 80 bp, synthetic construct
  source 1..80: mol_type = other DNA
ccatgttggccaggttggtctcaaatccccgacctcaaatgatcctactgcctcagactcccaaagtactgggattacag

SEQ ID NO: 100688 - DNA, 80 bp, synthetic construct; identical to SEQ ID NO: 19182
  source 1..80: mol_type = other DNA

SEQ ID NO: 100689 - DNA, 80 bp, synthetic construct
  source 1..80: mol_type = other DNA
ctgcaggctacgatggtgcctctgcactccagcctggatgacagagggagactgcaactcaaaaaaaataaaaataaaaa

SEQ ID NO: 100690 - DNA, 80 bp, synthetic construct
  source 1..80: mol_type = other DNA
cggctcactgcaacctctgcctcccaggttcaagcgattctcctgcctcagcctcccgagtacctgggactacaggcgcc

SEQ ID NO: 100691 - DNA, 80 bp, synthetic construct
  source 1..80: mol_type = other DNA
tttatttgtcagtctactgtaacctgggaggaacccaaatatggcactgtcacacaatattcccaagggactcctaaatc

SEQ ID NO: 100692 - DNA, 80 bp, synthetic construct; identical to SEQ ID NO: 19183
  source 1..80: mol_type = other DNA

SEQ ID NO: 100693 - DNA, 80 bp, synthetic construct
  source 1..80: mol_type = other DNA
tgggaggtgcagggtggggagggcaggaggcagtcagagctcccgacaccagctctgtggctgcctggttgtgggaccta

SEQ ID NO: 100694 - DNA, 80 bp, synthetic construct
  source 1..80: mol_type = other DNA
ttatgcatttctcctattccattttctccttttccttctcatcctgtttcatctcacccttctccttctctgtcatctca

SEQ ID NO: 100695 - DNA, 80 bp, synthetic construct
  source 1..80: mol_type = other DNA
atgggactctgaggttgtgtgtttccgggagcttggggaagggggtgtccagggtccagagctactcacatgaggagtgc

SEQ ID NO: 100696 - DNA, 80 bp, synthetic construct; identical to SEQ ID NO: 19184
  source 1..80: mol_type = other DNA

SEQ ID NO: 100697 - DNA, 80 bp, synthetic construct
  source 1..80: mol_type = other DNA
agactggagtgcaatgggacgatcttggctcactgcaaccttcgcctcctgggttagagggattctcctgcctcagcctc

SEQ ID NO: 100698 - DNA, 80 bp, synthetic construct
  source 1..80: mol_type = other DNA
agccaccacacccagccagagtccagccttgaccttggaaagaggtttctgttccctcttgagctgggtgacaccagtca

SEQ ID NO: 100699 - DNA, 80 bp, synthetic construct
  source 1..80: mol_type = other DNA
tgttgtagatattggctttatcacatattcacctacctgtccattaatctaaggtgggtttgtacaactttattttaatt

SEQ ID NO: 100700 - DNA, 80 bp, synthetic construct; identical to SEQ ID NO: 19185
  source 1..80: mol_type = other DNA

SEQ ID NO: 100701 - DNA, 80 bp, synthetic construct
  source 1..80: mol_type = other DNA
catggtgagatcacagctcactgcagccacaaccttcctggactcaagcgatcctcccacttcagcctcttgaatagttg

SEQ ID NO: 100702 - DNA, 80 bp, synthetic construct
  source 1..80: mol_type = other DNA
ctcctggctaaagctttatgttaaatggagaattaaaaacgtatacaagaatggaatagtataatgaactgccatgcccc

SEQ ID NO: 100703 - DNA, 80 bp, synthetic construct
  source 1..80: mol_type = other DNA
tcccacctcagcctcctgagtagctgggactacaggtatgcaccaccatgcctggctaattttttttagttttagtggag

SEQ ID NO: 100704 - DNA, 80 bp, synthetic construct; identical to SEQ ID NO: 19186
  source 1..80: mol_type = other DNA

SEQ ID NO: 100705 - DNA, 80 bp, synthetic construct
  source 1..80: mol_type = other DNA
tttatttattatttatttttattttattttttgagacaatgtctcactctgtcacccagtctggagtgcagtggcatggt

SEQ ID NO: 100706 - DNA, 80 bp, synthetic construct
  source 1..80: mol_type = other DNA
tcctgccttggcctcccaaagtgctgggattacagtgtgaggcagcatgctcaaccttatttatttaattatttatttta

SEQ ID NO: 100707 - DNA, 80 bp, synthetic construct
  source 1..80: mol_type = other DNA
caacctcctgggatcaaacgatcctcccacctcagcctcccaagtggctgggaccacagacacgcactaccacacctggc

SEQ ID NO: 100708 - DNA, 80 bp, synthetic construct; identical to SEQ ID NO: 19187
  source 1..80: mol_type = other DNA

SEQ ID NO: 100709 - DNA, 80 bp, synthetic construct
  source 1..80: mol_type = other DNA
caggaggatcacctgagtctgggaggcagaggttgtagtgagctatgatagcgccactgcactccagcctgggtggcaga

SEQ ID NO: 100710 - DNA, 80 bp, synthetic construct
  source 1..80: mol_type = other DNA
cagcctgaccaacatggtgaaaccccatctctactaaaaatacaaaaattagcctggcgtggtgacgggcgcctgtaatc

SEQ ID NO: 100711 - DNA, 80 bp, synthetic construct
  source 1..80: mol_type = other DNA
gaccccttcccatgcctgccaaatcagaatctgtattttgacaggatcccaggggcttcctgtgtatattaaatctggag

SEQ ID NO: 100712 - DNA, 80 bp, synthetic construct
  source 1..80: mol_type = other DNA
tgttgtttgtggaggcagaggctggctggatgggctccactgggaagacgggagaggggcaagacagtctgaggacactt

SEQ ID NO: 100713 - DNA, 80 bp, synthetic construct; identical to SEQ ID NO: 19188
  source 1..80: mol_type = other DNA

SEQ ID NO: 100714 - DNA, 80 bp, synthetic construct
  source 1..80: mol_type = other DNA
aggaggttggcctggctggatcagaggtgggacagtctaagggtgacctctgagccattttggagcctctaacgcccaga

SEQ ID NO: 100715 - DNA, 80 bp, synthetic construct
  source 1..80: mol_type = other DNA
agtttgagctggggaagcagaaggtacaagtgcagtgatgggggcactaatggggccaggctgaggcaggagatgtgggg

SEQ ID NO: 100716 - DNA, 80 bp, synthetic construct
  source 1..80: mol_type = other DNA
caagaacccggccccgcagtgcccaccgcggctggagatgcagatgctgatgccagtgtcctggagccgcatgcccaacc

SEQ ID NO: 100717 - DNA, 80 bp, synthetic construct; identical to SEQ ID NO: 19189
  source 1..80: mol_type = other DNA

SEQ ID NO: 100718 - DNA, 80 bp, synthetic construct
  source 1..80: mol_type = other DNA
atctcagggagccagacccacatcaacaccccagggggccccaagtacaccccaggatccctggacatgattcagggagg

SEQ ID NO: 100719 - DNA, 80 bp, synthetic construct
  source 1..80: mol_type = other DNA
gcacagtgcctcacacctgtaatcccagcacgttgggaggctgaggcaggcaggtcacctgaggtcaggagtctctacta

SEQ ID NO: 100720 - DNA, 80 bp, synthetic construct; identical to SEQ ID NO: 19190
  source 1..80: mol_type = other DNA

SEQ ID NO: 100721 - DNA, 80 bp, synthetic construct
  source 1..80: mol_type = other DNA
agtattccaggctggagacaccaagcccctgtgaagtgacattctagtaatgcttgtacataactcaggatgctcggaca

SEQ ID NO: 100722 - DNA, 80 bp, synthetic construct
  source 1..80: mol_type = other DNA
accaccaggaagcacagtgagaacccgtctccacattttttttttctttttaattagcttggcttggtggcacacacatg

SEQ ID NO: 100723 - DNA, 80 bp, synthetic construct
  source 1..80: mol_type = other DNA
gctaggtgtggttttaggtgctgggaatataacaaacaaaagcagaaacaaaacaggcagaaatgtcctgcccttggaat

SEQ ID NO: 100724 - DNA, 80 bp, synthetic construct
  source 1..80: mol_type = other DNA
caggggcccccagatcccttagggacttccagaaccattgaaagactcctagacccagctccactgccctcacagaaccc

SEQ ID NO: 100725 - DNA, 80 bp, synthetic construct; identical to SEQ ID NO: 19191
  source 1..80: mol_type = other DNA

SEQ ID NO: 100726 - DNA, 80 bp, synthetic construct
  source 1..80: mol_type = other DNA
gctgctgcacgccctggaggacgcgcacctgccaggcccactgcgcgcaggctactatgacctcctcatcagcatccacc

SEQ ID NO: 100727 - DNA, 80 bp, synthetic construct
  source 1..80: mol_type = other DNA
gcccccgcatcatttctcgcccccctgtttcgtggccgctctgccagctgctggggcagcagaggccccggcccgcctca

SEQ ID NO: 100728 - DNA, 80 bp, synthetic construct; identical to SEQ ID NO: 19192
  source 1..80: mol_type = other DNA

SEQ ID NO: 100729 - DNA, 80 bp, synthetic construct
  source 1..80: mol_type = other DNA
ctcctgcctcagccccccgagtagcggggactacaggcatgtgccaccacgccccgctaatatttgtattttcagtagag

SEQ ID NO: 100730 - DNA, 80 bp, synthetic construct
  source 1..80: mol_type = other DNA
tttctatgtatcctcccaccatctccctatctttcattcacctttccctccatctgctcacctgtcatctctttatgttt

SEQ ID NO: 100731 - DNA, 80 bp, synthetic construct
  source 1..80: mol_type = other DNA
agatcatctttccatcaacaagatctttccatcaacatctttccatctgcctttctatccttttgttctccacccactcc

SEQ ID NO: 100732 - DNA, 80 bp, synthetic construct; identical to SEQ ID NO: 19193
  source 1..80: mol_type = other DNA

SEQ ID NO: 100733 - DNA, 80 bp, synthetic construct
  source 1..80: mol_type = other DNA
tacccgttccctatccttctctccatcccttgtatcatgtacccttttattcgtagacccatctaactattcatttatat

SEQ ID NO: 100734 - DNA, 80 bp, synthetic construct
  source 1..80: mol_type = other DNA
ttacaggtgcccgccaccatgcccggctaatttttgtatttttaatagagatggggtttcaccatgttgaccaggctggt

SEQ ID NO: 100735 - DNA, 80 bp, synthetic construct
  source 1..80: mol_type = other DNA
ttcagcaatccttctgcctcagcctcctgaatagctgggactacaggtgtgcactaccatgcccaggtaagttttaaatt

SEQ ID NO: 100736 - DNA, 80 bp, synthetic construct
  source 1..80: mol_type = other DNA
tttgtaagagacagggtaatgcccaggctagaatgcagtggtatgattgtagcccactgcagtcttaaactcctgggttc

SEQ ID NO: 100737 - DNA, 80 bp, synthetic construct; identical to SEQ ID NO: 19194
  source 1..80: mol_type = other DNA

SEQ ID NO: 100738 - DNA, 80 bp, synthetic construct
  source 1..80: mol_type = other DNA
cctccattcatccatctctctctctcccctgcactcttcttccctttcgtctactccctctttacttccatatgttagca

SEQ ID NO: 100739 - DNA, 80 bp, synthetic construct
  source 1..80: mol_type = other DNA
accaccacacccagctaatttttttttgtatttttgtagagacggggtttcaccatgttggccaggctggtctcgaactc

SEQ ID NO: 100740 - DNA, 80 bp, synthetic construct
  source 1..80: mol_type = other DNA
catgcttaggcttgggagaaaggacactcgcctgtgatgggagaggcactcatatttgggtctgtggtctgggctgtgtg

SEQ ID NO: 100741 - DNA, 80 bp, synthetic construct; identical to SEQ ID NO: 19195
  source 1..80: mol_type = other DNA

SEQ ID NO: 100742 - DNA, 80 bp, synthetic construct
  source 1..80: mol_type = other DNA
agaaggggagaaagaagaaggcttggaggaagggctgctccagatgaagttgccagagtctgtgaagttacaggtgggct

SEQ ID NO: 100743 - DNA, 80 bp, synthetic construct
  source 1..80: mol_type = other DNA
aatgccaacttggaaagatctctgttttccatggagatgagaccatggagaaggcagtcttttttgtttgttttttgcga

SEQ ID NO: 100744 - DNA, 80 bp, synthetic construct
  source 1..80: mol_type = other DNA
gtagagatggggtttcgccatgttggccaggctggtcttgaactcctgacttcaggtgatccacccacctcggcctccca

SEQ ID NO: 100745 - DNA, 80 bp, synthetic construct; identical to SEQ ID NO: 19196
  source 1..80: mol_type = other DNA

SEQ ID NO: 100746 - DNA, 80 bp, synthetic construct
  source 1..80: mol_type = other DNA
gacgctggccacttttactgtctaaaccccaacctcaacatctcctgactctgatcactgaggaccctcaacctctaaac

SEQ ID NO: 100747 - DNA, 80 bp, synthetic construct
  source 1..80: mol_type = other DNA
atggactaacaattgcatcttctatctctgatctcagagttcctgctttgggatctcagaccctcattctaatctttgac

SEQ ID NO: 100748 - DNA, 80 bp, synthetic construct; identical to SEQ ID NO: 19197
  source 1..80: mol_type = other DNA

SEQ ID NO: 100749 - DNA, 80 bp, synthetic construct
  source 1..80: mol_type = other DNA
gatagaagaagtgggtaaaaaatggctggctggatagatggaaggatgaagagaaggatggatggatggttgagaactgg

SEQ ID NO: 100750 - DNA, 80 bp, synthetic construct
  source 1..80: mol_type = other DNA
ttagtatgacgtgtctaggtgtagagctctttgaatttatcctgttgaaagtttgttgagtttcttggatatatacttac

SEQ ID NO: 100751 - DNA, 80 bp, synthetic construct
  source 1..80: mol_type = other DNA
caatcttagctcactgcatcctctgcctcctgggctcaagccatcctcctacctcagcctccaaagtagctgggagaaca

SEQ ID NO: 100752 - DNA, 80 bp, synthetic construct; identical to SEQ ID NO: 19198
  source 1..80: mol_type = other DNA

SEQ ID NO: 100753 - DNA, 80 bp, synthetic construct
  source 1..80: mol_type = other DNA
gataagtcactattatgatatttccttttaattcttcagacatggtttcctttagttctttgaacatatttgcaaaattg

SEQ ID NO: 100754 - DNA, 80 bp, synthetic construct
  source 1..80: mol_type = other DNA
gggcaacatggcaagacccccatctctacagaaaaagatacaaaattaacagggcatggtggcatacacctgtagtccca

SEQ ID NO: 100755 - DNA, 80 bp, synthetic construct
  source 1..80: mol_type = other DNA
tgcacaaataaatgagtgtgtaagcaggtgaataagcaaactaatgaatgacatttcccgccttcttgaccacttccagg

SEQ ID NO: 100756 - DNA, 80 bp, synthetic construct; identical to SEQ ID NO: 19199
  source 1..80: mol_type = other DNA

SEQ ID NO: 100757 - DNA, 80 bp, synthetic construct
  source 1..80: mol_type = other DNA
aaacccccttctccactaaaaatacaaaaattagctgggtgtggcggtgcatgcctgtaatcccagctacttggagactg

SEQ ID NO: 100758 - DNA, 80 bp, synthetic construct
  source 1..80: mol_type = other DNA
acgtgtgtgttggaccagggtgacacagcctaccagcttagtggcaaacctctaactaagggatggcggtaaccctgaac

SEQ ID NO: 100759 - DNA, 80 bp, synthetic construct
  source 1..80: mol_type = other DNA
tatattagccacatctaacaaggacagatttcctgacgttggtacaggttttatcccacaacattcaggaaacttttatg

SEQ ID NO: 100760 - DNA, 80 bp, synthetic construct
  source 1..80: mol_type = other DNA
gtgcagtggcgcgatcttggctcactgcaacctccgcctcctgggttcaagcgattctcctgcttcagcctccagagtag

SEQ ID NO: 100761 - DNA, 80 bp, synthetic construct; identical to SEQ ID NO: 19200
  source 1..80: mol_type = other DNA

SEQ ID NO: 100762 - DNA, 80 bp, synthetic construct
  source 1..80: mol_type = other DNA
tcctattgaaatttttaggaagcccttgtgggctggatattagggtgaacagaacagagagattcttgggcgaatagaaa

SEQ ID NO: 100763 - DNA, 80 bp, synthetic construct
  source 1..80: mol_type = other DNA
aaagaaaaaaaggaaaacaatctgctagaatctgcctgctcccagcaggtggagggcgcaggtggtagtaactgggaaaa

SEQ ID NO: 100764 - DNA, 80 bp, synthetic construct
  source 1..80: mol_type = other DNA
cagagccccgagctggtgcgggccatgttcagcctcctgcaccggcagtacgacgggctgggtgagctgctgcgtgccct

SEQ ID NO: 100765 - DNA, 80 bp, synthetic construct; identical to SEQ ID NO: 19201
  source 1..80: mol_type = other DNA

SEQ ID NO: 100766 - DNA, 80 bp, synthetic construct
  source 1..80: mol_type = other DNA
cacccaggctggagtgcaatggcgcaatctcagctcactgcaacctccgcctcccaggttcaagcaattctcctgtctca

SEQ ID NO: 100767 - DNA, 80 bp, synthetic construct
  source 1..80: mol_type = other DNA
cgtgagccaccacacccagctgaggtttaccctttttgagcttcagtttcctcatctgtaaaaccggggagagccaagcc

SEQ ID NO: 100768 - DNA, 80 bp, synthetic construct
  source 1..80: mol_type = other DNA
ggcctcactctgttgcccaggctagagtgcagtggcccaatcacagctcactgcagcctcaacttcctgggctcaagcga

SEQ ID NO: 100769 - DNA, 80 bp, synthetic construct; identical to SEQ ID NO: 19202
  source 1..80: mol_type = other DNA

SEQ ID NO: 100770 - DNA, 80 bp, synthetic construct
  source 1..80: mol_type = other DNA
ataccgggttcaagcgattctcccacctcagcctcctgcgtagctgggattacgggtatgcgccaccacgcctggctaat

SEQ ID NO: 100771 - DNA, 80 bp, synthetic construct
  source 1..80: mol_type = other DNA
tgtaaaggcggtggtgctaggcacagagtgagagggtcaagaatgccaacgctgtcacagtggtggctatggccctctcc

SEQ ID NO: 100772 - DNA, 80 bp, synthetic construct
  source 1..80: mol_type = other DNA
tgagggcccaggcaggtgctggggagctcaggggaggcagccacagagggcaggccctgaccaccctgcctgtcccagga

SEQ ID NO: 100773 - DNA, 80 bp, synthetic construct; identical to SEQ ID NO: 19203
  source 1..80: mol_type = other DNA

SEQ ID NO: 100774 - DNA, 80 bp, synthetic construct
  source 1..80: mol_type = other DNA
ggcgagacaagcaggagtgagatgttctccccacctctcgcccctgcaggcatgcagggctccacgcccctggacgtggc

SEQ ID NO: 100775 - DNA, 80 bp, synthetic construct
  source 1..80: mol_type = other DNA
ggcaattctggatggtccagtgcccaaccagaaggagactaatttgcagggagagaacggcacccagttgttcattcatg

SEQ ID NO: 100776 - DNA, 80 bp, synthetic construct
  source 1..80: mol_type = other DNA
tacgcttccgggttgggggccgatccacagtctaggcttccagccaggtggccttggcacatttcttcgctctccgagct

SEQ ID NO: 100777 - DNA, 80 bp, synthetic construct; identical to SEQ ID NO: 19204
  source 1..80: mol_type = other DNA

SEQ ID NO: 100778 - DNA, 80 bp, synthetic construct
  source 1..80: mol_type = other DNA
taagaccagcctggacaatatagggacaccttgtctctacaaaaaatacaaaaagtaggtgggtgtagtggcacgtaact

SEQ ID NO: 100779 - DNA, 80 bp, synthetic construct
  source 1..80: mol_type = other DNA
aaaaaaaaaagtggccagagaaagcctcattgagaaagtgacatttgtgtaaagctctgaaggaaggtgacaggtcaggt

SEQ ID NO: 100780 - DNA, 80 bp, synthetic construct; identical to SEQ ID NO: 19205
  source 1..80: mol_type = other DNA

SEQ ID NO: 100781 - DNA, 80 bp, synthetic construct
  source 1..80: mol_type = other DNA
caaagagaaggttcttggatctcatgtaagaaagaattcagggcaactccatagagtaaagtgaaagcaagtttattagg

SEQ ID NO: 100782 - DNA, 80 bp, synthetic construct
  source 1..80: mol_type = other DNA
atattgccatgacatttgtaaactgtcgtggcgctggtgggagtgcagcagtgaggatgaccagaggtcactctcgttgc

SEQ ID NO: 100783 - DNA, 80 bp, synthetic construct
  source 1..80: mol_type = other DNA
tcaagatggagttgctgtagtttacaggcctctgacaggaccagggctaatgggccgagggatcagagctgaaccggact

SEQ ID NO: 100784 - DNA, 80 bp, synthetic construct; identical to SEQ ID NO: 19206
  source 1..80: mol_type = other DNA

SEQ ID NO: 100785 - DNA, 80 bp, synthetic construct
  source 1..80: mol_type = other DNA
cctgtggctggcagtgttggatcctggggctggcgggagcctggtgttacccctagaggtgttgggtcctggggctggca

SEQ ID NO: 100786 - DNA, 80 bp, synthetic construct
  source 1..80: mol_type = other DNA
gaacgccaatgtggtggtgcggctgctcatccggaagcctgagtgcttcggacccgccctgcggggtgagggtggctcag

SEQ ID NO: 100787 - DNA, 80 bp, synthetic construct
  source 1..80: mol_type = other DNA
acccaccttccctgcagctttggtgaggaaccgcctgaagaaaaccgggtgcacctgggacacgccatcatgtccttcta

SEQ ID NO: 100788 - DNA, 80 bp, synthetic construct; identical to SEQ ID NO: 19207
  source 1..80: mol_type = other DNA

SEQ ID NO: 100789 - DNA, 80 bp, synthetic construct
  source 1..80: mol_type = other DNA
gccaggatgaggggtcgcagggagaggggtcaggatgaggttggggggaacaaggagagaggtcgggactggggtggggg

SEQ ID NO: 100790 - DNA, 80 bp, synthetic construct
  source 1..80: mol_type = other DNA
ccaagccggcaagggtgaggccctgcggatccgcgccatcctccgctcccttgtgcccttggaggaccttgtgggcatca

SEQ ID NO: 100791 - DNA, 80 bp, synthetic construct
  source 1..80: mol_type = other DNA
catccttcgtgccggaccacaaggcgtccatggtgctcttcctggaccgtgtgtatggcatcgagaaccaggacttcttg

SEQ ID NO: 100792 - DNA, 80 bp, synthetic construct; identical to SEQ ID NO: 19208
  source 1..80: mol_type = other DNA

SEQ ID NO: 100793 - DNA, 80 bp, synthetic construct
  source 1..80: mol_type = other DNA
agttcgagaccagcctgaccaacatggtgaaaccgcatctctactaaaagtacaaaaattagccagacgtggtggcgcac

SEQ ID NO: 100794 - DNA, 80 bp, synthetic construct
  source 1..80: mol_type = other DNA
catctcaaaaaaaatattttgttcgcagtattggtttggtactgtgggcacacagaactctgtacaggaacagcaataac

SEQ ID NO: 100795 - DNA, 80 bp, synthetic construct
  source 1..80: mol_type = other DNA
gtaataactttgggaggccgaggcgggtgggttgcttgaagccaggattttgagaccagcctgggcaacatggagagatc

SEQ ID NO: 100796 - DNA, 80 bp, synthetic construct
  source 1..80: mol_type = other DNA
aaccatgattacatctctgcattccagcctgggcgacagagcgagaccttatctcagaaaaaaaaaagaaaaataaatta

SEQ ID NO: 100797 - DNA, 80 bp, synthetic construct; identical to SEQ ID NO: 19209
  source 1..80: mol_type = other DNA

SEQ ID NO: 100798 - DNA, 80 bp, synthetic construct
  source 1..80: mol_type = other DNA
gtggtagagattgggaggagcaggttttgggggagtcatcagaagcttggatcctttggccacagtcgctcaagacaggt

SEQ ID NO: 100799 - DNA, 80 bp, synthetic construct
  source 1..80: mol_type = other DNA
acaccgcgccatcatggtggactctatgctgcataccgtgtaccgcctgtctcggggtcgttcgctcaccaaggcgcagc

SEQ ID NO: 100800 - DNA, 80 bp, synthetic construct
  source 1..80: mol_type = other DNA
gattctacatcttgtgcattgtcccgcaggtacatccgcccgtcgatgctgcagcacctgttgcgccgcctggtgttcga

SEQ ID NO: 100801 - DNA, 80 bp, synthetic construct; identical to SEQ ID NO: 19210
  source 1..80: mol_type = other DNA

SEQ ID NO: 100802 - DNA, 80 bp, synthetic construct
  source 1..80: mol_type = other DNA
ctggaccaccagacttccactattcaaatgagtgcatttatttgaataaacattatcacagctattctgaatatttgcac

SEQ ID NO: 100803 - DNA, 80 bp, synthetic construct
  source 1..80: mol_type = other DNA
gggaggccgaggtgggcagatcacttgaggtcaggagttcgagaccagcctggccaacatggcgaaaccccatctctact

SEQ ID NO: 100804 - DNA, 80 bp, synthetic construct; identical to SEQ ID NO: 19211
  source 1..80: mol_type = other DNA

SEQ ID NO: 100805 - DNA, 80 bp, synthetic construct
  source 1..80: mol_type = other DNA
acacaaccagctctagtttaatgcccattttaactctaaattaagaatgctaaatttgcatactaagctgtctaggacca

SEQ ID NO: 100806 - DNA, 80 bp, synthetic construct
  source 1..80: mol_type = other DNA
cccacccagctcctcaccaaccactatgagcgctgttggaagtactactgcctacccacgggctgggccaacttcggggt

SEQ ID NO: 100807 - DNA, 80 bp, synthetic construct
  source 1..80: mol_type = other DNA
ggttcaaggaggagaaggttctgcaagtttggatctaggaggatctatgggttgaggcttcgatttggaggttatgaaag

SEQ ID NO: 100808 - DNA, 80 bp, synthetic construct; identical to SEQ ID NO: 19212
  source 1..80: mol_type = other DNA

SEQ ID NO: 100809 - DNA, 80 bp, synthetic construct
  source 1..80: mol_type = other DNA
ccccccgactatgtggatgcctcatactcatctaaggcagagaaaaaggccacagtggatgctgaaggcaactttgatcc

SEQ ID NO: 100810 - DNA, 80 bp, synthetic construct
  source 1..80: mol_type = other DNA
gtacacacacgagaagtgggccttcgacaaggttggcctcagggtcctcctatccaagaaaccctcaagaccccagcttt

SEQ ID NO: 100811 - DNA, 80 bp, synthetic construct
  source 1..80: mol_type = other DNA
cctcccctccatctctagatccagaacaactggtcctatggagagaacatagacgaggagctgaagacccaccccatgct

SEQ ID NO: 100812 - DNA, 80 bp, synthetic construct; identical to SEQ ID NO: 19213
  source 1..80: mol_type = other DNA

SEQ ID NO: 100813 - DNA, 80 bp, synthetic construct
  source 1..80: mol_type = other DNA
attccaccaactccccaccctcctgtccaccccaggacaaagagatttaccgctggcccatcaaggagtccctgaaggcc

SEQ ID NO: 100814 - DNA, 80 bp, synthetic construct
  source 1..80: mol_type = other DNA
ggccagacagggaagggatggagaggagaggggcccagggaggtaggtggggcaagaggggtgcagaaacctgagatctg

SEQ ID NO: 100815 - DNA, 80 bp, synthetic construct
  source 1..80: mol_type = other DNA
ggcttcctgctagcccatcagcccacctcccatcttccccttgtcctctcagacctatgatcctcgagaaggctacaacc

SEQ ID NO: 100816 - DNA, 80 bp, synthetic construct
  source 1..80: mol_type = other DNA
gactctgcatccactcccaggccatggcagaacaactggcagaaaattaccacaacacgtggggacggaagaagaagcag

SEQ ID NO: 100817 - DNA, 80 bp, synthetic construct; identical to SEQ ID NO: 19214
  source 1..80: mol_type = other DNA

SEQ ID NO: 100818 - DNA, 80 bp, synthetic construct
  source 1..80: mol_type = other DNA
gatcgagagaaggcccaggagctactgaaattcctgcagatgaatggctacgcggttacaaggcacgcgggttggggctc

SEQ ID NO: 100819 - DNA, 80 bp, synthetic construct
  source 1..80: mol_type = other DNA
gaggagttcgaaatgggcggggcttaagcacaggcgggaccagagaggagaggaggaagagaagggcggggcccagggag

SEQ ID NO: 100820 - DNA, 80 bp, synthetic construct
  source 1..80: mol_type = other DNA
cggggccagagaggggtggggaggtacagaggggcggggactggtgagtggaggcgggaccaaagaggagagaagggctg

SEQ ID NO: 100821 - DNA, 80 bp, synthetic construct; identical to SEQ ID NO: 19215
  source 1..80: mol_type = other DNA

SEQ ID NO: 100822 - DNA, 80 bp, synthetic construct
  source 1..80: mol_type = other DNA
tcctgcagcagctgctgcgctggatggacatttctcaggagttcattgcccacctgggtacggagaaataccccccgctt

SEQ ID NO: 100823 - DNA, 80 bp, synthetic construct
  source 1..80: mol_type = other DNA
tgacccctgctctcctgcaactactcctatgttggattcaggcaattagcatcataaataactaaatcgtttagtgttag

SEQ ID NO: 100824 - DNA, 80 bp, synthetic construct
  source 1..80: mol_type = other DNA
ccaggctggagtgcagtggcacggtctcggctcactgcaacctctgctttctggtttcaagcgattctcctgcctcagcc

SEQ ID NO: 100825 - DNA, 80 bp, synthetic construct; identical to SEQ ID NO: 19216
  source 1..80: mol_type = other DNA

SEQ ID NO: 100826 - DNA, 80 bp, synthetic construct
  source 1..80: mol_type = other DNA
gataaacgaggtcacagaggtgactggggcagatcatgcagggctttgcaagctgtgatgaggactttgaccttacctgg

SEQ ID NO: 100827 - DNA, 80 bp, synthetic construct
  source 1..80: mol_type = other DNA
ggggtgccccccagtgcctcttacaggccactaagaattacagctaggccctacaatcccctccagtttcccttagagac

SEQ ID NO: 100828 - DNA, 80 bp, synthetic construct; identical to SEQ ID NO: 19217
  source 1..80: mol_type = other DNA

SEQ ID NO: 100829 - DNA, 80 bp, synthetic construct
  source 1..80: mol_type = other DNA
ttttttttttttttttttttgagacggagtcttgctctgtcacccaggttggactgcagtggcgcgatctcagctcactg

SEQ ID NO: 100830 - DNA, 80 bp, synthetic construct
  source 1..80: mol_type = other DNA
gtttcaccatgttggccaggatggtctcgatctcctgacctcgtgatccacccgcctcggcttcccaaagtgctgggatt

SEQ ID NO: 100831 - DNA, 80 bp, synthetic construct
  source 1..80: mol_type = other DNA
gcagattaactcagtgccatgtattcaagtttagaatgaaaagcacttatggtgggtgaggaagggcatgttccatgacc

SEQ ID NO: 100832 - DNA, 80 bp, synthetic construct
  source 1..80: mol_type = other DNA
cgggtggatcacctgaggtcagaagtttgagaccagcctggacaacatggtgaaaccttggctgtactaaaaatacaaaa

SEQ ID NO: 100833 - DNA, 80 bp, synthetic construct; identical to SEQ ID NO: 19218
  source 1..80: mol_type = other DNA

SEQ ID NO: 100834 - DNA, 80 bp, synthetic construct
  source 1..80: mol_type = other DNA
cctacagaggctgtggtcagcagtgggcgagtggaaaagtccccacatgaacaggagattaaattctttgccaaggtgag

SEQ ID NO: 100835 - DNA, 80 bp, synthetic construct
  source 1..80: mol_type = other DNA
ccaaccactgcctctatttcttgtccactccggctaaagtgctgggcagcggtggccacgcctctaacaaggagaaggaa

SEQ ID NO: 100836 - DNA, 80 bp, synthetic construct; identical to SEQ ID NO: 19219
  source 1..80: mol_type = other DNA

SEQ ID NO: 100837 - DNA, 80 bp, synthetic construct
  source 1..80: mol_type = other DNA
ctgtagtcccagctactcaggaggctgaggcgggaggatcacttgaacccaggagttggaggctgcagggagctgggatc

SEQ ID NO: 100838 - DNA, 80 bp, synthetic construct
  source 1..80: mol_type = other DNA
cctcctgtctccatcatttggaccccctcctggttcctctctccttgtcttctctgtccctgtctcctctaattgggtca

SEQ ID NO: 100839 - DNA, 80 bp, synthetic construct
  source 1..80: mol_type = other DNA
ctcttccccaccctgaagaaatagctcccaggttctgccttaatttgaacaacctttgttgttttcttcccctggacctg

SEQ ID NO: 100840 - DNA, 80 bp, synthetic construct
  source 1..80: mol_type = other DNA
gggctggggaggagggacatttggaggcgctgtaggagtctgggggggtgggggtgcagtagcattccaacttagcccgc

SEQ ID NO: 100841 - DNA, 80 bp, synthetic construct; identical to SEQ ID NO: 19220
  source 1..80: mol_type = other DNA

SEQ ID NO: 100842 - DNA, 80 bp, synthetic construct
  source 1..80: mol_type = other DNA
tggagaacctgcggctgggcaaggtgtcgcaggcgcgcacccaggtgaaaggcgtgggccagaacctcacctacaccact

SEQ ID NO: 100843 - DNA, 80 bp, synthetic construct
  source 1..80: mol_type = other DNA
ttgaatgtgtggatttcttgctgtaagcaaagcatgcagtcagtaccttggcaggtggcaaatgagttaatgaggacgcg

SEQ ID NO: 100844 - DNA, 80 bp, synthetic construct; identical to SEQ ID NO: 19221
  source 1..80: mol_type = other DNA

SEQ ID NO: 100845 - DNA, 80 bp, synthetic construct
  source 1..80: mol_type = other DNA
ttaaaaaagagagtctattgataaaggttaggaaaagtagcacttggccgagcgcagtggctcacgcctgtaatcccagc

SEQ ID NO: 100846 - DNA, 80 bp, synthetic construct
  source 1..80: mol_type = other DNA
tgcttgaacccaggaggcgaaggttgcagtgcaccaagatcgtgccattgcacgccagcctgggcaacagagcgagactc

SEQ ID NO: 100847 - DNA, 80 bp, synthetic construct
  source 1..80: mol_type = other DNA
gaaaagaaaagtagcacctggatagggttcttctcccatccaactttgtattttgaaattttcaaaacatacaggaaggt

SEQ ID NO: 100848 - DNA, 80 bp, synthetic construct; identical to SEQ ID NO: 19222
  source 1..80: mol_type = other DNA

SEQ ID NO: 100849 - DNA, 80 bp, synthetic construct
  source 1..80: mol_type = other DNA
caaaatgtctttgatttttttaaaagaaattcagaatccagtcaagtttctcctgctgcatttggtggttgtgtctctgt

SEQ ID NO: 100850 - DNA, 80 bp, synthetic construct
  source 1..80: mol_type = other DNA
cttgagaccaggagtttgagatcagcctgggcaacatactgagaccccatctctaaaaaaatttttttttaatttttttt

SEQ ID NO: 100851 - DNA, 80 bp, synthetic construct
  source 1..80: mol_type = other DNA
gctgggattacaggcattcaccaacacactcagataatttttgtatttttagtagagatggggtttcaccatgttgccca

SEQ ID NO: 100852 - DNA, 80 bp, synthetic construct
  source 1..80: mol_type = other DNA
aagatagcctaaaattgcagcaatattgcagttctgtttgcatttttctggaggaagtacccctcactttcattatagag

SEQ ID NO: 100853 - DNA, 80 bp, synthetic construct; identical to SEQ ID NO: 19223
  source 1..80: mol_type = other DNA

SEQ ID NO: 100854 - DNA, 80 bp, synthetic construct
  source 1..80: mol_type = other DNA
ccgaacgctgtgcagtatctactccctgggaaccaccaagaacacttatgtggaaaagtaaggagagggagccatcgttt

SEQ ID NO: 100855 - DNA, 80 bp, synthetic construct
  source 1..80: mol_type = other DNA
gccgcgtgagggcgctcagggacaggtcagccacggaggtagagccgccaggtctggggctgtgaagcaggcaggcctcg

SEQ ID NO: 100856 - DNA, 80 bp, synthetic construct; identical to SEQ ID NO: 19224
  source 1..80: mol_type = other DNA

SEQ ID NO: 100857 - DNA, 80 bp, synthetic construct
  source 1..80: mol_type = other DNA
aatccacctactcctaaggctgagatggggggatcgcttgagctccagcctgagcagcatagggagactgcatctctaca

SEQ ID NO: 100858 - DNA, 80 bp, synthetic construct
  source 1..80: mol_type = other DNA
accctgtcttaaaaaacaaaacaagtggcacacatggatgaatggcagctctgtcccaaagggttctgggaggagccgtt

SEQ ID NO: 100859 - DNA, 80 bp, synthetic construct
  source 1..80: mol_type = other DNA
ccatgccggtggcgttcctggagccgcagctgaacgagtacaacgcctgctccgtgtacaccaccaagtctccgcgggag

SEQ ID NO: 100860 - DNA, 80 bp, synthetic construct
  source 1..80: mol_type = other DNA
gagtttatggttcgggggcatttcaaggccgttacatggggagaatttagagattaatttgatttttgaaaacagaatct

SEQ ID NO: 100861 - DNA, 80 bp, synthetic construct; identical to SEQ ID NO: 19225
  source 1..80: mol_type = other DNA

SEQ ID NO: 100862 - DNA, 80 bp, synthetic construct
  source 1..80: mol_type = other DNA
caaatatgtatcgagcagttactatgtatgaggcgctgtcctagtcacctgaggttcagcagtgaacagataaaacagac

SEQ ID NO: 100863 - DNA, 80 bp, synthetic construct
  source 1..80: mol_type = other DNA
aagggactgaaccgggtgtgggattcagagagacaaggcggggagacagggtggggttggaaaaggtctcttttggagta

SEQ ID NO: 100864 - DNA, 80 bp, synthetic construct; identical to SEQ ID NO: 19226
  source 1..80: mol_type = other DNA

SEQ ID NO: 100865 - DNA, 80 bp, synthetic construct
  source 1..80: mol_type = other DNA
ggtgcccgctacacagagatgccgcatgtcatcgagatcacgctgcccatgctatgcagctacctgccccgatggtggga

SEQ ID NO: 100866 - DNA, 80 bp, synthetic construct
  source 1..80: mol_type = other DNA
cagcctgggctcccttggcagatggtctgaaagggagacccatggtcccctcggagttgggaggagtcagagtgtaggtt

SEQ ID NO: 100867 - DNA, 80 bp, synthetic construct
  source 1..80: mol_type = other DNA
tagccaggtgtggtggcacatgcttatagtcccagctacttgggaggctgaggcaggaggatctcttgagcccaggagtt

SEQ ID NO: 100868 - DNA, 80 bp, synthetic construct; identical to SEQ ID NO: 19227
  source 1..80: mol_type = other DNA

SEQ ID NO: 100869 - DNA, 80 bp, synthetic construct
  source 1..80: mol_type = other DNA
aaaaaaaaaaaaagaaatatttgtgtaaggaaacaggttgtagatcagggtcaacctagaaatcaggagctgggatcaga

SEQ ID NO: 100870 - DNA, 80 bp, synthetic construct
  source 1..80: mol_type = other DNA
tcacaaccttggggtcatagccagaaatcacatagtgaggtaagactctgggtatgggccaggtcagaggttaaagattg

SEQ ID NO: 100871 - DNA, 80 bp, synthetic construct
  source 1..80: mol_type = other DNA
atacaaaagttagctgggtgtggtggcagacgcctgtaatcccagctactcggggctgaggcaggaaaatcgcttgaact

SEQ ID NO: 100872 - DNA, 80 bp, synthetic construct; identical to SEQ ID NO: 19228
  source 1..80: mol_type = other DNA

SEQ ID NO: 100873 - DNA, 80 bp, synthetic construct
  source 1..80: mol_type = other DNA
gctcctgcagtcccacttcatcccaactatcgggcggctgcgcaagagggcagggaaggtggtgtccgaggaggagcagc

SEQ ID NO: 100874 - DNA, 80 bp, synthetic construct
  source 1..80: mol_type = other DNA
cgacctcccacgtcctccagccccatctgatctccgcctcctgactggctagaaacttcttccaatgctctggccccacc

SEQ ID NO: 100875 - DNA, 80 bp, synthetic construct
  source 1..80: mol_type = other DNA
tgcagtggcgcgatctcggctcactgtaacctccacctcccgggttcaagtgattctcctgcctcagccttcccagtagc

SEQ ID NO: 100876 - DNA, 80 bp, synthetic construct
  source 1..80: mol_type = other DNA
ctggccagtgtgattttttttaaatcattctcctaatgctggacatttagattgtgtcgatttctttgtcactatgcaca

SEQ ID NO: 100877 - DNA, 80 bp, synthetic construct; identical to SEQ ID NO: 19229
  source 1..80: mol_type = other DNA

SEQ ID NO: 100878 - DNA, 80 bp, synthetic construct
  source 1..80: mol_type = other DNA
ttgagaccagcctggccaacgtggcgaaaccctgtctctattatgaatacaaaaattagccaggcgtagtgacgcaggct

SEQ ID NO: 100879 - DNA, 80 bp, synthetic construct
  source 1..80: mol_type = other DNA
tcacctcttttgtcttggtggtcgtgtgacattctctgctgttggatatagttcaatttttcaatcagtaaatatgaaca

SEQ ID NO: 100880 - DNA, 80 bp, synthetic construct; identical to SEQ ID NO: 19230
  source 1..80: mol_type = other DNA

SEQ ID NO: 100881 - DNA, 80 bp, synthetic construct
  source 1..80: mol_type = other DNA
gcctcaggctgggactgggaggctgaggtgggaggatcgtttgagcccaggaggtcaaagctgcagtgagctatgatcac

SEQ ID NO: 100882 - DNA, 80 bp, synthetic construct
  source 1..80: mol_type = other DNA
tgactgtaatcccagcactttgggtggccaaagagagtggatcactcaaactcagtctcaaactcagaagtttgagacca

SEQ ID NO: 100883 - DNA, 80 bp, synthetic construct
  source 1..80: mol_type = other DNA
cacaccactgcactccagcctgggcgacagagcgagaccctgtctcaaaaaagaaaaaaagaaaattttttttttttttt

SEQ ID NO: 100884 - DNA, 80 bp, synthetic construct
  source 1..80: mol_type = other DNA
gtagagatgaggtttcaccgtgttagccaggatggtctcgatctcctgacctcgtgatctgcccgcctcggcctcccaaa

SEQ ID NO: 100885 - DNA, 80 bp, synthetic construct; identical to SEQ ID NO: 19231
  source 1..80: mol_type = other DNA

SEQ ID NO: 100886 - DNA, 80 bp, synthetic construct
  source 1..80: mol_type = other DNA
gaaagaggatctcttgagcccaggagttcaagaccagcctggacaacctagggagaccctcttcctacaaaaaataaaat

SEQ ID NO: 100887 - DNA, 80 bp, synthetic construct
  source 1..80: mol_type = other DNA
aaagaaagaaagagagagagagagagagaatggatcgttaaaaaattttaaatgttcagctgggcacagtggcttacacc

SEQ ID NO: 100888 - DNA, 80 bp, synthetic construct; identical to SEQ ID NO: 19232
  source 1..80: mol_type = other DNA

SEQ ID NO: 100889 - DNA, 80 bp, synthetic construct
  source 1..80: mol_type = other DNA
atcccagcgcggaggagctgttcaggatggtgggcgagatcttcatctactggtccaagtcccacgtgagtgcccacccc

SEQ ID NO: 100890 - DNA, 80 bp, synthetic construct
  source 1..80: mol_type = other DNA
agaatgagatcaacaacatgtccttcctgactgctgacaacaaaagcaaaatggctaaggtcggggcttggttctgggag

SEQ ID NO: 100891 - DNA, 80 bp, synthetic construct
  source 1..80: mol_type = other DNA
tcttctccctcctcccatctccctcctcctctccatctccctcttctctcatctctgtctccttcctcctcctgtatctt

SEQ ID NO: 100892 - DNA, 80 bp, synthetic construct; identical to SEQ ID NO: 19233
  source 1..80: mol_type = other DNA

SEQ ID NO: 100893 - DNA, 80 bp, synthetic construct
  source 1..80: mol_type = other DNA
atgccctcttcccccagcctctgcacgcccccgcctcgagaaaacccctgcttctgttccccacccccgtcctcccctcc

SEQ ID NO: 100894 - DNA, 80 bp, synthetic construct
  source 1..80: mol_type = other DNA
agagcaactctcagcttttaccaaagcatcgtgggctgaggtcaagggtaatgggggtgggagaggcacacggagcatgg

SEQ ID NO: 100895 - DNA, 80 bp, synthetic construct
  source 1..80: mol_type = other DNA
gggctctgcgaggactcagggagaagctgcatgtgtggcctgcagcagtgcctggcacaggggtcatgctcaaagttgcc

SEQ ID NO: 100896 - DNA, 80 bp, synthetic construct; identical to SEQ ID NO: 19234
  source 1..80: mol_type = other DNA

SEQ ID NO: 100897 - DNA, 80 bp, synthetic construct
  source 1..80: mol_type = other DNA
ctggatgggcctgggttagaaattggagccaggcaagcatggtggtatgtgcctgtagtcccagctacttgggaggctga

SEQ ID NO: 100898 - DNA, 80 bp, synthetic construct
  source 1..80: mol_type = other DNA
tagagtcagcaagtctggggtggaaattgaggtgtcgtcggcagttggggagggagtgcctggtgtccagactggggcct

SEQ ID NO: 100899 - DNA, 80 bp, synthetic construct
  source 1..80: mol_type = other DNA
ccacactgaagaagatgctgcccatcggcctgaatatgtgtgcgcccaccgaccaagacctcatcacgctggccaagacc

SEQ ID NO: 100900 - DNA, 80 bp, synthetic construct; identical to SEQ ID NO: 19235
  source 1..80: mol_type = other DNA

SEQ ID NO: 100901 - DNA, 80 bp, synthetic construct
  source 1..80: mol_type = other DNA
ccttcaagccccttgggacctactgagaccctcatgacccctccttccctccctgccaagactgaacctctgggttcctg

SEQ ID NO: 100902 - DNA, 80 bp, synthetic construct
  source 1..80: mol_type = other DNA
aacctctgaggtctcaactgtcctggagaccaaaatacccgggctgtagaacctcttaagcttgctgggatatcaaggag

SEQ ID NO: 100903 - DNA, 80 bp, synthetic construct
  source 1..80: mol_type = other DNA
tactaaccccctggacccctaaagaccaccgacttctcccctgctaccaccaggacaccccttccctcagaacctcaggc

SEQ ID NO: 100904 - DNA, 80 bp, synthetic construct
  source 1..80: mol_type = other DNA
acctacgtgatcccccatgacctctgctgaccccttctgatcttcaaagactccctgccccactctgaccccccagtcat

SEQ ID NO: 100905 - DNA, 80 bp, synthetic construct; identical to SEQ ID NO: 19236
  source 1..80: mol_type = other DNA

SEQ ID NO: 100906 - DNA, 80 bp, synthetic construct
  source 1..80: mol_type = other DNA
gaaagtaaccacaatattagtgaaggtttgagcatttaccaaagaccaggcattgaagaaagacctcaaaggtcaggagt

SEQ ID NO: 100907 - DNA, 80 bp, synthetic construct
  source 1..80: mol_type = other DNA
acctgaggttaggagttcgagaccagcctggccaacgtggtgaaaccccgtctctactaaaagtacaaaattagctgggt

SEQ ID NO: 100908 - DNA, 80 bp, synthetic construct; identical to SEQ ID NO: 19237
  source 1..80: mol_type = other DNA

SEQ ID NO: 100909 - DNA, 80 bp, synthetic construct
  source 1..80: mol_type = other DNA
aaaatcgtgcgcagagtccaggaagtgtcagccgtgctctactacctggaccaggtgggtggggccggaggggtctttct

SEQ ID NO: 100910 - DNA, 80 bp, synthetic construct
  source 1..80: mol_type = other DNA
ttagaatggatcgggggaggggtctgctgcttaatcttgcatctgggggcgggacagggaaggggcagatctttaggtct

SEQ ID NO: 100911 - DNA, 80 bp, synthetic construct
  source 1..80: mol_type = other DNA
gagacaaggttttccttctgccgtgtgagtcttaacctgaatatggacttcgacacagctgggcagtttcatccagggct

SEQ ID NO: 100912 - DNA, 80 bp, synthetic construct
  source 1..80: mol_type = other DNA
ggcagtcgtggcctgtttccgtatgacgcccctgtacaacctgcccacgtaaggcccccagggacaagggaagcgtgaag

SEQ ID NO: 100913 - DNA, 80 bp, synthetic construct; identical to SEQ ID NO: 19238
  source 1..80: mol_type = other DNA

SEQ ID NO: 100914 - DNA, 80 bp, synthetic construct
  source 1..80: mol_type = other DNA
agctcctggcttgagtagaaccaaagtagggcgcaggatgtgggaaaagagaaaaaaaaatccagaccaacagggacatg

SEQ ID NO: 100915 - DNA, 80 bp, synthetic construct
  source 1..80: mol_type = other DNA
aaaagaggtgaagactcttgccagggccccagaaatgcccccaaggtcctggggccacccccagcccagcagcttccctg

SEQ ID NO: 100916 - DNA, 80 bp, synthetic construct; identical to SEQ ID NO: 19239
  source 1..80: mol_type = other DNA

SEQ ID NO: 100917 - DNA, 80 bp, synthetic construct
  source 1..80: mol_type = other DNA
caacatacaccgttgcatggctgaacacttcacaagggcatgtctgaggggttcgtatcacagacaatgtagattaacta

SEQ ID NO: 100918 - DNA, 80 bp, synthetic construct
  source 1..80: mol_type = other DNA
cagacagaagtagtggggaggttttctgtaattccctcaaaagcttcatgtaggctaatgacaggcttagtaataaataa

SEQ ID NO: 100919 - DNA, 80 bp, synthetic construct
  source 1..80: mol_type = other DNA
accgccacactgtgagacggattattgcatctcctttgtgtggataagggaatgaaggcacagggatttatttttcattt

SEQ ID NO: 100920 - DNA, 80 bp, synthetic construct
  source 1..80: mol_type = other DNA
tttagtagagacgggctttcaccatgttggccatgcttgtctcaaactcctgacctcaagtgatcttcccgccttggcct

SEQ ID NO: 100921 - DNA, 80 bp, synthetic construct; identical to SEQ ID NO: 19240
  source 1..80: mol_type = other DNA

SEQ ID NO: 100922 - DNA, 80 bp, synthetic construct
  source 1..80: mol_type = other DNA
gcccagggtctttctagctttctgctctgcccttcttagcttttgtctgtagtcctgggtggatgctgcacttctaggca

SEQ ID NO: 100923 - DNA, 80 bp, synthetic construct
  source 1..80: mol_type = other DNA
ctcccgggttcaagcgattctcctgcctcagccttccgagtagctgggattacaggtgcatgccaccatgcccagctatt

SEQ ID NO: 100924 - DNA, 80 bp, synthetic construct; identical to SEQ ID NO: 19241
  source 1..80: mol_type = other DNA

SEQ ID NO: 100925 - DNA, 80 bp, synthetic construct
  source 1..80: mol_type = other DNA
tattaacatacccacccaattggatgactgtgagggtcagtttgttaatatatacaaggcacctagaacaggcactgaca

SEQ ID NO: 100926 - DNA, 80 bp, synthetic construct
  source 1..80: mol_type = other DNA
tggtgttagtgtaaacactcagcaggtgttggccattgtagaggagacccaagcagaaagggattggccatacttgttat

SEQ ID NO: 100927 - DNA, 80 bp, synthetic construct
  source 1..80: mol_type = other DNA
ggccaggagtttgagaccagcctgggcaacatagcaagaccctgtctctacaaaaaaatggaaaaattagccaggtgtgt

SEQ ID NO: 100928 - DNA, 80 bp, synthetic construct; identical to SEQ ID NO: 19242
  source 1..80: mol_type = other DNA

SEQ ID NO: 100929 - DNA, 80 bp, synthetic construct
  source 1..80: mol_type = other DNA
gagtacggtggcgcaatgtcagctcactgcaacctctgcctcccgggttcaagcaattctcctgcctcagcctcccgagt

SEQ ID NO: 100930 - DNA, 80 bp, synthetic construct
  source 1..80: mol_type = other DNA
ccgcaccctgcccagaagctcttataagatgggggtcctctccaccgggtcctgaccactcccctgcttacttccccagc

SEQ ID NO: 100931 - DNA, 80 bp, synthetic construct
  source 1..80: mol_type = other DNA
aactgatgccccctccccagagctgccacctggaggagggaggggagaacggtgaagctgaagaggaggttgaggtctcc

SEQ ID NO: 100932 - DNA, 80 bp, synthetic construct
  source 1..80: mol_type = other DNA
acaccacggagtgtacaccatggtcatgggggaagctcaggcagaggggtcagggctggaattggggaggctcaggcaga

SEQ ID NO: 100933 - DNA, 80 bp, synthetic construct; identical to SEQ ID NO: 19243
  source 1..80: mol_type = other DNA

SEQ ID NO: 100934 - DNA, 80 bp, synthetic construct
  source 1..80: mol_type = other DNA
tttctgtgccagagtcccttctggcatctggtgaagactttctcaggatcatgtttttaaatgtataaaatgaattcata

SEQ ID NO: 100935 - DNA, 80 bp, synthetic construct
  source 1..80: mol_type = other DNA
cacctgaggccaggagttcaagaccagcctggccaacatggtgaaaccccatctctactaaaaatacaaaaatgagctgg

SEQ ID NO: 100936 - DNA, 80 bp, synthetic construct
  source 1..80: mol_type = other DNA
agatccaacagctactataattgagaagtagtgatgaacataactgatatttaaagacatctttgagccattgtgagtga

SEQ ID NO: 100937 - DNA, 80 bp, synthetic construct; identical to SEQ ID NO: 19244
  source 1..80: mol_type = other DNA

SEQ ID NO: 100938 - DNA, 80 bp, synthetic construct
  source 1..80: mol_type = other DNA
cctcccaagtagctaggactacaggctcatgccaccacgcctggctaattttttgtatttttagtagaggcggggtttca

SEQ ID NO: 100939 - DNA, 80 bp, synthetic construct
  source 1..80: mol_type = other DNA
ggcttcatccatataggaaggaaatgcttcatttctgttagagggcggaaaacataaaaatgtaacttttcatcatccaa

SEQ ID NO: 100940 - DNA, 80 bp, synthetic construct; identical to SEQ ID NO: 19245
  source 1..80: mol_type = other DNA

SEQ ID NO: 100941 - DNA, 80 bp, synthetic construct
  source 1..80: mol_type = other DNA
agtgcactcatcctaacctcactcctcctggctcgcccattccctgtggacccatttgccgcccctcaatgcctgtggtt

SEQ ID NO: 100942 - DNA, 80 bp, synthetic construct
  source 1..80: mol_type = other DNA
acactgccttccaactgggtggaccatcttttttctcccactccctccaggagagacaggtgccatggtgtcctccaccc

SEQ ID NO: 100943 - DNA, 80 bp, synthetic construct
  source 1..80: mol_type = other DNA
cttaaggacaagaaggaagttggcttcttccagagtatccaggcactgatgcaaacatgcaggtaggttcgagtggacct

SEQ ID NO: 100944 - DNA, 80 bp, synthetic construct
  source 1..80: mol_type = other DNA
aatgtcatagacttgaagaatgagttgcattatgaattccagacagtggaaccaaaaacttgagaatttaaggggaactt

SEQ ID NO: 100945 - DNA, 80 bp, synthetic construct; identical to SEQ ID NO: 19246
  source 1..80: mol_type = other DNA

SEQ ID NO: 100946 - DNA, 80 bp, synthetic construct
  source 1..80: mol_type = other DNA
ggtgaatgaggatggcactggtgaggccctcccttgggcttcccaccccctgagacatcttcctttgggattcctcccac

SEQ ID NO: 100947 - DNA, 80 bp, synthetic construct
  source 1..80: mol_type = other DNA
gccaccagaagtcattctgtcttgtgttctcacccatcactacatggaccccaccctccacgtgccccaaatgtcacgcc

SEQ ID NO: 100948 - DNA, 80 bp, synthetic construct; identical to SEQ ID NO: 19247
  source 1..80: mol_type = other DNA

SEQ ID NO: 100949 - DNA, 80 bp, synthetic construct
  source 1..80: mol_type = other DNA
attcccccagcccacccccgtgctgtgctgctgtcacccacccctcctaaccccgtccacccctccacctaggggctgag

SEQ ID NO: 100950 - DNA, 80 bp, synthetic construct
  source 1..80: mol_type = other DNA
tttccccatgtgtgaagcagaagctagagaacatggtaaagatctctttccagctggatattgtcggacttccagaccca

SEQ ID NO: 100951 - DNA, 80 bp, synthetic construct
  source 1..80: mol_type = other DNA
cctctgtgcctgctctggttggcccatttgcggtctagcctcctcccctaccgcccaccatgatttgcttctttcagatg

SEQ ID NO: 100952 - DNA, 80 bp, synthetic construct; identical to SEQ ID NO: 19248
  source 1..80: mol_type = other DNA

SEQ ID NO: 100953 - DNA, 80 bp, synthetic construct
  source 1..80: mol_type = other DNA
ctcacagtgtctttggagtggcagctgctcctcccagcacccccatgctttgtgcatgcgtgtgcagtgtgcatgggcct

SEQ ID NO: 100954 - DNA, 80 bp, synthetic construct
  source 1..80: mol_type = other DNA
ggggtgtggggtggaggggaagccgaggtttggggctggtacggaagggttgactgaattagtttccgcccctcctcctc

SEQ ID NO: 100955 - DNA, 80 bp, synthetic construct
  source 1..80: mol_type = other DNA
aacatggtgaaaccccgtctctactaaaaatataaaaaaaatagcagggcgtggtggcacatgcttgtagtcccagctac

SEQ ID NO: 100956 - DNA, 80 bp, synthetic construct; identical to SEQ ID NO: 19249
  source 1..80: mol_type = other DNA

SEQ ID NO: 100957 - DNA, 80 bp, synthetic construct
  source 1..80: mol_type = other DNA
ataaaatctttgcagaggaaagatctgtacaaaggcctacagattctttcctatcttaagcaagagttttgttttgttgt

SEQ ID NO: 100958 - DNA, 80 bp, synthetic construct
  source 1..80: mol_type = other DNA
acatgtacagtctcaagattgtggttataacctttagcaggtgattaggaaaccacagactacccggaaatcaactttcg

SEQ ID NO: 100959 - DNA, 80 bp, synthetic construct
  source 1..80: mol_type = other DNA
aggataaagtatgatctctttgtcttgaattttcaaaagctcttgtgtccacaacgagtttttcaaggtttattaaatac

SEQ ID NO: 100960 - DNA, 80 bp, synthetic construct; identical to SEQ ID NO: 19250
  source 1..80: mol_type = other DNA

SEQ ID NO: 100961 - DNA, 80 bp, synthetic construct
  source 1..80: mol_type = other DNA
tcaggaatatgaagttttgaaaatgagaatgttgttatgaaagggattgctgtctcccaacatatttgcaacccagtcct

SEQ ID NO: 100962 - DNA, 80 bp, synthetic construct
  source 1..80: mol_type = other DNA
ttgcacatgtctataacaggtgttgtcagttgccagaattttttttacaggagctgtgtatcttttatttttgcatatag

SEQ ID NO: 100963 - DNA, 80 bp, synthetic construct
  source 1..80: mol_type = other DNA
tgttgagccaacctgatagagcaattgtgaactgactgtaaaaaagttaaggggaaagaaaaacggggggcaaaaatact

SEQ ID NO: 100964 - DNA, 80 bp, synthetic construct; identical to SEQ ID NO: 19251
  source 1..80: mol_type = other DNA

SEQ ID NO: 100965 - DNA, 80 bp, synthetic construct
  source 1..80: mol_type = other DNA
catatactacagtgtaataaacctccaatcatatactacagtgtaataaatctccaatcatatactacagtgtaataaac

SEQ ID NO: 100966 - DNA, 80 bp, synthetic construct
  source 1..80: mol_type = other DNA
acagtgtaataaacctccaatcatatactaaagtgtaataaacctccaatcatatactacagtgtaataaacctccaatc

SEQ ID NO: 100967 - DNA, 80 bp, synthetic construct
  source 1..80: mol_type = other DNA
ttaacagtttgctttcacagaacaatgttttttaaatagtgggaaccaacccatcagacagacgttcatgaatcagtttc

SEQ ID NO: 100968 - DNA, 80 bp, synthetic construct; identical to SEQ ID NO: 19252
  source 1..80: mol_type = other DNA

SEQ ID NO: 100969 - DNA, 80 bp, synthetic construct
  source 1..80: mol_type = other DNA
ggatcacaaggtcaggagttggagaccagcctgtccaatatggtgaaaccctgtctctactaaaaatgcaaaaaaattag

SEQ ID NO: 100970 - DNA, 80 bp, synthetic construct
  source 1..80: mol_type = other DNA
tcctaccatagattgcagtcagaaaagattaaaaaattactgcacaagaatataaacttcacaagggcaggggctggaca

SEQ ID NO: 100971 - DNA, 80 bp, synthetic construct
  source 1..80: mol_type = other DNA
aggtgggaggaccacttgaacccaggaggtcaaggctgcagtgagctatgatcatgccacagtactccaacctaggcaac

SEQ ID NO: 100972 - DNA, 80 bp, synthetic construct
  source 1..80: mol_type = other DNA
cgtgaggatgtagtatacactcaataaaatatgttgaataaatgaacaagtgaccaatccatatgttccctggcctttag

SEQ ID NO: 100973 - DNA, 80 bp, synthetic construct; identical to SEQ ID NO: 19253
  source 1..80: mol_type = other DNA

SEQ ID NO: 100974 - DNA, 80 bp, synthetic construct
  source 1..80: mol_type = other DNA
tgggattacaggcacatgccaccacacctggctaattttgtattttttttagtagagacgggatttcaccatgttggcca

SEQ ID NO: 100975 - DNA, 80 bp, synthetic construct
  source 1..80: mol_type = other DNA
gactgcaatggtgagatctccactcactgcaacctctgcctccggggttgaagcgattctcctgcctcagcctcccaagt

SEQ ID NO: 100976 - DNA, 80 bp, synthetic construct
  source 1..80: mol_type = other DNA
ccggccagtatttttagacaaatgaataaatgatcatccatctttctctgtcacatagtaagtacttgatagttattaaa

SEQ ID NO: 100977 - DNA, 80 bp, synthetic construct; identical to SEQ ID NO: 19254
  source 1..80: mol_type = other DNA

SEQ ID NO: 100978 - DNA, 80 bp, synthetic construct
  source 1..80: mol_type = other DNA
ggaatccatcagcgacttctactggtactactcgggcaaggatgtcattgaagagcagggcaagaggaacttctccaaag

SEQ ID NO: 100979 - DNA, 80 bp, synthetic construct
  source 1..80: mol_type = other DNA
ggtccctgcaccgggaaccagcagagcctggcgcacagtcgcctatgggacgcagtggtgggattcctgcacgtgttcgc

SEQ ID NO: 100980 - DNA, 80 bp, synthetic construct
  source 1..80: mol_type = other DNA
aaatccatcctctttctggattggctgtctgcatgaccccgcctcctcctctgcccctccctccccaccaatcagctggt

SEQ ID NO: 100981 - DNA, 80 bp, synthetic construct; identical to SEQ ID NO: 19255
  source 1..80: mol_type = other DNA

SEQ ID NO: 100982 - DNA, 80 bp, synthetic construct
  source 1..80: mol_type = other DNA
cgatctctgagagcattcacatcctacacataatggtgtatttattacaatagtttagttttccagcagatggcagtaaa

SEQ ID NO: 100983 - DNA, 80 bp, synthetic construct
  source 1..80: mol_type = other DNA
aaaaggagttaaacttagaatgcaattcctccgtgtcacagcagctgaagttgtgctgttggtatcctaaaattctagag

SEQ ID NO: 100984 - DNA, 80 bp, synthetic construct; identical to SEQ ID NO: 19256
  source 1..80: mol_type = other DNA

SEQ ID NO: 100985 - DNA, 80 bp, synthetic construct
  source 1..80: mol_type = other DNA
tgaaccaatcatcataggcttaggaaagaaagctttgactgaccaggcccggtcatatacccacctatagaaccaggagg

SEQ ID NO: 100986 - DNA, 80 bp, synthetic construct
  source 1..80: mol_type = other DNA
gcagaatgcagagctttggaactgtggaaatacattaggattggaatcaacaactgatagaactagcatgggagcaaaag

SEQ ID NO: 100987 - DNA, 80 bp, synthetic construct
  source 1..80: mol_type = other DNA
gagaccagcctcaccaacatggagaaaccccatctctgttaaaagtaaaaaattagctgggtatggtggcgcatgcctgt

SEQ ID NO: 100988 - DNA, 80 bp, synthetic construct; identical to SEQ ID NO: 19257
  source 1..80: mol_type = other DNA

SEQ ID NO: 100989 - DNA, 80 bp, synthetic construct
  source 1..80: mol_type = other DNA
cccagagtcccactcttgccatcacacattatattcaacatacatctgtcaatcccaccgtaggccaggcacagtgctgg

SEQ ID NO: 100990 - DNA, 80 bp, synthetic construct
  source 1..80: mol_type = other DNA
caaccccacccccacaatcttgtctctctgccccttcccctgcttccgaggaacatgtctggactcgggtcccctcggag

SEQ ID NO: 100991 - DNA, 80 bp, synthetic construct
  source 1..80: mol_type = other DNA
aggacatggtggtgatgttgctgtcgctactagaaggtaaacacccaggagtgagggtgagggaacagtaaagaggttca

SEQ ID NO: 100992 - DNA, 80 bp, synthetic construct
  source 1..80: mol_type = other DNA
cacctgaagtcaggagtttgagaccagcctgggcaacatggtgagaccctgtctctactaaaaatacaaaaattagccta

SEQ ID NO: 100993 - DNA, 80 bp, synthetic construct; identical to SEQ ID NO: 19258
  source 1..80: mol_type = other DNA

SEQ ID NO: 100994 - DNA, 80 bp, synthetic construct
  source 1..80: mol_type = other DNA
tgggactacaggcgcccgccaccacacctggctaatttttttttttttttttttgtatttttagtagagacggggtttca

SEQ ID NO: 100995 - DNA, 80 bp, synthetic construct
  source 1..80: mol_type = other DNA
acaaaaataaactggagccaagcttcagctgctgcctttagagggagtgtgggatcgcagtttgccaatctctacctctc

SEQ ID NO: 100996 - DNA, 80 bp, synthetic construct; identical to SEQ ID NO: 19259
  source 1..80: mol_type = other DNA

SEQ ID NO: 100997 - DNA, 80 bp, synthetic construct
  source 1..80: mol_type = other DNA
tcaagcaattctcgtgcctcagcctcccaagtagctggaaatacaagcacatgccaccacgcccagctgattttgtattt

SEQ ID NO: 100998 - DNA, 80 bp, synthetic construct
  source 1..80: mol_type = other DNA
aggatcagccaggttggcacaggaggctgacgcaggtcaggaagggacctgtggaggggaggctgtggctggccagggac

SEQ ID NO: 100999 - DNA, 80 bp, synthetic construct
  source 1..80: mol_type = other DNA
atccaatgtggagatgatcctcaagttcttcgacatgttcctgaaactcaaggacattgtgggctctgaagccttccagg

SEQ ID NO: 101000 - DNA, 80 bp, synthetic construct; identical to SEQ ID NO: 19260
  source 1..80: mol_type = other DNA

SEQ ID NO: 101001 - DNA, 80 bp, synthetic construct
  source 1..80: mol_type = other DNA
tcatgcctggctaatttttaagtttattttttgtagagatgtggtctcactacattacccaggctcctcttgaactcttg

SEQ ID NO: 101002 - DNA, 80 bp, synthetic construct
  source 1..80: mol_type = other DNA
attgtgaataggcatcagttattccatcaataaacattggctggctttcttctctgtgtagggcctgtagtgacactatt

SEQ ID NO: 101003 - DNA, 80 bp, synthetic construct
  source 1..80: mol_type = other DNA
tgggtttatagtctaatgggggaggcagtcactaactagaccattccaagtctaaataatgagcctgctaggagggaagt

SEQ ID NO: 101004 - DNA, 80 bp, synthetic construct
  source 1..80: mol_type = other DNA
cctataatcccagcaatttgggaggccgaggtgggaggatcgcttgagcccaagagttcgagatcagcctgggcaaccta

SEQ ID NO: 101005 - DNA, 80 bp, synthetic construct; identical to SEQ ID NO: 19261
  source 1..80: mol_type = other DNA

SEQ ID NO: 101006 - DNA, 80 bp, synthetic construct
  source 1..80: mol_type = other DNA
ttctcctgcctcagcctcctgagtagctgggattacaggcacgcaccaccatgcccagctaaatttgtgtgtgtgtgtgt

SEQ ID NO: 101007 - DNA, 80 bp, synthetic construct
  source 1..80: mol_type = other DNA
tagccaatttccctttactttgaaacacttcagcgtgtatctcctgagaacaaattcattctcctacctaagcacaggac

SEQ ID NO: 101008 - DNA, 80 bp, synthetic construct; identical to SEQ ID NO: 19262
  source 1..80: mol_type = other DNA

SEQ ID NO: 101009 - DNA, 80 bp, synthetic construct
  source 1..80: mol_type = other DNA
gtgtcctcagtgtaatgtattaggaggcacatgtggtttcatcccattactgtttattttcttatttatttgtttttaga

SEQ ID NO: 101010 - DNA, 80 bp, synthetic construct
  source 1..80: mol_type = other DNA
tactgttgttaacttggatggcttggttaactcggtgttcaccaggggctccacaatgaagttactgttattccctttgg

SEQ ID NO: 101011 - DNA, 80 bp, synthetic construct
  source 1..80: mol_type = other DNA
ggtggttttctcatttcgccgtatgctttaccatcactaggcaccattttactgtaagaaagagtgtttccttcttgtcc

SEQ ID NO: 101012 - DNA, 80 bp, synthetic construct
  source 1..80: mol_type = other DNA
tccgcctcctgggttcagtgattcttctgcctcagcctcccaagtcgctgggattacaggtatgcaccaccatgcctggc

SEQ ID NO: 101013 - DNA, 80 bp, synthetic construct; identical to SEQ ID NO: 19263
  source 1..80: mol_type = other DNA

SEQ ID NO: 101014 - DNA, 80 bp, synthetic construct
  source 1..80: mol_type = other DNA
tgtcaggctcctgaaactcctctgaccaagatcatcagtgacctctttacctctgactgtcccctctgacttgtcatctt

SEQ ID NO: 101015 - DNA, 80 bp, synthetic construct
  source 1..80: mol_type = other DNA
aagagctcatagttaccatattctcactctgtgccctgcgtataaatgaatttgctcatttagtccttacagcaacccta

SEQ ID NO: 101016 - DNA, 80 bp, synthetic construct; identical to SEQ ID NO: 19264
  source 1..80: mol_type = other DNA

SEQ ID NO: 101017 - DNA, 80 bp, synthetic construct
  source 1..80: mol_type = other DNA
tgcaaactccgcttcctgggttcaagcgattcttctgccttagcttcccgagtagctggactacaggcatgcgccaccac

SEQ ID NO: 101018 - DNA, 80 bp, synthetic construct
  source 1..80: mol_type = other DNA
ttttatggatgtggaaactgaggcacagggagattaaacggacatgcttaaggtcacccatcttaataagtgacaaggtt

SEQ ID NO: 101019 - DNA, 80 bp, synthetic construct
  source 1..80: mol_type = other DNA
gggtggctacaagagaagcaaaaagcatttgcaggagctaaagtacacatgattcacaattgaaaatgagtaatgatctc

SEQ ID NO: 101020 - DNA, 80 bp, synthetic construct; identical to SEQ ID NO: 19265
  source 1..80: mol_type = other DNA

SEQ ID NO: 101021 - DNA, 80 bp, synthetic construct
  source 1..80: mol_type = other DNA
ctaaaaatacagaaattagccaagcatggtggcaggtgcctgtaatcccggctactcaggaggctaaggcaggagaatcc

SEQ ID NO: 101022 - DNA, 80 bp, synthetic construct
  source 1..80: mol_type = other DNA
aaggcaggaggattgcttgaggccaggagttcaagaccagcctggacaatatagcaagaccccattgctaaaaaaaaaaa

SEQ ID NO: 101023 - DNA, 80 bp, synthetic construct
  source 1..80: mol_type = other DNA
gtctcaaaaaaacatttatcaaaatacagcaaggcgtgaagtgagaagtcttactcctgctcttttccaatccactcttc

SEQ ID NO: 101024 - DNA, 80 bp, synthetic construct
  source 1..80: mol_type = other DNA
aggaagtgtcgtcattcttttttacaggtgtccaatattccacgctgtgtgtatattatggtttatttgctattccttgt

SEQ ID NO: 101025 - DNA, 80 bp, synthetic construct; identical to SEQ ID NO: 19266
  source 1..80: mol_type = other DNA

SEQ ID NO: 101026 - DNA, 80 bp, synthetic construct
  source 1..80: mol_type = other DNA
aaaatacgaaaaaatagcgggcatggtggcatgcacctgtaatcccagctgcttgggaggctgaggcagagaattgcttg

SEQ ID NO: 101027 - DNA, 80 bp, synthetic construct
  source 1..80: mol_type = other DNA
atcacatcttcattgatgaagtactttgtagatttcaaaacatctactatagcttggaaggccctttctggtgtttgaaa

SEQ ID NO: 101028 - DNA, 80 bp, synthetic construct; identical to SEQ ID NO: 19267
  source 1..80: mol_type = other DNA

SEQ ID NO: 101029 - DNA, 80 bp, synthetic construct
  source 1..80: mol_type = other DNA
cattttaatcatcctttgaaaacgaaccccatacccattagcagtcatttcccacttcccccaccccagcccccggtaac

SEQ ID NO: 101030 - DNA, 80 bp, synthetic construct
  source 1..80: mol_type = other DNA
gaagagcctgggcaacatggcgaaaccctgtctccactaaaaatacaaaaaattagccgagtgtggtggcacatgcctgt

SEQ ID NO: 101031 - DNA, 80 bp, synthetic construct
  source 1..80: mol_type = other DNA
gtgtatgtgtgtgtggccttaaaagacgttccttttatttaacaaaccacaatgtcatcactcctaacccaaaataaaac

SEQ ID NO: 101032 - DNA, 80 bp, synthetic construct; identical to SEQ ID NO: 19268
  source 1..80: mol_type = other DNA

SEQ ID NO: 101033 - DNA, 80 bp, synthetic construct
  source 1..80: mol_type = other DNA
ttctttttccttgcaatttatctcctggagatccagtcctgcagatctttactgtccaacagaaatacaatatgagcaat

SEQ ID NO: 101034 - DNA, 80 bp, synthetic construct
  source 1..80: mol_type = other DNA
gcgccaccacacctggctaatttttgtatttttagtagagacaaggtttcgccatgttggccagggtagtctcaaactcc

SEQ ID NO: 101035 - DNA, 80 bp, synthetic construct
  source 1..80: mol_type = other DNA
ggcgggaggatcacttgaggccaggagtttgagccagcctgcgtaacacagcaaaaccctatctctataaaaactttaaa

SEQ ID NO: 101036 - DNA, 80 bp, synthetic construct
  source 1..80: mol_type = other DNA
aaagtaaaatgaaacactacacataatctagtacactcaggatattatttcaacatggaatcaatcctgtttatttattt

SEQ ID NO: 101037 - DNA, 80 bp, synthetic construct; identical to SEQ ID NO: 19269
  source 1..80: mol_type = other DNA

SEQ ID NO: 101038 - DNA, 80 bp, synthetic construct
  source 1..80: mol_type = other DNA
ccagatgccagcagctgtttctgctcaacactcagacatattcattcattagagattgcaaaatggcgatagtctcattt

SEQ ID NO: 101039 - DNA, 80 bp, synthetic construct
  source 1..80: mol_type = other DNA
gcccagcctcttagttttcatgatgcttccttcacttgacaaatgagtatgagtacctactgtgtgtcaggcactgccct

SEQ ID NO: 101040 - DNA, 80 bp, synthetic construct; identical to SEQ ID NO: 19270
  source 1..80: mol_type = other DNA

SEQ ID NO: 101041 - DNA, 80 bp, synthetic construct
  source 1..80: mol_type = other DNA
ctacttgggaggctgaggcaagagaatcacttgaacccaggagggggaggttgctgtgagccaagatcgcgtcattgcac

SEQ ID NO: 101042 - DNA, 80 bp, synthetic construct
  source 1..80: mol_type = other DNA
gattgcaccactgcactccagcatgggcaacagagtgagactctctcaaaaataaaataaaataatacaataaaatataa

SEQ ID NO: 101043 - DNA, 80 bp, synthetic construct
  source 1..80: mol_type = other DNA
gggtatggtggtgcatgcctgtggtcccaacttggaaggctaagacgggaggatcacttgagcccaggaggtcgaggcta

SEQ ID NO: 101044 - DNA, 80 bp, synthetic construct; identical to SEQ ID NO: 19271
  source 1..80: mol_type = other DNA

SEQ ID NO: 101045 - DNA, 80 bp, synthetic construct
  source 1..80: mol_type = other DNA
tgcctgtaatctcagctactcagaagactgaggcaggagaatcgcttgaaccctggaggcagaggtttcagtgagccaag

SEQ ID NO: 101046 - DNA, 80 bp, synthetic construct
  source 1..80: mol_type = other DNA
ggccagcctggccaacatggcgaaaccctgtctctactaaaaatacagaattagccagtgtggtggcacacgcctgtagt

SEQ ID NO: 101047 - DNA, 80 bp, synthetic construct
  source 1..80: mol_type = other DNA
atgaatgatgacacagagagatcagcaaatcacaagagcaaagtctaggagtgaatggaggtgatagtgtcccaggcgcc

SEQ ID NO: 101048 - DNA, 80 bp, synthetic construct
  source 1..80: mol_type = other DNA
ttacaggcacgcaccatcatgcctaactaatttttgtatttttagtagagacggggtttcaccatgttgtccaggctggt

SEQ ID NO: 101049 - DNA, 80 bp, synthetic construct; identical to SEQ ID NO: 19272
  source 1..80: mol_type = other DNA

SEQ ID NO: 101050 - DNA, 80 bp, synthetic construct
  source 1..80: mol_type = other DNA
ggaggtaatgaaattaatttagcaatgcgtaactcgtgaccagcatctttagaaataaaatagaacactgcagagtgtgc

SEQ ID NO: 101051 - DNA, 80 bp, synthetic construct
  source 1..80: mol_type = other DNA
acctcttgcaaaaatgcatgggcaatcagcacaagaatgttcaagaaaagtgttgtctgaaagaaatctgtgggtgaact

SEQ ID NO: 101052 - DNA, 80 bp, synthetic construct; identical to SEQ ID NO: 19273
  source 1..80: mol_type = other DNA

SEQ ID NO: 101053 - DNA, 80 bp, synthetic construct
  source 1..80: mol_type = other DNA
ggccgaggcgggtggatcacctgaggacaggagttcgagaccagcctggccaacatgatgaaaccctatctcactaaaaa

SEQ ID NO: 101054 - DNA, 80 bp, synthetic construct
  source 1..80: mol_type = other DNA
tgcactccagcctgggcgacaagagcgaaactccgtctcaaaaaaaaaaaaaaaaaaaaagagaaagaaaaagaaaaaaa

SEQ ID NO: 101055 - DNA, 80 bp, synthetic construct
  source 1..80: mol_type = other DNA
acttgagcccgggggtggggatggggacgagaggggatgtcttgaggctgggttgagctgtgattgcgccactgcactcc

SEQ ID NO: 101056 - DNA, 80 bp, synthetic construct; identical to SEQ ID NO: 19274
  source 1..80: mol_type = other DNA

SEQ ID NO: 101057 - DNA, 80 bp, synthetic construct
  source 1..80: mol_type = other DNA
gagcatccttgagtacttccgcccctacctgggccgcatcgagatcatgggcgcgtcacgccgcatcgagcgcatctact

SEQ ID NO: 101058 - DNA, 80 bp, synthetic construct
  source 1..80: mol_type = other DNA
tccggcaagcccacgcccacccttttgtacacatttcgtccagctgcgcccttgcacatccctggctcgcccctggccac

SEQ ID NO: 101059 - DNA, 80 bp, synthetic construct
  source 1..80: mol_type = other DNA
tctcacctcctcgaacctgcatggcgacacaccccttgctcaccttcccagtagcccccggcgtgccgtctcttggtcct

SEQ ID NO: 101060 - DNA, 80 bp, synthetic construct; identical to SEQ ID NO: 19275
  source 1..80: mol_type = other DNA

SEQ ID NO: 101061 - DNA, 80 bp, synthetic construct
  source 1..80: mol_type = other DNA
ctcctatgcccagcccacaaatgcttgaacatccctcacacactcgcttgccccaagggtacactcacgtggtcccggca

SEQ ID NO: 101062 - DNA, 80 bp, synthetic construct
  source 1..80: mol_type = other DNA
ctcacacacatagcccgggaggtttgcgcacccgtcacctccttcatgagtgggcccttcatatgtctcctcaggggaca

SEQ ID NO: 101063 - DNA, 80 bp, synthetic construct
  source 1..80: mol_type = other DNA
acagagtcccaggcccttgcacacctgccccgtgtgcccacgtccaccgtgcacactgagcctctcgtggttgcacactt

SEQ ID NO: 101064 - DNA, 80 bp, synthetic construct
  source 1..80: mol_type = other DNA
tgcagcatcctggcacccaggatgtccacacatccctgcctctgcaggaagcccctgttcaccacggcccttcccactca

SEQ ID NO: 101065 - DNA, 80 bp, synthetic construct; identical to SEQ ID NO: 19276
  source 1..80: mol_type = other DNA

SEQ ID NO: 101066 - DNA, 80 bp, synthetic construct
  source 1..80: mol_type = other DNA
ggcggggttttgccatgttggcaaggctggtcttgaactcctgacctcaggtgatccgcccgcctcggcctcccaaagtg

SEQ ID NO: 101067 - DNA, 80 bp, synthetic construct
  source 1..80: mol_type = other DNA
aggtccagagagttaattcaaaatcacccagctactcagtggcagaatcaggatttgaacccaggcaggctggctgcaga

SEQ ID NO: 101068 - DNA, 80 bp, synthetic construct
  source 1..80: mol_type = other DNA
agaaaacccgctagccctaggcttgtttgtgaggattaaatgagttttatggaaactgcttgtatggggcctggccttat

SEQ ID NO: 101069 - DNA, 80 bp, synthetic construct; identical to SEQ ID NO: 19277
  source 1..80: mol_type = other DNA

SEQ ID NO: 101070 - DNA, 80 bp, synthetic construct
  source 1..80: mol_type = other DNA
gctactcaggaggccgaggcatggggatcatgtgaaccctggggacgaaggttacagtgagacagcgtcacttcattcca

SEQ ID NO: 101071 - DNA, 80 bp, synthetic construct
  source 1..80: mol_type = other DNA
gattacaggggtgcgccaccacaccggctaatttttgcatttttagtagagacgggggtttcaccatgttggccaggctg

SEQ ID NO: 101072 - DNA, 80 bp, synthetic construct; identical to SEQ ID NO: 19278
  source 1..80: mol_type = other DNA

SEQ ID NO: 101073 - DNA, 80 bp, synthetic construct
  source 1..80: mol_type = other DNA
gcgcggcggaggcgggcgcggaaggcgcggaggagggcgcggcggggctcgagggcacggcggccacggcggcggcgggg

SEQ ID NO: 101074 - DNA, 80 bp, synthetic construct
  source 1..80: mol_type = other DNA
ctggcgcgggggcggcggcgggcgcgctgggcctgctctggggctcgctgttcggcggcggcctggtggagggcgccaag

SEQ ID NO: 101075 - DNA, 80 bp, synthetic construct
  source 1..80: mol_type = other DNA
tgcacgaggccgggccgggcggtgccgacggggcggtggccgtgaccgatgggggccccttccggcccgaaggggctggc

SEQ ID NO: 101076 - DNA, 80 bp, synthetic construct
  source 1..80: mol_type = other DNA
acacacagaggagagaactggctagggggatgggcacacgcacccacggaggacgcacccatggaggacgcacacgggga

SEQ ID NO: 101077 - DNA, 80 bp, synthetic construct; identical to SEQ ID NO: 19279
  source 1..80: mol_type = other DNA

SEQ ID NO: 101078 - DNA, 80 bp, synthetic construct
  source 1..80: mol_type = other DNA
atataaaaattagccgggcatggtggtgtgcgcctgtaatcccagctactcgggaggctgaggcaggagaatcgcttgaa

SEQ ID NO: 101079 - DNA, 80 bp, synthetic construct
  source 1..80: mol_type = other DNA
caagactaaaaaaagtcccgagacagggtcagggccactaggaaaagaccctcggagatactcgttgtgggaatgaagta

SEQ ID NO: 101080 - DNA, 80 bp, synthetic construct; identical to SEQ ID NO: 19280
  source 1..80: mol_type = other DNA

SEQ ID NO: 101081 - DNA, 80 bp, synthetic construct
  source 1..80: mol_type = other DNA
gatgcttgccctgtccctaggtggatggagtggaggaggagctcccgccagagccagagcccgagccggaaccagagctg

SEQ ID NO: 101082 - DNA, 80 bp, synthetic construct
  source 1..80: mol_type = other DNA
tcctcggcatcacccagcccagactcaggcacggaggaggggctctgagtaaaagaatcaagaaataaatgctccaacct

SEQ ID NO: 101083 - DNA, 80 bp, synthetic construct
  source 1..80: mol_type = other DNA
agaaaaaaaaatatggagagatagaaaaatgaaaactcccatctaactgccaggccttcgcatgtgctttcccgctgcct

SEQ ID NO: 101084 - DNA, 80 bp, synthetic construct; identical to SEQ ID NO: 19281
  source 1..80: mol_type = other DNA

SEQ ID NO: 101085 - DNA, 80 bp, synthetic construct
  source 1..80: mol_type = other DNA
tccaaagaaggaggaagctggaggcgaattctggggagaactggaggtgcagagggtgaagttcctggtaaggatccagc

SEQ ID NO: 101086 - DNA, 80 bp, synthetic construct
  source 1..80: mol_type = other DNA
ttcagatggccctcacttggttccttgtcccttccctgctcactatccttattccaacctccatacctctgttcatcggg

SEQ ID NO: 101087 - DNA, 80 bp, synthetic construct
  source 1..80: mol_type = other DNA
attcctggggaagcgttcatctcatccaggccaggaagaagggtgggtgttgggaggcaggtcccagggttccctccatc

SEQ ID NO: 101088 - DNA, 80 bp, synthetic construct; identical to SEQ ID NO: 19282
  source 1..80: mol_type = other DNA

SEQ ID NO: 101089 - DNA, 80 bp, synthetic construct
  source 1..80: mol_type = other DNA
ttccgtcagaatttgtgggaagaatgagggatggagggaaaggtggagagaaagagggagagatggaagatgttcctggc

SEQ ID NO: 101090 - DNA, 80 bp, synthetic construct
  source 1..80: mol_type = other DNA
cccaggttggagtgcagtggcacaatctcggctcactgcaagctctgactcctgggttcacgccattctcctgcctcagc

SEQ ID NO: 101091 - DNA, 80 bp, synthetic construct
  source 1..80: mol_type = other DNA
gccactgcacctggccgaatatttttaatctttttttttttttaattactgctccttgcagagcagggctaccctctagg

SEQ ID NO: 101092 - DNA, 80 bp, synthetic construct
  source 1..80: mol_type = other DNA
ggtgagagtaagaccttgactcaaaaaaaaaaaaaattccctttcatcttctgtaaagcaggcagggcgacaggtggggt

SEQ ID NO: 101093 - DNA, 80 bp, synthetic construct; identical to SEQ ID NO: 19283
  source 1..80: mol_type = other DNA

SEQ ID NO: 101094 - DNA, 80 bp, synthetic construct
  source 1..80: mol_type = other DNA
aaaactaactgagtgtggtggtgcatacctgtaatcccagctacttaggaggctgagtcatgagaatttgaacccggtag

SEQ ID NO: 101095 - DNA, 80 bp, synthetic construct
  source 1..80: mol_type = other DNA
agatcagcctggccaatatggtgaaaccctgtctctactaaaaatacacaaattagctgggcgtggtggcacacgcctgt

SEQ ID NO: 101096 - DNA, 80 bp, synthetic construct; identical to SEQ ID NO: 19284
  source 1..80: mol_type = other DNA

SEQ ID NO: 101097 - DNA, 80 bp, synthetic construct
  source 1..80: mol_type = other DNA
tccatgctgtgggatgggaggctcagcccctatcagaatttcagggttcctccactgaagggataaggtattgggctttg

SEQ ID NO: 101098 - DNA, 80 bp, synthetic construct
  source 1..80: mol_type = other DNA
cacccactgattctgttaagcatctttggtttcacataagctaaacagaagtttgcagggaggaagaaatgggccactca

SEQ ID NO: 101099 - DNA, 80 bp, synthetic construct; identical to SEQ ID NO: 19285
  source 1..80: mol_type = other DNA

SEQ ID NO: 101100 - DNA, 80 bp, synthetic construct
  source 1..80: mol_type = other DNA
ggaggctgaggcagtagaatcccttgaacccaggaggcaaaggttgcagtgagccgagattgcaccactacactccagcc

SEQ ID NO: 101101 - DNA, 80 bp, synthetic construct
  source 1..80: mol_type = other DNA
tagggctccactatcaagatgaaccaactctgtcttcagttctgtgccactcagttcaataggctaattcccaggtcaga

SEQ ID NO: 101102 - DNA, 80 bp, synthetic construct
  source 1..80: mol_type = other DNA
catttcaggtctcagactctccaccaggggaggacgacatggaaggctcagctgctggggatgtgtcaggtgcaggctct

SEQ ID NO: 101103 - DNA, 80 bp, synthetic construct
  source 1..80: mol_type = other DNA
ttggctataattgtctcaaggtgggcccatggccatggttctggggcaagggcttattggctgggtgggggtgggggcag

SEQ ID NO: 101104 - DNA, 80 bp, synthetic construct; identical to SEQ ID NO: 19286
  source 1..80: mol_type = other DNA

SEQ ID NO: 101105 - DNA, 80 bp, synthetic construct
  source 1..80: mol_type = other DNA
tctcacatcctggcccgatccctctgcctgtgccccacccccattccagccctgacccctatatgcccctacatcccagc

SEQ ID NO: 101106 - DNA, 80 bp, synthetic construct
  source 1..80: mol_type = other DNA
ccatccctgccctgacccctctgcccatgttccccacatcccagccctaagccctctgcctgggcctcatttctaccctt

SEQ ID NO: 101107 - DNA, 80 bp, synthetic construct; identical to SEQ ID NO: 19287
  source 1..80: mol_type = other DNA

SEQ ID NO: 101108 - DNA, 80 bp, synthetic construct
  source 1..80: mol_type = other DNA
gcgggcggatcacgaggtcaggagtttgagaccagcctggacaacatggtgaaatcccgtctctactaaaagtacaaaaa

SEQ ID NO: 101109 - DNA, 80 bp, synthetic construct; identical to SEQ ID NO: 19288
  source 1..80: mol_type = other DNA

SEQ ID NO: 101110 - DNA, 80 bp, synthetic construct
  source 1..80: mol_type = other DNA
cgtgttttaaaccctgtctccaggtgtgattcttactcaggtgcaatgagtgcaaaataaaaaaacatggccaggcacga

SEQ ID NO: 101111 - DNA, 80 bp, synthetic construct
  source 1..80: mol_type = other DNA
gtgcctgtggtcctagctactccggaggctgaggcatgagaatcacttaaacctgcgaggtggaggttgcagtgagccga

SEQ ID NO: 101112 - DNA, 80 bp, synthetic construct
  source 1..80: mol_type = other DNA
actttgggaggctgaggcaggaggatcccttgtgcccaggagttcaagaccagcctggacaacatagagagacctatatc

SEQ ID NO: 101113 - DNA, 80 bp, synthetic construct; identical to SEQ ID NO: 19289
  source 1..80: mol_type = other DNA

SEQ ID NO: 101114 - DNA, 80 bp, synthetic construct
  source 1..80: mol_type = other DNA
aacatggtgaaaccctgtctctactaaaaatacaaaaaaattagctgggcgtggcagtgggtgcctgtagtcacagctac

SEQ ID NO: 101115 - DNA, 80 bp, synthetic construct; identical to SEQ ID NO: 19290
  source 1..80: mol_type = other DNA

SEQ ID NO: 101116 - DNA, 80 bp, synthetic construct
  source 1..80: mol_type = other DNA
gcagtggggtccccactgttcaaggttcctacaagaaaagcagtggagccaggcgcaggtggctcacgcctgtaatccca

SEQ ID NO: 101117 - DNA, 80 bp, synthetic construct
  source 1..80: mol_type = other DNA
ggtgggggcatcacctgaggtcagaagttcaagaacagcctggccaacatggcaaaacctcgtctctactaaaaatacga

SEQ ID NO: 101118 - DNA, 80 bp, synthetic construct
  source 1..80: mol_type = other DNA
aggaaaaagaaaaacagtggagtttcagccaaccctgtcgtggctgacagctctgatccctctggccctaacatcttata

SEQ ID NO: 101119 - DNA, 80 bp, synthetic construct; identical to SEQ ID NO: 19291
  source 1..80: mol_type = other DNA

SEQ ID NO: 101120 - DNA, 80 bp, synthetic construct
  source 1..80: mol_type = other DNA
caaaaatacaaaaaattagcacggtaccgcatgcctgtagtcccagctactcaggaggctgaggtgggaggatcgcttaa

SEQ ID NO: 101121 - DNA, 80 bp, synthetic construct
  source 1..80: mol_type = other DNA
ggaggccgaggtgggcagatcacttgaggtcaggagtttgagaccagcctggacaacatggcaaaactgcatctctacta

SEQ ID NO: 101122 - DNA, 80 bp, synthetic construct
  source 1..80: mol_type = other DNA
gaaatactagttgaaagagaggaagttagcaatatgtcttaagcacacacactctggaaccagattgcctgcttttcttt

SEQ ID NO: 101123 - DNA, 80 bp, synthetic construct
  source 1..80: mol_type = other DNA
gagtagctgggattacaggcacccaccaccacgtctggctaatttttgtatttttagtagagacggggtttcgccatgtg

SEQ ID NO: 101124 - DNA, 80 bp, synthetic construct; identical to SEQ ID NO: 19292
  source 1..80: mol_type = other DNA

SEQ ID NO: 101125 - DNA, 80 bp, synthetic construct
  source 1..80: mol_type = other DNA
gtgttaaacaaaacagtgattctgaccttcaagttggaaagatagatgatgaacccaagtacagtatgtcagtggtgata

SEQ ID NO: 101126 - DNA, 80 bp, synthetic construct
  source 1..80: mol_type = other DNA
ccgggcatggtggtgcatgcctgtaatcccagctactcaggtggctgaggcaggagaatcgcttgaacccgggaggcaca

SEQ ID NO: 101127 - DNA, 80 bp, synthetic construct; identical to SEQ ID NO: 19293
  source 1..80: mol_type = other DNA

SEQ ID NO: 101128 - DNA, 80 bp, synthetic construct
  source 1..80: mol_type = other DNA
gaggtgactggagtctgacactcaagcatctctccccacccccgcccccacaggctcatgtccatcgatgtcaagtacca

SEQ ID NO: 101129 - DNA, 80 bp, synthetic construct
  source 1..80: mol_type = other DNA
aatgactcctgggaccctgagtggctgtgaccctagggtatcttcttatccacacaaggctccttatccccctagacatc

SEQ ID NO: 101130 - DNA, 80 bp, synthetic construct
  source 1..80: mol_type = other DNA
aaaatttaaaaattagctggggctgggcgtgctggcttacgcctgtagtcccagcactttgggaggccgaggcaggcaga

SEQ ID NO: 101131 - DNA, 80 bp, synthetic construct; identical to SEQ ID NO: 19294
  source 1..80: mol_type = other DNA

SEQ ID NO: 101132 - DNA, 80 bp, synthetic construct
  source 1..80: mol_type = other DNA
ctcaacaagctgcggtgggaggatggcttgagcccaggaggcagaggtttcagtgagctgcatgtgcaccactgcactcc

SEQ ID NO: 101133 - DNA, 80 bp, synthetic construct
  source 1..80: mol_type = other DNA
cccatctctactaaaaatacaaaaattagctgggtgtggtgacccacgcctgtggtcccagctactttggaggctaaggc

SEQ ID NO: 101134 - DNA, 80 bp, synthetic construct
  source 1..80: mol_type = other DNA
gcttagcctccttcacttgaacctgagaggcggaggttgcagtgagctgagattgcgccatagcattccagcctgggtga

SEQ ID NO: 101135 - DNA, 80 bp, synthetic construct
  source 1..80: mol_type = other DNA
acccggcccagaacatcctttggctccctcagtgtgcccttagattgccagattatttccttctggagggggctctcatc

SEQ ID NO: 101136 - DNA, 80 bp, synthetic construct; identical to SEQ ID NO: 19295
  source 1..80: mol_type = other DNA

SEQ ID NO: 101137 - DNA, 80 bp, synthetic construct
  source 1..80: mol_type = other DNA
ctgggctgaggaggggcaaggccaggtgcgctgagccgggggtgtgtggggcagcaaggtagagccacagggactgaacc

SEQ ID NO: 101138 - DNA, 80 bp, synthetic construct
  source 1..80: mol_type = other DNA
gtacaccgtggtggccttcaacttcttccgcaagttctacaacaagagcgaggatgaggatgaacctgacatgaagtgtg

SEQ ID NO: 101139 - DNA, 80 bp, synthetic construct; identical to SEQ ID NO: 19296
  source 1..80: mol_type = other DNA

SEQ ID NO: 101140 - DNA, 80 bp, synthetic construct
  source 1..80: mol_type = other DNA
aaatgaaaatagtacctacagtttggcaagctgatgcatgccaggcacattttttttttttttttttgagatggagtctc

SEQ ID NO: 101141 - DNA, 80 bp, synthetic construct
  source 1..80: mol_type = other DNA
accacacccagatactttttgtattcttaattttctttctttcttttttttttgagacagagtctggcccaggctggagt

SEQ ID NO: 101142 - DNA, 80 bp, synthetic construct
  source 1..80: mol_type = other DNA
atggtctcgatctcctgacctggtgatccgcccgcctgggcctcccaaagtgctgggattacaggcatgagccactgcgc

SEQ ID NO: 101143 - DNA, 80 bp, synthetic construct; identical to SEQ ID NO: 19297
  source 1..80: mol_type = other DNA

SEQ ID NO: 101144 - DNA, 80 bp, synthetic construct
  source 1..80: mol_type = other DNA
gtatttttagtagagatggaggtgggggggtctcacaatgttggccaggcttgtctcgaactcctgacctcaaatgatcc

SEQ ID NO: 101145 - DNA, 80 bp, synthetic construct
  source 1..80: mol_type = other DNA
cctatgccctgggggcctcacctgtaaaatgagtgtgtaatagtagttgcttttaggactaataggtgctccctggctat

SEQ ID NO: 101146 - DNA, 80 bp, synthetic construct
  source 1..80: mol_type = other DNA
gctgggcatggtggcgcatgcctgtaatcccagctactcgggaggctgagacaggagaatcacttgaacccgggaggtgg

SEQ ID NO: 101147 - DNA, 80 bp, synthetic construct
  source 1..80: mol_type = other DNA
aaagtttcacccaggccgggcgcagtgactcacgcctgtaatcccaacactgtgggaggctgaggcaagaggattgcttg

SEQ ID NO: 101148 - DNA, 80 bp, synthetic construct; identical to SEQ ID NO: 19298
  source 1..80: mol_type = other DNA

SEQ ID NO: 101149 - DNA, 80 bp, synthetic construct
  source 1..80: mol_type = other DNA
tctcattatagtcacttatcttagtttttactctaggatgactgtgttctctcacatcctggggacacggaaagaacaag

SEQ ID NO: 101150 - DNA, 80 bp, synthetic construct
  source 1..80: mol_type = other DNA
cctataatcccagctacctgggaggctgaggcaggagaatctcttgaaccccggaggcggaggttgcagtgagccgagat

SEQ ID NO: 101151 - DNA, 80 bp, synthetic construct
  source 1..80: mol_type = other DNA
gaggtcgcagtgagccaatattgcaccacagcactccagcctgggcaacagagcaagactctgtctcaaaaaaaaaaaaa

SEQ ID NO: 101152 - DNA, 80 bp, synthetic construct; identical to SEQ ID NO: 19299
  source 1..80: mol_type = other DNA

SEQ ID NO: 101153 - DNA, 80 bp, synthetic construct
  source 1..80: mol_type = other DNA
ccctgcctcatctctccctgctctcctgcacaggagctctattttccagcctcacccaaccattttcagttcctcacagc

SEQ ID NO: 101154 - DNA, 80 bp, synthetic construct
  source 1..80: mol_type = other DNA
atgcctccagcgggctgttaaagcttccagtgcttcccctagctcatccctggtcacactgtgcctccccaccccagcct

SEQ ID NO: 101155 - DNA, 80 bp, synthetic construct; identical to SEQ ID NO: 19300
  source 1..80: mol_type = other DNA

SEQ ID NO: 101156 - DNA, 80 bp, synthetic construct
  source 1..80: mol_type = other DNA
tgccccccatcccagccctgacccctctgcctgtgccccccttatcctggccctgacccctctgcctgtgccccccatcc

SEQ ID NO: 101157 - DNA, 80 bp, synthetic construct
  source 1..80: mol_type = other DNA
taccatgtcttcagccctgcctatcccggggccttggctggtactcagtgaatgtcgaatgaatgagtgaccagtgtgct

SEQ ID NO: 101158 - DNA, 80 bp, synthetic construct
  source 1..80: mol_type = other DNA
atcaccttcttcttcttcgtcatcgtcatcctgttggccatcatccagggtcagtgctgggagtgggcgctcagggcccg

SEQ ID NO: 101159 - DNA, 80 bp, synthetic construct; identical to SEQ ID NO: 19301
  source 1..80: mol_type = other DNA

SEQ ID NO: 101160 - DNA, 80 bp, synthetic construct
  source 1..80: mol_type = other DNA
tggtgcaatcttggctcactgcaacctctacctcccaggttcaagcgattcttctgcctcagcctcctgattagctggga

SEQ ID NO: 101161 - DNA, 80 bp, synthetic construct
  source 1..80: mol_type = other DNA
ccgcacccggccaataaaggcctaatactatcttcttaggaagcgagattaggggtgagattagggaaatgggggatgga

SEQ ID NO: 101162 - DNA, 80 bp, synthetic construct
  source 1..80: mol_type = other DNA
tgtctgggggtgacccagagggattacgggattcagggggtcaagtgggcctccactctgatgtctcttgccactcacag

SEQ ID NO: 101163 - DNA, 80 bp, synthetic construct
  source 1..80: mol_type = other DNA
tggggtacttagctttggccagttaggaaagggggtgtagtgtccatgtgggcagattccctgccagccaatcagaaggt

SEQ ID NO: 101164 - DNA, 80 bp, synthetic construct; identical to SEQ ID NO: 19302
  source 1..80: mol_type = other DNA

SEQ ID NO: 101165 - DNA, 80 bp, synthetic construct
  source 1..80: mol_type = other DNA
acgtggagccctttaacataaggccagtcagtaggtggcagtaaaaagctcctatcaatatcaagggttagggctggggg

SEQ ID NO: 101166 - DNA, 80 bp, synthetic construct
  source 1..80: mol_type = other DNA
atcccagctacttggaaagctgaggtgggagaatcgcttgaacccaggaggcagaagttgcagtgagccaagatcatgcc

SEQ ID NO: 101167 - DNA, 80 bp, synthetic construct
  source 1..80: mol_type = other DNA
accctttctctattaaaaaattagccaggggtggtggtgtgcacctgtagtcccagctactctggagactgaggtggaga

SEQ ID NO: 101168 - DNA, 80 bp, synthetic construct; identical to SEQ ID NO: 19303
  source 1..80: mol_type = other DNA

SEQ ID NO: 101169 - DNA, 80 bp, synthetic construct
  source 1..80: mol_type = other DNA
attgtttcccccaagaaaaacaagatgacagcagaggctaaagtcatgtttattgggagatgaggacatgccatgaccac

SEQ ID NO: 101170 - DNA, 80 bp, synthetic construct
  source 1..80: mol_type = other DNA
tcattcatatgttcattgattcattaattcacaaagtagttaatagagactgtgccagccccatgctgaactatagcagt

SEQ ID NO: 101171 - DNA, 80 bp, synthetic construct; identical to SEQ ID NO: 19304
  source 1..80: mol_type = other DNA

SEQ ID NO: 101172 - DNA, 80 bp, synthetic construct
  source 1..80: mol_type = other DNA
aaggacacaggggctacttaaagtggttcccactggctaaatttaagaccatttgtgcctcaaaataaataatgacaagg

SEQ ID NO: 101173 - DNA, 80 bp, synthetic construct
  source 1..80: mol_type = other DNA
actacaaaaattatccaggtccatcctggctaacacggtgaaaccccatctctactaaaaatacaaaaaaaaattagcca

SEQ ID NO: 101174 - DNA, 80 bp, synthetic construct
  source 1..80: mol_type = other DNA
gacagagcgagcctctgtctcaaaaaaaaaaaaaaaaatttatccaggcatggtggtgcacgcctgtaatcccagctatt

SEQ ID NO: 101175 - DNA, 80 bp, synthetic construct
  source 1..80: mol_type = other DNA
aatccatgagaccatgctggtataaagaaagaagaatggagaagacacagctcttctttagagtagaatgccaactaaca

SEQ ID NO: 101176 - DNA, 80 bp, synthetic construct; identical to SEQ ID NO: 19305
  source 1..80: mol_type = other DNA

SEQ ID NO: 101177 - DNA, 80 bp, synthetic construct
  source 1..80: mol_type = other DNA
caataaaactagtgggtgaaaatctgatgagaaacaacgtatttacagactatttacctcgtctcagtgaatctccccaa

SEQ ID NO: 101178 - DNA, 80 bp, synthetic construct
  source 1..80: mol_type = other DNA
atgcccggctaattttgtatttttagtagagacagggtttctccacattggtcaggctggtctcaaactcccgacctcag

SEQ ID NO: 101179 - DNA, 80 bp, synthetic construct
  source 1..80: mol_type = other DNA
cttgagtccaggagttccagaccaggctaagtaacatggcgaaaccctgtctgtacaaaaaatacgaaaataagccaggt

SEQ ID NO: 101180 - DNA, 80 bp, synthetic construct; identical to SEQ ID NO: 19306
  source 1..80: mol_type = other DNA

SEQ ID NO: 101181 - DNA, 80 bp, synthetic construct
  source 1..80: mol_type = other DNA
agacaaaagaagttttaattattttttccggcttaattataaagaaacatggctcctaagtgccacctatgatcttggac

SEQ ID NO: 101182 - DNA, 80 bp, synthetic construct
  source 1..80: mol_type = other DNA
tgcagtggcgtaatctcggctcactgcaacctccacctctccgattcaagtgattctcctgcctcagcctcccagctggg

SEQ ID NO: 101183 - DNA, 80 bp, synthetic construct; identical to SEQ ID NO: 19307
  source 1..80: mol_type = other DNA

SEQ ID NO: 101184 - DNA, 80 bp, synthetic construct
  source 1..80: mol_type = other DNA
atgtgtggtgtgtgcgcataagaaagagaagaggccgggcatggtggcacatgcctgtaatcccagctactcgggaggct

SEQ ID NO: 101185 - DNA, 80 bp, synthetic construct
  source 1..80: mol_type = other DNA
aggtacagtggctcacgcctgtaatcccagcactttgggaggcagaggtgggtggatcacctgaggtcaagagttcgaga

SEQ ID NO: 101186 - DNA, 80 bp, synthetic construct
  source 1..80: mol_type = other DNA
cactccagcctgggccacacagcaagactccatctcaaaaaaaaaaaaaaaaaaagatctggttaatctggataaaaggg

SEQ ID NO: 101187 - DNA, 80 bp, synthetic construct
  source 1..80: mol_type = other DNA
gaggccgaggcgggcagatcacctgagatcaggggttcaagagcagcctggacaacatggcgaaagcctgtctctactaa

SEQ ID NO: 101188 - DNA, 80 bp, synthetic construct; identical to SEQ ID NO: 19308
  source 1..80: mol_type = other DNA

SEQ ID NO: 101189 - DNA, 80 bp, synthetic construct
  source 1..80: mol_type = other DNA
ctgcagtgagctgtgtgtgtaacactgcacttcagcctgcgcaacagaatgagaccttgtctcaaaaatgaaataaaatt

SEQ ID NO: 101190 - DNA, 80 bp, synthetic construct
  source 1..80: mol_type = other DNA
tgtaaacccagctacttgggaggctgaagcatgagaatcacttgaacctgggaggcagaggttgcagtgagctgagattg

SEQ ID NO: 101191 - DNA, 80 bp, synthetic construct
  source 1..80: mol_type = other DNA
gtggatcaccgaggtcaggagttcgagaccagcctggccaacatggtgaaatgccatctctactaaaaaatatagtatta

SEQ ID NO: 101192 - DNA, 80 bp, synthetic construct; identical to SEQ ID NO: 19309
  source 1..80: mol_type = other DNA

SEQ ID NO: 101193 - DNA, 80 bp, synthetic construct
  source 1..80: mol_type = other DNA
caggtgagacactgtccaggctagagataccttgctggggacacctcagaatgctctcttcacatcagaagccccctccc

SEQ ID NO: 101194 - DNA, 80 bp, synthetic construct
  source 1..80: mol_type = other DNA
gacagcaaggagctgggcacggtggctcacgcctgtaatcccagcactttgggaggccgaagtgggtggatcacctgagg

SEQ ID NO: 101195 - DNA, 80 bp, synthetic construct; identical to SEQ ID NO: 19310
  source 1..80: mol_type = other DNA

SEQ ID NO: 101196 - DNA, 80 bp, synthetic construct
  source 1..80: mol_type = other DNA
aaagtgtaagggcaaagtctgacacagtattctgtgagataaacaccattttccaaatgaggacagtgaggcacaggaag

SEQ ID NO: 101197 - DNA, 80 bp, synthetic construct
  source 1..80: mol_type = other DNA
ccagacagtcttgtcttaactatccatatatctctatagtggtccccattttacagttggggaacagaagcttaaagaga

SEQ ID NO: 101198 - DNA, 80 bp, synthetic construct
  source 1..80: mol_type = other DNA
tagctatggttgcaccactgcacttcagcctggacaagagagagagaccctatctccaaaacaaacaggccgggtgaagt

SEQ ID NO: 101199 - DNA, 80 bp, synthetic construct
  source 1..80: mol_type = other DNA
ttacctgggcatgatggagtgtacctgtaatcccagctactcgggaggctgaggcaggagaatcacttggacccaggagg

SEQ ID NO: 101200 - DNA, 80 bp, synthetic construct
  source 1..80: mol_type = other DNA
gagtttgagactagcctgggcaacatggtgaaaccctgtctctactaaaaatacaaaaaaattagctaagcatggcggca

SEQ ID NO: 101201 - DNA, 80 bp, synthetic construct
  source 1..80: mol_type = other DNA
atctatctatctatctatctatctataaaataggccgggtgtggtggctgacagctgtaatcccagcactttgggaggcc

SEQ ID NO: 101202 - DNA, 80 bp, synthetic construct
  source 1..80: mol_type = other DNA
cccagctacttgggaggccgaggcaggagaatcgcgtgaacccgggaggtggaggttgcagtgagccgggatcgcaccac

SEQ ID NO: 101203 - DNA, 80 bp, synthetic construct; identical to SEQ ID NO: 19311
  source 1..80: mol_type = other DNA

SEQ ID NO: 101204 - DNA, 80 bp, synthetic construct
  source 1..80: mol_type = other DNA
cgccgccgccgagctccgcggggctcgggagccggccccggcgaggaggcgcggaaccatggccgatgggggcgagggcg

SEQ ID NO: 101205 - DNA, 80 bp, synthetic construct
  source 1..80: mol_type = other DNA
ggagcgggcatcaccaagtgtgtgcaggtgtgcgtgttggggcgagggaaggcaagggcgcgtgtctgtgcgcgcgtgtg

SEQ ID NO: 101206 - DNA, 80 bp, synthetic construct
  source 1..80: mol_type = other DNA
gcagggtgcagagcagggtggcccgtgggggcgcggggagcggcgggaactcgggctgtttctgggaataccgccgccgg

SEQ ID NO: 101207 - DNA, 80 bp, synthetic construct; identical to SEQ ID NO: 19312
  source 1..80: mol_type = other DNA

SEQ ID NO: 101208 - DNA, 80 bp, synthetic construct
  source 1..80: mol_type = other DNA
gaaaggttggctccacactaatacaattctttctccttaagtacctcttggcactgctccttcctttctctcatttgttc

SEQ ID NO: 101209 - DNA, 80 bp, synthetic construct
  source 1..80: mol_type = other DNA
tgttcccttgcaggattccccagacttccccaacctagaactgcagcttctgctggtacttctttcctcagcagtacaaa

SEQ ID NO: 101210 - DNA, 80 bp, synthetic construct
  source 1..80: mol_type = other DNA
atttgcaaaggaacgttgtaaacgactgtctctttctcttttgtgcattaaacggactgggagaaagctttgggaaggat

SEQ ID NO: 101211 - DNA, 80 bp, synthetic construct; identical to SEQ ID NO: 19313
  source 1..80: mol_type = other DNA

SEQ ID NO: 101212 - DNA, 80 bp, synthetic construct
  source 1..80: mol_type = other DNA
tgtggggttaaaactagctgggacattttggtaggcttcatgcactcaagggcttcctgcgggcttaactgttaagccga

SEQ ID NO: 101213 - DNA, 80 bp, synthetic construct
  source 1..80: mol_type = other DNA
ggcagtcccaggctgggatttttcttttaataaaacatccgtaggttgctgtgctgacgacaaatgaccttgaaggaggt

SEQ ID NO: 101214 - DNA, 80 bp, synthetic construct
  source 1..80: mol_type = other DNA
ccttttttttctcttaacctgagaatgttggtggttcagaaatgctgatggggtgaataatggggagactgtagtatagt

SEQ ID NO: 101215 - DNA, 80 bp, synthetic construct
  source 1..80: mol_type = other DNA
tgtagatggaagaattcttgatagtgatggatgaagctgttttgcatagaaaaacaaaaacagtcattaagacaccgtaa

SEQ ID NO: 101216 - DNA, 80 bp, synthetic construct; identical to SEQ ID NO: 19314
  source 1..80: mol_type = other DNA

SEQ ID NO: 101217 - DNA, 80 bp, synthetic construct
  source 1..80: mol_type = other DNA
tggaaacctgcccacttgggtctgtttatctttgagagagattgaaaatatgtttttgtaaactctggatatgctgggac

SEQ ID NO: 101218 - DNA, 80 bp, synthetic construct
  source 1..80: mol_type = other DNA
attaacttaccaatgtagcatcaaactgtcatttggcatttaaaaacacgcatctttttcgttatggtcctctttttttt

SEQ ID NO: 101219 - DNA, 80 bp, synthetic construct
  source 1..80: mol_type = other DNA
tgtggtgtactgtgtcatgtagttttgtatttacccatagattgagacttaaagcttagtcctggctgtaagaatgatcc

SEQ ID NO: 101220 - DNA, 80 bp, synthetic construct; identical to SEQ ID NO: 19315
  source 1..80: mol_type = other DNA

SEQ ID NO: 101221 - DNA, 80 bp, synthetic construct
  source 1..80: mol_type = other DNA
agtacaaaggaaaagatggaatgagcagtggaaattcgcactttttgctcccttcataatgaagctacgaggagctttag

SEQ ID NO: 101222 - DNA, 80 bp, synthetic construct
  source 1..80: mol_type = other DNA
ttgtatttgtactttggcttcagataagtgtttttatcacggctgaattacccaagaaaggactccagcagcactgggtg

SEQ ID NO: 101223 - DNA, 80 bp, synthetic construct; identical to SEQ ID NO: 19316
  source 1..80: mol_type = other DNA

SEQ ID NO: 101224 - DNA, 80 bp, synthetic construct
  source 1..80: mol_type = other DNA
tgaaaatctgtgaagaatttccagaaaggaggtttaccagcacatcattctttatagagtagatttaaacccacttttcc

SEQ ID NO: 101225 - DNA, 80 bp, synthetic construct
  source 1..80: mol_type = other DNA
ctagcctttttttttttttttttgcctccctatccacttactccttctggtttatcttgaagcctgttaatttctcccat

SEQ ID NO: 101226 - DNA, 80 bp, synthetic construct
  source 1..80: mol_type = other DNA
acgtctaaatgtccctctctgtccctattcccttagattccttctcaagctctactaccctgactttcctttttgaagct

SEQ ID NO: 101227 - DNA, 80 bp, synthetic construct; identical to SEQ ID NO: 19317
  source 1..80: mol_type = other DNA

SEQ ID NO: 101228 - DNA, 80 bp, synthetic construct
  source 1..80: mol_type = other DNA
ccccagaaacaccagcttgacatcattgcctgttcggttccctaagcgactttccttcctagtgtctctgctgatcagtg

SEQ ID NO: 101229 - DNA, 80 bp, synthetic construct
  source 1..80: mol_type = other DNA
ctgcatctaatttgtcatcatagcccatcgtgtttctctttgcaatccaactcagatttcgatgtgtttcatactccgtt

SEQ ID NO: 101230 - DNA, 80 bp, synthetic construct
  source 1..80: mol_type = other DNA
ttctctacttggccttttatgatctgccccttgataccttgcttatgcttttcatcctacacagagttttcttggatcac

SEQ ID NO: 101231 - DNA, 80 bp, synthetic construct
  source 1..80: mol_type = other DNA
actaataattaataaaatgtatggaactgattgggaaactcaagcaatggtcagagaatgctctgaccctgatgctctgt

SEQ ID NO: 101232 - DNA, 80 bp, synthetic construct; identical to SEQ ID NO: 19318
  source 1..80: mol_type = other DNA

SEQ ID NO: 101233 - DNA, 80 bp, synthetic construct
  source 1..80: mol_type = other DNA
gagggaagttacagtcactagagcaaatgaacaaaggagagtaagagaataaattaaggattaattgagtctgagtgatt

SEQ ID NO: 101234 - DNA, 80 bp, synthetic construct
  source 1..80: mol_type = other DNA
ccttactttcctctttattaatcacgggaagaacattgggatgaggaccctgccaacaaatggttgtgtgaccttggggc

SEQ ID NO: 101235 - DNA, 80 bp, synthetic construct
  source 1..80: mol_type = other DNA
attctgcaggatgagcataacaaaatctcaccctgggactggaaagaaaagctttgaatgatcctggggtccctggaaat

SEQ ID NO: 101236 - DNA, 80 bp, synthetic construct; identical to SEQ ID NO: 19319
  source 1..80: mol_type = other DNA

SEQ ID NO: 101237 - DNA, 80 bp, synthetic construct
  source 1..80: mol_type = other DNA
tggaaggtatatttcctggtttctattgcaaaagttctgtagtggtgttgctgcaatgaaatggaagtccaaggcattcc

SEQ ID NO: 101238 - DNA, 80 bp, synthetic construct
  source 1..80: mol_type = other DNA
tatctgccaatttactggaagaaaacctgaaatctagctgtggagccaagatagatgcagaagaaagcgagtggaacagg

SEQ ID NO: 101239 - DNA, 80 bp, synthetic construct; identical to SEQ ID NO: 19320
  source 1..80: mol_type = other DNA

SEQ ID NO: 101240 - DNA, 80 bp, synthetic construct
  source 1..80: mol_type = other DNA
cattttgagaagatcaagaaaagaaaaagaaagcttacaggaaaaatgatatccttagtcttgagtcaattgggatattg

SEQ ID NO: 101241 - DNA, 80 bp, synthetic construct
  source 1..80: mol_type = other DNA
tacatgaggaaagttcggtctcacacacacgcacacatgtgtgcacaaatgaatgaaagatattccaccatatttttttt

SEQ ID NO: 101242 - DNA, 80 bp, synthetic construct
  source 1..80: mol_type = other DNA
cctttgtctttccctttccctcccctcccttcccccttccctccttttcccttccctccctttccctttctctccccccc

SEQ ID NO: 101243 - DNA, 80 bp, synthetic construct; identical to SEQ ID NO: 19321
  source 1..80: mol_type = other DNA

SEQ ID NO: 101244 - DNA, 80 bp, synthetic construct
  source 1..80: mol_type = other DNA
actgctgttggcaactttatttcttgtaggtgcattgatatgtaattgtctggcaggtctgttctaagcattgcatgtgt

SEQ ID NO: 101245 - DNA, 80 bp, synthetic construct
  source 1..80: mol_type = other DNA
ctgctggagatggacatattttaaaatgagagggaaacttggtgccctgcttctacctgcaggaagttactttataatat

SEQ ID NO: 101246 - DNA, 80 bp, synthetic construct
  source 1..80: mol_type = other DNA
aatacagagtagggtaattatatgcagtttactagggtaccttaatgcagtgtgtgtgaacgggatacctcttttatctg

SEQ ID NO: 101247 - DNA, 80 bp, synthetic construct; identical to SEQ ID NO: 19322
  source 1..80: mol_type = other DNA

SEQ ID NO: 101248 - DNA, 80 bp, synthetic construct
  source 1..80: mol_type = other DNA
taaggcaggaattaaagtttcaatgaaatgccgccttgatctctaaaagtgctccaaaatctcttttgtagcgtttcagg

SEQ ID NO: 101249 - DNA, 80 bp, synthetic construct
  source 1..80: mol_type = other DNA
gagcatgtcacagttatgagcctgtaggcaagaacagggttttttttttcctctccttttagggaagaacaacatattga

SEQ ID NO: 101250 - DNA, 80 bp, synthetic construct
  source 1..80: mol_type = other DNA
agtggtgtgatcttggcttactgcaacctctgcctcccagcttcaagtgattctcctgcctcagcctcctgagtagctgg

SEQ ID NO: 101251 - DNA, 80 bp, synthetic construct; identical to SEQ ID NO: 19323
  source 1..80: mol_type = other DNA

SEQ ID NO: 101252 - DNA, 80 bp, synthetic construct
  source 1..80: mol_type = other DNA
tcttcagacaaatgaaaagctgagatgaaacgtttttgattgatggctgtcagagaagcgtaaaaacttcagcttcactg

SEQ ID NO: 101253 - DNA, 80 bp, synthetic construct
  source 1..80: mol_type = other DNA
cccgacttgagtcagtcctactcacaccaaagaggatacggaaactggtgaaggataagagacaattgtgatttcacctc

SEQ ID NO: 101254 - DNA, 80 bp, synthetic construct
  source 1..80: mol_type = other DNA
ctgtctctatgggtgggatagggaataaggaaaacgcaaatattctactacacagtggacataacaatcagaaaaccgtc

SEQ ID NO: 101255 - DNA, 80 bp, synthetic construct; identical to SEQ ID NO: 19324
  source 1..80: mol_type = other DNA

SEQ ID NO: 101256 - DNA, 80 bp, synthetic construct
  source 1..80: mol_type = other DNA
cctcccttcttcccttctttcctcccttccttcctttttcttccctccttctctccctccctttatccatcacttcctcc

SEQ ID NO: 101257 - DNA, 80 bp, synthetic construct
  source 1..80: mol_type = other DNA
ttataaggaatgatttatggctgtcctatcacatttgtccatttaggttatctgtgcttttcacttgtctgggagctatc

SEQ ID NO: 101258 - DNA, 80 bp, synthetic construct
  source 1..80: mol_type = other DNA
atctctgtatgtcctttggagtctcctttgaacctgctgtgataccacactggttctttagtgaagaaattaaataaaat

SEQ ID NO: 101259 - DNA, 80 bp, synthetic construct
  source 1..80: mol_type = other DNA
gtgggggccatgtgttgtttcttctgtctccccatccccagggccactttccagtcttctctgccctgttctatgttcag

SEQ ID NO: 101260 - DNA, 80 bp, synthetic construct; identical to SEQ ID NO: 19325
  source 1..80: mol_type = other DNA

SEQ ID NO: 101261 - DNA, 80 bp, synthetic construct
  source 1..80: mol_type = other DNA
gttattcttttttctccttctcaagggagaaaaatgggtcagagctgtccattagaaagattaatggggcagcaatttat

SEQ ID NO: 101262 - DNA, 80 bp, synthetic construct
  source 1..80: mol_type = other DNA
ggtttatggggttggtaactgattagatacaagaagaggaaaaagacaaagctgagcttcagatggtgttggtcatatgg

SEQ ID NO: 101263 - DNA, 80 bp, synthetic construct; identical to SEQ ID NO: 19326
  source 1..80: mol_type = other DNA

SEQ ID NO: 101264 - DNA, 80 bp, synthetic construct
  source 1..80: mol_type = other DNA
tggagcactgcacctgtgaggactaaagactgtacctgtgaggactggagcactgcacctgtgaggactggagcattgca

SEQ ID NO: 101265 - DNA, 80 bp, synthetic construct
  source 1..80: mol_type = other DNA
gtgaggactagagactatacctgtgaggactggaacactgcacctgtgaggactggagcactgcacctatgaggactgga

SEQ ID NO: 101266 - DNA, 80 bp, synthetic construct
  source 1..80: mol_type = other DNA
gcactgcacctgtgaggactggagcactgcgtctgtgaggattggagcactgcacctgtgaggactggaacactgcacct

SEQ ID NO: 101267 - DNA, 80 bp, synthetic construct
  source 1..80: mol_type = other DNA
tgaggactggagcactgcacctgtgaggactagagactgcatctgtgaagactggagcactgcacctgtgaggactggag

SEQ ID NO: 101268 - DNA, 80 bp, synthetic construct; identical to SEQ ID NO: 19327
  source 1..80: mol_type = other DNA

SEQ ID NO: 101269 - DNA, 80 bp, synthetic construct
  source 1..80: mol_type = other DNA
cgcccaggctggagtgcagtggtgtgatatcggctcactgcaagctccacctcccgggttcaagcgattcttctgcctca

SEQ ID NO: 101270 - DNA, 80 bp, synthetic construct
  source 1..80: mol_type = other DNA
cgtgagccaccgcgcctggccctgaggagacttttgatgtgatcattatgggagtctctgcgaggaggttgaaagtagac

SEQ ID NO: 101271 - DNA, 80 bp, synthetic construct; identical to SEQ ID NO: 19328
  source 1..80: mol_type = other DNA

SEQ ID NO: 101272 - DNA, 80 bp, synthetic construct
  source 1..80: mol_type = other DNA
ggaccttttgatcattaaaattagagctctataaagctttgttggttcaaagctgggcgtgttttgtttgcaatttgcag

SEQ ID NO: 101273 - DNA, 80 bp, synthetic construct
  source 1..80: mol_type = other DNA
tcagtctagggatatattggagggattttctgaaagctcaggtcaggggaaaatgttgaaatatcttaggaaacagaatg

SEQ ID NO: 101274 - DNA, 80 bp, synthetic construct
  source 1..80: mol_type = other DNA
tgtgtaattggcactatgctgtacatataatttgttgcttgcaaagcactgtctttcaaaaaaatctaaccagtaaatct

SEQ ID NO: 101275 - DNA, 80 bp, synthetic construct
  source 1..80: mol_type = other DNA
gtctgcacttaacaacagagcatatatcttcatctcttttgtgttctgaatgagcacctataacactttctcaaaaggaa

SEQ ID NO: 101276 - DNA, 80 bp, synthetic construct; identical to SEQ ID NO: 19329
  source 1..80: mol_type = other DNA

SEQ ID NO: 101277 - DNA, 80 bp, synthetic construct
  source 1..80: mol_type = other DNA
aaccaaaacattgctctggacaggcctaaaacaaggacctgaacgtcagtagagaatggaatcagcgattccataaatga

SEQ ID NO: 101278 - DNA, 80 bp, synthetic construct
  source 1..80: mol_type = other DNA
cttactgggatacagaaatggactttaaaatctcggggttaataatgatgatgccattgccatctaacgtgaataatggg

SEQ ID NO: 101279 - DNA, 80 bp, synthetic construct; identical to SEQ ID NO: 19330
  source 1..80: mol_type = other DNA

SEQ ID NO: 101280 - DNA, 80 bp, synthetic construct
  source 1..80: mol_type = other DNA
aggccatgtatttatttggggattgcattaataagttttcaagcattcacttttatttagctacatgatcggctttgtgg

SEQ ID NO: 101281 - DNA, 80 bp, synthetic construct
  source 1..80: mol_type = other DNA
tcattcagcaaagatatatatactcactacctcctgtgtgtcaggtgtctgtagggtgctgtagacttatacttaaagcg

SEQ ID NO: 101282 - DNA, 80 bp, synthetic construct
  source 1..80: mol_type = other DNA
tctgatggccaaccaggtaagatttccttcaaagtctgtgtcaaatcagttctacatttctctacatccagtctacattt

SEQ ID NO: 101283 - DNA, 80 bp, synthetic construct
  source 1..80: mol_type = other DNA
attatgttcttagcctttccgaattcctgttatacgcaaagcattctacttaactccatgggtataatgggatatataat

SEQ ID NO: 101284 - DNA, 80 bp, synthetic construct; identical to SEQ ID NO: 19331
  source 1..80: mol_type = other DNA

SEQ ID NO: 101285 - DNA, 80 bp, synthetic construct
  source 1..80: mol_type = other DNA
catttatatcagagatgcatccatgttgtagctcctggtggcttagtgctgtatgctacaattcatctatccattctgtt

SEQ ID NO: 101286 - DNA, 80 bp, synthetic construct
  source 1..80: mol_type = other DNA
tatatatgctcagccttctaaacacttttccaaagtagttgactcagttaacatttccactagcagtacttagtaaatgt

SEQ ID NO: 101287 - DNA, 80 bp, synthetic construct
  source 1..80: mol_type = other DNA
ctcatgatggggaacacctgctttgtatctttaatgtccatttggatatactgtattcttttgtgaaatacctattcagg

SEQ ID NO: 101288 - DNA, 80 bp, synthetic construct
  source 1..80: mol_type = other DNA
gtctcattctgttgcccaggctggagtgcagtggcacagtcatagcttgctgcagccttaaactactgggctcaagggct

SEQ ID NO: 101289 - DNA, 80 bp, synthetic construct; identical to SEQ ID NO: 19332
  source 1..80: mol_type = other DNA

SEQ ID NO: 101290 - DNA, 80 bp, synthetic construct
  source 1..80: mol_type = other DNA
gcctacccaaaggctgttctcccatgttatcttctacagcctttactattttaaggctgatatttaggtctgtgctctta

SEQ ID NO: 101291 - DNA, 80 bp, synthetic construct
  source 1..80: mol_type = other DNA
tgggtagtaagtcaggtggctgtaagcagggatatctattacttgactctcttttatttcattggtctatttgtcttttc

SEQ ID NO: 101292 - DNA, 80 bp, synthetic construct; identical to SEQ ID NO: 19333
  source 1..80: mol_type = other DNA

SEQ ID NO: 101293 - DNA, 80 bp, synthetic construct
  source 1..80: mol_type = other DNA
caaatgtatctttaaaaaattgtttcttagactgtaaaaatataattgactttacatttgaccttgtatctagtaacctt

SEQ ID NO: 101294 - DNA, 80 bp, synthetic construct
  source 1..80: mol_type = other DNA
tattgcctcattgtacttcccaggatctttgtaaatgctgactagaagacatgatagcagatctttgatcctttccctca

SEQ ID NO: 101295 - DNA, 80 bp, synthetic construct
  source 1..80: mol_type = other DNA
aattatgattttactgtttttttttttctgttagtgcaatggactgtttgtgcctacccccaaaattcttatgttgaaat

SEQ ID NO: 101296 - DNA, 80 bp, synthetic construct; identical to SEQ ID NO: 19334
  source 1..80: mol_type = other DNA

SEQ ID NO: 101297 - DNA, 80 bp, synthetic construct
  source 1..80: mol_type = other DNA
cttcagtgtttacactagagattataatatcgttaatttattagtatctaccttaaatgaatacttttatatttttctgg

SEQ ID NO: 101298 - DNA, 80 bp, synthetic construct
  source 1..80: mol_type = other DNA
tcatgtagatttacttatatgttgcactgtctagtgcctttccgttgtcctgcttgccatgctgtcatctgggatcattt

SEQ ID NO: 101299 - DNA, 80 bp, synthetic construct
  source 1..80: mol_type = other DNA
ggcttccattatttctctttggaaggtcagctgtaagtctcactgttttcctttaaaggtgatattttcattctatttat

SEQ ID NO: 101300 - DNA, 80 bp, synthetic construct; identical to SEQ ID NO: 19335
  source 1..80: mol_type = other DNA

SEQ ID NO: 101301 - DNA, 80 bp, synthetic construct
  source 1..80: mol_type = other DNA
tgttttattttttagtaattggttttacatttggttctttttccagattcaaattctgttgtaacattcttcctcttcat

SEQ ID NO: 101302 - DNA, 80 bp, synthetic construct
  source 1..80: mol_type = other DNA
agatatagaggttctagatgatgttatcttcttccacaaaacattaattttattctggtaggtaggtagcatccaggcac

SEQ ID NO: 101303 - DNA, 80 bp, synthetic construct
  source 1..80: mol_type = other DNA
ctagatcctgtcttgattgtgaaatctcaattcagtatattgcatgcaagcccatcacatcctatgatttggttgctctt

SEQ ID NO: 101304 - DNA, 80 bp, synthetic construct; identical to SEQ ID NO: 19336
  source 1..80: mol_type = other DNA

SEQ ID NO: 101305 - DNA, 80 bp, synthetic construct
  source 1..80: mol_type = other DNA
aagttagcattgctataaagcgtgtatatagttttatgctattttatcacccatagattcatgtaatgaccactgcaatc

SEQ ID NO: 101306 - DNA, 80 bp, synthetic construct
  source 1..80: mol_type = other DNA
attctcctgcctcagcctcctgagtagctgggattagaggcacccaccaccacgcctggctaattttttttggtattttt

SEQ ID NO: 101307 - DNA, 80 bp, synthetic construct
  source 1..80: mol_type = other DNA
ctgctatccttttatagtcatacacttcctccttagtgccaccatccctagcccatgggagccactgttttgttctccat

SEQ ID NO: 101308 - DNA, 80 bp, synthetic construct
  source 1..80: mol_type = other DNA
aggaaactttcaatcatggtggaaggtgaagggaagcaggcacgtcttacatggctggagcaggaggaagtgtggggaag

SEQ ID NO: 101309 - DNA, 80 bp, synthetic construct; identical to SEQ ID NO: 19337
  source 1..80: mol_type = other DNA

SEQ ID NO: 101310 - DNA, 80 bp, synthetic construct
  source 1..80: mol_type = other DNA
ttggctattacaatgaaaatggctatgaataatcttatacaggcatttatgcagaaatcagttttgtttctttgggataa

SEQ ID NO: 101311 - DNA, 80 bp, synthetic construct
  source 1..80: mol_type = other DNA
tggtattgtaactgtttttaaattttagctgttctgctaggtgtgtagtgatatctaatcatggtattaatttgcttttc

SEQ ID NO: 101312 - DNA, 80 bp, synthetic construct
  source 1..80: mol_type = other DNA
ccattctcctgcctcagcctcctgaatagctgggactgcaggcgcccaccaccacacccggctaattttttgtattttta

SEQ ID NO: 101313 - DNA, 80 bp, synthetic construct; identical to SEQ ID NO: 19338
  source 1..80: mol_type = other DNA

SEQ ID NO: 101314 - DNA, 80 bp, synthetic construct
  source 1..80: mol_type = other DNA
gattgtgcttttttttgccccatgcctaagaactctttgccaagctcttggtcttgaatattttctcttatgttttcttc

SEQ ID NO: 101315 - DNA, 80 bp, synthetic construct
  source 1..80: mol_type = other DNA
gtacaaaattatttgttcatacttgtgcagggctatttctgtgttctgtattccgcttcattcgtctatgtgtctagctg

SEQ ID NO: 101316 - DNA, 80 bp, synthetic construct
  source 1..80: mol_type = other DNA
gggtttcgataagaattgtagcaaaacttgtgtatcaatttgggttgaattggcatctttattattttgtcttccaatgc

SEQ ID NO: 101317 - DNA, 80 bp, synthetic construct; identical to SEQ ID NO: 19339
  source 1..80: mol_type = other DNA

SEQ ID NO: 101318 - DNA, 80 bp, synthetic construct
  source 1..80: mol_type = other DNA
cctatttttagactctttcactttctcatcatgtcaatctcagaatagatagcactagtacttggctttctggggcccat

SEQ ID NO: 101319 - DNA, 80 bp, synthetic construct
  source 1..80: mol_type = other DNA
aataaagtcacactgacatgcagagacgaggacattggtggggttatcaaaatacagccagattatcagtaaacaacata

SEQ ID NO: 101320 - DNA, 80 bp, synthetic construct
  source 1..80: mol_type = other DNA
ccatgtgctgttgaagcctttattctgataacattggtaaattgtcccttaccaacgtggccatttgtgtaaatacattc

SEQ ID NO: 101321 - DNA, 80 bp, synthetic construct
  source 1..80: mol_type = other DNA
cattacatttgccctgacttttgcaaaaatgggttggttatgagaatttcctcaaaaaagtctttactgtgttatgattg

SEQ ID NO: 101322 - DNA, 80 bp, synthetic construct; identical to SEQ ID NO: 19340
  source 1..80: mol_type = other DNA

SEQ ID NO: 101323 - DNA, 80 bp, synthetic construct
  source 1..80: mol_type = other DNA
attctgctcttcattggttgttctggaagagtgctggtgaatgaattttctagtccaggccctagaaaaatccatgcagc

SEQ ID NO: 101324 - DNA, 80 bp, synthetic construct
  source 1..80: mol_type = other DNA
ttttgtgataagagaaagtgggaaagattaatgggaaccactcagaggtttagcaatagaacttaaagagagcaattttc

SEQ ID NO: 101325 - DNA, 80 bp, synthetic construct
  source 1..80: mol_type = other DNA
ttttgtattggacttaattattaatgcctgtcatccagatgactgaaagtagttcatgaaaatcaggaatgtttatataa

SEQ ID NO: 101326 - DNA, 80 bp, synthetic construct; identical to SEQ ID NO: 19341
  source 1..80: mol_type = other DNA

SEQ ID NO: 101327 - DNA, 80 bp, synthetic construct
  source 1..80: mol_type = other DNA
aaatttttaattgttttccattgctcattataaactggtccagttaagctactggaggctggtttgacatacctgttggt

SEQ ID NO: 101328 - DNA, 80 bp, synthetic construct
  source 1..80: mol_type = other DNA
ccatgcctggactgtgtttaactttttacctttctattttttatgattttttcttgcaggctgacttgaagcaaaattgg

SEQ ID NO: 101329 - DNA, 80 bp, synthetic construct; identical to SEQ ID NO: 19342
  source 1..80: mol_type = other DNA

SEQ ID NO: 101330 - DNA, 80 bp, synthetic construct
  source 1..80: mol_type = other DNA
actgtcccagatcccacacctgccaagggcaagccaggtgcaggaggccagggttgtgtgagcaagtgagtgtggggtcc

SEQ ID NO: 101331 - DNA, 80 bp, synthetic construct
  source 1..80: mol_type = other DNA
caaaagctcagagatgccaggaactgcagagccccaaggagggtgttacagcatgtcacagccctggctcagggagcccc

SEQ ID NO: 101332 - DNA, 80 bp, synthetic construct
  source 1..80: mol_type = other DNA
gtcggagaggagcttcattgagtaaaagaacaactctcatgagacctgaagtgggcagctcccttccgcaggcaggtctt

SEQ ID NO: 101333 - DNA, 80 bp, synthetic construct
  source 1..80: mol_type = other DNA
ctcctgagtagctgggattacaggcacctgtcgccatgcccggctaatttttctatttttagtagagacaaggtttcact

SEQ ID NO: 101334 - DNA, 80 bp, synthetic construct; identical to SEQ ID NO: 19343
  source 1..80: mol_type = other DNA

SEQ ID NO: 101335 - DNA, 80 bp, synthetic construct
  source 1..80: mol_type = other DNA
ggctccagcctttctccctgagcttgaaactcccccagagtttcagagggggatgaggcggcgggggtgctggtgtgtta

SEQ ID NO: 101336 - DNA, 80 bp, synthetic construct
  source 1..80: mol_type = other DNA
agagcacatggatgcccaggtctggagccatatccaggtggctgcagctgtgcctgcagcatggggctcccgttctgaca

SEQ ID NO: 101337 - DNA, 80 bp, synthetic construct
  source 1..80: mol_type = other DNA
aacccggcctgtgcagcttttgagatcagttgcagtttagcaaactccactttccactgatcagggtcggcttccaggca

SEQ ID NO: 101338 - DNA, 80 bp, synthetic construct; identical to SEQ ID NO: 19344
  source 1..80: mol_type = other DNA

SEQ ID NO: 101339 - DNA, 80 bp, synthetic construct
  source 1..80: mol_type = other DNA
taaaagtacaaaaaattacccaggcgtggtggcagtcacctgtaatcccagctacttgggaggctgaggcaggagaatcg

SEQ ID NO: 101340 - DNA, 80 bp, synthetic construct
  source 1..80: mol_type = other DNA
gacctatttctatcttcgccccaccgcacgctgaactagacacttaaggacctagtgtagaggactatgaagaggattgt

SEQ ID NO: 101341 - DNA, 80 bp, synthetic construct
  source 1..80: mol_type = other DNA
tctcgagcagacaaggaagatcgtgccaggtagttgaatccatatacaacgtggaccacacaggtagtgagagtcagcaa

SEQ ID NO: 101342 - DNA, 80 bp, synthetic construct; identical to SEQ ID NO: 19345
  source 1..80: mol_type = other DNA

SEQ ID NO: 101343 - DNA, 80 bp, synthetic construct
  source 1..80: mol_type = other DNA
cactaaaaataaaaaaaattagctgggtgttgtggcatgcacctgtagtcccagctactcaggaggctgaggcatgagaa

SEQ ID NO: 101344 - DNA, 80 bp, synthetic construct
  source 1..80: mol_type = other DNA
gtattttttttaaccatggctatgagaagatttaaaatttttttgtgtgggagccctaaatgatggctcatgtctgtaat

SEQ ID NO: 101345 - DNA, 80 bp, synthetic construct; identical to SEQ ID NO: 19346
  source 1..80: mol_type = other DNA

SEQ ID NO: 101346 - DNA, 80 bp, synthetic construct
  source 1..80: mol_type = other DNA
tcttattgcataacttgtttcaaatgttctgccacaacctcccccagcccagacatattcatgatgttcttttatgatta

SEQ ID NO: 101347 - DNA, 80 bp, synthetic construct
  source 1..80: mol_type = other DNA
tcaggcgatgttacgttggtgtgactggaactattgttatattattaaacggtagaggggccatcctgggcaagagttga

SEQ ID NO: 101348 - DNA, 80 bp, synthetic construct
  source 1..80: mol_type = other DNA
tttgcaggttaggttgatgagtcaccgattttgaagctggtgtatgtctaggtagaaatactgaacatgcagctggattg

SEQ ID NO: 101349 - DNA, 80 bp, synthetic construct; identical to SEQ ID NO: 19347
  source 1..80: mol_type = other DNA

SEQ ID NO: 101350 - DNA, 80 bp, synthetic construct; identical to SEQ ID NO: 19348
  source 1..80: mol_type = other DNA

SEQ ID NO: 101351 - DNA, 80 bp, synthetic construct
  source 1..80: mol_type = other DNA
tatatatcataatttagacatttctcatgcatttatgttccagatatgtgttacatatatggcacacacacacatacgca

SEQ ID NO: 101352 - DNA, 80 bp, synthetic construct
  source 1..80: mol_type = other DNA
catttatatggataggaggcagccattccagcctaaagaaacaaaacctttactcatgaaaagtcttcagtttctcctgc

SEQ ID NO: 101353 - DNA, 80 bp, synthetic construct; identical to SEQ ID NO: 19349
  source 1..80: mol_type = other DNA

SEQ ID NO: 101354 - DNA, 80 bp, synthetic construct
  source 1..80: mol_type = other DNA
gtactgtgggacaggtcctattgtaagcagcgttcatgttatattaacttattgactcttcacaggatcatgtgaggtat

SEQ ID NO: 101355 - DNA, 80 bp, synthetic construct
  source 1..80: mol_type = other DNA
agccaatgatgatgagcaaagatggcggacatttttaatggtctggaaatgaagtattaaaattgctattgtcgatgcac

SEQ ID NO: 101356 - DNA, 80 bp, synthetic construct
  source 1..80: mol_type = other DNA
tatatatatatataaaatcggatataaaatcagagagtaaactgcctcttatagccgcccctcctgcagtcttctgtttc

SEQ ID NO: 101357 - DNA, 80 bp, synthetic construct
  source 1..80: mol_type = other DNA
aagttaggtgtgaatacacgttttcagtctcacctgcagtgtcaggtgatgttaattctttgatctccttgctattatat

SEQ ID NO: 101358 - DNA, 80 bp, synthetic construct; identical to SEQ ID NO: 19350
  source 1..80: mol_type = other DNA

SEQ ID NO: 101359 - DNA, 80 bp, synthetic construct
  source 1..80: mol_type = other DNA
gagaaaattcctcacgaccatgtagaagtttcccgataaatttatgttcaagtggtggcatttgggcagccaacagccag

SEQ ID NO: 101360 - DNA, 80 bp, synthetic construct
  source 1..80: mol_type = other DNA
ttttttgataaattgcagaatgcctctttattccacagtcatctctcctctctgcttgtgttggtgtatgagcttgtttc

SEQ ID NO: 101361 - DNA, 80 bp, synthetic construct; identical to SEQ ID NO: 19351
  source 1..80: mol_type = other DNA

SEQ ID NO: 101362 - DNA, 80 bp, synthetic construct
  source 1..80: mol_type = other DNA
gttctgtggacacacgtggcatatggctaccatattggacagtgtggctctgaagagtgattattttatgacccacctct

SEQ ID NO: 101363 - DNA, 80 bp, synthetic construct
  source 1..80: mol_type = other DNA
agtgcctcatacccattttcacctggatgctcatggtatttcaaattcggcttatcccaaagcaaatccatctgtgtcaa

SEQ ID NO: 101364 - DNA, 80 bp, synthetic construct
  source 1..80: mol_type = other DNA
ttgtaagaaagccgaacatgtataatgacgtacataattcttataggcagcaaggtgactaggcatgtctagttattcat

SEQ ID NO: 101365 - DNA, 80 bp, synthetic construct
  source 1..80: mol_type = other DNA
ccttggtgccttcactgttcccagtgtcactggttagggaatagtcctttgcttttggccaggcatttcttgaatgtgct

SEQ ID NO: 101366 - DNA, 80 bp, synthetic construct; identical to SEQ ID NO: 19352
  source 1..80: mol_type = other DNA

SEQ ID NO: 101367 - DNA, 80 bp, synthetic construct
  source 1..80: mol_type = other DNA
caagggtgtgattgccgtttatgttcattttgtagcatgagtcgtgaaatttgaagtgcaacagatattttagtttctct

SEQ ID NO: 101368 - DNA, 80 bp, synthetic construct
  source 1..80: mol_type = other DNA
tagtcatttcagctactgggatggaaccgtgacttatcaaaaggagtcaagtctttggagtcaaaaatatctgagtttca

SEQ ID NO: 101369 - DNA, 80 bp, synthetic construct; identical to SEQ ID NO: 19353
  source 1..80: mol_type = other DNA

SEQ ID NO: 101370 - DNA, 80 bp, synthetic construct
  source 1..80: mol_type = other DNA
agaagagagctattcagacagggataggaagatcagtgaggcacctgcttctgactttttttttgagaggaggtgtccct

SEQ ID NO: 101371 - DNA, 80 bp, synthetic construct
  source 1..80: mol_type = other DNA
ggggtttcaccatgttgcccaggctgatcttgaactcctgagctcaagcgacctgactgccttggcctctcaaagtgctg

SEQ ID NO: 101372 - DNA, 80 bp, synthetic construct
  source 1..80: mol_type = other DNA
ctggaaattcaagatcaaggtgttggcagggctggtttcttctaaagcctctccccttgactcttagatggctgtctttt

SEQ ID NO: 101373 - DNA, 80 bp, synthetic construct; identical to SEQ ID NO: 19354
  source 1..80: mol_type = other DNA

SEQ ID NO: 101374 - DNA, 80 bp, synthetic construct
  source 1..80: mol_type = other DNA
taactaatccaagccagggcttgcatggaggatttttatttcccacaatatcatgggtaccctgtgcagggtggtgaggg

SEQ ID NO: 101375 - DNA, 80 bp, synthetic construct
  source 1..80: mol_type = other DNA
tgcttttaaatgagatagagctgatactaatggacaagttggtgctatccccggaggaacatgaactgcctgtatttgag

SEQ ID NO: 101376 - DNA, 80 bp, synthetic construct
  source 1..80: mol_type = other DNA
aagctgggattccctgaaggagggactgcattcgggaaaacttccaaattgctgaatttcttttcttccctcattagttg

SEQ ID NO: 101377 - DNA, 80 bp, synthetic construct; identical to SEQ ID NO: 19355
  source 1..80: mol_type = other DNA

SEQ ID NO: 101378 - DNA, 80 bp, synthetic construct
  source 1..80: mol_type = other DNA
attcactcttcaagtactatttgaggaggtagatttatttctaatgccagatgcaccaagacatgtttcttttctttgca

SEQ ID NO: 101379 - DNA, 80 bp, synthetic construct
  source 1..80: mol_type = other DNA
tctcctcctacattcccccctccacagtggggcttggatgtgtttgtaaaatgagccttaataaaaatgtgagaaagtct

SEQ ID NO: 101380 - DNA, 80 bp, synthetic construct
  source 1..80: mol_type = other DNA
agatggtattcaacacaattagttctctgtgcatgctgggttaagtcattggtatttgtgccacccatttggcatttgct

SEQ ID NO: 101381 - DNA, 80 bp, synthetic construct; identical to SEQ ID NO: 19356
  source 1..80: mol_type = other DNA

SEQ ID NO: 101382 - DNA, 80 bp, synthetic construct
  source 1..80: mol_type = other DNA
aggatgcaagggcttggctacctgtgcttttctttcctttttctactttccttgcaagactaaaccatatttacaagttc

SEQ ID NO: 101383 - DNA, 80 bp, synthetic construct
  source 1..80: mol_type = other DNA
tcaaactcctgtgccctatgagacaaaacaaaataaaaaacaaaagccaggggcattggtgttgtacgtttctttttcta

SEQ ID NO: 101384 - DNA, 80 bp, synthetic construct
  source 1..80: mol_type = other DNA
cagccttgtttttgtggtaggtaatcctttctcatagtacttagacagtttaggttaagttgtcatgtgaaggatacaag

SEQ ID NO: 101385 - DNA, 80 bp, synthetic construct; identical to SEQ ID NO: 19357
  source 1..80: mol_type = other DNA

SEQ ID NO: 101386 - DNA, 80 bp, synthetic construct
  source 1..80: mol_type = other DNA
ttttcttacacataaatgaagaaagctaatatctaggtaggcctgtttgagaataagcagagccttttcttcccattcct

SEQ ID NO: 101387 - DNA, 80 bp, synthetic construct
  source 1..80: mol_type = other DNA
tgttcagtctagtactagttcagatatgtccctaagaaatagtgagtcagtaagaggtaaccatctagccacatgatttt

SEQ ID NO: 101388 - DNA, 80 bp, synthetic construct; identical to SEQ ID NO: 19358
  source 1..80: mol_type = other DNA

SEQ ID NO: 101389 - DNA, 80 bp, synthetic construct
  source 1..80: mol_type = other DNA
ctgctatgaagaaatacccgagactgaataatttataagaaaagagatttaattgactcacagttccacatggctgggga

SEQ ID NO: 101390 - DNA, 80 bp, synthetic construct
  source 1..80: mol_type = other DNA
catgattcaattacctcccactggatccctcccatgctatgtggggattatgggaactacaattcaaggtgagatttggg

SEQ ID NO: 101391 - DNA, 80 bp, synthetic construct
  source 1..80: mol_type = other DNA
aggattacatgagggaggcagggggatcagagtcagaggagatgtgatgatggaagcagagatcagagacagttgaaggt

SEQ ID NO: 101392 - DNA, 80 bp, synthetic construct
  source 1..80: mol_type = other DNA
cagcaacaggaaactaataaaggaaactaatataggaatataggaaactggcatatactttgggtgtccttggttataaa

SEQ ID NO: 101393 - DNA, 80 bp, synthetic construct; identical to SEQ ID NO: 19359
  source 1..80: mol_type = other DNA

SEQ ID NO: 101394 - DNA, 80 bp, synthetic construct
  source 1..80: mol_type = other DNA
ctttcacatgacatttgtgtagagtaagagcttggtttggtgaaggagtgttactattctggaggaagataacaatatag

SEQ ID NO: 101395 - DNA, 80 bp, synthetic construct
  source 1..80: mol_type = other DNA
gtttcaggattctgactgagggatggaaactttctcttgtaacctgtccagtgagcttagcatcccttaggaaatgactt

SEQ ID NO: 101396 - DNA, 80 bp, synthetic construct
  source 1..80: mol_type = other DNA
aacctccgcctcctgggttcaagcaattctcctgcctcagcctcccgagtagctgggattacaggtgtgcggtgccacac

SEQ ID NO: 101397 - DNA, 80 bp, synthetic construct; identical to SEQ ID NO: 19360
  source 1..80: mol_type = other DNA

SEQ ID NO: 101398 - DNA, 80 bp, synthetic construct
  source 1..80: mol_type = other DNA
cagagagtcaacaggggatgggttaaaaatggagagatgttttgatagccatatgttcattatttcttttattttgtcct

SEQ ID NO: 101399 - DNA, 80 bp, synthetic construct
  source 1..80: mol_type = other DNA
aaagatctaccataaggatgcgttgtataatgggctgtagtctgcccacccttgggttaacaatgggttgatgttacctg

SEQ ID NO: 101400 - DNA, 80 bp, synthetic construct
  source 1..80: mol_type = other DNA
ttggtgtttgctcttatgtgactgtctgtgctattctgccatgtgaaatgtcccatttgaaaccatgttattttaaaata

SEQ ID NO: 101401 - DNA, 80 bp, synthetic construct
  source 1..80: mol_type = other DNA
ggttcaagtgattctcctgcctcagcctcccgagtaactgggattacaggcatgtgccaccatgcccagctattttttgt

SEQ ID NO: 101402 - DNA, 80 bp, synthetic construct; identical to SEQ ID NO: 19361
  source 1..80: mol_type = other DNA

SEQ ID NO: 101403 - DNA, 80 bp, synthetic construct
  source 1..80: mol_type = other DNA
ccacatgtggttattaaattcttaaagtgtgacgcgtttcaccaaggaactggattttacattttatctaattttaatta

SEQ ID NO: 101404 - DNA, 80 bp, synthetic construct
  source 1..80: mol_type = other DNA
cccatagtgatggtgggctaggggaggagctgagaagaaactgagactttcaggaaaacttgagaatagaaatagagggc

SEQ ID NO: 101405 - DNA, 80 bp, synthetic construct
  source 1..80: mol_type = other DNA
actggaagagagcagtttcatccctgaggacttagacctttgtttctctaggaccacaggctctggatgaagtgatcagc

SEQ ID NO: 101406 - DNA, 80 bp, synthetic construct; identical to SEQ ID NO: 19362
  source 1..80: mol_type = other DNA

SEQ ID NO: 101407 - DNA, 80 bp, synthetic construct
  source 1..80: mol_type = other DNA
aggagtcctgggtatttggacgatggatgcctgaaccctaggcagtggcgacaggaagagagaaggcaggcagctgggag

SEQ ID NO: 101408 - DNA, 80 bp, synthetic construct
  source 1..80: mol_type = other DNA
aatctatgttcagcttacatgcacttaaggggaagctcgctatatgtaggaagcctgtggttattgctaataattgccac

SEQ ID NO: 101409 - DNA, 80 bp, synthetic construct; identical to SEQ ID NO: 19363
  source 1..80: mol_type = other DNA

SEQ ID NO: 101410 - DNA, 80 bp, synthetic construct
  source 1..80: mol_type = other DNA
tcactgcaagctccacctcctgggttcacgccattctcctgccttagccttccgagtagctgggactacaggcgcccacc

SEQ ID NO: 101411 - DNA, 80 bp, synthetic construct
  source 1..80: mol_type = other DNA
tattattaacaaacaacccaagccttcatatatcaattgcttcctggatgccttgccctgtgctaaacatagtgtgtgat

SEQ ID NO: 101412 - DNA, 80 bp, synthetic construct
  source 1..80: mol_type = other DNA
attttttcctaaaagtgttagagacaacaaagggcagagggcatgtcaaaggtatctaagacaaactttctttattgaat

SEQ ID NO: 101413 - DNA, 80 bp, synthetic construct; identical to SEQ ID NO: 19364
  source 1..80: mol_type = other DNA

SEQ ID NO: 101414 - DNA, 80 bp, synthetic construct
  source 1..80: mol_type = other DNA
accttcagtgttccgtctgtgaggaacacttgccatctgtgaggttttgggagatgctgacaaccatccatttccacaga

SEQ ID NO: 101415 - DNA, 80 bp, synthetic construct
  source 1..80: mol_type = other DNA
caagaggattctgcagaaagagagatggatgtcatcagaataggcggggaagtggacttgtggttgaccttgaagtctgg

SEQ ID NO: 101416 - DNA, 80 bp, synthetic construct
  source 1..80: mol_type = other DNA
aaattggacttagagactatcacgggaaaatgatgaaggtcatagcctctgggatcctgaaaattgtttgggacttttat

SEQ ID NO: 101417 - DNA, 80 bp, synthetic construct
  source 1..80: mol_type = other DNA
ctgggcttgttttgttttgggattaaatcacatggaactcttttcttcagctcatgttgtcatacttgagacactgctat

SEQ ID NO: 101418 - DNA, 80 bp, synthetic construct; identical to SEQ ID NO: 19365
  source 1..80: mol_type = other DNA

SEQ ID NO: 101419 - DNA, 80 bp, synthetic construct
  source 1..80: mol_type = other DNA
ataaaggctgctcagattttaccacttggacaagagatgaaagttccagaagagtacaaactgagctgctctggcatgtt

SEQ ID NO: 101420 - DNA, 80 bp, synthetic construct
  source 1..80: mol_type = other DNA
ttggagtagagtcccaagagaaagctgtgcagtcgcccatgtgattttagtctattttagtcttgcctgttttttcaaaa

SEQ ID NO: 101421 - DNA, 80 bp, synthetic construct
  source 1..80: mol_type = other DNA
ggtagagaaataaatagagagtggaattctttagagctgccagattgaccttttccatcaaccactaaactgtctgaaaa

SEQ ID NO: 101422 - DNA, 80 bp, synthetic construct; identical to SEQ ID NO: 19366
  source 1..80: mol_type = other DNA

SEQ ID NO: 101423 - DNA, 80 bp, synthetic construct
  source 1..80: mol_type = other DNA
ttctggcaaggaggatatgggcttaagtaaaatactccattgcaccgtttctggggatttatgtttttaaaccaagtata

SEQ ID NO: 101424 - DNA, 80 bp, synthetic construct
  source 1..80: mol_type = other DNA
ctgcaggagtttggttgatcagatttgtattttagataaatatattaggtcacagtttgaatttcaaattgcatgtcctt

SEQ ID NO: 101425 - DNA, 80 bp, synthetic construct; identical to SEQ ID NO: 19367
  source 1..80: mol_type = other DNA

SEQ ID NO: 101426 - DNA, 80 bp, synthetic construct
  source 1..80: mol_type = other DNA
gtgagacactcaagatgtactgtcttagcaaatttcaggggtacaatccagtattattaacatgctgtccattattcaca

SEQ ID NO: 101427 - DNA, 80 bp, synthetic construct
  source 1..80: mol_type = other DNA
gacaatgtgggtaaacatggtggacatgatgctaagtggaatgagtcacacacagaaagacaaatactgcatgatctcac

SEQ ID NO: 101428 - DNA, 80 bp, synthetic construct
  source 1..80: mol_type = other DNA
gatgaataaattctggagatgattcaatcctgactgaaagagaagtccatgtgatttagagcagactgtgcaaaatattc

SEQ ID NO: 101429 - DNA, 80 bp, synthetic construct
  source 1..80: mol_type = other DNA
cggggacaacaagccaccttctcccgataaatgaatgggcttttaaagatcatctttcagcagtgagaaggtagtgtgaa

SEQ ID NO: 101430 - DNA, 80 bp, synthetic construct; identical to SEQ ID NO: 19368
  source 1..80: mol_type = other DNA

SEQ ID NO: 101431 - DNA, 80 bp, synthetic construct
  source 1..80: mol_type = other DNA
cacaccaccatgcctggctaatttttaaatttttcgtagagatgaggtcttgctatgttgtctaggttggtcctgaactc

SEQ ID NO: 101432 - DNA, 80 bp, synthetic construct
  source 1..80: mol_type = other DNA
ttaaaaatcctacactgtactaggagattgttccataccacatgccgcatggcagatcaatagaaccttcttttgctatg

SEQ ID NO: 101433 - DNA, 80 bp, synthetic construct; identical to SEQ ID NO: 19369
  source 1..80: mol_type = other DNA

SEQ ID NO: 101434 - DNA, 80 bp, synthetic construct
  source 1..80: mol_type = other DNA
gttaacttaggttagaaatgggttagcttctatttttcttaggtctctattgggacaagcttggagcttttaaaggaagg

SEQ ID NO: 101435 - DNA, 80 bp, synthetic construct
  source 1..80: mol_type = other DNA
aagtccctcctgcacatggctgggccttcaaggagttcctgatctgggatgggtggactcaatctcgcttctcgattctc

SEQ ID NO: 101436 - DNA, 80 bp, synthetic construct
  source 1..80: mol_type = other DNA
agcttcctgagcagctaggattacaggcgcccaccaccacacccggctatttctgtatttttagcagagatggggtttca

SEQ ID NO: 101437 - DNA, 80 bp, synthetic construct; identical to SEQ ID NO: 19370
  source 1..80: mol_type = other DNA

SEQ ID NO: 101438 - DNA, 80 bp, synthetic construct
  source 1..80: mol_type = other DNA
cttggtttgtcaccatgtgatgttgggatggcttgtctttgccgcctcacttcctaagctgacagacgtgtctgctaggg

SEQ ID NO: 101439 - DNA, 80 bp, synthetic construct
  source 1..80: mol_type = other DNA
tcagtgagtaagcaagttcagagacttggctttggccattttgttctcttaggctcatccttggatgccaacagggaaat

SEQ ID NO: 101440 - DNA, 80 bp, synthetic construct
  source 1..80: mol_type = other DNA
cttttttgtgcaggcacaatatgtagtctctccactattaaggggagcaatctccttagcgcagtggtagattttttttt

SEQ ID NO: 101441 - DNA, 80 bp, synthetic construct
  source 1..80: mol_type = other DNA
ctcaatcttgtttaaagtacacacgcacataagaagctaattaatagtacaaggcagaatcagttaaatgccacatgggt

SEQ ID NO: 101442 - DNA, 80 bp, synthetic construct; identical to SEQ ID NO: 19371
  source 1..80: mol_type = other DNA

SEQ ID NO: 101443 - DNA, 80 bp, synthetic construct
  source 1..80: mol_type = other DNA
caaaggaattgctgtggactgtggtgtgtgtgaaagcttcatggtagacttttgacttcaaggtcaaagacattgctgtg

SEQ ID NO: 101444 - DNA, 80 bp, synthetic construct
  source 1..80: mol_type = other DNA
gttgaggctttgtttacaggcgaggtgctggtgagggtggtggagaggcatccaggaaggttgaaaatatatttctgtag

SEQ ID NO: 101445 - DNA, 80 bp, synthetic construct; identical to SEQ ID NO: 19372
  source 1..80: mol_type = other DNA

SEQ ID NO: 101446 - DNA, 80 bp, synthetic construct
  source 1..80: mol_type = other DNA
actcgggaggctgaggcaggagaatcgcttgaacctgggaggtggaggttgcagtgagccaagatggcacccctgcactc

SEQ ID NO: 101447 - DNA, 80 bp, synthetic construct
  source 1..80: mol_type = other DNA
tctccgaacagtttcatcttatgaaacagaaactccacgaaaaacaaccaagaacagttttatttgaacccaagggtact

SEQ ID NO: 101448 - DNA, 80 bp, synthetic construct
  source 1..80: mol_type = other DNA
ttaaaatttattttggatattcagcttccgaacactgtcctacgtttgggaacctcactgttgcgtgagtcatggcatca

SEQ ID NO: 101449 - DNA, 80 bp, synthetic construct; identical to SEQ ID NO: 19373
  source 1..80: mol_type = other DNA

SEQ ID NO: 101450 - DNA, 80 bp, synthetic construct
  source 1..80: mol_type = other DNA
attcaagtgattctcctgcctcagcctcccgagtagctgggattacaggtgtgtgccaccacatctggctaattttagta

SEQ ID NO: 101451 - DNA, 80 bp, synthetic construct
  source 1..80: mol_type = other DNA
cagcccctgtcaattctttgaacacctgttagctagcattccaacttggttggtttctgtcatttgcaaccgagaattct

SEQ ID NO: 101452 - DNA, 80 bp, synthetic construct
  source 1..80: mol_type = other DNA
atatttagttgcttgtggccaaaacccgccttcactgcaaatgcatcggttcctcatcatttctcctctggaccagcaag

SEQ ID NO: 101453 - DNA, 80 bp, synthetic construct
  source 1..80: mol_type = other DNA
aagcatccctcagtagggacaaggctccagctgtccctttcattagggccctgccaaggacgtttcctttgttcagcacc

SEQ ID NO: 101454 - DNA, 80 bp, synthetic construct; identical to SEQ ID NO: 19374
  source 1..80: mol_type = other DNA

SEQ ID NO: 101455 - DNA, 80 bp, synthetic construct
  source 1..80: mol_type = other DNA
tttacccagggcactgtacttacttgtatatgtacttctctccccgcctagacccccatctccctacggataggaaagga

SEQ ID NO: 101456 - DNA, 80 bp, synthetic construct
  source 1..80: mol_type = other DNA
gtcttctcaacggtctgatggtaatgctgggaatttcaggctttctggcagactgtcagggagaaatttcagtgcagaaa

SEQ ID NO: 101457 - DNA, 80 bp, synthetic construct
  source 1..80: mol_type = other DNA
tttgttcaccttacgtttggggaaggctgaaattttattgagcaccgactgtattccacacactcttctaggtgcccgaa

SEQ ID NO: 101458 - DNA, 80 bp, synthetic construct; identical to SEQ ID NO: 19375
  source 1..80: mol_type = other DNA

SEQ ID NO: 101459 - DNA, 80 bp, synthetic construct
  source 1..80: mol_type = other DNA
gagatcgagaccagcctggtcaacatggtaaaacactgtccctactaaaaatacagaaattagccagcaatacaaaaatt

SEQ ID NO: 101460 - DNA, 80 bp, synthetic construct
  source 1..80: mol_type = other DNA
acaaaaaacatagttatcagagtgggtctctttgagatagtagcagttgagcagcttgaagatagcaggggagttagttc

SEQ ID NO: 101461 - DNA, 80 bp, synthetic construct
  source 1..80: mol_type = other DNA
tgttgagaggactgggctcttgctattacttttagccatatgggagtcattgcaatcctttgagctgaggggtagctcgt

SEQ ID NO: 101462 - DNA, 80 bp, synthetic construct; identical to SEQ ID NO: 19376
  source 1..80: mol_type = other DNA

SEQ ID NO: 101463 - DNA, 80 bp, synthetic construct
  source 1..80: mol_type = other DNA
ggtggttagtgtggacttctggagagagggctgaaactgtccttgaaaaaatggatttctcagtgtgatgtgtatacagt

SEQ ID NO: 101464 - DNA, 80 bp, synthetic construct
  source 1..80: mol_type = other DNA
gatcagagtgccagcaatttggtgtctggtgaaggctcgcttcctggttcataggcggctgtcttcttgctgtgttgtca

SEQ ID NO: 101465 - DNA, 80 bp, synthetic construct
  source 1..80: mol_type = other DNA
ggggactgagggacataaacatttagtctgtaacacaaagggaggttaatttggattaagaaatctaaggccatatgggg

SEQ ID NO: 101466 - DNA, 80 bp, synthetic construct; identical to SEQ ID NO: 19377
  source 1..80: mol_type = other DNA

SEQ ID NO: 101467 - DNA, 80 bp, synthetic construct
  source 1..80: mol_type = other DNA
ggcaggagaatggcgtgaacccagaggtggagtttgcagtgagccgagatcgcaccactgcactccagcctgggagacag

SEQ ID NO: 101468 - DNA, 80 bp, synthetic construct
  source 1..80: mol_type = other DNA
tctcccgtggaagatgcctctgagtccactcaggatcttgtgtggtcacaaaggtgtaggaaacgtctggacacttgagg

SEQ ID NO: 101469 - DNA, 80 bp, synthetic construct
  source 1..80: mol_type = other DNA
ctttatttttcttgaggcattgttgaaaagcctctactcctttgtggggctgttttacctcctggtaaaaaggttccggt

SEQ ID NO: 101470 - DNA, 80 bp, synthetic construct; identical to SEQ ID NO: 19378
  source 1..80: mol_type = other DNA

SEQ ID NO: 101471 - DNA, 80 bp, synthetic construct
  source 1..80: mol_type = other DNA
cctgcccagcttctgaatgaattgagacaaaaacaatgactaggacaaatgagaggtcaaaatgtcctcatagaggcttg

SEQ ID NO: 101472 - DNA, 80 bp, synthetic construct
  source 1..80: mol_type = other DNA
ggctgagctgcgctgagcagagctctgggattctcttaaatctatcagtcgaaattatttctcctgaggcacataggaag

SEQ ID NO: 101473 - DNA, 80 bp, synthetic construct
  source 1..80: mol_type = other DNA
gcctgcaatgttgtctcttgtctgtgctttccaccagcgttccagttttgcacttttggtatttctgagcaagctcagct

SEQ ID NO: 101474 - DNA, 80 bp, synthetic construct; identical to SEQ ID NO: 19379
  source 1..80: mol_type = other DNA

SEQ ID NO: 101475 - DNA, 80 bp, synthetic construct
  source 1..80: mol_type = other DNA
atgtacagggaagtcccatgaatgcttccagtttatattttttgaaattgagaaatataatcttagaagatggtaaagct

SEQ ID NO: 101476 - DNA, 80 bp, synthetic construct
  source 1..80: mol_type = other DNA
aaatctaagagcaatatctgattatctatgctttccatccctaaaaccaccaacacatagaggctactgaatctcccgaa

SEQ ID NO: 101477 - DNA, 80 bp, synthetic construct
  source 1..80: mol_type = other DNA
atttcctgggataggtaggggaaacggaaatttacatgattgccaacctgactactgatattttccaaggaagattacct

SEQ ID NO: 101478 - DNA, 80 bp, synthetic construct
  source 1..80: mol_type = other DNA
tgccaacctgactactgatattttccaaggaagattacctctgtgagggcctttttgctttaaatgtcaccttcatggtg

SEQ ID NO: 101479 - DNA, 80 bp, synthetic construct; identical to SEQ ID NO: 19380
  source 1..80: mol_type = other DNA

SEQ ID NO: 101480 - DNA, 80 bp, synthetic construct
  source 1..80: mol_type = other DNA
ggcattttttttttctttttttaaaagttttagggtacatgtgcacaatgtgcaggttagttacatatgtatacatgtgt

SEQ ID NO: 101481 - DNA, 80 bp, synthetic construct
  source 1..80: mol_type = other DNA
gaacatgcggtgtatggttttttgtcctttcgatagtttgctgagaatgatggtttccagtttcatccacgtccctaagt

SEQ ID NO: 101482 - DNA, 80 bp, synthetic construct
  source 1..80: mol_type = other DNA
cggggtaccaatgctctgaaacctcctgctgtggactgaaacattctctttggttaattcaaactgaaatattctatttg

SEQ ID NO: 101483 - DNA, 80 bp, synthetic construct
  source 1..80: mol_type = other DNA
acaaccctgtgaggtcaattgtgaagtccccctttaatgagactcaagaattcaatgacattttcaaggtcaagcacgat

SEQ ID NO: 101484 - DNA, 80 bp, synthetic construct; identical to SEQ ID NO: 19381
  source 1..80: mol_type = other DNA

SEQ ID NO: 101485 - DNA, 80 bp, synthetic construct
  source 1..80: mol_type = other DNA
tcaagaccagcctggccaacatggcgaaaccctgtctctaccaaaaatacaaaaattagccgggcgcggtggcaggtgcc

SEQ ID NO: 101486 - DNA, 80 bp, synthetic construct
  source 1..80: mol_type = other DNA
agttctgagtgtgaagtgtgcttcaggatagtaaatggaaatggcaaaagaaaatatccagtggaaatctttgccatctt

SEQ ID NO: 101487 - DNA, 80 bp, synthetic construct
  source 1..80: mol_type = other DNA
ctctctgagctagagaactggcagaaggacaaaatgtaatttactccactgtaagcccttggaaagcaggtaccttgtct

SEQ ID NO: 101488 - DNA, 80 bp, synthetic construct; identical to SEQ ID NO: 19382
  source 1..80: mol_type = other DNA

SEQ ID NO: 101489 - DNA, 80 bp, synthetic construct
  source 1..80: mol_type = other DNA
ccaccacgcctggctaattttttgtattttagtagagatggggtttcaccatgttggtcaggctggtctcgaactcctga

SEQ ID NO: 101490 - DNA, 80 bp, synthetic construct
  source 1..80: mol_type = other DNA
cccatttttattttgtttaccttttctgttaaagaaatttttgcccaggctaccctttaggcagggaggagaacttcccc

SEQ ID NO: 101491 - DNA, 80 bp, synthetic construct
  source 1..80: mol_type = other DNA
tatgtttttagggctccacttttgtttgatttatctccccatgaggatgtaagcctcttaggaatggggatcatgattct

SEQ ID NO: 101492 - DNA, 80 bp, synthetic construct; identical to SEQ ID NO: 19383
  source 1..80: mol_type = other DNA

SEQ ID NO: 101493 - DNA, 80 bp, synthetic construct
  source 1..80: mol_type = other DNA
tcggttttcataaattcagaaagggggcttttttcccctccatctggccataggatattgttggcctctcttttatttat

SEQ ID NO: 101494 - DNA, 80 bp, synthetic construct
  source 1..80: mol_type = other DNA
ttctcctgcctcagccccctgagtagctgggattacaggtgtgcgccaccatgcttggctaatttttttgtatttttagt

SEQ ID NO: 101495 - DNA, 80 bp, synthetic construct; identical to SEQ ID NO: 19384
  source 1..80: mol_type = other DNA

SEQ ID NO: 101496 - DNA, 80 bp, synthetic construct
  source 1..80: mol_type = other DNA
tacaaggtggaattcagcaggctcacacctattgggtgttagagagatgaacttagatcacatttatttaaacatctctg

SEQ ID NO: 101497 - DNA, 80 bp, synthetic construct
  source 1..80: mol_type = other DNA
gccttttattctctcagctctttgtgccactagtacatggtcacctgggcatttctttagaaagggtgcagagactttca

SEQ ID NO: 101498 - DNA, 80 bp, synthetic construct
  source 1..80: mol_type = other DNA
ctggtcaatattactaggattggcccagatgccaccaaatccttttttcttcctacttattgaaaaccctgttaaatttg

SEQ ID NO: 101499 - DNA, 80 bp, synthetic construct
  source 1..80: mol_type = other DNA
atttcagagtggaagagtacagtataaaatatttgaattcagacactttagagcttggaccctgtcagaagcttggaaat

SEQ ID NO: 101500 - DNA, 80 bp, synthetic construct; identical to SEQ ID NO: 19385
  source 1..80: mol_type = other DNA

SEQ ID NO: 101501 - DNA, 80 bp, synthetic construct
  source 1..80: mol_type = other DNA
caagttactcaacctctctgatcctgctgcttaatctgtacaatgggatgtgtggtagtattggccttgtagggttattt

SEQ ID NO: 101502 - DNA, 80 bp, synthetic construct
  source 1..80: mol_type = other DNA
ggtagtcatcaccaagtataggacttgagggaggtttccagacctttgaggtccaaattgcaaggaggaggggaaggaag

SEQ ID NO: 101503 - DNA, 80 bp, synthetic construct
  source 1..80: mol_type = other DNA
cgtggaaaccacacccccccccttgctctgggccagttggcagcccctgctcttggggctggaccactccttcccagaga

SEQ ID NO: 101504 - DNA, 80 bp, synthetic construct; identical to SEQ ID NO: 19386
  source 1..80: mol_type = other DNA

SEQ ID NO: 101505 - DNA, 80 bp, synthetic construct
  source 1..80: mol_type = other DNA
ctctgggtgagaacaaacttgtaggccttagttcttttgtaggtgtgaaatgttctcctcaaaaactgcaacgttcactt

SEQ ID NO: 101506 - DNA, 80 bp, synthetic construct
  source 1..80: mol_type = other DNA
tatcaaatggctgaaatatgaaagaatgtgtggacccataaggaaaaaggagaaaactatgagaagaattaatagggttg

SEQ ID NO: 101507 - DNA, 80 bp, synthetic construct
  source 1..80: mol_type = other DNA
tgttttgcagaaggggaaggggaaccaggctgaacgacttgcccaaccacttacctaccttgcatggactgttgctatcc

SEQ ID NO: 101508 - DNA, 80 bp, synthetic construct
  source 1..80: mol_type = other DNA
ataggaggtactcttatattagtcagggttctccagagaatcagaagcaattgaaacagaagcaattatatctatttgct

SEQ ID NO: 101509 - DNA, 80 bp, synthetic construct; identical to SEQ ID NO: 19387
  source 1..80: mol_type = other DNA

SEQ ID NO: 101510 - DNA, 80 bp, synthetic construct
  source 1..80: mol_type = other DNA
acccacattaggtagggcagtctcctttactgagttcaccaattcacatgctaatctaatctggaaacacccatacagac

SEQ ID NO: 101511 - DNA, 80 bp, synthetic construct
  source 1..80: mol_type = other DNA
atggaaggctgtgtctttgagggcaagtagaagcttcttaaataaaaaagatgatggagaaggaagacaggatagcaaat

SEQ ID NO: 101512 - DNA, 80 bp, synthetic construct; identical to SEQ ID NO: 19388
  source 1..80: mol_type = other DNA

SEQ ID NO: 101513 - DNA, 80 bp, synthetic construct
  source 1..80: mol_type = other DNA
tttctcttcttttttctcttctcttctttctcttctcttttctctcttctcttctttctcttctcttttctcctcttctc

SEQ ID NO: 101514 - DNA, 80 bp, synthetic construct
  source 1..80: mol_type = other DNA
caagctctccctcctgggttcaaatgattctcctgcctcagcctcccaagtagctgggttacaggcatgcaccaccacgc

SEQ ID NO: 101515 - DNA, 80 bp, synthetic construct
  source 1..80: mol_type = other DNA
tcaattttcaaactttgtggttttgcaacatgtacacaaatacctgcaaatatcctttctcccatttcaaaagaaattga

SEQ ID NO: 101516 - DNA, 80 bp, synthetic construct; identical to SEQ ID NO: 19389
  source 1..80: mol_type = other DNA

SEQ ID NO: 101517 - DNA, 80 bp, synthetic construct
  source 1..80: mol_type = other DNA
aatagtctatagtcaagtgcacagagacaacggtagaatggtggtcaccaggagctgctgggagggaaaatagggagtta

SEQ ID NO: 101518 - DNA, 80 bp, synthetic construct
  source 1..80: mol_type = other DNA
caggcatggaccaccacgcctgtagtgataccatgtttagttacatcttttataaagattttcctattctccttattaac

SEQ ID NO: 101519 - DNA, 80 bp, synthetic construct
  source 1..80: mol_type = other DNA
aaaaatgaattttagaatgaaaccattctgactgggtgaagaagtctatttctaatgtggggggtatgggctgaatgatg

SEQ ID NO: 101520 - DNA, 80 bp, synthetic construct
  source 1..80: mol_type = other DNA
aatccaatagactggtgtccttagaagatgaggaagagacaccgggagggtgtgtgcacagaggcaaggctgtatgagga

SEQ ID NO: 101521 - DNA, 80 bp, synthetic construct; identical to SEQ ID NO: 19390
  source 1..80: mol_type = other DNA

SEQ ID NO: 101522 - DNA, 80 bp, synthetic construct
  source 1..80: mol_type = other DNA
tacgatggccagtttgtttggaggatcacatcggatgaatggaaggaagtggtagctggtctcatggccatggcactctt

SEQ ID NO: 101523 - DNA, 80 bp, synthetic construct
  source 1..80: mol_type = other DNA
atgggaaggtcttggtattgataccacatctctgccttgaccttcaatcactgcatctcatctctgatcacttttcttca

SEQ ID NO: 101524 - DNA, 80 bp, synthetic construct
  source 1..80: mol_type = other DNA
taccatgtgatgtttattttatgatctctggagtcagaccactgggttttaactcctgtctcctcagtttgctttatatc

SEQ ID NO: 101525 - DNA, 80 bp, synthetic construct; identical to SEQ ID NO: 19391
  source 1..80: mol_type = other DNA

SEQ ID NO: 101526 - DNA, 80 bp, synthetic construct
  source 1..80: mol_type = other DNA
gtatttaataggggcccagaattttctaagtgatcaataaatggtgacgataaaatgtgcagagtcaagatgggtatgat

SEQ ID NO: 101527 - DNA, 80 bp, synthetic construct
  source 1..80: mol_type = other DNA
tatcgctttgtattatggtggtggcggttttcccctgacatagctctctaggatatgtaatggtaaaggatgaataaggg

SEQ ID NO: 101528 - DNA, 80 bp, synthetic construct
  source 1..80: mol_type = other DNA
ctcgacagaggagggcagctctccaggaaaagaaatgggaggaacttccttcttctgctggaacccccaactacaggttt

SEQ ID NO: 101529 - DNA, 80 bp, synthetic construct; identical to SEQ ID NO: 19392
  source 1..80: mol_type = other DNA

SEQ ID NO: 101530 - DNA, 80 bp, synthetic construct
  source 1..80: mol_type = other DNA
gagagcactcaactccttttacctcctgttttcttgatcgaggagaaagctgtttacagtaaaaatgtatttgcaagaga

SEQ ID NO: 101531 - DNA, 80 bp, synthetic construct
  source 1..80: mol_type = other DNA
atgtaatagaggcagagatccgaattctagtagctgtagattggtgtttctgatctcagtcccaggtgacaccctagact

SEQ ID NO: 101532 - DNA, 80 bp, synthetic construct
  source 1..80: mol_type = other DNA
gataaagtctctcttagtatccttatggaaattaagtgtgaaatgcaggaaaacagacaatggatgatggttcattgatg

SEQ ID NO: 101533 - DNA, 80 bp, synthetic construct; identical to SEQ ID NO: 19393
  source 1..80: mol_type = other DNA

SEQ ID NO: 101534 - DNA, 80 bp, synthetic construct
  source 1..80: mol_type = other DNA
gaagtgaaaagagggttcctcagtaaggacagacttaacagaagtacaatgtttcctttgcaaaagatgagtgttaaaag

SEQ ID NO: 101535 - DNA, 80 bp, synthetic construct
  source 1..80: mol_type = other DNA
aaaccccgtttctactaaaaatagaacaatcagccaggcgtggtggcctacgcctgtaatcccagctacttgggaggctg

SEQ ID NO: 101536 - DNA, 80 bp, synthetic construct; identical to SEQ ID NO: 19394
  source 1..80: mol_type = other DNA

SEQ ID NO: 101537 - DNA, 80 bp, synthetic construct
  source 1..80: mol_type = other DNA
tatatagttagcaaatgtaaaggctataggggtggattgtgtattatgcaactgctaaacactgtcttgcaatttgtgtg

SEQ ID NO: 101538 - DNA, 80 bp, synthetic construct
  source 1..80: mol_type = other DNA
acaatacttaccctaagatgctttctcatttattctgctttatttgcttctatcctatttttatttaaaaatactgatga

SEQ ID NO: 101539 - DNA, 80 bp, synthetic construct
  source 1..80: mol_type = other DNA
tgtagtcccagctactaggaggctggggtgcgaggatcacttgagcctaggagttcaaggttacagtgagctacgactgt

SEQ ID NO: 101540 - DNA, 80 bp, synthetic construct
  source 1..80: mol_type = other DNA
aggccggactgcggactgcagtggtgcaatctcggctcactgcaagctccgcttcccgggttcacgccattctcctgcct

SEQ ID NO: 101541 - DNA, 80 bp, synthetic construct; identical to SEQ ID NO: 19395
  source 1..80: mol_type = other DNA

SEQ ID NO: 101542 - DNA, 80 bp, synthetic construct
  source 1..80: mol_type = other DNA
agggttacggtgagtgtcataattatgaaaaaagctggcatcttgccattggcttatggatcattttgcaatgatttgcc

SEQ ID NO: 101543 - DNA, 80 bp, synthetic construct
  source 1..80: mol_type = other DNA
cccttctgtagtagtttcacagttgaccattcggtatctgcttgattaccttcagaaacagagagcccactgtgttagtt

SEQ ID NO: 101544 - DNA, 80 bp, synthetic construct; identical to SEQ ID NO: 19396
  source 1..80: mol_type = other DNA

SEQ ID NO: 101545 - DNA, 80 bp, synthetic construct
  source 1..80: mol_type = other DNA
accttaaccctcccttgacagggaaggtaacattcacagggtctagaaattatgatgtgggcccttttttttggtggggg

SEQ ID NO: 101546 - DNA, 80 bp, synthetic construct
  source 1..80: mol_type = other DNA
gacaatgactgctattcatgcagcaggtgagtttttaaaagagaaataaaggaatctgcaacctggagattttcaacttt

SEQ ID NO: 101547 - DNA, 80 bp, synthetic construct
  source 1..80: mol_type = other DNA
gcttggtggttgccagaaagagggtaacaatgagttttgaataaagagccgagaagtatctgtaagatacgaaactggtg

SEQ ID NO: 101548 - DNA, 80 bp, synthetic construct; identical to SEQ ID NO: 19397
  source 1..80: mol_type = other DNA

SEQ ID NO: 101549 - DNA, 80 bp, synthetic construct
  source 1..80: mol_type = other DNA
aaggaattacataaaaatattaacgtcattgtttttgtgctaagttcctcaaatgcgttctaaatattaaactgaatgaa

SEQ ID NO: 101550 - DNA, 80 bp, synthetic construct
  source 1..80: mol_type = other DNA
aatgtcactttctgtaatgtacaaaactgagtaagtgttggcaaagacatgtggcaagaagagacctttgttacttaata

SEQ ID NO: 101551 - DNA, 80 bp, synthetic construct
  source 1..80: mol_type = other DNA
ctgtctctactaaaaatacaagaattagccaggcatggtggcgggcgcctgtaatcccagctactcgggaggctgacgca

SEQ ID NO: 101552 - DNA, 80 bp, synthetic construct
  source 1..80: mol_type = other DNA
ctgtccttccagggaacttgctatgagagtaattggtgacagtcttcagctatggaggtcatgccaaacctaccgtctac

SEQ ID NO: 101553 - DNA, 80 bp, synthetic construct; identical to SEQ ID NO: 19398
  source 1..80: mol_type = other DNA

SEQ ID NO: 101554 - DNA, 80 bp, synthetic construct
  source 1..80: mol_type = other DNA
tttttttaaatttattttttattgataattcttgggtgtttctcacagagggggatttggcagggtcataggacaatagt

SEQ ID NO: 101555 - DNA, 80 bp, synthetic construct
  source 1..80: mol_type = other DNA
ctcttaacgagcatgctgccttcaagcatctgcttaacaaagcacatcttgcaccgcccttaatccatttaaccctgagt

SEQ ID NO: 101556 - DNA, 80 bp, synthetic construct
  source 1..80: mol_type = other DNA
tttccccacctttcccgcctttctattccacaaagccgccattgtcatcctggcccgttctcaatgagctgttgggtaca

SEQ ID NO: 101557 - DNA, 80 bp, synthetic construct
  source 1..80: mol_type = other DNA
ctgacccccccacctccttcccggacggggcggctggccgggcggggggctgatgcccccacctccctcccggacggggc

SEQ ID NO: 101558 - DNA, 80 bp, synthetic construct; identical to SEQ ID NO: 19399
  source 1..80: mol_type = other DNA

SEQ ID NO: 101559 - DNA, 80 bp, synthetic construct
  source 1..80: mol_type = other DNA
gcggccaggcagagatgctcctcacttcccagatggggtggcggccgggcagaggctgcaatctcggcactttgggaggc

SEQ ID NO: 101560 - DNA, 80 bp, synthetic construct
  source 1..80: mol_type = other DNA
accggcctggccaacacagcgaaaccctgtctccaccaaaaccagtcaggcgtggcggcacgagcctgcgatcgcaggca

SEQ ID NO: 101561 - DNA, 80 bp, synthetic construct; identical to SEQ ID NO: 19400
  source 1..80: mol_type = other DNA

SEQ ID NO: 101562 - DNA, 80 bp, synthetic construct
  source 1..80: mol_type = other DNA
ttgagcagaagagtgacatgatctcagttacattttagtaaggccaccgtggctgccagaatagactgaatggcagggat

SEQ ID NO: 101563 - DNA, 80 bp, synthetic construct
  source 1..80: mol_type = other DNA
aggtggagaaaagaggttggattccggatatattttgaatatagagataacaggaacagaggttggatatgagtagaaaa

SEQ ID NO: 101564 - DNA, 80 bp, synthetic construct
  source 1..80: mol_type = other DNA
ttttgacttgttaagtttgaaatacattttagacattcaagggcaaatggagaacaggtagttggacatctgactacttt

SEQ ID NO: 101565 - DNA, 80 bp, synthetic construct; identical to SEQ ID NO: 19401
  source 1..80: mol_type = other DNA

SEQ ID NO: 101566 - DNA, 80 bp, synthetic construct
  source 1..80: mol_type = other DNA
agagttctagaagcaattttgacagattgaagagtctgcaggaatgcagatctctcttcagcatgacacttgccaagata

SEQ ID NO: 101567 - DNA, 80 bp, synthetic construct
  source 1..80: mol_type = other DNA
ctattcagccataaaaaagaatgaaattctgtcattcttggcaacatgaatgaactatgaggacattatgctaagagaaa

SEQ ID NO: 101568 - DNA, 80 bp, synthetic construct
  source 1..80: mol_type = other DNA
aagtttcagttagatagtatgaataagttgtgaataagttctggagatctattgtacagcatggtgactatagttaatgt

SEQ ID NO: 101569 - DNA, 80 bp, synthetic construct; identical to SEQ ID NO: 19402
  source 1..80: mol_type = other DNA

SEQ ID NO: 101570 - DNA, 80 bp, synthetic construct
  source 1..80: mol_type = other DNA
agtactttgggaggctgaggtaggtggatcatgaggtcaggagttcgagaccagcctgaccatcatggcataaccccatc

SEQ ID NO: 101571 - DNA, 80 bp, synthetic construct
  source 1..80: mol_type = other DNA
aaaaaaaaagtcatctcactaactgacagtagactaaggtgatcctggattatgatcaggcatctagcagaagtaaatgt

SEQ ID NO: 101572 - DNA, 80 bp, synthetic construct
  source 1..80: mol_type = other DNA
cagggctgtctaagactgaggctagggtaagagaagtgagaaactctcctgtctccactctgagctttacaccaagtaaa

SEQ ID NO: 101573 - DNA, 80 bp, synthetic construct; identical to SEQ ID NO: 19403
  source 1..80: mol_type = other DNA

SEQ ID NO: 101574 - DNA, 80 bp, synthetic construct
  source 1..80: mol_type = other DNA
acaaggcccattgtcaagaaataaaatagtcaacagaaacagaccaagagatggcccagatatttgaactattggacagg

SEQ ID NO: 101575 - DNA, 80 bp, synthetic construct
  source 1..80: mol_type = other DNA
tgttttgacaggatggtagctagcctctaagatggcctgtaatgatccctgctttcaaatctgcatttttttttttaggt

SEQ ID NO: 101576 - DNA, 80 bp, synthetic construct
  source 1..80: mol_type = other DNA
gcatgcactaccatgtttggctgatttttaaaaaaatgtgtatgtaggtggggacgccctacgttgcccaggctggtctc

SEQ ID NO: 101577 - DNA, 80 bp, synthetic construct; identical to SEQ ID NO: 19404
  source 1..80: mol_type = other DNA

SEQ ID NO: 101578 - DNA, 80 bp, synthetic construct
  source 1..80: mol_type = other DNA
tgactccatattggtagtaatgtcatggcagatcatgagctagagccagcagcttaggtgctcttgaattcctgatccac

SEQ ID NO: 101579 - DNA, 80 bp, synthetic construct
  source 1..80: mol_type = other DNA
cagaattggtgaacttgaagagaggtcaataaaaggcatccaaaccaaacacaaagaatggcaaaaaatgacaaaactga

SEQ ID NO: 101580 - DNA, 80 bp, synthetic construct; identical to SEQ ID NO: 19405
  source 1..80: mol_type = other DNA

SEQ ID NO: 101581 - DNA, 80 bp, synthetic construct
  source 1..80: mol_type = other DNA
tgatgatggctgattgacatgctctgggtaatgaaagaagtgaggacttcagaggagacagcgtgggttgggagacagtg

SEQ ID NO: 101582 - DNA, 80 bp, synthetic construct
  source 1..80: mol_type = other DNA
gagagcgaggtcactgggaaagaacaaatcaagaaagtgacagactactttcttgaatgtgataatctgtgtgatttaga

SEQ ID NO: 101583 - DNA, 80 bp, synthetic construct
  source 1..80: mol_type = other DNA
aggagggagggttgagttatttgttggaagttgagaggtctagtagtcccactcatttggaatgtctttattgtaattta

SEQ ID NO: 101584 - DNA, 80 bp, synthetic construct
  source 1..80: mol_type = other DNA
gatcatgaggtcagaagttcaagaccagcctgaccaacatggtgaaaccccgtctctactaaaaatacaaaattagctgg

SEQ ID NO: 101585 - DNA, 80 bp, synthetic construct; identical to SEQ ID NO: 19406
  source 1..80: mol_type = other DNA

SEQ ID NO: 101586 - DNA, 80 bp, synthetic construct
  source 1..80: mol_type = other DNA
acactggtaagcctcactggtcccctggcttggcacacattactgagagagtccctcccttagaaagaacaaccactgat

SEQ ID NO: 101587 - DNA, 80 bp, synthetic construct
  source 1..80: mol_type = other DNA
gggatgtcttatatggcagcaggcaagagagagcttgtgcagggaaactcccccttataaaatcatcagatctcatgaaa

SEQ ID NO: 101588 - DNA, 80 bp, synthetic construct
  source 1..80: mol_type = other DNA
tctctttaatgataatctatgtaaagatgatcagggtgaaatagaatttaatacttcctttcaaagcaagtggtcaaagg

SEQ ID NO: 101589 - DNA, 80 bp, synthetic construct; identical to SEQ ID NO: 19407
  source 1..80: mol_type = other DNA

SEQ ID NO: 101590 - DNA, 80 bp, synthetic construct
  source 1..80: mol_type = other DNA
agtaagctgtttgcaacatatttagtatgcaagtccctggtggtagatgacgcatgctttcaatgccttatgtaaggtta

SEQ ID NO: 101591 - DNA, 80 bp, synthetic construct
  source 1..80: mol_type = other DNA
agtccctgtaatagactatcttggggaacagaagtttctcattgttctcctgggctacagattctaaaatcacactgtcc

SEQ ID NO: 101592 - DNA, 80 bp, synthetic construct; identical to SEQ ID NO: 19408
  source 1..80: mol_type = other DNA

SEQ ID NO: 101593 - DNA, 80 bp, synthetic construct
  source 1..80: mol_type = other DNA
attgtgatagatttgtcttttgtacagcttttgctttcacacatggcatctatgtggatacctctagagaatctttccta

SEQ ID NO: 101594 - DNA, 80 bp, synthetic construct
  source 1..80: mol_type = other DNA
tgcttcccttcttcttcagatcctcttcactggctgttgagaaggagagatgcatataattaccaacataacttgagtgt

SEQ ID NO: 101595 - DNA, 80 bp, synthetic construct
  source 1..80: mol_type = other DNA
cataatgcaggtcttcttggaaaagtatctaatgcaaggcagagttgcataaggggctgaataaccctgggttattctta

SEQ ID NO: 101596 - DNA, 80 bp, synthetic construct
  source 1..80: mol_type = other DNA
agctataaatgacatagggtcaaattgaaccattttcccaccgactggggtgtcagaatcccaaccagcatgtgaagaac

SEQ ID NO: 101597 - DNA, 80 bp, synthetic construct; identical to SEQ ID NO: 19409
  source 1..80: mol_type = other DNA

SEQ ID NO: 101598 - DNA, 80 bp, synthetic construct
  source 1..80: mol_type = other DNA
ctactcaggaggctgaggcaggagaattgcttgaaccaaggaggcagaggttgcagtgagccgagatcatgccactgcac

SEQ ID NO: 101599 - DNA, 80 bp, synthetic construct
  source 1..80: mol_type = other DNA
tccagtaacatgatttgtgtgtatgtgtgtggtcctcattgtgaccatgaatttcagtccccttaaggaacaattatttc

SEQ ID NO: 101600 - DNA, 80 bp, synthetic construct; identical to SEQ ID NO: 19410
  source 1..80: mol_type = other DNA

SEQ ID NO: 101601 - DNA, 80 bp, synthetic construct
  source 1..80: mol_type = other DNA
gtttatctgtacagataagatgtgcgacgtggcatccatttgaataagtaggaaggatcaaaggaagataattctactct

SEQ ID NO: 101602 - DNA, 80 bp, synthetic construct
  source 1..80: mol_type = other DNA
atcacagactctcaacatgcttaccccttccctaatagatagccactatcccaacttttgtgataatcatttatttgtgt

SEQ ID NO: 101603 - DNA, 80 bp, synthetic construct
  source 1..80: mol_type = other DNA
gcctcaggctcctgagtagctggaattgcaggcgtgtgccaccgtgcccggctaatttttgtattttttggtagaaacga

SEQ ID NO: 101604 - DNA, 80 bp, synthetic construct; identical to SEQ ID NO: 19411
  source 1..80: mol_type = other DNA

SEQ ID NO: 101605 - DNA, 80 bp, synthetic construct
  source 1..80: mol_type = other DNA
aagttcagatgtatacagtttactcattataaagtcaacaaatgagaacacattgacatgctggcagtattcagcatgta

SEQ ID NO: 101606 - DNA, 80 bp, synthetic construct
  source 1..80: mol_type = other DNA
ccaccagaatgactgtaataaaggcagacaagtgttgtcaaggctacagagaaattgaaactctcatacactgctgggga

SEQ ID NO: 101607 - DNA, 80 bp, synthetic construct
  source 1..80: mol_type = other DNA
agccaaaaagtgaaaacaactcaaatgtccatcagttaatgagtggatgagcatgatatgctgtatccatacaatggaat

SEQ ID NO: 101608 - DNA, 80 bp, synthetic construct
  source 1..80: mol_type = other DNA
gaaagtagatgagtggctgtcaggggctaaaggcagtgggaggattgggtggctaagggatgcagagttccttttttggg

SEQ ID NO: 101609 - DNA, 80 bp, synthetic construct; identical to SEQ ID NO: 19412
  source 1..80: mol_type = other DNA

SEQ ID NO: 101610 - DNA, 80 bp, synthetic construct
  source 1..80: mol_type = other DNA
tttacacagcgcaaaacactaacagattcaaataatttgacagactctatggtactgaaactatggtggctttgacgaaa

SEQ ID NO: 101611 - DNA, 80 bp, synthetic construct
  source 1..80: mol_type = other DNA
ttcaagagctaaacatagaaaagtggatgactgtctgactctaacacatttgaatgtgtatgtttctgtaagaagagttt

SEQ ID NO: 101612 - DNA, 80 bp, synthetic construct
  source 1..80: mol_type = other DNA
atatctgtttatcagctttcatccaaaagacttgatggattgatttctgatatgtgccatcttggtagggtaattattgt

SEQ ID NO: 101613 - DNA, 80 bp, synthetic construct; identical to SEQ ID NO: 19413
  source 1..80: mol_type = other DNA

SEQ ID NO: 101614 - DNA, 80 bp, synthetic construct
  source 1..80: mol_type = other DNA
ttgttcctggggaagtggattaattattataagcttactctgaaccattacaggtgtctttgacttaccttggaccatag

SEQ ID NO: 101615 - DNA, 80 bp, synthetic construct
  source 1..80: mol_type = other DNA
tagcagctgcagattagggagtgcatctgctgtgttatagtcacttttggaagcataatgcaatggatttatgtattgtc

SEQ ID NO: 101616 - DNA, 80 bp, synthetic construct
  source 1..80: mol_type = other DNA
tgtttctttttcttgtctggctgtagctgctagaatttctagtaccatggtttatagaaacaatgttggtaggtgtccat

SEQ ID NO: 101617 - DNA, 80 bp, synthetic construct; identical to SEQ ID NO: 19414
  source 1..80: mol_type = other DNA

SEQ ID NO: 101618 - DNA, 80 bp, synthetic construct
  source 1..80: mol_type = other DNA
tccagagaccaaggaatgactcaaacaagtccagcttggcaagcggatgagtttattaagacttacatatggggaccttc

SEQ ID NO: 101619 - DNA, 80 bp, synthetic construct
  source 1..80: mol_type = other DNA
gcctacagtgtgtgtgcaatggaactctttttgctatgttcccggatcctctccaggatgtttgggttctcagaaacacc

SEQ ID NO: 101620 - DNA, 80 bp, synthetic construct
  source 1..80: mol_type = other DNA
cacttgtgggatttgcaaacaacagatcccttcttacagccagccaatcagatatattcttacctaagtggctcctcact

SEQ ID NO: 101621 - DNA, 80 bp, synthetic construct
  source 1..80: mol_type = other DNA
gccccgctctgtcctatttctcatgttcttatgctgaagagtttgccaggagcttgtatgaaactgaagtgctagagtct

SEQ ID NO: 101622 - DNA, 80 bp, synthetic construct; identical to SEQ ID NO: 19415
  source 1..80: mol_type = other DNA

SEQ ID NO: 101623 - DNA, 80 bp, synthetic construct
  source 1..80: mol_type = other DNA
tccaggtcagacacacagagggaccgctaagccctagagtgcaacacttcactgcccattaacagtttattttatttttg

SEQ ID NO: 101624 - DNA, 80 bp, synthetic construct
  source 1..80: mol_type = other DNA
ctgcctgaaaaactggccggctctcaataggtttagactatcgttcgaacaccttcttccttgaaaaaagaaggttcagt

SEQ ID NO: 101625 - DNA, 80 bp, synthetic construct
  source 1..80: mol_type = other DNA
tgtgaatcactatgtaaaacataaattgagtcattccttgaaaactctctgagaattcccattgcatttaggctgaaacc

SEQ ID NO: 101626 - DNA, 80 bp, synthetic construct; identical to SEQ ID NO: 19416
  source 1..80: mol_type = other DNA

SEQ ID NO: 101627 - DNA, 80 bp, synthetic construct
  source 1..80: mol_type = other DNA
ccccagcctcccataactgtccagtatggaagcatgaaagcccagttcacgctttcacggggcagaacttaccgtgtaga

SEQ ID NO: 101628 - DNA, 80 bp, synthetic construct
  source 1..80: mol_type = other DNA
tacatcacccaactcaaataccccctgtctgaccagtgttggggaaaaagaacaaaaaccaaaatctcccaacccagtaa

SEQ ID NO: 101629 - DNA, 80 bp, synthetic construct
  source 1..80: mol_type = other DNA
ctgcgcatggtgacatgcgcctgtagtcccagctactcaggaggctgaggcaggagaattgcttgaacccgggaagtgga

SEQ ID NO: 101630 - DNA, 80 bp, synthetic construct; identical to SEQ ID NO: 19417
  source 1..80: mol_type = other DNA

SEQ ID NO: 101631 - DNA, 80 bp, synthetic construct
  source 1..80: mol_type = other DNA
tcttctttggatgtttacattccaaagagatgtttctcaggtcctggagaaagacatttctgggtcacagagctgacaga

SEQ ID NO: 101632 - DNA, 80 bp, synthetic construct
  source 1..80: mol_type = other DNA
catactataggtctagctgccctggagactctatcatattccttgtgctattttcctcagagctttctgaatgtttgata

SEQ ID NO: 101633 - DNA, 80 bp, synthetic construct; identical to SEQ ID NO: 19418
  source 1..80: mol_type = other DNA

SEQ ID NO: 101634 - DNA, 80 bp, synthetic construct
  source 1..80: mol_type = other DNA
cgttttgcacatgtaccccagaacttaaagtataataataaaaaaaaaaagaaaaaaagaaaaaggtgcactgtgggtag

SEQ ID NO: 101635 - DNA, 80 bp, synthetic construct
  source 1..80: mol_type = other DNA
ggtttgtgatatgaggaacatgcttctttgaacattcctattgtatctcctggcgccatatgcaagagtttttctgatgg

SEQ ID NO: 101636 - DNA, 80 bp, synthetic construct
  source 1..80: mol_type = other DNA
cctactatacccataaacatgaatgacccagttctagatgaccagttttttgaaacagaccctccagaaatcaataacta

SEQ ID NO: 101637 - DNA, 80 bp, synthetic construct; identical to SEQ ID NO: 19419
  source 1..80: mol_type = other DNA

SEQ ID NO: 101638 - DNA, 80 bp, synthetic construct
  source 1..80: mol_type = other DNA
ggtgttgtgtttggtatcatgaaaacataagtaattgttgaatttctcttaaaaagccagctctttagaaggggtgggga

SEQ ID NO: 101639 - DNA, 80 bp, synthetic construct
  source 1..80: mol_type = other DNA
gttttaaccccacatttttaatttagtgtttggcttctattggctctaagtcaactatctaatgaacacggcactgctgg

SEQ ID NO: 101640 - DNA, 80 bp, synthetic construct
  source 1..80: mol_type = other DNA
ccacttcaaatatgtagataacataacagtcggcatgcttggagtaaacaattcccactgctttgcaggatgcgctcctt

SEQ ID NO: 101641 - DNA, 80 bp, synthetic construct
  source 1..80: mol_type = other DNA
cagttttctttcacttggaggatgtgttcatctatttccagaatgcattttaagtattaccctcatctattctagtagtt

SEQ ID NO: 101642 - DNA, 80 bp, synthetic construct; identical to SEQ ID NO: 19420
  source 1..80: mol_type = other DNA

SEQ ID NO: 101643 - DNA, 80 bp, synthetic construct
  source 1..80: mol_type = other DNA
agtgccagaaaagattaaggctactatgctgaattgcatatttacatgagagattgagaaatctttctttttaattgaca

SEQ ID NO: 101644 - DNA, 80 bp, synthetic construct
  source 1..80: mol_type = other DNA
ggtgtgcacctgttctggtaataccaacagtatccaatgaaaaaatattatgagggtatgggggtaggggtggaaataca

SEQ ID NO: 101645 - DNA, 80 bp, synthetic construct
  source 1..80: mol_type = other DNA
tttaagtttcattatgagtaacttttcactaagagatgtctgccaacctcatggtgaatacatcatgtaaaatcagctcc

SEQ ID NO: 101646 - DNA, 80 bp, synthetic construct; identical to SEQ ID NO: 19421
  source 1..80: mol_type = other DNA

SEQ ID NO: 101647 - DNA, 80 bp, synthetic construct
  source 1..80: mol_type = other DNA
tggaaattttgcataatatgacagttttctcctgaagcaagttccaccgcatgtcgtgtcacacatatattatggtggag

SEQ ID NO: 101648 - DNA, 80 bp, synthetic construct
  source 1..80: mol_type = other DNA
aataaaacagcttttaacctctctttttaaaaggagattggttttcactgaaatacgtgcacgtgcaggaacagaaaacc

SEQ ID NO: 101649 - DNA, 80 bp, synthetic construct
  source 1..80: mol_type = other DNA
gacgggttgataggtacagcaaaccaccatggcacatgtatacctacgtaacaaacctgtgcattctgcacatgtatccc

SEQ ID NO: 101650 - DNA, 80 bp, synthetic construct; identical to SEQ ID NO: 19422
  source 1..80: mol_type = other DNA

SEQ ID NO: 101651 - DNA, 80 bp, synthetic construct
  source 1..80: mol_type = other DNA
tctatttttcagattttgggaaatccagccccctaccccaaattttgtgaattcttcaggttcatacatttttgttttca

SEQ ID NO: 101652 - DNA, 80 bp, synthetic construct
  source 1..80: mol_type = other DNA
catgatagaggaaatatttttagagctgcataatttgtttgaaaggtgtcgcttattttctatgcctatctatatccttg

SEQ ID NO: 101653 - DNA, 80 bp, synthetic construct; identical to SEQ ID NO: 19423
  source 1..80: mol_type = other DNA

SEQ ID NO: 101654 - DNA, 80 bp, synthetic construct
  source 1..80: mol_type = other DNA
gtcaaattccattaagagtggaatgaaggcttttttcttctgtgaagtgtgatgaagtttccctcccacacacctgttat

SEQ ID NO: 101655 - DNA, 80 bp, synthetic construct
  source 1..80: mol_type = other DNA
aaatgaagtccgagctacttcaatgctatcttgaaatgctgcctttctgggaatttttaggtgaagaagatagatgtgag

SEQ ID NO: 101656 - DNA, 80 bp, synthetic construct
  source 1..80: mol_type = other DNA
agcaacatttactgagaacttatatatgccaggcacagtgccaagtattctctgtgcattgtcacttgcaataaccttat

SEQ ID NO: 101657 - DNA, 80 bp, synthetic construct; identical to SEQ ID NO: 19424
  source 1..80: mol_type = other DNA

SEQ ID NO: 101658 - DNA, 80 bp, synthetic construct
  source 1..80: mol_type = other DNA
gtgcttaacctaatacctggcatgtggaaagcccctgaagacagatatggcaggcacttttcttggattggcagttgaaa

SEQ ID NO: 101659 - DNA, 80 bp, synthetic construct
  source 1..80: mol_type = other DNA
agatttggagaatttgacaatgccgagatgaagctcttgaatgttttagctggaggattctggaaatccttctggagttc

SEQ ID NO: 101660 - DNA, 80 bp, synthetic construct
  source 1..80: mol_type = other DNA
tttacttggagaacctttcttcttttagatctcagggtttcgattttgaaagtgagtttaaacaaatacacaggagtcac

SEQ ID NO: 101661 - DNA, 80 bp, synthetic construct; identical to SEQ ID NO: 19425
  source 1..80: mol_type = other DNA

SEQ ID NO: 101662 - DNA, 80 bp, synthetic construct
  source 1..80: mol_type = other DNA
tgactcttagcgatgcataagacacccctcaacatgttctttgaatggttgctgatgttatttagcaataattcaaatta

SEQ ID NO: 101663 - DNA, 80 bp, synthetic construct; identical to SEQ ID NO: 19426
  source 1..80: mol_type = other DNA

SEQ ID NO: 101664 - DNA, 80 bp, synthetic construct
  source 1..80: mol_type = other DNA
aagttccaggatacatgtgcagaatgtgcaggtttgttacgtagataaacatgtgccatgggtggtttgctgcacccatc

SEQ ID NO: 101665 - DNA, 80 bp, synthetic construct
  source 1..80: mol_type = other DNA
gtttggttttctgttcctgtgttcgtttgctgaggatgatggtttccagcttcatccatgtctctgcaaaagacatgatt

SEQ ID NO: 101666 - DNA, 80 bp, synthetic construct
  source 1..80: mol_type = other DNA
atttatattcctttggtatatacccagtaatgggatggctgggtcaaatgggatttctggttctagatccttgaggaatt

SEQ ID NO: 101667 - DNA, 80 bp, synthetic construct; identical to SEQ ID NO: 19427
  source 1..80: mol_type = other DNA

SEQ ID NO: 101668 - DNA, 80 bp, synthetic construct
  source 1..80: mol_type = other DNA
aagagcctgtggacagcaaaagaaactatcatcagagcaaacaggcaacccgcagaatgggaaaaaatttttgcagttac

SEQ ID NO: 101669 - DNA, 80 bp, synthetic construct
  source 1..80: mol_type = other DNA
atttgtgttttaaaaagatgagtcagagtgtgtgtatttagacagggaaaccaattaggatgctcttgcatgggtgagag

SEQ ID NO: 101670 - DNA, 80 bp, synthetic construct; identical to SEQ ID NO: 19428
  source 1..80: mol_type = other DNA

SEQ ID NO: 101671 - DNA, 80 bp, synthetic construct
  source 1..80: mol_type = other DNA
gagttgagctggcatggaacagttatagatagtctgggggatgtgtatgtgtagcattttttttttgcagggatagttgt

SEQ ID NO: 101672 - DNA, 80 bp, synthetic construct
  source 1..80: mol_type = other DNA
accccaaggctgtgtttgtattggaaataaagaagtggttttctgctgtaaaaatactgttttgctactaggcaaacagg

SEQ ID NO: 101673 - DNA, 80 bp, synthetic construct
  source 1..80: mol_type = other DNA
tgaccttgggaagcagctttgtcataaattgataagtgcaatttaagagggagatgagtaggaataaaaactgcaacttg

SEQ ID NO: 101674 - DNA, 80 bp, synthetic construct; identical to SEQ ID NO: 19429
  source 1..80: mol_type = other DNA

SEQ ID NO: 101675 - DNA, 80 bp, synthetic construct
  source 1..80: mol_type = other DNA
agtttttggttggtcagtgaaacactccaaacctgcttacctagctttctaaaaacaatgtagattttcaggcaggtgca

SEQ ID NO: 101676 - DNA, 80 bp, synthetic construct
  source 1..80: mol_type = other DNA
ttaaactaaagaattcaataatggcctgtacagatttggacctccgtcctatccctagagggacattttatagacttcat

SEQ ID NO: 101677 - DNA, 80 bp, synthetic construct; identical to SEQ ID NO: 19430
  source 1..80: mol_type = other DNA

SEQ ID NO: 101678 - DNA, 80 bp, synthetic construct
  source 1..80: mol_type = other DNA
ttgtctccttgtttgctcaaattaagctccccagcaaaagagggaagtgaaataaattaatacatgaaaccaagaactgt

SEQ ID NO: 101679 - DNA, 80 bp, synthetic construct
  source 1..80: mol_type = other DNA
tagctgggactacaggcgcccaccaccacgctcggctaattttttgtattttttagtagagatggggtttcacaatgtta

SEQ ID NO: 101680 - DNA, 80 bp, synthetic construct
  source 1..80: mol_type = other DNA
cattttggaattttattgagcggaaaggatagatgatttgattggaaactaaagggagatacttccagttttgtattgga

SEQ ID NO: 101681 - DNA, 80 bp, synthetic construct
  source 1..80: mol_type = other DNA
aaatatgcagttatatatctcattgggatgaatgggaatggctaggattgttactgattcttgcccctaaaaagagaagt

SEQ ID NO: 101682 - DNA, 80 bp, synthetic construct; identical to SEQ ID NO: 19431
  source 1..80: mol_type = other DNA

SEQ ID NO: 101683 - DNA, 80 bp, synthetic construct
  source 1..80: mol_type = other DNA
ccatcatgtcaagtgtttctcaaaatgtgttccgtgggaccccacccaggtgctattctccacaaaatctattctcagaa

SEQ ID NO: 101684 - DNA, 80 bp, synthetic construct
  source 1..80: mol_type = other DNA
aacatgttacacttacctcctggaggttttacaatgcatattagtaaagaatctgagatgtcttaaaggaacccgcttaa

SEQ ID NO: 101685 - DNA, 80 bp, synthetic construct; identical to SEQ ID NO: 19432
  source 1..80: mol_type = other DNA

SEQ ID NO: 101686 - DNA, 80 bp, synthetic construct
  source 1..80: mol_type = other DNA
gtaaccttcagtgagccacttgaactctgacctttgatttcatcctgtattaaatggaaatacaccccagttaaaatggc

SEQ ID NO: 101687 - DNA, 80 bp, synthetic construct
  source 1..80: mol_type = other DNA
agtggctcacgcctgtaatcccagcactttgggaggccgaggcgggtggatcacctgaggtcaggagtttgagaccagcc

SEQ ID NO: 101688 - DNA, 80 bp, synthetic construct
  source 1..80: mol_type = other DNA
ccagcctgggtgacagagtgagactccatctcaaaaaaaaaaaaaaaaaaaaaaaaaagaaagaaagaaagaaagaaaag

SEQ ID NO: 101689 - DNA, 80 bp, synthetic construct
  source 1..80: mol_type = other DNA
aatggataaagaaaatgtgatatatacacacaatgaaatattcgtcagctgtaaaaaagaatgaaatgctttcatttgca

SEQ ID NO: 101690 - DNA, 80 bp, synthetic construct; identical to SEQ ID NO: 19433
  source 1..80: mol_type = other DNA

SEQ ID NO: 101691 - DNA, 80 bp, synthetic construct
  source 1..80: mol_type = other DNA
ccctgatttcatcattatacattgtatgctattatcaagatagcacatgtgcctccacaagtatgtacaactattatgta

SEQ ID NO: 101692 - DNA, 80 bp, synthetic construct
  source 1..80: mol_type = other DNA
ttctcttcccatagaaagttaattaccataaaatagttatagatggagtgagttgggtgtttagagtgagaagactttca

SEQ ID NO: 101693 - DNA, 80 bp, synthetic construct; identical to SEQ ID NO: 19434
  source 1..80: mol_type = other DNA

SEQ ID NO: 101694 - DNA, 80 bp, synthetic construct
  source 1..80: mol_type = other DNA
ttgagacattgtgcctttttgtctaaaatattctatttgatgaacggttaaactaatagtctgtgagctcctttagggca

SEQ ID NO: 101695 - DNA, 80 bp, synthetic construct
  source 1..80: mol_type = other DNA
aaaatgctgcatggtagctgctaatagaaagcaagttctttcctccagttctgatgtgatgtgatctggcagagggcagc

SEQ ID NO: 101696 - DNA, 80 bp, synthetic construct
  source 1..80: mol_type = other DNA
ccaacatgaagaaacctgtctctactaaaaatacaaaattagctgcgcgtggtggtgcatgcctgtaatcccagctactc

SEQ ID NO: 101697 - DNA, 80 bp, synthetic construct; identical to SEQ ID NO: 19435
  source 1..80: mol_type = other DNA

SEQ ID NO: 101698 - DNA, 80 bp, synthetic construct
  source 1..80: mol_type = other DNA
attttgggaggccgaggcaggaggattgcttgagctcaggaattcaagaccaacctggacaacaaagtgtgaccctgcct

SEQ ID NO: 101699 - DNA, 80 bp, synthetic construct
  source 1..80: mol_type = other DNA
cttttaaggcctatattaatcaccatctccacaaaatcagcttcatttagtggaaacactcccttgaaattattaacgtg

SEQ ID NO: 101700 - DNA, 80 bp, synthetic construct
  source 1..80: mol_type = other DNA
cctatgtgattcctgaagtctctaacaattaatacttgacagacacagactgttatcaacagcagaatctttggattaac

SEQ ID NO: 101701 - DNA, 80 bp, synthetic construct
  source 1..80: mol_type = other DNA
tcagtggtgccaatatgattcaacaattttattatggtcttcaattacattttcttccttatttctttagtattgcttct

SEQ ID NO: 101702 - DNA, 80 bp, synthetic construct; identical to SEQ ID NO: 19436
  source 1..80: mol_type = other DNA

SEQ ID NO: 101703 - DNA, 80 bp, synthetic construct
  source 1..80: mol_type = other DNA
cattgatctttatagttcttttctgggaaggtgagattttacagactcaaggtgattggtttaaacttggaatttctttc

SEQ ID NO: 101704 - DNA, 80 bp, synthetic construct
  source 1..80: mol_type = other DNA
gtttccacaaaggcttattcacattcctggattttaaacctatgatgagactgtgtttaattagaggtacggcccacggc

SEQ ID NO: 101705 - DNA, 80 bp, synthetic construct
  source 1..80: mol_type = other DNA
atttgtagactctgcatgcaaatattatgggtaaaaagaaccatttaagtattttgaaaataacattagaccagatgatg

SEQ ID NO: 101706 - DNA, 80 bp, synthetic construct; identical to SEQ ID NO: 19437
  source 1..80: mol_type = other DNA

SEQ ID NO: 101707 - DNA, 80 bp, synthetic construct
  source 1..80: mol_type = other DNA
gtgaaattacaagtgggtctctttccatgcatactagaagacagcagttattttggcagacagtgcttttcatacattca

SEQ ID NO: 101708 - DNA, 80 bp, synthetic construct
  source 1..80: mol_type = other DNA
agcaaaatattgaagccagtaaaacagctaaccaggtttcaaataaaagtctattggttccaaaacccacctgttttcta

SEQ ID NO: 101709 - DNA, 80 bp, synthetic construct; identical to SEQ ID NO: 19438
  source 1..80: mol_type = other DNA

SEQ ID NO: 101710 - DNA, 80 bp, synthetic construct
  source 1..80: mol_type = other DNA
gaacacgccatcacataattacataagtcatcaacaaatctttattggccatctgcttgtcagaaagcctcttcctcatg

SEQ ID NO: 101711 - DNA, 80 bp, synthetic construct
  source 1..80: mol_type = other DNA
ataaagttggaaactttcagctaatgttcattctatttaaacatgctttgggttgttggtgcccaggatacagcacccca

SEQ ID NO: 101712 - DNA, 80 bp, synthetic construct
  source 1..80: mol_type = other DNA
gtggaagtgtacttagcctgttaagtagagaaacaatttccataggatagggttttgtgggctggaaagataaactgcaa

SEQ ID NO: 101713 - DNA, 80 bp, synthetic construct
  source 1..80: mol_type = other DNA
gaaactccatctgcttatccagtgctatttgatattatagttattatgtactctttatggactagagacggagaggttga

SEQ ID NO: 101714 - DNA, 80 bp, synthetic construct; identical to SEQ ID NO: 19439
  source 1..80: mol_type = other DNA

SEQ ID NO: 101715 - DNA, 80 bp, synthetic construct
  source 1..80: mol_type = other DNA
cactgattggtttatctgcagatctcctggttttatttttgtttatttggatgcacacatctgggcgtacatctcattag

SEQ ID NO: 101716 - DNA, 80 bp, synthetic construct
  source 1..80: mol_type = other DNA
ccatgtttgtgttagctcctcagcttctggagtgtgttagttttaccagaaagatttgatcaacaattgagaggtctaga

SEQ ID NO: 101717 - DNA, 80 bp, synthetic construct; identical to SEQ ID NO: 19440
  source 1..80: mol_type = other DNA

SEQ ID NO: 101718 - DNA, 80 bp, synthetic construct
  source 1..80: mol_type = other DNA
ctctgtttcaaaaaagcaaaaacaaattcagaaagctcatatgaacctgagggataacatcagaatgctgatttgttaac

SEQ ID NO: 101719 - DNA, 80 bp, synthetic construct
  source 1..80: mol_type = other DNA
acaagacaaatattcaaggttgggctgagagggtggtggggtttaagcagagacaggcgacaaataaataaaagaagagg

SEQ ID NO: 101720 - DNA, 80 bp, synthetic construct
  source 1..80: mol_type = other DNA
aacctcttacctttttgatagacatagggtttctttagttatgtttataaatacaatccagttcaggccagacctcaaag

SEQ ID NO: 101721 - DNA, 80 bp, synthetic construct; identical to SEQ ID NO: 19441
  source 1..80: mol_type = other DNA

SEQ ID NO: 101722 - DNA, 80 bp, synthetic construct
  source 1..80: mol_type = other DNA
ttttatttatattcctggaataagattacagatagggcaggaacaagagtgaggtaaagtggtggatgtcctggagatga

SEQ ID NO: 101723 - DNA, 80 bp, synthetic construct
  source 1..80: mol_type = other DNA
actgtaaagacagatttgtgaattacaaatttttgagactgtcaaaaattgggccctagctttccttagggggtggaaat

SEQ ID NO: 101724 - DNA, 80 bp, synthetic construct
  source 1..80: mol_type = other DNA
gaggccaaagtagaaggacgggttgagaccaagggttccagaccagcttgggtatcatagtgataacttcatctctacaa

SEQ ID NO: 101725 - DNA, 80 bp, synthetic construct
  source 1..80: mol_type = other DNA
gacctcatctctcagaaagtaaaaaaaaattagccaggcctggtggctcatgcctgtagcctgttgtcaggcaagggtgt

SEQ ID NO: 101726 - DNA, 80 bp, synthetic construct; identical to SEQ ID NO: 19442
  source 1..80: mol_type = other DNA

SEQ ID NO: 101727 - DNA, 80 bp, synthetic construct
  source 1..80: mol_type = other DNA
cagcaataaaacagatactttctgcatgagtgtgttgggagcagaaaatgagccaattaagcattctgttttctgatgca

SEQ ID NO: 101728 - DNA, 80 bp, synthetic construct
  source 1..80: mol_type = other DNA
atattttaaaatgcatgaacataacaaagttagtcattgaaaagcaggcaaaatctagcatgtatgtttttctttggatt

SEQ ID NO: 101729 - DNA, 80 bp, synthetic construct; identical to SEQ ID NO: 19443
  source 1..80: mol_type = other DNA

SEQ ID NO: 101730 - DNA, 80 bp, synthetic construct
  source 1..80: mol_type = other DNA
aatgaagcaacaaataaacaaacaaaagcaacctcttcactgcagatgggctattaacacttagcattctaagctcaccc

SEQ ID NO: 101731 - DNA, 80 bp, synthetic construct
  source 1..80: mol_type = other DNA
cattctggggaagaggggaaaaaaagcacagtgattacaatcaaaggagtaggcaccagaatgatatgaaacactcagaa

SEQ ID NO: 101732 - DNA, 80 bp, synthetic construct
  source 1..80: mol_type = other DNA
gtgaggctatcctttcgtttgcaataacttttagactcggtgaatataatagcatgatcattcttgcctatagaacagag

SEQ ID NO: 101733 - DNA, 80 bp, synthetic construct
  source 1..80: mol_type = other DNA
cctcctttttttttttttttttttttttttaaatttagagatgaggtcttgctgtgtcacccaggctggactgcagtggc

SEQ ID NO: 101734 - DNA, 80 bp, synthetic construct; identical to SEQ ID NO: 19444
  source 1..80: mol_type = other DNA

SEQ ID NO: 101735 - DNA, 80 bp, synthetic construct
  source 1..80: mol_type = other DNA
agagtggaggacaaatgttggcttcattccatgtcagtgtccttcttagattcctgggcattaatcgttaaatgttgtta

SEQ ID NO: 101736 - DNA, 80 bp, synthetic construct
  source 1..80: mol_type = other DNA
tgatggtttctatcttctcataactctgctcattgaaggtggagtcttctatttcttaagaggactgattaccaggttga

SEQ ID NO: 101737 - DNA, 80 bp, synthetic construct
  source 1..80: mol_type = other DNA
aatttagaatgtttagatttcacttttctctgttcttgctaaatgtgtgtgccggcataaagaacagagctgatggctgt

SEQ ID NO: 101738 - DNA, 80 bp, synthetic construct; identical to SEQ ID NO: 19445
  source 1..80: mol_type = other DNA

SEQ ID NO: 101739 - DNA, 80 bp, synthetic construct
  source 1..80: mol_type = other DNA
acaatgagatgtttgtaattatataaaatactaaattgttattaaattttagttagtgtcaacatgtattcatcattttc

SEQ ID NO: 101740 - DNA, 80 bp, synthetic construct
  source 1..80: mol_type = other DNA
gctggagtgcagtggcacaatctcggctcactgcaacctccacctcccaggttcaagcaattctcctgcctcagcctccc

SEQ ID NO: 101741 - DNA, 80 bp, synthetic construct; identical to SEQ ID NO: 19446
  source 1..80: mol_type = other DNA

SEQ ID NO: 101742 - DNA, 80 bp, synthetic construct
  source 1..80: mol_type = other DNA
tgttgtatggataattcatgtattataggcatgataacctgtttacagaaaattctaagcatgtggatctcctatctttt

SEQ ID NO: 101743 - DNA, 80 bp, synthetic construct
  source 1..80: mol_type = other DNA
aatgtctttctcccttgaagtttattttggaagatggagggattctggcaatagaataagcaaacaaggtatttgcaggc

SEQ ID NO: 101744 - DNA, 80 bp, synthetic construct
  source 1..80: mol_type = other DNA
gccatttggtttgagtcataatgatgaaaaggagcctgccctggaaacttctagggggagagcattcaaagcagagaagc

SEQ ID NO: 101745 - DNA, 80 bp, synthetic construct; identical to SEQ ID NO: 19447
  source 1..80: mol_type = other DNA

SEQ ID NO: 101746 - DNA, 80 bp, synthetic construct
  source 1..80: mol_type = other DNA
agaagaggttattatcctgcagatatagaagatctttcatgaagacattgaggaggaagatatgacctatactcagctat

SEQ ID NO: 101747 - DNA, 80 bp, synthetic construct
  source 1..80: mol_type = other DNA
aatatgtgtaggtgtaggtttctgtttaggtgtcggtggagaagtaagtgtaggcatctgcgtgacaccagtgattttca

SEQ ID NO: 101748 - DNA, 80 bp, synthetic construct
  source 1..80: mol_type = other DNA
ctctactaaaagtacaaaaaattagttgggtgtggtggtgggcacctgtagtgccagctactcgggaggctgaggcagga

SEQ ID NO: 101749 - DNA, 80 bp, synthetic construct
  source 1..80: mol_type = other DNA
cagtataccttttgacatgtagtagttgctaaatgattgatacagatactgatgtttttggaggtagaggactttctcat

SEQ ID NO: 101750 - DNA, 80 bp, synthetic construct; identical to SEQ ID NO: 19448
  source 1..80: mol_type = other DNA

SEQ ID NO: 101751 - DNA, 80 bp, synthetic construct
  source 1..80: mol_type = other DNA
cacacccagtgagtaatggtatggctttgcttcccaaacaggttaaagattatgaagctctgtgctatcataaggaggtt

SEQ ID NO: 101752 - DNA, 80 bp, synthetic construct
  source 1..80: mol_type = other DNA
gcccttacaaatatgcatatgtttgagaagagaggaggaaattaatcagagcccctggcttaaatgatctccattcttac

SEQ ID NO: 101753 - DNA, 80 bp, synthetic construct; identical to SEQ ID NO: 19449
  source 1..80: mol_type = other DNA

SEQ ID NO: 101754 - DNA, 80 bp, synthetic construct
  source 1..80: mol_type = other DNA
tttttttaatgaggaaaggcagtgctccaatgagaacattctcacaggcaggtaacagaatagcacacttttattaggag

SEQ ID NO: 101755 - DNA, 80 bp, synthetic construct
  source 1..80: mol_type = other DNA
tctggcaaaaccggagttttattgatggacttcctttatgtactcactctgcgttagcatgttggagacataggatttgc

SEQ ID NO: 101756 - DNA, 80 bp, synthetic construct
  source 1..80: mol_type = other DNA
gagaggtcctttgctgtgttcaagtacttgggatatcgaatgacagaacttgtttttagagagatgacagcaataagcct

SEQ ID NO: 101757 - DNA, 80 bp, synthetic construct
  source 1..80: mol_type = other DNA
ctacaaaagcatgttgacttaaatttgcagatgaggaaaaagaggttcagaaagatgaatctgcaacccaggtgccttga

SEQ ID NO: 101758 - DNA, 80 bp, synthetic construct; identical to SEQ ID NO: 19450
  source 1..80: mol_type = other DNA

SEQ ID NO: 101759 - DNA, 80 bp, synthetic construct
  source 1..80: mol_type = other DNA
ttgttagtaatattgagattgctttgagaatacacactctgacaataaactgaggatgcttgttggaaagagtagctggg

SEQ ID NO: 101760 - DNA, 80 bp, synthetic construct
  source 1..80: mol_type = other DNA
gtaggcattataaaaggggacaagagcattaaaagagagtttgactttcatgataaaagattaagagtgttggccgggcg

SEQ ID NO: 101761 - DNA, 80 bp, synthetic construct
  source 1..80: mol_type = other DNA
ctactctggaggctgaggcaggagaatggcatgaacctgggaggcagggcttgcagtgagccgagatcttgccactgcac

SEQ ID NO: 101762 - DNA, 80 bp, synthetic construct; identical to SEQ ID NO: 19451
  source 1..80: mol_type = other DNA

SEQ ID NO: 101763 - DNA, 80 bp, synthetic construct
  source 1..80: mol_type = other DNA
tcctgctgtgctagagcatcatccttagtcctttcctcctaaagtaggcactgtttgaaatgaactttgatttcaaatgc

SEQ ID NO: 101764 - DNA, 80 bp, synthetic construct
  source 1..80: mol_type = other DNA
caatggagtgagtggccattgcctacttggtttttgtttccccttagacctaatctgagatttgccaatctcatgttcta

SEQ ID NO: 101765 - DNA, 80 bp, synthetic construct; identical to SEQ ID NO: 19452
  source 1..80: mol_type = other DNA

SEQ ID NO: 101766 - DNA, 80 bp, synthetic construct
  source 1..80: mol_type = other DNA
tttctatttgcagtgttttctgacaaatatttttcctccagattttaagcgtgttattatgagtcaacctttatgtttgt

SEQ ID NO: 101767 - DNA, 80 bp, synthetic construct
  source 1..80: mol_type = other DNA
tatgtaccatataacctctacaaatcacagtcaatctggatagtgtccccttagggcaccttaattatatgctgtagttc

SEQ ID NO: 101768 - DNA, 80 bp, synthetic construct
  source 1..80: mol_type = other DNA
ggttgctttggaacctactgttatagatgccagtcttctggaagtgtttccagatttttttttcttttttggcctttaga

SEQ ID NO: 101769 - DNA, 80 bp, synthetic construct
  source 1..80: mol_type = other DNA
taactgaaccattgatgtgaactctttgggatctacagcatcatccttaatgcctgtgtcataccttgtatatcattttg

SEQ ID NO: 101770 - DNA, 80 bp, synthetic construct; identical to SEQ ID NO: 19453
  source 1..80: mol_type = other DNA

SEQ ID NO: 101771 - DNA, 80 bp, synthetic construct
  source 1..80: mol_type = other DNA
gagttcaaggccagcctgggcaacatagtgagaccttatctctgcaaaaaaatcattagccaggcacggtggtgtgtacc

SEQ ID NO: 101772 - DNA, 80 bp, synthetic construct
  source 1..80: mol_type = other DNA
taaaaaatgaaatatataaaaataatatataaatatatatttttttattaactctggcacatagcaaatattatttcact

SEQ ID NO: 101773 - DNA, 80 bp, synthetic construct; identical to SEQ ID NO: 19454
  source 1..80: mol_type = other DNA

SEQ ID NO: 101774 - DNA, 80 bp, synthetic construct
  source 1..80: mol_type = other DNA
tatgaactttctgatttctattgacttttctgattttgttatcaaactgtcaatacattctgtgccttggcaactacatg

SEQ ID NO: 101775 - DNA, 80 bp, synthetic construct
  source 1..80: mol_type = other DNA
tctggtaaagacgttctctaagtttgtgtgaaagtgtagtagaaggttcaggaacatacagtacttcaagaaaactgtgt

SEQ ID NO: 101776 - DNA, 80 bp, synthetic construct
  source 1..80: mol_type = other DNA
ctgttggaaatattacctccttatgaacctcataagacatggagcctggctatggtcactgttaggagtattttgctgct

SEQ ID NO: 101777 - DNA, 80 bp, synthetic construct; identical to SEQ ID NO: 19455
  source 1..80: mol_type = other DNA

SEQ ID NO: 101778 - DNA, 80 bp, synthetic construct
  source 1..80: mol_type = other DNA
accatgtatgtattctattgcaacctgctattttcacttagcattacatttctaaaattgatccacattgatgtttatag

SEQ ID NO: 101779 - DNA, 80 bp, synthetic construct
  source 1..80: mol_type = other DNA
tctttagggtttatacctagaagagaaattactgagctgtagagtatgggcatgctcattttcacaagataataccaaat

SEQ ID NO: 101780 - DNA, 80 bp, synthetic construct
  source 1..80: mol_type = other DNA
gcatgctctcagtgataacatgtaagaattctggttgttccacatctttgccatccttgatattgtcaggcattaatatt

SEQ ID NO: 101781 - DNA, 80 bp, synthetic construct; identical to SEQ ID NO: 19456
  source 1..80: mol_type = other DNA

SEQ ID NO: 101782 - DNA, 80 bp, synthetic construct
  source 1..80: mol_type = other DNA
gtgtgtttaaaagagatccctctgtcttctaaggtcatagagttacagctttaaaaattttctcttagatgtcaaagttg

SEQ ID NO: 101783 - DNA, 80 bp, synthetic construct
  source 1..80: mol_type = other DNA
acagaggtgggaggattgcttgagcccagagttcaaagctgcagtgagctatgattacaacattgtactctagcctgggt

SEQ ID NO: 101784 - DNA, 80 bp, synthetic construct
  source 1..80: mol_type = other DNA
tatcctagcagtgttgattaggctgtctttgaccattgccacctttgttgtatgtgtgtttctgagatccctattttgtt

SEQ ID NO: 101785 - DNA, 80 bp, synthetic construct
  source 1..80: mol_type = other DNA
attttatctctgctgtatggctggtaccagagaaacagaaatagaattggagcttctatgttgtttcagtcatcttcaga

SEQ ID NO: 101786 - DNA, 80 bp, synthetic construct; identical to SEQ ID NO: 19457
  source 1..80: mol_type = other DNA

SEQ ID NO: 101787 - DNA, 80 bp, synthetic construct
  source 1..80: mol_type = other DNA
tatgtgatctgggctacataccgtctctctgtatccagaatgtacattcttaccacccatataccagctgcccaccagct

SEQ ID NO: 101788 - DNA, 80 bp, synthetic construct
  source 1..80: mol_type = other DNA
tctattgtctttgcagagctctgtgctgggactaaattctgcctgattgaccaagaaaaagcaaaagagggtcagcatgt

SEQ ID NO: 101789 - DNA, 80 bp, synthetic construct
  source 1..80: mol_type = other DNA
agggctgttcaggatcctcagtgatgagaattggttgtgagttagagcctgggacaatggcctgatgggaaatgctgcat

SEQ ID NO: 101790 - DNA, 80 bp, synthetic construct; identical to SEQ ID NO: 19458
  source 1..80: mol_type = other DNA

SEQ ID NO: 101791 - DNA, 80 bp, synthetic construct
  source 1..80: mol_type = other DNA
atatgtatatataagtatatatatgtatatatgtatatatgtatatgtgtatatatgtatatgtatatgtgtatatatgt

SEQ ID NO: 101792 - DNA, 80 bp, synthetic construct
  source 1..80: mol_type = other DNA
taaatatatatcaatattaataaagtatatatttatactaattaaatatatttgattatataattataacaataaatata

SEQ ID NO: 101793 - DNA, 80 bp, synthetic construct
  source 1..80: mol_type = other DNA
acctccacctcccgggttcaagcaattctcctgcctcagcctgccaagtagctgggattacaggcacctgccaccatgcc

SEQ ID NO: 101794 - DNA, 80 bp, synthetic construct; identical to SEQ ID NO: 19459
  source 1..80: mol_type = other DNA

SEQ ID NO: 101795 - DNA, 80 bp, synthetic construct
  source 1..80: mol_type = other DNA
gcagatgtagaaactgctagggtgtgtcagatgagagatgtttttgatgctgtgacagagatgtttttgatgctggggac

SEQ ID NO: 101796 - DNA, 80 bp, synthetic construct
  source 1..80: mol_type = other DNA
gctgagtgtcttaataggtctaatgactgtgctgcatgaatgtaaagtaggttctgtatgcaaagggttaagaaactgga

SEQ ID NO: 101797 - DNA, 80 bp, synthetic construct; identical to SEQ ID NO: 19460
  source 1..80: mol_type = other DNA

SEQ ID NO: 101798 - DNA, 80 bp, synthetic construct
  source 1..80: mol_type = other DNA
cgatcttggctcactgcagactccgcctcccgggttcaatcaattctccttcctcagcctcctgagtagctgggattaca

SEQ ID NO: 101799 - DNA, 80 bp, synthetic construct
  source 1..80: mol_type = other DNA
ggggcttctttttaatcatataccctgcctcaccttcccttcctggaaattgtcaccatcttactcttatttcttactct

SEQ ID NO: 101800 - DNA, 80 bp, synthetic construct
  source 1..80: mol_type = other DNA
gacttggtgcttctaaaatacatccatggaaatccttggctgtagattgttagttacaacggtatactagtccattgtgt

SEQ ID NO: 101801 - DNA, 80 bp, synthetic construct; identical to SEQ ID NO: 19461
  source 1..80: mol_type = other DNA

SEQ ID NO: 101802 - DNA, 80 bp, synthetic construct
  source 1..80: mol_type = other DNA
acagccatgaaaacaggtaactctggtttagtatgataagcgcattagttggtttggtgatgagtctctgctctttgcca

SEQ ID NO: 101803 - DNA, 80 bp, synthetic construct
  source 1..80: mol_type = other DNA
gcattgatttgctagatatattagtagaatcctagggcaagctattcatgaagcatttggtagaggaggaagaatctgta

SEQ ID NO: 101804 - DNA, 80 bp, synthetic construct
  source 1..80: mol_type = other DNA
ttaggaggtcatcagtgaccttttgatagtagcttaggaaagacacgggcatggaaccactgagcacctaatgaaggaaa

SEQ ID NO: 101805 - DNA, 80 bp, synthetic construct; identical to SEQ ID NO: 19462
  source 1..80: mol_type = other DNA

SEQ ID NO: 101806 - DNA, 80 bp, synthetic construct
  source 1..80: mol_type = other DNA
agtcaatagtgagaactctgaaactccagctgcataagagaaagagattccaaacaccataagatcttgcagttaaactg

SEQ ID NO: 101807 - DNA, 80 bp, synthetic construct
  source 1..80: mol_type = other DNA
aaagcctacattccaagcaagactgagtgtggctgcaaagaaggatgttggttcccaggagcagaggactggggcagaaa

SEQ ID NO: 101808 - DNA, 80 bp, synthetic construct
  source 1..80: mol_type = other DNA
gcaagtttttaagtttcctcaaattacggaatacaattgacaagagaagaactacttttcgggagccataaataaccttt

SEQ ID NO: 101809 - DNA, 80 bp, synthetic construct; identical to SEQ ID NO: 19463
  source 1..80: mol_type = other DNA

SEQ ID NO: 101810 - DNA, 80 bp, synthetic construct
  source 1..80: mol_type = other DNA
ctttgtgaagagggttttttttttttggacagggtcttgctctgttgccaaggctgagtgcagtggcatgatcacagctc

SEQ ID NO: 101811 - DNA, 80 bp, synthetic construct
  source 1..80: mol_type = other DNA
agttctcccacctcggccccccaaatagttggtactacaggcgtacgtcaccacgcctggctaattttttattttttgta

SEQ ID NO: 101812 - DNA, 80 bp, synthetic construct
  source 1..80: mol_type = other DNA
ggccctttataccaaaacttcctgagcagcactattttacaggcagtgttaacataattgtaacatatttagatcttggc

SEQ ID NO: 101813 - DNA, 80 bp, synthetic construct
  source 1..80: mol_type = other DNA
tatatctaaaacagaactcattatctttcctgcacgtgctactttgcctctcacattctctatttctagcaccttcactc

SEQ ID NO: 101814 - DNA, 80 bp, synthetic construct; identical to SEQ ID NO: 19464
  source 1..80: mol_type = other DNA

SEQ ID NO: 101815 - DNA, 80 bp, synthetic construct
  source 1..80: mol_type = other DNA
accaaggttaaacagcaacatagctcctggacacttctgccacacagtcttcactgagtatagcacctgtttccttaggt

SEQ ID NO: 101816 - DNA, 80 bp, synthetic construct
  source 1..80: mol_type = other DNA
ctcttgtaggtaaatgccacatcctgatccgtgaagatgggatattgccttgcagggctttacagctgtgaattagaaaa

SEQ ID NO: 101817 - DNA, 80 bp, synthetic construct; identical to SEQ ID NO: 19465
  source 1..80: mol_type = other DNA

SEQ ID NO: 101818 - DNA, 80 bp, synthetic construct
  source 1..80: mol_type = other DNA
tggtttacatttgtgttttttcaactttgattcccaagattgaaagatttattctggctgaggattctgggcgttccttc

SEQ ID NO: 101819 - DNA, 80 bp, synthetic construct
  source 1..80: mol_type = other DNA
atctccttgtggctgtggcatagctgaagcctgcagtaaattttcagcatctggatatatttgtgtcaaatagctgcaga

SEQ ID NO: 101820 - DNA, 80 bp, synthetic construct
  source 1..80: mol_type = other DNA
gaggtcagctttttgcgaactctgaaagtcaaagatagaggtggctgtgttgagtttagaaagtgaatcaatgggacagt

SEQ ID NO: 101821 - DNA, 80 bp, synthetic construct; identical to SEQ ID NO: 19466
  source 1..80: mol_type = other DNA

SEQ ID NO: 101822 - DNA, 80 bp, synthetic construct
  source 1..80: mol_type = other DNA
catggtcacagctcactacagcctcagcctcccaggctcaagcaatcctcccacctcagcctcctgaatagctgggactg

SEQ ID NO: 101823 - DNA, 80 bp, synthetic construct
  source 1..80: mol_type = other DNA
ccacatagagttgtaaatcatgaaactgttctggacagaaagcagatggcagaatcacaatcttctgtgtccagagatta

SEQ ID NO: 101824 - DNA, 80 bp, synthetic construct
  source 1..80: mol_type = other DNA
ctgtttgtgacattgtgcatacttctcaatgatcttccctcttcatactttaacttactcctctccttgcccagatcact

SEQ ID NO: 101825 - DNA, 80 bp, synthetic construct
  source 1..80: mol_type = other DNA
gcctcattgaatgctgttttaggtgaaggaaggtaattttgctctggcaggttggcgaattagtatgttacagctgtaaa

SEQ ID NO: 101826 - DNA, 80 bp, synthetic construct; identical to SEQ ID NO: 19467
  source 1..80: mol_type = other DNA

SEQ ID NO: 101827 - DNA, 80 bp, synthetic construct
  source 1..80: mol_type = other DNA
ttatttaacatggattctttttttttctttttctttttgagatggagtttcactctttgttgcccaggctggagtgcagt

SEQ ID NO: 101828 - DNA, 80 bp, synthetic construct
  source 1..80: mol_type = other DNA
acttgatctagggagtctagggttgcagcattattttgtagactcgatgcggactgccttaatattttacagcattttta

SEQ ID NO: 101829 - DNA, 80 bp, synthetic construct; identical to SEQ ID NO: 19468
  source 1..80: mol_type = other DNA

SEQ ID NO: 101830 - DNA, 80 bp, synthetic construct
  source 1..80: mol_type = other DNA
attcctgagcttcatctatggtgtggcatgccatagaatttccttcttttaaggcttcataatgtcacgttgtgtatata

SEQ ID NO: 101831 - DNA, 80 bp, synthetic construct
  source 1..80: mol_type = other DNA
ttgagattctgcatcttgtatatgtcttttggatatagatacccatgtcgtggatggaatatgtccccacaaaattcaca

SEQ ID NO: 101832 - DNA, 80 bp, synthetic construct
  source 1..80: mol_type = other DNA
catgaatgggatatagtgttcttataagaaaaggccagagagctagcatgctgtctttctgccatgtgaagacacaacgt

SEQ ID NO: 101833 - DNA, 80 bp, synthetic construct
  source 1..80: mol_type = other DNA
tgtgtaagccgcccagtctataacacctttttatagcagcacaaactaagacaacgtaaaaatgggattgctagattgta

SEQ ID NO: 101834 - DNA, 80 bp, synthetic construct; identical to SEQ ID NO: 19469
  source 1..80: mol_type = other DNA

SEQ ID NO: 101835 - DNA, 80 bp, synthetic construct
  source 1..80: mol_type = other DNA
ttgccaacacttgctattttcctttctgttgatagtggccatcctaatgggtgtcaggtgatattgtgattttgatttgc

SEQ ID NO: 101836 - DNA, 80 bp, synthetic construct
  source 1..80: mol_type = other DNA
tatcagatacagttgtctctctgtgtgttccttatctttggattcaattaactgcagattgaaactatttgggaaaaaaa

SEQ ID NO: 101837 - DNA, 80 bp, synthetic construct
  source 1..80: mol_type = other DNA
tttgatatcagggacttgggcatccactgattctagtatccattggttctggaaccagtcctctgaagatgccgagggat

SEQ ID NO: 101838 - DNA, 80 bp, synthetic construct; identical to SEQ ID NO: 19470
  source 1..80: mol_type = other DNA

SEQ ID NO: 101839 - DNA, 80 bp, synthetic construct
  source 1..80: mol_type = other DNA
atgcaagggtttatttccaggctctctattctgttccatcggcctatataagtttctgtgccactaccacactgtctgat

SEQ ID NO: 101840 - DNA, 80 bp, synthetic construct
  source 1..80: mol_type = other DNA
ataggaattgcattgagtcttgactgtcttagattttatcgggaagaagctgtttaccaggctgagcaagaaatgtgagc

SEQ ID NO: 101841 - DNA, 80 bp, synthetic construct
  source 1..80: mol_type = other DNA
acggcacaatcaaaccgtgcagtgcagtctgtgaacaaattgtctccagctcgaaatgatgaaaagaatattttaacaac

SEQ ID NO: 101842 - DNA, 80 bp, synthetic construct
  source 1..80: mol_type = other DNA
tgccagaggaagaagtcagataggagctctctgtttttgttgctgttgttacttgccaaataatatttgctacatttttg

SEQ ID NO: 101843 - DNA, 80 bp, synthetic construct; identical to SEQ ID NO: 19471
  source 1..80: mol_type = other DNA

SEQ ID NO: 101844 - DNA, 80 bp, synthetic construct
  source 1..80: mol_type = other DNA
aatggtgtgatcttggttcactgcaacctccgcctcctgggttcaagcgattctcctgcctcagcctcctgagtagctgg

SEQ ID NO: 101845 - DNA, 80 bp, synthetic construct
  source 1..80: mol_type = other DNA
agcgcctagccaacaaaaccattttagatagcatataataaatttattagtaattccaaattctgtgatctcacttaata

SEQ ID NO: 101846 - DNA, 80 bp, synthetic construct
  source 1..80: mol_type = other DNA
catttattttccgctaaggggtttagaacagagatacgtaacttaagtatagcttactaagagccagttgttttgatttt

SEQ ID NO: 101847 - DNA, 80 bp, synthetic construct; identical to SEQ ID NO: 19472
  source 1..80: mol_type = other DNA

SEQ ID NO: 101848 - DNA, 80 bp, synthetic construct
  source 1..80: mol_type = other DNA
gggaggccgaggtgggtggatcacgaggtcaggagatcgagactatcgtggctaacatggtgaaaccccgtctctactaa

SEQ ID NO: 101849 - DNA, 80 bp, synthetic construct
  source 1..80: mol_type = other DNA
acaaacaaaaatatcttgaatgcttttgagtgactccttctaacttgtcacaatggtgatgttcagtgattaaaatgtgg

SEQ ID NO: 101850 - DNA, 80 bp, synthetic construct; identical to SEQ ID NO: 19473
  source 1..80: mol_type = other DNA

SEQ ID NO: 101851 - DNA, 80 bp, synthetic construct
  source 1..80: mol_type = other DNA
tcttatgaagaaaagattgcctttctcttgcgtcaaacattctcataacttttcattctatcttgaagttttcctttttt

SEQ ID NO: 101852 - DNA, 80 bp, synthetic construct
  source 1..80: mol_type = other DNA
cctttgcataaatgcatttcatttcttcttttcttgaccttgacatagttgctggcagagtacagcaaggaactctatga

SEQ ID NO: 101853 - DNA, 80 bp, synthetic construct
  source 1..80: mol_type = other DNA
tatcaggcacaaagtcaagaatattaatgaattcattatttataacccctttgttggacccaccgtactatacatgagtg

SEQ ID NO: 101854 - DNA, 80 bp, synthetic construct
  source 1..80: mol_type = other DNA
agaaaggcaggtgctggggtgacagagttaaggaaatcaatactgaccaccaatatagacactgcccaccaatgtagact

SEQ ID NO: 101855 - DNA, 80 bp, synthetic construct; identical to SEQ ID NO: 19474
  source 1..80: mol_type = other DNA

SEQ ID NO: 101856 - DNA, 80 bp, synthetic construct
  source 1..80: mol_type = other DNA
ggcacctattagggcatcactaaatgtttattcactgacctgtgaataggtatgttaggatttttccaaactcttttagg

SEQ ID NO: 101857 - DNA, 80 bp, synthetic construct
  source 1..80: mol_type = other DNA
tatttaatttaaagtgaaaattaaatgacccaatatctcggcacttagcaataaccagtcgctcgtgttgcccaaactgg

SEQ ID NO: 101858 - DNA, 80 bp, synthetic construct
  source 1..80: mol_type = other DNA
gctggtctcaaactcctgacctcaggtgatccacccaccttggcctcccaaagtgctgggattacaggtgtgagccacca

SEQ ID NO: 101859 - DNA, 80 bp, synthetic construct; identical to SEQ ID NO: 19475
  source 1..80: mol_type = other DNA

SEQ ID NO: 101860 - DNA, 80 bp, synthetic construct
  source 1..80: mol_type = other DNA
aatttcagtgttaaaatagccaatgatcttagcatgtcttgtccggcatgttgtaaaacatttgggtattgaagagttcc

SEQ ID NO: 101861 - DNA, 80 bp, synthetic construct
  source 1..80: mol_type = other DNA
agttaatggcagcttaagaaacaactgagtatattgtggtctaggaagtgtccttttggtaggcttttcatgttctagta

SEQ ID NO: 101862 - DNA, 80 bp, synthetic construct
  source 1..80: mol_type = other DNA
ttcaaagtgttttcatttgcattatcttattcacttctccacaaaattctaatagctagctagatattaaaatgacaatc

SEQ ID NO: 101863 - DNA, 80 bp, synthetic construct; identical to SEQ ID NO: 19476
  source 1..80: mol_type = other DNA

SEQ ID NO: 101864 - DNA, 80 bp, synthetic construct
  source 1..80: mol_type = other DNA
tggaatggcattgaatttatgtatcaatttgggagcagttcataactttataatatcgagcctttctatccataaacatg

SEQ ID NO: 101865 - DNA, 80 bp, synthetic construct
  source 1..80: mol_type = other DNA
tgttcctgaaatatattaagtaaagtgatttttaaaaatatactggtcttatatttagctaccttgctgaattgtcattc

SEQ ID NO: 101866 - DNA, 80 bp, synthetic construct
  source 1..80: mol_type = other DNA
gctataggatttcaatacactgtatcaagttaaattcccattcatctcaatttactgagttttcataaattggtgtaaat

SEQ ID NO: 101867 - DNA, 80 bp, synthetic construct; identical to SEQ ID NO: 19477
  source 1..80: mol_type = other DNA

SEQ ID NO: 101868 - DNA, 80 bp, synthetic construct
  source 1..80: mol_type = other DNA
gtgaacagctacagtgtacttaaaattacatttttaatagcagctgttggtagagtcttagcagtcctgctccatagctg

SEQ ID NO: 101869 - DNA, 80 bp, synthetic construct
  source 1..80: mol_type = other DNA
aaggaaatggaacaggaacaggtctgatacacatggacatatttttgctaatgaggcagtgggaaagacggaagaagatt

SEQ ID NO: 101870 - DNA, 80 bp, synthetic construct
  source 1..80: mol_type = other DNA
ttctcagctgtgataaatacagttttattactgcaggactatttagtttatgtgttgagtctactaaagtgttgagcagt

SEQ ID NO: 101871 - DNA, 80 bp, synthetic construct; identical to SEQ ID NO: 19478
  source 1..80: mol_type = other DNA

SEQ ID NO: 101872 - DNA, 80 bp, synthetic construct
  source 1..80: mol_type = other DNA
gattcagcaaaggtcagaatctaatgaggatctagactttattttgaaatccacaatttttagggccttggaaaacttgc

SEQ ID NO: 101873 - DNA, 80 bp, synthetic construct
  source 1..80: mol_type = other DNA
caggtcaatgccatgaaaattattgtctggttaatccggttatgatcaatttgataaatgcaaacttcaaaggtggttcc

SEQ ID NO: 101874 - DNA, 80 bp, synthetic construct; identical to SEQ ID NO: 19479
  source 1..80: mol_type = other DNA

SEQ ID NO: 101875 - DNA, 80 bp, synthetic construct
  source 1..80: mol_type = other DNA
agaaagatgggggccaggagactcagcaagtcttgtctttcagcctttttctgcctgcttttattctggctgtgctggca

SEQ ID NO: 101876 - DNA, 80 bp, synthetic construct
  source 1..80: mol_type = other DNA
cacacattcattggtgaaaaatcagcaatataaaacagcatatggttgcataaattctcaggattctttcaactgtggat

SEQ ID NO: 101877 - DNA, 80 bp, synthetic construct
  source 1..80: mol_type = other DNA
attagccgagttttgtttattataatatttctgtagtacttgctgtatacctgtactaagttctttacaagtgatagctc

SEQ ID NO: 101878 - DNA, 80 bp, synthetic construct; identical to SEQ ID NO: 19480
  source 1..80: mol_type = other DNA

SEQ ID NO: 101879 - DNA, 80 bp, synthetic construct
  source 1..80: mol_type = other DNA
cctcccgagtagctgggattacaggcgcccaccaccatgcctggctaacttttgtatttttagtagagacggtgttgcac

SEQ ID NO: 101880 - DNA, 80 bp, synthetic construct
  source 1..80: mol_type = other DNA
aactgcagattctggggggattacttttgccattctcgggcatatttttaataatggtgagcaaattgatactttgggtt

SEQ ID NO: 101881 - DNA, 80 bp, synthetic construct
  source 1..80: mol_type = other DNA
tgactatctactttagttgtgattctctcagttgtttgcttaggagtctcatccagtatagtgatggagctgggatatca

SEQ ID NO: 101882 - DNA, 80 bp, synthetic construct
  source 1..80: mol_type = other DNA
cttttcttgagttctgattttaaaataagcctcatttagccaagaattgacaatgactagaccaagacatgtttgacctg

SEQ ID NO: 101883 - DNA, 80 bp, synthetic construct; identical to SEQ ID NO: 19481
  source 1..80: mol_type = other DNA

SEQ ID NO: 101884 - DNA, 80 bp, synthetic construct
  source 1..80: mol_type = other DNA
atttagggaagcccattacacaaactggcattagcatcctccccacctccttttatcatcgtcattatcatcattactga

SEQ ID NO: 101885 - DNA, 80 bp, synthetic construct
  source 1..80: mol_type = other DNA
ttggagatggactggaaggtgacgtatattcaggatttgtttgataggcaccatttggttctatctgagttattttatca

SEQ ID NO: 101886 - DNA, 80 bp, synthetic construct; identical to SEQ ID NO: 19482
  source 1..80: mol_type = other DNA

SEQ ID NO: 101887 - DNA, 80 bp, synthetic construct
  source 1..80: mol_type = other DNA
cattcatttcttattgcagtctctttttctacctctttttgagtctgagcacttgaacattgggaatagatttgatggtc

SEQ ID NO: 101888 - DNA, 80 bp, synthetic construct
  source 1..80: mol_type = other DNA
ttcaattgagtctcctgcctcagcctcttgagtagctgggattacaggcatgcatcactgcacccagctaatttttataa

SEQ ID NO: 101889 - DNA, 80 bp, synthetic construct
  source 1..80: mol_type = other DNA
gtcctttaacaacacctttttaatggaaatcttgttctgaacagttttcgttccagcattctgaagatggcatctgcatc

SEQ ID NO: 101890 - DNA, 80 bp, synthetic construct; identical to SEQ ID NO: 19483
  source 1..80: mol_type = other DNA

SEQ ID NO: 101891 - DNA, 80 bp, synthetic construct
  source 1..80: mol_type = other DNA
aagatcattcttgagtctgatttgaaaactagggtcacatgttatcaggttgttttgtgtattaaatgggtgttaataca

SEQ ID NO: 101892 - DNA, 80 bp, synthetic construct
  source 1..80: mol_type = other DNA
ttggctaagtagaggaaatgagtattttcatacattgtaggtaagagtatatattggatcattattttgggaagaaagtt

SEQ ID NO: 101893 - DNA, 80 bp, synthetic construct
  source 1..80: mol_type = other DNA
aaataggtggtttgaatttattcattgaatttcatttactttctaagcttcattaaaactgtagtaaaaatttttttttt

SEQ ID NO: 101894 - DNA, 80 bp, synthetic construct; identical to SEQ ID NO: 19484
  source 1..80: mol_type = other DNA

SEQ ID NO: 101895 - DNA, 80 bp, synthetic construct
  source 1..80: mol_type = other DNA
gggttcaagtgattctcctgcctcagcctcccgagtagctgggactacagatgtgtgccaccacgcctggctaattttgt

SEQ ID NO: 101896 - DNA, 80 bp, synthetic construct
  source 1..80: mol_type = other DNA
tggcccatgtctttgttatatcagtagttatccctctacttttgattcccatatcctctgtccctttattgttgagtagt

SEQ ID NO: 101897 - DNA, 80 bp, synthetic construct
  source 1..80: mol_type = other DNA
tgatactgttgttgttgttttttgactgtcatgaataaagctgttatgaatgttcttgttaccaaaacaaaaacaaaaac

SEQ ID NO: 101898 - DNA, 80 bp, synthetic construct; identical to SEQ ID NO: 19485
  source 1..80: mol_type = other DNA

SEQ ID NO: 101899 - DNA, 80 bp, synthetic construct
  source 1..80: mol_type = other DNA
agattctttgcaggcaggaccaggcttccctacagcagaaggaaactaaatcagggtaatgagcctcagcagggacgggc

SEQ ID NO: 101900 - DNA, 80 bp, synthetic construct
  source 1..80: mol_type = other DNA
caaaatcaaggacatggttttctagaacacaggctgcaccctctcccccaagcctagcaaatgggctacgctggttggtg

SEQ ID NO: 101901 - DNA, 80 bp, synthetic construct
  source 1..80: mol_type = other DNA
gctgtgggcagccgtacaagctgtttacagcatcctgggacaggtgcttgcaaacatatggatgccatgggggatccgag

SEQ ID NO: 101902 - DNA, 80 bp, synthetic construct; identical to SEQ ID NO: 19486
  source 1..80: mol_type = other DNA

SEQ ID NO: 101903 - DNA, 80 bp, synthetic construct
  source 1..80: mol_type = other DNA
ctgtctggacctggaccggaggcttggcaagatgcaggacaactggaagccgtgagtcagacccgcgactggctcaagaa

SEQ ID NO: 101904 - DNA, 80 bp, synthetic construct
  source 1..80: mol_type = other DNA
ccgggaagaatatgacttcaagaggcagaagccggctcactgggaggccaagttccagcctttctggacagtgctttggc

SEQ ID NO: 101905 - DNA, 80 bp, synthetic construct
  source 1..80: mol_type = other DNA
gaaactcggccgaacatgagcctgagctgctccctcgaaaacacttttatctcttgttactttaggtaccatttattaat

SEQ ID NO: 101906 - DNA, 80 bp, synthetic construct
  source 1..80: mol_type = other DNA
ccctatacatataatactaaaagacttatttatatgtttacagatacacttggcattgtgtcatactattatatttatct

SEQ ID NO: 101907 - DNA, 80 bp, synthetic construct; identical to SEQ ID NO: 19487
  source 1..80: mol_type = other DNA

SEQ ID NO: 101908 - DNA, 80 bp, synthetic construct
  source 1..80: mol_type = other DNA
tattcacttgctgtggtttgaatgtgtttcctctaaaattcaggtgatgcttggctgggtgcagtgtttcatgcccgtaa

SEQ ID NO: 101909 - DNA, 80 bp, synthetic construct
  source 1..80: mol_type = other DNA
taggtgatgagagctcctgccttatgaatgggatgaaggcctttaaaaaaaagtcttcatggccaggcacggcggctcac

SEQ ID NO: 101910 - DNA, 80 bp, synthetic construct
  source 1..80: mol_type = other DNA
gctgaggcaggagaattgcttgaaccgaggaggcggaggttgcagtgagctgagatcatgccatcacactccagcctggg

SEQ ID NO: 101911 - DNA, 80 bp, synthetic construct; identical to SEQ ID NO: 19488
  source 1..80: mol_type = other DNA

SEQ ID NO: 101912 - DNA, 80 bp, synthetic construct
  source 1..80: mol_type = other DNA
aactagctggagagtattaggtgctgaaaagagtataaggattcagatttgttccaggtgaggcccacacagctttcacc

SEQ ID NO: 101913 - DNA, 80 bp, synthetic construct
  source 1..80: mol_type = other DNA
atagctgatcattttgaagttatcgctggtaaccattgagccagagacaaaaacaggtgctatcctcatggagtttgctg

SEQ ID NO: 101914 - DNA, 80 bp, synthetic construct
  source 1..80: mol_type = other DNA
tttcctttgaagaatgcttgagtaatatagctgttgaactagaagtgctgagcagtatatgcttcttgggatgtcttatg

SEQ ID NO: 101915 - DNA, 80 bp, synthetic construct; identical to SEQ ID NO: 19489
  source 1..80: mol_type = other DNA

SEQ ID NO: 101916 - DNA, 80 bp, synthetic construct
  source 1..80: mol_type = other DNA
tatttcccctcgctatgacccctggtaactaccctactactctctctcatctgtacaaccaaatgtgtgtgtgtatatat

SEQ ID NO: 101917 - DNA, 80 bp, synthetic construct
  source 1..80: mol_type = other DNA
acacataatgattatatatgtgtaacaggatacatatttatatatataaatgtactgtaattgaactatgattcagccat

SEQ ID NO: 101918 - DNA, 80 bp, synthetic construct; identical to SEQ ID NO: 19490
  source 1..80: mol_type = other DNA

SEQ ID NO: 101919 - DNA, 80 bp, synthetic construct
  source 1..80: mol_type = other DNA
aggcggatcacttgagttcaggagttggagaccaggctgggcaatatagccagaccctgtctctacaaaaaattttttaa

SEQ ID NO: 101920 - DNA, 80 bp, synthetic construct
  source 1..80: mol_type = other DNA
aaaaagccagagagccaagtgtgacagccctaatacatgttcaggattttagagaggttgtgcatctctttctatgtttt

SEQ ID NO: 101921 - DNA, 80 bp, synthetic construct
  source 1..80: mol_type = other DNA
tctgcatatattgttcttttatttttaaaaataaatttggaatcatcctgctcatgtaataaatgtatttttaaactttt

SEQ ID NO: 101922 - DNA, 80 bp, synthetic construct; identical to SEQ ID NO: 19491
  source 1..80: mol_type = other DNA

SEQ ID NO: 101923 - DNA, 80 bp, synthetic construct
  source 1..80: mol_type = other DNA
ccattatatgctggtcctataacccaaggcccatagactccctggtctttgttttttctcatagtttgcatcactgggtg

SEQ ID NO: 101924 - DNA, 80 bp, synthetic construct
  source 1..80: mol_type = other DNA
ggccaaagttcagggtgattcctcagggattgatacctacttaattggtattttacatcttcagctggtttacctttgaa

SEQ ID NO: 101925 - DNA, 80 bp, synthetic construct
  source 1..80: mol_type = other DNA
ctcagcctgtgccctggataccgcttaggttattggatggcattactatatggtgacacggacgcggatgcattttatct

SEQ ID NO: 101926 - DNA, 80 bp, synthetic construct
  source 1..80: mol_type = other DNA
gtcatagactgtgccagtatttagatttgactatatgtgtacaagttatcaatgtgctctgcagtgatggtacagaggct

SEQ ID NO: 101927 - DNA, 80 bp, synthetic construct; identical to SEQ ID NO: 19492
  source 1..80: mol_type = other DNA

SEQ ID NO: 101928 - DNA, 80 bp, synthetic construct
  source 1..80: mol_type = other DNA
aaagtgctttcaatgtgtattgaataattgtggtgtgtaaggatcgttcctagtgagccactccccttaatgtcactcca

SEQ ID NO: 101929 - DNA, 80 bp, synthetic construct
  source 1..80: mol_type = other DNA
gaacagcaaagatacttggaaattttatgatagtgttataatctccttggcagatggctaagcattaaattgcagacatc

SEQ ID NO: 101930 - DNA, 80 bp, synthetic construct
  source 1..80: mol_type = other DNA
ctcaatcctatatttattaatcttttctcatttaaaactacgttgtggacatgtgttctggatattagcaaatccagttg

SEQ ID NO: 101931 - DNA, 80 bp, synthetic construct; identical to SEQ ID NO: 19493
  source 1..80: mol_type = other DNA

SEQ ID NO: 101932 - DNA, 80 bp, synthetic construct
  source 1..80: mol_type = other DNA
acagagcaagaccccttttgttacaaaatgaaaaggaaacgtagaaacaatattgttaaattaaaaggcatgcacatttt

SEQ ID NO: 101933 - DNA, 80 bp, synthetic construct
  source 1..80: mol_type = other DNA
gagtgcagtagcgtgatctcgactcactgcaacctccgcctcccaggttcaagcaattctgcctcagcctctggagtagc

SEQ ID NO: 101934 - DNA, 80 bp, synthetic construct
  source 1..80: mol_type = other DNA
gaccggctgattggttattattattaaccatttttacttgccattccagtagtttttttaaaaaaagcaaaaaaccccaa

SEQ ID NO: 101935 - DNA, 80 bp, synthetic construct; identical to SEQ ID NO: 19494
  source 1..80: mol_type = other DNA

SEQ ID NO: 101936 - DNA, 80 bp, synthetic construct
  source 1..80: mol_type = other DNA
gtgagtttcctacttaatacattatttgcctgcttttctaatgggagcgcctcttctcaatatataacagctgtttataa

SEQ ID NO: 101937 - DNA, 80 bp, synthetic construct
  source 1..80: mol_type = other DNA
cactgttaggacttaaatctttaacctatctgaaatttattctggcaaaggatagggagagctttaatttttttttcccc

SEQ ID NO: 101938 - DNA, 80 bp, synthetic construct; identical to SEQ ID NO: 19495
  source 1..80: mol_type = other DNA

SEQ ID NO: 101939 - DNA, 80 bp, synthetic construct
  source 1..80: mol_type = other DNA
tagtatattgtcttagtccatttgtgtttctataaaggactaactgaggttgggtaatttctaatgaaaagagatatatt

SEQ ID NO: 101940 - DNA, 80 bp, synthetic construct
  source 1..80: mol_type = other DNA
gagagaggaaggaaatgaggaggaggtcccaggctctttaacagtcagctctcacaggaatgaatccagtgagaactcac

SEQ ID NO: 101941 - DNA, 80 bp, synthetic construct
  source 1..80: mol_type = other DNA
actttagatttcattttaatgtgtagcaagggtagtttcactcaatccatttctctttataatatttcctttgccttttc

SEQ ID NO: 101942 - DNA, 80 bp, synthetic construct
  source 1..80: mol_type = other DNA
attttgcaagggattatggtattgagcaggagaaaggaaatgacccatggaatgtgtttctcatatcacatgaagtcaac

SEQ ID NO: 101943 - DNA, 80 bp, synthetic construct; identical to SEQ ID NO: 19496
  source 1..80: mol_type = other DNA

SEQ ID NO: 101944 - DNA, 80 bp, synthetic construct
  source 1..80: mol_type = other DNA
tacctgtgctggaactcctggaatcatatgaagtattttaaaaagcatatttgacttcatatttccttttattatttcat

SEQ ID NO: 101945 - DNA, 80 bp, synthetic construct
  source 1..80: mol_type = other DNA
ttaggaattatataggatgatatatgtaaaattttgctccgtttttgggatatggtaggtactttccatgataatgaaaa

SEQ ID NO: 101946 - DNA, 80 bp, synthetic construct; identical to SEQ ID NO: 19497
  source 1..80: mol_type = other DNA

SEQ ID NO: 101947 - DNA, 80 bp, synthetic construct
  source 1..80: mol_type = other DNA
atcatatattaggaccttcaacttaactttaattctaatttttgaagaattttcaggttcatagatgaaagtttaggttc

SEQ ID NO: 101948 - DNA, 80 bp, synthetic construct
  source 1..80: mol_type = other DNA
cttagaaaagtgaggattccaagccttaagttgaatgttcaattgattttatcttttaaaaagtataatatgggctagga

SEQ ID NO: 101949 - DNA, 80 bp, synthetic construct
  source 1..80: mol_type = other DNA
aaaaaaattagccgggcatggtgggcacctgtaatcccagctacttagaaggctgaggcaggagaatggcttgaacccag

SEQ ID NO: 101950 - DNA, 80 bp, synthetic construct
  source 1..80: mol_type = other DNA
ctatataggtattgcaatttgaagcatttaagttagggtctgagtagcacatgctgaatgaatagtggcccagtgctttg

SEQ ID NO: 101951 - DNA, 80 bp, synthetic construct; identical to SEQ ID NO: 19498
  source 1..80: mol_type = other DNA

SEQ ID NO: 101952 - DNA, 80 bp, synthetic construct
  source 1..80: mol_type = other DNA
attattataatgtaacctttccctgctcgatgactcaggctataggtagtctacgtgcctgacttgttgatctatgcacc

SEQ ID NO: 101953 - DNA, 80 bp, synthetic construct
  source 1..80: mol_type = other DNA
ttaccaaagtgctttaggtggtggctaaaaatgtcagtttgcctgactttgaatcttgactgcacatcgcataacagctg

SEQ ID NO: 101954 - DNA, 80 bp, synthetic construct
  source 1..80: mol_type = other DNA
ttccaaggtactgagtaggcacagtgtgaagtagttgtgtttgtgtcctgtgattagatagtagtgatgactgctgactc

SEQ ID NO: 101955 - DNA, 80 bp, synthetic construct; identical to SEQ ID NO: 19499
  source 1..80: mol_type = other DNA

SEQ ID NO: 101956 - DNA, 80 bp, synthetic construct
  source 1..80: mol_type = other DNA
ttaacatttctaagctatttaaaagtcagttggatgcttttcggttgcacattcatttttcatctttgcccttccattca

SEQ ID NO: 101957 - DNA, 80 bp, synthetic construct
  source 1..80: mol_type = other DNA
tgaaaccactcatatatctcgatgtgcatagcttcttttctagtgccattgtagatggattgaggaatactgtgaactgg

SEQ ID NO: 101958 - DNA, 80 bp, synthetic construct
  source 1..80: mol_type = other DNA
gattattgtgtattaatcattgaacacctactgtgcaccacactgattataggacgtgtatgcattatatctggcctgac

SEQ ID NO: 101959 - DNA, 80 bp, synthetic construct
  source 1..80: mol_type = other DNA
ttcaactttagtgaaatctagcctcgtataggagaaggttcaccatggggaatttggcatttgagtcttgaagtcaaatg

SEQ ID NO: 101960 - DNA, 80 bp, synthetic construct; identical to SEQ ID NO: 19500
  source 1..80: mol_type = other DNA

SEQ ID NO: 101961 - DNA, 80 bp, synthetic construct
  source 1..80: mol_type = other DNA
gtgcagtggtgcaatctcggctcaccacacctctgcttcctgggttcaagtgattctcctgcctcagcctctcgaatagc

SEQ ID NO: 101962 - DNA, 80 bp, synthetic construct
  source 1..80: mol_type = other DNA
cactgcacccggcctatactttatgttaatccgtccattcactcatcataggacggctgcaggactttcacatatcccat

SEQ ID NO: 101963 - DNA, 80 bp, synthetic construct
  source 1..80: mol_type = other DNA
taaccagagtttggtcaaatgcctgttcctgaaataattactaacaaagtaaaaataacctctacaaatcagggtgtgat

SEQ ID NO: 101964 - DNA, 80 bp, synthetic construct; identical to SEQ ID NO: 19501
  source 1..80: mol_type = other DNA

SEQ ID NO: 101965 - DNA, 80 bp, synthetic construct
  source 1..80: mol_type = other DNA
tacttttagctgtgattacttggtgtatagtatgtttgattggttatgtgttgattactgaacagctactctgatggcca

SEQ ID NO: 101966 - DNA, 80 bp, synthetic construct
  source 1..80: mol_type = other DNA
ctgggacaaataggcagatgaaagggaattcactctctctgctttctgtctcccttctgagcaggtcactttttctcctc

SEQ ID NO: 101967 - DNA, 80 bp, synthetic construct
  source 1..80: mol_type = other DNA
gctgccagatttacactgagctatgctactggctttgagccatgttagcagcttctctgattctctagcttgcagtcagc

SEQ ID NO: 101968 - DNA, 80 bp, synthetic construct; identical to SEQ ID NO: 19502
  source 1..80: mol_type = other DNA

SEQ ID NO: 101969 - DNA, 80 bp, synthetic construct
  source 1..80: mol_type = other DNA
tcttgctgtttcgaaggagtccagtatgtcaaagtctacctgcctctttcattaataaatactgggaagctgaggtgggc

SEQ ID NO: 101970 - DNA, 80 bp, synthetic construct
  source 1..80: mol_type = other DNA
aggtggagtttgcagtgagccgagatcgcgccactgcactccagcctgggtgacagagtgagattctgtctcaaaaaaac

SEQ ID NO: 101971 - DNA, 80 bp, synthetic construct; identical to SEQ ID NO: 19503
  source 1..80: mol_type = other DNA

SEQ ID NO: 101972 - DNA, 80 bp, synthetic construct
  source 1..80: mol_type = other DNA
agatttattttaaaaagagagggatatgaaaacacggggaaatttcaggacatctcaaacattgtgctaataacacctgt

SEQ ID NO: 101973 - DNA, 80 bp, synthetic construct
  source 1..80: mol_type = other DNA
gagtgcttgtattctatttagtaagaagggacatggttttacctctttatcaagggctcactgaggtagtatattctggg

SEQ ID NO: 101974 - DNA, 80 bp, synthetic construct
  source 1..80: mol_type = other DNA
aaatatgtgaaatttaaggaacagctttctctacagctgatgatgtgggaggtttgtgaataaccgttggcaggtcctat

SEQ ID NO: 101975 - DNA, 80 bp, synthetic construct
  source 1..80: mol_type = other DNA
gtgggcggatcacgaggtcaggagatcgagaccatactggctaacacggtgaaaccccatctctactaaaatacaaaaaa

SEQ ID NO: 101976 - DNA, 80 bp, synthetic construct; identical to SEQ ID NO: 19504
  source 1..80: mol_type = other DNA

SEQ ID NO: 101977 - DNA, 80 bp, synthetic construct
  source 1..80: mol_type = other DNA
agacaaaagctaggattttagattgggggaaatttcctactagtagtccagtagtaccggcattttctaaccccaaattt

SEQ ID NO: 101978 - DNA, 80 bp, synthetic construct
  source 1..80: mol_type = other DNA
aagaccagcctgaccaacatagagaaaccctgtctctactaaaaatacaaaattatcccggcatggtggcacatgcttgt

SEQ ID NO: 101979 - DNA, 80 bp, synthetic construct
  source 1..80: mol_type = other DNA
tattgttctgtgataggtgagcaggcacttgtgttactttgtaatactgtcttattccattttctgatgttatgacagaa

SEQ ID NO: 101980 - DNA, 80 bp, synthetic construct; identical to SEQ ID NO: 19505
  source 1..80: mol_type = other DNA

SEQ ID NO: 101981 - DNA, 80 bp, synthetic construct
  source 1..80: mol_type = other DNA
atgacaaaattttctttcttcttctttttttaaggttatgtaatagagggagagaactcactagtcctgggccataaaaa

SEQ ID NO: 101982 - DNA, 80 bp, synthetic construct
  source 1..80: mol_type = other DNA
cacttctaaaatatgtgtgtcaaaggagtgcacttccagaattttctccttctggtctgtaaggcaaaactttttcaggt

SEQ ID NO: 101983 - DNA, 80 bp, synthetic construct; identical to SEQ ID NO: 19506
  source 1..80: mol_type = other DNA

SEQ ID NO: 101984 - DNA, 80 bp, synthetic construct
  source 1..80: mol_type = other DNA
ggggatttatgacaatttgaaaaaaaactcatagatgaactgcatagtctagaagtatcaagaaaaaataaggatggtat

SEQ ID NO: 101985 - DNA, 80 bp, synthetic construct
  source 1..80: mol_type = other DNA
tgcagggggtctatgccccaacccccatgtcgttcaaaggtcaactctattagtaatggtaatagctattagtaatagct

SEQ ID NO: 101986 - DNA, 80 bp, synthetic construct
  source 1..80: mol_type = other DNA
ttaaaaaaaagttaggtgtggtgatacacacctatagtcctagctactagaggggctaaagtgggaagatcacttgagcc

SEQ ID NO: 101987 - DNA, 80 bp, synthetic construct
  source 1..80: mol_type = other DNA
cacagtttatagttggcagagagggatttgaacattactttcttatttcagatttttttgcttttaaccactatgctgtg

SEQ ID NO: 101988 - DNA, 80 bp, synthetic construct; identical to SEQ ID NO: 19507
  source 1..80: mol_type = other DNA

SEQ ID NO: 101989 - DNA, 80 bp, synthetic construct
  source 1..80: mol_type = other DNA
agagagaatgagggtgaagtgaaagggatttcgccttataaaaccttcagatcttgtgagacttactcgctaccatgaga

SEQ ID NO: 101990 - DNA, 80 bp, synthetic construct
  source 1..80: mol_type = other DNA
ccacctatttctaggtttaccaatcagctaagttaagccatctcctgggggtaaagggagtgaatgggacagaaagagcc

SEQ ID NO: 101991 - DNA, 80 bp, synthetic construct
  source 1..80: mol_type = other DNA
ggccaatatggtgaaaccctgtctctactagaaatacaaaaattagctgggtgtggtggcacatgcctataatcctagct

SEQ ID NO: 101992 - DNA, 80 bp, synthetic construct; identical to SEQ ID NO: 19508
  source 1..80: mol_type = other DNA

SEQ ID NO: 101993 - DNA, 80 bp, synthetic construct
  source 1..80: mol_type = other DNA
agtgcttttctcccccttaacttgtcagtggcgtggcgtacatgtttttgttactgacagtgtggccaattattgtgttc

SEQ ID NO: 101994 - DNA, 80 bp, synthetic construct
  source 1..80: mol_type = other DNA
tcctgattctaaggccatttaagcatgggtcacactggactgctagttggcatagagaggaagtgattggtggtgaaatc

SEQ ID NO: 101995 - DNA, 80 bp, synthetic construct
  source 1..80: mol_type = other DNA
agtggcgtgctctcggctcactgcaacctccgcctcccgggttcaagcgattctccagccttagcctcccaagcagctgg

SEQ ID NO: 101996 - DNA, 80 bp, synthetic construct; identical to SEQ ID NO: 19509
  source 1..80: mol_type = other DNA

SEQ ID NO: 101997 - DNA, 80 bp, synthetic construct
  source 1..80: mol_type = other DNA
tttcacaatgtgtacatagatggaagtatcatgttgcacagtttttatttgtgaagtatgtctttgtcgtgaaagcagcc

SEQ ID NO: 101998 - DNA, 80 bp, synthetic construct
  source 1..80: mol_type = other DNA
gtttcatcataacatctatgagaaaaaaatgaaatggattcttggccagggctagtgtctgggtggagtttgcatgttca

SEQ ID NO: 101999 - DNA, 80 bp, synthetic construct; identical to SEQ ID NO: 19510
  source 1..80: mol_type = other DNA

SEQ ID NO: 102000 - DNA, 80 bp, synthetic construct
  source 1..80: mol_type = other DNA
gatttccataggtttttggggaacatgtggtatttggttacatgaataagatctttagtggtgacttgtgagattttggt

SEQ ID NO: 102001 - DNA, 80 bp, synthetic construct
  source 1..80: mol_type = other DNA
tgtttgcttttttattcctgagttacttcacttagaataatagtctccagttccatccaggttgctgcaaatgccattaa

SEQ ID NO: 102002 - DNA, 80 bp, synthetic construct
  source 1..80: mol_type = other DNA
gccttcttttcctctgggaacttaactcttgtttctatcaatcagcctgtggtaaaactggtttccttgtaggtcctttc

SEQ ID NO: 102003 - DNA, 80 bp, synthetic construct; identical to SEQ ID NO: 19511
  source 1..80: mol_type = other DNA

SEQ ID NO: 102004 - DNA, 80 bp, synthetic construct
  source 1..80: mol_type = other DNA
tgtgaaaaaaaataggaagaaaaatagtgacagctaacattgtgcacctatgatgcaccaagaactgtgggaagtatccc

SEQ ID NO: 102005 - DNA, 80 bp, synthetic construct
  source 1..80: mol_type = other DNA
aggagagagggtgggcagtgctttgcttacctgatttcattctggttgaggggataaacctggaaaaatacttaaatgcc

SEQ ID NO: 102006 - DNA, 80 bp, synthetic construct
  source 1..80: mol_type = other DNA
aatgtagcactttgtggccttttatgcatggtggggatgggtggtttgctgttagtattatagtttttcaccttttgggt

SEQ ID NO: 102007 - DNA, 80 bp, synthetic construct
  source 1..80: mol_type = other DNA
gaagtgatcctatgatggggaaagttggaaggctgtaaacatcccagagttcctgttggtacattgaattcattggttgg

SEQ ID NO: 102008 - DNA, 80 bp, synthetic construct; identical to SEQ ID NO: 19512
  source 1..80: mol_type = other DNA

SEQ ID NO: 102009 - DNA, 80 bp, synthetic construct
  source 1..80: mol_type = other DNA
tatataacgttaggctaagaagatagccccccctttttttatatagagctttgccatttgcttccacaatgcaatctaga

SEQ ID NO: 102010 - DNA, 80 bp, synthetic construct
  source 1..80: mol_type = other DNA
tactggaaggacagaattaaaaacaaccaactaacaaaagaaaaccaaaattgttgctcagataggcaaagagaggggaa

SEQ ID NO: 102011 - DNA, 80 bp, synthetic construct
  source 1..80: mol_type = other DNA
aagagaatgctgcattaagcttcacctttatatgccactattataggtctagatttgttatcaaatcacttcctggaaaa

SEQ ID NO: 102012 - DNA, 80 bp, synthetic construct; identical to SEQ ID NO: 19513
  source 1..80: mol_type = other DNA

SEQ ID NO: 102013 - DNA, 80 bp, synthetic construct
  source 1..80: mol_type = other DNA
acaggcgtggtggcacatgcctgtaatcccagctactcaggaagctaagacaggagaattgtttgaatctaggaggtggg

SEQ ID NO: 102014 - DNA, 80 bp, synthetic construct
  source 1..80: mol_type = other DNA
aagaaaagcatgattttagcatggagtgaggattatgagatttgtttctgtagccgattgaattgttttgtttctaagtg

SEQ ID NO: 102015 - DNA, 80 bp, synthetic construct
  source 1..80: mol_type = other DNA
ttcttttcattctttctttttttaaatagagatagtgtctttttttctttctttctttctttctttttttttttctgaat

SEQ ID NO: 102016 - DNA, 80 bp, synthetic construct; identical to SEQ ID NO: 19514
  source 1..80: mol_type = other DNA

SEQ ID NO: 102017 - DNA, 80 bp, synthetic construct
  source 1..80: mol_type = other DNA
ggcttaagtttataacactgtggtcatggcctaagcaagtagcaagccttttccacttccctactcccaccgcatcttgt

SEQ ID NO: 102018 - DNA, 80 bp, synthetic construct
  source 1..80: mol_type = other DNA
gtaggtggcaaataagatgaggtcttcccactactgacccagtattctttagcgtttttctagtgaattaattttaggta

SEQ ID NO: 102019 - DNA, 80 bp, synthetic construct
  source 1..80: mol_type = other DNA
gatgtcttttgtatgctaatgaactgattgatggcttgcagaacctaggtagcttcagaattacttctggtcacctaaag

SEQ ID NO: 102020 - DNA, 80 bp, synthetic construct; identical to SEQ ID NO: 19515
  source 1..80: mol_type = other DNA

SEQ ID NO: 102021 - DNA, 80 bp, synthetic construct
  source 1..80: mol_type = other DNA
cgcaacttgaagctagcctgttagaagttcccaaggccctacgtctggactggttaccagtgagaagtagggggcagtct

SEQ ID NO: 102022 - DNA, 80 bp, synthetic construct
  source 1..80: mol_type = other DNA
gttaatgatttgtgtggtatcagagcagagggaaaatcaagtttgagtttttcctcactcaagaggacagaaagattttg

SEQ ID NO: 102023 - DNA, 80 bp, synthetic construct
  source 1..80: mol_type = other DNA
gcttacagaaaaagagtgtgaagattgaagaaacaccaccttcacttaggcagggcacctgtgttaagagaaaataccct

SEQ ID NO: 102024 - DNA, 80 bp, synthetic construct; identical to SEQ ID NO: 19516
  source 1..80: mol_type = other DNA

SEQ ID NO: 102025 - DNA, 80 bp, synthetic construct
  source 1..80: mol_type = other DNA
acatggctagaacttagcatatgcatgtcagtcaagagtaatggctattagttttgctattcccagcttggtagtcttat

SEQ ID NO: 102026 - DNA, 80 bp, synthetic construct
  source 1..80: mol_type = other DNA
tgacaggggcacaccaccatgcctggctaatttttgtatttttttttttatagagatggggttttgccatgttgcccagg

SEQ ID NO: 102027 - DNA, 80 bp, synthetic construct
  source 1..80: mol_type = other DNA
aagagacatatacatgaaatactgtttaaccaacctcagggaactcgcatggagtatgtgttttccttgattattagatt

SEQ ID NO: 102028 - DNA, 80 bp, synthetic construct; identical to SEQ ID NO: 19517
  source 1..80: mol_type = other DNA

SEQ ID NO: 102029 - DNA, 80 bp, synthetic construct
  source 1..80: mol_type = other DNA
actccatgttggaatgatacaaagtttgttaactgagggaatgagttaaaatatgtaaattgaaatgttgcaaatatgct

SEQ ID NO: 102030 - DNA, 80 bp, synthetic construct
  source 1..80: mol_type = other DNA
aacattttggggttactattttccaaggatttcagtaaatgtaggggattcaaagttgttgtatgtggcttctgtcatca

SEQ ID NO: 102031 - DNA, 80 bp, synthetic construct
  source 1..80: mol_type = other DNA
aaaatgtgccctctattgttaatgatagaagtctttaaaagcactgatgtagtaaccccccctggggttcagggtccact

SEQ ID NO: 102032 - DNA, 80 bp, synthetic construct; identical to SEQ ID NO: 19518
  source 1..80: mol_type = other DNA

SEQ ID NO: 102033 - DNA, 80 bp, synthetic construct
  source 1..80: mol_type = other DNA
tcagcttctttgtcttggttagttttatggtttctgtaaaccatgggaatgtttctcaaagtggttcccagatattagcc

SEQ ID NO: 102034 - DNA, 80 bp, synthetic construct
  source 1..80: mol_type = other DNA
tgaggaaaacaaagttaagctgacttatataacccaagtaacaagtggtcaaaggcagtgatagatgccttctcttcatc

SEQ ID NO: 102035 - DNA, 80 bp, synthetic construct
  source 1..80: mol_type = other DNA
acaagccttcatgttcagtgcatactcatattggatgacaacattgttctaaattgtgtgataaggatttttctcaaccc

SEQ ID NO: 102036 - DNA, 80 bp, synthetic construct; identical to SEQ ID NO: 19519
  source 1..80: mol_type = other DNA

SEQ ID NO: 102037 - DNA, 80 bp, synthetic construct
  source 1..80: mol_type = other DNA
aatgcagatggggataaaatctatgtccaaagagttagaatagaggccaagaaatgataccaatctagagtttcaggatg

SEQ ID NO: 102038 - DNA, 80 bp, synthetic construct
  source 1..80: mol_type = other DNA
aaataacaaaaaacatggaagtgagcaggcagcaaactgctgcagtttgctttgggcagtcagcaagagaaaaagaactt

SEQ ID NO: 102039 - DNA, 80 bp, synthetic construct
  source 1..80: mol_type = other DNA
gtcctttcctaaaaggtgggagggaaattgttggaggctctatccaaccattgacagagtatcctttgattagtagtgat

SEQ ID NO: 102040 - DNA, 80 bp, synthetic construct; identical to SEQ ID NO: 19520
  source 1..80: mol_type = other DNA

SEQ ID NO: 102041 - DNA, 80 bp, synthetic construct
  source 1..80: mol_type = other DNA
tgttccttgaggatcttatagttcagagaaggaaattattgatgaatataaatgaataataaaattctaagcctccaact

SEQ ID NO: 102042 - DNA, 80 bp, synthetic construct
  source 1..80: mol_type = other DNA
actgacaaaacacactgtagcaataagataccaaattcagacctgactctagtatagcatcacatgacagataacaggcc

SEQ ID NO: 102043 - DNA, 80 bp, synthetic construct
  source 1..80: mol_type = other DNA
ggactaataagagacatttaccatctgttatctctgaaacttgctacctggaggcttcatctgcataataaaaaccttgg

SEQ ID NO: 102044 - DNA, 80 bp, synthetic construct; identical to SEQ ID NO: 19521
  source 1..80: mol_type = other DNA

SEQ ID NO: 102045 - DNA, 80 bp, synthetic construct
  source 1..80: mol_type = other DNA
cacctatgacctggaagtccccctcccccaacagcttcgagttgtccagcctttccagatcaaaccaaagtataccttac

SEQ ID NO: 102046 - DNA, 80 bp, synthetic construct
  source 1..80: mol_type = other DNA
ttacagagcttgactctgctaacataataaagcactgataatcttaacatctcactttgtcctctggtcttggcctcctt

SEQ ID NO: 102047 - DNA, 80 bp, synthetic construct
  source 1..80: mol_type = other DNA
tcaccttagatctgtaagagatttgccatggacctttgcagttagtggcttgactttgttttgaattgcatagtgaaata

SEQ ID NO: 102048 - DNA, 80 bp, synthetic construct
  source 1..80: mol_type = other DNA
catcagcatcatacaccagtcggactctgttctcactcctctttcatgaagacattgagtgtgctcaggattagaaacag

SEQ ID NO: 102049 - DNA, 80 bp, synthetic construct; identical to SEQ ID NO: 19522
  source 1..80: mol_type = other DNA

SEQ ID NO: 102050 - DNA, 80 bp, synthetic construct
  source 1..80: mol_type = other DNA
gcacggggttttatagagtagcttgaggaggcggtgtctgattttcacagagcctaaaagattggttggaccaggtgtgc

SEQ ID NO: 102051 - DNA, 80 bp, synthetic construct
  source 1..80: mol_type = other DNA
tctatgtttgcagcttgatttttcaggctgctttgtgttagaaaagaaataatttgggggctgctttttattaaaaggga

SEQ ID NO: 102052 - DNA, 80 bp, synthetic construct; identical to SEQ ID NO: 19523
  source 1..80: mol_type = other DNA

SEQ ID NO: 102053 - DNA, 80 bp, synthetic construct
  source 1..80: mol_type = other DNA
tccctagagcaaaaaagtatttgaattccaggtattttcagaagttttggcattctgcagatgtgaggttgccgtcgtct

SEQ ID NO: 102054 - DNA, 80 bp, synthetic construct
  source 1..80: mol_type = other DNA
gaatattccataatccctcaaaaaagtgaatccaaatataattctcattgtgacccttggtttatatagcccccaaacac

SEQ ID NO: 102055 - DNA, 80 bp, synthetic construct
  source 1..80: mol_type = other DNA
ctgttcatggtcctgtttctcactggcttagtggccttgagtaccatactataaaccaaacttattttcacaatgataaa

SEQ ID NO: 102056 - DNA, 80 bp, synthetic construct; identical to SEQ ID NO: 19524
  source 1..80: mol_type = other DNA

SEQ ID NO: 102057 - DNA, 80 bp, synthetic construct
  source 1..80: mol_type = other DNA
ttttcaaagaacattcacaggtaacattttagatcaaatggaaataaggtcaaatgaataacatggtacatgtatatgcc

SEQ ID NO: 102058 - DNA, 80 bp, synthetic construct
  source 1..80: mol_type = other DNA
ggtcatactgtaccaggctacggggttatactgattgtacatcagcatatctatggtgtcatccatgtatgaagcatcct

SEQ ID NO: 102059 - DNA, 80 bp, synthetic construct
  source 1..80: mol_type = other DNA
ttaaatatctctaaatggagaatgtgatatagtgatatgtggaactatatctgtcacagggtaaatctcaaaattggggt

SEQ ID NO: 102060 - DNA, 80 bp, synthetic construct
  source 1..80: mol_type = other DNA
tatggttatttcttgatcatatgctaaacaaggggtggattattcatgagttttccaggaagggagtgaggaatttccag

SEQ ID NO: 102061 - DNA, 80 bp, synthetic construct; identical to SEQ ID NO: 19525
  source 1..80: mol_type = other DNA

SEQ ID NO: 102062 - DNA, 80 bp, synthetic construct
  source 1..80: mol_type = other DNA
aaaagaggaaaagtcctattactgctagatacactatagtgaatgaaaaagacttttttccagtatgcctaaacagtatt

SEQ ID NO: 102063 - DNA, 80 bp, synthetic construct
  source 1..80: mol_type = other DNA
cagggaagtaaatgctgtatttagggggatatacctaagttattcacaaagctagccctagaacctcctagctcctagac

SEQ ID NO: 102064 - DNA, 80 bp, synthetic construct
  source 1..80: mol_type = other DNA
gacctaggagaaattagagaagatttttaccaactcagaaaggtttaatactcaggacgtgaatccttagcatagacatt

SEQ ID NO: 102065 - DNA, 80 bp, synthetic construct; identical to SEQ ID NO: 19526
  source 1..80: mol_type = other DNA

SEQ ID NO: 102066 - DNA, 80 bp, synthetic construct
  source 1..80: mol_type = other DNA
atgtgttattgactcacataagtgaaaagtctggggtagggctcaagtatgactttttccagggttgcaaactctgccat

SEQ ID NO: 102067 - DNA, 80 bp, synthetic construct
  source 1..80: mol_type = other DNA
caggggaggggttccccatacaccaagcatgaaccctagctgagtgtcctcttccaattcagtttcacactatctacctg

SEQ ID NO: 102068 - DNA, 80 bp, synthetic construct; identical to SEQ ID NO: 19527
  source 1..80: mol_type = other DNA

SEQ ID NO: 102069 - DNA, 80 bp, synthetic construct
  source 1..80: mol_type = other DNA
tatggaagcttcttgatgttggcattcctttccccaggctatagcgtgggaccctatctggggagggtcttaaaaaccac

SEQ ID NO: 102070 - DNA, 80 bp, synthetic construct
  source 1..80: mol_type = other DNA
atgttatggacaaaaaactatacatatatatttatcataacattataacacaatgtggcaagaaggtcaccagccgctcc

SEQ ID NO: 102071 - DNA, 80 bp, synthetic construct
  source 1..80: mol_type = other DNA
ttatccaaatcaattgaactgacagtctggagagtggatggctccctctgaagaggaatatcaaggtgtctcaccaacag

SEQ ID NO: 102072 - DNA, 80 bp, synthetic construct; identical to SEQ ID NO: 19528
  source 1..80: mol_type = other DNA

SEQ ID NO: 102073 - DNA, 80 bp, synthetic construct
  source 1..80: mol_type = other DNA
atcagacaccacctcctcaagctgaaatataaaatccagctcatccatcccagccggccttttcctctcggaatcccgtc

SEQ ID NO: 102074 - DNA, 80 bp, synthetic construct
  source 1..80: mol_type = other DNA
attttactagtccagtggaggctcccattgtcaaagccctttatagcaaagctcttaaagtgtgtttatttcctaaagtc

SEQ ID NO: 102075 - DNA, 80 bp, synthetic construct
  source 1..80: mol_type = other DNA
atagtgagacgctgtctctaaaaaataaaaaaaaaatactaaaattagctgggtgtggtggtgcatgcctgtagtctcag

SEQ ID NO: 102076 - DNA, 80 bp, synthetic construct
  source 1..80: mol_type = other DNA
aaaaaaaaagagatagctaagatagcttgtatttgtactctgatcagcctctttggaagcccttgtagttctgtttgaat

SEQ ID NO: 102077 - DNA, 80 bp, synthetic construct; identical to SEQ ID NO: 19529
  source 1..80: mol_type = other DNA

SEQ ID NO: 102078 - DNA, 80 bp, synthetic construct
  source 1..80: mol_type = other DNA
ctgaacattttctttaattctagaagcaaaagcaactttaatctgaagtcactttatgcctgcttgttttgatctgtttt

SEQ ID NO: 102079 - DNA, 80 bp, synthetic construct
  source 1..80: mol_type = other DNA
actaatttttgtatttttagtagaaatggggtttccccatgttgacctggctggtctcgaactcctgaccttgtgatctg

SEQ ID NO: 102080 - DNA, 80 bp, synthetic construct
  source 1..80: mol_type = other DNA
ctcctgggttccagcgattctcctgcctcagcctcccaagtagctgggattacaggtgcatgccaccaagcccggctaat

SEQ ID NO: 102081 - DNA, 80 bp, synthetic construct; identical to SEQ ID NO: 19530
  source 1..80: mol_type = other DNA

SEQ ID NO: 102082 - DNA, 80 bp, synthetic construct
  source 1..80: mol_type = other DNA
aaacatttgaattcccaagtaaccttggtacttttacttattttaaaagtaattgaatcttcctctcctttcatatattt

SEQ ID NO: 102083 - DNA, 80 bp, synthetic construct
  source 1..80: mol_type = other DNA
agagaacctaaaacatttgattgtcaattttagtggaagatgcatacaaagtttcgtctcagttaccaccttatttcttg

SEQ ID NO: 102084 - DNA, 80 bp, synthetic construct
  source 1..80: mol_type = other DNA
aaccctataatgattttctttcctaatttttctatgagactgcttgagaaggacggagaaggaaaagctctcgacactgt

SEQ ID NO: 102085 - DNA, 80 bp, synthetic construct; identical to SEQ ID NO: 19531
  source 1..80: mol_type = other DNA

SEQ ID NO: 102086 - DNA, 80 bp, synthetic construct
  source 1..80: mol_type = other DNA
gaaaggtgctggtgggttggaagcttcattatgctcagctgctacaagagatttcctctttttagattgattaagaaaag

SEQ ID NO: 102087 - DNA, 80 bp, synthetic construct
  source 1..80: mol_type = other DNA
ggagtattgaggtaccaggaggaaggtggaatagaaccttgtggcaatgaaggaaagaaaaaaatcattgttttaagagg

SEQ ID NO: 102088 - DNA, 80 bp, synthetic construct
  source 1..80: mol_type = other DNA
tctgtccatgctggtacctcaactacaaaacaggaggcttaagggttttcgcagaatctgagtagaagtgatacaaaaat

SEQ ID NO: 102089 - DNA, 80 bp, synthetic construct
  source 1..80: mol_type = other DNA
ctcctgtaatcccagctactcaggaggctgaggcaggagaattgcttaaaccacggaggcagaggttgcagtgagccgag

SEQ ID NO: 102090 - DNA, 80 bp, synthetic construct; identical to SEQ ID NO: 19532
  source 1..80: mol_type = other DNA

SEQ ID NO: 102091 - DNA, 80 bp, synthetic construct
  source 1..80: mol_type = other DNA
gaaggaacccatttttatgatgaagagacaggaaaatagagttgtgacactaccttagtactgagaggttttttaaagat

SEQ ID NO: 102092 - DNA, 80 bp, synthetic construct
  source 1..80: mol_type = other DNA
caattctccaacctcagcctcctgagtagctgggattacaggcatgcgccaccacgtccggctaatgttttttgtagttt

SEQ ID NO: 102093 - DNA, 80 bp, synthetic construct
  source 1..80: mol_type = other DNA
tgagcatctttggatatcagataccagctgagtttaaataactagtttccattactagatgaaattttgatgagaacctt

SEQ ID NO: 102094 - DNA, 80 bp, synthetic construct; identical to SEQ ID NO: 19533
  source 1..80: mol_type = other DNA

SEQ ID NO: 102095 - DNA, 80 bp, synthetic construct
  source 1..80: mol_type = other DNA
cattgaagtggattattccaaggttgaccatctagaaagtgagagatttgatatttttaactcaagtgttttgactccta

SEQ ID NO: 102096 - DNA, 80 bp, synthetic construct
  source 1..80: mol_type = other DNA
gaacatctgttatattccagggatgatgatacacacaggtgcagcaagaataagacatgaggctcattcttgcagagtac

SEQ ID NO: 102097 - DNA, 80 bp, synthetic construct
  source 1..80: mol_type = other DNA
agaaatgcattttttaggcaacttagaacggtctttcttaatatgcctcaggtagtaatgggatggactaatctgtgtga

SEQ ID NO: 102098 - DNA, 80 bp, synthetic construct; identical to SEQ ID NO: 19534
  source 1..80: mol_type = other DNA

SEQ ID NO: 102099 - DNA, 80 bp, synthetic construct
  source 1..80: mol_type = other DNA
gatagtctctcatttaaagggatatcgtccaatgtttaagtcttgtcctcgtgtctaatctcaagtgtgtcctggcagtc

SEQ ID NO: 102100 - DNA, 80 bp, synthetic construct
  source 1..80: mol_type = other DNA
aagccaccacctccacctgtgctttgatcccaggtggagatacacctatcccatctcttgcccaaatcactaacttctta

SEQ ID NO: 102101 - DNA, 80 bp, synthetic construct
  source 1..80: mol_type = other DNA
ctctctcacaaattcagattatgttagcagagggatcttccctgtatagcccatttaaaatatcaactcccattattgct

SEQ ID NO: 102102 - DNA, 80 bp, synthetic construct; identical to SEQ ID NO: 19535
  source 1..80: mol_type = other DNA

SEQ ID NO: 102103 - DNA, 80 bp, synthetic construct
  source 1..80: mol_type = other DNA
gttgccaaatgtaatggcaattctaaactgccttctcactcaacttccaggtagcattctacctggttgactattttttc

SEQ ID NO: 102104 - DNA, 80 bp, synthetic construct
  source 1..80: mol_type = other DNA
ccagggttcacttttagatcgtcctgtctttagttacctattcattcccttagtgatctcagctggtatcatgtctttat

SEQ ID NO: 102105 - DNA, 80 bp, synthetic construct; identical to SEQ ID NO: 19536
  source 1..80: mol_type = other DNA

SEQ ID NO: 102106 - DNA, 80 bp, synthetic construct
  source 1..80: mol_type = other DNA
tagaagccaccatcgtcttttgcttggctacggtaacaacctctcatgcccctagcatggcttcctgagtggttctttta

SEQ ID NO: 102107 - DNA, 80 bp, synthetic construct
  source 1..80: mol_type = other DNA
ccatttgttcttcctggagccgactgagacatttcctactgcagagcttttgtgttggctgctctttcctgcctggaata

SEQ ID NO: 102108 - DNA, 80 bp, synthetic construct
  source 1..80: mol_type = other DNA
ttcatttacttgtttatcaatctcctcccaagtgtaagctccatgggtgtaagaaattgttctgtctcattcacagtctt

SEQ ID NO: 102109 - DNA, 80 bp, synthetic construct; identical to SEQ ID NO: 19537
  source 1..80: mol_type = other DNA

SEQ ID NO: 102110 - DNA, 80 bp, synthetic construct
  source 1..80: mol_type = other DNA
atgaaactccatctctactaaaaatacaaaaatgagccgggcgtggtggtacacgcctgtaatcccagatactcgggagg

SEQ ID NO: 102111 - DNA, 80 bp, synthetic construct
  source 1..80: mol_type = other DNA
aaattattattatattattatttctgtctaatagatgagatcactgaggatgaagtgacaggtgagttacctggggtcat

SEQ ID NO: 102112 - DNA, 80 bp, synthetic construct
  source 1..80: mol_type = other DNA
ttttaccccttgtaaactggcagaggctcacatttgtaagttaaacaccaagcttttcaaaacctagtcctaaaacttgt

SEQ ID NO: 102113 - DNA, 80 bp, synthetic construct; identical to SEQ ID NO: 19538
  source 1..80: mol_type = other DNA

SEQ ID NO: 102114 - DNA, 80 bp, synthetic construct
  source 1..80: mol_type = other DNA
agaaaagtgaggtaatttacggaaagtctacaaaaatagggagtcatggtgcctggtacaccagatgataatcaacatgt

SEQ ID NO: 102115 - DNA, 80 bp, synthetic construct
  source 1..80: mol_type = other DNA
cagagctatgaaacccttctataaacatgaaattggggagatacatgtcaaaacatatcccagaaacaagattaaaatta

SEQ ID NO: 102116 - DNA, 80 bp, synthetic construct
  source 1..80: mol_type = other DNA
cacttgctgaaggtcattgtgttgtgcaatacaagaaagaaccatgtcttcaaaatcaccttatcttgaaataatagatt

SEQ ID NO: 102117 - DNA, 80 bp, synthetic construct; identical to SEQ ID NO: 19539
  source 1..80: mol_type = other DNA

SEQ ID NO: 102118 - DNA, 80 bp, synthetic construct
  source 1..80: mol_type = other DNA
acatttaatgtttcatagacacataatatctcacagtttgtagaacagacaatgctctctggtgtaattaccaggctgat

SEQ ID NO: 102119 - DNA, 80 bp, synthetic construct
  source 1..80: mol_type = other DNA
acagccatttctttgggcctgttctactttaggtatgagaggctcaggaaaactttcttatcctcagcacacacattatg

SEQ ID NO: 102120 - DNA, 80 bp, synthetic construct
  source 1..80: mol_type = other DNA
atgtatctgtcgatgttaatctcatctcacatgaaacagacactgaatttgaatgtctgaaatatgtccagtctttttag

SEQ ID NO: 102121 - DNA, 80 bp, synthetic construct
  source 1..80: mol_type = other DNA
acatttcaggaccttacttagtttaggggatttataacataggaacaaaaaaatttcctttgcctcctggtttctgggaa

SEQ ID NO: 102122 - DNA, 80 bp, synthetic construct; identical to SEQ ID NO: 19540
  source 1..80: mol_type = other DNA

SEQ ID NO: 102123 - DNA, 80 bp, synthetic construct
  source 1..80: mol_type = other DNA
ggcagagggagaagtcagccaggtgatttggagtttattccctgacagtctttagaattgccttttgatgtggtttggct

SEQ ID NO: 102124 - DNA, 80 bp, synthetic construct
  source 1..80: mol_type = other DNA
aaacccatgtcgcttgtctcacattttctcttgcctgccgccgtgtaagatgtgcctttcgccttctgccatgattggga

SEQ ID NO: 102125 - DNA, 80 bp, synthetic construct; identical to SEQ ID NO: 19541
  source 1..80: mol_type = other DNA

SEQ ID NO: 102126 - DNA, 80 bp, synthetic construct
  source 1..80: mol_type = other DNA
aagacactctgctggcttctgagccaataactttgttttatcaagtactttaatgaattccaaaggatatggcagatgtt

SEQ ID NO: 102127 - DNA, 80 bp, synthetic construct
  source 1..80: mol_type = other DNA
ttacttgaggctgcccttccttagtctaaattttaattacctattcatgatatagccaaccttctctttctcacctcacc

SEQ ID NO: 102128 - DNA, 80 bp, synthetic construct
  source 1..80: mol_type = other DNA
tcacaggactgtactttgtcttttaatgcagtgatttgatatcattgtaggagacaatatagtcttgaggctaggagcat

SEQ ID NO: 102129 - DNA, 80 bp, synthetic construct
  source 1..80: mol_type = other DNA
aatagtaattaactcatagagctcttcatttcttagccattgaccgtcgcttctgtgccagatgctgtgctatatgatag

SEQ ID NO: 102130 - DNA, 80 bp, synthetic construct; identical to SEQ ID NO: 19542
  source 1..80: mol_type = other DNA

SEQ ID NO: 102131 - DNA, 80 bp, synthetic construct
  source 1..80: mol_type = other DNA
gggctaataaggtaagaccttaaaaatgggacagagcaggttttgcaaagatctggaggaagaacaagcaaagaccttga

SEQ ID NO: 102132 - DNA, 80 bp, synthetic construct
  source 1..80: mol_type = other DNA
caggtgtggtggcaggtgcctgtaatcccagctactcgagaggctgaggcaggagaatcccttgaacccaggaggtcgag

SEQ ID NO: 102133 - DNA, 80 bp, synthetic construct; identical to SEQ ID NO: 19543
  source 1..80: mol_type = other DNA

SEQ ID NO: 102134 - DNA, 80 bp, synthetic construct
  source 1..80: mol_type = other DNA
gtgccacttatcaagataaggaactatgggggatggcaaaatttggggtaatagacctattaaaatgtgatcattattgg

SEQ ID NO: 102135 - DNA, 80 bp, synthetic construct
  source 1..80: mol_type = other DNA
gattgctgatggcttgtgaggacagccctgagtgagactgaatcagttggttgacaacagactgtgacagaatgctaagg

SEQ ID NO: 102136 - DNA, 80 bp, synthetic construct
  source 1..80: mol_type = other DNA
ctgggactagaaaagcattgatgaaagtttatatattcagagcaacattctgccttctgccttctgcttggccagctgcc

SEQ ID NO: 102137 - DNA, 80 bp, synthetic construct; identical to SEQ ID NO: 19544
  source 1..80: mol_type = other DNA

SEQ ID NO: 102138 - DNA, 80 bp, synthetic construct
  source 1..80: mol_type = other DNA
tcaacaccagtctggctaacatgatgaaactctctctctactacaaatacaaaaattagccaggcatggtgctgtgcgcc

SEQ ID NO: 102139 - DNA, 80 bp, synthetic construct
  source 1..80: mol_type = other DNA
aaaagagagactaccgtcaccttgtataaaaccacacacacagcataaatagttaagcctactaatgaaatatcctgtca

SEQ ID NO: 102140 - DNA, 80 bp, synthetic construct
  source 1..80: mol_type = other DNA
gatgcccagttcatccactggtggggaactgaagactagacagttacacggtagttcaaatgcaatcatatcactgcaat

SEQ ID NO: 102141 - DNA, 80 bp, synthetic construct
  source 1..80: mol_type = other DNA
agtctgtggatgactggtcactgtgtattggtttttagttcatgcatacaaggcaaagtgtgtagtgttgttaccttctt

SEQ ID NO: 102142 - DNA, 80 bp, synthetic construct; identical to SEQ ID NO: 19545
  source 1..80: mol_type = other DNA

SEQ ID NO: 102143 - DNA, 80 bp, synthetic construct
  source 1..80: mol_type = other DNA
accaggtgaaaaacttcacattaaagaaccctcagagatatttcagcacgttgaaagcacaaaggagaaaattcccgaag

SEQ ID NO: 102144 - DNA, 80 bp, synthetic construct
  source 1..80: mol_type = other DNA
gcactttgggagaccaaggtgggcagatcgcttaagtccaggagttctagaccagcctgggcaacatggtgagaccctgt

SEQ ID NO: 102145 - DNA, 80 bp, synthetic construct
  source 1..80: mol_type = other DNA
taaaggtcatggaacaatgataaacaatgtgaattttcccaaagcttgtctgaagacatttttatggtcctgtactagca

SEQ ID NO: 102146 - DNA, 80 bp, synthetic construct; identical to SEQ ID NO: 19546
  source 1..80: mol_type = other DNA

SEQ ID NO: 102147 - DNA, 80 bp, synthetic construct
  source 1..80: mol_type = other DNA
agtacatgacccagtggctgcccatttcccccagtaaaatccaaaggtcttacactgacatcaaggctttccatggtctg

SEQ ID NO: 102148 - DNA, 80 bp, synthetic construct
  source 1..80: mol_type = other DNA
accgggacggttatattgtgggacgagtgaaggcaggtcacaagtgttttacaaagaaataaaacactttggtggggtgc

SEQ ID NO: 102149 - DNA, 80 bp, synthetic construct; identical to SEQ ID NO: 19547
  source 1..80: mol_type = other DNA

SEQ ID NO: 102150 - DNA, 80 bp, synthetic construct
  source 1..80: mol_type = other DNA
tgactatttgaaaggaactgttgatgttgtttgagaattgttctccattctgtactgttccagcagacttggcaacagtg

SEQ ID NO: 102151 - DNA, 80 bp, synthetic construct
  source 1..80: mol_type = other DNA
agagtgcaatggcactctcttggctcactgcaacctccgcctcccaggttcaagtgattctcctgccttagcctcctgag

SEQ ID NO: 102152 - DNA, 80 bp, synthetic construct
  source 1..80: mol_type = other DNA
actgcacctggccaagagttttatagtcacaggaaatacagaaaggaattcaattcaacatatattgactgaacattttc

SEQ ID NO: 102153 - DNA, 80 bp, synthetic construct; identical to SEQ ID NO: 19548
  source 1..80: mol_type = other DNA

SEQ ID NO: 102154 - DNA, 80 bp, synthetic construct
  source 1..80: mol_type = other DNA
atgtacacaaagagcattgttttacttaaaataggggaaaaagaagggactgcattgctttttttcagtgatgcattggg

SEQ ID NO: 102155 - DNA, 80 bp, synthetic construct
  source 1..80: mol_type = other DNA
aaataagatcttaccttggcagttctaaaaagagactccatctgtcagcatggcagcatgtatttatgaataatcttaag

SEQ ID NO: 102156 - DNA, 80 bp, synthetic construct
  source 1..80: mol_type = other DNA
ctattggaacccatagaaatggacagaattgggtctaagtaactgcaaagaagtgatttctgtctgcaagtaacatcact

SEQ ID NO: 102157 - DNA, 80 bp, synthetic construct; identical to SEQ ID NO: 19549
  source 1..80: mol_type = other DNA

SEQ ID NO: 102158 - DNA, 80 bp, synthetic construct
  source 1..80: mol_type = other DNA
aatatagtgtcaggtagtgataataaaggggaaaaaataagagaagggactcagggtgataggggctgctattttagata

SEQ ID NO: 102159 - DNA, 80 bp, synthetic construct
  source 1..80: mol_type = other DNA
attcacccctcaacatgtccccattatatccccctcttccactgtcgccacccctgctatccctaagctttgggctttct

SEQ ID NO: 102160 - DNA, 80 bp, synthetic construct
  source 1..80: mol_type = other DNA
gcattgtagctacagttccttatttggccaatcctcagtatgatgatttggggaaggcaacatttcttcactattgagaa

SEQ ID NO: 102161 - DNA, 80 bp, synthetic construct; identical to SEQ ID NO: 19550
  source 1..80: mol_type = other DNA

SEQ ID NO: 102162 - DNA, 80 bp, synthetic construct
  source 1..80: mol_type = other DNA
tagctgggattacaggtacccaccaccatgcctggttaatttttgtatttttttttttagtagagatggggtttcaccat

SEQ ID NO: 102163 - DNA, 80 bp, synthetic construct
  source 1..80: mol_type = other DNA
aaagagaaaatacaatgttatgggagcacaaaacaaaagaattaatagcctggtgggtccaatctcaacacagccttgaa

SEQ ID NO: 102164 - DNA, 80 bp, synthetic construct
  source 1..80: mol_type = other DNA
aggatgcctgggttgagatttgaaagatgggtaagtattaactagagaagagagaaaggggtttaatagtgcatgcgaaa

SEQ ID NO: 102165 - DNA, 80 bp, synthetic construct
  source 1..80: mol_type = other DNA
caatctcggatcactgcaacctctgcctcccgggttcaagagattctcctgcctcagcctcccaagtagctgggactaca

SEQ ID NO: 102166 - DNA, 80 bp, synthetic construct; identical to SEQ ID NO: 19551
  source 1..80: mol_type = other DNA

SEQ ID NO: 102167 - DNA, 80 bp, synthetic construct
  source 1..80: mol_type = other DNA
acaggacttggtaactccaaggtggatgtcacccttttgttaagtccttccatttatctgattgctcttgaggtttcttt

SEQ ID NO: 102168 - DNA, 80 bp, synthetic construct
  source 1..80: mol_type = other DNA
ccaaggtgaaaaaaatgatggtcatcatgtgcatttcagcactcagaaacactattggcacaggcaaccaaaatgcaaaa

SEQ ID NO: 102169 - DNA, 80 bp, synthetic construct; identical to SEQ ID NO: 19552
  source 1..80: mol_type = other DNA

SEQ ID NO: 102170 - DNA, 80 bp, synthetic construct
  source 1..80: mol_type = other DNA
agctatttatcaaaacctctcaaatgcctactctgcatgctgtcagaccacagtgattctggagaggaagtgtgctctga

SEQ ID NO: 102171 - DNA, 80 bp, synthetic construct
  source 1..80: mol_type = other DNA
gatgagtatgtcagattaggttgtatcattcaaagttgaaccacgattgaaagctgtagctatagcctctctccttggtg

SEQ ID NO: 102172 - DNA, 80 bp, synthetic construct
  source 1..80: mol_type = other DNA
ctctccttggtggtatagtggagctctcctgaacttaatgttgcttcattaccatgcactccatcatacaatgttaaggg

SEQ ID NO: 102173 - DNA, 80 bp, synthetic construct
  source 1..80: mol_type = other DNA
gggcatctccacacgagctctaatttctgatttgtccaaagtgcacaggcttattttaatatttgactgttaaagattgt

SEQ ID NO: 102174 - DNA, 80 bp, synthetic construct; identical to SEQ ID NO: 19553
  source 1..80: mol_type = other DNA

SEQ ID NO: 102175 - DNA, 80 bp, synthetic construct
  source 1..80: mol_type = other DNA
gagaagaaaagaaactcgtatatttcttaggatccatatattttctgggtccctttctgggccctagatcctcatctaac

SEQ ID NO: 102176 - DNA, 80 bp, synthetic construct
  source 1..80: mol_type = other DNA
gagtctctagaagcagtgtgggatgggattacagactgaattatctgaatctaattcagatgaattaggtttagtgatca

SEQ ID NO: 102177 - DNA, 80 bp, synthetic construct
  source 1..80: mol_type = other DNA
gacggtgtgccttctcttcttccggggcttactgagtaagctctgttactcccacttgtcccatatatctgtggttttgt

SEQ ID NO: 102178 - DNA, 80 bp, synthetic construct; identical to SEQ ID NO: 19554
  source 1..80: mol_type = other DNA

SEQ ID NO: 102179 - DNA, 80 bp, synthetic construct
  source 1..80: mol_type = other DNA
agcaaacaaatgaatgttcactggaaatcagtgagcacctggagggtcagttaggaggtggttgttaaaaatattgggct

SEQ ID NO: 102180 - DNA, 80 bp, synthetic construct
  source 1..80: mol_type = other DNA
tgaccaacatggtgaaaccccatctctattaaaaatacaaaaattagctgggtgtggtggtgggtgcctgtaatcccagc

SEQ ID NO: 102181 - DNA, 80 bp, synthetic construct; identical to SEQ ID NO: 19555
  source 1..80: mol_type = other DNA

SEQ ID NO: 102182 - DNA, 80 bp, synthetic construct
  source 1..80: mol_type = other DNA
aggcatgtgccaccacgcccagctaatttttgtatttttggtagagacagggtttctgcatgttggtcaggctggtctcg

SEQ ID NO: 102183 - DNA, 80 bp, synthetic construct
  source 1..80: mol_type = other DNA
tctgccctgccatactaccttggtgaagggcttctagaatatacttgtgtgtcctttttctctctaattagaatggttga

SEQ ID NO: 102184 - DNA, 80 bp, synthetic construct
  source 1..80: mol_type = other DNA
agactttttaggcccttgccacgtagaacctgtgttttccattttcttactgtgcatttggtgccttttgtatgctagtc

SEQ ID NO: 102185 - DNA, 80 bp, synthetic construct
  source 1..80: mol_type = other DNA
tcattctaattttcgtctttccccatgtacagtttcttcagtaaccttgcttaatgaattgattggaaacctgttttggc

SEQ ID NO: 102186 - DNA, 80 bp, synthetic construct; identical to SEQ ID NO: 19556
  source 1..80: mol_type = other DNA

SEQ ID NO: 102187 - DNA, 80 bp, synthetic construct
  source 1..80: mol_type = other DNA
cctttttgcaaataaaaagtacgtgagggattgattccgtaggggtttcttttggttgtttttttgacagtagtttttac

SEQ ID NO: 102188 - DNA, 80 bp, synthetic construct
  source 1..80: mol_type = other DNA
acagaagctatgcttggcagcagaaggatttggcaacagactttgtttcttggagtccacttccaattccaaggtgggat

SEQ ID NO: 102189 - DNA, 80 bp, synthetic construct; identical to SEQ ID NO: 19557
  source 1..80: mol_type = other DNA

SEQ ID NO: 102190 - DNA, 80 bp, synthetic construct
  source 1..80: mol_type = other DNA
aatcccagttcatgtttaaaatacgtaaacctgggtctagatgcagttcacatagatatatctggatttgactttcattg

SEQ ID NO: 102191 - DNA, 80 bp, synthetic construct
  source 1..80: mol_type = other DNA
attttaaaatcaaaggcagaactaactttttgagacaatcgctccgaggatatttattcttttaggctgatctttgccta

SEQ ID NO: 102192 - DNA, 80 bp, synthetic construct
  source 1..80: mol_type = other DNA
aaattagaagttgaggttttgcttttaggaactattcactttgagacagacctaccttgttattattaaaaattcaggga

SEQ ID NO: 102193 - DNA, 80 bp, synthetic construct; identical to SEQ ID NO: 19558
  source 1..80: mol_type = other DNA

SEQ ID NO: 102194 - DNA, 80 bp, synthetic construct
  source 1..80: mol_type = other DNA
acatagtgaaaccctgtctctattaaaaatacaaaaattagctgggtgtggtaatgcacacctgtaatcccagctacttg

SEQ ID NO: 102195 - DNA, 80 bp, synthetic construct
  source 1..80: mol_type = other DNA
gaggtgagacgtttctggagtaaccttggccctatggacttttatagctaactatgtaaaactcccttacaggtcaaagt

SEQ ID NO: 102196 - DNA, 80 bp, synthetic construct
  source 1..80: mol_type = other DNA
agctgaaaaaaaggctacactctctcttctccctaagagtataagaaaaagcatttcaatttttgtctggacatttgatg

SEQ ID NO: 102197 - DNA, 80 bp, synthetic construct
  source 1..80: mol_type = other DNA
gtgtatatattgttttatatataaaaagagaataagaagcagaataatatctaaaggtaataaaggtcaactagttaaat

SEQ ID NO: 102198 - DNA, 80 bp, synthetic construct; identical to SEQ ID NO: 19559
  source 1..80: mol_type = other DNA

SEQ ID NO: 102199 - DNA, 80 bp, synthetic construct
  source 1..80: mol_type = other DNA
ctttatttctattattattacattgtaatatataataaattctagaactcaccataatgtacaatcagtgggagccctga

SEQ ID NO: 102200 - DNA, 80 bp, synthetic construct
  source 1..80: mol_type = other DNA
caggacgcagagctcaggtggccagtgagggggagcagctgtacatacagatgaagcttgcctgctgctcacttccggct

SEQ ID NO: 102201 - DNA, 80 bp, synthetic construct
  source 1..80: mol_type = other DNA
tggttttaggggagagtgtcttatggaatggctctgtcctctgacaaggttaagtaagtatgactaccaaaaatgggaga

SEQ ID NO: 102202 - DNA, 80 bp, synthetic construct; identical to SEQ ID NO: 19560
  source 1..80: mol_type = other DNA

SEQ ID NO: 102203 - DNA, 80 bp, synthetic construct
  source 1..80: mol_type = other DNA
tatattatataacgcatatattaaatatatttatattataaattaatgtacattcatgtttattaagaaatacatatata

SEQ ID NO: 102204 - DNA, 80 bp, synthetic construct
  source 1..80: mol_type = other DNA
atattatatatgatatgtatatcctatgtatatgtgtatatatgtatcacgtatatacatatgacacagctgtatgccac

SEQ ID NO: 102205 - DNA, 80 bp, synthetic construct
  source 1..80: mol_type = other DNA
aaaaataggaaagaggtgtctagaacaaagatataaagaaaatattttcatacagctgtgtttgtattttaagctaagtg

SEQ ID NO: 102206 - DNA, 80 bp, synthetic construct
  source 1..80: mol_type = other DNA
aggccttcacattcacccaccactcactcactgactcaccagagtaacttccggtcgtgcaagctccatttattgtaagg

SEQ ID NO: 102207 - DNA, 80 bp, synthetic construct; identical to SEQ ID NO: 19561
  source 1..80: mol_type = other DNA

SEQ ID NO: 102208 - DNA, 80 bp, synthetic construct
  source 1..80: mol_type = other DNA
acacacacatacacaccgcacacataaaatgttttaaataaaaggaaaattttcattttaaataaaaatgaaattatata

SEQ ID NO: 102209 - DNA, 80 bp, synthetic construct
  source 1..80: mol_type = other DNA
aaattataagcatgactacaaagccaaatctaacactatgtatacaaaaacaaaggcattcagaaagggaaaaataaaag

SEQ ID NO: 102210 - DNA, 80 bp, synthetic construct; identical to SEQ ID NO: 19562
  source 1..80: mol_type = other DNA

SEQ ID NO: 102211 - DNA, 80 bp, synthetic construct
  source 1..80: mol_type = other DNA
tttaggccacaaagaaaacttcagtaagttccaaagaataggaataatacaaatataactataaagaaactagaagttaa

SEQ ID NO: 102212 - DNA, 80 bp, synthetic construct
  source 1..80: mol_type = other DNA
attgaagagtttcttgaacatcatgataatgaacatgtgatgttttagaatgcatgggatatagctaaagaagttatcag

SEQ ID NO: 102213 - DNA, 80 bp, synthetic construct
  source 1..80: mol_type = other DNA
ccacctcctgcattcaagcaattctcctttctcagcctcccgagttgctgagattacaggcacccaccaccatgcctggc

SEQ ID NO: 102214 - DNA, 80 bp, synthetic construct; identical to SEQ ID NO: 19563
  source 1..80: mol_type = other DNA

SEQ ID NO: 102215 - DNA, 80 bp, synthetic construct
  source 1..80: mol_type = other DNA
gattattagaagttacatatgagttggaaggggataatgatcacaaaaggaaattaagtcataagggaccatttgtctaa

SEQ ID NO: 102216 - DNA, 80 bp, synthetic construct
  source 1..80: mol_type = other DNA
cctgacaagacacgcgccaaggtcggatactccctacttaactatgttccttaaattattccaaagcataataaaagaag

SEQ ID NO: 102217 - DNA, 80 bp, synthetic construct
  source 1..80: mol_type = other DNA
ttatcatgaccagtgaaggttattccaggaatccaagaatagctcaatacgataaatcaattaatataattcttcatatt

SEQ ID NO: 102218 - DNA, 80 bp, synthetic construct; identical to SEQ ID NO: 19564
  source 1..80: mol_type = other DNA

SEQ ID NO: 102219 - DNA, 80 bp, synthetic construct
  source 1..80: mol_type = other DNA
ctgctataggagtggattgatgagagaaatccataatgtagcaggttataaaatcaatggccacataacctggcaacata

SEQ ID NO: 102220 - DNA, 80 bp, synthetic construct
  source 1..80: mol_type = other DNA
taacagtttgaggctgcagtgagccgagatcgtaccactgcattgcagcctaggtgacagagtgagaccctgtctcaaaa

SEQ ID NO: 102221 - DNA, 80 bp, synthetic construct
  source 1..80: mol_type = other DNA
ttcctatatgtgtgttacatcagtaaatttttgaggatcatagatttgaagtgctgtttctgtttttctttgtggatttt

SEQ ID NO: 102222 - DNA, 80 bp, synthetic construct
  source 1..80: mol_type = other DNA
cctcagccttccaggtatctacgactacaggcacacactactatgcccagctaatttttgtatttttttttttttttttt

SEQ ID NO: 102223 - DNA, 80 bp, synthetic construct; identical to SEQ ID NO: 19565
  source 1..80: mol_type = other DNA

SEQ ID NO: 102224 - DNA, 80 bp, synthetic construct
  source 1..80: mol_type = other DNA
ttaaaaggaaacacccacagtctgtatgaatttgattctcgtgtggatagtatagacttaagcactgaacatggtctgag

SEQ ID NO: 102225 - DNA, 80 bp, synthetic construct
  source 1..80: mol_type = other DNA
gtggaataactgccagttaaactaatgttcctttgataatatttgggttattctagggttttaagttgaattagatcaag

SEQ ID NO: 102226 - DNA, 80 bp, synthetic construct; identical to SEQ ID NO: 19566
  source 1..80: mol_type = other DNA

SEQ ID NO: 102227 - DNA, 80 bp, synthetic construct
  source 1..80: mol_type = other DNA
cacaaatcattttataagactctctatactgctgagtctcaccttgttcagatgatctaaaactcatgacaataagtact

SEQ ID NO: 102228 - DNA, 80 bp, synthetic construct
  source 1..80: mol_type = other DNA
tgagcaaaaagttttgcaaaactgggaaagattttagcatcgttacacaaggttgaacctcatgcaacaccaggatttca

SEQ ID NO: 102229 - DNA, 80 bp, synthetic construct
  source 1..80: mol_type = other DNA
tcttatttaattatctcactgcttcaagcatagttttctggtattcatcatcgtggactctggatagaggcagtaagagg

SEQ ID NO: 102230 - DNA, 80 bp, synthetic construct; identical to SEQ ID NO: 19567
  source 1..80: mol_type = other DNA

SEQ ID NO: 102231 - DNA, 80 bp, synthetic construct
  source 1..80: mol_type = other DNA
tgtcggtataagataaatgctagatgatgtaagaaagattcacttcatatatagtttatgaaccatcttaaacagcagat

SEQ ID NO: 102232 - DNA, 80 bp, synthetic construct
  source 1..80: mol_type = other DNA
gtttcttctctctactttattcattttgactttcacagaattttgtttgtgcaaatgagaggcaaaagaaagaccactgt

SEQ ID NO: 102233 - DNA, 80 bp, synthetic construct
  source 1..80: mol_type = other DNA
gaataagtgattagatacttgaacagagttccgatagaacagaagagttgaaagaaaatatttaacagttttcttggcag

SEQ ID NO: 102234 - DNA, 80 bp, synthetic construct
  source 1..80: mol_type = other DNA
aacctccaccttctaggttcaagtgattctcctgcctcagcctcctgagtagctgggattacaggcacgcaccaccacac

SEQ ID NO: 102235 - DNA, 80 bp, synthetic construct; identical to SEQ ID NO: 19568
  source 1..80: mol_type = other DNA

SEQ ID NO: 102236 - DNA, 80 bp, synthetic construct
  source 1..80: mol_type = other DNA
cattgtagtcataggtgagctcctaatttcccattatgtttctcataagatgtagaaaatgaagcaacatgaaaacttag

SEQ ID NO: 102237 - DNA, 80 bp, synthetic construct
  source 1..80: mol_type = other DNA
gcagatattttaatccacctaacctgtcagcttcagccaaagggggctgtgcttacaaagtgcgtagccagtttttgttc

SEQ ID NO: 102238 - DNA, 80 bp, synthetic construct; identical to SEQ ID NO: 19569
  source 1..80: mol_type = other DNA

SEQ ID NO: 102239 - DNA, 80 bp, synthetic construct
  source 1..80: mol_type = other DNA
ggttatagagtatatactgcagagtgcccgctgccactgttagaagcctggctataaagtatatactgcagaaagtatat

SEQ ID NO: 102240 - DNA, 80 bp, synthetic construct
  source 1..80: mol_type = other DNA
tattttagttttgtgggtcagatgttttctattcagcttggacattgcagtgtgaaagtggccgtggaccatatgtaaac

SEQ ID NO: 102241 - DNA, 80 bp, synthetic construct
  source 1..80: mol_type = other DNA
gtccatggccatgatgtgcttagcccagctctaacatatggaaagtattatattgctaaagggaaagctagacaaataaa

SEQ ID NO: 102242 - DNA, 80 bp, synthetic construct
  source 1..80: mol_type = other DNA
tgaaagtatagggatggcatttgagtgggactccttgacagatggtacttaagttaatgaatgtttttgatgtttgaaag

SEQ ID NO: 102243 - DNA, 80 bp, synthetic construct; identical to SEQ ID NO: 19570
  source 1..80: mol_type = other DNA

SEQ ID NO: 102244 - DNA, 80 bp, synthetic construct
  source 1..80: mol_type = other DNA
ttcctggaagacccttgcgcgttcttcacctgaaggaagtctcttcattgtttaggtatctgtcaaatgttttttccttt

SEQ ID NO: 102245 - DNA, 80 bp, synthetic construct
  source 1..80: mol_type = other DNA
gctcctctctttcaagcaaaattaattcctcctttgactgcgtaacttgctgctaactcatgtgtccctttacatttact

SEQ ID NO: 102246 - DNA, 80 bp, synthetic construct; identical to SEQ ID NO: 19571
  source 1..80: mol_type = other DNA

SEQ ID NO: 102247 - DNA, 80 bp, synthetic construct
  source 1..80: mol_type = other DNA
gttactggagtacaggtggtatttggttacatgagtaagttctttagtggtgatttgtgagattttggggcacccatcac

SEQ ID NO: 102248 - DNA, 80 bp, synthetic construct
  source 1..80: mol_type = other DNA
actaagttacttcacttagaataatagtctccaatctggccaggcgtggtggctcacgcctgtaatcccagcactttggg

SEQ ID NO: 102249 - DNA, 80 bp, synthetic construct
  source 1..80: mol_type = other DNA
tgggaggcggacgttgcagtgagtcgagattgcgccactgcactcctgcctgggcgacaacagtgagactccatctcaaa

SEQ ID NO: 102250 - DNA, 80 bp, synthetic construct; identical to SEQ ID NO: 19572
  source 1..80: mol_type = other DNA

SEQ ID NO: 102251 - DNA, 80 bp, synthetic construct
  source 1..80: mol_type = other DNA
gcagctattgtaaaaggggtcgagttcttgatttgattctctgcttggttgctgttggtgtatagaagagctactgattt

SEQ ID NO: 102252 - DNA, 80 bp, synthetic construct
  source 1..80: mol_type = other DNA
ttcctcttgtctgattggtctggctaggacttccagtactatgttgaagaggagtggtgcaggtgggcatccctgtcttg

SEQ ID NO: 102253 - DNA, 80 bp, synthetic construct
  source 1..80: mol_type = other DNA
tttctgcatctattgagatgatcatgtgatttttgtttttaattctgtttatatggtatatcacatttattgacttgcat

SEQ ID NO: 102254 - DNA, 80 bp, synthetic construct
  source 1..80: mol_type = other DNA
tcctggttttggtattagggtgatactggcttcatagaatgaattagggagggttccttctttctctatcttgtagaata

SEQ ID NO: 102255 - DNA, 80 bp, synthetic construct
  source 1..80: mol_type = other DNA
ttaagctaggagggttgtatttttccaggaattcatctgtctcttctaggttttctagtttatgtgtgtaaagatgttca

SEQ ID NO: 102256 - DNA, 80 bp, synthetic construct
  source 1..80: mol_type = other DNA
ttttatcttttgtatttcttttctttcaatttcatttagttctgctctgatcttggttatttctttcttctgctgggttt

SEQ ID NO: 102257 - DNA, 80 bp, synthetic construct; identical to SEQ ID NO: 19573
  source 1..80: mol_type = other DNA

SEQ ID NO: 102258 - DNA, 80 bp, synthetic construct
  source 1..80: mol_type = other DNA
ccatgcgcttttaatagaatgcagttgttggatgaaatgctccgtatatatctgttaagtccatttcttccaatgtgtag

SEQ ID NO: 102259 - DNA, 80 bp, synthetic construct
  source 1..80: mol_type = other DNA
ttgggtgagtttcctgaaggcagcagatggctggtgagttcttatccattctgtggttctatatcttttgagtggagcat

SEQ ID NO: 102260 - DNA, 80 bp, synthetic construct
  source 1..80: mol_type = other DNA
tgttttgatgtgtttccaggatttgtttcaagattctgagctccttttagcagttcttgtagtggtggcttggtgatggt

SEQ ID NO: 102261 - DNA, 80 bp, synthetic construct
  source 1..80: mol_type = other DNA
aatctgataggttttcctttataggctacctggtgcttctgtctcacagctcttaagattatttccttcatcttaacttt

SEQ ID NO: 102262 - DNA, 80 bp, synthetic construct; identical to SEQ ID NO: 19574
  source 1..80: mol_type = other DNA

SEQ ID NO: 102263 - DNA, 80 bp, synthetic construct
  source 1..80: mol_type = other DNA
ttgttttttctttaagctatctaattccttgaatatttctcccttcacttcttgtatcattttttgtatttccttgcacg

SEQ ID NO: 102264 - DNA, 80 bp, synthetic construct
  source 1..80: mol_type = other DNA
aggtttggttttctggttccgtctcatttgggtaggctctgtcagagggagggtctagggctgaaggctgttgttcagat

SEQ ID NO: 102265 - DNA, 80 bp, synthetic construct
  source 1..80: mol_type = other DNA
cagagtcccatgatgtgaaccttctatgagtctctcagctgtggatacaagtgtctgtcctggtgcaggtggtgcgagtg

SEQ ID NO: 102266 - DNA, 80 bp, synthetic construct
  source 1..80: mol_type = other DNA
atgtcctttgtcttctgctaccagggtggataggggaggaccatcaggtaggggagggctaggcacgtttgagctcagac

SEQ ID NO: 102267 - DNA, 80 bp, synthetic construct; identical to SEQ ID NO: 19575
  source 1..80: mol_type = other DNA

SEQ ID NO: 102268 - DNA, 80 bp, synthetic construct
  source 1..80: mol_type = other DNA
gctagagatttccttctgcctgtggagttttaccccgtgctcctctcccattggatccctgtggtgccaggcaggtatgg

SEQ ID NO: 102269 - DNA, 80 bp, synthetic construct
  source 1..80: mol_type = other DNA
ggagggccgccctttcctacttccatggttggggcactcacagttttaggggggtctcccgggtcctgcaggagcagtcc

SEQ ID NO: 102270 - DNA, 80 bp, synthetic construct; identical to SEQ ID NO: 19576
  source 1..80: mol_type = other DNA

SEQ ID NO: 102271 - DNA, 80 bp, synthetic construct
  source 1..80: mol_type = other DNA
agaacagcagcatgggggtaaccatcaccatgattcaattacctcccactgggtccctcccatgacatgtgggaattatg

SEQ ID NO: 102272 - DNA, 80 bp, synthetic construct
  source 1..80: mol_type = other DNA
ggtacagaaggaaatgctaagattttttgtcagcataactttctgatactttggcataaaactattttagttgcacatgt

SEQ ID NO: 102273 - DNA, 80 bp, synthetic construct
  source 1..80: mol_type = other DNA
cctactcatggttatttacccaagagttatttgtccctgtttctacccagagtcttgtactcgtatgtttggggcagttt

SEQ ID NO: 102274 - DNA, 80 bp, synthetic construct; identical to SEQ ID NO: 19577
  source 1..80: mol_type = other DNA

SEQ ID NO: 102275 - DNA, 80 bp, synthetic construct
  source 1..80: mol_type = other DNA
attttgtgattgtggtgatgattagatgattgtagaaaagtgttaaaactcatcaagttgtatacttataagtggtaaat

SEQ ID NO: 102276 - DNA, 80 bp, synthetic construct
  source 1..80: mol_type = other DNA
acataaaaacagcactaccaccaacaacgaaaatacaaacctcagattgggagaagatattttcaacatgtaaatataag

SEQ ID NO: 102277 - DNA, 80 bp, synthetic construct
  source 1..80: mol_type = other DNA
tagttataaggaatgcacaaattaaagctgcattcaaattcttgtgcatgaaattggcaaaagcttttgagtttgacaat

SEQ ID NO: 102278 - DNA, 80 bp, synthetic construct; identical to SEQ ID NO: 19578
  source 1..80: mol_type = other DNA

SEQ ID NO: 102279 - DNA, 80 bp, synthetic construct
  source 1..80: mol_type = other DNA
tttcatagctaaacatacttttactgtacaatccagcaatcacagtccttggtatttacccaaatgagtaaaagcttatg

SEQ ID NO: 102280 - DNA, 80 bp, synthetic construct
  source 1..80: mol_type = other DNA
cgtgaaaagacatggaggaaccttaaatgcatgtcactaagtgaaagaagccaatctgaaaaaggctacataatacgaca

SEQ ID NO: 102281 - DNA, 80 bp, synthetic construct
  source 1..80: mol_type = other DNA
acccatcaaatatccaacacaaagggttaaccccagtgtaaactatagtctttgggggatagtgatacctgaatgtaggt

SEQ ID NO: 102282 - DNA, 80 bp, synthetic construct; identical to SEQ ID NO: 19579
  source 1..80: mol_type = other DNA

SEQ ID NO: 102283 - DNA, 80 bp, synthetic construct
  source 1..80: mol_type = other DNA
aaaataggtacaaaatattagaatatataaatgtgtgtacaggaaaatcctaagaaagtacacattaatgataaacatta

SEQ ID NO: 102284 - DNA, 80 bp, synthetic construct
  source 1..80: mol_type = other DNA
ttatgctggatttgcagccagaaaattttaaacataagcagcaaacactcaagaagttaatctgggaagtttttgatgct

SEQ ID NO: 102285 - DNA, 80 bp, synthetic construct
  source 1..80: mol_type = other DNA
gagaatgtttgcacgagataactgtactgcaactgtggatatgaccgggctgcactttgcatttattgtctggccagtac

SEQ ID NO: 102286 - DNA, 80 bp, synthetic construct; identical to SEQ ID NO: 19580
  source 1..80: mol_type = other DNA

SEQ ID NO: 102287 - DNA, 80 bp, synthetic construct
  source 1..80: mol_type = other DNA
tcaagcgattctcatgtctcagcctctcaagtagctgggactacaggcgcgtgccaccacacccggctaatttttgtatt

SEQ ID NO: 102288 - DNA, 80 bp, synthetic construct
  source 1..80: mol_type = other DNA
gtcatctttacttctgtctgactgatttaaatcaggggttcccatgatccccctcctcatgatagagcagctcacataac

SEQ ID NO: 102289 - DNA, 80 bp, synthetic construct
  source 1..80: mol_type = other DNA
tttagttcagcaacctagttttaattctgactcttatctttttgggtttttaaggaggctccattttgtaggcatggttg

SEQ ID NO: 102290 - DNA, 80 bp, synthetic construct
  source 1..80: mol_type = other DNA
gcctaccaagagtcacctctttcgaacaaaaaaggatatttttacctaggaaattttaagggattttaggagctctgtgt

SEQ ID NO: 102291 - DNA, 80 bp, synthetic construct; identical to SEQ ID NO: 19581
  source 1..80: mol_type = other DNA

SEQ ID NO: 102292 - DNA, 80 bp, synthetic construct
  source 1..80: mol_type = other DNA
aatggctttcaatacagtggctttaattcatgtacatcattgtagttgtttatttggtgtctattgagaaaatggaaaat

SEQ ID NO: 102293 - DNA, 80 bp, synthetic construct
  source 1..80: mol_type = other DNA
gtatatagataatgcttctggagtgtatggtggtttcattgattgtttcttataacccccaaccccctggcccacaggta

SEQ ID NO: 102294 - DNA, 80 bp, synthetic construct
  source 1..80: mol_type = other DNA
agtttttttaggggaggggaataagggagtgatataaataaaatgatgtttgagaaattgtacttataggccaggcatgg

SEQ ID NO: 102295 - DNA, 80 bp, synthetic construct; identical to SEQ ID NO: 19582
  source 1..80: mol_type = other DNA

SEQ ID NO: 102296 - DNA, 80 bp, synthetic construct
  source 1..80: mol_type = other DNA
atgcagtgaaaaatctgatctagattggtacaaaagggaaggggcccagaaaatttggagacaaagctgtggtagtcatt

SEQ ID NO: 102297 - DNA, 80 bp, synthetic construct
  source 1..80: mol_type = other DNA
actctatgtaggatttataggtaatatgaagttctggagtattttaaacgttgtaataagatcttttaatatttttaccg

SEQ ID NO: 102298 - DNA, 80 bp, synthetic construct
  source 1..80: mol_type = other DNA
tatttagagtgttgatgacgtgctaagcaatgtccaaagtcatggggacagagcagagatcgagacagagtgcaccatct

SEQ ID NO: 102299 - DNA, 80 bp, synthetic construct; identical to SEQ ID NO: 19583
  source 1..80: mol_type = other DNA

SEQ ID NO: 102300 - DNA, 80 bp, synthetic construct
  source 1..80: mol_type = other DNA
gaaagctgttggatgtggtgtattataggaattgaatgatgtttctaaataattttactccatgaagaggggattggaga

SEQ ID NO: 102301 - DNA, 80 bp, synthetic construct
  source 1..80: mol_type = other DNA
aggcagacttattaagagtcctgttttgattgtgtttgttaggttggtggtatctgagtgaagatgtcaagtaagcagct

SEQ ID NO: 102302 - DNA, 80 bp, synthetic construct; identical to SEQ ID NO: 19584
  source 1..80: mol_type = other DNA

SEQ ID NO: 102303 - DNA, 80 bp, synthetic construct
  source 1..80: mol_type = other DNA
tgaacacaaaaaataaaatcacaattttggaaatgacgtaacaaatgaatgtatctggaaaaaatcagggatgtaaaagg

SEQ ID NO: 102304 - DNA, 80 bp, synthetic construct
  source 1..80: mol_type = other DNA
gaccaagccttgagctgatccatgaatttatatatttataaggaaaggtgatctttatgctccactataacaaactgcag

SEQ ID NO: 102305 - DNA, 80 bp, synthetic construct
  source 1..80: mol_type = other DNA
tttgtaataccctacccacaggaaagaaaagtaaaggtgggtattagacttaaagacttcagtacacctttagaactcag

SEQ ID NO: 102306 - DNA, 80 bp, synthetic construct
  source 1..80: mol_type = other DNA
cagtttctaaaaagtactctgcaactcacattgagagtttcactgtaaaagagtattcctaatatattgggagcgttcac

SEQ ID NO: 102307 - DNA, 80 bp, synthetic construct; identical to SEQ ID NO: 19585
  source 1..80: mol_type = other DNA

SEQ ID NO: 102308 - DNA, 80 bp, synthetic construct
  source 1..80: mol_type = other DNA
catttgttccttcagaaacaagttacatcattctcttaaccaaccacgttattctttgtcatcgtcactcattcatcact

SEQ ID NO: 102309 - DNA, 80 bp, synthetic construct
  source 1..80: mol_type = other DNA
tgcatggactctagtaatccaaggatggcctgcaagactccattctttgatgttatatccaaaattatttatcagcatat

SEQ ID NO: 102310 - DNA, 80 bp, synthetic construct; identical to SEQ ID NO: 19586
  source 1..80: mol_type = other DNA

SEQ ID NO: 102311 - DNA, 80 bp, synthetic construct
  source 1..80: mol_type = other DNA
gaagctgggagtttgagaccaatctgggcaagatggcaagaccccgtttctacaaaaaattagaaaattagccgagtatg

SEQ ID NO: 102312 - DNA, 80 bp, synthetic construct
  source 1..80: mol_type = other DNA
ttttgtatcatatgcatgcctctgttaaattattcaacacatatctaaatgtgctcaatgttatttttcctgatcaaatt

SEQ ID NO: 102313 - DNA, 80 bp, synthetic construct
  source 1..80: mol_type = other DNA
ccttttcttttccctcttctttattctcatggtagaattaagagttatcattgaccagagtgttttcactctactgtggc

SEQ ID NO: 102314 - DNA, 80 bp, synthetic construct
  source 1..80: mol_type = other DNA
caactatcaaagctctgcaatagagaaaattctcaatactgtaaagataattttgatgtgctggacttctgggccagaag

SEQ ID NO: 102315 - DNA, 80 bp, synthetic construct; identical to SEQ ID NO: 19587
  source 1..80: mol_type = other DNA

SEQ ID NO: 102316 - DNA, 80 bp, synthetic construct
  source 1..80: mol_type = other DNA
attctcctttctcaagttgaagaatgtggttgagtcattcattcatgaatctcatgtgacattcctatccttaccatgga

SEQ ID NO: 102317 - DNA, 80 bp, synthetic construct
  source 1..80: mol_type = other DNA
attattgagagaatcaaataagatgatacacggaccaccaggaaacatctgagagggctcttccttattgttttggttga

SEQ ID NO: 102318 - DNA, 80 bp, synthetic construct; identical to SEQ ID NO: 19588
  source 1..80: mol_type = other DNA

SEQ ID NO: 102319 - DNA, 80 bp, synthetic construct
  source 1..80: mol_type = other DNA
cttgctgactttcatgagttgctgatgatctgcaagacaaaattagatcttcagtgctgagttaggcaaagcgcttcgct

SEQ ID NO: 102320 - DNA, 80 bp, synthetic construct
  source 1..80: mol_type = other DNA
ccataatgctgaggacagcataatatcaatgaagtctgttcagctttctgccagtcagaccaatgtggaaccaaatatgt

SEQ ID NO: 102321 - DNA, 80 bp, synthetic construct
  source 1..80: mol_type = other DNA
cacatggctttaagtatatgctgactttgcagtgcccagtcaagtgccaggtaatctttaaatactgataaattgaatcc

SEQ ID NO: 102322 - DNA, 80 bp, synthetic construct
  source 1..80: mol_type = other DNA
atctctctttatgctcatccaagatcatccctgattgaatacataccattcaaatctgtaaaactcaagattgcaagtat

SEQ ID NO: 102323 - DNA, 80 bp, synthetic construct; identical to SEQ ID NO: 19589
  source 1..80: mol_type = other DNA

SEQ ID NO: 102324 - DNA, 80 bp, synthetic construct
  source 1..80: mol_type = other DNA
actttagatctgtagtctatccagagttaaagtgcttgccttttcttttccctcctctttattcgcatggtagaattaag

SEQ ID NO: 102325 - DNA, 80 bp, synthetic construct
  source 1..80: mol_type = other DNA
ttttcttttccctcctctttattcgcatggtagaattaagagttatcattgaccagagtgttttcactctactgtggctc

SEQ ID NO: 102326 - DNA, 80 bp, synthetic construct
  source 1..80: mol_type = other DNA
gctaatattgttatcaaattatttgacactgttctctttgaacaacgaactctggcccatactacttgaattcagacata

SEQ ID NO: 102327 - DNA, 80 bp, synthetic construct; identical to SEQ ID NO: 19590
  source 1..80: mol_type = other DNA

SEQ ID NO: 102328 - DNA, 80 bp, synthetic construct
  source 1..80: mol_type = other DNA
ccttgatatatttacaatgtccattcttataaccagttcctagaataggttagttgtattggtaaactggtgtccctgaa

SEQ ID NO: 102329 - DNA, 80 bp, synthetic construct
  source 1..80: mol_type = other DNA
tagaatctaaatttatcagacagacatggaagccagaataccttcagctaaaatcccagctctatcatttatgtatttgt

SEQ ID NO: 102330 - DNA, 80 bp, synthetic construct
  source 1..80: mol_type = other DNA
gtcatattgcccttcagaatagtttacaatcttctgagctgtgtttctacgcatccatttgcccattcttacatctgcac

SEQ ID NO: 102331 - DNA, 80 bp, synthetic construct; identical to SEQ ID NO: 19591
  source 1..80: mol_type = other DNA

SEQ ID NO: 102332 - DNA, 80 bp, synthetic construct
  source 1..80: mol_type = other DNA
gactggagtgcagtggtgcaatgtcagctcactgcaacctctgcctctcgggttcaagtgattctcctgcctcagcctcc

SEQ ID NO: 102333 - DNA, 80 bp, synthetic construct
  source 1..80: mol_type = other DNA
gccactgcgcccagctggttatcctttaaaatttaatattttaaaatagttatgtttatactacctgaaaaccttgtgaa

SEQ ID NO: 102334 - DNA, 80 bp, synthetic construct
  source 1..80: mol_type = other DNA
taattatcttattgcttgagaatacagattcatgaggccaaatccaagaaatacattttatccaactggatagtcctagt

SEQ ID NO: 102335 - DNA, 80 bp, synthetic construct
  source 1..80: mol_type = other DNA
agcagttaatgggcccagctttgcaataggatgatttctgagtgtgatatgattcttttataagcagtaggtacaagttg

SEQ ID NO: 102336 - DNA, 80 bp, synthetic construct; identical to SEQ ID NO: 19592
  source 1..80: mol_type = other DNA

SEQ ID NO: 102337 - DNA, 80 bp, synthetic construct
  source 1..80: mol_type = other DNA
tatatgagctgtcacttgggccgtctgtttcaaaggctacttattgatgttgttatgcgtcctcaagctattatgccatc

SEQ ID NO: 102338 - DNA, 80 bp, synthetic construct
  source 1..80: mol_type = other DNA
ttcaacaataaagcaaaaactacagactgtctaaggaaaactccgttttattatttggtttgttacttaccaaaacatac

SEQ ID NO: 102339 - DNA, 80 bp, synthetic construct; identical to SEQ ID NO: 19593
  source 1..80: mol_type = other DNA

SEQ ID NO: 102340 - DNA, 80 bp, synthetic construct
  source 1..80: mol_type = other DNA
aattggaaatagcagcagactgcagaagaaattgagctatagtcatgcagcggatgactctgagcaataaaaatgaatgg

SEQ ID NO: 102341 - DNA, 80 bp, synthetic construct
  source 1..80: mol_type = other DNA
ctctgtcacccaggctggagtgcagtggcacaatcactgcttactgcagcctggacctcccaggctcaagcgatcctccc

SEQ ID NO: 102342 - DNA, 80 bp, synthetic construct
  source 1..80: mol_type = other DNA
ttacaggcatgagccactgtgcccagccaacaaatttaaataacatactgtgtaggtctacataaatttgtggtaaaatt

SEQ ID NO: 102343 - DNA, 80 bp, synthetic construct; identical to SEQ ID NO: 19594
  source 1..80: mol_type = other DNA

SEQ ID NO: 102344 - DNA, 80 bp, synthetic construct
  source 1..80: mol_type = other DNA
ggaaatgattgacaaactgagaagagaaagaaaatacttactaggactagattattaaataatcatataggtagctgata

SEQ ID NO: 102345 - DNA, 80 bp, synthetic construct
  source 1..80: mol_type = other DNA
ggattggtcaatgacttagcaatcaatgacagatagtaatctggcactattttaaaatactcgtgtatgcagtctatgga

SEQ ID NO: 102346 - DNA, 80 bp, synthetic construct
  source 1..80: mol_type = other DNA
aattatttgaccttttgtgtgataaacatctttctcctgatatcagctttgacttttttcgtgtgggttttagttttcat

SEQ ID NO: 102347 - DNA, 80 bp, synthetic construct; identical to SEQ ID NO: 19595
  source 1..80: mol_type = other DNA

SEQ ID NO: 102348 - DNA, 80 bp, synthetic construct
  source 1..80: mol_type = other DNA
cctcgatgagtcatatttagcttattttctccattatatgtcctctgtcacaagatcccatttcgtgggctgtatttgag

SEQ ID NO: 102349 - DNA, 80 bp, synthetic construct
  source 1..80: mol_type = other DNA
ttacatcatgaggaagaatctaaactttagagagtgtaggtgatttactccagatcacatagctgctgagtagcagaacc

SEQ ID NO: 102350 - DNA, 80 bp, synthetic construct
  source 1..80: mol_type = other DNA
ttcacagatgttcttaaactgaaaaggaacaaggaatgctagtctagatttttatagtatgagatagtcacattattgta

SEQ ID NO: 102351 - DNA, 80 bp, synthetic construct; identical to SEQ ID NO: 19596
  source 1..80: mol_type = other DNA

SEQ ID NO: 102352 - DNA, 80 bp, synthetic construct
  source 1..80: mol_type = other DNA
gctgtacttaatatttttttaaagtatacaataacaacattgtgcaataaagtttgcataatattatcagaggcattcga

SEQ ID NO: 102353 - DNA, 80 bp, synthetic construct
  source 1..80: mol_type = other DNA
ctcataaagtcaggcattcctaccctctagatgtttattatggttaagggaaaaaattaataatgtttaaacagacccag

SEQ ID NO: 102354 - DNA, 80 bp, synthetic construct; identical to SEQ ID NO: 19597
  source 1..80: mol_type = other DNA

SEQ ID NO: 102355 - DNA, 80 bp, synthetic construct
  source 1..80: mol_type = other DNA
gcggtgagtgttacagttcttaaaggtggtgtgtccagagtttgttctttctgatgctcagatgtgttcggagtttcttc

SEQ ID NO: 102356 - DNA, 80 bp, synthetic construct
  source 1..80: mol_type = other DNA
cctgagcaggttgcctctgctggcttgggcagcctgcttttattcccttatctggccccacccacatcctgctgattggt

SEQ ID NO: 102357 - DNA, 80 bp, synthetic construct
  source 1..80: mol_type = other DNA
aaccttgagctagacacagggtgctgattggtgtgtttacaaaccttgagctagacacagagtgctgattggtgtattta

SEQ ID NO: 102358 - DNA, 80 bp, synthetic construct
  source 1..80: mol_type = other DNA
caatcccttagctagacataaaggttctccaagtccccactagattagctagacacagagcactgattggtgcatttaca

SEQ ID NO: 102359 - DNA, 80 bp, synthetic construct; identical to SEQ ID NO: 19598
  source 1..80: mol_type = other DNA

SEQ ID NO: 102360 - DNA, 80 bp, synthetic construct
  source 1..80: mol_type = other DNA
gcaggctgcaggtcccgtgccctgccctgcggggaggcagctgaggcccggcgagaatttgagcacagcaccggtgggct

SEQ ID NO: 102361 - DNA, 80 bp, synthetic construct
  source 1..80: mol_type = other DNA
cacacctctccctccacacctccctgcaagcagagggagccagctccagcctcggccagcacagagaagggctcccacag

SEQ ID NO: 102362 - DNA, 80 bp, synthetic construct
  source 1..80: mol_type = other DNA
gactactgtaggtattatactaatggtatctactgcttttgtagattcaaagcaattcagtgggttgtgggaatataatg

SEQ ID NO: 102363 - DNA, 80 bp, synthetic construct; identical to SEQ ID NO: 19599
  source 1..80: mol_type = other DNA

SEQ ID NO: 102364 - DNA, 80 bp, synthetic construct
  source 1..80: mol_type = other DNA
cttctaaattgattgagtcctgtctcagatactttttggtttacaataatgtaatatctctttatatattatttttatcc

SEQ ID NO: 102365 - DNA, 80 bp, synthetic construct
  source 1..80: mol_type = other DNA
ccttgatttgagcatatcgtgacaaaatatcaatttagtaggtatctatcctatataaacttcccgatgaagttactaga

SEQ ID NO: 102366 - DNA, 80 bp, synthetic construct
  source 1..80: mol_type = other DNA
ggctttaagagtttctgcagagatacacaagttgaaaattatactggttatgtaaacacaaatggggaaaatctaaacat

SEQ ID NO: 102367 - DNA, 80 bp, synthetic construct; identical to SEQ ID NO: 19600
  source 1..80: mol_type = other DNA

SEQ ID NO: 102368 - DNA, 80 bp, synthetic construct
  source 1..80: mol_type = other DNA
atccttccacttcagcctcctgagtagctgggactataggtgtgtgccaccacaaccagctaatttttttttttaagtag

SEQ ID NO: 102369 - DNA, 80 bp, synthetic construct
  source 1..80: mol_type = other DNA
gaagataaaaagtcatagtcatttgggaaaacacttactcttatcatagaagtggctgaaataatactgagaaaccatat

SEQ ID NO: 102370 - DNA, 80 bp, synthetic construct
  source 1..80: mol_type = other DNA
agctactttttatgaggctctgaaggaaacatagagacaatagattgtcaggagtgagcaaattctttggtaaaagcaag

SEQ ID NO: 102371 - DNA, 80 bp, synthetic construct; identical to SEQ ID NO: 19601
  source 1..80: mol_type = other DNA

SEQ ID NO: 102372 - DNA, 80 bp, synthetic construct
  source 1..80: mol_type = other DNA
agggcgaagatgacatttttaacaatgaaaaactacctgctttctggtaaccttaccttggagagaatattttgaaatga

SEQ ID NO: 102373 - DNA, 80 bp, synthetic construct
  source 1..80: mol_type = other DNA
gaaagtgaaatgtcatgtggttagtttgtaagaacttagtgaccatagggaaaattggaatttactattgctacctgaat

SEQ ID NO: 102374 - DNA, 80 bp, synthetic construct
  source 1..80: mol_type = other DNA
tgactcacaaagttttaatacaagatatttaatataagatatgaagcatattcagttgcatagcattcataactcaagca

SEQ ID NO: 102375 - DNA, 80 bp, synthetic construct; identical to SEQ ID NO: 19602
  source 1..80: mol_type = other DNA

SEQ ID NO: 102376 - DNA, 80 bp, synthetic construct
  source 1..80: mol_type = other DNA
aggaatgtagaaagcctttagaagctgaaaacagtgaggaaacagattctccctggcgagcttccagaaagaatcaatct

SEQ ID NO: 102377 - DNA, 80 bp, synthetic construct
  source 1..80: mol_type = other DNA
gaccattatctctactttagtttctaacttaatgaaaatgcttttgctaggggttactgaaagtaaccttagatgtttta

SEQ ID NO: 102378 - DNA, 80 bp, synthetic construct; identical to SEQ ID NO: 19603
  source 1..80: mol_type = other DNA

SEQ ID NO: 102379 - DNA, 80 bp, synthetic construct
  source 1..80: mol_type = other DNA
ccagctaattttttgtatttttattagagacagggtttcaccatgttagccaggatggtctcaatctcctgacctcatga

SEQ ID NO: 102380 - DNA, 80 bp, synthetic construct
  source 1..80: mol_type = other DNA
taaaggtttaaaataacatgggttaaaaagtggtactagccttccaggtgctcaggttgctaatctgaatttgtatatgc

SEQ ID NO: 102381 - DNA, 80 bp, synthetic construct
  source 1..80: mol_type = other DNA
atgagaatgttcttttgaggagagatgaaggctttcctgaagtccgtgatatattatattgcttgctcctcacttgtctt

SEQ ID NO: 102382 - DNA, 80 bp, synthetic construct
  source 1..80: mol_type = other DNA
gcaggcaccagacatttaccagattcattcttgaaccactattgccataaattgtggcacaatgaaattaacataaactg

SEQ ID NO: 102383 - DNA, 80 bp, synthetic construct; identical to SEQ ID NO: 19604
  source 1..80: mol_type = other DNA

SEQ ID NO: 102384 - DNA, 80 bp, synthetic construct
  source 1..80: mol_type = other DNA
tgggtgtatatttcctacaaggctgcactctgaaataatgcagataaattctgtgcaagatagttttaacattttaatgt

SEQ ID NO: 102385 - DNA, 80 bp, synthetic construct
  source 1..80: mol_type = other DNA
gtatttcttagggcttatttacaaatattttttggtggtccatttgcaatgagatgataagtgttgtcctttcacaaaaa

SEQ ID NO: 102386 - DNA, 80 bp, synthetic construct
  source 1..80: mol_type = other DNA
gcagtttgagtcatcaagaagtgtttcatggatgagtccatatctgagcttggagctgagggatggtagaaattggacaa

SEQ ID NO: 102387 - DNA, 80 bp, synthetic construct; identical to SEQ ID NO: 19605
  source 1..80: mol_type = other DNA

SEQ ID NO: 102388 - DNA, 80 bp, synthetic construct
  source 1..80: mol_type = other DNA
agagtttttgcttgatttccagtatcagatatgggtattacagcttcttctttaggacattgatgctttaattaaaaata

SEQ ID NO: 102389 - DNA, 80 bp, synthetic construct
  source 1..80: mol_type = other DNA
tctactaaaattgtttccttaaatatctctggtgatatcttagtttcagatccaaaggctctgacttcctcaccctattt

SEQ ID NO: 102390 - DNA, 80 bp, synthetic construct
  source 1..80: mol_type = other DNA
tttaaaactatggatcaatctccagttcctcctttaccctcagtgtccagttagttttcaaatccatttttcccttccct

SEQ ID NO: 102391 - DNA, 80 bp, synthetic construct; identical to SEQ ID NO: 19606
  source 1..80: mol_type = other DNA

SEQ ID NO: 102392 - DNA, 80 bp, synthetic construct
  source 1..80: mol_type = other DNA
aaccctacctccccacctccacaaaaggctgatgattgtgcttcaaagtaaatggaagtggaccgaggagtatttattta

SEQ ID NO: 102393 - DNA, 80 bp, synthetic construct
  source 1..80: mol_type = other DNA
ttaatggtaagatctgttcaaaggcacgtcaacatggtcaaaattagttatatagttcttctgagttttagccaaggact

SEQ ID NO: 102394 - DNA, 80 bp, synthetic construct
  source 1..80: mol_type = other DNA
aggatagctgatttttatgtattgatctatatgttgcatccctgctacactcatttattagggccagtagttttttggtg

SEQ ID NO: 102395 - DNA, 80 bp, synthetic construct
  source 1..80: mol_type = other DNA
ctaaaaatcttttttgtgtgactggatgtagctgtttcacctcttacggttaatgttttcatcatgtgcattttttgtgt

SEQ ID NO: 102396 - DNA, 80 bp, synthetic construct; identical to SEQ ID NO: 19607
  source 1..80: mol_type = other DNA

SEQ ID NO: 102397 - DNA, 80 bp, synthetic construct
  source 1..80: mol_type = other DNA
gaaaacctgctccaacatagcttcatttcctttcccttccttcatactctttttttgtgacatatacacccatacatcat

SEQ ID NO: 102398 - DNA, 80 bp, synthetic construct
  source 1..80: mol_type = other DNA
aattgaaggaagctccttcagaactttcttttgtatttaactgtgctaggaacaaattctcagtctttgtttatctgcaa

SEQ ID NO: 102399 - DNA, 80 bp, synthetic construct
  source 1..80: mol_type = other DNA
catctcactgccttctgtcttctcttttgtcagatgaaaagtcagccattaatcatatatccatttgatgggatgtgtat

SEQ ID NO: 102400 - DNA, 80 bp, synthetic construct; identical to SEQ ID NO: 19608
  source 1..80: mol_type = other DNA

SEQ ID NO: 102401 - DNA, 80 bp, synthetic construct
  source 1..80: mol_type = other DNA
tcttcttcaatctgcaattgaacctctttagtatatttattattttagttattgtattcaaatacagattttccatttga

SEQ ID NO: 102402 - DNA, 80 bp, synthetic construct
  source 1..80: mol_type = other DNA
cagagagtttctcaagactatgttttccccacagaatgggttacactttcctgggcttttactgtctgtgtcataatttt

SEQ ID NO: 102403 - DNA, 80 bp, synthetic construct
  source 1..80: mol_type = other DNA
tttttattttttctttgtttagtaaattgtctgagctgagtctgtgacatgtctctccttgatgggtggccaataacgtc

SEQ ID NO: 102404 - DNA, 80 bp, synthetic construct; identical to SEQ ID NO: 19609
  source 1..80: mol_type = other DNA

SEQ ID NO: 102405 - DNA, 80 bp, synthetic construct
  source 1..80: mol_type = other DNA
ccctttgacaaggtggcacagctactggtcttcacagctagcccatgtcatgacatggtagaacctccacattagtcgag

SEQ ID NO: 102406 - DNA, 80 bp, synthetic construct
  source 1..80: mol_type = other DNA
ggctttttaaggagaagatttgccaaccttctcacttggtcatggggggaggtgcatataatttatttaaaaaatgcagc

SEQ ID NO: 102407 - DNA, 80 bp, synthetic construct
  source 1..80: mol_type = other DNA
ttaagtgagatggactttttggttactgtattttttgtgttccattagcttcaactataggtttatcatctgtaaagatt

SEQ ID NO: 102408 - DNA, 80 bp, synthetic construct; identical to SEQ ID NO: 19610
  source 1..80: mol_type = other DNA

SEQ ID NO: 102409 - DNA, 80 bp, synthetic construct
  source 1..80: mol_type = other DNA
atggcccttaagccaaagtcgtggagtatggggtattcatgactccattctctctgtgtgtgtgtgtgatttttttagag

SEQ ID NO: 102410 - DNA, 80 bp, synthetic construct
  source 1..80: mol_type = other DNA
cagtctggtatgagttttaggctaagcagataggtcttttaatagtttctggcttagggcatgtcactcagttttctgat

SEQ ID NO: 102411 - DNA, 80 bp, synthetic construct; identical to SEQ ID NO: 19611
  source 1..80: mol_type = other DNA

SEQ ID NO: 102412 - DNA, 80 bp, synthetic construct
  source 1..80: mol_type = other DNA
ctagaatttatgtgttttaaacacaacttaggaaagtgggccaaggatgttggtagaggatcactaggttcgatgtcatt

SEQ ID NO: 102413 - DNA, 80 bp, synthetic construct
  source 1..80: mol_type = other DNA
gctgaggagcttagggctgctgattagttagggcagtggggatgaagtcataaattgtattcttatgttgaataagttct

SEQ ID NO: 102414 - DNA, 80 bp, synthetic construct
  source 1..80: mol_type = other DNA
aacaggggctatgtgatttttaagcagtaagtacctataaggaagtggactatagggcaggctggttaatgcttagctat

SEQ ID NO: 102415 - DNA, 80 bp, synthetic construct
  source 1..80: mol_type = other DNA
tgaaattaatccagctcattttcagagaatgagacacctgcaaacagtgagatggttggtatttgtatggttatgcctga

SEQ ID NO: 102416 - DNA, 80 bp, synthetic construct; identical to SEQ ID NO: 19612
  source 1..80: mol_type = other DNA

SEQ ID NO: 102417 - DNA, 80 bp, synthetic construct
  source 1..80: mol_type = other DNA
tctatcaagtgtgttcaatctgtggtctactgagatcctgcagacggcaaagctgagatattactgcaaataacaagtat

SEQ ID NO: 102418 - DNA, 80 bp, synthetic construct
  source 1..80: mol_type = other DNA
taaaaaaaaaaaccttttttgaggaaagagtgaaaatgtgctccaaagtaattcgtggctagaggaactgcaacagtgtt

SEQ ID NO: 102419 - DNA, 80 bp, synthetic construct
  source 1..80: mol_type = other DNA
tctgacatacttgttcgggatacttgttttccagagagttggtatgtggagcttttattgagattgtgattttttttatc

SEQ ID NO: 102420 - DNA, 80 bp, synthetic construct; identical to SEQ ID NO: 19613
  source 1..80: mol_type = other DNA

SEQ ID NO: 102421 - DNA, 80 bp, synthetic construct
  source 1..80: mol_type = other DNA
tgttgtattatgaaagatgcatgtcaaggagcaaaatgaacaccgagcaaaccatatgggatgctacgaattcactaggg

SEQ ID NO: 102422 - DNA, 80 bp, synthetic construct
  source 1..80: mol_type = other DNA
caaaggatttaagaccggggaaaacccagagacatcagcttcatttgttaggatcacatttagccttgtctttcaaaaag

SEQ ID NO: 102423 - DNA, 80 bp, synthetic construct
  source 1..80: mol_type = other DNA
ctatgaacagaggtgtgaagctctggaaataatatttccaaactaggaacatggtgtaatgttatgattggggttttgaa

SEQ ID NO: 102424 - DNA, 80 bp, synthetic construct; identical to SEQ ID NO: 19614
  source 1..80: mol_type = other DNA

SEQ ID NO: 102425 - DNA, 80 bp, synthetic construct
  source 1..80: mol_type = other DNA
gctctgttttaaagtatactgttttcacatctcttggtggaagaacagcttttctcttaatttatatctctctgattctg

SEQ ID NO: 102426 - DNA, 80 bp, synthetic construct
  source 1..80: mol_type = other DNA
ctgaggtatcttggctagttacccatgagatctgaattccatgttcctggtacggggatttactgctgtcaaactgtcaa

SEQ ID NO: 102427 - DNA, 80 bp, synthetic construct
  source 1..80: mol_type = other DNA
tggaaacctagtgttaacaaaacagcccaaccaaaagcagatttgtcattagggctctaactgcctgtatccctatagtg

SEQ ID NO: 102428 - DNA, 80 bp, synthetic construct; identical to SEQ ID NO: 19615
  source 1..80: mol_type = other DNA

SEQ ID NO: 102429 - DNA, 80 bp, synthetic construct
  source 1..80: mol_type = other DNA
aatgtttctactgctatgaatacatagcatatgtatacatgtaaatgcatagaaaaaggactgcaaataggccaggcgtg

SEQ ID NO: 102430 - DNA, 80 bp, synthetic construct
  source 1..80: mol_type = other DNA
aggctgaggcaggagaatggcgtgaacgtgggtggaggagcttgcagtgagccgagattgtaccactgcattccagcctg

SEQ ID NO: 102431 - DNA, 80 bp, synthetic construct
  source 1..80: mol_type = other DNA
ctacaaggagatgtttttatgtgtgattttatgtgtgatttaaaaatatgaaatagtgtgcataggtggggaccttcacg

SEQ ID NO: 102432 - DNA, 80 bp, synthetic construct; identical to SEQ ID NO: 19616
  source 1..80: mol_type = other DNA

SEQ ID NO: 102433 - DNA, 80 bp, synthetic construct
  source 1..80: mol_type = other DNA
agccatgctgctggcttaaagtctgttacctttcccaaagtatatatattctgataaaatcggtgttgtctccatatgaa

SEQ ID NO: 102434 - DNA, 80 bp, synthetic construct
  source 1..80: mol_type = other DNA
aactgcagtttttggttttgtgttccgatgtgatctgagtatttcgaagcacttataatgcagagcgtactatatgaaag

SEQ ID NO: 102435 - DNA, 80 bp, synthetic construct
  source 1..80: mol_type = other DNA
tccccatgtttgtaaaatgttttaccttatcttccattcctggcattaggagtcattttggttcggggccatttattgaa

SEQ ID NO: 102436 - DNA, 80 bp, synthetic construct; identical to SEQ ID NO: 19617
  source 1..80: mol_type = other DNA

SEQ ID NO: 102437 - DNA, 80 bp, synthetic construct
  source 1..80: mol_type = other DNA
ggtaaacactatttttttttttaactgtctcagcttttctattacatttgtgtgtgtagggggagctgggtacaaagaga

SEQ ID NO: 102438 - DNA, 80 bp, synthetic construct
  source 1..80: mol_type = other DNA
caggattaattcatttgaaacccatgtggttttcaaggatctttaaaataacatgagatattacagcaatccttacttta

SEQ ID NO: 102439 - DNA, 80 bp, synthetic construct; identical to SEQ ID NO: 19618
  source 1..80: mol_type = other DNA

SEQ ID NO: 102440 - DNA, 80 bp, synthetic construct
  source 1..80: mol_type = other DNA
gcttaggtggtctgtgtatagaatccatgctcttaactattaggatatgctgattctaaagcaattaataaatgttggtc

SEQ ID NO: 102441 - DNA, 80 bp, synthetic construct
  source 1..80: mol_type = other DNA
tcaaggcattttttttcaagtcagttcaccagcacaccatttgataacatagcgccctttcagcagtgccaaagtataag

SEQ ID NO: 102442 - DNA, 80 bp, synthetic construct
  source 1..80: mol_type = other DNA
agagagtccttttcctagcctttgaacttttatatgaggattttagaaagaaagcccttgtctggccaactgcagacttt

SEQ ID NO: 102443 - DNA, 80 bp, synthetic construct; identical to SEQ ID NO: 19619
  source 1..80: mol_type = other DNA

SEQ ID NO: 102444 - DNA, 80 bp, synthetic construct
  source 1..80: mol_type = other DNA
aaacagtgtaaattgtaatgtggatgcattgcatcagcttatcaaatttatcctcccagtgttctttttatgaagaaagc

SEQ ID NO: 102445 - DNA, 80 bp, synthetic construct
  source 1..80: mol_type = other DNA
cctggttggactgcatactggatcctgcttgtctaagcgaaagcatacatgattaataacttacggttctaactcaccaa

SEQ ID NO: 102446 - DNA, 80 bp, synthetic construct
  source 1..80: mol_type = other DNA
tttatttttattttttgagaacagggtcttgctctgtcactcaggttttcatacagtggtgtgaccatggcttactgcag

SEQ ID NO: 102447 - DNA, 80 bp, synthetic construct
  source 1..80: mol_type = other DNA
cgaggtcaagagatcgagatcatcctggctaacatggtgaaacccccatctgtattaaaaatacaaaaattagctgggct

SEQ ID NO: 102448 - DNA, 80 bp, synthetic construct; identical to SEQ ID NO: 19620
  source 1..80: mol_type = other DNA

SEQ ID NO: 102449 - DNA, 80 bp, synthetic construct
  source 1..80: mol_type = other DNA
gagaaaaaaagaaaacagatggaggatgaaaaaataaagcaatacagatatacacagaacaggaccaagttagaggcaaa

SEQ ID NO: 102450 - DNA, 80 bp, synthetic construct
  source 1..80: mol_type = other DNA
gcaaactgaatggtaagttagaaatgaatgtatgagagtcagagaaatctggattttaatccttagcgtgaaaattttat

SEQ ID NO: 102451 - DNA, 80 bp, synthetic construct; identical to SEQ ID NO: 19621
  source 1..80: mol_type = other DNA

SEQ ID NO: 102452 - DNA, 80 bp, synthetic construct
  source 1..80: mol_type = other DNA
cgtctggctactttttgtatttttagtagagatggggtttcactatgttggccaggctgaactcaaactcctgacctcag

SEQ ID NO: 102453 - DNA, 80 bp, synthetic construct
  source 1..80: mol_type = other DNA
gatgactggggaacttgcagtagaaagttgacaaatactgtttctatgaaagaaactggagcctcctaaggtaagctggg

SEQ ID NO: 102454 - DNA, 80 bp, synthetic construct
  source 1..80: mol_type = other DNA
caggagatgctggctaacaccgtggagaaatcagaaggggcaagtacccaatttatgtagacttgtagtattttaatgag

SEQ ID NO: 102455 - DNA, 80 bp, synthetic construct; identical to SEQ ID NO: 19622
  source 1..80: mol_type = other DNA

SEQ ID NO: 102456 - DNA, 80 bp, synthetic construct
  source 1..80: mol_type = other DNA
gtaaccaaattttggtgatatggctttaggctattgtaattttgcaaacagctaatccttctcctctgaaaattgaaatt

SEQ ID NO: 102457 - DNA, 80 bp, synthetic construct
  source 1..80: mol_type = other DNA
cctggctattttttttttttttttctatttttagtagagacggggtttcaccatgttggccaggatggtcttgacctcct

SEQ ID NO: 102458 - DNA, 80 bp, synthetic construct
  source 1..80: mol_type = other DNA
atttggttattttattttcaatgagacttcctgtgactgatatctgggctgttacccagtcttaaccaatttattaaagt

SEQ ID NO: 102459 - DNA, 80 bp, synthetic construct
  source 1..80: mol_type = other DNA
aaaactgaaaattttattttgccattattgatctatatgttgctgttgttattaatcattactctggtctggataaataa

SEQ ID NO: 102460 - DNA, 80 bp, synthetic construct; identical to SEQ ID NO: 19623
  source 1..80: mol_type = other DNA

SEQ ID NO: 102461 - DNA, 80 bp, synthetic construct
  source 1..80: mol_type = other DNA
taacccctcctgatttttaaacatccctgagtcatatcaactttgatatgcaaatcagcttttataaagaaagatcattt

SEQ ID NO: 102462 - DNA, 80 bp, synthetic construct
  source 1..80: mol_type = other DNA
gaggttgggctgggcaaattctaaagtttcttgaaatataggaagtaatttgaaatactgttttaggatttatggttttt

SEQ ID NO: 102463 - DNA, 80 bp, synthetic construct
  source 1..80: mol_type = other DNA
tctggatctcctcaagtatttttatttagctgaatttagttttgaattgttcactctctagaatgtctccatcacagata

SEQ ID NO: 102464 - DNA, 80 bp, synthetic construct; identical to SEQ ID NO: 19624
  source 1..80: mol_type = other DNA

SEQ ID NO: 102465 - DNA, 80 bp, synthetic construct
  source 1..80: mol_type = other DNA
cggcagcaactgtttaccaagaaggatagatattttccacttaaccattttattcataaggatgtgcaccagctagatat

SEQ ID NO: 102466 - DNA, 80 bp, synthetic construct
  source 1..80: mol_type = other DNA
catgtctgatgatatgtgactcatggatgctgctggcacttgtaggaaccaagtcttctgaactccaaatatcatctttt

SEQ ID NO: 102467 - DNA, 80 bp, synthetic construct; identical to SEQ ID NO: 19625
  source 1..80: mol_type = other DNA

SEQ ID NO: 102468 - DNA, 80 bp, synthetic construct
  source 1..80: mol_type = other DNA
ttccatttagaaccatgcctttgttttttgtggttaaggaccattttgctagtattcttgggtcatgaataaatacatgg

SEQ ID NO: 102469 - DNA, 80 bp, synthetic construct
  source 1..80: mol_type = other DNA
cctaatgtatgaagttttggttccctaaaaagttgcttattgtgactattagtaaaataactcatatttttgtggcacca

SEQ ID NO: 102470 - DNA, 80 bp, synthetic construct
  source 1..80: mol_type = other DNA
actatcatttagcttttattcttattaaaatcatgtcaatagtaaataggccaagacctgtctatctcagtagctgccca

SEQ ID NO: 102471 - DNA, 80 bp, synthetic construct; identical to SEQ ID NO: 19626
  source 1..80: mol_type = other DNA

SEQ ID NO: 102472 - DNA, 80 bp, synthetic construct
  source 1..80: mol_type = other DNA
attcttttttgtatacttttaaactccctgggttggactgctattaattcctgactgccttttctctgggcttgatggct

SEQ ID NO: 102473 - DNA, 80 bp, synthetic construct
  source 1..80: mol_type = other DNA
gtagtttgccgatttaatgatgccgcagcagtgttagaatagagagttgatgatagcatttgcttgtttccatgtgtttt

SEQ ID NO: 102474 - DNA, 80 bp, synthetic construct
  source 1..80: mol_type = other DNA
taatttaaggatttcatctcctatgagcacagatatcaagtgagaggtgacgtagtatagtagaaagggctttggttttg

SEQ ID NO: 102475 - DNA, 80 bp, synthetic construct; identical to SEQ ID NO: 19627
  source 1..80: mol_type = other DNA

SEQ ID NO: 102476 - DNA, 80 bp, synthetic construct
  source 1..80: mol_type = other DNA
tatgatttggatcattcattcatttgctatataatcctcatgatcgtgggtattggtagtttaccgctatgtaagttatg

SEQ ID NO: 102477 - DNA, 80 bp, synthetic construct
  source 1..80: mol_type = other DNA
gaaatttaagtgtttttttgtcatcaatgagtttacaactgcagggatagaaaaacaattatagtataatttcatgtatg

SEQ ID NO: 102478 - DNA, 80 bp, synthetic construct
  source 1..80: mol_type = other DNA
ccaaggaacaatttgagctcattaggcaattccttaaaattttaatagaaaataatacttgtcaggaagacaatccaaaa

SEQ ID NO: 102479 - DNA, 80 bp, synthetic construct; identical to SEQ ID NO: 19628
  source 1..80: mol_type = other DNA

SEQ ID NO: 102480 - DNA, 80 bp, synthetic construct
  source 1..80: mol_type = other DNA
aaaattagctgggtgtggtggcgcacacctgtaatcccagctactcgggaggctgaagcaagagaatcgcttgaacccag

SEQ ID NO: 102481 - DNA, 80 bp, synthetic construct
  source 1..80: mol_type = other DNA
cattctttttataaaacccctatctctttaagacatgtactctaagaacattcaaaaatgcatggggctgggcacggtgg

SEQ ID NO: 102482 - DNA, 80 bp, synthetic construct
  source 1..80: mol_type = other DNA
tgggaggctgaggcacgagaatcacttgaacccgggaggcggattttgcagtgagcccagatcgtgccactgcactccag

SEQ ID NO: 102483 - DNA, 80 bp, synthetic construct
  source 1..80: mol_type = other DNA
gctccaatttcacacaagtaattgcatctaagatcattttatataaatgcaagagcaaaagatgaagaagatctgtgtat

SEQ ID NO: 102484 - DNA, 80 bp, synthetic construct; identical to SEQ ID NO: 19629
  source 1..80: mol_type = other DNA

SEQ ID NO: 102485 - DNA, 80 bp, synthetic construct
  source 1..80: mol_type = other DNA
acacccacaataataaaaccttcaattacctgaagcccctagctatagttgctctatggccgcctttacaagttaccgct

SEQ ID NO: 102486 - DNA, 80 bp, synthetic construct
  source 1..80: mol_type = other DNA
ttcttggcttgtgacccatcctccaccctcaaagccagcagtgacctaccatgtcacatcgtcacaggtgccagggatta

SEQ ID NO: 102487 - DNA, 80 bp, synthetic construct
  source 1..80: mol_type = other DNA
ttgcaaaccgatcaataggaatttcagtctgtcttatgtacataccaatttatagattcacatacattttgtatttaacg

SEQ ID NO: 102488 - DNA, 80 bp, synthetic construct; identical to SEQ ID NO: 19630
  source 1..80: mol_type = other DNA

SEQ ID NO: 102489 - DNA, 80 bp, synthetic construct
  source 1..80: mol_type = other DNA
gtaaagccttttttgttcaagctttagggcagatagatcaaggatcaaaatgaaaagagttaatgttgtgtccacgctag

SEQ ID NO: 102490 - DNA, 80 bp, synthetic construct
  source 1..80: mol_type = other DNA
aatgaggtttaacacttgatgttcatccattttcaaatatgctctgtatgagtctccattaagtctctgtataagtcttc

SEQ ID NO: 102491 - DNA, 80 bp, synthetic construct
  source 1..80: mol_type = other DNA
ataccacactcatcatgttttatttgtgtttcaggaagatgcctgcttggaatatgataagaactcaacaaattgagcat

SEQ ID NO: 102492 - DNA, 80 bp, synthetic construct; identical to SEQ ID NO: 19631
  source 1..80: mol_type = other DNA

SEQ ID NO: 102493 - DNA, 80 bp, synthetic construct
  source 1..80: mol_type = other DNA
gatttagttgatccaagctctaggtgagatttctgtagttctctttgccctgttctgtgtttgcttggttcacaggctag

SEQ ID NO: 102494 - DNA, 80 bp, synthetic construct
  source 1..80: mol_type = other DNA
caggaattccctggcagaatttccctcatacccattgtcacacacccatagctaatttatttactcgcaagagaaaatgg

SEQ ID NO: 102495 - DNA, 80 bp, synthetic construct
  source 1..80: mol_type = other DNA
catctgtatgctttcactggaaatgtttatatttgggaccctccatgttcttgagccaaactaggaccaacaagtaaaat

SEQ ID NO: 102496 - DNA, 80 bp, synthetic construct; identical to SEQ ID NO: 19632
  source 1..80: mol_type = other DNA

SEQ ID NO: 102497 - DNA, 80 bp, synthetic construct
  source 1..80: mol_type = other DNA
tattgtagacaatacgatgctactagctatttatatctgaaacttctattctcaaatatctagtctaacttaaccttatt

SEQ ID NO: 102498 - DNA, 80 bp, synthetic construct
  source 1..80: mol_type = other DNA
tacctacctgtcatctgcaaaattgatgcagtgatgtaatggtgaatgtgattataatctcttgaagggttcatagctaa

SEQ ID NO: 102499 - DNA, 80 bp, synthetic construct; identical to SEQ ID NO: 19633
  source 1..80: mol_type = other DNA

SEQ ID NO: 102500 - DNA, 80 bp, synthetic construct
  source 1..80: mol_type = other DNA
ttctgattcaatcttaataaactattctgcaatttatgagtgacttaaagatatgtggaacctattgagtcagccattct

SEQ ID NO: 102501 - DNA, 80 bp, synthetic construct
  source 1..80: mol_type = other DNA
gcatttttttggtgtgttttcttcaaagcactgaacaccttctgaagactatgtattcgcggtctgtttattgccttcct

SEQ ID NO: 102502 - DNA, 80 bp, synthetic construct
  source 1..80: mol_type = other DNA
gactggagggactgcaagatggaatttatagaccaaaatcaaggggctgaaaagtaccaaaaattctgtttctgctactg

SEQ ID NO: 102503 - DNA, 80 bp, synthetic construct; identical to SEQ ID NO: 19634
  source 1..80: mol_type = other DNA

SEQ ID NO: 102504 - DNA, 80 bp, synthetic construct
  source 1..80: mol_type = other DNA
tgatttgaagacttaaaagaagtcttcctttttgttgagttaaataacttccttttttttttttgagttaattcttgctc

SEQ ID NO: 102505 - DNA, 80 bp, synthetic construct
  source 1..80: mol_type = other DNA
ggttcttggtatattgcccaggctgtccttgaactcctgaccttaagtgatcctcccaccttaacctcccaaaatgttgg

SEQ ID NO: 102506 - DNA, 80 bp, synthetic construct
  source 1..80: mol_type = other DNA
agatggaacattctgagagtgagcatgaggtcagtactcgtagtacaaactgattactttcatgtggcttctgagatcag

SEQ ID NO: 102507 - DNA, 80 bp, synthetic construct
  source 1..80: mol_type = other DNA
tattgccgcgcactgatttccatagccctggaaaatgtgagccatatgtgagacaagaagaacatattgaaagccttgca

SEQ ID NO: 102508 - DNA, 80 bp, synthetic construct; identical to SEQ ID NO: 19635
  source 1..80: mol_type = other DNA

SEQ ID NO: 102509 - DNA, 80 bp, synthetic construct
  source 1..80: mol_type = other DNA
gattggacaatgcaaagataaagctaaatgaaagttaaataacacgagagatcacagaagaaacagcagctaaaccagca

SEQ ID NO: 102510 - DNA, 80 bp, synthetic construct
  source 1..80: mol_type = other DNA
aggcctcttccagaataggacataaatggagcgtgtgcattgtagtgtataaacactcaataagtgattttttttttcag

SEQ ID NO: 102511 - DNA, 80 bp, synthetic construct; identical to SEQ ID NO: 19636
  source 1..80: mol_type = other DNA

SEQ ID NO: 102512 - DNA, 80 bp, synthetic construct
  source 1..80: mol_type = other DNA
ccaagtagctgggattgcaggcacccaccaccacgcctggctaatttttgtgtatttttagtacagatggggtttctcca

SEQ ID NO: 102513 - DNA, 80 bp, synthetic construct
  source 1..80: mol_type = other DNA
ctcgggaaactattcaagcattggttaggaagaaatatgtgcagctgggtgaatccagctaatgatcggattattctcat

SEQ ID NO: 102514 - DNA, 80 bp, synthetic construct
  source 1..80: mol_type = other DNA
tatttctggctccaattagttctttatactattcgttctctatccaaactgaactcactccctgaatatgctacacttaa

SEQ ID NO: 102515 - DNA, 80 bp, synthetic construct; identical to SEQ ID NO: 19637
  source 1..80: mol_type = other DNA

SEQ ID NO: 102516 - DNA, 80 bp, synthetic construct
  source 1..80: mol_type = other DNA
tggcaccatcttggttcactgcaaccaacctctgcctcccggattcaagcagttctcctgcctcagcctcctgagtagct

SEQ ID NO: 102517 - DNA, 80 bp, synthetic construct
  source 1..80: mol_type = other DNA
cagcctgtagtaagttttgaagttacataatgtctgtctctgactttgttcttctccaatgttgtgattattgtgggtct

SEQ ID NO: 102518 - DNA, 80 bp, synthetic construct
  source 1..80: mol_type = other DNA
aagactttattatatgaaatttattattcataatagatctaagcccaggaggtcaaggctgaagtgagtgctactatatt

SEQ ID NO: 102519 - DNA, 80 bp, synthetic construct
  source 1..80: mol_type = other DNA
gtaatcaacttgatttttttctattaattttagctaagcaaaagttccatcattattcatgactgatgatttctttcctt

SEQ ID NO: 102520 - DNA, 80 bp, synthetic construct; identical to SEQ ID NO: 19638
  source 1..80: mol_type = other DNA

SEQ ID NO: 102521 - DNA, 80 bp, synthetic construct
  source 1..80: mol_type = other DNA
tttgagttagtgcatatccaggctgggtgcggtggctcatacctataatcccagtactttgggaggctgaggtgggcaga

SEQ ID NO: 102522 - DNA, 80 bp, synthetic construct
  source 1..80: mol_type = other DNA
agctaaagtgagtgctactactgccactatactccggcctgggcaaagtgagagggtctacctcaaaaaaaaaaaaaaaa

SEQ ID NO: 102523 - DNA, 80 bp, synthetic construct
  source 1..80: mol_type = other DNA
atttctaaaccctttccttgtattgagttgtatgtgtgttagtgtatgagattgctgagtttattgtactgagtcggctt

SEQ ID NO: 102524 - DNA, 80 bp, synthetic construct; identical to SEQ ID NO: 19639
  source 1..80: mol_type = other DNA

SEQ ID NO: 102525 - DNA, 80 bp, synthetic construct
  source 1..80: mol_type = other DNA
gtttgaggtcctgtgagtctgtgattctattatttgtaaacatgtatgaaaatggaaaagaggttgggcatggtggctca

SEQ ID NO: 102526 - DNA, 80 bp, synthetic construct
  source 1..80: mol_type = other DNA
actgagctatgattgtaccaccctgggcaccaaagtgagaccccgtctcaaaaacaaacaaacagaaaaaacagagaggg

SEQ ID NO: 102527 - DNA, 80 bp, synthetic construct; identical to SEQ ID NO: 19640
  source 1..80: mol_type = other DNA

SEQ ID NO: 102528 - DNA, 80 bp, synthetic construct
  source 1..80: mol_type = other DNA
cctagaaatagtattagtctattagtagactaatactccagctgtgggaaaaacaaaaaacaagcaaaacacccaaacct

SEQ ID NO: 102529 - DNA, 80 bp, synthetic construct
  source 1..80: mol_type = other DNA
cctaaatcccagcagtaagagaagtgcactgaggtaggtctaacattttttataccacttttccctttggggcatttgct

SEQ ID NO: 102530 - DNA, 80 bp, synthetic construct
  source 1..80: mol_type = other DNA
ttacactctgaagaggctttccccttgaggtatttctctgttggtggtgacgtttttattattattattacgagacaggg

SEQ ID NO: 102531 - DNA, 80 bp, synthetic construct
  source 1..80: mol_type = other DNA
agctcagaagcttagcagaaagcagatcaaaagctcagcagtatagtaagatgtgactatcgattctatgaaacaatact

SEQ ID NO: 102532 - DNA, 80 bp, synthetic construct; identical to SEQ ID NO: 19641
  source 1..80: mol_type = other DNA

SEQ ID NO: 102533 - DNA, 80 bp, synthetic construct
  source 1..80: mol_type = other DNA
aggcatgtaaggagtcaggatcaagagaaaaaagatctgacagtagaaatagacccataagtgatccagatattggaatt

SEQ ID NO: 102534 - DNA, 80 bp, synthetic construct
  source 1..80: mol_type = other DNA
gggacatagttgaagaaaggattcatgaactgaaaaatagattagttgaaaatatccagactggcctatgtggagaaaag

SEQ ID NO: 102535 - DNA, 80 bp, synthetic construct
  source 1..80: mol_type = other DNA
ccacactgggttaccatagtaaaaatgctgaaaactagaaaaataaaaaatcttaaaagtaactggaggagggaacaaaa

SEQ ID NO: 102536 - DNA, 80 bp, synthetic construct; identical to SEQ ID NO: 19642
  source 1..80: mol_type = other DNA

SEQ ID NO: 102537 - DNA, 80 bp, synthetic construct
  source 1..80: mol_type = other DNA
taaaatgcataacgataataactcaaaaggtggaagagtataaaattgtcaaccatgttcaaagatcctttttctggaac

SEQ ID NO: 102538 - DNA, 80 bp, synthetic construct
  source 1..80: mol_type = other DNA
aacctctagggtactaaccaaaagaataagaaagaataaccaacaactttccagagggaaaaatgcaatatcaagatatt

SEQ ID NO: 102539 - DNA, 80 bp, synthetic construct
  source 1..80: mol_type = other DNA
atatttccataaagctatataaagagaacatgagaccaatataatacaaataatatgaaaatatgataaatataactaat

SEQ ID NO: 102540 - DNA, 80 bp, synthetic construct; identical to SEQ ID NO: 19643
  source 1..80: mol_type = other DNA

SEQ ID NO: 102541 - DNA, 80 bp, synthetic construct
  source 1..80: mol_type = other DNA
gggaggctgaggcaggagaatagcttcaatccaggaggcagaggttgcagtgagctgagatcgcaccactgtactccagc

SEQ ID NO: 102542 - DNA, 80 bp, synthetic construct
  source 1..80: mol_type = other DNA
taaaaaaagtcagtttataagaaaaataaaataattctgaatttacatgaatctaatgatatagctttcaagcttataaa

SEQ ID NO: 102543 - DNA, 80 bp, synthetic construct
  source 1..80: mol_type = other DNA
gcaccatatgctgagaaagtacacatttgtttcaagtgcagatggagcatttaccaaaattgattatggaggaagtataa

SEQ ID NO: 102544 - DNA, 80 bp, synthetic construct; identical to SEQ ID NO: 19644
  source 1..80: mol_type = other DNA

SEQ ID NO: 102545 - DNA, 80 bp, synthetic construct
  source 1..80: mol_type = other DNA
gaaatataaatcattcaagccaatagctggatttttgaaatgactaattgatgagcccttggaaagactgaatacgaaaa

SEQ ID NO: 102546 - DNA, 80 bp, synthetic construct
  source 1..80: mol_type = other DNA
aaccctaacactagaagtgggaaatatcaactgtcttatatttattaaatgaaatgaatttataattaaagccttctcac

SEQ ID NO: 102547 - DNA, 80 bp, synthetic construct
  source 1..80: mol_type = other DNA
ggaaatccatcccattgacatatcaactcaatagcctattacaaccaagttgggattcaaaaccaattattgtcacttac

SEQ ID NO: 102548 - DNA, 80 bp, synthetic construct; identical to SEQ ID NO: 19645
  source 1..80: mol_type = other DNA

SEQ ID NO: 102549 - DNA, 80 bp, synthetic construct
  source 1..80: mol_type = other DNA
aaatataccatgttcatatattgggaggctcaatattacaaagatgacagttctcttccaattgatcaggtagatcaatg

SEQ ID NO: 102550 - DNA, 80 bp, synthetic construct
  source 1..80: mol_type = other DNA
caataagaccgttgggtattaggacaaagacagaaaaatagagcaggatagagttcataagtagatctgtacatttgtgt

SEQ ID NO: 102551 - DNA, 80 bp, synthetic construct
  source 1..80: mol_type = other DNA
ttcatgggaaaggcaaaataatgaactttctagaaaatttagtagctttagtagcttcgtgtcattttattttgttgttg

SEQ ID NO: 102552 - DNA, 80 bp, synthetic construct; identical to SEQ ID NO: 19646
  source 1..80: mol_type = other DNA

SEQ ID NO: 102553 - DNA, 80 bp, synthetic construct
  source 1..80: mol_type = other DNA
gcttgaacccaggaggcggaggttacagtgagccgagatttcaccactgcattccagcctgggtgacagagtgagactcc

SEQ ID NO: 102554 - DNA, 80 bp, synthetic construct
  source 1..80: mol_type = other DNA
tcttttaagggaaattttgtttttattttgaaattttgaaatgaaattgctctttttattagtgttaatatgatagatat

SEQ ID NO: 102555 - DNA, 80 bp, synthetic construct
  source 1..80: mol_type = other DNA
agtttactgtgaattttatatttccttgtcttgattagctccatttgaatcattctccttttcaccgtttgcaggaattt

SEQ ID NO: 102556 - DNA, 80 bp, synthetic construct; identical to SEQ ID NO: 19647
  source 1..80: mol_type = other DNA

SEQ ID NO: 102557 - DNA, 80 bp, synthetic construct
  source 1..80: mol_type = other DNA
gcagaagtgaacctgataatggcaaaatacaatgtctttgataatcgttgatagcactaaaaatatgcactaaatatgca

SEQ ID NO: 102558 - DNA, 80 bp, synthetic construct
  source 1..80: mol_type = other DNA
ttttgcttctgtttgccccaggatctaaaggaatggattcatcactccgataagttaatgtttaaaaggagatcttcagc

SEQ ID NO: 102559 - DNA, 80 bp, synthetic construct
  source 1..80: mol_type = other DNA
aggcaaaatgctctgttacaagtaacctattggatttcattagggcttcataaaattctgcctgtttatttaggctcata

SEQ ID NO: 102560 - DNA, 80 bp, synthetic construct; identical to SEQ ID NO: 19648
  source 1..80: mol_type = other DNA

SEQ ID NO: 102561 - DNA, 80 bp, synthetic construct
  source 1..80: mol_type = other DNA
tattctgatttatttgcaaggaatcctagggcgttgtagagacagtctttgttgacatatggcttttttgtttgttctgt

SEQ ID NO: 102562 - DNA, 80 bp, synthetic construct
  source 1..80: mol_type = other DNA
gaaatgctagaaagattagagtaagagaaattttactttaagtgtcatgagagaaactgtagttagacactatgtctcta

SEQ ID NO: 102563 - DNA, 80 bp, synthetic construct
  source 1..80: mol_type = other DNA
attatcattattttatgtacctggtgcatttccagcctaatgtctttttgagttctgattgctaaattaactgaattctt

SEQ ID NO: 102564 - DNA, 80 bp, synthetic construct
  source 1..80: mol_type = other DNA
tttggctttttctttccacagcaagttgatgtggaaaaatgggtatgtgtttccatgtatttgcaaagaaattgtgatct

SEQ ID NO: 102565 - DNA, 80 bp, synthetic construct; identical to SEQ ID NO: 19649
  source 1..80: mol_type = other DNA

SEQ ID NO: 102566 - DNA, 80 bp, synthetic construct
  source 1..80: mol_type = other DNA
tcaaaattccactgcttagtccttatatttctgcatgtactgtagaagaagacaattatatatatagtcatagaaagtca

SEQ ID NO: 102567 - DNA, 80 bp, synthetic construct
  source 1..80: mol_type = other DNA
aaggtgaatgaccatgtagaaaaacgcagttacaggattctggaggctaattcttagagcccacattgtcacaagttgtg

SEQ ID NO: 102568 - DNA, 80 bp, synthetic construct; identical to SEQ ID NO: 19650
  source 1..80: mol_type = other DNA

SEQ ID NO: 102569 - DNA, 80 bp, synthetic construct
  source 1..80: mol_type = other DNA
tgagaattttgccatcttttcagtgccctttcagtagtgttttccaacaatttcatgttctcttgtctttttttttaaat

SEQ ID NO: 102570 - DNA, 80 bp, synthetic construct
  source 1..80: mol_type = other DNA
ttgaaatttcctaccttcctctttggctatagttaaaatgctgatccaagattcacatttttcttgtcttggtaagggaa

SEQ ID NO: 102571 - DNA, 80 bp, synthetic construct
  source 1..80: mol_type = other DNA
tatttctgtgccatatctggattggtattgaccaaccactcaagctgcttttacttactttgtaaatagcacttgccagt

SEQ ID NO: 102572 - DNA, 80 bp, synthetic construct; identical to SEQ ID NO: 19651
  source 1..80: mol_type = other DNA

SEQ ID NO: 102573 - DNA, 80 bp, synthetic construct
  source 1..80: mol_type = other DNA
tgctgggttttagaacacggatgatcactatgtgtaaatgttgcagcaaattttagattggagctctttttttctttgaa

SEQ ID NO: 102574 - DNA, 80 bp, synthetic construct
  source 1..80: mol_type = other DNA
tttgaaattctactgttacaggtagactttgaaggccaacagaaagtaatttaaccctctacccacctaacccaggacta

SEQ ID NO: 102575 - DNA, 80 bp, synthetic construct
  source 1..80: mol_type = other DNA
tgaacttgaagctaattcaagttaacttgtcaggaatcgagctggagggacggatatctgggaagctgtttcttgcttgc

SEQ ID NO: 102576 - DNA, 80 bp, synthetic construct; identical to SEQ ID NO: 19652
  source 1..80: mol_type = other DNA

SEQ ID NO: 102577 - DNA, 80 bp, synthetic construct
  source 1..80: mol_type = other DNA
gcctctcaatctccaggcatagtaagacaccagtctacagtgtcccagctcccagggatatcaggtatccctgaagctac

SEQ ID NO: 102578 - DNA, 80 bp, synthetic construct
  source 1..80: mol_type = other DNA
ctttgacatccctgcttaggtggcataacaatatgttttgggacgtgatagtacaggtgctcctccagttagggtgaggt

SEQ ID NO: 102579 - DNA, 80 bp, synthetic construct
  source 1..80: mol_type = other DNA
ctattttatactaaagtgttgaatatctcatgtaatttattgaatactatactgaaagtaaaaaatacaatgattgtatg

SEQ ID NO: 102580 - DNA, 80 bp, synthetic construct
  source 1..80: mol_type = other DNA
ctgttatacttgcttgtctagggtgcgtttaccaccaccagattaagacctttgggagccttacaaacttaaatatatat

SEQ ID NO: 102581 - DNA, 80 bp, synthetic construct; identical to SEQ ID NO: 19653
  source 1..80: mol_type = other DNA

SEQ ID NO: 102582 - DNA, 80 bp, synthetic construct
  source 1..80: mol_type = other DNA
atcaggtcatgagtggggtgaagaaagcaaaaggatgaaatagactgtgagattgttgtctatgaagcattgtctataga

SEQ ID NO: 102583 - DNA, 80 bp, synthetic construct
  source 1..80: mol_type = other DNA
acacacgactgctattatgtgagaacctgcgaaatgctttcaagctatcaaggttcattcatgtttgaaatggtttttaa

SEQ ID NO: 102584 - DNA, 80 bp, synthetic construct; identical to SEQ ID NO: 19654
  source 1..80: mol_type = other DNA

SEQ ID NO: 102585 - DNA, 80 bp, synthetic construct
  source 1..80: mol_type = other DNA
tactcgaaagagaagacattccatttaactactgtctgtacagagctgtttataggttgaaaaagaacttgctacaaatc

SEQ ID NO: 102586 - DNA, 80 bp, synthetic construct
  source 1..80: mol_type = other DNA
atgatttctgtacctgtaatcaatatgtctgtcttttcagagcatcttggacatttttagcaggggaatcctggaaagtg

SEQ ID NO: 102587 - DNA, 80 bp, synthetic construct
  source 1..80: mol_type = other DNA
agagacagtgtctcactatggtgcccaagctagtcttgcactcctgggctcaagcagatactcctgccctggcctcccaa

SEQ ID NO: 102588 - DNA, 80 bp, synthetic construct
  source 1..80: mol_type = other DNA
ctatcattaattaactatagctacctagaaatcctagtctttggtggtgaaatcactttgttttctcaacataatgaagt

SEQ ID NO: 102589 - DNA, 80 bp, synthetic construct; identical to SEQ ID NO: 19655
  source 1..80: mol_type = other DNA

SEQ ID NO: 102590 - DNA, 80 bp, synthetic construct
  source 1..80: mol_type = other DNA
tgaaaggcatcattataatagaggagctttgctacattacctgaattattgtttccttctttgcaccaagaacagattaa

SEQ ID NO: 102591 - DNA, 80 bp, synthetic construct
  source 1..80: mol_type = other DNA
tgattctgcttctttttgtcatccatttgacacccagggccgtctatgtgttaaaatgtagcaatagcaatttctcttcc

SEQ ID NO: 102592 - DNA, 80 bp, synthetic construct; identical to SEQ ID NO: 19656
  source 1..80: mol_type = other DNA

SEQ ID NO: 102593 - DNA, 80 bp, synthetic construct
  source 1..80: mol_type = other DNA
attctccacacccaaagaggctgctttcttcaatatttatctttatgtgtttcttttttctactttccatcatatcaatt

SEQ ID NO: 102594 - DNA, 80 bp, synthetic construct
  source 1..80: mol_type = other DNA
cttttcccttaaacgatccctttgaatgtctcctgatgctataattttggtaatatctagcacttaaaccaatttgaaca

SEQ ID NO: 102595 - DNA, 80 bp, synthetic construct
  source 1..80: mol_type = other DNA
attctattttgtcgtgtatgcagattgctctcctctgtgtattattcttcctacagtcagacatgacttagcaatgccga

SEQ ID NO: 102596 - DNA, 80 bp, synthetic construct; identical to SEQ ID NO: 19657
  source 1..80: mol_type = other DNA

SEQ ID NO: 102597 - DNA, 80 bp, synthetic construct
  source 1..80: mol_type = other DNA
tctttacaatttttccttgaaattgtaatattgaaaatgaaaaaattagtctcaacagaatttccctttaataatataca

SEQ ID NO: 102598 - DNA, 80 bp, synthetic construct
  source 1..80: mol_type = other DNA
ggaaatatatcattgttttctttttcatactctttcatctgtgtaactctcctaggaataagtagtcaaagaaactttag

SEQ ID NO: 102599 - DNA, 80 bp, synthetic construct
  source 1..80: mol_type = other DNA
tcacctttcacaatattcagtgtctaagaaattgcttactgttattttgcatgaaacgagagccgctcattgcagcatat

SEQ ID NO: 102600 - DNA, 80 bp, synthetic construct
  source 1..80: mol_type = other DNA
gcttaaataggttgtcaatggaatcactgaaagtagagcagcatgttttcacagaaaaaggaagaaactaacgtcaaaac

SEQ ID NO: 102601 - DNA, 80 bp, synthetic construct; identical to SEQ ID NO: 19658
  source 1..80: mol_type = other DNA

SEQ ID NO: 102602 - DNA, 80 bp, synthetic construct
  source 1..80: mol_type = other DNA
gttatacacatttgttttacttttgaatccatgtaacttttcttcacatgcttttaaaaggtttttaaaaatcaagcttt

SEQ ID NO: 102603 - DNA, 80 bp, synthetic construct
  source 1..80: mol_type = other DNA
tggggattatgttgactttgcatttatgcccttttgcatgaatacaatgggaaattcttccactgggaaattaggggagg

SEQ ID NO: 102604 - DNA, 80 bp, synthetic construct; identical to SEQ ID NO: 19659
  source 1..80: mol_type = other DNA

SEQ ID NO: 102605 - DNA, 80 bp, synthetic construct
  source 1..80: mol_type = other DNA
gaaagagactgtgagaaatattaaatcaaaattccagatatagatggaaaagattgctttgaagaaaaggaagcgcgttc

SEQ ID NO: 102606 - DNA, 80 bp, synthetic construct
  source 1..80: mol_type = other DNA
accaggacgtggaacatcttccagaatttcaaataactctagctcttatttttcagtagaaaatattatgatcacatttt

SEQ ID NO: 102607 - DNA, 80 bp, synthetic construct
  source 1..80: mol_type = other DNA
ctgcatttgctgtattcattttatcatctcattcttaattcaactgtacaatattgtatggacttccccttgggaagggt

SEQ ID NO: 102608 - DNA, 80 bp, synthetic construct
  source 1..80: mol_type = other DNA
ataatttaattaggcccccagttcttttaacttcgaggccagaaggccaatagttattttcacacttgcaatggatgatc

SEQ ID NO: 102609 - DNA, 80 bp, synthetic construct; identical to SEQ ID NO: 19660
  source 1..80: mol_type = other DNA

SEQ ID NO: 102610 - DNA, 80 bp, synthetic construct
  source 1..80: mol_type = other DNA
aggccaggattctcatggattgttacagtccttcggtgaccctgttgtgtgattcactacttattttattttttaagaga

SEQ ID NO: 102611 - DNA, 80 bp, synthetic construct
  source 1..80: mol_type = other DNA
agcatgaggcactttgccttgctctgggccaactgtatttaaaaaacacagagccaaaaaacaaaaaaagcaaaccagaa

SEQ ID NO: 102612 - DNA, 80 bp, synthetic construct; identical to SEQ ID NO: 19661
  source 1..80: mol_type = other DNA

SEQ ID NO: 102613 - DNA, 80 bp, synthetic construct
  source 1..80: mol_type = other DNA
ggccacaataaatcaaatgcattatagaaaaaaaagtgctctctaaagacagcctcattctctgaaggagtatagttttt

SEQ ID NO: 102614 - DNA, 80 bp, synthetic construct
  source 1..80: mol_type = other DNA
cccgggttcaagccattcttctgtctcagcctcctgaaagtagctgggattacaggcgcccgccaccatgcccagctaat

SEQ ID NO: 102615 - DNA, 80 bp, synthetic construct
  source 1..80: mol_type = other DNA
gtctggccccccaaaaaaagtggtttttcagcagtttttcttattttaataccttttaatatctgtttttagaatagttc

SEQ ID NO: 102616 - DNA, 80 bp, synthetic construct
  source 1..80: mol_type = other DNA
atttttaaagacctccttttcctgcaaaaagaattacaaacttctcgtcataatattttgtaccttccatggtctttccc

SEQ ID NO: 102617 - DNA, 80 bp, synthetic construct; identical to SEQ ID NO: 19662
  source 1..80: mol_type = other DNA

SEQ ID NO: 102618 - DNA, 80 bp, synthetic construct
  source 1..80: mol_type = other DNA
ttgaggaaactggatgaggcttcatagagaaggtagtctttaatcagagttttaaaaagtagagggagaaaaaaatctga

SEQ ID NO: 102619 - DNA, 80 bp, synthetic construct
  source 1..80: mol_type = other DNA
caattacactaatagaaaaaaactactggaggctttcctattaaaaaggctttataaggcagggaagactagagagaggg

SEQ ID NO: 102620 - DNA, 80 bp, synthetic construct; identical to SEQ ID NO: 19663
  source 1..80: mol_type = other DNA

SEQ ID NO: 102621 - DNA, 80 bp, synthetic construct
  source 1..80: mol_type = other DNA
ttccctataagcaattgggaggaatgagaagtttttaagcctggaggcattatgatcaattttgtgttctaggaatactc

SEQ ID NO: 102622 - DNA, 80 bp, synthetic construct
  source 1..80: mol_type = other DNA
ctcccgagtagctgggattacaggcaggcatcaccacgcccagctaatctttgtagttttactagagatggggttttgcc

SEQ ID NO: 102623 - DNA, 80 bp, synthetic construct
  source 1..80: mol_type = other DNA
aatggtgactaaggtaccatggttcccacccagtggaaaccataatataatgggaaagagattattattaagtacattat

SEQ ID NO: 102624 - DNA, 80 bp, synthetic construct; identical to SEQ ID NO: 19664
  source 1..80: mol_type = other DNA

SEQ ID NO: 102625 - DNA, 80 bp, synthetic construct
  source 1..80: mol_type = other DNA
atttcatctccctgtggtcatgctgatccatttgggggtacatggtctgcaaatgctggtagcatcatttctgcaatggt

SEQ ID NO: 102626 - DNA, 80 bp, synthetic construct
  source 1..80: mol_type = other DNA
taccatcttcagtatcttacttttgatagagtagttttaggaggagagaggtgtaagagtcaaataagagatattttctt

SEQ ID NO: 102627 - DNA, 80 bp, synthetic construct
  source 1..80: mol_type = other DNA
tttcacccagttattcactaggcttctcttgggcacagttttcttattctttgcctcatgtatatatgcacatatatatg

SEQ ID NO: 102628 - DNA, 80 bp, synthetic construct; identical to SEQ ID NO: 19665
  source 1..80: mol_type = other DNA

SEQ ID NO: 102629 - DNA, 80 bp, synthetic construct
  source 1..80: mol_type = other DNA
caggaatggtagagggggaagaacatcttagtaagtgggcccgtgcagttgaaacctgtgttgttcaagggtcaactgta

SEQ ID NO: 102630 - DNA, 80 bp, synthetic construct
  source 1..80: mol_type = other DNA
ctgagtagctgggactacaggtgcccgccaccacacccagctaattttttgtatttttaatagagacagggtttcaccgt
